United States Patent Application Publication US 2008/0066201 A1 - sequence listing, part 3

SEQ ID NO: 13974 - DNA, 423 bp, Glycine max
  Clone ID: LIB3094-061-Q1-K1-B4
cccacgcgtccgcccacgcgtccgctcgctttatcttcccttcccttcatctccgcttcaaaataatatcctcctctctatctctgttcgaaacaagtccaacaccagcaacacactgcttcaatctcaatcgggcacattgagaaatggttttgagtaatgggaaaactgaggcaccattgccaagtagtaatgggggaggtgctgagattgataacaatgagaagaagcccttcaagatcttcgtagggtatgaccctcgcgaagatcttgcctatgaggtatgtcgccactccatcttgaaaaggtcttcaatccctgttgagatcataccaattaagcagtcagatctgaggaaaagtggtttgtattggcgtgagaggggccagtttgagagcactgagttctccttttcaagattct

SEQ ID NO: 13975 - DNA, 433 bp, Glycine max
  unsure at all n locations
  Clone ID: LIB3094-061-Q1-K1-C2
tgtaagttacatgatgtgaagttgcaaatgctttggagatcaccaacttcaaaatgcagctactgctacttgtgtggcacttgttcttcgcaatttaggatggagtatttctgataaatctattaggtatggtttagaggatacataccttcttggaaggagtcaatttctaacatctgaagaagctgaggtattaggacttactggatcaacagtactgcttgatggagcccacaccaaagaatctgccaaagctctgatgaataccataaggatggcatttcccaaggctcaattggtttttgttgttgcaatggcaagtgacaaagatcatgtgggatttgctcgagagattctctcangtgtacatgtggagactgtcgttttgacagaagctgctattgctggaggtgtaactcgaacaacaccagca

SEQ ID NO: 13976 - DNA, 402 bp, Glycine max
  Clone ID: LIB3094-061-Q1-K1-C3
gagagacacaaaactacctgaagtagtattcttgctactcttcaccttaattcttgcatctaaatttacgcaaggaattagaacagaagaatcggtatctcaatcccctcaaccccaaagagaaccaagtttggaggatggcaatgaggcatggaaaatgaggaattctaggagactaatgattggatccactgcaccaacttgtacgtacaatgaatgtagaggttgtaagtataaatgcagagctgagcaagtgcctgtagagggaaatgacccaattaatagcccataccactacagatgtgtttgtcatagatgatatatgatagtccataatgaattctatagcataatgtaacttttgagttctagtagacatgagtttatctcctgtaagtcact

SEQ ID NO: 13977 - DNA, 453 bp, Glycine max
  Clone ID: LIB3094-061-Q1-K1-C4
cccacgcgtccgcccacgcgtccggtgattgaagctagttagaacaagatgttgcagctactctacactgcgattttctccgaaatgcttttgattctcacgctcgtcttcaaaaccccactgagaaaactcgtcatcgtttccctcgatagtgtgaagcgcggtcgcggtcccgtggtggtttccaccgtgggcgccacattgatggtggttctcgcttcgagcctctacagcatggccaagatccagcaacgcaccctcgaggccggcatagtcaaccccaccgaccaagtcctcatgtccaagcacatgctcgaagcttctctcatggggtttctgctgttcctctctctgatgattgatagattgcaccattacataagagagcttcggtcactcaggaagaccatggaagctattaagaaacaaagccgaagtttgaagatggaaaaa

SEQ ID NO: 13978 - DNA, 418 bp, Glycine max
  Clone ID: LIB3094-061-Q1-K1-C5
cttttctactttgagtcttcttgatccttctttttctccttgaactcaaacatggcagatgaggtggttctgctagatttctggccaagtccatttgggatgagggtcaggattgcacttgctgaaaagggtatcaaatatgagtacaaagaagaggacttgaggaacaagagtcctcttctcctccaaatgaacccggttcacaagaagattccggttctcatccacaatggcaaacccatttgtgaatccctcattgctgttcagtacattgaggaggtttggaatgacagaaatcccttgttgccttctgacccttaccagagagctcaggctagattctgggctgattatgttgataagaagatatatgatcttggaaggaagatttggacatcaaaaggagaagaaaaagaag

SEQ ID NO: 13979 - DNA, 454 bp, Glycine max
  unsure at all n locations
  Clone ID: LIB3094-061-Q1-K1-C7
aagaatcaaagaaaggggtggtggctgcttcgaaagcttaataatttgtttatttccagagcatcatagttttcgcagcagcaaactaacaaattactcatatcatataataagatggcccgttctctctcgcaagccaaacgtattggtgtccttgttgctcaatctatctccctaattcccgttcatcggcgaggttacgcagtggcatccgatgtatcggtaagagttggattgggtaatattgggcgaaggaatggaatcgtgggaggtgtagaagagaagcctgatacaagagatggttcaaaagcctactcaactgattgggccccagacccagtaacaggttactataggcccattaaccacacccctgaaattgacccggtggagcttcggcataggttgctccgatcacctncactagagcctagaggagttgctggacacccat

SEQ ID NO: 13980 - DNA, 418 bp, Glycine max; identical to SEQ ID NO: 13978
  Clone ID: LIB3094-061-Q1-K1-C9

SEQ ID NO: 13981 - DNA, 430 bp, Glycine max
  Clone ID: LIB3094-061-Q1-K1-D1
cccacgcgtccggcgaaaacccccaactccaacctctgttcatcgtctaccgcgctttcttttcaaccagaactatgattaagctttttaaagtaaaggaaaagcagagagaacttgcagaaaatgcaagtggcggaccacctgttaagaagcaaagtgctggagagttgcgtcttcacaaagatataagtgagctgaatctaccaaaatcatgtaccatgcaattccccaatggcaaagatgatctgatgaactttgaagtttcaattcgacctgatgatggatattacttaggtggcacatttttgttttcctttcaagtgtctcccatctatccacacgaagcaccaaaggttaagtgtaagacaaaggtctatcatccaaatattgacttggaaggaaatgtttgtctcaacatcttacgagaaga

SEQ ID NO: 13982 - DNA, 435 bp, Glycine max
  unsure at all n locations
  Clone ID: LIB3094-061-Q1-K1-D10
caaccatggccgactcatctcaagaccttgaccaacttctcgatagtgctttggatgattgtcagtccttcaacctcaatcctccccctccaagtggggaagcaactgcgaatagcaagaaggagagtccttctttgccgtcgggggttcaaggattgggcatgggtttacccgatttgagaacgaagaaaaaggggaaacagaaggcttccaaagacagccacgtgtcggaggcgctcaacaagctcagggagcagaccaaagaggctgtgaaggggctggagtctatatccccacccactgccgatgatttaggtaaggatgccttgatggaagattgggtcaaacaatttgagcagcttgctggctctcangacatggaatctattgtggagaccatgatgcatcaacttctgtccaaagagattcttcatg

SEQ ID NO: 13983 - DNA, 398 bp, Glycine max
  Clone ID: LIB3094-061-Q1-K1-D11
aaaaaaggttcatagttgatatctccagcggaacgatgaagtttgaagatttggcagaaggatgcatggcaaaaatactgtcctacaccactcgtgcggatgtatgcaggctttctctggtttccaaagcctttcattccgcggctgaagccaacactgtgtgggattgctttctcccctctgatttgtcctctatcatctccccttcttcttccgttcctccctttcgctctattaaggatctctatctctatctctccgatcgtcccaccatcatcgatcaaggtataaagagttttcaattggagaagcggactgggaacaagtgttacatgctttccgctagagatctgagcattatatggggtgacactactcattattgggagtggacaacc

SEQ ID NO: 13984 - DNA, 410 bp, Glycine max
  Clone ID: LIB3094-060-Q1-K1-H7
gaagaaagattcgaaacgaagaaagaatgcgttgtgaagaatggcggacgtagggacacgtggtcggtgtccacagcgtagaggagtggaacgaacatatgatgcagggagaagagtccacgaaattgcttgttaatcttatgcccttctattatgtctagccttgtaatcttgattcgcattactataagcgcactacggttttcgcattgggaaattccttcatcgcttcttgccttaatgaaccattgtgtgctatcaatggcaactatagattctattatgacatatattagttaatattgatgcatctggacggcgatgttgagtgcgatgctattgctatgctatggtgtgggatttttcaaaataatcgacgaagaatcatatgcttacgtccatgatggatg

SEQ ID NO: 13985 - DNA, 377 bp, Glycine max
  Clone ID: LIB3094-060-Q1-K1-F8
acgcgtccggatagctactattgaagaagcaaaacgattttacccactgttcggactcggggccaatggggcccttattttctctggccggacagtcaaatgcttttctaatctgaggcataatttaggtcctggagttgatggttgggccatctctctgaaagcaatgatgagcatagttgtgggtatggggtttgcaatctgtttcctgtactggtgggtgaacaattatgttcctcttcctactcgtagcaagaagaagaaggagaagcccaaaatgggaacaatggagagcttgaagttcttggtgtcttcaaagtacatcagagatcttgccactttagtggttgcttatggaatcagcatcaatcttgttg

SEQ ID NO: 13986 - DNA, 311 bp, Glycine max
  unsure at all n locations
  Clone ID: LIB3094-060-Q1-K1-G1
aagcacaaaaagactganaatgaaaataacatttgaagtcaattgcatattgttaagattgcgcactgtgacgatgctgggtgctaacctccctgtcgaaaaacactccgactatcacacttaagttcgaaccagactttttcaatttccgaccttcctaaataaagtggtgcgactcgccatttccttcatgaagaccacttggagtcccgatcgccttcctcaaaggtagttgcgcagtacttgcctttcgcgaaggtagttccttattgaataactaataacaaaagtaaactaagctaaaataactc

SEQ ID NO: 13987 - DNA, 442 bp, Glycine max
  Clone ID: LIB3094-060-Q1-K1-G11
cccacgcgtccgcccacgcgtccgaaaaaaatgggttcttcttcttccatatggaccgtgtgtttgattttggcatcactggcctctgcagcactctgtgccaaccctcgtagaccagtggatgtacaatttggccgaaactacgtgcccacatgggcctttgatcacatcaaatacttcaatggaggttctgacattcagcttcatcttgacaagtacactggtactggcttccagtccaaagggtcatacttgtttggtcacttcagcatgtacataaagatggttcctggagattcagctggcacagtcactgctttctatttatcttcccaaaatgcggagcacgacgagatagactttgagttcttggggaacagaacaggacaaccttacattttgcaaacaaatgttttcacaggaagcaagggtgacagagagc

SEQ ID NO: 13988 - DNA, 148 bp, Glycine max
  Clone ID: LIB3094-060-Q1-K1-G12
cgacgcacgcgtacggacacgcgtccgcccactcgtgcgactataatgggctcaactgaaaccatatggaccgtgggtgtcatattggcatcacgaggacactgcagcactcaaccgcctaaatctcatacaccagaccaatgaacaa

SEQ ID NO: 13989 - DNA, 373 bp, Glycine max
  Clone ID: LIB3094-060-Q1-K1-G2
ctcaaaaaaagtcagaaaaataattgattatttataggggggcccactatttatagcgcattcatgcacatatattaatttctttgaatgcctagaccccatgtttttgtgccactgcacatgttggataaatgagattcgtcagtcaagtttgaacatgaagtacatctgtgtcgtttggctttctaaaaacacatgcccttcttgtacgccatcgtagctccaactactaataaccgatacacttatttaattcttactactaatttctccccctattattagtattatttattagtttataatttgtacattattccatttttttcacataactttcccataatttattctaaaataaaaacattttaaa

SEQ ID NO: 13990 - DNA, 130 bp, Glycine max
  unsure at all n locations
  Clone ID: LIB3094-060-Q1-K1-G3
cccacgcgtccggaaaaaaaaaaaagccttttactttttttcttttgcatgatttgaatcttgattgngaaaagcttcgaattggggtgttttacccatcaattcaattttaagttgtgctttgttcaat

SEQ ID NO: 13991 - DNA, 353 bp, Glycine max
  unsure at all n locations
  Clone ID: LIB3094-060-Q1-K1-G4
cggtcttgaattcccgggggnttcccggnnaacccacgcgtcgattcgatgcgcaagaagaaaacccttctaccgttcaagagcaaatcttggagaccctactggtagaccatcactctcgaagcagagtcagatccataacatgtaaggccaaaattcagacaggaaggatcccaccagatcagcacggctcattttgtggcaagcagcttgaggatggacgtacccttgctgattatacatccaaaaggagtcactctccactggtcttcgtctcgggtgggatgcaaatctttgtaagaccttgcggnaaagacaatacccttgagtcgagagctcgacacattgcaacg

SEQ ID NO: 13992 - DNA, 436 bp, Glycine max
  Clone ID: LIB3094-060-Q1-K1-G6
ttcgacccacgcgttcgctgttattattatggcagtcacacattttaattaatgaatatcgtgagcgtataatgttgccttctgcatcaaagaagcaggggcgacctattaccacttgtataaaggttttagacatgactggtctgaagttatcagccctgaatcagattaagttgctaactattatatcatccattgatgatctgaactaccctgagaagacaaatacttattacattgtaaatgctccatacatattatctgcttgttggaaggttgcgaagccacttttacaagagaggacaagaagaaaaatacaggtgttaccaggttgtggacgagatgagctattgactatcatggattactcgtctctaccacatttctgtcgaagagaaggctctggatcattcagacattctgagagtggtagtga

SEQ ID NO: 13993 - DNA, 434 bp, Glycine max
  Clone ID: LIB3094-060-Q1-K1-G9
cccacgcgtccgcgagcttcagcaatggtgtacgtcaaggctcagaaatcaaaagcctacttcaagagatatcaagtcaagttcaagagaagaagagagggaaaaaccgattaccgtgccaggattcggttgattaatcaggacatgaacaaatataacactccgaaataccgatttgtggttcgctttagcaacaaggacattgttgcacaaataatatctgctagcattgccggcgatttagttcttgctacagcatattcacatgagctgccacgatatggtcttgaagtaggacttacaaattatgcagcagcttattgcactggtctactgttggcccgaagagtcctcaaaacacttgaaatggatgaggagtatgaaggaaatgttgaggctactggagaggattattcagtggaacctgccgagag

SEQ ID NO: 13994 - DNA, 430 bp, Glycine max
  Clone ID: LIB3094-060-Q1-K1-H1
gacccacgcgtccgcgcgtcgctgctccgtaccagtttcactgcttaaatttgagagaaaactctgcaaacatgttgggttatcaggacctccttacaggtgatgagcttctctatgactccttccgttacaatgaaattgagaatggaatgctgtgggaagttgaggggaagtgggttgttaagggagcagttgatgttgacattggtgcaaacccttctgctgagggtggagaagatgagggagtcgatgacgcagctgttaaggttgttgacattgttgatacattcagacttcaggagcaacccgcttttgataagaaacagtttgttaccttcatgaagaggtttatcaagaatttgactcccaagctcgatgcagagaaacaagagttgtttaagaagcacattgaaggagcaactaaatacct

SEQ ID NO: 13995 - DNA, 431 bp, Glycine max
  Clone ID: LIB3094-060-Q1-K1-H10
aaacacccttgtcgaccacaccaaattttataacataaaaaagcataaaagcacaaagagaggtacaaaagggaaaataaaacattttgaagtcatatttgcacacttgattaaaggctgtcgtcccttgtgacggatgcatacagtgctaataccttccctgtgcgtaaaaacaactcccgaactattcacacttaaagttcgtagaccacacctttacaattttccctacgctttcctcaaataaaagttgatggcaactccgctcattttcctttcatggaagacgcacttgtgagtcccgcatcgccctcacgtcaaagggtaggttgcgacagtacttgccctcccgccgaagggtaggatccttaattgaattaactaataacatatgtgaaactaaggctatgataaactcacaaatcaagctt

SEQ ID NO: 13996 - DNA, 405 bp, Glycine max
  Clone ID: LIB3094-060-Q1-K1-H2
aacccacgcgtccgcgcgtcactgctacgtaccagattcactgcttatattagcgagacaactctgcctacatggtggtgtatcaggacctgcttacaggtgatgagcttgtgtcggactccttccgttacaatgaaatggagaatggaatgctgaggcaagttgaggggaagtgggttgttaagggagcaggtgctgttgacattggcgcagacccttatgctgagggtggagaagatgaaggagtcgatgacgcagctgataaagctgttgacattgttgatacattcagactttacgagctacccgattttgataagaaacagtttgataccttcatgaacaggattatcaagaatatgactaccaagctcgatgcacagaatccagagttgtttaagaagc

SEQ ID NO: 13997 - DNA, 106 bp, Glycine max
  Clone ID: LIB3094-060-Q1-K1-H3
cccacgcgtccgcgcggcactgctacggaccagatacactgcttatttgagcgagacaactctacatacatgcgggggcatcatgaccaccatacacgtgctgagc

SEQ ID NO: 13998 - DNA, 301 bp, Glycine max
  unsure at all n locations
  Clone ID: LIB3094-060-Q1-K1-H4
ttcccggngnttccgggaaaaccccacctcattgtgctgcagaattcacagccgcttgattacaatgatgttttgtggcctaagtgtatcctctgcctaactgtattccctgttgtttccttatagtggattgtctatatggatccagtcacatagaggcttaattcaatgattcttgctgacatttatcttcaattcttgggnggacaattatccatagagataggaatattctcagggcacataccaaatttggtgttattacgagccttctaattcagtgatgtggatctatcactct

SEQ ID NO: 13999 - DNA, 256 bp, Glycine max
  Clone ID: LIB3094-060-Q1-K1-F6
aagagaaggaatttattctggacaccttgtgccacttattgtattaatcgaatgcttgagtgttttactaaaataagatgtgtggaagagtgcttggaaaagggccagaaaattaccaaactaatatacaatcaaatatggttgttaaatcttatgaaaagtgaatttaccgagggacaggagcttctaaaaccatctgccacccattttgtctctagctttgctactctacagagcttgctggatcatttagttg

SEQ ID NO: 14000 - DNA, 423 bp, Glycine max
  unsure at all n locations
  Clone ID: LIB3094-060-Q1-K1-D7
gcggcgctgggcggacgcgccggcggttttgaggagaagacggagttcgacgtgggggtcgagtggtgccgagcaacgctcgaatcgcggtgattaaggcggtgagggtattgacgaacctagcgctgaaggaggcgaaggagttgatcgaagggttgccgaagaagttcaaggaagggatttcaaaggacgaagctgaagatgcgaagaagcaactcgaagaagctggtgccaaggttaccattgcttaaacactgtttagctgcagcatatatgttctgcttcttcttttgttggttgtagttgagttcaccagtacactgtaatttcatttccattttgtctggatttcaatcttttatttgtaatgaggaaatatgagttcttatttttatattattttttttaatgcgtatgangtgt

SEQ ID NO: 14001 - DNA, 292 bp, Glycine max
  Clone ID: LIB3094-060-Q1-K1-D9
aacggggacgcgtgtgtctatgtctatcaaattctataacatccagagctcgggcaaaaagaagggcacgatgtcagagcgcgctccgactacactcgaacaggtcgtgtacatggcgaagctggctgagcatgccaagcgccacgaggagaaggtggagcatatggcgaatgactgcaactacagcgagagcgaggaactgacccgggaacaccacaaccgtgaatgggcctactacaagaacgtagtcctctctcaacgagcctacgagttcatcatgctctgaattgac

SEQ ID NO: 14002 - DNA, 395 bp, Glycine max
  unsure at all n locations
  Clone ID: LIB3094-060-Q1-K1-E12
gttccaagaagtgttagagtggaaagacctgctgattaggtttttacaatttgccaattgcgattccttgatgtcagcactctacatgctgctctgccagattccactgctgttagaatcatctcaaattctcgtttgtatacacgtaaatcacttatctattagtaggattttaatgtatttcaaatatttgtataagtagaaatttctttctgtcatctggttttggttcaattatgtaggtggtttaacattcatagctgcatgaccaccaagttctcaaatactgtaaatagctgcaaaaaaatatatccaacatcaaaaataacaaatataaattcgcattttacatcggttctaggaaaaaaaatncccctctcttcttcaacgagtct

SEQ ID NO: 14003 - DNA, 333 bp, Glycine max
  Clone ID: LIB3094-060-Q1-K1-E2
acccacgcgtccgcggacgcgtgggtctctctctttctctttctctctcatccagatcttgaaaaaaaaaaaaaagacaatggcagcgagcgctcccactccacgcgaatagttcgtgtacatggcgaagctggcggagcaggccgagcgctacgaggagatggtggagttcatggagaaggtctccgcctccgccgagagcgaggagctgaccgtggaggagcgcaacctcctctccgtcgcctacaagaacgtaatcggcgctcgccgcgcctactggcgcatcatctcctccattgagcagaaagaggagagccgcggcaacgaggacca

SEQ ID NO: 14004 - DNA, 413 bp, Glycine max
  unsure at all n locations
  Clone ID: LIB3094-060-Q1-K1-E5
cccaggcgtccgattgcattgacctggattcaaaccttgcatcaataggagataaagagggtcttataaatgccaggaaattatatgaatctgcacntttagcttatgaccataatgtcagcttgtggcaagattactatcgcatggagaccaagatgggaacatcagaaaaggctaatgctatctattggcgtgcaaggaaagtactcaaagatgctagtgaatttgtcactgccacagatatgtgataatatttctaaattacgaccatggctattggagttcaattttgaccacttcatttatttggtttttctacagaaatttcttttcgaccagtctagtctagactcaaatttgtttttccttcccaagaggtgaggaataaagcttcctccttntccccaaaaagc

SEQ ID NO: 14005 - DNA, 423 bp, Glycine max
  Clone ID: LIB3094-060-Q1-K1-E7
ctaaacaactcttctctttttccttcgctcgttgttctccctcgcgtagatcgacagggcggagacagagacgtttgctttccaggctgagatcatccagctcctcagtttcatcatcaacaccttctactccaacaaggagattttccttcgtgaactcatcagcaacgcctccgatgctttggacaagattcgatttgagagtttgacagataagagcaagctcgatgctcagccagagttgttcattcatattattccagacaagactaacaatacactgaccattgttgacagtggtattggcatgaccaaagctgatttggtgaacaacttgggtacaattgctagatctggtaccaaggaattcatggaaagcctggctgctggtgctgatgttagtatgattggacaagttggtgt

SEQ ID NO: 14006 - DNA, 447 bp, Glycine max
  Clone ID: LIB3094-060-Q1-K1-E9
cccaggcgtccgcccacgcgtccggtgatttaagctagttagaacaagatgttgcagggagtctacactgcgattttctccgaaatgcttttgattctcacgctcgtcttcaaaaccccactgagaaaactcgtcatcgtttccctcgatagtgtgaagcgcggtcgcggtcccgtggtggtttccaccgtgggcgccacattgatggtggttctcgcttcgagcctctacagcatggccaagatccagcaacgcaccctcgaggccggcatagtcaaccccaccgaccaagtcctcatgtccaagcacatgctcgaagcttctctcatggggtttctgctgttcctctctctgatgattgatagattgcaccattacataagagagcttcggtcactcaggaagaccatggaagctattaagaaacaaagccgaagttttgaagat

SEQ ID NO: 14007 - DNA, 248 bp, Glycine max
  Clone ID: LIB3094-060-Q1-K1-F1
tccaacatcgagattttccttcttgaactcatcatcaactcctccgatgctttggacaagattccatttgagagtttgacagataagagcaagctctatgctcagccacagttgttcattcatattattccagacaagactaacaatacactgaccattgttgacagtggtattggcatgaccaaagcttatttggtgaacaacttgggtacaattgctagatcttgtaccaaggaattcatggaaac

SEQ ID NO: 14008 - DNA, 424 bp, Glycine max
  Clone ID: LIB3094-060-Q1-K1-F10
gaggttttcgtctgatgatgttggtagttctagcaatcgagggcgagggcaagggcaatggtctcgaaattatgggaggaatggagcggatggtgatggcagaatgaggaagaatgggaatgggagaaggtttttgtccaataatgttgatcggtctagcggtggagaacagtcttctactttgaattatgggggggatggaatgaatggtgatggtagattgaggaggaatgggaatgggaggagggtctctatccttgacaagatggtcgccaccctgcacacgtttgctgctaccctggccgctgtggtggatactgtaagcatggctgcttgcattgcccagcattcaacggatgtttcagaagatgcttgcataacactgacgaagctattgcttctcatactcacgatgggactcact

SEQ ID NO: 14009 - DNA, 445 bp, Glycine max
  Clone ID: LIB3094-060-Q1-K1-F11
atggctcccaaaccgcctagtacgggtctgtttgttggactgaacaagggtcacgtcgtcgccaagaaggaattgcctccacgcccctcagatcgtaaggggaaaacaagcaagagggtgcactttgtgaggaacctcataagagaggtagccggttttgcaccctatgaaaagcgtataactgagttgctgaaggttgggaaggataagagggcactgaaggttgcaaagagaaagctcggaacacacaaacgcgcaaagaagaagcgtgaggaaatgtccagtgttctcaggaagatgagggctggtggtgctggagacaagaagaaataagtcttatttactgttttccagattcactagatggacctgtgtattgatggacgagctttcatatttttgctttggttcaattagtttacttcaagattttgtttgagaaata

SEQ ID NO: 14010 - DNA, 438 bp, Glycine max
  Clone ID: LIB3094-060-Q1-K1-F12
atgggtcccaaaccgcctagtacgggtctgtttgttggactgaacaagggtcacgtggtggccagattgaattgcctgcacgcccctcagatcgtaaggggaaaacaagcacgagggtgcactttgtgaggaacctcataagagaggtagccggttttgcaccctatgaaaagcgtataactgagttgctgaaggttgggaaggataagatggcactgaaggttgcaaagagaaagctcggaacacacaaacgcgcaaagaagaagcgtgaggaaatgtccagtgttctcaggaagatgacggctggtgatgctggagacaagatgaaataaatcttatttactgttttccagattcactagatggacctgtgtattgatggactagctttcatatttttgctttggttcaattactttactataagaatttgcttga

SEQ ID NO: 14011 - DNA, 370 bp, Glycine max
  unsure at all n locations
  Clone ID: LIB3094-060-Q1-K1-F2
gngnnnttnncccgggnnnnaaacccacgcgtccgtgagaagaagggagagaatggaggaaaaggcaaaagctgagcagaagaagataggtatgacggagacttggttgaagaagcaccgtcttctttacattggagccactagacaccctcttattattagcattcgcgatggcaccatcaacactgcttccttcaaaacatggctcgcacaggattacttgttcgttcgggcgtttgtcccatttgtggctagtgtgctgataaaagcgtggaaggaatcagattgcagtggtgacatggaagtcatattggggggcatggcttctctggaggatgagatttcatggttcaagacaaaccaacaagtg

SEQ ID NO: 14012 - DNA, 412 bp, Glycine max
  Clone ID: LIB3094-060-Q1-K1-F3
cccacgcgtccgctcgagaatatgacccgttctaaaatttacgaaacataattatttattattggtgatatataatgagaggaacataaacgaacaatcagatgctgctagtcatttggataataaacaacattaggatttaggcatatcacatgatcgctttacttataatttagggatatcagctcaataccacatgattcaagtaatattaccaaaatcaaagccttatcctacaagatgcggtcagctacatgggtcatgacgtcattcggcaagtttagaaaccaaagtgtagcaaacgggaaaaaagtacacttctccttacagaggtatcccatatgacacaataactctgaaatagtatagtataccatagtcttaatcagcggaatatacaatttcttacatg

SEQ ID NO: 14013 - DNA, 347 bp, Glycine max
  unsure at all n locations
  Clone ID: LIB3094-060-Q1-K1-F4
ggtcttgaattcccggggnttcnccggntaacccacgcgtcgccacgcgtcggttcatattcacatagaagaacatgttctctcctaagcgagattgctgatagccatcttaggagcaatatatcgcctttaattattacaaaggtgtgcgtattaaccatagtctttgtattgtgttcaacacgcagttacctttgaagcatacatcacatggtgatcagatatattcacattgaagatcaggcatcagctagctacagcatgatatggtttcttccacaatttcatgctcaacactaccagatgaccataacctcaccttactcaactaatatacttatgtcacc

SEQ ID NO: 14014 - DNA, 422 bp, Glycine max
  Clone ID: LIB3094-060-Q1-K1-F5
cccacgcgtccgcccacgcgtccgcccactcgtccgcccacgcgtccgtctccctctttcggtcactagctctgtgcattcttctctcgctctctgccttccatcacactcgatatttcctttcccaagatagtagaagatggcagacactgaggatattcaacctcttgtttgtgacaatggaacaggaatggttaaggctggatttgctggagatgatgccccacgtgctgtgtttcccagcattgtaggtcgtcctcgtcacactggtgtgatggttggcatgggccaaaaagatgcatatgttggtgatgaggcacaatctaagaggggtattttgactctcaagtaccccattgaacatggaattgtgagcaattgtgatgatattggaaagatttggcatcataccttctataatg

SEQ ID NO: 14015 - DNA, 329 bp, Glycine max
  unsure at all n locations
  Clone ID: LIB3094-060-Q1-K1-D4
nggttcccgggnaaaacccacgcgtcgccacgcgtcgccacgcgtcgtcgctttacttccttccttcatctccgcttcagagagtatctncttcttctctgttcgaacaggtccacaccagcaacacactgcttcaatctcaatcggcccattgagaatggtttgagtaatgggaaacctgaggaccattgccaatttaatggggaaggcgctggattgatccattgagaagaacccttaggatcttcgagggtatgaccctcgcgaaatcttgcctatgaggtatgtcgccactccatctgaaaaggtcttcaatccctgtgagatca

SEQ ID NO: 14016 - DNA, 343 bp, Glycine max
  Clone ID: LIB3094-060-Q1-K1-A9
ggctacttttgattgcttgatgaaaacttattgattcctgacaccagaattctggagggagactcgcttctccaaatctgcattccaagagtacacagatctactggcaaaaccaacaggaaagactctaatcttggaggaggaaagggtggatgcttgatttgctagttttgctttatggatgttttaggaactttattactttacatactttgttggttctgtgctttacttttggttttgatagacggtatgtctctgtatgcattttgattgtttccaagttttaattgactgcaaaaaataaaaataataatattttattttattattataatatttt

SEQ ID NO: 14017 - DNA, 356 bp, Glycine max
  Clone ID: LIB3094-060-Q1-K1-B11
actagctcttgaccctacttcttacctgactctggtccctcctagaaaggcggttttattccattcttcggcgctgtatctttctagtgggtgccacaaaggttttttcctatgatgaagatctcaagacagtggttcctgcacctgctccaccagtgaaggcaccaactcctgcctctccagtgaaatcaccatcttaccctccaaggtcagtgaccacaccaactgttaaagtgccccctcctcctcagtccccagtagtgaagccaccaacttcaacaccagcccctgttaagggaccccctctacagtccccagtagtgaagccaccaacaccaacattcccagtggtgtac

SEQ ID NO: 14018 - DNA, 70 bp, Glycine max
  Clone ID: LIB3094-060-Q1-K1-B12
agaaaatgtaattttcagcactgtccaggaaatttaaggattgtaattctttatgcctgaggttattatt

SEQ ID NO: 14019 - DNA, 314 bp, Glycine max
  Clone ID: LIB3094-060-Q1-K1-B7
gctatgcttacggtgaattcatgcaattattttccgtcagtagacttgatattaaaagcgcggggcaaatatgccaaactgacgatcgtcaccttaggcaaatgattgccagggtaggagactaacgcatactatatcaaccctggacatggtgactaacttgggatctgcatctggagcaacgccagataactctaatgagagtactactgcatgctgagaaatatctgttctagaaatgactgcattcgtaagagcggctaatgaatctatacatcaatcatcattaggtcatatttgcacaagccacacat

SEQ ID NO: 14020 - DNA, 374 bp, Glycine max
  unsure at all n locations
  Clone ID: LIB3094-060-Q1-K1-B8
ataatgatgatattgaggttgaggttgttgttggtgttgatctttggttgaagattcaagaggaggcaaggttagatgttgatcaagaaccaatttttgtccagctactattatagttccattttgtctcacaaatctttggagagtgccttggccaaccacctctccacaaatttgagcagcttgagccttccaagcagcaccctttttgaccttttcatgggtgttttggttgatgatggagatgatgacatcgtaagtgctgtgaaggatgatttgatagctgttaaggagagggaccctgcttgcataagttatgtgcattgcttgctgaatntcaagggttttttggcatgtcaagctcataagattgc

SEQ ID NO: 14021 - DNA, 439 bp, Glycine max
  Clone ID: LIB3094-060-Q1-K1-C12
cccacgcgtccgcccacgcgtccgccctcgcgtccgcccacgcgtccgtctccctctggcgcgtcactagctctgtgcattcttctctcgctctctgccttccatcacactcggcatttcctttcccaagatagtagaagatggcagacactgaggatattcaacctcttgtttgtgacaatggaacaggaatggttaaggctggatttgctggagatgatgccccacgtgctgtgtttcccagcattgtaggtcgtcctcgtcacactggtgtgatggttggcatgggccaaaaagatgcatatgttggtgatgaggcacaatctaagaggggtattttgactctcaagtaccccattgaacatggaattgtgagcaattgggatgatatggaaaagatttggcatcataccttctataatgagcttcgtgttgcccc

SEQ ID NO: 14022 - DNA, 84 bp, Glycine max
  unsure at all n locations
  Clone ID: LIB3094-060-Q1-K1-C2
ggnnttncccggggnaacccacgcgtcgcgactcgtgcgtccattaccatgttgattgactaagagaagacaggatgacaagag

SEQ ID NO: 14023 - DNA, 208 bp, Glycine max
  Clone ID: LIB3094-060-Q1-K1-C3
cccacgcgtccgcccactcgtgcgttcacatataccatcttgttatttatacaaacaatgaccaggatgatgaggggactacttacactaacatgtatgctctatacctatatcacactatataaagtgcagaattcactcagaaagctaccttcaatatttatcatcatgatcaaactatcttcaataacaaaattgtagtcataga

SEQ ID NO: 14024 - DNA, 354 bp, Glycine max
  Clone ID: LIB3094-060-Q1-K1-C4
acccacgcgtccggcttcctcctcttacgagcctttcctttcagtccattgattcggtgggtgcgggtgcagcgaaaccgagctagaccctgatcggcgtcggcacacctccggagaacaagatgattgtctgcgtcgccgtcgtcggtcaccagaacaatccgctgtacatacagagcttcacggaggccgatgatgctctcaagctccaccacatcgtccattgctcgctcgatgtggtcgacgagcgagtgaacaatcctaaaaagtctgggccgatgcttaatgagacgtttttggggactgctttatcctatttgaaactacaaaagatatggatatctgactaatacg

SEQ ID NO: 14025 - DNA, 390 bp, Glycine max
  Clone ID: LIB3094-060-Q1-K1-C8
ggagattctgatttgttctctcagatctgatcttaccgtcgccggaatccaactcaacctgggtcggattcttgggtatcatcgcatggccattcgttttagcctctcaattagagattttagttcgcttcaaattcgaggtttgatttgaagttgaaagttggaatagcttaactgttgtgtaaaacaaccaacacacacgagcatgggaagccaagacaacaacgtagaattgtcatccaattcatctctagcttacaaatctgctaaagtgttatgtgctggtcaccggcgtcttgttggctcggacaattgtcgcaagctcacccaacttgggttcactaatctagtcttgcgcatccatgccgagcttgatctcactcgacaatc

SEQ ID NO: 14026 - DNA, 198 bp, Glycine max
  Clone ID: LIB3094-060-Q1-K1-C9
ggcggccctgtggcggacgcgccggctttttttgaggagaagacggagttcgacgtggtgatctatgagagaccgagcaacgctcgaatcgcggtgattaaggcgggaaggccttgaccaaacttacccttaaagaagccaaagaatttatccaaaggtttcccaaaaaattcaaagaaaggatattaaaagaccaaa

SEQ ID NO: 14027 - DNA, 189 bp, Glycine max
  Clone ID: LIB3094-060-Q1-K1-D1
tgtttaatttatgcaatcagtattggaagtacacttgacattaaaaacccggtcattttttacaaactcaagagagtcacatacattattatgatttcaaagactcaagtttaatatattctagtatcatccatttacatagcttctaacttaacatcttaatccttatcaagttcaaacatctaaaat

SEQ ID NO: 14028 - DNA, 401 bp, Glycine max
  Clone ID: LIB3094-060-Q1-K1-D11
cacagacatccgttttctggatgtgttttttctcactctcaggattgaaactgtagggggggtcatgacaaagtcgctgcgcactaacactgctattctaaccaagagatgtcaggtgttacaccacctatcatgaccagcagactacattctcgattcatgctctcgaaggctagaggagtactacataggatcgaccacttcatggaatatgggatctgtctggaatcccgttaacaagcacgtgatccctaaatatgagacctgacacacataagtttgcaccctcaagagttctaaacgtaaaccgcagattacatgggcaactggtaaatcacagaagatcacgctttcaaacgaataggaacgtctcagccaatatgaaacagatagaatggatc

SEQ ID NO: 14029 - DNA, 273 bp, Glycine max
  Clone ID: LIB3094-060-Q1-K1-D12
tgtcctcacacgggcattgctagataacctttctgccaactttgtcctttgatggcgcatcaccaatggtgcacgtcttgcatcatacccaatatacactgttttaagaagaatgattatgacctctggtgaagccgtcaagtacaagagctccttggatgcatttacacatatcctcaagaatgagggtgccaaaacccttttcaaaggtgccggtgccaaaatttttcttgccgttctcatgcttttgttctttctggttattaacaaatt

SEQ ID NO: 14030 - DNA, 418 bp, Glycine max
  Clone ID: LIB3094-060-Q1-K1-D3
gcttttctcatgtttaatttatgcgatcagtttccgggtggagacttgatattagaaaccctggcaaatatgccaaacttaagagagtcacatcatgaatatgatttcaagggtgtaagtggaatgtattctatatcagccttggacatggtttctaacttgggatttgtatttggagcaagttcaaacaactcaaatgagagtaggattgctgtgggtgaaatatctgttggagaaatgactgaattggaaagagcggttaaagaatctaagaacaatcataaaaaggtcatatctgcacaagccacagttgatggtgttaaagttgatggtattgacactaatttggctgtcatgaaagagttactttttcctctaaatgaacttgcgaagtctcttcagtccttggcatattggg

SEQ ID NO: 14031 - DNA, 423 bp, Glycine max
  Clone ID: LIB3094-060-Q1-K1-A8
cccacgcgtccggcgaaaacccccaacttcaacctctgttcatcgtctaccgcgctttcttgtcaaccagaactatgattaagctttttaaagtaatggaaaagcagagagaacttgcagaaaatgcaagtggcggaccacctgttaagaagcaaagtgctggagagttgcgtcttcacaaagatataagtgagctgaatctaccaaaatcatgtaccatgcaattccccaatggcaaagatgatctgatgaactttgaagtttcaattcgacctgatgatggatattacttaggtggcacatttttgttttcctttcaagtgtctcccatctatccacacgaagcaccaaaggttaagtgtaagacaaaagtctatcatccaaatattgacttggagggaatgtttgtctcaacatcttacg

SEQ ID NO: 14032 - DNA, 99 bp, Glycine max
  Clone ID: LIB3094-059-Q1-K1-D11
ccttggtaccaacactgagcttaactgagcttcgcaaagatgaatcgggaaaagttaatgaagggggccggttcggttagaactggaagaaagggtact

SEQ ID NO: 14033 - DNA, 375 bp, Glycine max
  Clone ID: LIB3094-059-Q1-K1-D5
cttcgatgaagtgtgctgaggggcaaggaactggtatgaaggtctctataagacatcttggcccgtccatgattcagcagatgcagcatgcttgcaatgaatgcaagggtactggagaaaccatcaacgacagagatcgctgcccacagtgcaagggagaaaaggttgtgcaggagaaaaaagtccttgaagttattgtggaaaagggaatgcataacgggcagaagattacattccctggcgaaactgatgaagcgccagacacaattactggggatattggctttgtccttcagcataagtgaacaatccaaattcaaaagaaaggctgaagatctttttgtagagcacattttgtcccttactgaaacccta

SEQ ID NO: 14034 - DNA, 188 bp, Glycine max
  Clone ID: LIB3094-059-Q1-K1-D6
ctgagaactctacatatgaagcatgatcgagtgctaggacaactggaactgtcaactcgagagcatcacctacactttcaaggatggcaaaacatttcaacttgagcatgtgtttattcgaagcatcaaattcatgtttatagtcataccttacattcttaagaatgctcctatgtttaaacaattgt

SEQ ID NO: 14035 - DNA, 274 bp, Glycine max
  unsure at all n locations
  Clone ID: LIB3094-059-Q1-K1-E9
ggccaaactccattgtttcctcgtatatttggtcatgaagctggagggattgtggagagcgtgggtgagggtgtgactcatctcaaaccaggggaccatgccctcccagtgtttaccggngagtgtggagaatgccctcattgcaagtcagaggagagcaacatgtgtgatcttctcaggatcaacactgataagggtgtcatgatccatgacaggcaaaccaagatttctattaaaggaccacctatttaacattttggtggtaccttcacat

SEQ ID NO: 14036 - DNA, 353 bp, Glycine max
  Clone ID: LIB3094-059-Q1-K1-F12
aaaaaaaaaaaaaaaaaaaaagaaaaaaaaaaaaaaaaaaaaaaaaaaaaaaaaaaaaaaaaaaaaaaaaaaaaaaaaaaaaaaaaaaaaaaaaaaaaaaaaaaaaaaaaaaaaaaaaaaaaaaaaaaaaaaaaaaaaaaaaaaaaaaaaaaaaaaaaaaaaaaaaaaaaaaaaaaaaaaaaaaaaaaaaaaaaaaaaaaaaaaaaaaaaaaaaaaaaaaaaaaaaaaaaaaaaaaaaaaaaaaaaaaaaaaaaaaaaaaaaaaaaaaaaaaaaaaaaaaaaaaaaaaaaaaaaaaaaaaaaaaaaaaaaaaaaaaaaaaaaaaaaaaaaaaaaaaaaaaaaaaaaaaaaaaa

SEQ ID NO: 14037 - DNA, 84 bp, Glycine max
  unsure at all n locations
  Clone ID: LIB3094-059-Q1-K1-F2
aatgctaggtccaagtagatgtgtnatgtagtttttatacaatgattctaatatcctatctccaccattcatattaatatttgc

SEQ ID NO: 14038 - DNA, 341 bp, Glycine max
  Clone ID: LIB3094-059-Q1-K1-F3
cgttcgggcttgttttgattgctttatgaataccgattgattcctcacaccagaattctgggaggagagtcgcttctccaaatctccattgcaagagtacacagatctactggcaaaaccaacaggaaagactctaatcttggaggaggaaagggtggatgcttgatttgctagttttgctttatggatgttttaagaactttattactttacatactttgttggttctgtgctttacttttggttttgatagacggtatgtctctgtatgcattttgatttgttccaagttttaattgactgcaaaaaaaaaaaataaaatttattattaaattaatttt

SEQ ID NO: 14039 - DNA, 348 bp, Glycine max
  unsure at all n locations
  Clone ID: LIB3094-059-Q1-K1-F7
ggattttgatgctggtnattttgatcattcagttatgctatcagagcccattgcaactctgcgggtgctagactatgaatgtcaagtttcggatcccttgaaaggattatatggagctggagctcatactgactatggtttaattacactgttagcaacagatgatgtctcgggtcttcaaatatgcaaagatagggatgctaaacctcagaaatgggaggatgtagcaccattgaatggagcattcatagtgaatcttggtgacatgctggaacccttgagcatctgcgtttttaagtccacacttgacatagttctatgaaacggtcaaagaagatattctaattg

SEQ ID NO: 14040 - DNA, 404 bp, Glycine max
  unsure at all n locations
  Clone ID: LIB3094-059-Q1-K1-F8
tgctgttcttttacgtgttgaggttagcatttctgacaacttgagaccaactcagactgaggcaacatatgtcggggatgctgttttagatggaagtgatgccattcttctgggtgctgagactttacgtgggttgtaccctattgagactatatctactgttggcagaatttgttcagaggctgagaaagttttcaatcaagacctttattttaaaaggacagtcaaatatgttggagaacccatgactcacttggaatctattgcatnctttgcggtacgagctgcaattaatgttgaaagcatctattataatttggtttacttcatctggaatgggctgaaagattgattgcaaagtttaggccaacaatgccagtactatctgttggaacccccgactt

SEQ ID NO: 14041 - DNA, 202 bp, Glycine max
  Clone ID: LIB3094-059-Q1-K1-G11
cccacgcgtccgtccacgcgtccggtgattgaagctagttagaacaagatgttgcagctactctgcactgcgattttctccgaaatgcttttgattctcacgctcgtcttcaaaaccccactgagaaaactcgtcatcgtttccctcgatagtgtgaagcgcggtcgcggtcccgtggtggtttccaccgtgggcgccacat

SEQ ID NO: 14042 - DNA, 152 bp, Glycine max
  Clone ID: LIB3094-059-Q1-K1-G5
ttttctaatctgaggcagaattatgtcctggagttgatggttgggccatctctctgaaagcaatgatgagcatagttgtgggtatggggtttgcaatctggattttttactttttttttaacattttttttttttttcctacttttatcatg

SEQ ID NO: 14043 - DNA, 202 bp, Glycine max
  Clone ID: LIB3094-059-Q1-K1-G7
caacaattgaagcaacatgttaaattataaagggggcttgaccatatttggtgaaccatccaaccgtccaaagcaagaatcgtgatgagatatcaaaagtgctaaaaggggagccagtttcataatctaacctacacgagctaccatccttacaagccacatttaaagagacactgagactttacacttcaatttctttttt

SEQ ID NO: 14044 - DNA, 322 bp, Glycine max
  Clone ID: LIB3094-059-Q1-K1-G8
tccctagaaacgcatgatatgctatataagccatccttaggagcaatatatccgacctcttcaatttattaccagaatgtatgtttcgtactacaccatagactcaatgacattcatatttcccaacaacgcattttaacctttgatagcatcatcaatcacatacagatcagaatatcattcaacaattgaagatcattagcatcatgcatattctatcatacaatgatatagctttcattccaacaaattttattctacaaacacctcaccaagatcaccaataaacctcacccttacttaactcaattataacttcatt

SEQ ID NO: 14045 - DNA, 408 bp, Glycine max
  Clone ID: LIB3094-060-Q1-K1-A1
ccacgcgtccgaaattcacccgctaccttttcccgtgtacgatcgaatccaatccaccaaatcggcggcgacgcctccgctctgtctcgaaaccacagatctgcggcggaaccgccgtctccgactatctccgattgatcttccggtaaagtggaccggagatgccggttgccgcttccgccatttacttcctcaacctccgcggcgacgttctcatcaaccgcctctatcgcgacgatgtcgggggaaatatggtggatgcttttaggacgcatattatgcaaacgaaggagcttggtacttgcccagtgaggcagattggtggatgctctttcttttacatgaggatcagtaatgtctacattgtcattgttgtcagcaacaacgccaatgtcgcttgcgctttca

SEQ ID NO: 14046 - DNA, 443 bp, Glycine max
  Clone ID: LIB3094-060-Q1-K1-A10
gaaaaacaagagcaaattgggatcgattaatttgaagaacaccacaagcaagatgcatgttgttgtggtgctcaacacgcaatcctactgcagaggcctagaacctccttcatcttctccttccgtcgtttccaacaagggaacaaggactttgagtttcaggaggctgctgctgcgtccttctcttgggattcatttatcgcgtagctttgctttaaagtgtgttgttactccgaacccagctgtggaattgccattaactgctgaaaatgtagaaagtgtattggatgaaattcgaccctatctcattgcagacggtgggaatgtggctttacatcaaattgatggcaatgttgtgcgcttgaagctacaaggcgcatgttgttcctgtccaagttctgttaccaccatgaaaatgggcattgaacgtcggttaatggaaa

SEQ ID NO: 14047 - DNA, 231 bp, Glycine max
  Clone ID: LIB3094-060-Q1-K1-A11
cccacgcgtccgggtggagtcatgacatagttgattcccagaaacactgttatcccagagcgggaaatctcaggtgttcaccacctatcaggaccagcagactacagtctccattcaggttttcgaaggcgagaggcgtctcaccaaggattgccggcttcttgggacatttgatctgtctggaattcgtgcagcctctatgggtacgctttactttgaagtgacctgcta

SEQ ID NO: 14048 - DNA, 205 bp, Glycine max
  Clone ID: LIB3094-060-Q1-K1-A12
ccgacgcatgcgtccacgcgtgcgatcattggttattatgagatcctttgaaaacatgatcaacttgtaacatgtagtctattaggagactactgtattggtaatgtgtatgtcggattaagtggattcgagtgaaatgttgatcaggggagtcatttcgacatattttctggaatataactcttggattataagtttttaaaaa

SEQ ID NO: 14049 - DNA, 139 bp, Glycine max
  Clone ID: LIB3094-059-Q1-K1-C8
ctttggttgaagatgcaatacgaggcattgttagaggtcgatcaagaaccaattttatccaactactatttcagttccattttgtctcacaaatcttttgagagtgccttggccaaccacctttacacaaatttgagca

SEQ ID NO: 14050 - DNA, 398 bp, Glycine max
  Clone ID: LIB3094-060-Q1-K1-A2
cccacgcgtccgaaatgcacccgctaccttttcccgtgtacgttctaatccaatccaccaaatcggcggcgacgccggcgctctgtctcgaaacgacagatctgcggcggatatgtcgtgtccgactttctccgattgatcttccggtaaagtggaccggagatgccggttgccgcttccgccatttacttcctcaacctccgcggcgacgttctcatcaaccgcctctatcgcgacgatgtcgggggaaatatggtggatgcttttaggacgcatattatgcaaacgaaggagcttggtacttgcccagtgaggcagattggtggatgctctttcttttacatgaggatcagtaatgtctacattgtcattgttgtcagcaacaacgccaatgtcgc

SEQ ID NO: 14051 - DNA, 306 bp, Glycine max
  Clone ID: LIB3094-060-Q1-K1-A3
ccccagcgtcgaccctaacgcgtgcagagcaaagagactcacctggggcgaagacccggagggtatggcaattagacaacatcccaagtacggtttgcggggttctgatcccaagatcagattacgatgtgtttaaaaaaggtgtgatgaattcttttggtcattggtagtgggaaaggaaacgttttaggggcctgaagctgctcgattgttgcacagtcatggcaaattgctggaaggatctttcacttagagtagggtgcacccattcatgtcttagatcaacagatgctttctgtgccggac

SEQ ID NO: 14052 - DNA, 426 bp, Glycine max
  unsure at all n locations
  Clone ID: LIB3094-060-Q1-K1-A4
cccacgcgtccgcacctttgttcactcttcttctcttgcggcttgggttttagcgcagcttcttctagatttaaggaagatgggtaaggaaaaggttcacatcagtattgttgtcattggccatgtcgactctgggaaatccactaccactggtcacctgatttacaagcttggaggcattgacaagcgtgttattgagaggtttgagaaggaagctgctgagatgaacaagaggtctttcaagtatgcctgggtgctggacaaacttaaggctgagcgtgaaagaggaatcaccattgatattgctttgtggaagtttgaaacaacaaagtattattgcacagttattgatgcgcctggacatagggatttcattaagaatatgattactgggacatnccaagctgactgtgcttgtcttatcat

SEQ ID NO: 14053 - DNA, 355 bp, Glycine max
  Clone ID: LIB3094-058-Q1-K1-G2
ccgatcgctaaactaatatggatcgagaaatcgccccagaggagaacatgaacaagactaacaatccgcacctaagcaatggccctttaaaaccgcgactcaagggatcccttcacctactctcaaatatgcaacgctaacatcggacaatgaacaccatacaatgactgcatcagactatgttaaatcgaaggaatcgaatagcataatgctgaatacgcctttaagtccatgaccttcgatgttaagaaccatcatgttcaatggaagaactacccatgtgcaatatcaaaattgcaccatgagatagtgccagacaaatgcaacgttgcggacaatcctaaaatggcaatca

SEQ ID NO: 14054 - DNA, 440 bp, Glycine max
  Clone ID: LIB3094-058-Q1-K1-G3
cccacgcgtccgccaaaaccgaaaagaagatttactgctgaaatccccaaaatcgaatagaaggtggccaaaagcgctgaaatccctctaaccgatggcaaaacgaacagggatagagaaatcgccaaagaggagaacaagaagaagactaataaacccaagctcagcaatggcacttcaaaacagcgagacgagggatccaaaaagggagtagcagaatgaaaacgagatgaggggaaaatgaacgtgtttccgatgaatcgcatcagaacgatgattaaaggcgaagatcccgatatgcgtgtttctcatgaagcattgttggccatcaacaaccctgtggagaagttccttgagcaattctcgcaagaagcttatgctttttgtgatcgggaccgcaagaaatgcctaagctacgatcacctaccacatgttgtaag

SEQ ID NO: 14055 - DNA, 447 bp, Glycine max
  Clone ID: LIB3094-058-Q1-K1-G5
cccacgcgtgcgccaaaaccgaaaagaagaatatctctgaaatccccaaaatcgaaaagaaggaggcaaatgcgctgaaatccctctaaccgatggcaaaacgaagagggatagagaaatcgccaaagaggagaacaagaagaagactaagaaacccaagctcagcaatggcacttcaaaacagcgagacgagggatccaaaaagggagtagcagaaggaaaaggagaagaggggaaaatgaacgtgtttccgatgaatcgcatcagaacgatgattaagggcgaagatcccgatatgcgtgtttctcaggaagcattgttggccatcaacaacgctgtggagaagttccttgagcaattctcgcaggaagcttatgctttttgtgttcgggaccgcaagaaatgcctcagctacgatcacctagcacatgttgtaagtaagcaaag

SEQ ID NO: 14056 - DNA, 446 bp, Glycine max
  unsure at all n locations
  Clone ID: LIB3094-058-Q1-K1-G7
caccgtcacttttccttaacggcgaagctatcgccgaagggcacaaccgtcattcccactcgaaaccgtttcttctatcctccactctccccatcccaataacaaagagaggaatcgaagtctgttccgttctgatcagaaagggaataacggtaacggagatatggggcttctgtctaacagagtaactagagagagcctgaaaccaggggatcacatctactcttggaggactgcttacatatacgctcatcacggcatttatgtcggcgatgacaaagtcattcacttcactagacatgggcaagaagtaggaaccggtactgcactagatcttctcctcatcagttcaggaccagccaagcctcgagaaagttgcccaacttgtacagcaccccaagaggaacacggngttatctcctcatgcatgaactgcttcctagctg

SEQ ID NO: 14057 - DNA, 448 bp, Glycine max
  Clone ID: LIB3094-058-Q1-K1-G8
caccgtcacttttccttaacggcgaagcttttgccgaagggcacaaccgtcattccgactgcaaaccgtttcttctatcctccactctccccatcccaataacaaagagaggaatcgaagtctgttccgttctgatcagaaagggaataacggtaacggagatatggggcttctgtctaacagagtaactagagagagcctgaaaccaggggatcacatctactcttggaggactgcttacatatacgctcatcacggcatttatgtcggcgatgacaaagtcattcacttcactagacatgggcaagaagtaggaaccggtactgcactagatcttctcctcatcagttcaggaccagccaagcctcgagaaagttgcccaacttgtacagcaccccaagaggaacacggtgttatctcctcatgcatgaactgcttcctagctggt

SEQ ID NO: 14058 - DNA, 431 bp, Glycine max
  Clone ID: LIB3094-058-Q1-K1-G9
ccgcctaatacggattctttcgacggactgaacaaggatcacttggacgcctttttttaattgcctgcacgcccctcatatcgtaacgcgaaaacatgcaatatgctgcactttgttaggaacctcatacaaaacgtatcctgttttgcaccctattaaaagcgtataactgaataactgaatgatgctaatgataatatgtcacttaaagttgcaaatataaagcacttatcacacaaacgcacaaagaataagcctgaggaaatttccaatgttctcatgaatattacggctggtggtgctagatacaacaataaatatgacttatttactagttctcatattcactatattgacctgtgtattgattaactaactttcatattaatctttttttcaatcatattacttcaatatttttttttacaaat

SEQ ID NO: 14059 - DNA, 413 bp, Glycine max
  Clone ID: LIB3094-058-Q1-K1-H10
caaagacatccttctcctggatgtggctcttctcactctcggaattgaaactgttggtggagtcatgacaaagttgattcccagaaacactgttatcccaaccaagaaatctcaggtgttcaccacctatcaggaccagcagactacagtctccattcaggttttcgaaggcgagaggagtctcacaaaggattgccgccttcttgggaaatttgatctgtctggaattcctccagccccaaggggtacgcctcaaattgaagtgaccttcgaagttgatgccaacggcattctaaatgtgaaggcagaagacaagggcactggtaaatcagaaaagatcaccattacaaacgaaaagggacgtcttagccaggaagaaattgagagaatggttcgcgaagcagaggagtttg

SEQ ID NO: 14060 - DNA, 402 bp, Glycine max
  Clone ID: LIB3094-058-Q1-K1-H11
gccacgcgtcgccacgcgtcgggattaagctgttagaaccgatgtgcactacggggtctggagttctcgaaacgctttgatctacgctcgcttaaacccactgagaaaactcggatcgtcccctcgatcgtgtaaccgcgtcgcggccaacagggccaaacattaccctaaagttcgggaccacacctttcaattttccgactcttttctaatataaaattggtggcgacttcccgcatttttctttatggtagactcactttttagtcccgcattttccttccctcatatggtttgttgcgacagtactttgccttccttctaatggtatgttccttaattgaattatcctatttacttatgttaaacttatgctttaattaacttactaattaagccttt

SEQ ID NO: 14061 - DNA, 278 bp, Glycine max
  Clone ID: LIB3094-058-Q1-K1-H4
cccacgcgtccgcccacgcgtccagaatattctgttgccttatgaacattttccattgttgattgcttttgcaggtcggattggtaaagatctggtgtagaatcccacagctgttggtgtggtttaaggtttcaagaagtgtcatgcttttgtcatgatcaaccgtgcagtgcttatatcatgcttcttttactgcttgattgatgtatgttggaatgttattttaagtatactattctttttattgaaggtaatttttactatgtttgggtcttgat

SEQ ID NO: 14062 - DNA, 449 bp, Glycine max
  Clone ID: LIB3094-058-Q1-K1-H6
cggacgcgtgggtctctctctttctctttttctctcatccagatcttgaaaaaaaaagaagacacaatggcagcgagcgctcccactccacgcgaagagttcgtgtacatggcgaagctggcggagcaggccgagcgctacgaggagatggtggagttcatggagaaggtctccgcctccgccgagagcgaggagctgaccgtggaggagcgcaacctcctctccgtcgcctacaagaacgtaatcggcgctcgccgcgcctcctggcgcatcatctcctccattgagcagaaggaggagagccgcggcaacgaggaccacgtcgccgtcatccgtgactaccgctccaagatcgaagccgagctctccaacatctgcgacggaatcctcaagctcctcgacacgcgcctcgtcccctccgccgtctccggcgactccaaggtcttcta

SEQ ID NO: 14063 - DNA, 151 bp, Glycine max
  Clone ID: LIB3094-058-Q1-K1-H9
ataaagatggttcctggagattcagctggcacagtcactgctttctatttatcttcccaaaatgcggaacactacgagatagactttgagttcttggggaacagaacaggacaaccttacattttgcaaacaaatgttttcacaggaagca

SEQ ID NO: 14064 - DNA, 319 bp, Glycine max
  Clone ID: LIB3094-059-Q1-K1-A3
aaaaaaaaaaaaaaaaagaaaaaaaaaagaaaaaaaaaaaaaaaaaaaaaaaaaaaaaaaaaaaaaaaaaaaaaaaaaaaaaaaaaaaaaaaaaaaaaaaaaaaaaaaaaaaaaaaaaaaaaaaaaaaaaaaaaaaaaaaaaaaaaaaaaaaaaaaaaaaaaaaaaaaaaaaaaaagaaagaaaaaaaaaaaaaaaaaaaaaaaaaaaaaaaaaaaaaaaaaaaagaaaaaaaaaaaaagaaaaaaaagaaaaaaaaaaaaaaaaaaaaaaaaaaaaagaaaaaaaaagaaaaaaaaaaaaaaaaaagaaaaaaaaaaa

SEQ ID NO: 14065 - DNA, 223 bp, Glycine max
  Clone ID: LIB3094-059-Q1-K1-B10
aaaaaaaaaaaaaaaaaaaaaaaaaaaaaaaaaaaaaaaaaaaaaaaaacaaaaaaaaaaaaaaaaaaaaaaaaaaaaaaaaaaaaaaaaaaaaaaaaaaaaaaaaaaaaaaaaaaaaaaaaaaaaaaaaaaaaaaaaaaaaaaaaaaaaaaaaaaaaaaaaaaaaaaaaaaaaaaaaaaaaaaaaacaaaaaaaaaaaaaaaaacaaaaaaaaaaaaaaaaa

SEQ ID NO: 14066 - DNA, 432 bp, Glycine max
  Clone ID: LIB3094-059-Q1-K1-C1
gcgttcgcccatgcgtcttttctatttcgcttactggctatagaccacaatacactcaccccgggcaaagaatttcttttcaaaattgtgatatggacggaagagcgagcagcagcgtgggcggagaagcatcgccagctccagcaccggtgccgataacgaatgcgaacgcgccgtcgtctttcttgagcaagacatacgagatggtagaggacccttcgacggactcgatagtgtcgtggagtccaacgaacaacagtttcgtggtttggaaccctcccgagttcgccagagatctcttgcccaaacacttcaagcacaacaacttcttcagctttcgtcgccaattaaacacctactgatttaggaaggtagatccagatcgctgggaaattgcaaatgagggatttttgaggggtcaaaaacacttgc

SEQ ID NO: 14067 - DNA, 406 bp, Glycine max
  Clone ID: LIB3094-059-Q1-K1-C3
aatcaccaaatttcaaccccggatccaggagtaacatgttgacaaaagtgtaccgagttgcattttgttcttgtaacctcctcaacccactggaggtcgtgatctgtaaattttgagtgaattatacaacaaattcttgaaaaagaaatgattttctcttctgagctgctgcttattgatcgatgaatccagctgcaattattttcgaagatggcaataaaatctcttctgcggtgttatctctttgactgaattccaaattttgtaagtataatagttggctatgaaagagactgtaccaagaaacatattgtgagagtcagagatcagttgttaagtatgagatgtgagaacatttgttgaatgtatatttgctaaattaaagtgcaaaaaatgattatagatt

SEQ ID NO: 14068 - DNA, 249 bp, Glycine max
  Clone ID: LIB3094-059-Q1-K1-C4
tgctagtctgagaatggattggcacaaggtcggtgctaatgaatggcttggttttcgcttggactatatgggagtgattttcctttgctttgccactatttttatgatctttctgccaagtgctattattaagccagaatatgttggtttgtctttgtcctatggcctggctctcagtagtctcttggcatttaccataagcatgacttgttctgttgagaacaaaatggtttcaattgagagaattaa

SEQ ID NO: 14069 - DNA, 310 bp, Glycine max
  unsure at all n locations
  Clone ID: LIB3094-059-Q1-K1-C7
ataaacacgaaagatgccaagattcaagggagaagaagagcaangccgnccaacgannccganncgccgaagaagaacgnacatggcgacgctggntacatactcgaagacgttcctcacttcaccgactacattccaaatcttcctacgtatccgaatccgcttcgatccaatcctgcttactcggttgttaagcagtatttcgtgcacatggactacactggtccttagaaagctgttgttcacaaggatagtccaagaggtatacattttcgacgtgcaaggcctcggcaaaaggtattctttaaat

SEQ ID NO: 14070 - DNA, 365 bp, Glycine max
  Clone ID: LIB3094-058-Q1-K1-G12
cccacgcgtccgattgaatatccatggttctcttagttcttttatccattaaaaaactctggattaatatttctaagaagaactatagtagttgaaagatatcttttgcaaatatgcatatttaactgaggttgttataacttgttccttccctcaaaaaaaaaaaaaaaagaaagaaaaagaacctattagcctccttcattggatatattacatctataaggagtaaattctaccggttcagagattagaaaaataatcaaaataaaagtcagcagtcttacatctctaattttggtgacagattcaaggggttaaatttgatccacaaggtgaatatgtgttacattggctatctgagttgt

SEQ ID NO: 14071 - DNA, 444 bp, Glycine max
  unsure at all n locations
  Clone ID: LIB3094-058-Q1-K1-E1
cgactatcaaaaaaatcagaaaaggttacgagatttatattaactgcattcagtataagttgaagacacataagggctctaaccatattccggctcgtgatcaacccatatatacctatagaaaataaataggcactcaaaacaagtgcatgctcgaatatcattgaccaactccttatcaatttttattcatttcgatatgaacaagaagaattcaacggatttgattgactaatattataagtctacaacaaaataaagtattcgcaataaaaaaaagattttaatacagaanatattcgttttcattcacatagaattcaaccaaaataaatgtgataaaatctaaaaaaaaaaaaaaattgaattttggttttggtttatattattagttctaaaaatttcttattggcgagctacgacaatngcacctatcaaagcaac

SEQ ID NO: 14072 - DNA, 127 bp, Glycine max
  Clone ID: LIB3094-058-Q1-K1-E10
ctcttctctcctcccaaatccctaacctcaaaaagtcatcaacacactaagcttcttcacaaataccagctccaatttctaccaaaacccaatatacaccttcacctgcacaaaaatatacaccact

SEQ ID NO: 14073 - DNA, 332 bp, Glycine max
  Clone ID: LIB3094-058-Q1-K1-E12
gcgtccgccaggcgtccgcttcctctgccgcttcctcctcgcggcctccccaagcacctctactccgccattttctacgtcgccctctcctacctctccttcggcttctcctccaacctccacttcctcgtccccatgttccttggctacgcctccatgctcctctatcgtcctcgatgcggcatcctcaccttcttcctcggatttggctacctcattggctgccacgtgtattacatgagcggtgatgcatggaatgaaggtggcatcgatgccactggggctttaatggttttgacgctcaatgttatctcctgtgcggttaattacaa

SEQ ID NO: 14074 - DNA, 237 bp, Glycine max
  Clone ID: LIB3094-058-Q1-K1-E3
caaaaaaatcaccaaatactactttatttatacttactgcatacattaaaaattggaaggctcatattgactctaaccacccatcaattcaatatcaacccatacctacttcaaaaaaaaaaaaaatcaactcaaaacaaatacatactcaaatatcatccactatctactaatcaatcttacttcatctccatatcaacatcataatcttacataatctcacctactaataatata

SEQ ID NO: 14075 - DNA, 450 bp, Glycine max
  Clone ID: LIB3094-058-Q1-K1-E5
cgaccgacgcgtgcgcgactatcggaaaaatcagaaaaggttacgagatttatattaactgcattcagtataagttgaggcacataatggctctaaccatattccggctcgtgatcaacccatatatacctatagaaaataaataggcactcaaaacaagtgcatgctcgaatatcattgaccaactccttatcaatttttattcatttcgatatgaacaagaagaattcaacggatttgattgactaatattataagtctacaacaaaataaagtattcgcaataaaaaaaagattttatacagaaatattcgttttcattcacatagaattcaaccaaaataaatgtgataaaatctaagaaaaaaaaaaaattgaattttggttttggtttatattattagttctaaaaatttcttaatggcgagctacgacaattgcacctatcaa

SEQ ID NO: 14076 - DNA, 443 bp, Glycine max
  Clone ID: LIB3094-058-Q1-K1-E6
ctgaaatcaatcatgctattggagctgaaggagttttaagtgtagaatgtaaggaagttgtttctgaatatggagaattgttatgggatctcttggtatctggggtaagttctctttgcccaaccttgaagttttctcttcacctcaatttgcagtctttgctctttcccttcatgtgttttcacccccccacccttaaatgagtttgatcttgatttgcaggtacgacccgatgatgtatgctcacaggttggcttatgtttcaaaaggactaaatcagagaggttaggatttgttcttttaaaatcgtaattagcatttttatatttcaatatttttgtatcccctttttatcatatttgattcagtacacttcaattgagtaatgatttgaagatgttggatgaatgcttaataattctggctgtgagcttaaagtcaag

SEQ ID NO: 14077 - DNA, 114 bp, Glycine max; identical to SEQ ID NO: 13348
  Clone ID: LIB3094-058-Q1-K1-E7

SEQ ID NO: 14078 - DNA, 349 bp, Glycine max
  Clone ID: LIB3094-058-Q1-K1-E8
cccacgcttacacaaagaaaaaaaatccttttacttcttttctctttcataatttaaatctttattaaaaaagcaaaatttaaaaatgatttacccatcaattcaattaaaatcctatccttcttcaaaaaaaaaaaaaaaaaataaaataaaaaaaaaaaaaaaaattacaatcattataaataatccaaacttacaaacacttacattcaacataatacctattatataaatacacctaaaatcaattcactatcacactatttacaactactatacttataaaaccctttcattacccaactaaatctcctaccaacacatcccctattatacatctaactaaata

SEQ ID NO: 14079 - DNA, 449 bp, Glycine max
  Clone ID: LIB3094-058-Q1-K1-E9
gaagttgcgagagtgaagaaatggcgcaagacttggcattggatttggaggagcttcgccggctgcacagcatcgccaaaagacctcgaaccctctctcttctctcctccgaaattcgtaacctcgaaaagttatcgtcagaggaagcttctgcgcagattccggcgccgatttcgaccggaactaaagtggcgccttcacctgcgctgaagtatgcggcactcgcgtcgttcagttgggaccaggatagtgacaaagttaagatatatgtgttaatggagggaatcgatgagaataaggttgaatccgagtttaagtcgatgtcattcgatgttaagttccatgatgttcaagggaagaactaccgatgtgcaatatcaaaattgcacaatgagatagtaccagagaaatgcaaggttgtggtcaagcctaaaagggcaatcatcaca

SEQ ID NO: 14080 - DNA, 461 bp, Glycine max
  Clone ID: LIB3094-058-Q1-K1-F11
ccggccgacgcacgcgtacggttggtcccaaaccttctagtacagctgatttataggactgaacaaggctcacctcgtcgggctatatataattgactccacgcccctcacatctttaagtgaaaacacacaaacaatcacttagtcacaaacctcataagatacctaaccttcttttcaccctattaaaagcgtataactaagtcactgaactttccgaaatataatacatcactgaaacttgcaaacagaaaactcataacacacaaactctcatagaaaaatcgttagcaaatctccacacttctcacgaatatcatggctgctgttgcttatacacaaatcaaatatgccttatttactgtacatcaaattcactatataaacctttctatctatacactaactttcatattttctgcttcaaactcaaattattattacttacaatattattatta

SEQ ID NO: 14081 - DNA, 443 bp, Glycine max
  Clone ID: LIB3094-058-Q1-K1-F12
caaccatggccgactcatctcaagaccttgtccaacttctcgatagtgctttggatgattgtcagtccttcaacctcaatcctccccctccaagtggggaagcaactgcgaatagcaagaaggagagtccttctttgccgtcgggggttcaaggattgggcatgggtttacccgatttgagaacgaagaaaaaggggaaacagaaggcttccaaagacagccacgtgtcggaggcgctcaacaagctcagggagcagaccaaagaggctgtgaaggggctggagtctatatccccacccactgccgatgatttaggtaaggatgccttgatggaagattgggtcaaacaatttgagcagcttgctggctctcaggacatggaatctattgtggagaccatgatgcatcaacttctgtccaaggagattcttcatgaaccaatg

SEQ ID NO: 14082 - DNA, 204 bp, Glycine max
  Clone ID: LIB3094-058-Q1-K1-F4
acctcgatccctctctcttctctcctccgaaaatcgtaacctcgaaaagttatcgtcagaggaagctactgcgcagattccagcgccgatttctaccggaactaaaatggcgccttcacctgcgctgaaatatgcggcactcgcgtccttcagttgggaccaccatagtgacaaagttaagatatatgtgttattggagggaat

SEQ ID NO: 14083 - DNA, 420 bp, Glycine max
  Clone ID: LIB3094-058-Q1-K1-F6
gagtgaaaaatggcgcatttttgcattggatttgaggacttggcgcactcactagcatcccaaagacctcaaccctctctcttctctcctccgaaattctaacctcgaaaagttatcgtcagaggaagcttctgcgcacattccggcgccgatttcgaccggaactaaagtgcgccttcacctgcgctgaagtatcgcactcgcgtcgttcattggaccatgatagtgacaaagttaagatatatgtgttaatggagggaatcgatgaaaataaggttgaatccgagtttaagtcgatgtcattcgatgttaagttccatgatgttcaagggaagaactaccgatgtgcaatatcaaaattgcacaatgagatagttccagagaaatgcatagttgtggtcaagcctaaaagggcaatca

SEQ ID NO: 14084 - DNA, 449 bp, Glycine max
  Clone ID: LIB3094-058-Q1-K1-F8
gaagttgcgagagtgaagaaatggcgcaagacttggcattggatttggaggagcttcgccgcctccacagcatcgccaaaagacctcgaaccctctctcttctctcctccgaaattcgtaacctcgaaaagttatcgtcagaggaagcttctgcgcagattccggcgccgatttcgaccggaactaaagtggcgccttcacctgcgctgaagtatgcggcactcgcgtcgttcagttgggaccaggatagtgacaaagttaagatatatgtgttaatggagggaatcgatgagaataaggttgaatccgagtttaagtcgatgtcattcgatgttaagttccatgatgttcaagggaagaactaccgatgtgcaatatcaaaattgcacaatgagatagtaccagagaaatgcaaggttgtggtcaagcctaaaagggcaatcatcaca

SEQ ID NO: 14085 - DNA, 444 bp, Glycine max; identical to SEQ ID NO: 13553
  Clone ID: LIB3094-058-Q1-K1-G1

SEQ ID NO: 14086 - DNA, 383 bp, Glycine max
  Clone ID: LIB3094-058-Q1-K1-G11
gccacgcgtccgcccactcgaccaaattaattgggtactgcttcttccatatataccgggtgttttatataggcatcacggccctcttcagcactctaggccaaccctcatataccagcgaatgtacaatttggccgaaactacttgcccacatggtcatttgatcacatcaaatacttcaatggatgttctgacattcaccttcatcacgacaaatacactggtactttcttccagtccaaatggtcatacttgcatagtcacttcatcatgtacataaatatttttcctgaagactcacatggcacagttactgttatctatctatcttcctaaaatgctcaacacgactagatatactttgaattcatggtgaacaataa

SEQ ID NO: 14087 - DNA, 444 bp, Glycine max
  Clone ID: LIB3094-058-Q1-K1-D8
cccacgcgtccgattgaatatccatggttctcttagttcttttatccattaaaaaactctagattaatatttctaagaagaactatagtagttgaaagatatcttttgcaaatatgcatatttaactgaggttgttataacttgttccttccctcaaaaaaaaaaaaaaaagaaagaaaaagaacctattagcctccttcattggatatattacatctataaggagtaaattctaccggttcagagaatagaaaaataatcaaaataaaagtcagcagtctcacatctctaattttggtgacagattcaaggggttaaatttgatccagaaggtgaatatgtgagacaatggctacctgagttggcaagaatgccaactgagtggatccatcatccttgggatgcaccgcttactgttcttagagcagcaggagttgagctggg

SEQ ID NO: 14088 - DNA, 453 bp, Glycine max
  Clone ID: LIB3094-058-Q1-K1-B3
tttgaatacattccttgtagtttatactgaaagattggtttgaagatggcgttactgatcctaggcctttccctcatgctccttttggtctcctctgaggtggcatccacgaatacaaaagaggaggcaaatggagtggatgatgccaaatatcccggtggaagctatggagggggttacccaggtcatggcggtggcggttatcctggccatggcggtggcggttatcctggccatggcggtggtggtggctatcctggtcatggtggtggccaccctggtcatggtggcggctaccctggccgtggtggtggatactgtaggcatggctgttgcggtggccggacatacaacggaggttgcagaaggtgctgctataacgctggcgaagctgttgctgcacaaactcaagataagactcacgattaagacgatgcagttctacttaattag

SEQ ID NO: 14089 - DNA, 447 bp, Glycine max
  Clone ID: LIB3094-058-Q1-K1-B4
tttgaatacattccttgtagtttatactgaaagatgggtttgaagatggcgttactgatccgaggcctttccctcatgctcctttgggtctcctctgaggtggcatccacgaatacaaaagaggaggcaaatggagtggatgatgccaaatatcccggtggaagctatggagggggttacccaggtcatggcggtggcggttatcctggccatggcggtggcggttatcctggccatggcggtggtggtggctatcctggtcatggtggtggccaccctggtcatggtggcggctaccctggccgtggtggtggatactgtaggcatggctgttgcggtggccggacatacaacggaagttgcagaaggtgctgctataacgctggcgaagctgttgctgcacaaactcaagataagactcacgattaagacgatgcaattctactt

SEQ ID NO: 14090 - DNA, 434 bp, Glycine max
  unsure at all n locations
  Clone ID: LIB3094-058-Q1-K1-B5
ggcggcgctgtggcggacgcgccggcggtggttgaggagaagacggagttcgacgtggtgatcgaggaggtgccgagcaacgctcgaatcgcggtgattaaggcggtgagggcattgacgaacctagcgctgaaggaggcgaaggagttgatcgaagggttgccgaagaagttcaaggaagggatttcaaaggacgaagctgaagatgcgaagaagcaactcgaagaagctggtgccaaggttaccattgcttaaacactgtttagctgcagcatatatgttctgcttcttcttttgttggttgtagttgagttcaccagtacactgtaatttcatttccattntgtctggatttcaatcttttatttgtaatgagggaaatatgagttcttattnttatattatnntttttaatgcgtatgaaagtgttgttg

SEQ ID NO: 14091 - DNA, 417 bp, Glycine max
  Clone ID: LIB3094-058-Q1-K1-B6
ggcggcgctgtggcggacgcgccggcggagtacgaggagaagacggagttcgacgtggtggtcgacgttgtgccgagcaaggctcgaatcgcggtgattaaggcggtgagggcattgacgaacctagcgctgaaggaggcgaaggagttgatcgaagggttgccgaagaagttcaaggaatggatttcaaaggacgaagctgaagatgcgaagaagcaactcgaagaagctggtgccaaggttaccattgcttaaacactgtttagctgcagcatatatgttctgcttcttcttatgttggctgtagttgagttcaccagtacactgtaatttcatttccattttgtctggatttcaatcttttatttgcaatgacgaaatatgagttcttatatttatattatatttattaatgcg

SEQ ID NO: 14092 - DNA, 342 bp, Glycine max
  Clone ID: LIB3094-058-Q1-K1-B7
tcgttgaaacattcctgagtttatactgaagttggtttgagatgcgttctgatcctggccttttcctcatgctcttgggtctcctctgggtggcatccacgaatcaaaagaagaggcaaatggagtggatgatgccaaatatcccggggaagctatggagggggttacccaggtcatggcggtggcggctatcctggccatggccgtagcggttatcctggccatggcaatggtggtggctatcctggtcatggtggtggccaccctggtcatggtggcagctacccttggcgtggtggtggatactgtaagcatggctgttgcaatggcccgacatacaac

SEQ ID NO: 14093 - DNA, 404 bp, Glycine max
  Clone ID: LIB3094-058-Q1-K1-C1
tttgaatacattccttgtagtttatactgaaagtctggtttgaagatggcgttactgatcgtagggcttttcctcatgctccttttggtctactctgaggtggcatccacgaatacaaaatatgaggcaaatggagtggatgatgccaaatatcccggtggaagctatggagggggttacccaggtcatggcggtggcggatatactgaccatggccgaagcggttatcctggccatggcaagggtggtggctatcctggtcatggaggctgacacactggtcatggaggatgctaccctggccttggaggtggatactgtaagcatttctgttgcaatgaccggacatacatcgcaagttgcagaaagtgctgctatcacactaagcggaactgttgctgcac

SEQ ID NO: 14094 - DNA, 371 bp, Glycine max
  Clone ID: LIB3094-058-Q1-K1-C3
cagaacagggactcactctcttcgcagcggttctctcggtggctttcatcttctcgggttgtcaagatgtacacatcgaggaagaaaattcacaaggataaggatgctgagccaactgaatttgaggaatcagttggacaggcattgtttgatctagaaaataccaacaatgagctgaaaagtgatctgaaagatttatacataaactcagctgtccaaattgatgtttctggcaaccgaaaggctgtggttatccatgtcccctacagactaaggaaaggattccggaagattcatgtcaggcttgtgagagaacttgagaaaaagtttagtggaaaagatgtaatcttgattgccacccggaggatagt

SEQ ID NO: 14095 - DNA, 268 bp, Glycine max
  Clone ID: LIB3094-058-Q1-K1-C4
ataaataatcacactcagcattcttgatctataaaatccaacatatactaaaacgatctaacattatcataactcactaccaaatgatattttccaacctaaagctatatatccatgtccactacagactactaaagattacagaacaccaatcaccatttgagaaacttaaaaaaatttaatataaagattaatcataattccaccagatgatactaggtcaccaaataaaagtctactatcatctcccacaacctaacactcacta

SEQ ID NO: 14096 - DNA, 337 bp, Glycine max
  Clone ID: LIB3094-058-Q1-K1-C7
acagggactcactctattcgcatcgatactttcggtggctatcatatcctacaaatacctgggatgttctacatataggcatattgtacacatatatacgcactctgttcaaagctaatttgccgaatcactgatacatgcattgctaaatctataacatgccatcaatgcacctaccagacatttcacacatatatacataaactcacaccttcaaaatgatgtttacgctaacctaaaagctaaggttatccatattccctacatactaacgaaatgatacacgcacattcatgtcccgcatgtgagataacttgataaaaagtttagtacaaaa

SEQ ID NO: 14097 - DNA, 450 bp, Glycine max
  Clone ID: LIB3094-058-Q1-K1-D1
aaacacccttgtcgaccacaccaaaattaaaaacataaaaaagcataaaagcacaaaaagacataaaaaagggaaaataaaacattttgaagtcatatttgcacacttgattaaaggctgtcgtcccttgtgacggatgcgtggggtgctaataccttccctgtgcgtaaaaacaactcccgaactattcacacttaaagttcgtagaccacaccttttcaattttcccgacgctttcctcaaataaaagttggtggcgactccgcgcattttcctttcatggaagacgcacttgtgagtcccgcatcgcccttccgtcaaagggtaagttgcgacagtactttgccttccgccgaagggtaggttccttaattgaattaactaataacaaaagtgaaactaaggctaaaataaactcacaaatcaagctttgtccataaaaatcactta

SEQ ID NO: 14098 - DNA, 444 bp, Glycine max
  Clone ID: LIB3094-058-Q1-K1-D12
gttgccgggctctaccgtggtttcaacatctcatgtgttggaatcatcgtgtatcgtggtctgtactttggattgtatgattctgttaaaccagttgtcctcacagggtcattgcaggatagcttttttgccagctttgcccttggatggctcatcaccaatggtgcaggtcttgcatcatacccaatagacactgttagaagaagaatgatgatgacctctggtgaagctgtcaagtacaagagctccttggatgcattcacacagatcctcaagaatgagggtgccaagtccttgttcaagggtgccggtgccaacatcctccgtgccgttgccggtgctggtgtgcttgctggttatgacaagttgcaggttcttgtgttcggcaagaagtacggctctggtggggcttaagttctaatgctgagtcagtactattatttg

SEQ ID NO: 14099 - DNA, 103 bp, Glycine max
  Clone ID: LIB3094-058-Q1-K1-D2
ctcaatagttgcttcagtcatgtctttcacctattccataattggtctcgttcttggagttaccgagaattgcagaaacgggaactttcaagggtagcctcac

SEQ ID NO: 14100 - DNA, 438 bp, Glycine max
  Clone ID: LIB3094-058-Q1-K1-D4
gaccgacgcatccgttcgaccactccttccatcgaatatccacggcttaactcaaatctcgtatccatcaaaaaacgctgagttaatattactaagaagaggtctaataaatgaaagatatcttttgcacatatgcatatctaactcaggacgctataacttgttccttccctcaaaaaaaaaaaaaaaagaaagaaacataacctatcagcctccttcattggatatattacatctataaggagaaaattctaccggatcaaataatagcactataatcaaaataaacgtcagcagtctcacatctctaatttaggtgacagattcaatgagtcaaatttgatccagaaagtgaatctgttagacaatggctacctgagttggcaagaatgccaactgagtgtatccatcatccttgggatgcaccgattactgcac

SEQ ID NO: 14101 - DNA, 446 bp, Glycine max
  Clone ID: LIB3094-058-Q1-K1-D5
aaaaaataacagaaaaaaaagaaaaagataattctgatttacttgttcctgaaaacattttatccgctagacgtcgtagagaattgagaattctaatttgtttaaatccaaataatataaatagtatgcatagaaacacaatattttataatccaaataaagtccaaaatggttttccacttttgactaaaaaaagaaaatattttgagaaagataaaaaaaaactaatgaatttcaaaatttttctttggccaaaatatcgattagaagatttagcttgtataaatcgatattggtttaatacccataatggaagccgtttcagtatagtaaggatacatatgtatccgcgaatgaaaattcgttaatccaaatttgtcttctatttaccatatttatatggtaaatagaagacacattaatatctatatctatctatatagata

SEQ ID NO: 14102 - DNA, 443 bp, Glycine max
  Clone ID: LIB3094-058-Q1-K1-D7
cccacgcgtccgagaaggcctgggcttagttgataagcataactgggtgaggaagaaagagggagagtgaagaagatggcgtcgagcggagcggtaccgttttggagggcggcggggatgacgtacataacatactcaaacatatgcgcgaatctgctcaggaattgcctcaaggaaccctacaaggccgaatccctctctcgtgagaagctccattttgttctctccaaatgggtcgacgccaagcctgaaaaacctactattcgttcagacaccccagagcagtgatctggaatagttggaagctataaatgcataaatctttgagatctggaagttcattgtcattttgaacctttctgtgatgtttaattcctttgtttttttctctccatgaaatggaacatgcactggattttgatttgcacggttaatcttgtaat

SEQ ID NO: 14103 - DNA, 426 bp, Glycine max
  Clone ID: LIB3094-058-Q1-K1-B12
tttgaatacattccttgtagtttatactgatttatgggtttgaagatggcgttactgatcctaggcctttccctcatgctccttttggtctcctctgaggtggcatccacgaatacaaaagaggaggcaaatggagtggatgatgccaaatatcccggtggaagctatggagggggttacccaggtcatggcggtggcggttatcctggccatggcggtggcggttatcctggccatggcggtggtggtggctatcctggtcatggtggtggccaccctggtcatggtggcggctaccctggccgtggtggtggatactgtaggcatggctgttgcggtggccggacatacaacggaggttgcaaaaggtgctgctataacgctggcgaagcttgtgctgcacaaactcaagataagactcacgat

SEQ ID NO: 14104 - DNA, 127 bp, Glycine max
  Clone ID: LIB3094-056-Q1-K1-F11
attcattcctatagctatagctacaacatatcatactactactgttgttgatgctgctacggctgtagctgctaccacatatcaatcactagcttaccataatgggtatggatagccatgaccccac

SEQ ID NO: 14105 - DNA, 406 bp, Glycine max
  unsure at all n locations
  Clone ID: LIB3094-056-Q1-K1-F12
cccacgcgtccgcccagcgtccgaattcctcaaccacacttgccatatcaaagaaaagagggtcaacatcagatcaaagatacaacatggaggcacttcaatcatgggtttcaaagcacaagctcgccagcattggggcactctgggcctctggaattggagcaacacttgtggcttattcatgcaaaaagtctccaatgaagccaagtctcaggcttatccatgctaggatgcatgctcaggctctaactntagcagtgctatccggtgcagctgcttatcattattatgagaaacgtgatgttcagccaaaaccagaggcagattatattattcctgctcccaatgtcacccagatggttgaatatgaacntcaaatgtccttctaaaaaataaaaataaaact

SEQ ID NO: 14106 - DNA, 408 bp, Glycine max
  Clone ID: LIB3094-056-Q1-K1-F2
ggccgaccgacgcgttctatataatgtttctccaccaatttttatcgactattccagataaattgcctaatacaaacattgaagctgcattcaaggacaatctctctaatcataaggctgcatgcatcaagagaaatgctaataatatcacctccttgtcctaacaaaattcttaatattttccttatacaacgatattaccaaatgtagattatgtgctagaagatctcttggatagcctcaaaaagggcaataatggacagtcatgtattgcaagttctatccttaagagtatgaacatttccaaaagtgtagattctgatataataatagatgaggcaagtcaagcatatggaagtgttaatgttgtatacgaaagtccctcattggaggctgttattcaaacaa

SEQ ID NO: 14107 - DNA, 217 bp, Glycine max
  Clone ID: LIB3094-056-Q1-K1-F9
tcccactcgtccgcccacgcgttctcaaaattttcaacaccaatctcacccatttcaaaaaagggccgttattattactattcttaaaatggccactctttttctttaccaattctttctcaaactcttgctcctaatttaagtctttcaactttcctttgctgctatgacactcaaccagcttgttcatgaccattcacatttacttcattaccac

SEQ ID NO: 14108 - DNA, 352 bp, Glycine max
  unsure at all n locations
  Clone ID: LIB3094-056-Q1-K1-G3
cagaacagggactcactctcttcgcagcggctctctcggtggctttcatcttctcgggttgtcaagatgtacacatcgaggaagaaaattcacaaggataaggatgctgagccaactgaatttgaggaatcagttggacaggcattgtttgatctagaaaataccaacaatgagctgaaaagtgatctgaaagatttatacataaactcagctgtccaaattgatgtttctggcaaccgaaaggctgtggttatccatgtcccctacagactaaggaaaggattccggaagattcatgtcaggcttgtgagagaactngagaaaaagtttagtggaaaagatgtaatcttga

SEQ ID NO: 14109 - DNA, 398 bp, Glycine max
  Clone ID: LIB3094-056-Q1-K1-H7
cgcacatcctctataaggagggaaactgagctcagtaagaagcctcctcgccaatctttagatggatacaagcacgtggttgatgtggaatactgtcccccagttccttctgatggccctaaatttcctccaaaagcagtaaaagcaaaagaggcagcacaaaatgcgcccaatacacagaatactgtggaatatcatgaaattgtagaagatgagatgattcgaggattacagcagttgggatggaaaaaagttgatgtcagctttcactcagcattctggcctttctttgctcataacaacattcatgtgaaaaatgaatggtttcacaatgctggtgtaggagttattgctcatgtggccgaaagcttaagacagctagaagcatcatcattttt

SEQ ID NO: 14110 - DNA, 389 bp, Glycine max
  unsure at all n locations
  Clone ID: LIB3094-056-Q1-K1-H9
aattgtttatgcttacagatcaggtgaggtgattcggctaccaaaaggggtttcaattccagtgacactaanagttctggagtttgagcttttccacttctgtccaatccaagaaatagctccaagtatatcatttgcagcaatagggctactggatatgttcaacactggaggagcagtggagcaggttgagattcataaccgagcagcaacgaaaacaatagctcttagtgtaaggggaagaggcagatttggagtttactcctcccagagaccactgaagtgtgtggtaggtggcgctgaaaccgacttcaactatgactcagagaccgggttgacaaccttctccattccagtttctccagaggagatgtacagatggtcaatag

SEQ ID NO: 14111 - DNA, 294 bp, Glycine max
  Clone ID: LIB3094-058-Q1-K1-A1
cttgatgatcccaacactttcggtaacaggattcacaggatgctgaagcttggactgagcattgatgaagatgctggtgaagcagatgctgacatgcttcttttgaagacccttatgcaaatgctgaaggtagcaagattgaagaaggtgattaaatctgacttaattgcctggtacgtttttagaaacaatgattggagaaacagtctttttactatggtttatggtttttgaattttcgaaattttggaacgttggctagttaggtgccgtatgtagtagtttctttatggt

SEQ ID NO: 14112 - DNA, 433 bp, Glycine max
  Clone ID: LIB3094-058-Q1-K1-A10
acgcttcatgctattgcttcctatctctttttcatgaccccttcatggagtccactttgcggacgaatctactagtcttcaacaacaccctccaaccagagttaatgaggagtgtgcatgtgtaccgccgaggggatggagagaaaagggaagttgagagagagtttgtgttttcagagagcggctcctatggggaaatgcaggctaccccaattcctggattggtaaaatctcgtgtttctgaagtgtgtgaagggcaccgaaatggagtgtggctttgtgtctttgcgttccatgccgatcacactcctcaattttgccgcattccaccggtttttgtggtcacaagaaacccaaagcttaagatgattccaaacttgcttgatgatctccatgtgatatacaagttggaccggaaggaggaagacagtga

SEQ ID NO: 14113 - DNA, 447 bp, Glycine max
  unsure at all n locations
  Clone ID: LIB3094-058-Q1-K1-A12
agtggattttgctttgtttcttcgaaactatgcataaaacagcgtaacagtatccatccatggcttcacctgcaagccaacccaccaaacccttgtcattcactcccacctatctgcaactctaaacccaatatacccacgggccacggtcggtgacgctataatccaaattacggtgtcgttttcagttcgtttaagcatcacccttcccaattgtattcactactaccagtatcttaatctaatccccaaccacacctaaaccaaaccatcagcataatggggaactgtttggggaagtcggagaaattaacggcggagattgttccacgcgacggggccaaagtgtatcccaccgtccgcttgcacggctcgcccaagagcattctcgccgnctacatccgtttcgcgcttcttcacaagtcccgttcgttggacttcgtggaa

SEQ ID NO: 14114 - DNA, 295 bp, Glycine max
  Clone ID: LIB3094-058-Q1-K1-A2
cttgatgatcccaacactttcggtaacaggattcttaggatgctgaagcttggactgagcgggggtgaagatgctggtgaagcagatgctgacatgcctcctcttgaggacgctgatgcagatgctgagggtagcaagatggaagaagttgattaaatctgacttaattgcctgttacgtttttagaaacaatgattggagaaacagtctttttactatgttttatgttttttgaattttcgaaattttggaacgttggctagttaggtgccgtatgtagtagtttctttatggt

SEQ ID NO: 14115 - DNA, 454 bp, Glycine max
  Clone ID: LIB3094-058-Q1-K1-A5
gtttggtgtaactgcatgctctttgccattgttgatggagtttgcctttagatttttgagttgcccatatagttatacaatttcattttagggtcttgttgactagtgttcctagactattggttaaggaactaaaaggagaagtttttaatatgtaaatcataggaaagtataaaaaaaaatcatgaagaacgcaattttatgccttccaataaaaaaccttagttccttaacccgtgtcctcgggacacttgttagcatttgccttcattttatatgtatcattagattattataattgaaaaaaatagggcctactttttgacgtcattttattcattttattaggggtcatcaaatactttcacttggtggcagtgtttgtcaaaattgtacacaatttgtattttgttcctccaacaaattttcttattctttgtaccaaaagagaaga

SEQ ID NO: 14116 - DNA, 444 bp, Glycine max
  Clone ID: LIB3094-058-Q1-K1-A6
gcgtccggtttggtgtaactgcatgctctttgccatataagatggagtttgcctttagattttggagggacccatataggtatacaatgggattttagggtcttgttgactagtgttcctagactattggttaaggaactaaaaggagaagtttttaatatgtaaatcatatgaaagtataaaaaaaaatcatgaagaacgcaattttatgccttccaataaaaaaccttagttccttaacccgtgacctcgggacacttgttagcatttgccttcattttatatgtattattatattattataattgaaaaaaatagggcctactttttgacgacattatattcattttattaggtgtcattaaatactttcacttggtggctatgtttgacaaaattgtacacaatttgtattttgttccttcaacaaattaacctattctt

SEQ ID NO: 14117 - DNA, 265 bp, Glycine max
  Clone ID: LIB3094-058-Q1-K1-A9
caagattgcttgacatgttcagatgaaaattattttccacataatttgaggttacaataggatgatctagtgatcttctctgtgctcgaagacctgcttgaaatttctcagacacactctcaaaaagactttctcaacatagaatgaacccttgttattgctattaagctcttgtgtaatagtcttcctccagttaatccaatacctatcacaattgccaggctttaacaaattatatttggctttactaattcttttataaatt

SEQ ID NO: 14118 - DNA, 262 bp, Glycine max
  Clone ID: LIB3094-058-Q1-K1-B1
atcgctgcgattaaggccgtgagggcattgacgaacctagcgctgaaggaggcgaacgagttgatcgaagggttgccgaagaagttcaaggaagggatttcaaaggacgaagctgaagatgcgaagaagcaactcgaagaagctggtgccaaggttaccattgcttaaacactgtttagctgcagcatatatgtactgcttcttctttcgttggctgtagttgagttcaccagtacacttgtaattgcatttccattttgtc

SEQ ID NO: 14119 - DNA, 188 bp, Glycine max
  Clone ID: LIB3094-058-Q1-K1-B10
cccacgcgtccgatcattggttattatttgttccggggaaaacatgatcaacttgtaacatgtagtctatgaggagactactttattggtaatgtgtatgtcggattaagtggattcgagtgaaatgttgatcaagggagtcatttcgacatattttctggaatataactcttggattataagttttt

SEQ ID NO: 14120 - DNA, 351 bp, Glycine max
  Clone ID: LIB3094-058-Q1-K1-B11
agaatagctagtactagctcttgacccttcttcccacctttttctggtccctcctagaaatggcttccaattccattcttcttctttgtatctttcttgtggttgccacaaaggttttttcctatgatgaagatctcaagacagtggttcctgcacctgctccaccagtgaaggcaccaactcctgcctctccagtgaaatcaccatcttaccctccagggtcagtgaccacaccaactgttaaggtgccccctcctcctcagtccccagtagtgaagccaccaactccaacaccagcccctgttaaggtaccccctccacagtccccagtagtgaagccaccaacaccaa

SEQ ID NO: 14121 - DNA, 207 bp, Glycine max
  Clone ID: LIB3094-056-Q1-K1-F1
ttaacctcctacaatcaaaaaactgttcaagtcttttcattgaatttaccaaaagttcaccggctccacatcatcaccaatacacctctaaccctctctcttctctcctacaaaattcttaacctcaaaattttatcgtaagagaaatcttcttctcatattccatctcccattttgaccgtaactaaattggcacctttaccttcc

SEQ ID NO: 14122 - DNA, 446 bp, Glycine max
  Clone ID: LIB3094-056-Q1-K1-C10
cccacgcgtccggactgcccaagatgtatcgacaatgttacggtgcgggcaaaaaaccatcgtctttctgatcaacaatggtggatacaccatcgaggttgaaattcatgatgggccgtacaatgtgattaagaactggaattacactgggttgattgatgcaatccacaatggtgaagggaaatgctggactgccaaggtgttctgtgaagaggagctagttgaagcaattgccacagccacaggacccaagaaagactccttatgcttcattgaggtgattgttcataaggatgacaccagtaaagaattgcttgaatggggctcaagggtttctgctgccaatagccgtcctcccaatcctcagtaatcttcagaatttatcctatgactaaattgctgcagttgccctttagctctatgaaagtgaaaatcatttgagatga

SEQ ID NO: 14123 - DNA, 439 bp, Glycine max
  unsure at all n locations
  Clone ID: LIB3094-056-Q1-K1-C11
gggtcgaccacgcgtgcgcccacgcgtccggactgcccaagatgtatctttcttgtttctgngcgggcaaaaaaccatcgtctttcgtatcatctattttccatacaccatcntngttgaaattcatgatgtgccgtacaatgttattaaaaactggaattacactggttttattgatgcaatccacatttgttaatgtaaatgctttactgccaaggtgttctgttaaaaggaactagttgaatcaatttccacatccacagaacccaataaagactccttatacttcatttaggtgattgttcataatgatgacaccagttaataattgcttgaatggggctcaagggtttcttcttccaatatccgtcctcccaatccttagtaatcttcataattatttctatgactaaatttcttcagttgccctttacctcta

SEQ ID NO: 14124 - DNA, 441 bp, Glycine max
  Clone ID: LIB3094-056-Q1-K1-C12
cggacgcgtgggtttcagaggcaccgaatgttcttacagttgcattaaagagatttcagtctgggaaatttgggaagctcaacaagcctattcaatttcctgaaatacttaacttggcacctttcatgagcgggactagtgataaatcacccatatacagattgtatggggtagttgttcacttagatatcatgaatgctgccttttcgggtcactatgtgtgctatgtgaagaatatccaaaacaagtggttcaaggttgatgacagtgtggtgacagctgttgaattggatagagtcttgacaaaaggagcatatatgcttttctatgcaaggtgctcgccaagggccccaagattaattaggaacagaatactgtccccagattcaaaacgtaaagtcagtggaaagactcttacaacgaaagcaagatctatatcta

SEQ ID NO: 14125 - DNA, 355 bp, Glycine max
  Clone ID: LIB3094-056-Q1-K1-C3
gatttaccgagccgacccactcgtcctaaaactaattatatctataccttttccctttctccaccaaaaacctaacatttgcaatatcgaatcttcactcttccaacattcaaaacccttatccctacctacaccacactcaatcgaaaatcctcattctcttcttatacacccaacataaaactctgatctactcgtacgcgactcttttaacagatcacatttctttatacaccccatacaacttaaactttaacttcatagccttacaatgccttcataatcacccttccaccaacaacaagcttacctacaattcctactcacacacattcaattaccctactgacaattc

SEQ ID NO: 14126 - DNA, 168 bp, Glycine max
  unsure at all n locations
  Clone ID: LIB3094-056-Q1-K1-C4
gcttaaaaaaaaaaaagccttctactttttttcctcttcatgatgngaatcttgaaggaaaaaggttcaaattttattattttacccatcaattcaattataatcctttccttcttcataaaaaaataaatatatataaaaataattaaaattaaaaattttcttcca

SEQ ID NO: 14127 - DNA, 450 bp, Glycine max
  Clone ID: LIB3094-056-Q1-K1-C9
cccacgcgtccggttgttttcgttcctctgaagtctggagtggtggagcttggttcgtttgaaatggtgcctgaagagcagggtgttgtggaaatggtcaggacagcatttggggaatccagtcctggacaggcaaaggtgtttccaaagatttttgggcatgagttaagcctgggggatacaaaatctcagtctataactattagtttctccccaaaggtggaagatgatccgggtttcacttcagactcctatgaagttcaagcactaggggtgaaccatgcttatggaaattcttccaatgggactttaggtgacggtaatgaaggaacattgtttcctcaattgaatcaaatgatggctgggaattttaatgctcaagcaagggttccttgtctagatctcggtaatgaagactcatcatcaattcatgcagatgagcggaagccc

SEQ ID NO: 14128 - DNA, 114 bp, Glycine max; identical to SEQ ID NO: 13348
  Clone ID: LIB3094-056-Q1-K1-D1

SEQ ID NO: 14129 - DNA, 217 bp, Glycine max
  Clone ID: LIB3094-056-Q1-K1-D10
tactttctcattaaagagatttcactgggtcaaatgtgttattctcaacatacctattcaatttccttaaatacttaacttctcaccttttcatcatctctactatatataaatcacccatattcatattctatatttctattcttcacttttatatcataaaaacatccttttctaattcactatttatactattttaacaatatccaaaacaaat

SEQ ID NO: 14130 - DNA, 102 bp, Glycine max
  Clone ID: LIB3094-056-Q1-K1-D2
ccgacccacacgtccaaaaaaaaaaaaaaaccccaaacttctaaaactcataacacaaaacaaaccacaaagaactaagcaaaaaaaacaataccccccccc

SEQ ID NO: 14131 - DNA, 339 bp, Glycine max
  Clone ID: LIB3094-056-Q1-K1-D3
ggaactgcgggtgtgtatagcggaagcgtgactccaccaagaaccgggcggagcccagatgtctctataactcttccaacagacgaaatacaataccctaccgacaccacactcaatcgaaactcttcatgctattgtcatagatggggcaggagcatatgatctacgcgttcgtgtcggggagtacagtgattcttgcggaggacaccgaattcagcggaatcttgaacttcatcggctaccagtgccgtgacaagctccctgcctccgacaacatggtcagctacgattgcgacgcacgacgcctcaattacctagtcgacgatggctacacatatt

SEQ ID NO: 14132 - DNA, 446 bp, Glycine max
  Clone ID: LIB3094-056-Q1-K1-D8
aaactgaagaaggtgaagagaccactgaaggcactggattatctgcttggcgaatgtaaggacaggccgcctcaagaatttcaagaattttgcccgaaatttaagaacgattatcaacaaaattgcccgaatgccgcgtatgaagcagtttgcccgttactgaagcaagcgattcaaatatgttgccagaaacacgcataactctgcaagccacggtgggcgtttggatgtgcttttagttaccactttctctcttggatttgcttacgtattgctccttttgtattagtggctcctgtcccaccttgcttttggacttgagctttttatatttctgattgttcaatgtctgttgtgtgtgctctccaacctgtggtgactttccggtttattcctgtggctggttcttgtaagcctttcgaacctcagtattaaataaaagatca

SEQ ID NO: 14133 - DNA, 208 bp, Glycine max
  Clone ID: LIB3094-056-Q1-K1-D9
aagacgcataagtttcacagacaactaatgtctctacattttctttaaagagaactcaaggggagaacgtggcaaatctcaacaaacctattccatttccttaaaaactaatactaacacctttcctgaactgcactattgataaatcacccactatacacaatatatggcgtagcatgttcactttccatatcactctctgcttcct

SEQ ID NO: 14134 - DNA, 348 bp, Glycine max
  Clone ID: LIB3094-056-Q1-K1-E1
aaacttttatatctataacttttcatgtctccaccaaaaacctaactgaggccatatgggtctatcacttttccaacaatccaaatccaaaaccctacctacaccacactcaatctaaattcttcattctcttctcatatatagctcataagcctattatctacccgatctcgacccgtacaacagtgattctctcacattacaccaaattcaccgtactacttaactccatctcctaccagtaccttcacaaactccctatcaccaacaacaatttcacctacaatttctactcacactccttcaattacctcttctacaatttctacacataatttcatgttgcat

SEQ ID NO: 14135 - DNA, 289 bp, Glycine max
  Clone ID: LIB3094-056-Q1-K1-E11
gtccaaaaaaaaaaaaaaaaaaaaatttttaaaattttttaaaaaaaaaaaaaaaaaagggaaaaaagaaatattttaaaaaaaaataataaattaaatgggccgcccctttaaaaaaaccaaacttaactaacccttcattccaacgaaaaacctttttaatagttcaaccaaatttaaattaactgcccgtcttttaaaaacttcttaactggaaaaaccctgccttaaccaaactaaatccctttgaaaaaaatccccttttccccagttgccttaataccaaaaa

SEQ ID NO: 14136 - DNA, 389 bp, Glycine max
  Clone ID: LIB3094-056-Q1-K1-E2
aaataatgtttctccaccaatttttatcgttgaaccagataaattgtctaatagaaacatgggagctgcattcaaggacaatcttgggaatcgtaaggctgcatgcagcaagagaaatgctaagaatatcacctcctgtcccaacaaaattcttaatattttccttatacaacgagataccaaagggagattatgtgctagaagagctcgcggatagcctcaaaaagggcaataatggacagtcatgtagtgcaagttctatccttaggagtatgaacatttccaaaagtgtagattctgatataataatagatgaggcaagtcaagcagatggaagtgttaatgttgtagacgatagtccctcattggaggctgctatcaaacaatct

SEQ ID NO: 14137 - DNA, 430 bp, Glycine max
  Clone ID: LIB3094-056-Q1-K1-E3
gaagttgcgagagtgaagaaatggcgcaagacttggcattggatttggaggagcttcgccgcctccacagcatcgccaaaagacctcgaaccctctctcttctctcctccgaaattcgtaacctcgaaaagttatcgtcagaggaagcttctgcgcagattccggcgccgatttcgaccggaactaaagtggcgccttcacctgcgctgaagtatgcggcactcgcgtcgttcagttgggaccaggatagtgacaaagttaagatatatgtgttaatggagggaatcgatgagaataaggttgaatccgagtttaagtcgatgtcattcgatgttaagttccatgatgttcaagggaagaactaccgatgtgcaatatcaaatatgcacaatgagatagtaccagagaaatgcagggttgtgtcaagcct

SEQ ID NO: 14138 - DNA, 196 bp, Glycine max
  unsure at all n locations
  Clone ID: LIB3094-056-Q1-K1-E7
ctgactcgcaagattcactccaaattatgcttttcgcttttatattcctcatcacatcagaganacgtgggacatcatcntatttcctttattatttccttttgttgatacactgtatcacacacactaaacctgtgtgttcactgaggtataaagaaaatgattgaattgtaaacatcatgaattacctttttgg

SEQ ID NO: 14139 - DNA, 441 bp, Glycine max
  Clone ID: LIB3094-056-Q1-K1-E8
ctgagttgcaagattcacttcaaattatgcgtttcgctgatcggttcctcatcacatcaaacgacgtcgcagatcatcgcaattccttgattatttccttttgttgatacgcggaatcgcgcacacggtgctggtgtgtgcactgaggtagaaagaagaagattgaattgtaaacagcatgaattaccttcttggagctttcaagcctgcatgtaatgtcttgatcacgtttaatgatgggaagaaccggaagcaggttccgtttaaaaaagaaaatggtcaaatggtcacagtcccacttttccaaagtcaagaaaacattggtgggaagattacaatagaaccaatgcaagggaagaagattgatcacaatggtgtaaaagttgagctccttggacagatagagatgtattttgacagaagaaatttttatgactttac

SEQ ID NO: 14140 - DNA, 444 bp, Glycine max
  Clone ID: LIB3094-056-Q1-K1-C1
cccacgcgtccgccaaaaccgaaaagaagaaaaacgctgaaatccccaaaatcgaaaagaagaaaaccaaaagcgctgaaatccctctaaccgatggcaaaacgaagagggatagagaaatcgccaaagaggagaacaagaagaagactaagaaacccaagctcagcaatggcacttcaaaacagcgagacgagggatccaaaaagggagtagcagaaggaaaaggagaagaggggaaaatgaacgtgtttgcgatgaatcgcatcagaacgatgattaagggcgaagatcccgatatgcgtgtttctcaggaagcattgttggccatcaacaacgctgtggagaagttccttgagcaattctcgcaggaagcttatgctttttgtgttcgggaccgcaagaaatgcctcagctacgatcacctagcacatgttgtaagtaagc

SEQ ID NO: 14141 - DNA, 164 bp, Glycine max
  Clone ID: LIB3094-055-Q1-K1-G8
tccacgcgtacggtcacgccatcggtccaggtgtgagattgaacctaatcggaccttaactgcagtcagggaatccttcatggcagacgagccccatatcaggtatgatagctctgaggttgaggccaagaatcgtggtgtttttaactttctgggcaggaaaa

SEQ ID NO: 14142 - DNA, 476 bp, Glycine max
  Clone ID: LIB3094-055-Q1-K1-H1
cccacgcgtccgcccacgcgtccgctccagatagaagaagaaacttaatcgatcatcacttcacgttcagtaatacatcatggcagacgagacccagaacaagtatgagagctctgaggttgaggtccaggatcgtggtgtttttgactttctcggtaagaaaaaggatgaagaagacaagcctcatcctcaggaggaggtcatcgccaccgagtttcaaaaagtcactgtctcagaccaaggagagaacaagcacagcctcttagaaaagcttcaccgatctgacagcagctctagctcttcaagtgaggaggaaggagaagatggagagaaaaggaagaagaagaagaaggaaaagaaagggctgaaagagaagatcgaggagaaaatagagggtgatcatcatcatcacaaggatgaggacacaagtgtcccttgtgagaaaagtgaggttggtgaaacagcacatgctgagg

SEQ ID NO: 14143 - DNA, 328 bp, Glycine max
  unsure at all n locations
  Clone ID: LIB3094-055-Q1-K1-H9
aaaaaaaaaaaaataaaaaaaaaaaaaaaaaaaaagaaaaaaaaaaaaaaaaaaaaaaaaaaaaaaaaaaaaaaaaaaaaaaaaaaaaataaaagaaaaaaaaaaaaaaaaaaaaaaaaaaaaaaaataaaaaaaaaaaaaaaaaaaaaaaaaaaaaaaaaaatatgaaaaaaaaaaaaaaaaataaaaaaaaaaaaaaantaaaaaaaaaaaaattaaaaaaaaaaaaaagaaaaaaaaaaaatattaaaaaaaaaaaaaaaataaagaaaaaaataaataaatataaaaaaaaaaaaaaaaaaaaaagaaaaaaaaaaaaaaaaaa

SEQ ID NO: 14144 - DNA, 451 bp, Glycine max
  Clone ID: LIB3094-056-Q1-K1-A1
cccacgcgtccgagaaggcctgggcttagttgataagcataactgggtgaggaagaaagaaggagagtgaagaagatggcgtcgagcggagcggtaccgttttggagggcggcggggatgacgtacataacatactcaaacatatgcgcgaatctgctcaggaattgcctcaaggaaccctacaaggccgaatccctctctcgtgagaagctccattttgttctctccaaatgggtcgacgccaagcctgaaaaacctactattcgttcagacaccccagagcagtgatctggaatagttggaagctataaatgcataaatctttgaaatctggaagttcattgtcattttgaacctttctgtgatgtttaattcctttggttttttctctccatgaaatggaacatgcactgtattttggtttgcacggttattcttggtataatacaag

SEQ ID NO: 14145 - DNA, 443 bp, Glycine max
  Clone ID: LIB3094-056-Q1-K1-A10
cccacgcgtccgcccacgcgtccgaaaaaaatgggttcttcttcttccatatggaccgtgtgtttgattttggcatcactggcctctgcagcactctgtgccaaccctcgtagaccagtggatgtacaatttggccgaaactacgtgcccacatgggcctttgatcacatcaaatacttcaatggaggttctgacattcagcttcatcttgacaagtacactggtactggcttccagtccaaagggtcatacttgtttggtcacttcagcatgtacataaagatggttcctggagattcagctggcacagtcactgctttctatttatcttcccaaaatgcggagcacgacgagatagactttgagttcttggggaacagaacaggacaaccttacattttgcaaacaaatgttttcacaggaggcaagggtgacagagagca

SEQ ID NO: 14146 - DNA, 217 bp, Glycine max
  Clone ID: LIB3094-056-Q1-K1-A11
accggccggattcccggtcgccacgcgtcgttatcttattccctgataaactgagcatataatggaacccttatatatctgatcttatatatctataaagggtaaagatatccgatgtgaatctatttgtttagttttcaatcggtatgtatataggtgaataatccacatgcctttttgtgaagtaaaaaaactaccctcgatccatgccctcaaa

SEQ ID NO: 14147 - DNA, 453 bp, Glycine max
  Clone ID: LIB3094-056-Q1-K1-A12
cccacgcgtccgcccacgcgtccgcaaaaattacaacaccaatctcacccatttcaaaaaaaggccgttagtgttactattcgtaaaatggccactcttgttctttaccaattctttctcaaactcttgctcctaatttcagtctttcagctttcctttgctgctaggagactcaaccagctggttcaggaccagtcacagttactccattaccacaacggtcctcttctatacggcaaaatcgccgtgaacctaatctggtatggtcacttcaaaccatcccaaaaggccatcatcaccgatttcgttacctcactgtcatccccatcgtctcagagcagccagccatctgttgccacgtggtggaaaaccacggagatgtactaccacctgagtcccaagaacaagaaggctgcttcttctctttctctatcactgggcgatcaggttctc

SEQ ID NO: 14148 - DNA, 177 bp, Glycine max
  unsure at all n locations
  Clone ID: LIB3094-056-Q1-K1-A2
ccacgcgtccgcccaggcgtccgagaaggcctgggcttnagttttaagcattactgggtgaggaagaaagaaggagagtgtggaagatggcgtcgagcggagcggtaccgttttggagggcggcgtgtatgacgaacataacatactcatacatatacgcgaatattctaacgaatt

SEQ ID NO: 14149 - DNA, 309 bp, Glycine max
  unsure at all n locations
  Clone ID: LIB3094-056-Q1-K1-A4
acccacgcgtcctnattgataatttatatgaacaattcttaacttatacttcnacaagatntnctatgttttcagataaatttattcnctcataaaaaactctataatattttaatcttaacatataatatttgttacttaataaaataaatatatactcatattcccatacatataatttatatattaacaaataatatcttttatttacttttccaaaaaaaaaaacaaatccattttttttttatataaaatactaattttaattttttattttctccaaataaataaactaaaatttcttttcat

SEQ ID NO: 14150 - DNA, 306 bp, Glycine max
  Clone ID: LIB3094-056-Q1-K1-A7
cccacgcgtccgagaaggcctgggcttagttgataagcataactgggtgaggaagaaagaaagagagtgaagaagatggcgtcgagcggagcggtaccgttttggagggcggcggggatgacgtacataacatactcaaacatatgcgcgaatctgctcaggaattgcctcaaggaaccctacaaggccgaatccctctctcgtgagaagctccattttgttctctccaaatgggtcgacgccaagcctgaaaaacctactattcgttcagacaccccagagcagtgatctggaatagttggaagc

SEQ ID NO: 14151 - DNA, 481 bp, Glycine max
  Clone ID: LIB3094-056-Q1-K1-B10
ccgcctgaataccgggccgcccacgcgtccgcccacgcgtccggcaccccacattgagtatctagtccgtaccaaccaaattcctcgcgaaaggccccagcagaagtacccatcatggctgttagttcttggtgctggcacccttccatttggcaccttgttcattgagctcttctttatcatgtccagcatttggatgggtcgcgtttactacgtctttgggtttctcttcgctgttttgatccttcttgtggcggtttgtgccgaggtatctctagttctgacttacatgcacctgtgtgtggaggattggaaatggtggtggaaatcgttctttgcctgcggttctgtcgccatatacatctttttgtactctgtcaactatcttgtgtttgacctcaagagtgtgagcagtcctgtgtctgcaactctttacttaggctactcactcttcatggttctagcaatcatgctatctaca

SEQ ID NO: 14152 - DNA, 441 bp, Glycine max
  Clone ID: LIB3094-056-Q1-K1-B12
cggacgcgtgggtttcaaaggcaccgaatgttcttacatttgcattaaagagatttcagtcggggaaaggtgggaagctcaacaagcctattcaatttcctgaaatacttaacttggcacctttcatgagcgggactagtgataaatcacccatatacagattgtatggggtagttgttcacttagatatcatgaatgctgccttttcgggtcactatgtgtgctatgtgaagaatatccaaaacaagtggttcaaggttgatgacagtgtggtgacagctgttgaattggatagagtcttgacaaaaggagcatatatgcttttctatgcaaggtgctcgccaagggccccaagattaattaggaacagaatactgtccccagattcaaaacgtaaagtcagtggaaagactcttacaacgaaagcaagatctatatcta

SEQ ID NO: 14153 - DNA, 131 bp, Glycine max
  Clone ID: LIB3094-056-Q1-K1-B3
cccacgcgtccggtaggattaattgatgtatagaagaatcaattgctcacttatgaaaggtttatgaggagactttggcacaatccaaccaaccaaccacaaagtggatattttgactctttttttccctt

SEQ ID NO: 14154 - DNA, 398 bp, Glycine max
  unsure at all n locations
  Clone ID: LIB3094-056-Q1-K1-B4
tcccactcttcctccaaaaccgattttaagtatatcgctgaaatccccaaaatcagagagaagggaacctaaanctcttaaatccctctaaccgatggcaaaacgaatagggatagagaaatcgccaaagaggagaacaagaagaagactaagaaacccaagctcatcaatggcacttcaaaacagcgagacgagggatccaaaaagggagtagcagaaggaaaaggagaagaggtgaaaatgaacgtgtttccgatgaatcgcatcataacgatgattaagggcgaagatcccgatatgcgtatttctcaggaagcattttttggccatcaacaaccgctgtggagaagttccttgagcaattcttgcatgaaacttatgctttttgtgttcggtac

SEQ ID NO: 14155 - DNA, 263 bp, Glycine max; identical to SEQ ID NO: 13862
  Clone ID: LIB3094-056-Q1-K1-B5

SEQ ID NO: 14156 - DNA, 401 bp, Glycine max
  Clone ID: LIB3094-056-Q1-K1-B7
cccacgcgtccggggcgattcgcggcggagattcgagatccgtggaagaagcagcgcgtgtggctggggacgttcgattccgccgaggatgccgcgcgggcttacgacaaggctgcccgatccttccgcgggcccaaggccaagaccaatttcccctccttccccggcccgacggaccaccactcctcgcagcagattccgccgctctaccaggcccacgggctttccaccaagttcgagcccgcccaggtgaaccggcccaccaccagcggcatgagcagcaccgtggagtccttcagcgggcctagggttcccccctcctcctcctcctctcgcaagccccttgtggttgttaaccctatcatccctctcgacgacgacgacgacgattgccacagcga

SEQ ID NO: 14157 - DNA, 461 bp, Glycine max
  Clone ID: LIB3094-056-Q1-K1-B8
aaacacccttgtcgaccacaccaaaattaaaaacataaaaaagcataaaagcacaaaaagacataaaaaagggaaaataaaacattttgaagtcatatttgcacacttgattaaaggctgtcgtcccttgtgacggatgcgtggggtgctaataccttccctgtgcgtaaaaacaactcccgaactattcacacttaaagttcgtagaccacaccttttcaattttcccgacgctttcctcaaataaaagttggtggcgactccgcgcattttcctttcatggaagacgcacttgtgagtcccgcatcgccctcccgtcaaagggtaggttgcgacagtacttgccctcccgccgaagggtaggttccttaattgaattaactaataacaaaagtgaaactaaggctaaaataaactcacaaatcaagctttgtccataaaaatcacttaaaaaccatttt

SEQ ID NO: 14158 - DNA, 443 bp, Glycine max
  Clone ID: LIB3094-055-Q1-K1-G7
ctctcttccttctttctctttacctcgtcattttcattgccagtggcgttcaaaccaagaccgtccacttgcagaggaaactgcagcatggcaccccggagtgcctcctcccccaatcaagaaaggagaaaggcgctattatactggaaatgaaggacagaggtgagtgctcagagtcagagagaaaaggtgattgggttgagaaacagttggtactggatggtctccacgttcgttcaattcaaaatcacattcgaaaaaggacctctagtagccaaattgcagattcctcggaaacccaagttccattaacttctggcataaaattccaaactctaaactacattgtgacaatgggattgggtagccagaacatgagcgtgatagtagacactggaagcgacttgacatgggtccaatgcgagccttgccggtcatgttat

SEQ ID NO: 14159 - DNA, 462 bp, Glycine max
  unsure at all n locations
  Clone ID: LIB3094-055-Q1-K1-D6
tcttcctctaaaccctaaacaactctttctcttctttcttcgctcgntgntctccctcgcggagatcgacaatggcggagacagagacgtttgctttccaggctgagatcaaccagctcctcagtctcatcatcaacaccttctactccaacaaggagattttccttcgtgaactcatcagcaacgcctccgatgctttggacaagattcgatttgagagtttgacagataagagcaagctcgatgctcagccagagttgttcattcatattattccagacaagactaacaatacactgaccattgttgacagtggtattggcatgaccaaagctgatttggtgaacaacttgggtacaattgctagatctggtaccaaggaattcatggaagccttggctgctggtgctgatgttagtatgattggacaagtttggtgtggggttctactctgcatatctt

SEQ ID NO: 14160 - DNA, 463 bp, Glycine max
  Clone ID: LIB3094-055-Q1-K1-D8
aaacacccttgtcgaccacaccaaattttatttcataaaaaagcataaaagcacaaagagacggaaaaaagggaaaataaaacattttgaagtcatatttgcacacttgattaaaggctgtcgtcccttgtgacggatgcgtggggtgctaataccttccctgtgcgtaaaaacaactcccgaactattcacacttaaagttcgtagaccacaccttttcaattttcccgacgctttcctcaaataaaagttggtggcgactccgcgcattttcctttcatggaagacgcacttgtgagtcccgcatcgccctcccgtcaaagggtaggttgcgacagtacttgccctcccgccgaagggtaggttccttaattgaattaactaataacaaaagtgaaactaaggctaaaataaactcacaaatcaagctttgtccataaaaatcacttaaaaaccattttga

SEQ ID NO: 14161 - DNA, 467 bp, Glycine max
  unsure at all n locations
  Clone ID: LIB3094-055-Q1-K1-E1
cccacgccgtcgctctatccttcaagcaaactctccttctcaaatctctctttctctctctcggggggttccgtttctctctctgctatttatgatcactctctgacgcgcttctgtcaccaaatcaagtgcttccgtctcttccccttcttctctgattggaaggattcgtgtggtcggagatggtggtttcggggccaatcacgccggggcaggtgtctttcttgctgggggttattccagtttttgtttcatggatatattcagagtacttagagtacaagaaactctcatctcctcccaaagttcattcagatgctagtcttgaagagttggggaaggatgcaattaaggaagatgatncggccattttgctggaatcagggcttacaagatcagcatcagcataattccatccaccatctgtcaaattgaatttgattcggttttttgaccatggatgattc

SEQ ID NO: 14162 - DNA, 253 bp, Glycine max
  Clone ID: LIB3094-055-Q1-K1-E12
gacttacatataaaataaatgaggaaaaaatgaataaaatacaaaataatttttaataataaaaataaataacgaattaaaaatccataaacaatctatatgattcacaatacttattcaaaatcaccctatacaagacaaattctgaaaaaaaaaatatcctcttatcagtatactatcatcaaactttttgaaagaaaaaaaacctttttccttttttttctactctcattaatcattttcctctctattt

SEQ ID NO: 14163 - DNA, 362 bp, Glycine max
  Clone ID: LIB3094-055-Q1-K1-E3
ccaccggtaggctctttcatattggaatagctcataaagctattaatgcgctagagctagccatggatgctctaaaggaaatccatttgcgattttactcagacttcccacctcatccttatgaacaggtttatgggtttgcaaccccttcaaccctgaagccaacccattggatttatccaggaggtggaatcaatcaaattccaggggaatgtactattttaggagatgtcaaattaactccattctacaatgtaaaggatgttatgaaaaagctgcaagaatacgtggccgatattaatgagagtgcacagaatcttatatttacgggtccagttttaaaatatgttctacctgatgaa

SEQ ID NO: 14164 - DNA, 413 bp, Glycine max
  unsure at all n locations
  Clone ID: LIB3094-055-Q1-K1-E4
ctttttttttataagtttttaaagttttttttgctcttcttttttaattcctcaaatttttggtgataaattttaattcttcattaattttttgttaacacttttagtcttattaaatttttttgtccatttttaatccttcatttatttttattattcaaaattagacttaaatataaaataaatgaggaaaaaatgaataaaatacaaaataattttgaataataaaaataaataaggaattaaaaatggataaaaaaattagagggaataaaaatactgataaaaaattagtgaagaaataaaaattgttaaaaaaattggaggactaaaaattagattctttgagattttggaaagacanaaaacttaatcctttttttctactctcatttatcaatttctctctattt

SEQ ID NO: 14165 - DNA, 327 bp, Glycine max
  unsure at all n locations
  Clone ID: LIB3094-055-Q1-K1-E6
aaccagctcctcaggcncatcagcaacaccgnctactccaacaaggagatattccttcgtgaactcatcagcaacgcctccgatgctttggacaagattcgatttgagagtttgacagataagagcaagctcgatgctcagccagagttgttcattcatattattccagacaagactaacattacactgaccattgttgacagtggtattggcatgaccaaagctgatttggtgaacaacttgggtacaaatgctagatctggtaccaaggaattcatggaagccttggctgctggtgctgaagatagtatgattggacagtttggt

SEQ ID NO: 14166 - DNA, 438 bp, Glycine max
  Clone ID: LIB3094-055-Q1-K1-E9
cccacgcgtccgattttaactgtgtgtgtgtttcttacgtgaaaagtactttttttgatgagggtaactcaactttgctatttataatctactatgcagctgagaagctaaacttgccatacttaagtgcttatctgaattcccttggaaccaattaccggcatggggcaaattttgccactgggggatccaccattaggaagcagaatgaaaccatatttcaatatggaataagtcctttctctcttgacattcagattgtgcaatttaaccagtttaaagcacgcaccaaacaactctatgaagaagccaaggccccacatgaaaagagcaagcttccagtgcctgaggagttctctaaggctctctacacatttgacattggtcaaaatgatctctctgttgggtttagaaagatgaattttgaccaaatacgtg

SEQ ID NO: 14167 - DNA, 225 bp, Glycine max
  unsure at all n locations
  Clone ID: LIB3094-055-Q1-K1-F10
cgcgtccgntttttttttataannnnncaaagccttctcctcttttcncncncaangccccacagggcttgtaataaattttagggcgccatccccccccccttaacactnttataattattaaattcttttgtccatttttaatccttcatttatttctattattcaaaattagacttacatataaaatacatgacgaaaaaatgaatcaaatacaaaataatt

SEQ ID NO: 14168 - DNA, 463 bp, Glycine max
  Clone ID: LIB3094-055-Q1-K1-F3
cttcactttcattctttgcttcagaaaattatttagctagctatctaggatggtgagtgttgaagagatccgtcaggcacaacgtgcagaaggccctgccactgtcatggctattggcaccgccactcctcccaactgcgtcgatcagagtacctatcctgactattacttccgcatcaccaacagcgagcacatgactgagctcaaagaaaagttcaagcgcatgtgtgataagtcaatgattaagaagcgatacatgtacttaaatgaagagatcctgaaggagaatccgagtgtttgtgcatatatggcaccttcattggatgcaaggcaagacatggtggttgtggaggtaccaaagttgggaaaagaggctgcaactaaggcaatcaaggaatggggtcaacccaagtccaagattacccatctcattttttgcaccaccagcggtgtcgacatgcct

SEQ ID NO: 14169 - DNA, 408 bp, Glycine max
  Clone ID: LIB3094-055-Q1-K1-F4
ctgctcttcttttttaattcctcaaattttggatgataaattttaattcttcattaattttttgttaacacttttagtcttattaaatttttttgtccatttttaatccttcatttatttttattattcaaaattagacttaaatataaaataaatgaggaaaaaatgaataaaatacaaaataattttgaataataaaaataaataaggaattaaaaatggataaaaaaattagagggaataaaaatactgataaaaaattagtgaagaaataaaaattgttaaaaaaattagaagactaaaaattagaatctttgagaattttgaaagacaaaaaacttaatcctttttttctactctcatttatcattttctctctatttaaaaaaattgtatggtatcttgaga

SEQ ID NO: 14170 - DNA, 340 bp, Glycine max
  unsure at all n locations
  Clone ID: LIB3094-055-Q1-K1-F6
cccacgcgtccgcttctctctctctctctctgtttttcttgcttgaagcaatggccaaagccttggcgtcagtgctgctgtttctcctcgtagctgtgagtaatgtgtttgctgtagagcttgaacttgaaactcttccaccctcttaccctcaccctcaccctgttcactcccccacaccagcacctcttcacccaccagcaaatgctcctcacccacaccaccaccaccaccaccaccaccctccagcaccagcacctgttccttcaccttctcaccacaattaccctcctacccctgcccctgctaagcctnctactcaccaccatcaccatcaccc

SEQ ID NO: 14171 - DNA, 439 bp, Glycine max
  unsure at all n locations
  Clone ID: LIB3094-055-Q1-K1-G12
gtcagtaaccatcgtcgtgagcgaagatccattataatacagttacaaattgcaatggcacacgtcattgtggttatcgaaatttgatcgcagcgtcgagaagaatgggaagtttgggagcgattctgaaacatccagatgacttttaccctctgctgaagctgaaaatggcggcgaggaacgccgagaagcagatcccgccggagccgcactgggcgttctgctacacaatgctccacaaggtttctcgaagtttcgccctcgtcattcagcaactcggcatcgagcttcgcaacgccgtttgcatattttatttggttctgcgagctctcgacaccgttgaggatgatactagcatagaaacagatgtncaggtgccaatactgatagcctttcaccgtcatatttatgatcgtgattggcacttttcatgtggcac

SEQ ID NO: 14172 - DNA, 75 bp, Glycine max
  Clone ID: LIB3094-055-Q1-K1-G4
cggacgcgtgggtctaaatcgcgaaggcccgctttttttttttttttttgaaaggtcccatttgtctaagaggga

SEQ ID NO: 14173 - DNA, 446 bp, Glycine max
  Clone ID: LIB3094-055-Q1-K1-G5
cccacgcgtccgcccacgcgtccgcagggattttgtgttagttgttgggcgttctcaacggtggccagagtggaagcaataaacaagatagtgacagggaagtttgtgtccttatctgaacaagaacttgtggactgtgacagagcctacaatgaaggatgcaatggtggccttatggactatgcattcgaattcatcattcaaaatggaggcattgacacagacaaagattacccataccgtggctttgatggcatctgtgatccaactaagaaaaatgcataggttgtgaacattgatgggttcgaggatgttccaccgtatgatgagaatgccttgaagaaagctgtcgctcataaacccgtaagcattgctattgaagcctcttgcagagatttgcaactttatcaatcgggtgtatttacttgtaaatgtgggacaagttt

SEQ ID NO: 14174 - DNA, 394 bp, Glycine max
  unsure at all n locations
  Clone ID: LIB3094-055-Q1-K1-D11
cgacgttctcgataagcacttggaacgatcctctccttccacttctcgccccatcacctccggctcgaggaattccaacctccaagtggaggaatctgaaacggagagtgaagagtctgatgttagtggctctgatggggatgacacctcttggatctcgtggttctgtaatctcagagggaatgagttcttttgtgaggtggatgatgattacatacaggatgactntaacctatgtgggttgagcagtcaagtgccctactatgattatgcccttgatttgattctcgacgtcgagtcgtcccatggtgacatgttcacggaggaacagaatgagttgattgaatcagcggcgganatgctttatggtctgattcatgccagatatgtgttg

SEQ ID NO: 14175 - DNA, 119 bp, Glycine max; identical to SEQ ID NO: 12932
  Clone ID: LIB3094-054-Q1-K1-G11

SEQ ID NO: 14176 - DNA, 382 bp, Glycine max
  unsure at all n locations
  Clone ID: LIB3094-054-Q1-K1-G3
cccacgcgtccgtcaagcattgcatccatcttgatttgtactctgttttgtgctttagatgggagttctgccaaatcaagaggggttttaagatcatagtgtgtgttttgcaacaatggctaacttctttgctgctatgatcttggcactctttgccatttccatacttcaaacagtggtaatggctgctaatgaacaaggaggccacttgtatgacaacaagagcaaatatggaagtggaagtgtcaagaagtaaccaatgcccatcacaatgctcgaggagatttagccagacccaatcccacaggccctgcatgtttttctggcagaagtgctgcangacatgcctgtgtgtgcccccggggtattatgggaaataagc

SEQ ID NO: 14177 - DNA, 177 bp, Glycine max
  Clone ID: LIB3094-054-Q1-K1-G4
cttgaattttcttcatccttctctgttctcctagaacttgattacttgaacattccctatggcagatgaggtggttcttctggatttctggccaagtccatttgggatgagggtcaggattgcacttgctgaaaagggtatcgaatatgagtacaaagaagaggacttgaggaacaa

SEQ ID NO: 14178 - DNA, 463 bp, Glycine max
  Clone ID: LIB3094-054-Q1-K1-G7
aaacaccctggtcgacccccccaaatttaaaacataaaaaagcctaaaagccccaaaaggccgtagaaaggggaaaataaacaatttggaagtcatatttgcccacctgataaagggctgtcgtccctttgtgacggatgcgtggggtgctaataccttccctgtgcgtaaaaacaactcccgaactattcacacttaaagttcgtagaccacaccttttcaattttcccgacgctttcctcaaataaaagttggtggcgactccgcgcattttcctttcatggaagacgcacttgtgagtcccgcatcgccctcccgtcaaagggtaggttgcgacagtacttgccctcccgccgaagggtaggttccttaattgaattaactaataacaaaagtgaaactaaggcttaaataaactcacaaatcaagctttgtccataaaaatcacttaaaaaccattttg

SEQ ID NO: 14179 - DNA, 364 bp, Glycine max
  unsure at all n locations
  Clone ID: LIB3094-054-Q1-K1-G8
cccacgcgtccgcccacgcgtccgcccacgcgtcttgtgacgcgttggggttctataaggctcntagcctctgtgttcttgaagttctaaagagacaaggaacctacgtctggtggattaatcatgaccgtgtgatcagagcgtgattaactgcccgggtgagtttctctttggagtattctcatctttggctgtagaggatcgttcttatgacacttttcatgtcctgggaatgattatactgttgtcttacttaccaatatataattacatacaaattcttttatatattttgttaaatccatttataatttctctttcatttttattttttagaatttcttctttaaattccttttttttt

SEQ ID NO: 14180 - DNA, 446 bp, Glycine max
  Clone ID: LIB3094-054-Q1-K1-H1
cctaaacaactctttctcttcttccttcgctcgttgttctccctcgcgtagatcgacagtggcggagacagagacgtttgctttccaggctgagatcaaccagctcctcagtctcatcatcaacaccttctactccaacaaggagattttccttcgtgaactcatcagcaacgcctccgatgctttggacaagattcgatttgagagtttgacagataagagcaagctcgatgctcagccagagttgttcattcatattattccagacaagactaacaatacacctgaccatggttgccagggtattggcatgaccaaagctgatttggtgaacaacttgggtacaattgctagatctggtaccaaggaattcatggaagccttggctgctggtgctgatgttagtatgattggacaagttggtgtggggttctactctgcatatc

SEQ ID NO: 14181 - DNA, 451 bp, Glycine max
  unsure at all n locations
  Clone ID: LIB3094-054-Q1-K1-H7
ctctcttccttctttctctttacctcgtcattggcattgccagtggcgttcaaacaaagacgttcgacttgcagaggaaactgcagcatggcaccccggagtgcctnctcccccaatcaagaaaggagaaaggcgctattatactggaaatgaangacagaggtgagtgctcagagtcagagagaaaaggtgattgngttgagaaacagttggtactggatggtctccacgttcgttcaattcaaaatcacattcgaaaaaggacctctagtagccaaattgcagattcctcggaaacccaagttccattaacttctggcataaaattccaaactctaaactacattgtgacaatgggattgggtagccagaacaataacgtgatagtagacactggaagcgacttgacatgggtccaatgcgagccttgccggtcatgttataatcaaaa

SEQ ID NO: 14182 - DNA, 442 bp, Glycine max
  Clone ID: LIB3094-054-Q1-K1-H9
cggacgcgtggggtttactagtatgcaaggtaaagaatcagcaaaatttcaacacccgcatccagcgagtaacatgttgacaaaagtctaccgagttgcattctgttcttgtaacctcctcaacccactggaggtcgtgatcatgtaattttgagtgaattatacaacaaattcttgaaaaagatatgattgtctcttctgagctgctgcttattgatcgatgaatccagctgcaattattttcgaagatggcaataaaatctcttctgcggtgttatctctttgactgaattccaaattttgtaagtataatagttggctatgaaagagactgtaccaagaagcatagtgtgagagtcaaaaaacagttgctaagtatgagatgtgagaacatttgttgaatgtatattgctaaatagaagcgcaaaagatgattatagat

SEQ ID NO: 14183 - DNA, 404 bp, Glycine max
  unsure at all n locations
  Clone ID: LIB3094-055-Q1-K1-A8
cccacgcgtccgcccacgcgtccggtttcgtttcgttctgcttcgcgtggaccaacaggaagggtaagttttcattcaatggccagcgctcatctctcatcaatatcttcgtcgatctctacggcgtcgtttgaagggcttcgaccttcggctgttcagtttgcttccgcgggcagaattagaattggcaatctctcccaaaggtctttccggggcttggttgtcaaagccgccaccgttgttgcccccaaatacaccgcgattaagcctctgggagacagagtgctgataaaaattaaggaagcagaggagaaaactgagggtgggattttgcttccatcaactgctcaaacgaagcctcaaggnggtgaggtggttgctgttggaaaaaggaaagacaattg

SEQ ID NO: 14184 - DNA, 454 bp, Glycine max
  Clone ID: LIB3094-055-Q1-K1-A9
cccacgcgtccgcccagcgtccgaattcctcttcacacttgccatatcaaagaaaagagcagcaacatcagatcaaagatacaacatggaggcacttcaatcatgggtttcaaagcacaagctcgccagcattggggcactctgggcctctggaattggagcaacacttgtggcttattcatgcaaaaagtctccaatgaagccaagtctcaggcttatccatgctaggatgcatgctcaggctctaactttagcagtgctatccggtgcagctgcttatcattattatgagaaacgtgatgttcagccaaaaccagaggcagattatattattcctgctcccaatgtcacccagatggttgaatatgaacttcaatgtcctttctaaaaattaaaaataaaactgtaggggtcatgttattaagattaggagatattcctatcatcgagtttt

SEQ ID NO: 14185 - DNA, 462 bp, Glycine max
  Clone ID: LIB3094-055-Q1-K1-B3
cccacgcgtccgggtttaaatcacctttgaatttctgctatggcttcaaccagatcgggctttcttcttcttttcattcaattgtgcttctcacttctacccttgtcattcgctcaatcccccgccaccgggtctaccgaaggttacaccatttatggtcgagtgaagatccccagtgtgggaacaaaagattatattcttcctggaaaaatttcaaatgtcaaagtcatactcaatggtggtcaaagagttacttttctgaggcctgatggatatttctcattccacaatgttcctgcagggacacatctaattgaagtggctgccataggctatttcttttctccggtacgagttgatgtaagtgccagacaccatggcataattcatgcagccctgacagataataggagggggctaagtgagtttgcttggagccattgaagatgaacaatattttga

SEQ ID NO: 14186 - DNA, 455 bp, Glycine max
  Clone ID: LIB3094-055-Q1-K1-B4
cccacgcgtcctcccagcgtccgaattctctcatcctcacttgccatatcaaagaaaagagcggaacatcagatcagagatacagcatggaggcacttcaatcatgggtttcaaagcacaagctcgccagcattggggcactctgggcctctggaattggagcaacacttgtggcttattcatgcaaaaagtctccaatgaagccaagtctcaggcttatccatgctaggatgcatgctcaggctctaactttagcagtgctatccggtgcagctgcttatcattattatgagaaacgtgatgttcagccaaaaccagaggcagattatattattcctgctcccaatgtcacccagatggttgaatatgaacttcaatgtcctttctaaaaattaaaaataaaactgtaggggtcatgttattaagattaggagatattcctatcatcgagtttt

SEQ ID NO: 14187 - DNA, 463 bp, Glycine max
  Clone ID: LIB3094-055-Q1-K1-B5
aaagaaaatgaggacagtgctttcgcgcttgttctcattccacgccttccatttccaggatcaatgcagtgtcaatccgcgggagagatctcttctttccaaatgtctgctttaaagttgaagaagcagttaatgtgcctccacccccaacggaaaaggttgttctgtttggaggcgattggtttgttggatcacacttttttagagaagccctagaacgtggcatgtctgctgggagtcctagcaggtctggtaggtcatccctgcatgattcctgggctaggaattttgcttggtatcaagggaatctcttttcaactgcttcattgagaaaacatctgaatggggccactgctgttatctcatttatgggtggttttggctccaacatcaaagctattagagcagcttcagatcaaggtgttaaaagatttgtctatatctctgctgctgaatgtggtgt

SEQ ID NO: 14188 - DNA, 465 bp, Glycine max
  Clone ID: LIB3094-055-Q1-K1-C2
cccacgcgtccgggagaagcagaaggttcatttgcaatggcgccgaaaaagccgagagccaggacaaggaaccctgatttggttagggggattggcaagtattcgaggtcgcagatgtaccacaagaggggcatctgggccatcaaggccaaaaacggtggcgttttgccccgccacgatcccaagcccaagcccgaggccccggcccataagccgcccaagttctaccccgcggacgatgttaagaagcccctcgtcaacaagcacaagcccaaacccgcgaaactcagggctagcattactccagggactgtgttgatcctgcttgctgggaggttcaagggaaagagggttgttttcctgaagcagctcccatctggattgcttcttgtaactggtcccttaagatcaatggggttcctctcagaagggtgaaccaatcgtatgtcattggtacatccacaa

SEQ ID NO: 14189 - DNA, 465 bp, Glycine max
  Clone ID: LIB3094-055-Q1-K1-C9
ctcttctcttttttttggatttcctggcccgtttatttttgggggatagccagtattcgtttgctctggccacatttagcccttctggaaagcttgttcaaattgaccatgctttgacggctgtcgggtctggacaaacgtctttgggaattaaagctgcaaatggagttgtcattgctaccgagaagaaattgccatctatattggttgatgaagcatcagtccagaaaattcagttattaacaccaaatataggtgtcgtatatagtggcatgggtcctgattttcgagttttggttcggaaaagcaggaaacaagccgagcagtatcaccgtttatataaagaaccaattcctgtcactcaacttgtcagggaagttgccgccgtattgcaggaatttactcaatctggtggtgttaggccttttggagtgtccctgctagttgctgggtttgatgataacg

SEQ ID NO: 14190 - DNA, 74 bp, Glycine max
  unsure at all n locations
  Clone ID: LIB3094-055-Q1-K1-D10
gaagacccacgnggncccgcangcggaacaaggccaaccccgaacacaccccgcaccaaaagaagaaccgcaag

SEQ ID NO: 14191 - DNA, 324 bp, Glycine max
  unsure at all n locations
  Clone ID: LIB3094-054-Q1-K1-G1
cggggcgagcccacgcgtccgcttctccttctcaatcttgtaattctatttcttccaccataatgctgcgcaagcttggntganngccattcaagaacaagcctggcacaattcccgttcacctcaacgtctatgatctcaccccaatcaacggctatgcctattggcttggccttggagtctaccattctggggttcaagttcatggattggaatatggttttggtgcgcacgagcacgacacaacggggatttttgaagtccaacccaaacactgccctgggttcactttcagaaagtcaattttcatcggaacaacagatc

SEQ ID NO: 14192 - DNA, 351 bp, Glycine max
  Clone ID: LIB3094-054-Q1-K1-D1
tttgaatacattccttgtagtttatactgaaagatgggtttgaagatggcgttactgatccgaggcctttccctcatgctccttttggtctcctctgaggtggcatccacgaatacaaaagaggaggcaaatggagtggatgatgccaaatatcccggtggaagctatggagggggttacccaggtcatggcggtggcggttatcctggccatggcggtggcggttatcctggccatggcggtggtggtggctatcctggtcatggtggtggccaccctggtcatggtggcggctaccctggccgtggtggtggatactgtaggcatggctgttgcggtggccggacatac

SEQ ID NO: 14193 - DNA, 432 bp, Glycine max
  Clone ID: LIB3094-054-Q1-K1-D10
gtcagtcttcagagctaaaaatgttctcactcttccatctcagtatgtgtggacatgctgggcaaggaatgctaaaaccggtccatggttagatgaacatgcatctgaattgccaagtacttctcgtgaatctgtaccagtttgttataacaatttacgacaagaagcaatcaaatatgttgaagaaggtgcaaaatcaatccaaatctatcatgttgccatgagagctctgaaagaagctgctaagaaggtttgcaccataaaaaaatcagaagttctggaacaagcagaggggagctacagccacccaatggaagcaggggtgaattgcttgtagcagatgaagatgttccaagcaatcaatctgtggcggagaagcaaaagaaaataggagagttgactgctgagttagaggccacaaatcaacgatgt

SEQ ID NO: 14194 - DNA, 460 bp, Glycine max
  Clone ID: LIB3094-054-Q1-K1-D4
atcagattaatatatgttagtatagttttgaaaatataaatatggctatttaaaaattaagagataaatagataatgtatatattattttaaatttttaatatgattttttttcatgtatgataaatgtgctaaatatttaaaaactaaataaaaataaatacataactgaaaagaagtaattaattatgttgcgttaaacacataatataaaagataataaactaagaaagaatttatgtaatattttctcagatatttttggtattattttttgataaaagccaaagaagcaccgccacacttccaccaaagggatggatccaaagtttctgaggaaccaaaggtacgcgaggaagcataacaagaagagcggtgaaacagccacggaagaagagtaaagtgtcactctcaaatggggctattaggatttgatttgctattcaagtcccatatgtttt

SEQ ID NO: 14195 - DNA, 443 bp, Glycine max
  unsure at all n locations
  Clone ID: LIB3094-054-Q1-K1-D9
attgctgctgtttgcctattggtgtactntggtgtctctaccctgcttgatgcctcatctagccgggggcaaaaaatcaaatgaaaagcacaaagaagcaaaactaacagtttctgaattttctggaaatggtgctgggatactatctgctgctagcacaggtgccagtacttttctcttagtttttgttgctgaatggggcgacaagtcatttttctccacaattgcccttgcagcagcttcttctccccttggagtcatagcttgagcactggctggtcatggtgttgcaactttgctagctgtactttggggttctttacttgggacgtatttgtcagagaaggttattgcctacatcggaggtgttctctttctcgtcttttccgcaataaccttatttgaaattgtgcaatangggttaaaagaaatgcaatataatc

SEQ ID NO: 14196 - DNA, 441 bp, Glycine max
  Clone ID: LIB3094-054-Q1-K1-E1
cccacgcgtccgcggacgcgtgggggtttttgtggataagagtgagctataatggctggcaggagaccgggtttaattgctttgtttgatgttgacgggactcttacagctcccaggaaggtggtcacaccggaaatgttgacattcatgcaagaactacgaaaggttgtaacggttggagttgttgggggttctgaccttataaagatatcagagcaacttggcagcacagttaccaatgagtatgattacgtattttctgagaatggtcttgtggctcacaaggaaggaaagctcattggaactcagagcttgaagtcattccttggtgaagaaaagcttcaggagtttattaactttacacttcattatattgctgatttggacatccccattaagaggggaacatttatggagttccgtagtgggatgcttgatgtc

SEQ ID NO: 14197 - DNA, 318 bp, Glycine max
  Clone ID: LIB3094-054-Q1-K1-E10
accacgcagcaagaaaaatgaatatcgaacaggatgagcatggactcatcacatagaatcaggcggggacatgtctttgtacgggctgacactcactaacgaccgcgcacacgaagctgccatggccatgctgctaacactgcccacgcccaaactccgaagggaccagatcgactgtcatcgatgactaattcttcaacacgcgctattgattgtaccactagcggtgcaccaactgacatatatatactgaaaaaatgagcatcatgagaggactacacacaaagtctttactgccgcggagagagaccgatatga

SEQ ID NO: 14198 - DNA, 434 bp, Glycine max
  Clone ID: LIB3094-054-Q1-K1-E12
gaagttgcgagagtgaagaaatggcgcaagacttggcattggatttggaggagcttcgccgcctggacagcatcgccaaaagacctcgaaccctctctcttctctcctccgaaattcgtaacctcgaaaagttatcgtcagaggaagcttctgcgcagattccggcgccgatttcgaccggaactaaagtggcgccttcacctgcgctgaagtatgcggcactcgcgtcgttcagttgggaccaggatagtgacaaagttaagatatatgtgttaatggagggaatcgatgagaataaggttgaatccgagtttaagtcgatgtcattcgatgttaagttccatgatgttcaagggaagaactaccgatgtgcaatatcaaaattgcacaatgagatagtaccagagaaatgccaggttgtggtcaagcctaaa

SEQ ID NO: 14199 - DNA, 130 bp, Glycine max
  unsure at all n locations
  Clone ID: LIB3094-054-Q1-K1-E2
ccacgcgtccgggaatgtanntnttccaagcttcaaggtattttataatgttaggtccaagtagatatgggaggtatttataatacaatgattctactatcctatctccaccattcatattaatatttgc

SEQ ID NO: 14200 - DNA, 429 bp, Glycine max
  unsure at all n locations
  Clone ID: LIB3094-054-Q1-K1-E3
cggggcggcccacgcgtccgcccacgcgtccgcccacgcgtccgcccacgcgtccgcccacgcgtccgtctccctctgggtgtcactagctctgtgcattcttctctcgctctctgccttccatcacactcggcatttcctttcccaagatagtagaagatggcagacactgaggatattcaacctcttgtttgtgacaatggaacaggaatggttaaggctggatttgctggagatgatgccccacgtgctgtgtttcccagcattgtaggtcgtcctcgtcacactggtgtgatggttggcatgggccanaaaagatgcatatgttggtgatgaggcccaatctaaaaggtgtattttgactctcagtaccccattgaacatggaattgtgagcaattgggatgatatgggaaagaattggcatcat

SEQ ID NO: 14201 - DNA, 465 bp, Glycine max
  Clone ID: LIB3094-054-Q1-K1-E5
ctagagaattatcatacccttcaagatgaaaccgtacctacgtccaatattcctattgttcgttatccttctcgaccaatccatttcggcgagtgctgctataaatattaatggtctgagaaacaaaattagagaagttctaaacaagcacccgagcatcaatcttccggcagataaactgaagaaggtgaagagaccactgaaggcactggattatctgcttggcgaatgtaaggacaggccgcctcaagaatttcaagaattttgcccgaaatttaagaacgattatcaacaaaattgcccgaatgccgcgtatgaagcagtttgcccgttactgaagcaagcgattcaaatatgttgccagaaacacgcataactctgcaagccacggtgggcgtttggatgtgcttttagttaccactttctctcttggatttgcttacgtattgctccttttgtattagt

SEQ ID NO: 14202 - DNA, 463 bp, Glycine max
  unsure at all n locations
  Clone ID: LIB3094-054-Q1-K1-E8
atccgggcgaccacgcgtcgccacgcgtcggcaaaccccaactcaacttgtcatgctacggcttcttgcaggcagactatgattagcttttaaagtaagganaagcagagagaacttgcagaaaatgcaagtggcggaccacctgttaagaagcaaagtgctggagagttgcgtcttcacaaagatataagtgagctgaatctaccaaaatcatgtaccatgcaattccccaatggcaaagatgatctgatgaactttgaagtttcaattcgacctgatgatggatattacttaggtggcacatttttgttttcctttcaagtgtctcccatctattcacacgaagcaccaaaggttaagtgtaagacaaaggtctatcatccaaatattgacttggaaggaaatgtttgtctcaacatcttacgagaaagatggaaacctgtccttaatataaacactgtca

SEQ ID NO: 14203 - DNA, 431 bp, Glycine max
  Clone ID: LIB3094-054-Q1-K1-F10
cccacgcgtccgcccacgcgtccgcttttgcaagctcaatttcggaactgaataattgcccgatatataggaatttactgtcttttttcttactttttttaatacttccaattccatatgtattatgctcggaatttctggaaaaaaaaaagctttgaaattgagctgatttttctttctttccttcaagaatcacatgtattttatatttatatttattcaaactgttttaacgacgtgctaactcttctgaaacccttgcccttcgcttattctccactatatatagccttaatcgcaggaacaggacaattctgaagaaaaaaaatgcttgtttcgggtgctatcagcgacgttttggtggtgcttccgccttcgacatctcttagactcccggaatttcgccatttgcatgtttttgcggtttctga

SEQ ID NO: 14204 - DNA, 225 bp, Glycine max
  Clone ID: LIB3094-054-Q1-K1-F11
ttccatattattattctccaaatttctctaaaaaaaaaatcctttaaaattaactcatttttttttctttccttcaacaatcacatctattttatatttatatttattcaaactttttttaccactttctaactttttttaaacccttacccttcacttattctccactatatataaccctaatcccaacaaccatacaatttttaaaaaataaaatactttttt

SEQ ID NO: 14205 - DNA, 418 bp, Glycine max
  Clone ID: LIB3094-054-Q1-K1-F5
cccacgcgtccgtccggattgggattccggccaagcgcggtggctccggtgaattccggcggggggcggaatttgtatctgaacccgcgcctgcaacaacagcagcagcaggggagtactgcacaacacaggggcgacgaagttaaacgaattttggatattttgctgaggacgaagaagaggaacccgatcttggtgggggaatcggagcctgaggcggcgatcaaggaggtgataaagaagattgagaacaaggaattgggagaaggggctttcgcgaatgctcacgtgattcatctggaaaaggagcttccgagtgataaggcgcagatacctgcgaggttgaaggagttgggggatttgattgagaccaggaatcggaattctgggtgtggaggggttttcgttgacttgggtg

SEQ ID NO: 14206 - DNA, 291 bp, Glycine max
  Clone ID: LIB3094-054-Q1-K1-F7
atctgctgctagcacagttgccagtactttttctcttagtttttgttgctgaatggggcgacaagtcatttttctccacaattgcccttgcagcagcttcttctccccttggaatcatagctggagcactggctggtcatggtgttgcaactttgctagctgtacttgggggttctttacttgggacgtatttgtcagaagagggtatttgcctacatcggaggtgttctctttctcgtctttgccgcaataaccttatttgaaattgtgcaataggggttaaaagaaatg

SEQ ID NO: 14207 - DNA, 373 bp, Glycine max
  unsure at all n locations
  Clone ID: LIB3094-054-Q1-K1-F9
ctctgctgcgtttgcttctcctccacccatccacaaacgaacacacactttgattgaaaatggggcgtgttcgcacaaagacagtgaagaagtcctcgcggcaagtgatcgagaggtactactctcgcatgacgctggacttccacacgaacaagaaggttctggaagaggtggccatcattccctccaagaggctccgcaacaagatcgcgggattctccacccacctcatgaagcggatccagaagggtcccgtacgtggaaatctcctcaagctgcangaggaagagcgcgagcgccgcatggacttcgtccccgatgtcttcgncatcaagacccgaccagatcgaggtcgacaaggagacgctcgaca

SEQ ID NO: 14208 - DNA, 367 bp, Glycine max
  unsure at all n locations
  Clone ID: LIB3094-054-Q1-K1-C6
aacaacacataaacanactttattccaaccccancaatctttaataatcgtcggctttatcaaaaaacaatccccaccccacacaaaccaacnnacaaaaccaacataaaatactttaatctcaacctaacaaatcaaatatacttaacatcctaccttctttttatatataatttaagaacatcatcacttcacacactccaaatctaccacacttaacttatctattttataaacataataaaatcatatacatttctattaccctcaacttcaactcacttcccctctaaatataccaactaacattcaatattacatatatcataataaaacatttaatgtatctcctcttttaaaatcaaaa

SEQ ID NO: 14209 - DNA, 119 bp, Glycine max
  Clone ID: LIB3094-054-Q1-K1-A5
gtaatgtaggtgttccaagcttcaaggtaggtaataatgttaggtccaagtagatatgggagtgagttgtaatacaatgattctaatatcctatctccaccattcatattaatatttgc

SEQ ID NO: 14210 - DNA, 415 bp, Glycine max
  Clone ID: LIB3094-054-Q1-K1-A6
cggggcggccgacgcgtacggaagttgcgagagtgaaaaaatggcgcaagacttggcattggatttggaggagcttcggcggctccacatcatcgccaaaagacctcgaaccctctctcttctctcctccgaaattcgtaacctcgaaaagttatcgtcagaggaagcttctgcgcagattccggcgccgatttcgaccggaactaaagtggcgccttcacctgcgctgaagtatgcggcactcgcgtcgttcagttgggaccaggatagtgacaaagttaagatatatgtgttaatggagggaatcgatgagaataaggttgaatccgagtttaagtcgatgtcattcgatgttaagttccatgatgttcaaagggaagaactaccgatgtgcaatatcaaaattgcacaatga

SEQ ID NO: 14211 - DNA, 261 bp, Glycine max
  Clone ID: LIB3094-054-Q1-K1-A8
tttaatttaaaagaaaatgttcgaaaacatgtctattctgacttagaaggagaaatgcatgggagtaccgatgtgtaccatgcatgagaatttaaatatagtaatgtccatatcttaccaaaaacaagtcatttatggattttatcaggaaaatcatacaggtccggttcagtctctttttcaatccgaaaagatcaagatcaaatgaacattcattatctttctactggagaaagagatttttgtaaccttttagcaagt

SEQ ID NO: 14212 - DNA, 372 bp, Glycine max
  Clone ID: LIB3094-054-Q1-K1-A9
cagaacagggactcactctcttcgcagcggcactctcggtggctttcatcttctcgggttgtcaagatgtacacatcgaggaagaaaattcacaaggataaggatgctgagccaactgaatttgaggaatcagttggacaggcattgtttgatctagaaaataccaacaatgagctgaaaagtgatctgaaagatttatacataaactcagctgtccaaattgatgtttctggcaaccgaaaggctgtggttatccatgtcccctacagactaaggaaaggattccggaagattcatgtcaggcttgtgagagaacttgagaaaaagtttagtggaaaagatgtaatcttgattgccaccaggaggatagta

SEQ ID NO: 14213 - DNA, 443 bp, Glycine max
  Clone ID: LIB3094-054-Q1-K1-B12
cgtcggcacgtgaaatcagtatagctctgggacagggggcacaacgatatctggcgtgttctggaaatcacatgtcacaaattgcgacaggttcaggggataagacagtgaaaaatctggccatagagagggagtctgtcaagcagcttatgtctttacctcaatttacgagtagtgtaacagcattatcttgggttggtctccatcatcggaagaataatggacttctagctgttggaatggaaaatggccaaatagagttgtggaatctgtcttataacagagcagatgatgggagcatagcaacaccaagtttggctgcttctcttgctgtacgtatagatccttttatatgccatgcgtctaccgtaaaccgtctagcatggaagaaaaatgaagatgatcaaacgagtatgcaacttgcttcatgtggagcttataat

SEQ ID NO: 14214 - DNA, 295 bp, Glycine max; identical to SEQ ID NO: 11959
  Clone ID: LIB3094-054-Q1-K1-B4

SEQ ID NO: 14215 - DNA, 419 bp, Glycine max
  Clone ID: LIB3094-054-Q1-K1-B5
gttcttctaccttattttctttccctagtcaaggagattcatctctgcagcaggttgttttagaaaagaaaaaatgctgaagatttgctgcattggggctggatatgtggggggtccaacaatggcagtcattgcactgaaatgcccctcaattgaagtggctgttgttgacatctctaaatccaggattgcagcatggaacagtgaccagctccctatctatgagccaggccttgatgatgtggtgaagcaatgtcgtggcaggaaccttttcttagcactgatgttgagaaacatgtctatgaggccgacatagtgttcgtctccgtcaacaccccgacaaaaactcgtggtcttggagccggaaaggctgcagatttgacttactgggagagtgcagcacgcatgattgctgatgt

SEQ ID NO: 14216 - DNA, 351 bp, Glycine max
  Clone ID: LIB3094-054-Q1-K1-B6
cccacgcgtccggaaaaacaaaacgataagtgtgttaaaattgttccatgagtcgttttgaggttctgtgtccatcaagcgacacgtcgttttgaagcaggaaccgaaccgtgcacccctttgtagtttgaagcgatcaacacgcgcaaccacggcgatgatgatgcaaatcaacatcacctccaccacctcaatcgtcacggcgttctcttcggatcattccccgaatgttctaccttgagccatgtccaacctcgttcagattcgcgtcgccgccgacgctagcgatggcttcgactctccggcgaagcagaaagcagccaaccgcagctcctacagcaatcgcccctt

SEQ ID NO: 14217 - DNA, 458 bp, Glycine max
  unsure at all n locations
  Clone ID: LIB3094-054-Q1-K1-B7
gaacgcgaacacagattcancacctaccgtcctacccttttctctttcgccggctcttcgtcttgctctcgcatgctccttctctgaaccaaaccaatccattattcatttgaatcttcttatacatcccaaaaaaacccaataaaaaaggggtctttagaaggttctggttgatgggtaggagaggaatcaagctattcgatgaagaaaggaacggtcttttttcaatttccaattttgggtctcaatggggtggtgttagaggtgatggtgttcaagaccctgtgaatttggctgtgtatgcaagcattagtcaaatgggaatggggtttggtgttcaagaaccaaacccttcttcttcttcttctgatggtgataattcccaacacaacggtggcatgagcatgagaatgaggattccgtgcaccgagttgtacgttcggtacgtgcaatccgag

SEQ ID NO: 14218 - DNA, 327 bp, Glycine max
  Clone ID: LIB3094-054-Q1-K1-B8
tctccacccaaaccaatccattattcattttaatcttcttatacatcccaataaaaacccaataaaaatatactctttataattatcttttttttctttattataccaatcaatctattctattaaaaaattaactaccttttttcaatttccaattttttctctcaatcaactacattttaaattttaattatcttcaacaccctctaaatttctcttaatatacaatcattactcaaattcaaattattctttcatattcaataaccaataacctttttcttcttcttattaatcatataatttccaacacaaacaccttctttt

SEQ ID NO: 14219 - DNA, 419 bp, Glycine max
  Clone ID: LIB3094-054-Q1-K1-B9
cccacgcgtccgatttccctggtgttgttaatcctcttgacaacgtgcattggacacaagaaacaggaagtggtatgtatcagtattttattaaggttgtgcctacagtatacactgacgtgagtgggcatactatccagtcaaaccagttctctgtgacagaacacttcaggactggagacgtgggtcgtctgcagtcccttcccggggttttctttttctatgacctctctccaattaaggttacttttacagaagaaaatgtctcattcttacattttcttactaatgtttgtgccatagttggaggtattttcaccgtttctggaatactagattcattcatctatcacggtcaaagggctatcaagaagaagatggagcttggtaaatttaactgatgggatttgagtaatttc

SEQ ID NO: 14220 - DNA, 397 bp, Glycine max
  Clone ID: LIB3094-054-Q1-K1-C1
gaagttgcgagagtgaagaaatggcgcaagacttggcattggatttggaggagcttcgccgcctccacagcatcgccaaaagacctcgaaccctctctcttctctcctccgaaattcgtaacctcgaaaagttatcgtcagaggaagcttctgcgcagattccggcgccgatttcgaccggaactaaagtggcgccttcacctgcgctgaagtatgcggcactcgcgtcgttcagttgggaccaggatagtgacaaagttaagatatatgtgttaatggagggaatcgatgagaataaggttgaatccgagtttaagtcgatgtcattcgatgttaagttccatgatgttcaagggaagaactaccgatgtgcaatatcaaaattgcacaatgagat

SEQ ID NO: 14221 - DNA, 401 bp, Glycine max
  Clone ID: LIB3094-054-Q1-K1-C10
gacgatttggaattgggaaggcgagggattgtctctcgtctcttcctcttctctttcgattgatccctcattcataatcttccaatccaacaacctcagcctcacactcacacatacacacatctgaacgcgtatcgtccctcccatggcttcaaagcgcatcctcaaggagctcaaggacttgcagaaagacccaccaacttcttgcagcgctggtccagtagctgaagacatgttccattggcaagcaacgattatgggtcctgctgatagtccttatgctggaggtgtattcctagtcactattcactttcctccggattatcctttcaaacctcccaaagttgcctttaggactaaggtgtttcatccgaacatcaacagcaatggtagcatttgtc

SEQ ID NO: 14222 - DNA, 340 bp, Glycine max
  unsure at all n locations
  Clone ID: LIB3094-054-Q1-K1-C12
ggctacttttgattgcttgatgaaaacctatggattcctgacaccagaattctggaaggagactcgctttttccaaatctccattccaagaatacacagatctactggcaaaaccaacaggaaagactctaatcttggaggaggaaagggtggatgcttgatttgctagttntgctttatggatgttntaagaactntattactttacatacttttgtggttctgtgctttacttttggttttgatagacggtatgtctctgtatgcatttntgattgttccaagttttaattgacttgcaannaaaaaaaannaaannaaaannnnnnnnnnnannnna

SEQ ID NO: 14223 - DNA, 298 bp, Glycine max
  Clone ID: LIB3094-054-Q1-K1-C3
ggctacttttgattgcttgatgaaaacctatggattcctgacaccagaattctggaaggaggctcgcttctccaaatctccattccaagagtacacagatctactggcaaaaccaacaggaaagactctaatcttggaggaggaaagggtggatgcttgatttgctagttttgctttatggatgttttaggaactttattactttacatactttgttggttctgtgctttacttttggttttgatagacggtatgtctctgtatgcattttgattgtttccaagttttaattgactgc

SEQ ID NO: 14224 - DNA, 323 bp, Glycine max
  Clone ID: LIB3094-054-Q1-K1-C4
cccacgcgtccgctctattcctctgacttcccatagaccacaatacactcaccccaggcagagaaatttcgtttcaaaattgtgatatggacggaagagcgagcagcagcgtgggcggagaagcatcgccagctccagcaccggtgccgataacgaatgcgaacgcgccgccgcctttcttgagcaagacatacgagatggtagaggacccttcgacggactcgatagtgtcgtggagtccaacgaacaacagtttcgtggtttggaaccctcccgagttcgccagagatctcttgcccaaacacttcaagcacaacaacttc

SEQ ID NO: 14225 - DNA, 453 bp, Glycine max
  Clone ID: LIB3094-054-Q1-K1-C5
cccactcgtccgtacacatatgcattctttctctcactccattccatttccgggatttgcatgtgcatacatacacttacctctctggtctctagctatagcacaagatatgggtagcagttattttggagaacctaactttggaaatgaaagagcaagttgttcttcttcgtcaagaaaagggaagaagagccacaactcagacaagccaaagcaaccacagagaggtcttggagttgctcaattggagaaaatcagattacatggctatcacccttctctgcacgctccttacccttttaatttttccaacgaagatccaagagtgcaaatagcatattcatcggggccatcatcttctttttcttactcatcatcatacgcagctttctatggatttcaacccaacatcatgatgggcctatccgaatatcaaaaaacaaacatcagata

SEQ ID NO: 14226 - DNA, 503 bp, Glycine max
  unsure at all n locations
  Clone ID: LIB3094-054-Q1-K1-A3
cggacttgaaggcccgggccgaccgacgcgtccgcccacgcgtccgttatgcattgcatccctcttgatttgtagtttgttttgtgctttagataaaagttctgccaaatcaagaggggttttaagatcatagtgtgtgttttgcaacaatggctaagttctttgctgctatgatcttggcactctttgccatttccatacttcaaacagtggtaatggctgctaatgaacaaggaggccacttgtatgacaacaagagcaaatatggaagtggaagtgtcaagagttaccaatgcccatcacaatgcttgaaggagatgtagccagacccaataccacaagccctgcatgtttttctgtcagaagtgctgcaggacatgcctgtgtgtgcccccggngtattatggtaataaagctgtgtgcccttgctacaacaactggaagaccaaagaaagaggacccaagtgcccttgagcttcaacttgttcaacttcaattgtcgc

SEQ ID NO: 14227 - DNA, 58 bp, Glycine max
  Clone ID: LIB3094-053-Q1-K1-E6
ggggggggccgctcatccggcaaaaacccctttttctatcctcagatgatcctctacc

SEQ ID NO: 14228 - DNA, 416 bp, Glycine max
  unsure at all n locations
  Clone ID: LIB3094-053-Q1-K1-F1
ttttatctttattccactgaatagaacatgagcatataaatggataccctttatatgatggatctttatattatctataaagggtaaagatatccgatgtgaatctatttgtttagttttctatcggtatgtatataggtgaataatccaacatgcctttttgtgaagtaaaaaaactaccctcgatccatgcctcaaaagggttgataataagtaaaaaaaatcattgaattcatgataaaacccttctgcgtttttttattatannattttttgtcaataaagggatccagggggttgggggatcaaatggtaaagttcttttgttggtaaattggaggattagaaacatgactattgctttccanatagctgtttttgcattaatngctatttcatttattttattggatagt

SEQ ID NO: 14229 - DNA, 448 bp, Glycine max
  Clone ID: LIB3094-053-Q1-K1-F10
cccacgcgtccgctcgagaatatgacccgtcctaaaatttacgaaacataattatttattatttatgatatataatgagaggaacataaacgaacaatcagatgctgctagtcatttggataataaacaacattaggatttaggcatatcacatgatcgctttacttataatttagggatatcagctcaataccacatgattcaagtaatattaccaaaatcaaagccttatcctacaagatgcggtcagctacatgggtcatgacgtcattcggcaagtttagaaaccaaagtgtagcaaacgggaaaaaagtacacttctccttacagaggtatcccatatgacacaataactctgaaatagtatagtataccatagtcttaatcagcggaatatacaatttcttacatgacaaaaggacagccactgatcccagacaatattggc

SEQ ID NO: 14230 - DNA, 351 bp, Glycine max
  Clone ID: LIB3094-053-Q1-K1-F12
cggacgcgtgggtttttcttcaaattcccgtgaagagacactcagaaagatgaggttatcgggtgaggcatgctttggtgtttgtgttaatcggggcgttgggaaacttgaaaagggcaaagggtttccgatttgtgatagacaaagacgagtggttctccatgatgtgaagtcgaggtgcactgtcatgctcttcgtgtataagctatctcctgcatacgcacaagtgcactctgtaagactctgcacaatcaattcgcagacgggagtgctttgtaaatcggtcaattgtacacagtctaagaacgcattgagcatgtgactttattacacacaaatacattaccctgt

SEQ ID NO: 14231 - DNA, 253 bp, Glycine max
  Clone ID: LIB3094-053-Q1-K1-F2
gcggccgttggatctttattccactaaatagtttatgtttatataaaaccataccctatatgggctggttctttatataaactatccaccccaaacactttctatctcaacctataatttaattctatcatccacttctatatattttaataatccaacatacctcttctctaattaaaatactaccctctatccatacctcatatttaatatttttaactaaaaaaatcaatcaatctcattataaaaccct

SEQ ID NO: 14232 - DNA, 58 bp, Glycine max
  unsure at all n locations
  Clone ID: LIB3094-053-Q1-K1-G10
accggaccggaaggcccgacccgcgcgtccggccacgcgtgccncaaaaccgaaaaga

SEQ ID NO: 14233 - DNA, 133 bp, Glycine max
  Clone ID: LIB3094-053-Q1-K1-G11
cgcccgcgcctccgatgtaatcaatcacaaatttatttctattcctgaaatttttaaagaccgtccatcatgtgaaggtgtcttatgtcatatgtatttcaaatttactgtaaatcttttctggttgcatagc

SEQ ID NO: 14234 - DNA, 155 bp, Glycine max
  unsure at all n locations
  Clone ID: LIB3094-053-Q1-K1-G12
caaaaccnaaaanaacattaactttttttttcccacaatcnaaaagaggaaaagcaaaatttcttaaatccctctaacccatatcaaaatcaaatttactgtaaatcttttcaaagaggataacaagaagaagactaagaagcccgagctcatct

SEQ ID NO: 14235 - DNA, 426 bp, Glycine max
  Clone ID: LIB3094-053-Q1-K1-G4
cccacgcgtccggtcgcaagagagacaggtcagcctacttttcccgccacgacgccgccgagcgccgcctccccttgccggagcccgcggaggaggagacgcctacgatgagaccggcgccgccgtccgcggtggtcgtgatgggcctcccccaggactgctccgtcctcgatctcaagtcccgattcgagatctacggcgccatctcccgcatccgcatcgaccgcgacgccgtcggatacatcacctaccggaccaaggactccgccgacgctgccatcgccgccggcctcgaccccaccttcggaatcaccgttaactctaaaatggttcaagtgttgtgggcaacggaccctctagccatgtggagggaagggagtggtaatagcaggaaccaaaggtctatgtcaaagcttgtgcgtgctg

SEQ ID NO: 14236 - DNA, 131 bp, Glycine max
  Clone ID: LIB3094-053-Q1-K1-G5
cccacgcgtccgatgtaatcaatcacaaagttatttctattcctgaaatttttaaagaccgtccatcatgtgaaggtgtcttatgtcatatgtatttcaaatttactgtaaatcttttctggttgcatagc

SEQ ID NO: 14237 - DNA, 73 bp, Glycine max
  Clone ID: LIB3094-053-Q1-K1-G6
gacccacccgtacccgccacgcctagcccaaaaccgaaaagaagataaactttgaaatccccaaaatcgaaaa

SEQ ID NO: 14238 - DNA, 272 bp, Glycine max
  Clone ID: LIB3094-053-Q1-K1-G7
taccggccggaattcggtcaccacgcgtcgcggcgctgggcggacgcccgcggggttgaggagagacgagtcgacgtgtgacgggaggtgccacacgctcgaatccgtgataaggcgggaggcattacgaacctagcgctgaggagcgaaggattatcgaaggttgccgaaaaatcaagaaggattcaaggacaactgaaagcgaaaacactcaaaactgtccaggtacattgttaacactgttagctgcacaaatgtctgctcttcttttg

SEQ ID NO: 14239 - DNA, 400 bp, Glycine max
  unsure at all n locations
  Clone ID: LIB3094-053-Q1-K1-G8
aagacggagttcgacttggtggtcggggaggtgccnagcaaccctcaaatcccggtgattaaggcggtaagggcattgactaacctagcgctgaaggaggctaatgagttgatcgaagggttgccgaataagttcaaggaagggatttcaaaggacaaagcttaagatgctaagaatcaactctaagaacctggtgccaaggttaccattgcttaaacactgtttagctgcagcatatatgttctgcttcttcttttgttggttgtagttgagttcaccagtacactgtaatttcatttcccatttgtctggatttcaatcttttatttgtaatgaggaaatatgagttcttaattttatataatttttttaatgcttataagtttttgttgaaatataa

SEQ ID NO: 14240 - DNA, 122 bp, Glycine max
  Clone ID: LIB3094-053-Q1-K1-G9
tcgggggccccgtggccggacccgtggccactaccgccgcagaagagaccgaaacgccgtcttggtcgtttccaaccacggattttggagaaaggaggaacccaccccaaccccgaccagga

SEQ ID NO: 14241 - DNA, 209 bp, Glycine max
  Clone ID: LIB3094-053-Q1-K1-H1
cccacgcgtccggcgaaaacccccaactccatacctctgttcatcgtctaccgcgctttctgttcaaccagaactatgattaagctttttaaagtaaaggaaaagcagagagaacttgcagaaaatgcaagtggcggaccacctgttaagaagcaaagtgctggagagttgcgtcttcacaaaagatataagtgagctgaatctacaaa

SEQ ID NO: 14242 - DNA, 224 bp, Glycine max
  unsure at all n locations
  Clone ID: LIB3094-053-Q1-K1-H10
gaaatgtgaaagccttatcatacagtgtttgcaagatgccaaggtagaagttgaagaagtgagatgatgtgataattgtaggcggatgttcttacatcccgagggtgaaaaatcttgttactaacgtatgtaaaggcaaggaactttataaaggcatgaatcctttaaaagctgctgtttgcggtgcagcagtgaaaggagctattgcttcangcgtcaatgat

SEQ ID NO: 14243 - DNA, 319 bp, Glycine max
  Clone ID: LIB3094-053-Q1-K1-H11
tttgaatacattccttgtagtttatactgatagattggtttgaagatggcgttactgatcgtaggcgcttccctcatgctcctttgggtctcctctgaggtggcatccacgaatacaaaagaggaggcaaatggagtggatgatgccaaatatcccggtggaagctatggagggggttacccaggtcatggcggtggcggttatcctggccatggcggtggcggttatcctggccatggcggtggtggtggctatcctggtcatggtggtggccaccctggtcatggtggcggctacccttgccgtggtggtggatact

SEQ ID NO: 14244 - DNA, 456 bp, Glycine max
  Clone ID: LIB3094-053-Q1-K1-E5
cccacgcgtccggcgaaaacccccaactccaacctctgttcatcgtctaccgcgggttcggttcaaccagaactatgattaagctttttaaagtaaaggaaaagcagagagaacttgcagaaaatgcaagtggcggaccacctgttaagaagcaaagtgctggagagttgcgtcttcacaaagatataagtgagctgaatctaccaaaatcatgtaccatgcaattccccaatggcaaagatgatctgatgaactttgaagtttcaattcgacctgatgatggatattacttaggtggcacatttttgttttcctttcaagtgtctcccatctatccacacgaagcaccaaaggttaagtgtaagacaaaggtctatcatccaaatattgacttggaaggaaatgtttgtctcaacatcttacgagaaagatggaaccctgccttaatataaacac

SEQ ID NO: 14245 - DNA, 352 bp, Glycine max
  unsure at all n locations
  Clone ID: LIB3094-053-Q1-K1-H6
aaaaaaaaaaaaaaaaaaaaaacgaaagggtttaaaaaaaaatntcaaaccaaaaaaaaaaaaaaaaaaaaaaaaaaaaaaaaaaaaaaaaaaaaaaacaaaaaaaaaaaaaaaaaaaaaaaaaaaaaaaaaaaaaaaaaaaaaaaaaaaaaaaaaaaaaaaaaaaaaaaaaaaaaaaaactaaaaaaaaaaaaaaaaaaaaataaaaaaaaaaaaaaaaaaaaaaaaaaaaaaaataaaaaaaaaaaaaaaaaaaaaaaaaaaaaaaaaaaaaaaaaaacaaaaaaaaaaaaataaaaaaaaaaaaaaaaaaaaaaaaaaaaaaaacaaaaaaaaaaaaaaaaaaaaaaaa

SEQ ID NO: 14246 - DNA, 410 bp, Glycine max
  unsure at all n locations
  Clone ID: LIB3094-053-Q1-K1-H7
ggggcgggggcggacgcgtgggcacgactgtcgtataagagaccgaaacgccntcttagcatgttcgaacaccgaatatgcaacaacaaataaaccaacacaaacactaacaaaaagaaaaaaaaaaaatcgtttgcttacacgcgtcgttcttcgtcgatgacaattaccagctgacgaaattcacgttcggttcgcaagacattcagctcttctgtctgcattctgcttccactgattttgatttgacagggcatctggtttggcctggagccatgttgctgaatgagtatctttcaaaaaatgttaacctgcttcagggttgcactgccattgaataaggttctggtgttggtattaccggaatactttgcagcagattctgccataaagttgtgatgacagatcat

SEQ ID NO: 14247 - DNA, 417 bp, Glycine max
  unsure at all n locations
  Clone ID: LIB3094-053-Q1-K1-H9
aatttccagcaatctttcctgtctcttgaagctnctgctgctgcggccggttgtgaagtgtttgttctccgtcatctcacgtcnttagttcattgaactcactgcattgagtggatttggtacaagttgagttcagaatggatgggcgacatcagaagcaaaaaaacaagtacagtataattgttcctacatataatgagcgtctcaacattggtctcattgtttacctcatcttcaagcaccttgtggatgctgattttgaaattattattgtggacgatgggagtcctgatggtactcaggatgttgtaaaacaactgcagcaagtttatggaaaaaaacggattctgttaagagcacgccctatgaagttggttttggaactgcttatattcatggcttgaatcatgcatttgg

SEQ ID NO: 14248 - DNA, 415 bp, Glycine max
  Clone ID: LIB3094-054-Q1-K1-A1
gaacgcgaacacagattcattcacctaccgttcctacccttctctctctcgccgcctcttcttcttgctctcgcatgctccttctctgaaccaaaccaatccattattcatttgaatcttcttatacatcccaaaaaaacccaataaaaaaggggtctttagaaggttctggttgatgggtaggagaggaatcaagctattcgatgaagaaaggaacggtcttttttcaatttccaattttgggtctcaatggggtggtgttagaagtgatggtgttcaagaccctgtgaatttggctgtgtatgcaagcattagtcaaatgggaatgggggttggtgttcaagaaccaaacccttcttcttcttcttctgatggtgataattcccaacacaacggtggcatgagcatgagaatg

SEQ ID NO: 14249 - DNA, 215 bp, Glycine max
  Clone ID: LIB3094-054-Q1-K1-A10
ctcacgcgtctgaatactcgagttctataaactacaccataacgctgtgcaagctagccacggggggcacgcaaagacaagccaggcgcagactctgttcacctcaacgtctatgaactcaccccaatcaacgtctatgcctatgggattggccgtggagaagaccattctgggggtgaaggacacgtgattgaaatagacgtattgaggcgcac

SEQ ID NO: 14250 - DNA, 441 bp, Glycine max
  Clone ID: LIB3094-053-Q1-K1-B2
ggaaagatgacctgcacttggtagagaacgtgctggattcagctgctcaggagtgtgctgagaaagcaaatgtcgatcccccagagatcattgttgacaaccaagtctatcttccacctggacccagtcgtcacaattctcacgatctctactgctccggtggggtggtgttggcttctcgtgatggaaagattgtgtgtgaaaatactcttgatgcacgtcttgatgtagttttccgtaaaaagcttccagagatccgaaagcagctctttggacaaattgttgcttgaagattttgattgtaatgtttggttacccctggaactatatcccgaagcataagcttgtcttcatgtcttggacctgaatagctatcaagccattgcttctgtgaacttataattattgtcccttaaattacgtcattttcggtagtccagt

SEQ ID NO: 14251 - DNA, 199 bp, Glycine max
  Clone ID: LIB3094-053-Q1-K1-B3
gcgtccggtagatattacctgcacttggtatttttcttgctgcattcagctgctcattagggggcgggtagagtaaaagacgtatcctccttacacattgttgacaactatgactatcttccacctagactcattcgtgacaaaaattacgatctcttctgatgccttgctaagaattaccaaacttgagaaggaaaga

SEQ ID NO: 14252 - DNA, 320 bp, Glycine max
  Clone ID: LIB3094-053-Q1-K1-B4
cccacgcgtccggactgcccaagatgtatcgacaatgttacggtgcgggcaaaaaaccatgatctttctgatcaacaatggtggatacaccatcgaggttgaaattcatgatgggccgtacaatgtgattaagaactggaattacactgggttgattgatgcaatccacaatggtgaagggaaatgctggactgccaaggtgttctgtgaagaggagctagttgaagcaattgccacagccacaggacccaagaaagactccttatgcttcattgaggtgattgttcataaggatgacaccagtaaagaattgcttgaat

SEQ ID NO: 14253 - DNA, 193 bp, Glycine max
  unsure at all n locations
  Clone ID: LIB3094-053-Q1-K1-B5
accggnccgacggacgcgtccgcccaggcatccntactgcccaagaattatctactatgttacggngcggacaaaaggggcatgtttgtttcttatcaacaattggtgcatacaccatctaggttgaaattcatgatgggccgtacaatgtgattaagaacttgaaatcacactgggttgattgatgcaatcc

SEQ ID NO: 14254 - DNA, 446 bp, Glycine max
  Clone ID: LIB3094-053-Q1-K1-B8
ctcagattcagcaattttctattttcttctctcatggcttcagattccaaaaaggatttccctgctgaacaataagggggtaattgctttacacgttgtggttcctcctgattccttccatctcatttgcttctgggaaaaaagtttgcatttgtgtgtaggcatgacaaagaatgacaaagctggaacagcagagaataaagcatccaaagatgaaacgtcatctaaagattctccagcagcacaaagagctactacagctacttctggacctgcaactggttttccaggcaacccttttgatttctctgcaatgtctggcctgctcaatgatccaagtatcaaggaattggctgaacagatagcaaaagatccatcattcaaccagatggctgagcagcttcagaaaacttttcagggagctccacaggatgctatgcctagct

SEQ ID NO: 14255 - DNA, 51 bp, Glycine max
  Clone ID: LIB3094-053-Q1-K1-C12
cagagtttgagtggacctgtctcagctaccctttaccttgggtattcacta

SEQ ID NO: 14256 - DNA, 120 bp, Glycine max
  Clone ID: LIB3094-053-Q1-K1-C9
gtaatgtaggtgttccaagcttcaaggtaggtaataatgttaggtcccagtagaatttgggatggggtggaataccatggatcttatatcctattttcccccttcattttaataattgcc

SEQ ID NO: 14257 - DNA, 427 bp, Glycine max
  unsure at all n locations
  Clone ID: LIB3094-053-Q1-K1-D1
aaagccttatcatacagttttttcaagatgccaaggtacaanttgagggagggtatgatgtgataattgtacgcccatnttcttacatcccnagggtgaaaaatcttgttactaacgtatgtaaaggcaaggaactttataaaggcatgaatcctttagaagctgctgtttgcggtgcatcagtggaaggagctattgcttcaggcgtcaatgatccctttgggaacttggacttgttaactatccaagctacacctcttgccattgggattcgagctgatgggaacaagtttgtccctgtaattccgagggatactacaatgccagcacggaaggagctagttttcacaactactcatgacaattaaactgaggcgtttatccttgtctatgaaggagaaggttgaaaggcaaaaaaaaccaccta

SEQ ID NO: 14258 - DNA, 417 bp, Glycine max
  unsure at all n locations
  Clone ID: LIB3094-053-Q1-K1-D10
acctatctcatctactttttatcttgnntattcactactcatggcggttggggtggtgtttaaaccctcaccattctcttccttatgtcattctactttacgcactacttgttctcatcagtaaagatagattgaggttcttgttgtcattgcatattaactatgaaaaaggttgattgatataactagatcacattgcatagtagggcaacggatgattaattcattgtctgattttatattgcgatgggatctgcagtttgttctccttctgcctgtttcccaaagtagtgtgctcattcaagtattcaactattgtttgatatcatgtttcaagtattttgttcaagtttctttagaaggttgtaattcaaactcttatctcatttcaatactttagaaaaatgatgttagatt

SEQ ID NO: 14259 - DNA, 380 bp, Glycine max
  unsure at all n locations
  Clone ID: LIB3094-053-Q1-K1-D11
gaaatgtgaaagccttatcatacagtgtttgcaagatgccaaggtagaagttgaagaagtgaatgatggtgataattgtaggcggatgttcttacatcccgagggtgaaaaatcttgttactaacgtatgtaaaggaaaggaactttataaaggcatgattcctttaaaagctgctgtttgcggtgcagcagtggaaggagctattgcttcangcgtcaatgatccctttggaaacttggactttgtaaactatcaagctacacctcttgccattgggattcgagctgatgggaacaagtttgtccctgtaattccgagggatactacantgccagcacggaaggagctagttttcacaactactcatgacaatcaaact

SEQ ID NO: 14260 - DNA, 51 bp, Glycine max
  Clone ID: LIB3094-053-Q1-K1-D12
aaaaaaggttcatagttgatatctccagcggaacgatgaagtttgaagatt

SEQ ID NO: 14261 - DNA, 420 bp, Glycine max
  unsure at all n locations
  Clone ID: LIB3094-053-Q1-K1-D5
gcttggcttcccatcaccgagtctcgcaatggaaatgctcactatgctgcatttgacaacgctcaatgctggtgttggcttccaggccctctttttgccagttgcttttgcttatcttggctggagttggggaattctttccttaaccatagcatattgttggcaactttacacgttatggattttggtcagcttcacgaagcagttccaggtaaaaagatacaacagatatgtggagctagcacaagcagcnnattgggaaaagattaggagtctggcttgctctctttccaactgtttatttgtcagcaggaactgcaacagctttgattcttaatggaggagagaccatgaaactgttcttccaaatagtttgtggtcccacgtgtacctcanatnncttaaccacagtggagtggt

SEQ ID NO: 14262 - DNA, 377 bp, Glycine max
  Clone ID: LIB3094-053-Q1-K1-D6
ggggtgggcttcccatcaccgagtctttcaatggaaatgctcactatgctgcattgggcacggtcaatgtctgatgttgcttccacaccctctttttgccagttgcttttgcttatcttggctggagttggggaattctttccttaaccatagcatattgttggcaactttacacgttatggattttggttcagcttcacgaagcatttccaggtataagatacaacatatatgtggagctagcacaagcagcatttggcgaaagattatgagtctggcttgctctcttcccaacttgttatttgtcaggaggaactgcaacagctttgattctttattgtaggagagaccatgaaactgttcttccaaatagtttg

SEQ ID NO: 14263 - DNA, 53 bp, Glycine max
  Clone ID: LIB3094-053-Q1-K1-D7
ctgagtcgcacgatacaatggacataatgcgtacagctgataggctcgtcatt

SEQ ID NO: 14264 - DNA, 467 bp, Glycine max
  unsure at all n locations
  Clone ID: LIB3094-053-Q1-K1-D8
tttgaatacattccttgtagtttatactgaaagatgggtttgaagatggcgttcctgatcgcaggcctttccttcatgctcctttgggtctcctctgaggtggcatccacgaatacaaaaaaggaggcaaatggagtggatgatgccaaatatcccggtggaagctatggagggggttacccaggtcatggcggtggcggttatcctggccatggcggtggcggttatcctggccatggcggtggtggtggctatcctggtcatggtggtggccaccctggtcatggtggcggctaccctggccgtggtggtggatactgtangcatggctgttgcggtggccggacatacaacggaggttgcagaaggtgctgctataacgctggcgaagcttgtgctgcacaaactcaagataagactcacgattaagacgatgcagntctacttaantagtacttttgatattt

SEQ ID NO: 14265 - DNA, 456 bp, Glycine max
  unsure at all n locations
  Clone ID: LIB3094-053-Q1-K1-E1
aaacacccttgtcgaccacaccaaaattaaaaacataaaaaagcataaaagcacagggaggcataaaaaagggaaaataaaacattttgaagtcatatttgcacacttgattaaaggctgtcgtcccttgtgacggatgcgtggggtgctaataccttccctgtgcgtaaaaacaactcccgaactattcacacttaaagttcgtagaccacaccttttcaattttcccgacgctttcctcaaataaaagttggtggcgactccgcgcattttcctttcatggaagacgcacttgtgagtcccgcatcgcccttccgtcaaagggtaggttgcgacagtacttgcccttccgcccgaaggtagggtccttaattgaattaactaataacaaaagtgaaactaaggctaaaataaactcacaaatcaagctttgtnncataaaatcacttaaaaacc

SEQ ID NO: 14266 - DNA, 388 bp, Glycine max
  unsure at all n locations
  Clone ID: LIB3094-053-Q1-K1-E10
cccacacgttcataaatcatatcttcaccctatcttttaanttngaanatttcncanaccggtccgtttcaaaaatactntcctacaccactcttacatatatattctatcctttctctttttttccaaatcctttcattcctcctccttaatccaacactatnttacattactttctcccctctaatttttcctctatcatctccccttcttcttcctatcctccctttctctctattaannatctctatctctatctctcctatcttcccaccatcatctatcaanttataaatacttttcatattcaaatacttacttttaacaatttttacatcctttccactaaatatcttaacattatattnctttacactactcatttatt

SEQ ID NO: 14267 - DNA, 261 bp, Glycine max
  unsure at all n locations
  Clone ID: LIB3094-053-Q1-K1-E2
ccacaccaattttattttcataaaaaancataaaancacaggacggtntgtttaaataaaataaaacattttcaactcatatttncacacttnattaaannctntcttcccttataacttattcattattttctaataccttcccttttcttaaaaacaactcccnaactattcacacttaaatttcttaaaccacaccttttcaattttcccnactctttcctcaaataaaattttatctctactccactcattttcctt

SEQ ID NO: 14268 - DNA, 229 bp, Glycine max
  unsure at all n locations
  Clone ID: LIB3094-053-Q1-K1-E3
aaaaaaccggnccgacccacgcgaccgaaacacccttattaccacaccaatttttatatcataaaaaancataaaaccaccggctggctttataataataaaataccacatctctcattctatattttcacacttaatctatatcttactatcctttttacttattctcttatttctaataccaatcctttaccataaatacaacttccttactatccacacttaaatt

SEQ ID NO: 14269 - DNA, 312 bp, Glycine max
  Clone ID: LIB3094-053-Q1-K1-E4
cccacgcgtccgggaagatggtgctttcggaggaggaaatgggtcgtctgtaccgaataaggaagacggtgatgcaaatgcttcgggacaggggttttctggtgggtgacttcgagatcaacatgtcgaagcatgagttcaagtccaagtacggcgagcacatgaagcgcgaggacctggtcatcaacaagtccaagaaggacaactccggcgaccagatctacgtcttcttccccgacgagcccaaggtcggcgtcaagaccatgaagacctacaccaaccgcatgaactccgaaaacgtctatagagcca

SEQ ID NO: 14270 - DNA, 335 bp, Glycine max
  unsure at all n locations
  Clone ID: LIB3094-053-Q1-K1-B11
ctggctcctggtgcaaagaaaattcatcctggaatatcttctagcataatttctgagctaactgattgcaatgctgctctttcccagcagagaaagaagcgacagattcctccaactttggctcctgtcgaagctctagaggcatatacccagatatctagtcatccctttcacaaaacaaacaaacaaggcattatatctcttgatatcctttattctaaggaccttaatgcaactggaggtattgatacaaatgctgttatttttgaccgcccatcangacagatattatctacactcagtggtcactctaaaaagtgaccagtgtaaagttt

SEQ ID NO: 14271 - DNA, 225 bp, Glycine max
  unsure at all n locations
  Clone ID: LIB3094-052-Q1-K1-E9
aaacccccaacttctttctctgctcatcatctaccactctcgaggtggtttcaaaactatnctgtgcctattcatatttacacacttgcttaaagaacttccaccatattcacgtatccgtccacctcttataactcacatttccgtaaaatcaactctccacctatatatacttaaacttcatctaccacaatcattcaccattcacttccctaatctcaaata

SEQ ID NO: 14272 - DNA, 343 bp, Glycine max
  Clone ID: LIB3094-052-Q1-K1-F3
cacgcgtccggcaccattttcaccgcacgaatatcttgttgtttggagctattcgagaaaaactctgtgggcatgttggggtaccatgacctccttacaggtgatgagcttctctctgactccttccgttacaaggaatttgataatggaatgctgtgggaagttgaggggaagcgggttgttaaaggagcaattgatgtttacattggtgcaaacccttctgctgatggtggaagacaagatgatggatttgatgatgcaactgttaaggttgttgacattggttacacattcagacttcaagagcaacccgcattttattataagcaaattgttaccttta

SEQ ID NO: 14273 - DNA, 424 bp, Glycine max
  Clone ID: LIB3094-052-Q1-K1-F5
cggacgcgtgggattttgtaattgtaaggtttaataagttgtttgtttttacttgatgggtacaaaaatgctccacaactcataagatacttgtacccaaaagataacctttgtacattctgtgagaaaatcgatgacgaagtgcccaactaaactttattcccaggacttaattggttttatgcccatctttgaactttgttctcgagactgaaaacatattttttcttctgctgcaggtagtattaagcatctttggtccaccttcaagatgttcaatcattgagcaagaggaagatcgttcatcaacctcttcatagctgtaaactactcattggacgatgggatgtccgcaagtagtgcagaagcatctgtaaagtacagaaatttatatgccaaacagaagataggaaatacagcaatt

SEQ ID NO: 14274 - DNA, 460 bp, Glycine max
  Clone ID: LIB3094-052-Q1-K1-G11
gtcttaattcccggtcgggcgggcgtccgagagtgtgagtggacctgtctcagctacctatcaccttggttattcactactcatggccatgtcaattttgtaatcaaccggggccattggcttccttatgtcattctactttgtgcactacttgttctcatcagtaaagatagattgaggttcttgttgtcattgcatattaactatgaaaaaggttgattgatataacttgatcacattgcatagtatggcaacggatgtttaattcattgtctgattttatattgcgatgggatctgcaatttgctctccttctgcctgtttcccaaagtaatgtactcattcaagtattcaactagtgtttgagatcatgtttcaagtattttggtcaagtttctttagaaggttgtaattcaaactctcatctcaatttaatactttagaaaaatgatgttagata

SEQ ID NO: 14275 - DNA, 306 bp, Glycine max
  Clone ID: LIB3094-052-Q1-K1-G4
cttgatgatcccaacactttcggtaacaggattcacaggatgctgaagcttggactgaggattgattaagatgctggtgaagcagatgctgacatgcctcctcttgaggacgctgatgcagatgctgagggtagcaagatggaagaagttgattaaatctgacttaattgcctgttacgtttgtagaaacaatgattggagaaacagtctttttactatgttgtatgttatttgaaatttcgaaagtttggaacgttggctagttatgtgccgtatgtagtaagtttctttatgggaaaaaaataa

SEQ ID NO: 14276 - DNA, 270 bp, Glycine max
  Clone ID: LIB3094-052-Q1-K1-G5
cactcgtccgttcatgcattgcatccctttttatttttagtatgttttgggctttatagggaagttttgccaaatcattaggggttttaagatcatattgtgttgttttgcaacaatggctaatttctatgtttctatgatcttagcactttttgccatttccatactttaaacatatgttattactgcttaattaacaacttatgccacttgtataacaactatatctaatattgatatgtatatttcaatattttccaatgcccatca

SEQ ID NO: 14277 - DNA, 423 bp, Glycine max
  Clone ID: LIB3094-052-Q1-K1-G9
gagtggacctgtctcatctacccatcaatatggttattcactactcatggccatgtcagttttgtaatcaaccggggccattggcttccttatgtcattctactttgtgcactacttgttctcatcagtaaagatagattgaggttcttgttgtcattgcatattaactatgaaaaaggttgattgatataacttgatcacattgcatagtatggcaacggatgtttaattcatcgtctgattttatattgcgatgggatctgcaatttgttctccttctgcctgtttcccaaagtagtgtactcattcaagtattcaactagtgtttgagatcatgttttaagtaatttgttcaagtttctttagaaagttgaaattcaaactctcattctaattaaatacttaaaaaaaatgattcagatt

SEQ ID NO: 14278 - DNA, 246 bp, Glycine max
  Clone ID: LIB3094-052-Q1-K1-H11
tcccccgtcgagccactcgtacgagtttttttcacatgcctccgttgtcctttttataatccgcaatgtacgttagccatggaggttctcaatgaacatcaggcccggccaatccccctatgccaggccccgctccccagctcgcctgtgctcgccattccccacggcctcaatggcccttgaccgctccttcagcccggaccacctgaatgtctccccgtcccgcgtcctgcatcggtacccatc

SEQ ID NO: 14279 - DNA, 349 bp, Glycine max
  Clone ID: LIB3094-052-Q1-K1-H9
cgcatgcctccgttgtcctatttataatccgcaatggaggtgagccgttgtggggacccgatgaacatcaggcccggccgggcccccgatgccaggccccgctccccagcgcgccggggctcgccgatccccacggcctcaatggcccggggccgctcccccagcccggcccaccggaatgtctccccgtcccgcgtcctgcagcggtacccatcccgtggccgtactccctgcctcagccccgtgcctgtccctctcagcccaccctactcggccgtcatcaccggcaccttcacggagtacaaaggcagccgctttggggagcccatcgagacgtacgttacgcgcg

SEQ ID NO: 14280 - DNA, 441 bp, Glycine max
  unsure at all n locations
  Clone ID: LIB3094-053-Q1-K1-A12
ggtctctaagtttcactttctttgcatagggcaacctcctttctctgtgactctgaatatcggatcgtttaataataatttctaattctctctaatcaggtccattgaatatgtctccgtcgttggatcttcctcccaagggtggcttcagttttgatctatcccgaaaaaacgcaatgcttcaaaacaggggcctcaaagccccaacctttctcaaaactggcaccactattgtcggtttagttttccaggatggtgtcattcttggtgctgatactagggcaactgaaggacctatagtggctgataaaaactgtgagaaaattcattatatggcacccaacatatattgctgtggagcangcacagctgctgatacagaggcttgtacagacatggntagctcacagctgcaattacatcgctaccatactggtcgag

SEQ ID NO: 14281 - DNA, 210 bp, Glycine max
  Clone ID: LIB3094-053-Q1-K1-A2
gttctcccccatctcgcgtcgttagttcattgaactcacttcattgagtggatttggtacaagttgagttcagaatggattggccacattataaacaataaaacatagtccgtattatttttccttctcttaattaatctcacctatttttgtttttcatatattttctatcatataattttctattatctttttattatttctcttatt

SEQ ID NO: 14282 - DNA, 381 bp, Glycine max
  Clone ID: LIB3094-053-Q1-K1-A3
agaagccatgattcggcttgacatgagtgaattcatggaaaggcacacagtctccaaactgattggttcacctcctggatacgttggttacactgagggtggtcaactgaccgaggcagttcggcgtcgtccctacactgttgtactctttgatgagattgagaaagcccatcctgatgtattcaacatgatgcttcagatcctggaagatggaagattaacagacagcaaaggaagaactgtggacttcaagaacacgcttcttataatgacatcaaatgttggaagcagtgtgattgagaaaggaggcccgaaaataagatttgaccttgattatgatgagaaggatagcagttacaaccgaatcaagagcttggtgac

SEQ ID NO: 14283 - DNA, 438 bp, Glycine max
  unsure at all n locations
  Clone ID: LIB3094-053-Q1-K1-A4
gagaagccatgattcggcttgacatgtgtgttttcatggaaaggcacacagtctgggactgattggttcacctcctggatacgttggttacactgagggtggtcaactgaccgaggcagttcggcgtcgtccctacactgntgtactctttgatgagattgagaaagcccatcctgatgtattcaacatgatgcttcagatcctggaagatggaagattaacagacagcaaaggaagaactgtggacttcaagaacacgcttcttataatgacatcaaatgttggaagcagtgtgattgagaaaggaggccgtaaaataggatttgaccttgattatgatgagaaggatagcagttacaaccgaatcaagagcttggtgactgaggaactgaagcaatacttcatgccagagttcttgataggatggatgaaatgatt

SEQ ID NO: 14284 - DNA, 465 bp, Glycine max
  unsure at all n locations
  Clone ID: LIB3094-053-Q1-K1-A8
gtttttggcccgttaatttccgagcaatcgttcgccgtcgcttgaagctgctgctgctgctgcccgttgtgaagtgtttgttctccgtcatctcgcgtcgttagttcattgaactcactgcattgagtggatttggtacaagttgagttcagaatggatgggcgacatcagaagcaaaaaaacaagtacagtataattgttcctacatataatgagcgtctcaacattggtctcattgtttacctcatcttcaagcaccttggggatgctgattttgaaattattattgtggacgatgggagtcctgatggtactcaggatgttgtaaaacaactgcagcaagtttatggagaagatcggattctgttaagagcacgccctangaagttgggtttgggaactgcttatattcatggcatgaagcatgcatcttgaaatttttgtggcatcatggatgctgatcta

SEQ ID NO: 14285 - DNA, 295 bp, Glycine max; identical to SEQ ID NO: 11959
  Clone ID: LIB3094-053-Q1-K1-B1

SEQ ID NO: 14286 - DNA, 436 bp, Glycine max
  Clone ID: LIB3094-053-Q1-K1-B10
tttgaatacattccttgtagtttatactgaacgatgggtttgaagatggcgttactgatcctaggcgtttccctcatgctccttttggtctcctctgaggtggcatccacgaatacaaaagaggaggcatatggagtggatgatgccaaatatcccggtggaagctatggagggggttacccaggtcatggcggtggcggttatcctggccatggcggtggcggttatcctggccatggcggtggtggtggctatcctggtcatggtggtggccaccctggtcatggtggcggctaccctggccgaggtggtagatactgtatgcatggctgttgcggtggccggacatacaacggaggctgcagaaggtgctgatataacactggcgaagctgttgctgacatactcaatataagactcacgattaagacgatgc

SEQ ID NO: 14287 - DNA, 425 bp, Glycine max
  Clone ID: LIB3094-052-Q1-K1-E7
gttggtgcacactcctcatcagccatgtatctgcattcatctcagtatccctgtcagcgggctggaatgccgtttatacatcatgaacatgttcaccaaccctttgcacagtctcatcagcccccaccagatgcaagttttggattggcccggccccggtgaggggcatgggccatgcctgcacccaatcagccagtggtataagataagatcatgggctgctgcagctccaaatttcttttagctgattggagtgcaggcatataggccgagtttggctggaatggattggcttatatttgaaatatcagcccaccagcattgatctatccctccaatctcggctttgcaaggatgcttcctgcatcttccaccagtccgtgactgtgtccctagtagacatttgaattttttgaggagctttt

SEQ ID NO: 14288 - DNA, 347 bp, Glycine max
  Clone ID: LIB3094-052-Q1-K1-A10
ccttaaatttcttatcatatctgactaattttacttttacaacctttcctcttatgaaggctttttaaatatctgaatcctactatcaaattcctactaccttctatcctttttctgattcaaattctcatgacttctttccttcatcaaaacattatctgcatattcgcttacatcatctaaatgtaatgaaaatccttacaacctttcattcattgaaaaaagaattcaactataacaatatacttaaacatgttaataaatactttcttttcaatgcaacattttttcatgacccataactattacattttattcaactttaaatttatcatacgaataatttt

SEQ ID NO: 14289 - DNA, 227 bp, Glycine max
  unsure at all n locations
  Clone ID: LIB3094-052-Q1-K1-A12
tttctcccactcatccatcctacttactcactaactacatacctttctataatggcagtcttctatnaactttaagtctaactagacaataactatacgtcttctatactaatcatgacccatataccaataacttattaactccctcaaaaaattattcttttaattactctcatcttctactttatatgatcattcttactacacttccatgttcctaataataa

SEQ ID NO: 14290 - DNA, 433 bp, Glycine max
  Clone ID: LIB3094-052-Q1-K1-A4
cccacgcgtccggtgatttcagtgagtgatcggtgttcacttgatctcatcataatcgtcggcgtcaatttgagaagatgccgatcagaaacatcgccgtcggaaggcctgaagaggcgactcaccccgacacgttgaaggcggctttggctgagttcatctcaaccttcatcttcgtgttcgccggctcaggctccggcatcgcctacaacaagctcaccgacaacggcgctgccacccctgccggcctcatctccgccttcatcgcccatgcattcgccctcttcgtcgccgtctccgtcggcgccaacatcttcggcggccacgtcaaccccgccgtcaccttcggcgcctttgtcggcggcaacatcaccttcctccgcggcatcgtctacgtcatcggccagctcctcggctccatcgtcgccttcct

SEQ ID NO: 14291 - DNA, 414 bp, Glycine max
  Clone ID: LIB3094-052-Q1-K1-A6
catgctcctctctgaattcctcttattcattaatttggagagtattgatgtatcattgtagtataatctagtagccaatgaagatatggagttttctatgattttcattgttagcaacattatgctgcttttcagttcagcatttgccaaaactgctagtcctccctctctgagcccaactccagcaccagccccggcaccagacttcgtgaacctcactgagttactcagtgttgctggtccgtttcacacctttcttggataccttgagtccactaaagtgattgacactttccaaaaccaaaccaacaacactgaataaggaattaccatctttgttcctaatgacagtgccttcaatgctataaagaaaactaccctatccaacctcacctttaaccagctaaagcaagt

SEQ ID NO: 14292 - DNA, 418 bp, Glycine max
  Clone ID: LIB3094-052-Q1-K1-A7
gtcttcttctctaaaataaaaaaccctaacttctgaacctttcaccggggcgccaccgatgccctatctccactaatcaaagaaaagaaaatgagtagacgctcgagcagaactgtctacgttgggaatctacccggtgatatccgtgaaagagaagttgaagatttgtttctgaagtacggacacataacacacatcgacctaaaggttcccccaagaccacctggttatgcatttgtagagtttgaagatgctcaagatgctgaggatgcaattcgtggtcgtgatggctatgattttgatggccaccggttacgggtggagcctgcccatggtgggcgtggtcattcatcctcaaaagatcggcacaatagtcacagcaatggccgaggtggacgttgggtatctaggcgctctg

SEQ ID NO: 14293 - DNA, 177 bp, Glycine max
  Clone ID: LIB3094-052-Q1-K1-B11
aactctccaatctccatgattaaagcttttatgccatttactaacctatcgctaaacgattctaaatactttatctaaaggtttcctaataaattcaacgaatttatttcaaaagactaatcttaatatgccaataatcaactctataaaacttttaccaaagttaccatttcttaa

SEQ ID NO: 14294 - DNA, 422 bp, Glycine max
  Clone ID: LIB3094-052-Q1-K1-B2
ttctcttcgagggtttgggtttctcttcctcccttggagaaaaagaagagccaccgctgggacgccgttcgtgcatttttgaggtgccgctgtcatgtttgggcgtggtggaccaaggaggagtgataactccaaatattatgatattctcgggatttccaaaaatgccagtgaagatgaaatcaagaaggcctatagaaaggcggctatgaagaaccatccagataagggaggagatcctgaaaagtttaaagagttaggtcaagcatatgaagttttaagtgatcctgagaagaaagaactgtatgaccagtatggtgaagatgcccttaaagaagggatggggggaggaagctcgtttcataatccatttgatatatttgaatcattttttggaggagcaagctttggtggtggtggta

SEQ ID NO: 14295 - DNA, 398 bp, Glycine max
  Clone ID: LIB3094-052-Q1-K1-B9
ggtgtgtgcaacccattggtgaagtctttagttgccctcatccaccaatttatcatattgacatttttttcactagctaattcaaccccatacttgggaggagtgcttctgctgattgcttctgcctagctagcagcgtcaaaatacttggatacccaatttactgcattgcgtaaagaggaagaactcgacaaagacattgaacgagcagccgccgtcaagataccactggtggctgaaactgacagtggaaatcgttctcttgcaactggttcaccaatgaatccatccttaagtgacttctcaatcaatccatctgaagccttaactcctcgcaattaaaatgtgcctttcttctttgagaaatttcctcacataatgaacaaattgaactcttt

SEQ ID NO: 14296 - DNA, 430 bp, Glycine max
  Clone ID: LIB3094-052-Q1-K1-C5
tgtggacctcacagtgaggctggagaaggattcctcctacgatgaaattaaaaatgctatgaaggattaatcagagggcaagttgaagggaattcttggttacactgaagatgatgtggtctccaccgactttgtgggcgatagcagatcaagtatttttgatgcaaaggctggaattgcattgaataagaactttgtgaagcttgtctcttggtatgacaacgagtggggatacagctcacgtgtcattgacctgcttgtattcgttgccaagaagtctttttaaggttgtactgaaaaaaaagtagcttgtctagacattatgtgctggtgtctagctgcgatttagtgtcttcttgctcgggcagaaattaaaagtatgaataaatcggtttctgtaaccggtgttggtaccctgttatgagcatta

SEQ ID NO: 14297 - DNA, 320 bp, Glycine max
  Clone ID: LIB3094-052-Q1-K1-C7
caagaaccaacctaccttttgcaatctcaattcaatggcgtcctctctgagtgcgaatcagttcctctcctctaccctcctctccaggtccctccttcgccccgccgcttccgcttcccaccgctctttcaacaccaacgccatgcgccagtatgacaaccgctccgacgaccacagcaccgacatcgatcgtcactcctaacgctctttccctagcactgctcgccacgactatatcttctcatatgttttggatccattttttccgactcggattttgacccatgttcttaacatgatggaccatatcatggacaatc

SEQ ID NO: 14298 - DNA, 359 bp, Glycine max
  Clone ID: LIB3094-052-Q1-K1-D1
cggtcgacccacctccggtgctgtctctgagggccatagtttgttccctttgaactttaatctccacccaaacggcattttcagtaaatttccttggaaaagaaagagcgaataggaaaatgcataatcacatgctgaagcagcagcagcatcagcaacaacaagctcttatgcatcaagctcttcttcaacaacagtctctctaccaccctttcctccttgctcctcctcatattgaaccatattcaagttgaaatttgccttctggttttgatccaagtacattcctcattttgtatttttttaacattcttacacattttaactgatcccttttttgcaataatttttcttttttt

SEQ ID NO: 14299 - DNA, 406 bp, Glycine max
  Clone ID: LIB3094-052-Q1-K1-D3
gcttcctcctcttacgagcctttcctttcagtccattgattctgtgggtgcgggtgcagggaaaccgagcgagaccctgatcggcgtcggcacaccgccggagaacaagatgattgtctgcgtcgccgtcgtcggtcaccagaacaatccgctgtacatacagagcttcacggaggccgatgatgctctcaagctccaccacatcgtccattgctcgctcgatgtggtcgacgagcgagtgaacaatcctaaaaagtctgggccgatgcttaatgagacgtttttgggactgctttatcctattgaaaactacaaagtatatggatatctgactaataccaaggtgaaatttatcttggtgaccacggatctggatgttaaagatgcggatgtaaggaattttttc

SEQ ID NO: 14300 - DNA, 387 bp, Glycine max
  Clone ID: LIB3094-052-Q1-K1-D6
cccacgcgttcgcccaatcctccgaccactttttccgcgtacccttggatgctatatgctgatacctttttatccttgagttctaatgaaacaagaacctaacttttgtggatgaatcaataacctgttatcaaaacctgaataaccggcccggttaatttctctttggagtaatcttatcttttgctgtataggatccttcttatgacactttcattttcctctgaattgtcatactgttgtcttacataccaaaaaataaaaaaagacataaaagtaataaaaaagaataaaatataaattaaatataaaaattaaataacttctatttaaatataattctttataaaaataaatcttttgaataaaataataaaatataaaaat

SEQ ID NO: 14301 - DNA, 281 bp, Glycine max
  unsure at all n locations
  Clone ID: LIB3094-052-Q1-K1-E11
aacacgcctttctaccacaccaaaattaagcatcatttaaaatcataaaatcacacatcaactagccgatttnttaaataaaacattccccactcatattttcacactttattaacaactttcttcccttttaactcatacctcctcctctaataccttcccttttcataaaatcaactccccaactattcacacttaaacttactataccacaccttttcaattttcccaaccctttccttatataaaattttattaacacttctctcatattcctttca

SEQ ID NO: 14302 - DNA, 388 bp, Glycine max
  Clone ID: LIB3094-052-Q1-K1-E4
atcgaaaccttaagtttcggatcaggtctgagcaatctggttggtagaacctttggtctgagagagtcaagttttatgtctgaattagacgatcaaattcctactgccttcgatccttttgctgatgcaaatgctgatgactcgggtgctgggtcaaaggagtatgtgcatattcgcgtacagcagcgaaatggaaggaaaagcctgacaaccgttcagggattgaaaaaagaattcagctataacaagatacttaaagatgttaagaaagagttctgttgcaatggaacagttgttcatgacccaaaactaggacaggttattcaactttaatgtgatcagaggaaaaatgtttctacctttctgggccaagctggtttcgtgaaaa

SEQ ID NO: 14303 - DNA, 432 bp, Glycine max
  Clone ID: LIB3094-052-Q1-K1-E5
ctgagttgcaagattcacttcaaattatgcgtttcgctgatcggttcctcatcacatcaagcgacgtcgcagatcatcgcaattccttgattatttccttttgttgatacgcggaatcgcgcacacggtgctggtgtgtgcactgaggtagaaagaagaagattgaattgtaaacagcatgaattaccttcttggagctttcaagcctgcatgtaatgtcttgatcacgtttaatgatgggaagaaccggaagcaggttccgtttaaaaaagaaaatggtcaaatggtcacagtcccacttttccaaagtcaagaaaacattggtgggaagattacaatagaaccaatgcaagggaagaagattgatcacaatggtgtaaaagttgagctccttggacagatagagatgtattttgacagaggaaattttta

SEQ ID NO: 14304 - DNA, 302 bp, Glycine max
  Clone ID: LIB3094-052-Q1-K1-A1
tcgcccacgcgttcgtccacgcgttcgcagggaagttgtggaagttgttgggcgttctcaacggtggccacagtgggagcaataaacaagatagtgacagggaagtttgtgtccttatctgaacaagaacttgtggactgtgacagagcctacaatgaatgatgcaatggtggccttatggactatgcattcgaatttcatattcaaaatggaagcattgactcatacaaagattacccataccgtggctctgatggcatctgtgatccaacttagaaaaatgcaaatgttgtgaacattga

SEQ ID NO: 14305 - DNA, 439 bp, Glycine max
  unsure at all n locations
  Clone ID: LIB3094-051-Q1-K1-D7
attgctgctgtttgcctattggtgtactttggggtctctaccctgctggatgcctcatctggcgatgggggaaaatcagatgaagagcagaaggaggcagaactagcagtttctgaattttctggaaatggtgctgggatactatctgctgctagcacagttgccagtacttttctcttagtttttgttgctgaatggggcgacaagtcatttttctccacaattgcccttgcagcagcttcttctccccttggagtcatagctggagcactggctggtcatggtgttgcaactttgctagctgtacttgggggttctttacttgggacgtatttgtcagagaaggttattgcctacatcggaggtgttctctttctcgtctttgccgcaataaccttatttgaaattgtgcaatangggttaaaaagaaatgcaatat

SEQ ID NO: 14306 - DNA, 393 bp, Glycine max
  unsure at all n locations
  Clone ID: LIB3094-051-Q1-K1-D8
aggcctgtncttagtttataagcatttctttgtgaggaaaaaagaagaagagttaggaagatggcttcnaccgnaccggtaccttttttgatggcggcggggatgacgtacataacatactcaaacatatgcgcgaatctgctcaggaattgcctcaaggaaccctacaaggccgaatccctctctcgtgagaagctccattttgttctctccaaatgggtcgacgccaagcctgaaaaacctactattcgttcagacaccccatagcagtgatctggaatagttggaagctataaatgcataaatctttgagatctggaagttcattgtcattttgaacctttctgtgatgtttaattcctttgtttttttctctccaataaatggaacatg

SEQ ID NO: 14307 - DNA, 391 bp, Glycine max
  unsure at all n locations
  Clone ID: LIB3094-051-Q1-K1-E1
aagagtcaaanaaaggggtggttgctgctttttaagctaataatttttaggccataagtcatatttttcgcagcatcaaactaacaaattactcatatcatataataagatggcccgttctctctcgcaagccaaacgtattggtgtccttgttgctcaatctatctccctaattcccgttcatcggcgaggttactcagtggcatccgatgtatcggtaagagttggattgggtaatattgggcgaaggaatggaatcgtgggaggtgtagaagagaagcctgatacaagagatggttcaaaagcctactcaactgatttttccccatacccattaacatgttactatatgcccattaaccacaccccttaaattgacccggtggagctt

SEQ ID NO: 14308 - DNA, 227 bp, Glycine max
  Clone ID: LIB3094-051-Q1-K1-E10
tttctgatccttgtttttgagatattgtatgaatttaccgattgtttttcatatggggttataattgaggcatgctgtggtgtttgtgttaatcggtgcgttgtggaacttgcaaagggcatagggtatccgatttgtgatagacagagactagtgtttcttccatgatgtgaagtaccaaggttgacactgttcatgtctctttcgttggtattaaggctgattct

SEQ ID NO: 14309 - DNA, 448 bp, Glycine max
  unsure at all n locations
  Clone ID: LIB3094-051-Q1-K1-E7
gaagttgcgagagtgaanaaatggcgcaagacttggcattggatttggaggagcttcgccggctccacaggatcgccaaaagacctcgaaccctctctcttctctcctccgaaattcgtaacctcgaaaagttatcgtcagaggaagcttctgcgcagattccggcgccgatttcgaccggaactaaagtggcgccttcacctgcgctgaagtatgcggcactcgcgtcgttcagttgggaccaggatagtgacaaagttaagatatatgtgttaatggagggaatcgatgagaataaggttgaatccgagtttaagtcgatgtcattcgatgttaagttccatgatgttcaagggaagaactaccgatgtgcaatatcaaaattgcacaatgagatattaccagagaaatgcaaggttgtggtcaagcctaaaaaggcaatcatcac

SEQ ID NO: 14310 - DNA, 433 bp, Glycine max
  Clone ID: LIB3094-051-Q1-K1-F1
ctcaccattttcaccgcacgaatatcttgttgtttggagcgatccgagaaagactctgtagacatgttggtttaccaggacctccttacaggtgatgagcttctctctgactccttccgttacaaggaaattgagaatggaatgctgtgggaagttgaggggaagtgggttgttaaaggagcagttgatgtagacattggtgcaaacccttctgctgagggtggaggagaagatgagggagttgatgatgcagctgttaaggttgttgacattgttgacacattcagacttcaggagcaacccgcattcgataagaagcagtttgttaccttcatgaagaggtttatcaagaatttgactcccaagctcgatgcagagcaacaggagttgtttaagaagcacatcgagggagcaactaaatacctgctctcta

SEQ ID NO: 14311 - DNA, 161 bp, Glycine max
  Clone ID: LIB3094-051-Q1-K1-F10
tatttcagtgagttattcttgttcacttgatctcatcataatcgtcggcttctatttaataatatgccgatcataaacatctccctcctaaagccttaataatctactcacccctacacctttaaatcttctttcgcttatttcatcttaacctttatctt

SEQ ID NO: 14312 - DNA, 301 bp, Glycine max
  Clone ID: LIB3094-051-Q1-K1-F4
ccaaaccaatccaccccttctttaaaactctttttttctctcccttcctctcatctctcccataccctaatcctatcctcttcattcctcttttctccatctacaccttccctttctctccaacctcctcaaccctaataaacctaatctatcttatataatattctatctcttatattttatccaaactaaactattccttctcactcttatctttatcgacatatctatcaacttatttatctcaatcctctttcttaatcttaaattaattctcctttctatcaatctattactattc

SEQ ID NO: 14313 - DNA, 427 bp, Glycine max
  Clone ID: LIB3094-051-Q1-K1-F6
agaaagaccaatccgaggagacgaatagacatagaaaaggctcacacaccacccgtggaaggaatgaatgattgagaaaccaaatcaaaccacgccagcttcaaaacgctgcgtttcactcccgtcctcgcgtcgctcccaaaccctaatcctatccgcggcattcctctggtcgccgtcgacaccgtcccggtcgcgccaaccgccgtaacccgaagaaaccgaatcgatctgagagaaggtgcgatctcggaggtgggagccaaacgaaacgatgccgtctcacgcggatctggagcgacagatcgagcagctgatggactgcaagcctctgtcggagtcggaggtgaaggcgctgtgcgatcaagcgaggacgattcttgtggaggagtggaacgtgcaaccggttaaatgccccgtcaccgtc

SEQ ID NO: 14314 - DNA, 438 bp, Glycine max
  unsure at all n locations
  Clone ID: LIB3094-051-Q1-K1-G1
tctgttcattattatgtgcagtcacacattctaattaatgaatatcgtgagcgtataatcgtgccttctgcatcaaagaagcaggggcgacctattaccacttgtataaaggttttagacatgactggtctgaagttatcagccctgaatcagattaagttgctaactattatatcatccattgatgatctgaactaccctgagaagacaaatacttattacattgtaaatgctccatacatattttctgcttgttggaaggttgtgaagccacttttacaagagaggacaagaagaaaaatacaggtgttaccaggttgtggacgagatgagctattgactatcatggattactcgtctctaccacatttctgtcgaagagaangctctggatcatccagacattctgagagtggtagtgaaaattgctattccttg

SEQ ID NO: 14315 - DNA, 406 bp, Glycine max
  Clone ID: LIB3094-051-Q1-K1-G3
cccacgcgtccggttttctattctattcgacttatacttcttcaaatcgccagctcatccggtctcaccaaccaattacaaatactatttctagcgctgtcaaatttccaagtccgactcccccatcgataatagaagtgaagaagccgccgccggcgaccataatctctggaccctctggaccctctggaacctctggagccttatacaactatgctgggaatgggaatagcaagacccaaactaagaatggaaaccttcttggcaaccgtcttggcaatgaaaagtgacaacaatcagaacaagaaaaagactttcaagtgaaaactcactcacttacttgcttcttggacagacagtttcatttcaatagctttggtgaatagtacatacatgatgatgctct

SEQ ID NO: 14316 - DNA, 419 bp, Glycine max
  unsure at all n locations
  Clone ID: LIB3094-051-Q1-K1-G5
gttcgagcgacgcgtccgaaacacccttgtcnaccacaccaaaattaaatacataaaaattcataaaagcacaaaaagacgtaaaatagggaaaattaaacattttgaagtcatatttgcacacttgattaaaggctgtcgtcccttgtgacggatgcgtggggtgctaataccttccctgtgcgtaaaaacaactcccgaactattcacacttaaagttcgtagaccacaccttttcaattttcccgacgctttcctcaaataaaagttggtggcgactccgcgcattttcctttcatggaagacgcacttgtgagtcccgcatcgccctcccgtcaaagggtaggttgcgacagtacttgccctcccgccgaagggtaagttccttaatttgaattaactaataacaaaaatgaaac

SEQ ID NO: 14317 - DNA, 351 bp, Glycine max
  unsure at all n locations
  Clone ID: LIB3094-051-Q1-K1-G8
ttttctccttttttncaaacacccccncaagacgctttaagcaaaattataaaccaccacctccacccatttnnaaagcttctccctttctcctccactttcacccaacaaaaaaatgatattcaacttcaagcttacaacaatcctttcatcaccacttcatacataacatacattttcacataccacacctctcatttccaatgaaaacattatgatattaaagtaacagactctaatacccttctcttntttgacacacccatcacccattatcaaaccacaaaccctaataaaaatccatttacctacaataaaacttataacaataattaatcaaccaatctattc

SEQ ID NO: 14318 - DNA, 425 bp, Glycine max
  unsure at all n locations
  Clone ID: LIB3094-051-Q1-K1-G9
cggaacanggactcactctcttcgcagtgtcactctcggtggctttcatcttctcggnttgtcaagatgtacacatcgaggaagaaaattcacaaagataaagatgctgaaccaactgaatttgaagaatcagttggacaggcattgtttgatctagaaaataccaacaatgagctgaaaagtgatctgaaagatttatacataaactcagctgtccaaattgatgtttctggcaaccgaaaggctgtggttatccatgtcccctacagactaangaaaggattccggaagattcatgtcaggcttgtgagaaaacttgagaaaaagtttaatggaaaagatgtaatcttgattgccaaccagaagattattaagccaccaaagaaaagttcttcttgtcaacgcccccgtaccagaacaattac

SEQ ID NO: 14319 - DNA, 307 bp, Glycine max
  unsure at all n locations
  Clone ID: LIB3094-051-Q1-K1-H10
gaccgacgcgtacggaggtgtttgtctgatgatgttggtaggtcttgcaatcgagggcgagggcaagggcaatcttgtcnaaattatgggaggaatggagcggatggtgatggcagaatgaggaagaatgggaatgggagaaggtttttgtccaataatgttgatcggtctagcggtggagaacagtcttctcctttgaattatgggggggatggaatgaatggtgatggtagattgaagaggaatgggaatgggaggagggttttgtctgatgaggatagtaaccatggataacggtcttcttatt

SEQ ID NO: 14320 - DNA, 377 bp, Glycine max
  unsure at all n locations
  Clone ID: LIB3094-051-Q1-K1-H8
ttctaattcttttatcatttatttgaagattgatatgtcaagtgggaaaaccantagccaaagaagatattnaattttctatgattttcattgctaccacattatgctgcttttcagttcagcatttgccaaaactgctaatcctccctctctgagcccaactccagcaccatcccctgcaccagacttcgtgaacctcactgagttactcagtgttgctggtccgtttcacaccttccttggataccttgagtccactaaagtgattgacactttccaaaaccaaaccaacaacacttaagaaaggaattaccacctttgttcctaaagacaatgccttcaatgctataaaaaaaactaccctatccaacctcacc

SEQ ID NO: 14321 - DNA, 271 bp, Glycine max
  Clone ID: LIB3094-051-Q1-K1-H9
cccacgcgtccgtcaagcattgcatccctctttatttgtagtttgttttgtgctttagataggaggtctgccaaatcaagaggggttttaagatcatagtgtgtgttttgcaacaatggctaagttctttgctgctatgatcttggcactctttgccatttccatacttcaaacagtggtaatggctgctaatgaacaaggaggccacttgtatgacaacaagagcaaatatggaagtggaagtgtcaagagttaccaatgcccattacaa

SEQ ID NO: 14322 - DNA, 381 bp, Glycine max
  Clone ID: LIB3094-051-Q1-K1-D6
gcgtttgagtacattccttgtagtttatactgaatgatgggttttaagatggcgttactgatccgaggcctttgcctcatgctccttttggtctcctctgaggtggcatccacgaatacaaaagaggaggcaaatggagtggatgatgccaaatatcccggtggaagctatggagggggttacccaggtcatggcggtggcggttatcctggccatggcggtggcggttatcctggccatggcggtggtggtggctatcctggtcatggtggtggccaccctggtcatggtggcggctaccctggccgtggtggtggatactgtaagcatggctgttgcggtggccggacatacaacggaagttgcaaaaagtgctgctat

SEQ ID NO: 14323 - DNA, 463 bp, Glycine max
  Clone ID: LIB3094-050-Q1-K1-G12
cctcccacactttctggggttattgaggagaatgttacctgagtccaatagttacttttaaaaggctcacagccaattgaactataaccctactgaccaggcttcattcccctcaaaaatacttccttcatttcactatacttcaaacttcaaaccacaagatcatatgtgtatctacttacctatctagcttctctctttattttgaatgatctctctacacacacatcatgtatgtgtttcataacttgatatctttccttgcaaattttcaattcatagaaatgctgtctgtctctatatcatgcatcaacaatatactacttatatcagttaaagtctccaattcaaatttcccctcttaacacacacacataataaatgattctctgaccatgcttcattccccccacccaacctttgttttctattcctttcaatttctatctcttcattttcaaat

SEQ ID NO: 14324 - DNA, 492 bp, Glycine max
  unsure at all n locations
  Clone ID: LIB3094-050-Q1-K1-G6
gcgattgctgctgtttgcctattggtgtactttggggtctctaccctgctggatgccgcatggagcgatggccaaaaatcagatgaagagcagaaggaggcagaactagcagtttctgaattttctggaaatggtgctgggatactatctgctgctagcacagttgccagtacttttctcttagtttttgttgctgaatggggcgacaagtcattgatctccacaattgcccttgcagcagcttcttctccccttggagtcatagctggagcactggctggtcatggtgttgcaactttgctagctgtacttgggggttctttacttgggacgtatttgtcagagaaggttattgcctacatcggaggtgttctctttctcgtctttgccgcaataaccttatttgaaattgtgcaatangtgttaaaagaaatgcaatataatctccgtgcaaagggttcaagaacgtaatgacctctagagttgtatgat

SEQ ID NO: 14325 - DNA, 295 bp, Glycine max
  Clone ID: LIB3094-050-Q1-K1-G7
ttttttttttttttttatttttttttttctttattttttttattacttttttttttttatttttttcttttttttttttttaattttttttttttttttttttttttttttttttttttttttttttttttttttatttttttttttttttttttttttttttttttttttttcttttttttttttttttttttttttttttttttttctttttttttttttttctttttatttttttttttttttttttttttttttttttttttatttatttttttttttttttttttttttt

SEQ ID NO: 14326 - DNA, 442 bp, Glycine max
  Clone ID: LIB3094-050-Q1-K1-H1
cgctgggttgcgagattcacttcaaattatgtttggttctgatcggttcctcatcacattaggctacgtttgattcatcgcggccctagattatgttcttttgttgattctcggaattgtgcacactgtgctggtgtgtgcactgacgtagaaagaagaagattgaattgtaaacagcatgaattaccttcttggagctttcaagcctgcatataaagtcttgatcacgtttaatgatgggaagaaccggaagcaggttccgtttaattttgaacatggtcaaatggtcacagtcccacttttccaaagtcaagaaaacattgttgggaagattacaatataaccaatgcaaggtatgaagattgatcacaatggtgtaaaagttgagcttcttggacagatcgatatgtatttttacacattaatattttattgctttact

SEQ ID NO: 14327 - DNA, 302 bp, Glycine max
  Clone ID: LIB3094-050-Q1-K1-H11
gcgtccgctggatgatcccaacactttttttaacattattcacaggatgctgaagcttgaactgatgattgattaagatgctggtgaagcagatgctgacatgcctcctcttgaggacgctgatgcagatgctgagggtagcaagatggaagaagttgattaaatctgacttaattgcctgttacgtttttagaaacaatgattggagaaacagtctttttactatgttttatgttttttgaattttcgaaattttggaacgttggctagttaggtgccgtatgtagtagtttctttatggt

SEQ ID NO: 14328 - DNA, 338 bp, Glycine max
  Clone ID: LIB3094-050-Q1-K1-H12
cccaacactttctataacatgattcacaggatgctcaagcttgaactttagaaaatttaaaatgcccttgaaccatatcctaacatacctcctcttaatgactctaattcatattcttaagatatcaagattgaataagttaattaaatctgacttaatttcctgttacatttttaaaaacaatgattgtataaacagtctttttactatattttatgtttttttaattttctaaattatgtaacattagctagttaattaccaaatgtattatttttctttatgataaaaaaaaaaaaaaaatgactttcactctacattatccaatcttacttact

SEQ ID NO: 14329 - DNA, 239 bp, Glycine max
  Clone ID: LIB3094-050-Q1-K1-H2
cgatcattggttattattttaaccggggaaaacatgatcaacttgtaaggtctagtctatgaggagactactttattggtaatgtgtatgtcggattaagtggattcgagtgaaatgttgatcaggggagtcatttcgacatattttctggaatataactcttggattataagtttttaaaaaaaaactttaaagcttgaatgtattggtttgatcacgtttaatgatgggaagaactt

SEQ ID NO: 14330 - DNA, 319 bp, Glycine max
  Clone ID: LIB3094-051-Q1-K1-A12
tctactttgagtcttcttgatccttctttttctccttgaactcaaacatttcacgtgaggtttttatgctagattggtcgccaaatccatttgggatgaaggtcaagatttcactttcttaaaaaggtatcaaatattaatacaaagaataggacttgaggaacaagagtcctcttctcctccaaatgaacccggttcacaagaagattccggttctcatccacaatggcaaacccatttgttaattccctcattgctgttcagtacattgaagaggtttggaatgacagaaatcccttgttgccttctgacccttacc

SEQ ID NO: 14331 - DNA, 462 bp, Glycine max
  unsure at all n locations
  Clone ID: LIB3094-051-Q1-K1-A4
gaaaaccggnccgaccgacgcgtccgcggacgcctgggttatcctatttctttgggtttagtgctgcaatggcttcaggtcatgtgggggggacccttttgggagctactggaatcccatttgtgtgcagggttcatattgccctcaagttgaagggagttcaatacaaatatgtcgaagaaaatttgaggaacaagagtgaactgcttctcaaatccaacccagttcacaagaaggttccagtgtttattcacaatgagaagcccatagcagagtctcttgtgattgttgaatacattgatgagacatggaagaacaaccccatcttgccttctgatccttaccaaagagccttggctcgtttctggtccaaattcattgatgataaggtttttggtgctgcatggaaatccgttttcacagctgatgagaaagagcgtgagaagaatgtttaagaaacaa

SEQ ID NO: 14332 - DNA, 412 bp, Glycine max
  unsure at all n locations
  Clone ID: LIB3094-051-Q1-K1-A5
cccacgcgtccgntctaatctcattctccttctgttcaaacactctctctcatggcatcagagaanaatatgaggatcggcatcaacggatttggaaggattggccgtttggtggccagggttgcccttcaaaggaatgatgttgaacttgttgctgtcaacgatcctttcatcaccactgattacatgacatacatgttcaagtacgacaccgttcatggccagtggaagcattttgatgtgaaggtgaaggactctaagacccttctctttggtgagaagcccgtcaccgtttttggaatcaggaaccctgaggaaattccatggggtgaggttggtgctgattatgttgttgagtcaactggtgtattcactgacaaggacaaggctgctgctcacttgaagggtggtg

SEQ ID NO: 14333 - DNA, 263 bp, Glycine max
  Clone ID: LIB3094-051-Q1-K1-A9
ctgatgaactatgttttcatttcaataacaagtgtcactgtttatgaaaggatttatacctaatcagagggctcattaagatcatagtgtgtgttttgcaacaatggctaagttctttgctgctatgatcttggcactctttgccatttccatacttcaaacagtggtaatggctgctaatgaacaaggaggccacttgtatgacaacaagagcaaatatggaagtggaagtgtcaagagttaccaatgcccatcacaatgct

SEQ ID NO: 14334 - DNA, 410 bp, Glycine max
  Clone ID: LIB3094-051-Q1-K1-B8
tgagaagaagggagagaatggaggaaaaggctaaagctgagcagaagaagataggtatgacggagacttgggtgaagaagcaccgtcttctttacaatggagccactagacaccctcttattattagcattcgcgatggcaccatcaacactgcttccttcaaaacatggctcgcacaggattacttgttcgttcgggcgtttgtcccatttgtggctagtgtgctgataaaagcgtggaaggaatcagattgcagtggtgacatggaagtcatattggggggcatggcttctctggaggatgagatttcatggttcaagacagaagccaacaagtggggtatttcactttctgacgttgttcctcagcaggctaacaaaaactattgtgggttgctggaaagtttaatg

SEQ ID NO: 14335 - DNA, 269 bp, Glycine max
  unsure at all n locations
  Clone ID: LIB3094-051-Q1-K1-C11
tggatcctgtgtttttgagattgnagtgtatgatatttactcgattggtttttcactgtngagggttataagatgangcattgctcttggtgatttgtgttaatacggggcagttgtaggaaccttgcaaagtggcagaagggtattccgatttcgtgatagacatgagaccgagtgtttctcccatgatgtgaagtacgagggtgacactgttcatgtctctttcgttgttattaaggctgattctccctggcattaacggtaacaaa

SEQ ID NO: 14336 - DNA, 152 bp, Glycine max
  Clone ID: LIB3094-051-Q1-K1-C2
aaaccactttacaccctcttattattatcattccccattacaccatcaacacttcttccttcaaaacatttctctcacaatattactttttcattcccacctttttcccatttttaactaatttcctaataaaatcctttaaataatcaaat

SEQ ID NO: 14337 - DNA, 448 bp, Glycine max
  Clone ID: LIB3094-051-Q1-K1-C3
tcccacgcgtcctcccacgcgttctccagtctccaacaaaacaaaatccaatggggccgtctgtcgcaatcaacggcgctttccccatctccagagtcactcctccttccgtcaccggccgattctccgccgtctacagcgaggtccaaaacagccgcatctaccacgccctccctctcccctccgttctcaaaaaccctttcatcatcgtcgacggtccccaaagctccgccgccggcaaccctggtctcgctccctcccattcactacttcaattttccgtcgacaattagttctacgtaattttgatattgttatgaatattattatgtgccaatagagctgtgcactcttaggtccattatcctttatttgtcttttaacaataatagataaatatgtataatagtttagggacattctagaatgtgtttgttataattctatt

SEQ ID NO: 14338 - DNA, 423 bp, Glycine max
  Clone ID: LIB3094-051-Q1-K1-C7
cgcgtcgctgctccgtaccagtttcactgcataaatttgagagaaaactctgcaaacatgtgggtttatcgggacctccttacaggtgatgagcttctctcggactccttccgttacaatgaaattgagaatggaatgctgtgggaagttgaggggaagtgggttgttaagggagcagttgatgttgacattggtgcaaacccttctgctgagggtggagaagatgagggagtcgatgacgcagctgttaaggttgttgacattgttgatacattcagacttcaggagcaacccgcttttgataagaaacagtttgttaccttcatgaagaggtttatcaagaatttgactcccaagctcgatgcagagaaacaagagttgtttaagaagcacattgagggagcaactaaatacctgctctct

SEQ ID NO: 14339 - DNA, 425 bp, Glycine max
  Clone ID: LIB3094-051-Q1-K1-D2
cccacgcgtccgcgcgtcgcttctccgtacctttttcactgcataaatttgggagaaaactgtgcaaacatgttggtttatcaggacctccttacaggtgatgagcttctctcggactccttccgttacaatgaaattgagaatggaatgctgtgggaagttgaggggaagtgggttgttaagggagcagttgatgttgacattggtgcaaacccttctgctgagggtggagaagatgagggagtcgatgacgcagctgttaaggttgttgacattgttgatacattcagacttcaggagcaacccgcttttgataagaaacagtttgttaccttcatgaagaggtttatcaagaatttgactcccaagctcgatgcagagaaacaagagttgtttaagaagcacattgatggagcaactaaata

SEQ ID NO: 14340 - DNA, 333 bp, Glycine max
  Clone ID: LIB3094-050-Q1-K1-G11
ccgactcgtccgcccacacgttctgttgttattgaggggaatgttgcctgtggcgatgcgtttcacataggaggttcacagtggatggaactataacgcttcggaccaggcttcattcccctcaaaagtacttccttcatttgtttatacttcaaacttcaaaccacaagatcataggtgtagctacgtacctagctagcttctctctttattttgaaggatctctctacacacacgtcatgtgtgtggttgagaacttgagatgtttccttgcaaaggttaagttgagaggaatgttgtctggctcgaggtcattgatgaagaatagagtac

SEQ ID NO: 14341 - DNA, 469 bp, Glycine max
  Clone ID: LIB3094-050-Q1-K1-C6
gcggttgatctttccggccttgacctctctaaactggatttatcttatgttgatttcggctaggcttgtcttaaaaacgtgtttttttcacgagcaaaccttcaatgtgcaaagtttcgagatgttgatgccgagggctccatctttcacaatgcaactttgcgtgaatgtgaatttactgcggcaaatcttcgtggtgctttattggctggtgcatgccttcagagtgcaaatctacaagatgcttgcttagtagactctagcttctgtggagcagatctgcgtactgcacatctacagaatgcagatcttaccaatgccaatctagagggagccgtcctagaaggagctaatttgaagggtgcaaaactgaacaaagcaaacctgaagggtgcaaaccttcaacgagcttatctttgtcgtgtcaatcttcgagatacagaattggaaggtgcgaggctcgatggtg

SEQ ID NO: 14342 - DNA, 408 bp, Glycine max
  Clone ID: LIB3094-050-Q1-K1-C9
acgcgtccgcccgctcgtccgcccacgcgttcggaatatatgaatataccttacggatggaggaatcagtaagcatttaaaattgcatagggcgggtggtgacgaagatggaagacaaagagagtgagagagagaaaaatcttcgctttatgtcaatggcacgaagcaggggtttttacagaagtgagcaacgacgccagatatgagaaaagtgagtttatttggggtcatatttgtaaaaagtggttttgtaattataccctctaattcaagagtgaagaaacaagggtgggatggaaatataaatagtacaatttggtcctagtggtggcttaccctttggcctctttttctaattcagaattttttttaaatatataaaaatggggtgatatgtttacttaaaaa

SEQ ID NO: 14343 - DNA, 420 bp, Glycine max
  Clone ID: LIB3094-050-Q1-K1-D2
aaacacccttgtcgaccacaccaaaattaataacataaaaaagcataaaagcacaaaaatagataggaaagggaaaataaaacattttgaagtcatatttgcacacttgattaaaggctgtcgtcccttgtgacggatgcgtggggtgctaataccttccctgtgcgtaaaaacaactcccgaactattcacacttaaagttcgtagaccacaccttttcaattttcccgacgctttcctcaaataaaagttggtggcgactccgcgcattttcctttcatggaagacgcacttgtgagtcccgcatcgccctcccgtcaaagggtaggttgcgacagtacttgccctcccgccgaagggtaggttccttaattgaattaactaataacaaaagtgaaactaaggctaaaataaactcac

SEQ ID NO: 14344 - DNA, 262 bp, Glycine max
  Clone ID: LIB3094-050-Q1-K1-D3
tctattattcaaaccatatttcatatttacaccaaattttttttaccaaaatttaccatatcacaattcacaaaccccatataatataaatctaaataaatcctccaaaacttcattttttacaaatacactttaaacacaactcaattatcttacatttatccttcaaagacatattcagtactatataaacctctcttcttatatttatatcaaaatatcttttttaaaaaagacaccaactttttcatcgatcataaca

SEQ ID NO: 14345 - DNA, 405 bp, Glycine max
  Clone ID: LIB3094-050-Q1-K1-D4
cccgcgcgccgcccacgcgtccgcccgatttatcttatatatcgaatcatcctcaatatagcctggatttagtgtcaataacgcactgctaaatttctacgactctcaaatatcctctttcctcttttagtccaaccacatgtcatatttgcaccaaatttgttctaccaagattcgtaagatcacatttcacatgccccacataagaaaaacgttattaaattcttgaaagcttcatttttgacaaatacagttgaagctaaattcaattacgtaatatggatccttcacggacaaatgcagggctatatataaccttacttgtgatgttgctacaaaagttgctctgtgaaaaaagacaaaggctcgttcagcgatcatctcattgcagattttgcattcaca

SEQ ID NO: 14346 - DNA, 384 bp, Glycine max
  Clone ID: LIB3094-050-Q1-K1-D5
cctgaacaactctttctcttcttccttctttcgtttttctccctcgcgtagatctacagaggcgggtgtacatatacatttgctctccatgctgacatcaaccagctcctcattctcatcatcaacaccttctactccaacaaggagattttccttcgtgaactcatcagcaacgcctccaatgctttggacaacattcgattcgagagttttacagataagagcaagctcgatactcagccacagttgttcattcatattattccagacaagactaacaatacactgaccattgttgacagtggtattggcatgaccaaatctgatttggtgaacaacttgtgtacaattgctagatctggtaccaatgaattcatggaagcc

SEQ ID NO: 14347 - DNA, 426 bp, Glycine max
  Clone ID: LIB3094-050-Q1-K1-D7
cccacgcgccgcccacgcgtccgccccagttatatcatatatcgtatcatccttaatatagagctgattttgtgtcaattttgcactgtttaatttctacaaatatcaaagatccgccttcctcttttagtcaaaccatatttcatatttgcaccaaattttttttaccaagatttgtaagatcacaattcacatgccccagagaagataagggaaaataaatccttgaaagtttcatttttgacaaatacagttgaagcaaaattgaattacgtaatagttatccttcacggacatatggagggctatataaacctttcttctgatgttggtgcgaaagtggctctgtgaaaaaggacaaaggcttgttcagcgatcataacattgaagattttgtattcacacgtatgaatagggataataata

SEQ ID NO: 14348 - DNA, 457 bp, Glycine max
  Clone ID: LIB3094-050-Q1-K1-E10
cggacgcgtgggcggacgcgtgggttattatccgcagctgcttttattcgcgccgcaagcagtgagccatggccgtcggaaagaacaagcgcatctccaaggggaagaagggtggcaagaagaaggcagctgatccctttgccaagaaggattggtatgacattaaggctccttctgtttttcaagtgaaaaatgttggcaaaaccctcgtctctcgtactcagggtaccaagattgcttctgaaggactcaagcatagagtgtttgaggtctccttggctgatcttcaaggggatgaggatcatgcattcaagaagattaggttgagagctgaagatgtgcaagggaagaatgttctgacaaatttctggggaatggatttcacaacagacaagctgaggtcattggtacgaaaatggcaaactcttattgaagcccatgtggatgtgaagacaac

SEQ ID NO: 14349 - DNA, 279 bp, Glycine max
  Clone ID: LIB3094-050-Q1-K1-E11
tcaatgatatggtctatcaactttcctaatttgatacttctacaagatgttctgttttttgatagattaaaattcgctcaaaaaaaacgcgaaaatattctaatcgtaacttataggattagttacgtagaaaatgaatgatagattcatattcccatacatataaattatatatgaacaaataaaatcttggattacttcttgaaaataaagtataaatctatttttttggagtaaaaatactattccaattatcataataagaaaaaaagtataatt

SEQ ID NO: 14350 - DNA, 200 bp, Glycine max
  Clone ID: LIB3094-050-Q1-K1-E12
taattctccaatctaatacccacatattcctccaattcctcaaccataccaactctaaactctcctcacaccacaagaatatcttcaaagtccacaatcacatctccatcgccatcgatgacctcacctactataaccatcatctctcccactacatgatatccgaatgcattaactataattacacctactactttccc

SEQ ID NO: 14351 - DNA, 376 bp, Glycine max
  unsure at all n locations
  Clone ID: LIB3094-050-Q1-K1-E5
cgacgcacgcgtccgcgggctcttgggtttcaactctctctgtctacattttccatttgcaccaaattctcttcgcgaggggtgttttggatttcaggcttttcgactattaacctgggctacctaaacantgtttgggaaatcagggctctgaataggaaacccgcggctgaagaagccacgaagatgttggaaaagatcgccaaacaggtccaacccatcattctcaaacacaaatggaggatcaaacttctctctgaaatgtgcccaagcaatccacgtcttcttgggttgaaatgtttaactggtatacatgtgaaattgctgctactgaaaccgaacagtgatttggacttctacccgtttgatcaggttc

SEQ ID NO: 14352 - DNA, 474 bp, Glycine max
  unsure at all n locations
  Clone ID: LIB3094-050-Q1-K1-E6
gcgcccgcgcgttctagaaggcctgtgcttagttgataagcataactgggtgaggagggaaagatgagagtgaagaagatggcgtcgagcggagcggtaccgttttggagggcggcggtgatgacgtacataacatactcaaacatatgcgcgaatctgctcaggaattgcctcaaggaaccctacaaggccgaatccctctctcgtgagaagctccattttgttctctccaaatgggtcgacgccaagcctgaaaaacctactattcgttcagacaccccagagcagtgatctggaatagttggaagctataaatgcataaatctttgagatctggaagttcattgtcattttgaacctttctgtgatgtttaattcctttgnttttttctctccatgaaatggaacatgcactggatattgatttgcacggttaatctngtaataatacaagtttaaacgaatgatttaaac

SEQ ID NO: 14353 - DNA, 400 bp, Glycine max
  Clone ID: LIB3094-050-Q1-K1-F3
gttgggcgtaactgcatgctctgtgtcatttttgatggagtttgcctttatatttgtgaggtgcctttataaatatacaattacattttatggtcttgtagactagtgattctagactattggttaaggaactaaaaggagaagtctctaatatgtaaatcatatgaaagtataaaaaaaaatcatgaataacgcaattttatgcctgtatttataaaaccttagttccttaacccgtgtcctcgggacacttgttagcatttgccttcattttatatgtatcattagattattataattgaaaaaaatatggcctactttttgacgtcattttattcattttattaggtgtcatcaaatactttcacttgttggcaatgtttgtcaaaattatacacaa

SEQ ID NO: 14354 - DNA, 476 bp, Glycine max
  unsure at all n locations
  Clone ID: LIB3094-050-Q1-K1-F4
gttgggtgtaactgcatgctctttgccattgttgatggagtttgcctttagatttttaagttgcgcatatagttatacaatttcattttagggtcttgttgactagtgttcctagactattggttaaggaactaaaaggagaagtttttaatatgtaaatcataggaaagtataaaaaaaaatcatgaagaacgcaattttatgccttccaataaaaaaccttagttccttaacccgtgtcctcgggacacttgttagcatttgccttcattttatatgtatcattagattattataattgaaaaaaatagggcctactttttgacgtcattttattcattttattaggggtcatcaaatactttcacttggtggcagtgtttgtcaaaattgtacacaatttgtattttgttcctccaacaaattttcttattctttgtaccaaaagagaagagactcatgcaagctttcagang

SEQ ID NO: 14355 - DNA, 492 bp, Glycine max
  Clone ID: LIB3094-050-Q1-K1-F6
gcgcccacgcgtccggactgcccaagatgtattgacaatgttacggtgcgggcaaaggggcagcatctttctgatcaacaatggtggatacaccatctaggttgaaattcatgatgggccgtacaatgtgattaagaactggaattacactgggttgattgatgcaatccacaatggtgaagggaaatgctggactgccaaggtgttctgtgaagaggagctagttgaagcaattgccacagccacaggacccaagaaagactccttatgcttcattgaggtgattgttcataaggatgacaccagtaaagaattgcttgaatggggctcaagggtttctgctgccaatagccgtcctcccaatcctcagtaatcttcagaatttatcctatgactaaattgctgcagttgccctttagctctatgaaagtgagaatcatttgagatgatgccctttgagggaatttacctttgttaatggcttgaaacatt

SEQ ID NO: 14356 - DNA, 226 bp, Glycine max
  Clone ID: LIB3094-050-Q1-K1-F8
actaaaaggactattttttaatatgtaaatcatattaaagtataaaaaaaaatcatgaacaactcaatcttatgccttacaattattttcttatttccttaacccttgtactcgtttcacttgttagcatttgccttcattttatatgtatcattatattattataattgaaaaaaattagggcctactttttgacttcattttattcattctattacttttcatc

SEQ ID NO: 14357 - DNA, 340 bp, Glycine max
  Clone ID: LIB3094-050-Q1-K1-G10
gttacacgaactgttagagtgttaagactttctgattatgaatttacaattggccaattgcaaattcttaatgtcagcactctacatgctgatctgccacattccactgctgttagaatcatctcaaattctcgtttgtatacacgtaaatcacttatctattagtaggattttaatgtatttcacatatttgtataagtagaaatctctctctgtcatctggtctaggttcaattatgtatgtggtttaacattcatagctgcatgaccaccaagttctcaaatactgtaaatagctgcccaaaaatatatccaacatcaaagattacaaaaataaatt

SEQ ID NO: 14358 - DNA, 482 bp, Glycine max
  Clone ID: LIB3094-050-Q1-K1-A5
cccacgcgtccgagaaggcctgggcttagttgataagcataactgggtgaggaagaaaggaagagagtgaagaagatggcgtcgagcggagcggtaccgttttggagggcggcggggatgacgtacataacatactcaaacatatgcgcgaatctgctcaggaattgcctcaaggaaccctacaaggccgaatccctctctcgtgagaagctccatattgttctctccaaatgggtcgacgccaagcctgaaaaacctactattcgttcagacaccccagagcagtgatctggaatagttggaagctataaatgcataaatctttgagatctggaagttcattgtcattttgaacctttctgtgatgtttaaattccttggttttttctctccatgaaatggaacatgcactggattttgatttgcactgttaatcttgtaataatacaagtttaaacgaatgatttagaactattgacata

SEQ ID NO: 14359 - DNA, 455 bp, Glycine max
  Clone ID: LIB3094-050-Q1-K1-A7
cagaacagggactcactctcttcgcagcgtcactctcggtggctttcatcttctcgggtgagcagggatgtacacatcgaggaagaaaattcacaaggataaggatgctgagccaactgaatttgaggaatcagttggacaggcattgtttgatctagaaaataccaacaatgagctgaaaagtgatctgaaagatttatacataaactcagctgtccaaattgatgtttctggcaaccgaaaggctgtggttatccatgtcccctacagactaaggaaaggattccggaagattcatgtcaggcttgtgagagaacttgagaaaaagtttagtggaaaagatgtaatcttgattgccaccaggaggatagtaaggccaccaaagaaaggttctgctgttcagcgcccccgcaccagaacactcactgctgtacatgaggcaatgctggaagata

SEQ ID NO: 14360 - DNA, 324 bp, Glycine max
  Clone ID: LIB3094-050-Q1-K1-A8
actcactctcttcacatcgttgctttccgtggctttcatcttctcttgtggcaggttgtatcacaagagggccagtgttcattgggattatgatgctgagccgtgtggttctgaggtatcagttggacacgcattcgttgatctacaaaataccaacattgagctgcaaagtgatctgaaagatttatacataaagatagagggtgaaattgatgtttctggcaaccgaaaggcttgcggtatccatattctctacatactaaggaaaggattccggaagattcatgtcaggcttgcgagaggacttgagatatagtatagtgg

SEQ ID NO: 14361 - DNA, 382 bp, Glycine max
  Clone ID: LIB3094-050-Q1-K1-B1
ctcttcacagcgttttctctctaaggcttacatcttctctgtttgtcaagatgtacacatccaggaacaaaattcacattgataatgatgctaatccaactgaatttgaggaatcacttgcacatgcattgtttgatctacaaaataccaacaattagctcaaaagtgatctcaaagatttatacataaactcatctatctatattgatgtttcttgcaaccgaaaagctgtggttatccatgtcccctacatactaatgaaaggattcccgaagattcatgtcacacttgttagagaacttgacaaaaagtttattggaaaagatgtaatcttgattgccaccatgatgatagtaaggccaccaaagaaaggttcttcttt

SEQ ID NO: 14362 - DNA, 311 bp, Glycine max
  Clone ID: LIB3094-050-Q1-K1-B11
acaccatctacttaaatcccatatcaacttcaaattaccatacacaccctcaaatctaacttaattaaatacaaatatatctcaataaaattttacacaacaaaacattcactacttcttaaatccaacccactccacaaaaaacttccacttcaatattcacaatcataaacccatatcataatctctcataatcactaaatacattaaacaaacattcaacatcaaccccatcaaaccttcttatccacaccaaataacctattctattaatttatccaaattcattaattataatctctctaatcttc

SEQ ID NO: 14363 - DNA, 414 bp, Glycine max
  Clone ID: LIB3094-050-Q1-K1-B12
ccgactcgtccgctcgagaatatgacccttcctaaaatttacgaaacataaggatttatgatttatgatatataatgagaggaacataaacgaacaatcagatgctgctagtcatttggataataaacaacattaggatttaggcatatcacatgatcgctttacttataatttagggatatcagctcaataccacatgattcaagtaatattaccaaaatcaaagccttatcctacaagatgcggtcagctacatgggtcatgacgtcattcggcaagtttagaaaccaaagtgtagcaaacgggaaaaaagtacacttctccttacagaggtatcccatatgacacaataactctgaaatagtatagtataccatagtcttaatcagccgaatatacaatttcttacatgac

SEQ ID NO: 14364 - DNA, 452 bp, Glycine max
  Clone ID: LIB3094-050-Q1-K1-B3
gggcaagtttatataatgttttctttgttgcatggaatattcatgactggatgcttcagaagggtttaggtgggtcaatgtttccagtggcttgaccccgtacgtttggtttgaccattgatatgatttggaagagtaggaatcacactgttttcagaaaccaaacatggagcatagaggagagcattgcaagaattcagcgcatggagctttttgcttgtaacttgggtcgtagttcagttcttcaagctggattatgggccatttttcatggcattcaactagccagggagcgtgttctcttcaaactggagtttcaatcagactctagagaagcaatagatttggtgaacgaaggctgggatgattctaatgaagcctttccaatggttaaggctatcaaggaggctattctaccgtatctgcaggtgatctttaagcacattctaaga

SEQ ID NO: 14365 - DNA, 389 bp, Glycine max
  unsure at all n locations
  Clone ID: LIB3094-050-Q1-K1-B5
gtcgtctcacttcgtcaaaaccaaccaaactccttcccaattctcaagccaaccatgtctgcncgggtttagcaagtaccaagatgaactcattgccaatgctgcttacattggcaccccatggaagggtatccttgctgctgatgagtcaactggtacaattggcaagcgattggccagcattaatgtcgagaatgttgaagcaaataggcgtgctcttcgtgaactcctattcaccacacctggtgcttttgagtgcctcagtggtgtgatcttgtttgaggaaaccctataccaaaagacagcttcaggaaaacccttcgtagagttgatgaaggaaggaggagttctccctggtatcaaggttgacaagggcacagtagagcttg

SEQ ID NO: 14366 - DNA, 461 bp, Glycine max
  Clone ID: LIB3094-050-Q1-K1-B8
gcgtggggtcggtcttcagagctaaaaatgttttcattcttccatctcagtatgtgttgacaggctgtctaagtaatgctaaaaccggtacattgttagatgaacatgcatctgaattgccaagtacttctcgtgaatctgtaccagtttgttataacaatttacgacaagaagcaatcaaatatgttgaagaaggtgcaaaatcaatccaaatctatcatgttgccatgagagctctgaaagaagctgctaagaaggtttgcaccataaaaaatcagagttctggaacagcagagggagctacagcaaccaatggaagcaggggtgaattgcttgtagcagatgaagatgttccaagcaatcaatctgtggcggagaagcaaaagaaaataggagagttgactgctgagttagaggccacatatcaacgatgtgaagtttatagagcatacttgctggct

SEQ ID NO: 14367 - DNA, 463 bp, Glycine max
  Clone ID: LIB3094-050-Q1-K1-B9
cggacgcgtgggttatcctaagtctttgggaatagtgctgcaatggcttcaagtcaggagaaggtgacccttttgggagctactggaagcccatttgtgtgcagggttcatattgccctcaagttgaagggagttcaatacaaatatgtcgaagaaaatttgaggaacaagagtgaactgcttctcaaatccaacccagttcacaagaaggttccagtgtttattcacaatgagaagcccatagcagagtctcttgtgattgttgaatacattgatgagacatggaagaacaaccccatcttgccttctgatccttaccaaagagccttggctcgtttctggtccaaattcattgatgataaggtttttggtgctgcatggaaatccgttttcacagctgatgagaaagagcgtgagaagaatgctgaggaagcaattgaggctctgcagtttcttgagaatg

SEQ ID NO: 14368 - DNA, 383 bp, Glycine max
  Clone ID: LIB3094-050-Q1-K1-C1
gacccactcatcggtagttttagggcttttcattcttctctcttctcttctcttcaatggctacaatcagtctgattaattgctcttccacttctcgtctcctcttccccttaacctctcaaattcactcttccttcactcgttcccctctctctcctcccgttttcaccaatgactccacatcttcttcttcttcttcttcttccagttccaacccctgttgatgatccatgtccaccttcaccagaacgaaacctcacgttaatgtctgaactattggacacgtgtatcacggtaagaccactcttactgcatcaatcaccattgtgcttgctgatgaagggaaagctaaagctgttgccttctattaaatctataatgct

SEQ ID NO: 14369 - DNA, 476 bp, Glycine max
  unsure at all n locations
  Clone ID: LIB3094-050-Q1-K1-C10
cgcgtccgattgaagaactcatgatagatttacgcattgatcctgacagcaaaaaattggggggagggccaagagaattgacaggtgctgtggatctattaaatcacttccaattactcccacattttgagtttttctgcaagaggccacttcctgtttcaatttcagatgcacactatttatacaatgtagtaggtgacatagaaatcagaaaaggagatgggatgcagttggatcaacttattcaagatacatctttgtccagtggttctaattatcatatacaacctttggacctcgatattctaaaggaggcttttcaactcaaggaaactgttcccattgatttgcctgctgccgagaaggggattctgactgttgcaggaaaatcaaaaggtgaatctaaagatgtggagaagaagcataaaanacacaaagacagggacaaagataaggacaaggagcatatgaagcac

SEQ ID NO: 14370 - DNA, 437 bp, Glycine max
  Clone ID: LIB3094-050-Q1-K1-C11
attgaagaactcatgatagatttacgcatttatcctgacagcaaaaaattgggtggagtgccaagataattgacaggtgctgtggatctattaaatcacttccaattactcccacattttgagtttttctgcaagaggccacttcctgtttcaatttcagatgcacactatttatacaatgtagtaggtgacatagaaatcagaaaaggagatgggatgcagttggatcaacttattcaagatacatctttgtccagtggttctaattatcatatacaacctttggacctcgatattctaaaggaggcttttcaactcaaggaaactgttcccattgatttgcctgctgccgagaaggggattctgactgttgcaggaaaatcaaaaggtgaatctaaagatgtggagaagaagcataaaaaacacatagacaggga

SEQ ID NO: 14371 - DNA, 412 bp, Glycine max
  unsure at all n locations
  Clone ID: LIB3094-050-Q1-K1-C12
acgcacgcgtccggtagaacaagaagaaaaaaccttcacaattatctagtcctagctagaatcaggagggtgtatctcaccttcaagaacacatcgccatggcaaggaacttgcttcttgtgctttttgcagtagccaccctcctccatggctcagcagcccaaaccagacacatggtcggtgatgccacgggctggatcatccctgctggcggcgctgccacctacaccgcctgggcttccaacaaaaccttcaccgtaaacgacactctcgtgttcaacttcgccaccggccaacacaacgtggccaaggtaacgaaatcggctttcgacgcgtgcaactgctggagcgccgtttcaccctgacctnncgtccatcgaccgtgaccctgaacgaaacaggggagcaatac

SEQ ID NO: 14372 - DNA, 489 bp, Glycine max
  Clone ID: LIB3094-050-Q1-K1-A4
gggtcgtctcacttcgtcaaaaccaacttaaactttctccccaattctcaagccaaccgggtctgccttcaagagcaagtaccaagatgaactcattgccaatgctgcttacattggcaccccagggaagggtatccttgctgctgatgagtcaactggtacaattggcaagcgattggccagcattaatgtcgagaatgttgaagcaaatagtcgtgctcttcgtgaactcctattcaccacacctggtgcttttgagtgcctcagtggtgtgatcttgtttgaggaaaccctataccaaaagacagcttcaggaaaacccttcgtagagttgatgaaggaaggaggagttctccctggtatcaaggttgacaagggcacagtagagcttgcaggaactaatggggagactactactcaaggtttggatggccttggcgcccgatgccagaagtactatgaagccggtgcccgttttgccaaatggcg

SEQ ID NO: 14373 - DNA, 454 bp, Glycine max
  Clone ID: LIB3094-049-Q1-K1-F4
cactcttgcgctcaacaatcaacaatatctttcttactacttttttttttttcagaacaccacttttaaatacgtctcgttcaagtttaaacttctccatcatttttacacattcttaatacataacattcattccaattctcattaaacctataatactatttcctctctcaaactatttatacatctttaactttctaacaaaacctcatatcacacttctaatatactcaacaccacaatcattatgagttcaattgcaacctacaatatccctatcgttacaacttattccatatttactaaacttttctccaatcatacctcttctaatttcattttttataaaatttacattttcctttttcttttattatttttcaattttacattctttttatttttttaaaatttatgtttttttaacaattcgtatttttcatttatttattca

SEQ ID NO: 14374 - DNA, 433 bp, Glycine max
  Clone ID: LIB3094-049-Q1-K1-F9
cccacgcgtccggcgaaaacccccaactccaacctctgttcatcgtctaccgcgctttctttgtaaccagaactatgattaagctttttaaagtaaaggaaaagcagagagaacttgcagaaaatgcaagtggcggaccacctgttaagaagcaaagtgctggagagttgcgtcttcacaaagatataagtgagctgaatctaccaaaatcatgtaccatgcaattccccaatggcaaagatgatctgatgaactttgaagtttcaattcgacctgatgatggatattacttaggtggcacatttttgttttcctttcaagtgtctcccatctatccacacgaagcaccaaaagttaagtgtaagacaaaagtctatcatccaaatattgacttggaaagaaatgtttgtcttaacatcttacgagaagattg

SEQ ID NO: 14375 - DNA, 271 bp, Glycine max
  unsure at all n locations
  Clone ID: LIB3094-049-Q1-K1-G1
cccacgcgtccgcccacgcgtccgcaaaaattacaacaccaatctcacccatttcaaaaaaaggccgctagtgttactattcgtaaaatggccactcttgttctttaccaattctttctcaaactcttgctcctaatttcagtctttcagctttcctttgctgctaggagactcaaccagctggttcaggaccagtcacagttactccattaccacaactgtactcttctataccgcanaatcgccgngaaccctatctggtattgtcact

SEQ ID NO: 14376 - DNA, 293 bp, Glycine max
  Clone ID: LIB3094-049-Q1-K1-G11
cacgcgtccggcgaaaacccccatctccattctctgttcatcgtctaccgttctatcttgtaaccggaacaatgattaagggccttaaaattaattaaaatctcagagaacttgcataaaattcaagttgctgaccacctgttaacaatcaaagttgcttaagattttcttcttcacaaagatataagtgaacttaatctaccaaaatcatgtaccatgcaatttcccaattgctaatattatctgatgaactttgaattttcaattctacctgatgatagatattacttatg

SEQ ID NO: 14377 - DNA, 457 bp, Glycine max
  Clone ID: LIB3094-049-Q1-K1-G2
cccacgcgtccggccaaacctccgaactcctttctactctcatcgtatacagcgcatactttggcaccagaactatcaataagctttataaactaaatgaaaagcacaaagaacttgcaaaacatgcaactggcaagaccacctgttaagaagcaaagtgcttgatagttgactcttcacacagatataagtccactgaatctaccataatcatgtaccatgcaattccccaatgccaaagatgatctgatgaactaataagttacaattacacctgatgatggatattactcatgtggcacatttttgtttcccttttaagaggcctccatctatacaaacgaaacacccaaagttaaacgtaagacaaaagtctattataccaatattgacttggaacgaaatgcctggcttcacattttaccagaagattggaaacctgtccttaatataaaca

SEQ ID NO: 14378 - DNA, 451 bp, Glycine max
  Clone ID: LIB3094-049-Q1-K1-G3
tgaattctgggagcatcgcggttatgacaagtgagcaattgattgagtttgcatggggacttgctaatagcaacaaaaactttttgtgggtcataagggcagatcttgtggcgggtgaaaatgctgttttacctccagagtttgtgaaacaaaccgaaaatagaggcctattgtctagttggtgctcccaggagcaagtgttggctcacccttcagttgggggatttttgacacacagtggttggaattcaacgttggaaagtatgtgtggaggtgttccaatgatttgttggcctttctttgcagagcaacagaccaattgtcggttttggtgcaaggattgggggaatgggttggagattgaagatggtgaaagggaaaaaattgagagccttgtgaaggaattgattgatggggaaaagggttaagagattaagaaaaaagcttttca

SEQ ID NO: 14379 - DNA, 276 bp, Glycine max
  Clone ID: LIB3094-049-Q1-K1-G4
cccacgcgtccggtgatttcagtgagtgatcggcgttcacttgatctcatcataatcgtcagggtcagttgaagaagatgccgatcagaaacatcgccgtcggaaggcctgaagaggcgactcaccccgacacgttgaaggcggctttggctgagttcatctcaaccttcatcttcgtgttcgccggctcaggctccggcatcgcctacaacaagctcaccgacaacggcgctgccacccctgccggcctcatcttcgacttcatcgcccatgcat

SEQ ID NO: 14380 - DNA, 447 bp, Glycine max
  Clone ID: LIB3094-049-Q1-K1-G5
aaacacccttgtcgaccacaccaaaattaaaaacataaaaaagcataaaagcacaaaaagacatgaaaaagggaaaataaaacattttgaagtcatatttgcacacttgattaaaggctgtcgtcccttgtgacggatgcgtggggtgctaataccttccctgtgcgtaaaaacaactcccgaactattcacacttaaagttcgtagaccacaccttttcaattttcccgacgctttcctcaaataaaagttggtggcgactccgcgcattttcctttcatggaagacgcacttgtgagtcccgcatcggccttccgtcaaaaggtaaggtgcgacagtacttggccttccggcgaaaggtaaggtccttaattggattaactaattaccaaagtgaaactaaggcttaaattaactcacaaatcaagctttgtgcataaaaatcac

SEQ ID NO: 14381 - DNA, 286 bp, Glycine max
  Clone ID: LIB3094-049-Q1-K1-G6
cacgcgtccggcgatctcagtgagatgatcgtgtgctcacttgatctcatcataatcgtcagcgtgaagtgaagattatgccgatcagctacatcaccgtcagaaggtctgaagaggctactcaccccgacccgttgaaggcggctctggctgatttcatctcaaccttcatcttcgtgttcgccggctcaggctccggcatcgtctacaacaagctcaccgacaacggcgctgacacccctgccggactcatctccgtctccatcgcccatgcattcgccctctt

SEQ ID NO: 14382 - DNA, 240 bp, Glycine max
  Clone ID: LIB3094-049-Q1-K1-G7
gcgtacgctgacagcatcgcggctatgacaagttttcatttgattgagttagcatggcgacttggggtatgtcaacattaaactagtttgtgggtcataagggcagatcttgtggcgggtgaaaatgctgttttacctccagagtttgtgaaacaaaccgaatatagaggcctattgtctagttggtgctcccagtagcaagtgttggctcacccttcagttcgtggatttttgacacac

SEQ ID NO: 14383 - DNA, 319 bp, Glycine max
  Clone ID: LIB3094-049-Q1-K1-G9
cccacgcgtccgttccagaacgccggcgaccgaacccgatattgaagtccagagaagacaacggtgccgggagttacagcaataataatattaataacaacagcgacaggggtggcagtaacagtaatagtaattgtaacatggaacatcatcatcacagccaccatgtgaatagtgggttcttgccctgaaaatagtagttattgtatttatttattatagcttttttcttttcttttttttaactttgtacctttttatctcttcaagttgatcaaggagatcggaaattgggcaaaaaaaaaaaaaattattatat

SEQ ID NO: 14384 - DNA, 214 bp, Glycine max
  Clone ID: LIB3094-049-Q1-K1-H1
cgcgtccggcaaagatggggatgtggcactcttctttggactctcaggtaccggaaagaccactctttcgagcgatgacaataagtatctaatcggagaagattaacactgttggggtgacaatggtgtctccaacattgaaagtggttgctatgccaaatgcattgacctctcacgggagaaagagccagatatttgaaatgcaatcaggttt

SEQ ID NO: 14385 - DNA, 85 bp, Glycine max
  Clone ID: LIB3094-049-Q1-K1-H12
tcgtctcgttcttggactttctctggatctctgtgttttttgagatcgagtgtatgtaatttacccgattggtttttcaggatga

SEQ ID NO: 14386 - DNA, 267 bp, Glycine max
  Clone ID: LIB3094-049-Q1-K1-H2
gatttggatgctaatttttttgatcagccagaaatgcttggagagcccattgcaactctgcgtttgctgcactatgaaggtcaagtttcggatcccttgaaaggattatatggagctggagctcatactgactatggtttaattacactgttagcaacagatgatgtctcgggtcttcaaatatgcaaagatagggatgctaaacctcagaaatgggaggatgtagcaccattgaagggagcattcatagtgaatcttggtgacatg

SEQ ID NO: 14387 - DNA, 433 bp, Glycine max
  unsure at all n locations
  Clone ID: LIB3094-049-Q1-K1-F3
caaaacaatcaacaatagcttgctagctactcctgttgctgtgagaaccgttgatgtagatgcgttgcaagcaagatttagagactccaacaataaaagccatgcttaacacctaccatgcctncaaactctcatcaaaccagtgtggttctagccttgtgcaaacaatagatgcacctttacctctcgtatggtccctcataaggcgctttgagtatccacaagggtacaagctctttgtgaagaagtgcaaccttcttgatggggatggtggcattggaagcgtgcgtgaggtcatgatcacatctgggttacccgctggtgttagtgttgaaaaggtggacaagctccatgatgaacagcatgtcttgaaagttaacatcattggtggtgatcacaagcttggcaattataggtcaacgattactttgca

SEQ ID NO: 14388 - DNA, 206 bp, Glycine max
  Clone ID: LIB3094-049-Q1-K1-H3
gatttggatgctaatttttttgatcagccagtttatgcttggagagcccattgcaactctgcgggtgctgcactatgaatgtcaagtttcagatcccttgaatgattatatggagctggagctcatactgactatggtttaattacactgatagcaacagatgatgtctcggatcttcaaatatgcatagatagtgatgctaaacc

SEQ ID NO: 14389 - DNA, 289 bp, Glycine max
  Clone ID: LIB3094-049-Q1-K1-H4
cccacgcgtccgcggacgcgtgggttgaaaacgacccgtttcctccctcgcacggatccacgcgaaatctgagattccttcgaattgttaactctctttcagtttcaagttggaaactttttcgattttcgctttctggaggtgtgaattgttgtttgaaagtcacaagcaatggtgaaggacactgcgtattatgacatattaggtgtcaattatgatgcatctgctgcagagatcaagaaagcttattatgtcaaggctagaattgttcaccccgataaaaatcctg

SEQ ID NO: 14390 - DNA, 417 bp, Glycine max
  Clone ID: LIB3094-050-Q1-K1-A3
atcccgatcgacgaggcgtccgagaggcatgggctcactctcttcgcagcgtttctctctgtggctttcatcttctcgggttgtcaaggtgtacacatcgaggaagaaaattcacaaggataaggatgctgagccaactgaatttgaggaatcagttggacaggcattgtttgatctagaaaataccaacaatgagctgaaaagtgatctgaaagatttatacataaactcagctggccgaattgatgtttctggcaaccgaaaggctgtggttatccatgtcccctacagactaaggaaaggattccggaagattcatgtcaggcttgtgagagaacttgagaaaaagtttagtggaaaagatgtaatcttgattgccaccaggaagatagtaaggccaccaaagaaaggttctgc

SEQ ID NO: 14391 - DNA, 252 bp, Glycine max
  Clone ID: LIB3094-049-Q1-K1-D7
gtccggtcatgtgctccaagtgcactggtatttgttctaagtctggtgcttcgatgaagtgtgctgggtgtcaattaactggtatgaaggtctctataaaacatcttggcccgtccatgattcaccatatgcatcatgcttgcaatgaatccaagggtactgtagaaaccatcaacgacagagatcgctgcccacattgcaaggtagaaaaggttttcatgagaaaaaattccttaaatttattgtgaaaaa

SEQ ID NO: 14392 - DNA, 70 bp, Glycine max
  Clone ID: LIB3094-049-Q1-K1-D8
agaaaatgtaattttcagcactgtccaggaaatttaaggattgtaattctttatgcctcattgtattatt

SEQ ID NO: 14393 - DNA, 446 bp, Glycine max
  Clone ID: LIB3094-049-Q1-K1-E1
cggacgcgtgggctgagaaaccctccactctttagtccaaactctcctcctacccaaaatggatgcaagggcatcatcttcttcagcttcctcgattcttttccttgcagcaattgtagctgcttatttctattcatcagaagcagctgtgtccaaaggatcttttgaggacaatttcagcataatgtggtctgaggaccattttactacctctaaagatggacagatctggtatctctcactagacaaagacacaagatgtggatttcaaacaaaacaacgctacagaattgggtggttcaatatgaagcttaagttggtagcaagtgactctgctggtgttgtgacagcttattatatgtgctcaaaaaatggtgccggacccgaaagagatgaacttgattttgagtttttggggaacagaacaagagagccttatttgattc

SEQ ID NO: 14394 - DNA, 383 bp, Glycine max
  Clone ID: LIB3094-049-Q1-K1-E10
gctttctcctctcaacattgagtgctttttggattataaggatgtccggtgcttcatgaagctatgatgagtttgagcaactaagtcttccaattttggaacgtgtgaagggacctctggagaaggcacttgctgaagcaggtcttaccgttgaaaatgtacacacagttgaggtggttggttcaggttctcgggtaccggccattaacaaaatattgacagagtttttcaaaaaggagcctatgcggacaatgaatgctagtgagtgtgttgctaggggctgtgcgttggaatgcgcaattcttagtccaacgttcaaagtacgagaatttcatgtcaaccaaagccttcctttctcgatttctctttcatggaaaggttct

SEQ ID NO: 14395 - DNA, 303 bp, Glycine max
  Clone ID: LIB3094-049-Q1-K1-E11
gcgctacgcgtccgatttattctataattggtgcctatgttataccaatcttagttcgtaaatgtcaattgaaaattactgtgaaaacaagtgccaaagccagaggtttgttgagtctttttttatagtttgttttactctactctagagccattctaagtttctcttcgagtcctagcttgcttctatgtccttttcattgctttaattgttgaataatccttgaaaaattgtcttgttaaaacttcattggtttaactttcatttcattttttttagtctttggttattgcttgtctcttt

SEQ ID NO: 14396 - DNA, 420 bp, Glycine max
  Clone ID: LIB3094-049-Q1-K1-E2
cggacgcgtgggctgagaaaccctccactctctagtccaaactctcctcctacccaaaatggagtcaagtgcatcatcttcttcagcttcctcgattcttttccttgcagcaattgtagctgcttatttctattcatcacaagcagctgtgtccaaaggatcttttgaggacaatttcagcataatgtggtctgaggaccattttactacctctaaagatggacagatctggtatctctcactagacaaaaacacaagatgtggatttcaaaccaaacaacccttcagattttggtggttcaatattaaacttaaatttgtaacaagtgactcttcttgtgtttttaccacttaatatattttctcaaaaaattgttccggaccataaagagattaactttatttttaatttttcgggaa

SEQ ID NO: 14397 - DNA, 418 bp, Glycine max
  Clone ID: LIB3094-049-Q1-K1-E3
gctccgcgacgcgtcgctgaaaaccctccactctttatccaaactctctctacccaaaatgggggcggggcatcatctcttcagcttgctcattcttttccttgcagcaattgtagctgctcatatctattcatcagaagcagctgggtccaaaggatcttttgaggacaatctcagcatactgtggtctgaggaccattctactacctctaaagatggacagaaacggcatctctcacttgacacatacccaggatttggatttcaaaccaaacaacgcttccgatttaggtggatccatattaagctcaactttgtaaccggagactcctcttgtgttgcaacaacttattatatctgctcaaaaaattgttcgggaccataaagaaattagcttgatttttactttttggggaac

SEQ ID NO: 14398 - DNA, 420 bp, Glycine max
  unsure at all n locations
  Clone ID: LIB3094-049-Q1-K1-E4
acttacgcataagcttataaaccctncactctttagtcttaactctcctcctacccaaaatacagacaagttcatcatcaacttcaacttcctctattcttttcctatcatcaattctaactccttatttctattcatcataatcatctgtctccaaaagatcttattattacaatttcatcataatttaatcttaataccattttactacctctaaaaatccacatatctagtatctcttactatacaaatacacattattttgatttcaaaccaaacaactcttcaaattttcctccttcattattaatcttaaatttctaacactttactcttcttctttttttacaacttatttatatttcctcaaaaaattattcccctaccaaaaataaattaactttaattttaatttttttt

SEQ ID NO: 14399 - DNA, 322 bp, Glycine max
  Clone ID: LIB3094-049-Q1-K1-E5
atttggggctgcaagaattcacagctttgccttatatatcatattattgtaatttggggtcctgaacatatattcactactgtcctcaactgtttattccctcgtctgttcatccttcattagttaattgctctatgattgtgatcacagtacatcatatcgaggcttctaattccatattgcatctcatgactgacatttttcatcttgctaattcctcttttgtagatcaatttataccaataatacatattctaataattcctcaaaataccagcatcaccataatttatcaagcttcatcaacagttgcactcactaa

SEQ ID NO: 14400 - DNA, 362 bp, Glycine max
  unsure at all n locations
  Clone ID: LIB3094-049-Q1-K1-E6
taattcacatctttgcttttatatancaaataattaaaaattggggaacgttaaatttataaactaccttgcccaactctttattccctctacttttttccttcattacttcattactctatgattttaatcacatttcatcatattattacttctaattccatatttcattacttaacttacattttccatcttacaaattcctcttttttatatcaatttataccaataatatataatttaataattacccaaattaccaacatcaccataattttcttttcttcaattaactattacactttctaaatcctcaatatatcttaatattatacatttctttcatctacttttattcatat

SEQ ID NO: 14401 - DNA, 434 bp, Glycine max
  Clone ID: LIB3094-049-Q1-K1-E7
gttctagatcgcgatctagaactagccaattcactctttttcttctcgccctctgccgtgggaggagtttgtaacatggctgctctaccaacggcggagcttagtgacgcaaatgcaacacatgtagcaagttgtgatgtgagggtgttgcatccagtgttcaaggtttacggtggggccaccgcgttctccggccccgttgtcaccgtgaaggtgtttgaagacaacgtgttggtgagggagcttcttgagacgaaaggcgaaggaagagtattggttgttgatggaagaagaagcttgaagtgtgcattggtgggaaggaatttggcactgattgcacataacatgggttgggctgggattgtggtgaatggctgcatcagagatgtggatgagatcaatgcaagtgatattggcgtcagagccttggcttc

SEQ ID NO: 14402 - DNA, 456 bp, Glycine max
  Clone ID: LIB3094-049-Q1-K1-E8
gcgtccggttctgtatcgcgatctagaactagccaatttactctttttcttctcgccctctgccgtagcggtagtttgtaacatggctgctgtaccaacggcggagcttagtgacgcaaatgcaacacatgtagcaagttgtgatgtgagggtgttgcatccagtgttcaaggtttacggtggggccaccgcgttctccggccccgttgtcaccgtgaaggtgtttgaagacaacgtgttggtgagggagcttcttgagacgaaaggcgaaggaagagtattggttgttgatggaggaggaagcttgaggtgtgcattggtgggagggaatttggcactgattgcacataacatgggttgggctgggattgtggtgaatggctgcatcagagatgtggatgagatcaatgcaagtgatattggcgtcagagccttggcttctcattcactcagatc

SEQ ID NO: 14403 - DNA, 436 bp, Glycine max
  Clone ID: LIB3094-049-Q1-K1-F1
gcgtccgatccaagaggaagaagaggaagaagaagaaggttttgtggttcggaggaccagtgttcgtaacgtcgggggggtgaataagcttggggatgattctgacagggttgccctggacaacgatgagtcccatacagcgtgctcgatgagacgactcgtggtcagaaattggttaagactggtgaacttgcgaacaatacggtggttgaagtacctgaaaaatcatacaccacaggaaagaagagtgcaagctaatccgaacagagccctggggatagaacttgtttcagattggctgaacctgcgtccaatcaaacgtcttgtgaatagaattttgatctaattgcgcatttccttttcctttcattaatggccaattatccattctttgtatatttcaagaattacggtttgttcaacaattgggattttg

SEQ ID NO: 14404 - DNA, 455 bp, Glycine max
  Clone ID: LIB3094-049-Q1-K1-F10
cccacgcgtccgcccacgcgtccgcaaaaattacaacaccaatctcacccatttcaaaaaaaggccgttagtgttactattcgtaaaatggccactcttgttctttaccaattctttctcaaactcttgctcctaatttcagtctttcagctttcctttgctgctaggagactcaaccagctggttcaggaccagtcacagttactccattaccacaacggtcctcttctatacggcaaaatcgccgtgaacctaatctggtatggtcacttcaaaccatcccaaaaggccatcatcaccgatttcgttacctcactgtcatccccatcgtctcagagcagccagccatctgttgccacgtggtggaaaaccacggagaagtactaccacctgagtcccaagaacaagaaggctgcttcttctctttctctatcactgggcgatcagtttctcga

SEQ ID NO: 14405 - DNA, 387 bp, Glycine max
  Clone ID: LIB3094-049-Q1-K1-F11
acgcgtacgacacgcgtccggtttctggttgaggaaccaacttcatatcaatgcatgaggccttcaaaaggtaacactttaagaaaatgtcctgcagttgtcacaaataaaaatgatttgatgaggtacagagtatccataaaataatggattccaagttatcctggcccatataccaaaggataaacttaatccaattaaccttgttaatcccttatgaaaatttaaggttaatttaatcttttagcttgataccctaaacctataccagatgaattgatcccagcctacaaaagatctatatttaacattcatacattactttttccaacttttggaagccaaggaatctattgcattaaagtgcacaaaacacttatttttttt

SEQ ID NO: 14406 - DNA, 450 bp, Glycine max
  Clone ID: LIB3094-049-Q1-K1-D6
gtcatatgctccaagtgcactggtaagggttctaagtctggtgcttcgatgaagtgtgctggtggtcaatgaactggtatgaaggtttctataagacatcttggcccgtccatgattcagcagatgcagcatgcttgcaatgaatgcaagggtactggagaaaccatcaacgacagagatcgctgcccacagtgcaagggagaaaaggttgtgcaggagaaaaaagtccttgaagttattgtggaaaagggaatgcagaacgggcaaaagattacattccctggcgaaacttgataaaccccagacacaattactggggatattggctttgtcctttaacagaaaggacattccaaattcaaaagaaaggcttaagatctttttgtagagcacattttgtcccttactgaagccttatgtggctttcaatttgtgctgactcacttggat

SEQ ID NO: 14407 - DNA, 354 bp, Glycine max
  unsure at all n locations
  Clone ID: LIB3094-049-Q1-K1-A9
gattccacaaaatcaaatctcccactaccaacaacactgccaccactaaagcactgacaacgctccttcactccaccactcctcactcttctcattcagatctacccaacacacacacaccaaanaataaaataaaaatgcaactccaacccactctctccactctctacctctcccttttgttaacaataacgttaacatctccaaccttggcagcacaaagcaagccgcaagatctggtccggtcctcgtgcgtgcacgcgcggtacccgcgtctgtgccttcgcaccctcttgaactacccgggtcccggcaacacgccggtagaccttgccaaggcaacttttaaggtaa

SEQ ID NO: 14408 - DNA, 270 bp, Glycine max
  Clone ID: LIB3094-049-Q1-K1-B1
aaagaaaatgaggacagtgctttcgcgcttgatccattccacgccttccatttccaggatcagtgcagtgtcaatccgcgggagagatctcttctttccaaatgtctgctttaaagttgaagaagcagttaatgtgcctccacccccaacggaaaaggttgttctgtttggaggcgattggtttgttggatcacacttttttagagaagccctagaacgtggcatgtctgctgggagtcctagcaggtctggtaggtcatccctgcatga

SEQ ID NO: 14409 - DNA, 384 bp, Glycine max
  Clone ID: LIB3094-049-Q1-K1-B2
aaagaaaatgatgacagtgctttcgcgcttgattcattccacgccttccatttccaggatcaaggcagggtgcaattcgccggagagatctcttctttccaaatgtctgctttaaagttgaagaagcagttcatgtgcctccacccccaacggaaaatgttcttctgtttggaggccattggcttgttggatcacactcttttagagaagccctagaacgtggcatgtctgctgagagtcctagcaggcctgttaggtcattcctgcatgattcctgggctaggaatttggcttggtataaagggaatctcttttcacctgtttcattgaaaaaacatctgattgggccccctgttgtgatctaattattggctggttttgctt

SEQ ID NO: 14410 - DNA, 273 bp, Glycine max
  Clone ID: LIB3094-049-Q1-K1-B3
aaacagaatgatgacagtgcttacgcgctatatccattctacgccttccatttccaagatcaagtcagtgtcaattcgcgggagagatctcttctcttcaaatgtctgctctaaagttgaagaagcacttaatgtgcctccacccccaactgataaggttcttctgtctggaagcgatctgcttgttgtatcacactcttttatagaagccctagaacgtatcatctctgctcaaaatccttacaggcctggtaggtcattccttcatcattc

SEQ ID NO: 14411 - DNA, 205 bp, Glycine max
  Clone ID: LIB3094-049-Q1-K1-B6
ccacgcatcctctctattcttcaatttaactttacgtctcacatctctctatctctctctctgatgtaataacaaagctctctctgctatttatgatcactctctgacactcttctgacaccaaatcaaatactaccatctctaccccttcttctctgattgtaaagattcttatcttcttagattattattttccatccaatca

SEQ ID NO: 14412 - DNA, 408 bp, Glycine max
  Clone ID: LIB3094-049-Q1-K1-B7
ggtgacgcctacttttgattgcttgatgaaaacctatgttattcctgacaccagaattctggaaggagacgcgctgctccaaatctccattcggagagtacacagatctactggcaaaaccaacaggaaagactctaatcttggaggaggaaagggtggatgcttgatttgctagttttgctttatggatgttttaggaactttattactttacatactttgttggttctgtgctttacttttggtttttgatagaaggtatgtctctttatgccttttgaatggttccaagttttaattgactgccaaaaaaaaaaaaataaaaattaaaaataaaaaaataaaaaaaataaaaaaaaaaaagggccgccccttttaaagaaccaaacttaactaccccttccttcc

SEQ ID NO: 14413 - DNA, 235 bp, Glycine max
  Clone ID: LIB3094-049-Q1-K1-B9
tcgccgtgagccaagagccatactaattcagctacaaactgcaataacaggggcatggtggttatcgaaatgcgatcgcatcgtcgagaataatgggaattttgggagcgattcttatacatccagatgactcttaccctctgctgaaactcaaaatggcagctatgaacgcctagaagctgatcctgtctgagccgtactgggcgttctgctacacaatgctctacaaggtttc

SEQ ID NO: 14414 - DNA, 298 bp, Glycine max
  unsure at all n locations
  Clone ID: LIB3094-049-Q1-K1-C1
ggctacttttgattgcttgatgaaaacctattgattcctgacaccagaattctggaaggagactcgcttctccaaatctccattccaagagtacacagatctactggcaaaaccaacaggaaagactctaatcttggaggaggaaagggtggatgctngatttgctagttttgctntatggatgttttaggaactntattactttacatactttgttggttctgtgctttacttttggntttgatagacggtatgtctctgtatgcattttgaatggttccaagtttaaattgactgc

SEQ ID NO: 14415 - DNA, 404 bp, Glycine max
  Clone ID: LIB3094-049-Q1-K1-C3
aactacggttcaatagctgagatctacacctatatctacctgacaccaagatttctcaaatagaggcatggcataaatactgtcattacaccaatcctcacattttcttgagcaatcatctggataaaactctctctcattaccaggataagcccaacacttgatttgatagctttctcccctctgatttgtcctccatcatctcccctactactttcgtacttacgtaccgatctattaaggatctctatctctatctaccctatcggcccaccaatatctatcaaagtataattagctttcaattggaaaaaccgacttggaacaagtgttacatgcttttcgctagaaatcttaaccttatattgggttacactacttattattgggaatggacaacccta

SEQ ID NO: 14416 - DNA, 375 bp, Glycine max
  Clone ID: LIB3094-049-Q1-K1-C4
tcttgataagaaattagaaaatcgtgatatcctaatttcttatcaagatgttagctaacgacgggacaggtgctaatgaaaagtactcatagagaactgatattggctcacttgattcaaggctgacagacattgtgacggatgcgtggggtgctcctacctttactgtgcgttaaaacatctcccgagctattcacacttaaagttcgtagaccacaccttttcaattgtcccgacgctttcctcaaataaaagttggtggcgactccccgcattttcctttcatggaatacgcacttgtgagtcccgcatcgccctcccgacaaagggtaggttgctacagtcctggccttccagcctaaggttaggttcctt

SEQ ID NO: 14417 - DNA, 355 bp, Glycine max
  Clone ID: LIB3094-049-Q1-K1-C5
tacggagctattgctcgtgcctatacggatatcatatttacatttccattttctatctataagtgttcgaataatcttatgctatgggaaagtctcacatatactggagcgctgattaccagaaagcctaatataaggcgaagaataagctcatagctctaattgctagtaatggatgcgctactctaatgctacgtttggcatggacatatgctggaacttacgacctgagctctaagacctgaggtaccttctgaaccataaagcacccctacgaactcgctcacggtacttaccacggtctttacaatccttgtaggcttttggaaccactcaaagcggagtttcctatttt

SEQ ID NO: 14418 - DNA, 394 bp, Glycine max
  Clone ID: LIB3094-049-Q1-K1-C6
aaacacccttgtcgaccacaccaaaattaaaaacataaaaaagcataaaagcacaaaaagacataaaaaagggaaaataaaacattttgaagtcatatttgcacacttgattaaaggctgtcgtcccttgtgacggatgcgtggggtgctaataccttccctgtgcgtaaaaacaactcccgaactattcacacttaaagttcgtagaccacaccttttcaattttcccgacgctttcctcaaataaaagttggtggcgactccgcgcattttcctttcatggaagacgcacttgtgagtcccgcatcgccttcccgtcaaagggtaggttgcgacagtacttgccttcccgccgaagggtaggttccttaatggaattacctattaccaaaag

SEQ ID NO: 14419 - DNA, 239 bp, Glycine max
  Clone ID: LIB3094-049-Q1-K1-C7
ctacagtcacttatcccactatagatttaaattctcagaaagcataaaaccccaatgggacagaggcatttcaacatttggcatgtccacaactacttactacacctaatataacatatgatgacttgttaattatgccagatgttgacaatatttccaatgctcacactatcaactctctaactgttctcacaccacgtacctacactacttcatcttcatcttaataactatctata

SEQ ID NO: 14420 - DNA, 306 bp, Glycine max
  Clone ID: LIB3094-049-Q1-K1-C8
attaccgtttcgacccactcgtccataaacacccttaaaaaccacaataaaattaaattcacaaaaaaacatcaaatctcaatgggacatgttaattttaaaagtaagtcactaccataacatattcatacactttaataattacttccttcccttttcacttattcttaaactactaatacctttcctatgcataaactcaactccctaactattccaacttcattcacatataccactcctatttacatctcacaaactcttctctcatcatacaaaacccttctaactactacatctttcttt

SEQ ID NO: 14421 - DNA, 218 bp, Glycine max
  Clone ID: LIB3094-049-Q1-K1-D1
cgtccgcgcacgcgtgctctgagaaaccctccactctttattccaaactctcctcctacccaaaatagagtcaaggtcatcatcttcttcagcttcctctattcttttccttgcatcaattgtatctgcttatttctattcatcataagcacctgtttccaaatgatctttttacgacaatcttctcctaatgtactcctgatgaccaatttactacc

SEQ ID NO: 14422 - DNA, 399 bp, Glycine max
  Clone ID: LIB3094-049-Q1-K1-D10
ggcgtcatatgctccaagtgcactggttttggttctaagtctgatgcttcgataaatgctgctggtgtgtcaaggaactggtattaatgtttctataatacatcttggcccgtccatgattcagcatattcatcatgcttgcaatgaatgcaatggtactggagaaaccatcaactacagatatcgcttcccacattgcaagggagaaaaggttgtgcacgataaaaaagtcctttgagctattgtggaaaacggaatgcataacgggcataacattacatttccttgctaaacttattaaactccatacacaattactggggatattgtctttgtccttcagcagaatgaacattccaaattcaaaagaaaggctttatatctttttgtatagcacat

SEQ ID NO: 14423 - DNA, 295 bp, Glycine max
  Clone ID: LIB3094-049-Q1-K1-D12
gcggtcacctctcaacattgaactgctttatggatttaaatgatgtccgtcgcttcatgaagcgagatgactttgaacaactaagtcttccaatattggacacttgtgaaccgacctttatacaacgcactcagctgaaccaggtcttaacgctgtaaatctacacacaccataagctactgattcaggttctcacatacctgccattaacaaaatattcacagaaattttcaacttggagccatagcggacaatgaatgctaatcagtctgatgatttcatctgctcgttaaaa

SEQ ID NO: 14424 - DNA, 166 bp, Glycine max
  Clone ID: LIB3094-049-Q1-K1-A8
acagccaacactacagactctaatctcttttcaccacaccgttcatgcttgataggctaggttaactttatacatgcgctaggaactttattacttcacatacttcgctaccactgctctctactcatcattttcatatactgtatcccattgtacccattcttac

SEQ ID NO: 14425 - DNA, 434 bp, Glycine max
  Clone ID: LIB3094-049-Q1-K1-D4
cggacgcgtgggtttcagaggcaccgaatgttcttacagttgcattaaagagatttcagtctgggaaagttgggaagctcaacaagcctattcaatttcctgaaatacttaacttggcacctttcatgagcgggactagtgataaatcacccatatacagattgtatggggtagttgttcacttagatatcatgaatgctgccttttcgggtcactatgtgtgctatgtgaagaatatccaaaacaagtggttcaaggttgatgacagtgtggtgacagctgttgaaatggattaagtcttgacaaaaggacctataagcttttctaatccaaggggttggccaaggccccaagaattatttggaaccgaatactggtcccagattcaaaacgttaagtcagtggaaagactcttaccacgaaagccagatcta

SEQ ID NO: 14426 - DNA, 446 bp, Glycine max
  Clone ID: LIB3094-049-Q1-K1-D5
gtcatatgctccaagtgcactggtaagggttctaagtctggtgcttcgatgaagtgtgctggttgtcaaggaactggtatgaaggtttctataagacatcttggcccgtccatgattcagcagatgcagcatgcttgcaatgaatgcaagggtactggagaaaccatcaacgacagagatcgctgcccacagtgcaagggagaaaaggttgtgcaggagaaaaaagtccttgaagttattgtggaaaagggaatgcagaacgggcagaagattacaattcctggcgaagcttatgaagcgccagacacaattaccggggatattggctttggcccttaacagaaagaacattccaaattcaaaagaaaggcttaagatctttttgtagagcacattttgtcccttactgaagccttatgtggcttccaatttgtgctgactcactt

SEQ ID NO: 14427 - DNA, 268 bp, Glycine max
  Clone ID: LIB3094-048-Q1-K1-G8
aaaaaaaaaaaaaaaaaaaaaaaaaaaaaaaaaaaaaaaacaaaaaataaaaaaaaaaaaaaaaaaaaaaaaaaaaaaaaaaaaaaaaaaaaaaaaaaaaaaaaaaaaaaaaaaaaaaaaaaaaaaaaaaaaaaaaaataaaaaaaaaaaaaaaaaaaaaaaaaaaacaaaaaaaaaaaaaaaaaaaaaaaaaaaaaaaaaacaaaaaaaaaaaaaaaaaaaaaaaaaaaaacaaaaaaaaaaaaaaaataaaaaaaaaaaaaaaaaa

SEQ ID NO: 14428 - DNA, 423 bp, Glycine max
  Clone ID: LIB3094-048-Q1-K1-H1
gcgcccacgcgtccgggagaagcagattgagcttaagcaatggcgccgaagaagccgggaaccgctacaaggaaccctgatttggttagggggattggcaagtattcgaggtcgcagatgtaccacaagaggggcatctgggccatcaaggccaaaaacggtggcgttttgccccgccacgatcccaagcccaagcccgaggccccggcccagaagccgcccaagttctaccccgcggacgatgttaagaagcccctcgtcaacaagcacaagcccaaacccgcgaaactcagggctagcattactccagggactgtgttgatcctgcttgctgggaagttcaagggaaagagggttgttttcctgaagcagctcccatctggattgcttcttggaactggtccctttaagatcaatggggtt

SEQ ID NO: 14429 - DNA, 368 bp, Glycine max
  Clone ID: LIB3094-048-Q1-K1-H10
acgcgtgcgggtgtctaagtgtcactttctttgcatattgcaaccttctttctctgtgactctgagggggcgattgttaaattattattgctaattctctcttatcaggtccattgaatatgtctccgtcgttggatcttcctcccaagggtggcttcagttttgatctatgccgaagaaacgcaatgcttcaaaacaagggcctcaaagccccaacctttctcaaaactggcaccactattgtcggtttagttttccaggatggtgtcattcttggtgctgatactagggcaactgaaggacctatagtggctgataaaaactgtgagaaaattcattatatggcacccaacatatattgctgtgga

SEQ ID NO: 14430 - DNA, 329 bp, Glycine max
  Clone ID: LIB3094-048-Q1-K1-H11
taagtgtcactttctttgcaattgcaccttctttctctgtgactctgactagctcattggataattattattggctaattcgtctcttatcaggtccattgaatatgtctccgtcgttggatcttcctcccaagggtggcttcagttatgatctatgcctaagaaacgcaatgcttcaaaacaagggcctcatagccccaacctttctcaaaactggcaccactattgtcggtttagtttttcaggatggtgtcattcttggtgctgatactagggcaactgaaggacctatagtggctgataaaaactgtgagaaaattcattatatg

SEQ ID NO: 14431 - DNA, 448 bp, Glycine max
  unsure at all n locations
  Clone ID: LIB3094-048-Q1-K1-H4
ctgagttgcaagattcacttcaaattatgcgtttcgctgatcggttcctcatcacatcagacgacgtcgcatatcatcgcaattccttgattatttccttttgttgatacgcggaatcgcgcacacggtgctggtgtgtgcactgaggtagaaagaagaagattgaattgtaaacagcatgaattaccttcttggagctttcaagcctgcatgtaatgtcttgatcacgtttaatgatgggaagaaccggaagcaggttccgtttaaaaaagaaaatggtcaaatggtcacagtcccacttttccaaagtcaagaaaacattggtgggaagattacaatagaaccaatgcaagggaagaagattgatcacaatggtgtaaaagttgagctccttggacagatagagatgtattttgacagaggaaattnttatgactttactttcctt

SEQ ID NO: 14432 - DNA, 463 bp, Glycine max
  Clone ID: LIB3094-048-Q1-K1-H6
aatacccggcccgacgcacgcatgcgctcgctcacacactctcttattgtctctctatcatggctcacattctccctttgctcctggtcacctaccaaaccgccaccgcctccgcccacaatatcaccgacattctcgccgccaaccccgactacagcgacttcaacggcttcctctcccaaaccggcctcgccggcgaaatcaacacccgccagaccatcaccgtcctcgtcctcaacaacgccgccctctccgccgtggccgcaaaacaccccctctccgtcgtcaaaaacctcctcagcctccacatcctcctcgactacttcgacaacacaaagctccaccagatccccaacggcaccacgctctccaccactctctaccaaaccaccggcaatgccaacggcaacggcggctccgtcaacatcaccgacctcaaaagcggtaaggttggcttccgctc

SEQ ID NO: 14433 - DNA, 438 bp, Glycine max
  Clone ID: LIB3094-048-Q1-K1-H7
cggacgcgtgggttatcctaagtctttgggaatagtgctgcaatggcttcaagtcaggaggaggtgacccttttgggagctactggaagcccatttgtgtgcagggttcatattgccctcaagttgaagggagttcaatacaaatatgtcgaagaaaatttgaggaacaagagtgaactgcttctcaaatccaacccagttcacaagaaggttccagtgtttattcacaatgagaagcccatagcagagtctcttgtgattgttgaatacattgatgagacatggaagaacaaccccatcttgccttctgatccttaccaaagagccttggctcgtttcttgtccaaattcattgatgataaaggtttttggtgctgcatggaaatccgttttcacagctgatgagaaagagcgtgagaagaatgttgaggaagcaat

SEQ ID NO: 14434 - DNA, 434 bp, Glycine max
  Clone ID: LIB3094-048-Q1-K1-H8
aaacacccttgtcgaccacaccaaaattataaacataaaaaagcataaaagcacaaaaagacataaaaaagggaaaataaaacattttgaagtcatatttgcacacttgattaaaggctgtcgtcccttgtgacggatgcgtggggtgctaataccttccctgtgcgtaaaaacaactcccgaactattcacacttaaagttcgtagaccacaccttttcaattttcccgacgctttcctcaaataaaagttggtggcgactccgcgcattttcctttcatggaagacgcacttgtgagtcccgcatcgccctcccgtcaaagggtaggttgcgacagtacttgccctcccgccgaagggtaagttccttaattgaattaactaataacaaaagtgaaactaaggctaaaataaactcacaaatcaagctttgt

SEQ ID NO: 14435 - DNA, 447 bp, Glycine max
  Clone ID: LIB3094-048-Q1-K1-H9
ggtctctaagtttcactttctttgcatatttcaacctcctttctctgtgactctgagtagcgtatcggtttattattatttctaattctctcttatcaggtccattgaatatgtctccgtcgttggatcttcctcccaagggtggcttcagttttgatctatgccgaagaaacgcaatgcttcaaaacaagggcctcaaagccccaacctttctcaaaactggcaccactattgtcggtttagttttccaggatggtgtcattcttggtgctgatactagggcaactgaaggacctatagtggctgataaaaactgtgagaaaattcattatatggcacccaacatatattgctgtggagcatgcacagctgctgatacagaggctgtaacagacatggttagctcacaactgaattacatcgctccatactggtcgagatcaagag

SEQ ID NO: 14436 - DNA, 346 bp, Glycine max
  Clone ID: LIB3094-049-Q1-K1-A1
gtgctgtgctctgaggggccatagtttgggactctttgaaccctaatctccacccaaacccaggttcccgggaaattgccttggaaaagaaagagcgaagaggaaaatgcagaatcacaggctgaagcagcagcagcagcagcaacaacaagctcttatgcagcaagctcttctccaacaacagtctctctaccaccctggcctccttgctcctcctcagattgaaccatatccaagtggaaatttgcctcctggttttgatccaagtacttgccgcagtgtgtatgttgggaacattcgtacacaggtaactgagccgcttttgcaagaagttttctcgggtact

SEQ ID NO: 14437 - DNA, 388 bp, Glycine max
  Clone ID: LIB3094-049-Q1-K1-A11
acaggctgagtggacctgtctcaactaccctttaccttggttattcactactcatgaccagtgcaatgatattgtcaagcggcaccattggcttacttatgtcattctactttgtgcactacttgttctcatcagtaaatatagattgatgttcttgttgccattgcatattaactatgataaaagttgattgatataacttgatcacattgcatagtatgtcaacagatgttcaattcattgtctgattttatattgcgattgtatctgcatttttttctccttctgcctgtttaccaaagtaatgtactcattcaagtatttaactattgactgaaatcatgtatcaaggttttttgcttaaattttctttattaacgctttaatt

SEQ ID NO: 14438 - DNA, 260 bp, Glycine max
  Clone ID: LIB3094-049-Q1-K1-A12
attgctgctgtttgcctattggtgtactttggggtctctaccctgctggatgccgcatctagcgatggccaaaaatcagatgaagagcacaaagaggcagaactagcagtttctgaattttctggaaatggtgctgggatactatctgctgctagcacagttgccagtacttttctcttagtttatgatgctgaatggggcgacaagtcatttttctacacaattgcccttgcaacagcttcttcttcccttggagtcat

SEQ ID NO: 14439 - DNA, 248 bp, Glycine max
  Clone ID: LIB3094-049-Q1-K1-A2
gtgctgcgctctgaggggccatagtttgggactcttttaaccctaatctccacccaaacccatgttcccgtgaaattgccttggaaaagaaagagcgaagaggaaaatgcagaatcacaagctgaagcaacaacagcaacatcaacaacaagctcttatgcatcaagctcttctccaacaacagtctttctaccaccctggccttcttgcttcttctcagatttaaccctattccaaatgaaaatttc

SEQ ID NO: 14440 - DNA, 381 bp, Glycine max
  Clone ID: LIB3094-049-Q1-K1-A3
gcttcctcctcttacgagcctttcctttcagtccattgattcggtgggtgcgggtgcagcgaggccgagctagaccctgatcggcgtcggcacaccgccggagaacaagatgattgtctgcgtcgccgtcgtcggtcaccagaacaatccgctgtacatacagagcttcacggaggccgatgatgctctcaagctccaccacatcgtccattgctcgctcgatgtggtcgacgagcgagtgaacaatcctaaaaagtctgggccgatgcttaatgagacgtttatgggactgctttatcctattggaaaccttcaagtatatggatatttgacttatacgaaagtgaaatttatcttggtgaccaccgatctggatggtaa

SEQ ID NO: 14441 - DNA, 432 bp, Glycine max
  Clone ID: LIB3094-049-Q1-K1-A4
ggctgaagcacaactacgagaccagcatggcaaccctgtcccactcaccgatcaatacggtagtgcggttatcttaactgacgagcgcggtaatcccgtccaactcactggtgtcgctaccaccgctaccggcacagcaggttctgggtttgggtcctatggtaccggtgcttacggtggtggtgcaagtgcaaccaccgttgcagatcttttggcaacccaaccaaggagtggcagggaggctagagagcttcgtcgttccttcagttcaagctctagctcgtctgaggatgaatggcaaggtgggaggaggaaaaaggaattgaaggttaaaataaaggagaaactccaagggtaagaaggagggaataatattaggggccttgcccccccacaactggttcaaacaacggcacttaccaacctggtgat

SEQ ID NO: 14442 - DNA, 438 bp, Glycine max
  Clone ID: LIB3094-049-Q1-K1-A6
ctttcaagcacagctactacaccatcatcactttcctctcccactcaccaatcaatactataagccagggttattttctaactatcgcgggaatatcatccaactcactcttgtctctaccacctctacctacacaccatattcatctctttacttctctattatacctcttcttactatcttgttacaatttcaaccaccttttcatatctttattcaacccaaccaataaatttcatatatgctacagatcttcatcaatcctccagttcaaactctaactcttcttactatgattttcaacgtataaactaagaataaagataatgatatataaaataaaacaaaaactactcattatattaatatgcaataataataatgatcatgcacacacaacaacttctccaaccacctacactaaccacccttcttatc

SEQ ID NO: 14443 - DNA, 206 bp, Glycine max
  Clone ID: LIB3094-049-Q1-K1-A7
ggcaaaaccaacaggaaagactctaatcttggaggaggaaagggtggatgcttgatgggctagttttgctttatggatgttttaggaactttattactttacatactttgttggttctgtgctttacttttggttttgatagacggtatgtctctgtatgcattttgattgtttccaagttttaattgactgcagttgagtaccat

SEQ ID NO: 14444 - DNA, 295 bp, Glycine max
  Clone ID: LIB3094-048-Q1-K1-G5
cttgatgatcccaacactttcggtaacaggattcacaggatgctgaagcttggactgaggattgatgaagatgctggtgaagcagatgctgacatgcctcctcttgaggacgctgatgcagatgctgagggtagcaagatggaagaagttgattaaatctgacttaattgcctgttacgtttttagaaacaatgattggagaaacagtctttttactatgttttatgttttttgaattttcgaaattttggaacgttggctagttaggtgccgtatgtagtagtttctttatggt

SEQ ID NO: 14445 - DNA, 445 bp, Glycine max
  Clone ID: LIB3094-048-Q1-K1-D4
cctaaacaactctttctcttctgccttcgctcgttgttctccctcgcgtagatcgacaagcgcggagacagagacgtttgctttccaggctgagatcaaccagctcctcagtctcatcatcaacaccttctactccaacaaggagattttccttcgtgaactcatcagcaacgcctccgatgctttggacaagattcgatttgagagtttgacagataagagcaagctcgatgctcagccagagttgttcattcatattattccagacaagactaacaatacactgaccattgttgacagtggtattggcatgaccaaagctgatttggtgaacaacttgggtacaattgctagatctggtaccaaggaattcatggaagccttggctgctggtgctgatgttagtatgattggacagtttggtgtggggttctactctgcatat

SEQ ID NO: 14446 - DNA, 418 bp, Glycine max
  Clone ID: LIB3094-048-Q1-K1-D5
cccacgcgtccgagcagcgcaagcacgcacgcattctgtgtgttgtggtttctctgagtggcgagtggactcagttacggagcaataatgagtcaggaatcgtttatatatagcttcgtggctcgtgggacgatggtgttggctgagtacacggagttcactggaaacttccctgccattgcagctcagtgtcttcagaagcttccatcttccaacaacaagttcacttacaactgtgaccaccacaccttcaatttcctagttgaagatggttatgcttactgtgttggtgccaaggaatctgttagcaagcagatctctattgctttccttgaacgtgtcaaagctgacttcaagaaaagatatggtggtggaaaagcagatacagctattgccaagagtcttaacaaggagtttg

SEQ ID NO: 14447 - DNA, 321 bp, Glycine max
  unsure at all n locations
  Clone ID: LIB3094-048-Q1-K1-E10
ccatatcaaantatttaagcttcattttaaattcaaatatacaccatacaatcacttcaatcatctatttcaaatcacaatctcaccatcattcttacactctattcctctataattatatcaacacttatttcttattcattcataaacatctccaataaatccatttctcatacttatccattctattattcattctcattctctatctttaacataactattcaattcatctacttatcattattattataaactttatttttattcaaatccttattcatattatattattacctctcccaatttcacccaaatatt

SEQ ID NO: 14448 - DNA, 402 bp, Glycine max
  Clone ID: LIB3094-048-Q1-K1-E12
gacgcacgcgtccgggagctttggatatctatagcgaaagcgttacaccaccaaaaaccgaactgttcccatgtctctctgtcactcttccaacaatcgaaatccaaaaccctaccgacaccacactcaatcgaaattcttcattctcttctcatcgatggggcagaagtctctgatctacgcgttcgtgtcgcggggaacagtgattctcgcggagtacaccgaattcagcggaaacttcaactccatcgccttccagtgccttcagaagctccctgccaccaacaacaagttcacctacaattgcgacgcacacaccttcaattacctcgtcgacaatggctacacatattgtgttgttgcagatgaatcaattggaagacagttacccatggcttttct

SEQ ID NO: 14449 - DNA, 439 bp, Glycine max
  Clone ID: LIB3094-048-Q1-K1-E3
gcgagaagccatgattcggcttgacattagtgtattcatggaaaggcacacagtctcgaaacgcattggttcacctcctggatacgttggttacactgagggtggtcaactgaccgaggcagttcggcgtcgtccctacactgttgtactctttgatgagattgagaaagcccatcctgatgtattcaacatgatgcttcagatcctggaagatggaagattaacagacagcaaaggaagaactgtggacttcaagaacacgcttcttataatgacatcaaatgttggaagcagtgtgattgagaaaggaggccgtaaaataggatttgaccttgattatgatgagaaggatagcagttacaaccgaatcaagagcttggtgactgaggaactgaagcaatacttcaggccagagttcttgaataggttggatgaaatg

SEQ ID NO: 14450 - DNA, 377 bp, Glycine max
  Clone ID: LIB3094-048-Q1-K1-E7
cacggacacacaaaacagaacacaacacattcacatacacatgttgttgatgagtggagggaacagataacacagatccatcacacacatgaacaattgatctttgtcctttgtatataatttgattctaatttttggcactaagagagccactcaaggctctgggatgtactatacgccattcggggttctgattttcggcggagagaaggttcaagagacccagtgggagaaggagcgataagtaattcatattccattatctccatttctagatccttccattaactctcataggatcctccaatttcaattcaatcccttccgatatttcggagagagcatggctggtaaggttttgaaagaaacaaagtcgc

SEQ ID NO: 14451 - DNA, 419 bp, Glycine max
  unsure at all n locations
  Clone ID: LIB3094-048-Q1-K1-E9
cccgcgcgtccgcccagcgtccgaattctttaaccactcttgccatatcaaagaaaagagcatcaacgtcagatcaaagatacaacatggaggcacttcaatcatgggtttcaaagcacaagctcgccagcattggggcactctgggcctctggaattggagcaacacttgtggcttattcatgcaaaaagtctccaatgaagccaagtctcaggcttatccatgctaggatgcatgctcaggctctaactttagcagtgctatccggtgcagctgcttatcattattatgagaaacgtgatgttcagccaaaaccagaggcagattatattattcctgctcccaatgtcacccagatggttgaatatgaacttcaatgtcctttctaaaaattaaaaataaaactgtangggtcatgt

SEQ ID NO: 14452 - DNA, 431 bp, Glycine max
  unsure at all n locations
  Clone ID: LIB3094-048-Q1-K1-F10
gttgaatcgtgaaaatgttcagaaaccagtacgacacggacgtgaccacatggagcccggcggngaggctgttccaggtggagtacgctatggaggcggtgaagcagggctcggcggcgatagggctccgatcgaagacccacgtggtcctcgcatgcgtcaacaaggccaactccgaactctcctcgcaccagaagaagatcttcaaggtcgacaatcacatcggcgtcgccatcgctggcctcaccgccgatggccgcgtcctctcccgctacatgagatccgaatgcatcaactataattacacctacgagtcgccgctccccgtcggcagactagtcgttcagctcgccgataaggctcangtttgcacacagcggtcttggaaacgtncttatggggttggactcctggtagcttgattagatgaa

SEQ ID NO: 14453 - DNA, 341 bp, Glycine max
  unsure at all n locations
  Clone ID: LIB3094-048-Q1-K1-F11
gttgaatcgtgaaaatgttcagaaaccatttcgacactgacgtgaccacatggagccctgcggnttggctattccaggtggactacgctatggaggcggtgaatcagggctcggcggcgatagggctccgatcgaagacccacgtggtcctcgcatgcgtcaacaaggccaactccgaactctcctcgcaccagaagaagatcttcaaggtcgacaatcacatcagcgtcaccatcgctggcctcaccgccgatggccgcgtcctctaccgctacatgagatccgaatgcatcaactataattacacctacgagtcgccgctccccgtcagcagactagtc

SEQ ID NO: 14454 - DNA, 123 bp, Glycine max
  Clone ID: LIB3094-048-Q1-K1-F12
atcaaaccactgcctccatctacagccaatcaacttctcaccaaaaaattaagtcacatacatcctcccatctgcctaccgcatccggtctctcctacataaccatcatacatatacactaca

SEQ ID NO: 14455 - DNA, 348 bp, Glycine max
  Clone ID: LIB3094-048-Q1-K1-F2
acgcactcgtcctcacgcacacacataacataacacaacacattctacattcacatgttgttgatgagtttatggatcgtgttacatatatccatggacacacatgaacaattgatctttgtcctttgtatataatttgattctaatttttggcactaagagagccactcaaggctctgtgatgtactatacgccattctgtgttctgattttcggctgatagaatgtttcaagagacccattttgagaaggatcgataagtaattcatattccattatcttcatttctagatccttccattaactctcatatgatccttcaatttcaattcaatccctttctatatt

SEQ ID NO: 14456 - DNA, 165 bp, Glycine max
  Clone ID: LIB3094-048-Q1-K1-F3
acccaccaaccccttatcattcactcccacctatcttcaactctaaacccaatatacccacttaccaccatcacataccctattatccaaatttaccaatctctttcaattcattaaaacatcacccttcccaaaactattcactactaccatcatcttaatcta

SEQ ID NO: 14457 - DNA, 266 bp, Glycine max
  Clone ID: LIB3094-048-Q1-K1-F5
acattatccatccgaatcgtgttaaattaaccaacccaccaaaccccaatcattcactcccacctatctacaactctaaacccaatatacccacttaccacatccctttacactataatccaaactacactctcattttcattcctataatcatcaccctttccaatcatattcactactaccaatatcttaatctaatccctaaccacacctaaaccaaaccatcatcataattcataaccttttatataatctcccaaaattaa

SEQ ID NO: 14458 - DNA, 388 bp, Glycine max
  Clone ID: LIB3094-048-Q1-K1-F7
agtggattttgctttgtttcttcgaaactaagcataaaacagcgtaacagtatccatccgtggctggacctgcaagccaacccaccaaacccttgtcattcactcccacctatctgcaactctaaacccaatatacccacgggccacggtcggtgacgctataatccaaattacggtgtcgttttcagttcgtttaagcatcacccttcccaattgtattcactactaccagtatcttaatctaatccccaaccacacctaaaccaaaccatcagcataatggggaactgtttggggaagtcggagaaattaacggcggagattgttccacgcgacggggccaaagtgtatcccaccgtccgcttgcacggctcgcccaagagcattc

SEQ ID NO: 14459 - DNA, 434 bp, Glycine max
  Clone ID: LIB3094-048-Q1-K1-G1
gcgcttgaaggccattgtcagttttgttacaattcaattccagctttgcactgtcttggtcacgttttccttgggtacaagaacacattattttggtcggacaattcttcatggtggtgcaaggtatcaagcaactggccgcgggtttgttgttcgccatatcaaattttcagagaactacagactctactctcgtagtcattttgttaaagggttggaggttgcgcttttgttgatagtatatcttgcttatggctataatgaaggtggtgcactctcatatattcttttgagtataagcagttggtttatggctctatcctggttgtttgctccatatttattcaacccatctggatttgagtggcaaaaggtggtggaagatttcagagattggacaaattggctactctaccgaagtggaattggtgtta

SEQ ID NO: 14460 - DNA, 330 bp, Glycine max
  Clone ID: LIB3094-048-Q1-K1-G2
gacgcactcgtccgagtggattttgctttgtttcttcgaaacttatcatttaacagcgtaacagtatccatccgtttctttaccaacaagccaacccaccaaacccttgtcattcactcccacctatctgcaactctaaacccaatatacccacgggccactgtcggtgacgctataatccaaattacggtgtcgttttcagttcgtttaagcatcacccttcccaattgtattcactactaccagtatcttaatctaatccccaaccacacctaaaccaaaccatcagcataatggggaactgtttgttgaagtcttataaattaactt

SEQ ID NO: 14461 - DNA, 292 bp, Glycine max
  Clone ID: LIB3094-048-Q1-K1-G4
tcccaacactttctctaacattatccatatagatgctgaaccttatacttacgattcagttaaatttctaagaagcacatcctaacataccttctctttaagacacttatacatatacttattatatcaatatataataatttcattaaatctaacttaattacctgttacttttttaaaaacaattattttataaacaatctatatactattttttattttatttgaattttctaaattttataactttatctacttaattaccatatttaataatatctttattataaaa

SEQ ID NO: 14462 - DNA, 207 bp, Glycine max
  Clone ID: LIB3094-048-Q1-K1-D3
atatatatcttcatctctcattttactattttattatcttaatacacttatttcacttgaaactttccttccattacatctcattatcttcataaacttccatctttcaacaacaaattcacttacaactgttaccaccacaccttcaatttcctattttaataattttattcttactttgatttttccaattaattttttatcaat

SEQ ID NO: 14463 - DNA, 443 bp, Glycine max
  Clone ID: LIB3094-048-Q1-K1-B1
cccacgcgtccgctcgagaatatgacccgtcctaaaatttacgaaacataattagttatgatttatgatatataatgagaggaacataaacgaacaatcagatgctgctagtcatttggataataaacaacattaggatttaggcatatcacatgatcgctttacttataatttagggatatcagctcaataccacatgattcaagtaatattaccaaaatcaaagccttatcctacaagatgcggtcagctacatgggtcatgacgtcattcggcaagtttagaaaccaaagtgtagcaaacgggaaaaaagtacacttctccttacagaggtatcccatatgacacaataactctgaaatagtatagtataccatagtcttaatcagcggaatatacaatttcttacatgacaaaaggacagccactgatcccagacaata

SEQ ID NO: 14464 - DNA, 315 bp, Glycine max
  Clone ID: LIB3094-048-Q1-K1-B11
aaccccatacttaatacgagtacttctactaattatttctgcctgactagcatcgacaaaatccttgaatacccaatttactacattgcgtaaagaggaaaaactcaagaaagagatggaacaatcaaccgccttcaatataccagctataactgatactgataataaaaattgttctctttcaaactaatcaccacttaatccatcctcaaacgaactcctaaacaatccatcttaatcctcaactcctcacaattaaaatgtaccttatttctatgataaaattcctcacataaagagcaaataaaacctctt

SEQ ID NO: 14465 - DNA, 280 bp, Glycine max
  unsure at all n locations
  Clone ID: LIB3094-048-Q1-K1-B12
gttgccgggctctaccgtggtttcaacatctcatgtgttggaatcatcgtgtatcgtggtgtgtactttggattgtatgattctgttaaaccagttgtcctcacagggtcattgcaggatagcttttttgccagctttgcccttggatggctcatcaccaatggtgcangtcttgcatcatacccaatagacactgttagaagaagaatgatgatgacctctggtgaagctgtcaagtacaagagctccttggatgcattcacacagatcctcaagaatg

SEQ ID NO: 14466 - DNA, 438 bp, Glycine max
  unsure at all n locations
  Clone ID: LIB3094-048-Q1-K1-B2
gattcacttcaaattgggttttacttttatcgaatcctcatcacattaagctacttttttcattcaacggtggcncgtcaatatttccttttgctgatacgcggaatcgcgcacacggtgctggtgtgtgcactgatgtagaatgaataagattgaattgtaaacagcaatgaattaccttcttggagctttcaagcctgcatgtaatgtctagatcacgtttaatgatgggaagaaccttaagcatgttccgtttaaaaaagaaaatggtcaaatggtcacagtcccacttttttcaaaggcaagaaaacattgttgggatgattacaatagaaccaatgcaagggtagaatattgattacaatgggtgtaaaattttatctcccttgaccagatagaaaatgtattttgacacaatgatatttttattaactttac

SEQ ID NO: 14467 - DNA, 442 bp, Glycine max
  Clone ID: LIB3094-048-Q1-K1-B3
ctagagaattatcatacccttcaagatgaaaccgtacctacgtccaatattcctgttatgccttatccttctcgaccaatccatttcggcgagtgctgctataaatattaatggtctgagaaacaaaattagagaagttctaaacaagcacccgagcatcaatcttccggcagataaactgaagaaggtgaagagaccactgaaggcactggattatctgcttggcgaatgtaaggacaggccgcctcaagaatttcaagaattttgcccgaaatttaagaacgattatcaacaaaattgcccgaatgccgcgtatgaagcagtttgcccgttactgaagcaagcgattcaaatatgttgccagaaacacgcataactctgcaagccacggtgggcgtttggatgtgcttttagttaccactttctctcttggatttgctta

SEQ ID NO: 14468 - DNA, 383 bp, Glycine max
  Clone ID: LIB3094-048-Q1-K1-B4
attatcatacccttcattagattttatacctacctccaataatcctgtcattgtttaatttaaaccaccactccactctaatctactactactataacacttaatccctctacacaaacacaattacacacactctaaacaaacacccaatcatcaatcttccaccacataaacttcataatttaaacataccacttaacacactatatcatcatcatttctaatataattacaaacctcctcaataatttcaataattttaccctatatctaataactactatcaacataattcccctaatacctcacattaatcatattaccccttacttaaacattcaattcaaatatattcccaaaaacactcataactcttcaaacca

SEQ ID NO: 14469 - DNA, 449 bp, Glycine max
  Clone ID: LIB3094-048-Q1-K1-B6
cgcgtacgctgggttgcaagattcacttcaaattaggtttttcgctgatcggttcctcatcacatcaggcgacggttcaaatcatcgcagctccttgattatttccttttgttgatacgcggaatcgcgcacacggtgctggtgtgtgcactgaggtagaaagaagaagattgaattgtaaacagcatgaattaccttcttggagctttcaagcctgcatgtaatgtcttgatcacgtttaatgatgggaagaaccggaagcaggttccgtttaaaaaagaaaatggtcaaatggtcacagtcccacttttccaaagtcaagaaaacattggtgggaagattacaatagaaccaatgcaagggaagaagattgatcacaatggtgtaaaagttgagctccttggacagatagagatgtattttgacagaggaaatttttatgactttac

SEQ ID NO: 14470 - DNA, 472 bp, Glycine max
  Clone ID: LIB3094-048-Q1-K1-B9
gttgtgtgcaacccattggggaagtctggttgtgccctcatccagcaatttatgatatgggcttttgggtcactagctaattcaaccccatacttgggaggagtgcttctgctgattgtttctgcctggctagcagcggcaaaatccttggatacccaatttactgcattgcgtaaagaggaagaactcgagaaagagatggaacgagcagccgccgtcaagataccagtggtggctgagactgagagtggaaatggttctcttgcaactggttcaccactgaatccatcctcaggtgactcctcaagcagtccatctgaagcctcaactcctcgcaattaaaatgtgccttctttctgtgagaaattgcctcacagaatgagcaaatagagctcttttgagagcagtgttaggtgaaactatttgttgtaggtttatatataagctcttatagaataaacttgctagctac

SEQ ID NO: 14471 - DNA, 355 bp, Glycine max
  Clone ID: LIB3094-048-Q1-K1-C10
cccactcgtcctaccacacatcctatcaaaaattgtaccttgtctaaaatctacgaaacataagaatttatgatcaattatatataacgttctgaacatctattaacacacttatacttactcccacatttataataaacatcattaataccaattcatatcacattatcacattcactctaattatacaatatcatctctatcctacatatcacaattaatattaccattctcaaagaccaattcaataacaatccatcttcttccagtcacattacttattatatacaacctataaacctatatattctaaactacgctaatctactcaactacacacataccattcatatac

SEQ ID NO: 14472 - DNA, 362 bp, Glycine max
  unsure at all n locations
  Clone ID: LIB3094-048-Q1-K1-C11
ttcatatctatatctaaatcgtttcacctttaaaaaccaaactattcccatagctcttttttaatcttccaacaacctaaatccaaaaccctacctacaccacactcaatctaaattcttcattctcttctcatctattcttcataattctcatatctactctttcatttctcttctaacattcattctctctaattacacccaattcatcttaaacttcaactccatcatcttccaattccttcataatctcccttccaccaacaacaanttcacctacaatttctactcacacaccttcaattacctttactacaatttctacacatattttattatttcatattaatcaattttaatac

SEQ ID NO: 14473 - DNA, 114 bp, Glycine max; identical to SEQ ID NO: 13348
  Clone ID: LIB3094-048-Q1-K1-C4

SEQ ID NO: 14474 - DNA, 438 bp, Glycine max
  Clone ID: LIB3094-048-Q1-K1-C5
gttgcaagaagtgttagagtggaaagacctgctgattaggtttttacaatttgccaattgcaattgcttgatgtcagcactgtacatgctgctctgccagattccactgctgttagaatcatctcaaattctcgtttgtatacacgtaaatcacttatctattagtaggattttaatgtatttcaaatatttgtataagtagaaatttctttctgtcatctggttttggttcaattatgtaggtggtttaacattcatagctgcatgaccaccaagttctcaaatacttgaaatagctgcaaaaatatatatccaacaacaaaaattacaaaaattaattcgcattttacatcggttctagggaaaataaattatctcttttttgtctatctttttttgtttttttttgtattatatattttattttttttttatttt

SEQ ID NO: 14475 - DNA, 114 bp, Glycine max
  Clone ID: LIB3094-048-Q1-K1-C6
gaaaaaaaagaaagccttttactttttttcttttgtatgatttgaatcttgattggaaaagcttcggtttaaaatgatttacccatcaattcaattttaagccgtgccttcttc

SEQ ID NO: 14476 - DNA, 421 bp, Glycine max
  Clone ID: LIB3094-048-Q1-K1-C7
cccacgcgtccgattgaatatccatggttctcttagttcttttatccattaaaaaactcgagattgatatttctaagaagaactatagtagttgaaagatatcttttgcaaatatgcatatttaactgaggttgttataacttgttccttccctcaaaaaaaaaaaaaaaagaaagaaaaagaacctattagcctccttcattggatatattacatctataaggagtaaattctaccggttcagagaatagaaaaataatcaaaataaaagtcagcagtctcacatctctaattttggtgacagattcaaggggttaaatttgatccagaaggtgaatatgtgagacaatggctacctgagttggcaagaatgccaactgagtggatccatcatccttgggatgcaccggttactgttctt

SEQ ID NO: 14477 - DNA, 171 bp, Glycine max
  Clone ID: LIB3094-048-Q1-K1-C8
aaaaaaaaaaaatccttttactttttttctttactttatttaaatcttgatttaaaaagcttcgtttaaatttaaattacccatcaattcaattttaagccttgccttcttcaaaaaaaaaaaaaaaaaaaaaataaaaaaaaaaaaaaaaaaatccttccactctataat

SEQ ID NO: 14478 - DNA, 429 bp, Glycine max
  Clone ID: LIB3094-048-Q1-K1-C9
ggagctttggatatctatagcgaaagcgtgtcaccaccaaaaaccgaactgttcccagagctctctctcactcttccaacaatcgaaatccaaaaccctaccgacaccacactcaatcgaaattcttcattctcttctcatcgatggggcagaagtctctgatctacgcgttcgtgtcgcggggaacagtgattctcgcggagtacaccgaattcagcggaaacttcaactccatcgccttccagtgccttcagaagctccctgccaccaacaacaagttcacctacaattgcgacgcacacaccttcaattacctcgtcgacaatggctacacatattgtgttgttgcagatgaatcaattggaagacagttacccatggcttttctagagcgtgtcaaagatgaatttgtgtcaaaatatggtggtg

SEQ ID NO: 14479 - DNA, 162 bp, Glycine max
  Clone ID: LIB3094-048-Q1-K1-D1
ataattattcaaaaatctcttatatataacttcatatctcactgtacgatttatatctcttactacacctaattcactaaaaacttccctaccattacaactcattatcctcataaacttccatttttcaacatcaaattcacttacaacatcgaccaccac

SEQ ID NO: 14480 - DNA, 355 bp, Glycine max
  Clone ID: LIB3094-048-Q1-K1-D2
cccgcgcgtccgattgaatatccatgggtttcttatttcttttatccattaaaaaactcggtatgagtatatctaagaagaactatagtagttgaaagatatcttttgcaaatatgcatatttaactgaggttgttataacttgttccttccctcaaaaaaaaaaaaaaaagaaagaaaaagaacctattagcctccttcattggatatattacatctataaggagtaaattctaccggttcagagaatagaaaaataatcaaaataaaagtcagcagtcttacatctctaattttggtgacagattcaaggggttaaatttgatccataaagtgaatatttgagacaatggcta

SEQ ID NO: 14481 - DNA, 372 bp, Glycine max
  Clone ID: LIB3094-048-Q1-K1-A6
aaggggcctggaataatccagacacgtaaattatagtgctgcaatggcttcaagtcaggtagtatgggatccaatttgggagcgggtggaagcccatttgtgtgcagggttcatattgccctcaagttgaagggagttcaatacaaatatgtcgaagaaaatttgaggaacaagagtgaactgctttttaaatccattttagttcacaagaaggttttagtgtttattcacaatgagaagcccatatcagagtctcttgtgattgttgaatacattgatgagacatggaagaacaaccccattttgccttctgatccttaccaaagagccttggctcgtttctggtccaaattcattgatgataagggtttt

SEQ ID NO: 14482 - DNA, 364 bp, Glycine max
  Clone ID: LIB3094-047-Q1-K1-F4
gcgcggaacgataaccggcggcggatctacggttaggttgccgacgtggaaggagagagagagcggcaagatgagagagagaagacgaagagcgattgcagctaagatctacactggccttcgagcccaggggaactacaagcttccaaagcactgcgacaacaacgaggtcctgaaagctctctgcgccgaagctggctggatcgtggaagaagatggcacaacttatcgaaagggatgtaagagacccacgagtgagattggaggaacaccactgaacttaagcgcgtgttcttccattcaggcaagtccacaatcctcgtcatacccgagtcctgtaccatcctaccatgctagcccaacc

SEQ ID NO: 14483 - DNA, 407 bp, Glycine max
  unsure at all n locations
  Clone ID: LIB3094-047-Q1-K1-F6
aataaaaaaaaaaaaaaaattataattaaaaaaaaaaaaaaaaaactcttgactcntaaattaaaggccccccaaaaaaaaaaaaannannaaaaaaaaaaaaaaaaaaaaaaaaaaaaaaaaaaaaaaagaaaaaaaaaaaactaaaaaaaaaaaaaaaaaaaaaaaaacacaanacaaaaaaaaacaaaaaaaaaaacacaaaacaaaaaacaaaaaaaaaacaaaaaacaacaaaaaaaataaacaaaaataaaaaaacaaaacacattctaatatatttttaatttattttatttaaaattatataatttataactaaaattaatttataataattttaattattatttaaatttaattttaatttttattaatattaaataattttttcttaaaaataaaat

SEQ ID NO: 14484 - DNA, 282 bp, Glycine max
  unsure at all n locations
  Clone ID: LIB3094-047-Q1-K1-F9
caananctatcactnnaanatnaaaacatctnacttcattttcactcaaataacccaaaattttcccatcatncccttctctacaanttcttttaaaaataaaatacctcnttttcctttattctaatcttttaatcatnatctccttcaaccttatccttttctacattaaaatcctttttattatattncacatatcaaattcactgtcttnctaattcccaatcaatcaaatctttttacttctcactcactccattaattncaacccaccaaaacaat

SEQ ID NO: 14485 - DNA, 443 bp, Glycine max
  unsure at all n locations
  Clone ID: LIB3094-047-Q1-K1-G1
attgctgctgtttgcctattggtgtactttgtggtctctaccctgctggatgcctcatcgggcgagtggccaaaaatcagatgaagagcagaaggaggcagaactagcagtttctgaattttctggaaatggtgctgggatactatctgctgctagcacagttgccagtacttttctcttagtttttgttgctgaatggggcgacaagtcatttttctccacaattgcccttgcagcagcttcttctccccttggagtcatagctggagcactggctggtcatggtgttgcaactntgctagctgtacttgggggttctttacttgggacgtatntgtcagagaaggttattgcctacatcggaggtgttctctttctcgtctttgccgcaataaccttatttgaaatngtgcaatangggttaaaagaaatgcaatataatc

SEQ ID NO: 14486 - DNA, 477 bp, Glycine max
  unsure at all n locations
  Clone ID: LIB3094-047-Q1-K1-G10
agaaaaaaaaaaaaaaaaatttataatttaaaaaaaaaaaaaaaaaagctcgtaagggttgattatnanagggcccggccaganaaaaaaannaaaaaaaaaaaaaaaaaaaananaaaaaaaaaaaaaaaaaaataaaaanaaaaaaaaaaaaaaattattttaataatattaatatataataaaatatattatttattaatatttatatttataaaaaaatatatttattaataaataaaaatattataatataattaattatataaaatatataatatatatataatataaaataatattggggtggtgggggattatatatataattatattaataaaaaatataaaatatatataatatttatataatatatatatttattaaaaatttaaaaaaataaattataatattttttaataaaataattttataattatatttatataatatatttaataataaataaaatttta

SEQ ID NO: 14487 - DNA, 413 bp, Glycine max
  Clone ID: LIB3094-047-Q1-K1-G11
gaagttgcgagagtgaaaaaatggcgcatgtcttggcattggatttggaggagcttcgcctgctccacagcatcgccaaaagacctcgaaccctctctcttctctcctccgaaattcgtaacctcgaaaagttatcgtcagaggaagcttctgcgcagattccggcgccgatttcgaccggaactaaagtggcgccttcacctgcgctgaagtatgcggcactcgcgtcgttcagttgggaccaggatagtgacaaagttaagatatatgtgttaatggagggaatcgatgagaataaggttgaatccgagtttaagtcgatgtcattcgatgttaagttccatgatgttcaagggaagaactaccgatgtgcaatatcaaaattgcacaatgagataataccagagaaatgc

SEQ ID NO: 14488 - DNA, 362 bp, Glycine max
  Clone ID: LIB3094-047-Q1-K1-G12
cccacgcgtccggctccctctcctctcttcttttctgttcaaacaatgtcgcaaacgttgcgtgctttcgtcgccaaaaatcttggctgtggaatggcagaaggcaagtgtctcccatgttcaggtgtttctggaagaactgctgctgtatattcctactcttctctaggtcatcacagaattcattcccgtgtccaagttagaggactaaagtgtggctttaggggtgcatcttttgtatgtgaagcaaagaggaacccagatttctcaaggcaaaacaagcacgggtcctccagaagcagaaatcggaacagtgatgggagagacagctttgagagctttgacgacgatatgttttcatt

SEQ ID NO: 14489 - DNA, 341 bp, Glycine max
  unsure at all n locations
  Clone ID: LIB3094-047-Q1-K1-G4
aaaaaaaaaaaaaaattaaaaataaaaaaaaaaaaaaaaactcgcacctgtaaattaaaaaaggcccccccaannaaaaaaaaaaaaaaaaaaaaaaaaaaaaaaaanaaaaaaaaaaaaaaaaaaaacaaanaaaaaaaaacaacaccataaaaaaacaaaaaaaaaaaaaaaacacaacaacaacaaaaaaaaaaaaaacaacaaaaaaacaaaaaaaaaaaacancaaacacaacacaaaaaaaaaaaaaaaaaaaaaaaaacaaaaaaaagaggagtgggagcaacaaaaaaaaaaaaaaaaaacacaaaaaacaaaaaaaaaaaaaataataatat

SEQ ID NO: 14490 - DNA, 144 bp, Glycine max
  unsure at all n locations
  Clone ID: LIB3094-047-Q1-K1-H10
acaaaaaaaagggangggggaggcgcggagnatgcaagaaataacggcaacccagncatactgtaccatatatcaaaggatgaatctaatccaagtgaccttgttgatacactaaagaaatttgaggttgattttattctttta

SEQ ID NO: 14491 - DNA, 262 bp, Glycine max
  unsure at all n locations
  Clone ID: LIB3094-047-Q1-K1-H11
cggcgaggagcctccagagaagaatgtccttttcactatcgagaacacgagggagggcgacgggaccgtttgcaagcccgatgacgaanagttatttgctggaaatgatgctgatgaatttggtccaattttgaatcagcaacaaactcccaagatattaatcaccacttgccgcttccattctactaggggacctgcttttatatcagagttgctttcagttataccaaatgcacattacttcagagaagaacatatgatc

SEQ ID NO: 14492 - DNA, 251 bp, Glycine max
  Clone ID: LIB3094-047-Q1-K1-H4
ttataatattattatcttttatatatttttttttatttttttttttttatattttttttctattatctcttttttatattctttttttctattctttatttatttttataatatatattttttttattttaattatttattctatttttatttttttttatttttttttattttatattaatttttatattttttttttttaactatcttattttattattattttaatattttatttttattaatttttt

SEQ ID NO: 14493 - DNA, 85 bp, Glycine max
  Clone ID: LIB3094-047-Q1-K1-H6
aaaaaaccccaaaaatttttttttataaaaaaaaaaaaaaaaaaaaagaaaccgttttcttttaaaaaacccccccgcccaccac

SEQ ID NO: 14494 - DNA, 72 bp, Glycine max
  Clone ID: LIB3094-047-Q1-K1-H8
aaaaaaaaaaaaaaaaaaaattaaaaaaaaaaaaaaaaaaccgcaacgtaaattaaaaaaaccccgcccccc

SEQ ID NO: 14495 - DNA, 446 bp, Glycine max
  Clone ID: LIB3094-048-Q1-K1-A1
cgcaccagtttcaccgcacgaatatcttgttgtttggagcgatccgagaaaaacgctgtggacatgttggtttaccaggacctccttacaggtgatgagcttctctctgactccttccgttacaaggaaattgagaatggaatgctgtgggaagttgaggggaagtgggttgttaaaggagcagttgatgtagacattggtgcaaacccttctgctgagggtggaggagaagatgagggagttgatgatgcagctgttaaggttgttgacattgttgacacattcagacttcaggagcaacccgcattcgataagaagcagtttgttaccttcatgaagaggtttatcaagaatttgactcccaagctcgatgcagagcaacaggagttgtttaagaagcacatcgagggagcaactaaatacctgctctctaagattaaagattt

SEQ ID NO: 14496 - DNA, 434 bp, Glycine max
  Clone ID: LIB3094-048-Q1-K1-A11
acccacccgtccgaaaaaaaaaaagaaaaaaaaaaaaaaaattttaaaaatttaaaacaaaaaaaaaaaaaaaggaaaaaagaaaaaattaaaaaaaacaaaaacaaaaatattggttttaaaaaaaaaaaaaaaaaaaaaaaaaaaaaaaaaaaaaaaaaggcccccccccccaaacacccccaccttcccacccccaccctcccccctcaaacccccttcaaaaccccccccaaatccaatcccctcccccccctttaccccccttcacccctgaaaacccctttccttccccaacttaaccccctttcaaacaaaccccctttcccccccctccctaaaacccaaaacccccccccccaacccccttcccaacctattccccccccaaattcccaatggccccccccctttatcccccccttaaccccccc

SEQ ID NO: 14497 - DNA, 481 bp, Glycine max
  Clone ID: LIB3094-048-Q1-K1-A12
acgcgtgcgatggctcccaagccgcctagtacgggtctttttgttttactgaacaagggtcacgtcaggaccattgaggaattgcctacgggccccgcagatcgtaaggggaaaacaagcaagagggtgcactttgtgaggaacctcataagagaggtagccggttttgcaccctatgaaaagcgtataactgagttgctgaaggttgggaaggataagagggcactgaaggttgcaaagagaaagctcggaacacacaaacgcgcaaagaagaagcgtgaggaaatgtccagtgttctcaggaagatgagggctggtggtgcttgagacatgaagaaataagtcttatttactgttttccagattcactagatggacctgtgtattgatggaccaagctttaataattttgttttggttcaataagttacttcaagattttgtttgagaaatatgttttgcttaactgaaacatgattta

SEQ ID NO: 14498 - DNA, 426 bp, Glycine max
  Clone ID: LIB3094-048-Q1-K1-A2
cgggcgcgtgggttatcctaagtctttggttatagttctgcaatggcttcaagtcatgaggaggggtctccatttgggagctactggaagcccatttgtgtgcagggttcatattgccctcaagttgaagggagttcaatacaaatatgtcgaagaaaatttgaggaacaagagtgaactgcttctcaaatccaacccagttcatatgaaggttccagtgtttatttacaatgagaagcccatatcatagtctcttgtgattgttgaatacattgatgagacatggaagaacaaccccatcttgccttctgatccttaccaaagagccttggctcgtttctggtccaaattcattgatgataatgtttttggtgcctcatggaaattcggttttacagctgatgataaataacgtgagaagaatgt

SEQ ID NO: 14499 - DNA, 443 bp, Glycine max
  Clone ID: LIB3094-048-Q1-K1-A5
aatcaaactagaattattctgacagtaaactttagttctgcaatggcttcaagtcaggagtaggtgtcccttttgggagctactggaagcccatttgtgtgcagggttcatattgccctcaagttgaagggagttcaatacaaatatgtcgaagaaaatttgaggaacaagagtgaactgcttctcaaatccaacccagttcacaagaaggttccagtgtttattcacaatgagaagcccatagcagagtctcttgtgattgttgaatacattgatgagacatggaagaacaaccccatcttgccttctgatccttaccaaagagccttggctcgtttctggtccaaattcattgatgataaggtttttggtgctgcatggaaattcgttttcacagctgatgagaaagagcgtgagaagaatgttgaggaagcaattgaggc

SEQ ID NO: 14500 - DNA, 455 bp, Glycine max
  unsure at all n locations
  Clone ID: LIB3094-047-Q1-K1-F3
aaacggccttgtcnaccacaccaaaattaattacatataaaagcataaaagcacaaaaagaggtgggggtgggaaaataaaacattttgaagtcatatttgcacacttgattaaaggctgtcgtcccttgtgacggatgcgtggggtgctaataccttccctgtgcgtaaaaacaactcccgaactattcacacttaaagttcgtagaccacaccttttcaattttcccgacgctttcctcaaataaaagttggtggcgactccgcgcattttcctttcatggaagacgcacttgtgagtcccgcatcgccctcccgtcaaagggtaggttgcgacagtacttgccctcccgccgaagggtaggttccttaattgaattaactaataacaaaagtgaaactaaggctaaaataaactcacaaatcaagctttgtccgataaaatcactgaaaaac

SEQ ID NO: 14501 - DNA, 76 bp, Glycine max
  Clone ID: LIB3094-047-Q1-K1-C10
aaaaaaaaaaaaaaatttaaataaaaaaaaaaaaaaaaaacaacagctacggtagataaaaaaaccccccccccaa

SEQ ID NO: 14502 - DNA, 276 bp, Glycine max
  unsure at all n locations
  Clone ID: LIB3094-047-Q1-K1-C3
ataaaaaaaaaaaaaaaaaattttatttaaaaaaaaaaaaaaaaatctacgttttttgattgaaaggggccccccaaaaaaaaanaaanaaaaaaaaaaaaaaaaaaaaaaaaaaaaaaaaaaaanaaaaaaaaaaaaaaaaatttttttttttttttaataaaataattataattttttttttatattttttttttatataattttttaattattatattaaaattttttattttatttaatttttttttttatttattttttttaataattttt

SEQ ID NO: 14503 - DNA, 342 bp, Glycine max
  unsure at all n locations
  Clone ID: LIB3094-047-Q1-K1-C5
aaaaaaaaaaattaatttaaaaaaaaaaaaaaaaacttctgtctttaaaaaaaaaaacccgcccaaaaaaaaaaanaaaaaaaaaaaaaaaaaaaaaaaaaaaaaaaanaaacaaaaaataaacaaaaaaaaaaaaaaaacaaaaaaaaaaaaaaaaaaaaatttaaatttaaacaaattaacacaaaaattatacccataaaaaaataaaaaaaaaaaaaaaaactacaaaaaaaaaataaactaaaaaaaaaaaaaaaaatcacttcctgtaattaaaaaaaaaaacataaaaaaaacaatataaaacaaaaaacaaaaaaaataaataaaaatcacaaa

SEQ ID NO: 14504 - DNA, 462 bp, Glycine max
  unsure at all n locations
  Clone ID: LIB3094-047-Q1-K1-C6
cccacgcgtccgtcaagcattgcattcctcttgatttgtagtttgttttgtgcttgggatgtggttctgccaaatcaagaggggttttaagatcatagtgtgtgttttgcaacaatggctaagttctttgctgctatgatcttggcactctttgccatttccatacttcaaacagtggtaatggctgctaatgaacaaggaggccacttgtatgacaacaagagcaaatatggaagtggaagtgtcaagagttaccaatgcccatcacaatgctcgaggagatgtagccagacccaataccacaagccctgcatgtttttctgtcagaagtgctgcangacatgcctgtgtgtgcccccggngtattatggtaataaagctgtgtgcccttgctacaacaactggaagaccaaggaagggggacccaagtgcccttgagcttcaacttgttcaacttcaatt

SEQ ID NO: 14505 - DNA, 313 bp, Glycine max
  unsure at all n locations
  Clone ID: LIB3094-047-Q1-K1-C9
aattcattattgnccctacaatgtgattaaaaactntaattacacttttttnatttatnccatccattttttttatattaaaatctttacttcccatttttttttaataatatctaatattatcaatttttttatttacatgacccaagaaagactccttatgcttcattgangtgattgttcataangatgacaccaataaagaattgtttgaattggtctcaagggttttctgtttccaaaatcctatttttcaattcttaattatttttttaatttattttcttttcttaatttttttaattttttcttt

SEQ ID NO: 14506 - DNA, 468 bp, Glycine max
  Clone ID: LIB3094-047-Q1-K1-D1
cccacgcgtccggactgcccaagatgtatctacaatgttacggtgcgggcaaaaaaccatgagcttgctgatcaacaatggtggatacaccatcgaggttgaaattcatgatgggccgtacaatgtgattaagaactggaattacactgggttgattgatgcaatccacaatggtgaagggaaatgctggactgccaaggtgttctgtgaagaggagctagttgaagcaattgccacagccacaggacccaagaaagactccttatgcttcattgaggtgattgttcataaggatgacaccagtaaagaattgcttgaatggggctcaagggtttctgctgccaatagccgtcctcccaatcctcagtaatcttcagaatttatcctatgactaaattgctgcagttgccctttagctctatgaaagtgagaatcatttgagatgatgcccttgtagggaatttacct

SEQ ID NO: 14507 - DNA, 341 bp, Glycine max
  unsure at all n locations
  Clone ID: LIB3094-047-Q1-K1-D2
cccacgcgtccgcccacgcgtccgcccacgtttccgttgacgcgtggggttctataggctcggacctgtgtgttcttgagttctaaggagacaggaacctacgtctggtggatgaatcatgaccgtgtgatcagagcgtgattaacggcccgggtgagtttctctttggagtagtctcatctttggctgtagaggatcgttcttaggacacttccatgtgcctgggaatggtcatacggttgtctgacagaccaaaaaagaaaaaaagacaaaaaagtaataaaanggaggaatnaaaaaaaaaaaaaaatttatagaatggatattggaaatattattat

SEQ ID NO: 14508 - DNA, 465 bp, Glycine max
  unsure at all n locations
  Clone ID: LIB3094-047-Q1-K1-D3
cccacgcgtccgcnagcttcaacaatggtgtacgtctaggctcagaaatcaaaagcctactgcatcgttattatgtcaagttcaagagaacaananagggaaaaaccgattaccgtgccaggattcggttgattaatcaggacaagaacaaatataacactccgaaataccgatttgtggttcgctttagcaacaaggacattgttgcacaaataatatctgctagcattgccggcgatttagttcttgctacagcatattcacatgagctgccacgatattggctttgaagaggacttataaattatgcagcaggttattgcactggtctactgtntgcccgaaaagttctttaaacatctttaattgtttatgagtttgtattgatttgtttagttcttttgttttgcttattcattttattatttatatttttttttatttatttcttaattattttttttt

SEQ ID NO: 14509 - DNA, 169 bp, Glycine max
  Clone ID: LIB3094-047-Q1-K1-D7
caatgtgattaagaactggaattacactttttttattgatgcaatccacattttttatacttaaatcctcaacttccaattttttcttttaatactatctattttaatcaatttccacatccacattacccaataaagactccttattcttcattgaactcatttttca

SEQ ID NO: 14510 - DNA, 360 bp, Glycine max
  unsure at all n locations
  Clone ID: LIB3094-047-Q1-K1-D8
gggtttggatacattccttgtagtttatactgtttgatgggtttgaagatggcgtttcggatcgttggctcttccctcatgctccttttgntctcctctgaggtggcatccacgaatacaaaagaggaggcaaatggagtggatgatgccaaatatcccggtggaagctatggagggggttacccaggtcatggcggtggcggttatcctggccatggcggtggcggttatcctggccatggcggtggtggtggctatcctggtcatggtggtggccaccctggtcatggtggcggctaccctggccgtggtggtggatactgtangcatggctgttgcggtggccggacatacaacgga

SEQ ID NO: 14511 - DNA, 274 bp, Glycine max
  unsure at all n locations
  Clone ID: LIB3094-047-Q1-K1-E10
annaataatattaatatttttttttattttatattttttattttttttacttattatttttttttttatatattattttttttttattttttatttatttttataatttaaatttttttatttatctttttttttttttttatttattttctcttaatattttattttttttatttttatttttttttactcttctattttttttttttattatttttttttttttttttttttttttttattctatttttttttattttatttaaaaattttt

SEQ ID NO: 14512 - DNA, 454 bp, Glycine max
  Clone ID: LIB3094-047-Q1-K1-E12
cccacgcgtccgcccacgcgtccgcccaatcttcactgaaccgcaccgcttccatttcatggcggtgcgttcactacttgctctcagttcccaacaaacccatcgctctcgtcgacgatttcctcacactgtttaaacctctctcccactctccgccccaaaactcactattctccaggctccgcagaatcgctcacaaagctaaggcgaagccgcaggagctggaagtaactgtggcgagtgatgcgtttacgcaattcaagcatctgcttctgcctattacggataggaatccctatctctctgagagtacaagacaagctatagcaaccacctctgctttagctaaaaagtatggagctgacattactgttgttgttattgacgaacagcagaaggagtcactgcctgagcatgagacccaactatccagtatccggtggcatctatctga

SEQ ID NO: 14513 - DNA, 249 bp, Glycine max
  Clone ID: LIB3094-047-Q1-K1-E3
gttcatttctacacatccctagctctgtcgttccgtcgttgacgatggcgtttcgggtgcgggagccgtgacctccgctctctctttcttctctctctctggaccatcgcttccgccaatgtcttcttcgaagagcgtttcgatgccgggtgggaaaatcgatgggttaaatcagattggaaaaaagatgagaacgtggctggggagtggaaccacacctctggtcaatggaatggagacgctaatgac

SEQ ID NO: 14514 - DNA, 430 bp, Glycine max
  Clone ID: LIB3094-047-Q1-K1-E4
gtctgaaagctattctccaccgtatccgcatgcttcgccgtttgaaacagtgcctgagccggggcagaacaaacagagaaggcttttctgaagcaaccaaaagtgtttctatgctctaagaaaggtgggaagggaaagaggcctgggaaaggtgggaatcgcttttggaagtcaattgggcttggattcaagactcccagagatgccattgaaggaacatatattgacaagaagtgccccttcactggcaatgtttccattcggggtcgtatcctagccggtacttgtcacagtgctaagatgacaaggaccattattgtaaggaggaattatcttcattttattaagaaataccagagatatgaaaagcgacattccaatattcctgcacatatatcaccttgtttccgtgttaaaagaggagatcatg

SEQ ID NO: 14515 - DNA, 284 bp, Glycine max
  unsure at all n locations
  Clone ID: LIB3094-047-Q1-K1-E8
aaaaaaaaaaaaattttattaaaaaaaaaaaaaaaaaaaatctagtctttttattttaagggtccctgccccacaactgnccatcncttccgccaatgtcttcttcgaagagcgtttcttatgactgttgggaaaatcaatatttttaatttttttgtaataaatatttaacttctcttcttttttaatcattacttttattctttaaatcttcttcctttatatttttccacctaacccccaggattacagattctatgctatttcagctgaatactcctaat

SEQ ID NO: 14516 - DNA, 310 bp, Glycine max
  Clone ID: LIB3094-047-Q1-K1-F1
atattatatttttaattattattttttatttttattattttttaattttttttttttttttttaattattttattttaatttaaatattttttttttttttattttatattttttatttttaatctattattatttttattttcaaatttttatttctttttttttattttattattatatattttataatttattattttattattttttttttttttattttttatttttattatattttttatttaattttatttttattattatatatattattttttttattatttatattatttttatttattt

SEQ ID NO: 14517 - DNA, 321 bp, Glycine max
  Clone ID: LIB3094-047-Q1-K1-F11
cccacgcgtccggactgcccaagatgtatctacaatgttacggtgcgggcaaaaaaccatggtctgggtgatcaacaatggtggatacaccatcgaggttgaaattcatgatgggccgtacaatgtgattaagaactggaattacactgggttgattgatgcaatccacaatggtgaagggaaatgctggactgccaaggtgttctgtgaagaggagctagttgaagcaattgccacagccacaggacccaagaaagactccttatgcttcattgaggtgattgttcataaggatgacaccagtaaagaattgcttgaatg

SEQ ID NO: 14518 - DNA, 281 bp, Glycine max
  unsure at all n locations
  Clone ID: LIB3094-047-Q1-K1-F12
aaaataaaaaaaaaaaaaaaaaatttaaaatttaaaaaaaaaaaaaaaaaaaattgtcactgctgattttnaaaggggcccgggaaaaaaaaaaaaaaaaaaaaaaaaaaaanaaaaaaaanaaanaaaaanaaaaaaaaaaaaaaaanaaaaaaaaaaacttttttttatttaatataattaatattataattaatttttttttattatttattatattaaattattaaatttttattataaaaataatatattataaattaaaatatatattaaataat

SEQ ID NO: 14519 - DNA, 307 bp, Glycine max
  Clone ID: LIB3094-047-Q1-K1-F2
tattaattaaattttattttatattttttaatttttttattttttatttttttatatttttttaaattatatattttattttttttattattattatttatatattataattttattttttttattttttatttattaatattctttttacctatttttttttttattttattatattttatattttttataatttttttttttttttttattatttatattatttaaatttatttatttcttttaatttatttttatatttttttttttttatattatattttttttttttattattttttttttt

SEQ ID NO: 14520 - DNA, 235 bp, Glycine max
  Clone ID: LIB3094-047-Q1-K1-B3
cccacgcgtccgcacatccaatgcatcgtaatcaggtgtcaaacaagattggaataaccatggagctgcctaagtactagtactaccctagataatcccaatcttgaagaaaacttttttaaaaagcatagattctatattttgtgttttgttattttgtatcttttgtctcagttgacactaagcagaccttgtgtttcaattttgactagagagttgtttaaattgaagattt

SEQ ID NO: 14521 - DNA, 451 bp, Glycine max
  Clone ID: LIB3094-046-Q1-K1-D8
cccacgcgtccggactgcccaagatgtatctacaatgttacggtgcgggcaaaagaccatggtctttctgatcaacaatggtggatacaccatcgaggttgaaattcatgatgggccgtacaatgtgattaagaactggaattacactgggttgattgatgcaatccacaatggtgaagggaaatgctggactgccaaggtgttctgtgaagaggagctagttgaagcaattgccacagccacaggacccaagaaagactccttatgcttcattgaggtgattgttcataaggatgacaccagtaaagaattgcttgaatggggctcaagggtttctgctgccaatagccgtcctcccaatcctcagtaatcttcagaatttatcctatgactaaaattgctgcagttgccctttagctctatgaaagtgagaatcatttgagatgatgcc

SEQ ID NO: 14522 - DNA, 250 bp, Glycine max
  Clone ID: LIB3094-046-Q1-K1-E2
gccgtcggccaagccttccgttcaaaacggccggcgactgaccccgattggaggtccagggaagccaccgttgccgcaggttccagcattattatttttaataacaccagcgccgggggtggcagtacagtatagtaatgtaactggacatctcatccagcccatgtgatagggtctgcctgaaatgagtatgattattatatagtttcttttttttaacttgacctttattttagtgaaaggatcgaat

SEQ ID NO: 14523 - DNA, 418 bp, Glycine max
  Clone ID: LIB3094-046-Q1-K1-E4
aaaaaaggttcatagttgatatctccagcggaacgatgaagtttgaagatttggcagaaggatgcatggcaaaaatactgtcctacaccactcgtgcggatgtatgcaggctttctctggtttccaaagcctttcattccgcggctgaagccaacactgtgtgggattgctttctcccctctgatttgtcctctatcatctccccttcttcttccgttcctccctttcgctctattaaggatctctatctctatctctccgatcgtcccaccatcatcgatcaaggtataaagagttttcaattggagaagcggactgggaacaagtgttacatgctttccgctagagatctgagcattatatggggtgacactactcattattgggagtggacaaccctaccagagtccaggttcga

SEQ ID NO: 14524 - DNA, 435 bp, Glycine max
  Clone ID: LIB3094-046-Q1-K1-F2
cccacgcgtccgcccacgcgtccgcccacgttttcgcttatatataacgacggcggtagtggtaagtatacacaaactgaactttataaaaagactcttttacctaattggctagttcacaccctttaagaaagttagttaatttagtttagtaacattaagttctttagtaatttgtattatttttccaaaattatccttcaaattattgggactcattatctttctctttctaattaatcacattctgcctaatcgattaatgtgtgttagccttgttcttcaatccttacaagagagagaattcattctatctttttaattcataacattattgtaaagtaattaagggtattttaaacaaaaaataattaatgcaaaagacaacttgaaaagagtcttataaaaagggataaataaaatgaaaaaagagtc

SEQ ID NO: 14525 - DNA, 158 bp, Glycine max
  Clone ID: LIB3094-046-Q1-K1-F4
ccctagttagcctcttcttgtttctcctgctatcaacgacacccccccaaaaatgacaggggagacagtgaacccaaaagcttaccctttggccgatgcgcaactcgcaataacaatactggatcttgtgcaacaagctgccaactacaagcaactca

SEQ ID NO: 14526 - DNA, 426 bp, Glycine max
  Clone ID: LIB3094-046-Q1-K1-F6
ctttctccaagacaaaaaaaaaaacgtgatttcgcttttttcttcgaataaaccacaaacggcacggacgagaagaggagtgagagaaaatggggttgtcgttcacgaagctgttcagcaggttgtttgcgaagaaggaaatgaggattctgatggtaggtctcgatgctgctggtaagacaaccatcttgtacaagctcaagcttggagaaatcgtcaccaccatccccaccatcggatttaatgttgagactgtggagtacaagaacatcagcttcactgtgtgggatgttggtggtcaggacaagatccgtcctctgtggaggcattatttccagaacactcagggtctcatttttgtggttgatagcaatgatagggatcgagtggttgaggcaagggatgagttgcacaggatgttgaatg

SEQ ID NO: 14527 - DNA, 399 bp, Glycine max
  Clone ID: LIB3094-046-Q1-K1-F9
gaagggctctcctggcaggttgagagtacttatgccggtagattctaacgaagatgatgaggaaattgaggtggttggttatgtgaaattttctgagcgagtaactcagtcattgtctggagtttctatacgacctgcttcagatggtaagacagacttctacgaggttagtcacagacttgagagtggggtatacatgtgcgattgattttgtaatcatagttgattaataggggttgtactttttcattttttggtcatgagatttatggtttggttgtgtttatagcattcttggatatggatcatgtaccttgaactctggaattatctgaaaatctttgtttctctgttgttatggctgtgaatttacatcaatggattgtatttggtcttcac

SEQ ID NO: 14528 - DNA, 406 bp, Glycine max
  Clone ID: LIB3094-046-Q1-K1-G10
ttttatctttattccactgaatagaacatgagcatataaatggataccctttatattatgtgatctttatattatctataaagggtaaagatatccgatgtgaatctatttgtttagttttctatcggtatgtatataggtgaataatccaacatgcctttttgtgaagtaaaaaaactaccctcgatccatgcctcaaaagggttgataataagtaaaaaaaatcaatgaattcatgataaaacccttctgcgtttttttattataaatttttttgtcaataaagggatcaaggggttgggggatcaaatggtaaagttcttttgttggtaaattggaggattagaaacatgactattgctttccaattagcttgttttgcattaattgctatttcatttatttt

SEQ ID NO: 14529 - DNA, 284 bp, Glycine max
  unsure at all n locations
  Clone ID: LIB3094-046-Q1-K1-G5
cgcttatccagaagaatcaagcatggatgaagagtgctactttaatgctgaacatgcaagcacatgaaatatctattcagccgacattttatctatattggggagtgtgctggatttgggatttacaggcttgaaggatttggtttacttacttctatggcatttacttcattgggctcgtggccaaagcaaagttttccacccacacatactntgactcctggaatcgagtgctacttgatggctttcttggttgcctaatgtcngtcgtgcttgtctggaca

SEQ ID NO: 14530 - DNA, 354 bp, Glycine max
  Clone ID: LIB3094-046-Q1-K1-H11
gccgaccgacgcgtccgcccacgcgtccggcgcgatgccagtttgtgttgtgtggtatcatcacagcgaagcgcgccgccactactaaactttcctcactttctctctctctctctgtgagttgtggaaattgattagaattgaaaataatgtctggttcggaggacgagggaggagaagagtacctcttcaagatcgtcataatcggagactccgcggtggggaaatcgaacctgctgtcccgctacgcccggaacgagttcaacatgcactccaaggccaccataggcgtcgagttccagactcagtgcttggaaatcgactccaaagaagtcaaagctcagatttgggaca

SEQ ID NO: 14531 - DNA, 138 bp, Glycine max
  Clone ID: LIB3094-047-Q1-K1-A11
ccacgcgtccgattctttccctttgtcaagtgcaatctaagaaagagctaacaagcgaaacatgggttctttgggcacaatcaacaacaagcctcatgctgtgtgcataccgtacccggcacaaggccacattaaccc

SEQ ID NO: 14532 - DNA, 418 bp, Glycine max
  unsure at all n locations
  Clone ID: LIB3094-047-Q1-K1-A3
gctgaacgcagtaagcactaangagtagcgagtattgtctgatacttgcaccctcttaacgggaacgtgagacagagaaagggttgacggaaaggaaaaccaaatcaaacccaacccaccttgtccgatctgccaccaggtgtggttgttgtgatttgaatggaagcaagtggaggtggcggtggcggtgcttcaccgtctgcaccagtgaagcaatatctgcacgatttctcgaagctgtttcagtactatctggataaatccactccacattccacgtacagatggattgngacttttgtgatagcatccatctacgttttacgcgttgtttatgtgcaggggttttacattgtctcttatggcctcggaatctaccttctgaatctctttgatggtttctctcccctttggtcga

SEQ ID NO: 14533 - DNA, 324 bp, Glycine max
  unsure at all n locations
  Clone ID: LIB3094-047-Q1-K1-A4
gaaaaccaaacaaacccncccatcttgtccgatctgccaccaggtgtggttgttgtgatttgaatggaggcaagttgaggtggcggtggcggtgcttcaccgtctgcaccagtgaagcaatatctgcacgatttctcgaagctgtttcagtactattctggataaatccactccacattccacgtacagatggattgggacttttgtgataacatccatctacgttttacgcgttttttatttgccagggttttacattgtttcttattggctcggaatctacctttctgaaacttttgattgggtttcttctccctttggtcg

SEQ ID NO: 14534 - DNA, 337 bp, Glycine max
  Clone ID: LIB3094-047-Q1-K1-A8
cccacgcgtccggtgaagctggatcattcctccgcggaatcgatgtgaaccgtttaccttgggtggttgattgcgaagaggaagcaggtgtttcatctccaaacagcacggtttctagcgtcagtggaaagcgcagcgagagggaaaccaatggagaagaaaacgacacagacagagcttgttccagaggcatcatcagcgacgaagaagatgctgaaacctctagaaagaaacttagactctccaaagatcagtcaattgtcctggaagagagcttcaaagaacacaacactcttaaccccgtaagtaaacgtacacatgccaattaatttttttt

SEQ ID NO: 14535 - DNA, 380 bp, Glycine max
  Clone ID: LIB3094-047-Q1-K1-A9
aaaactaaatttttctttcaaaaaaacaaaaaaaaaaaaacgcctttttttaattataacaacgccccgccacccaaaacatctccaaacagcacggtttctatcgtcattggaaagctcatctagatttaaaccaatgtataataaaactacacatacagagcttgttccatatgcatcatcagcgacgaagaagattctgaaacctctagaaataaacttagactctccaaagatcagtcaattgtccttcaagagagcttcaaagaacacaacactcttaaccccttaatttaacgtacacattccaattaattttttttttcctgtatcaaaaacatagtatccttttatctacttcatcatatattaatctcact

SEQ ID NO: 14536 - DNA, 468 bp, Glycine max
  unsure at all n locations
  Clone ID: LIB3094-047-Q1-K1-B1
ttttattaaaaaaaaaaattttatttttaaaaaaaaaaatnaaactctaactttctatttttaaaagcccncccccacaaaaaaaaaataaaaaaaaaatttttctttttttatttattttttttttttttttttttcttctatattaatttttttttttttttcttttattttatctacaaattttttttttatttttttattttttttttattatctttttatttatttttctttttatttattctttatttttttttttatctttttttttttttttttttcttttttaatctttttttcttttttttttttttttttatatattaattttatatattattcttttttttttttatttattttttatttatctatatttttttcttttcctctttctatttttatttttactttatatctttattttttttatttttatttatatcttttctattttctattttt

SEQ ID NO: 14537 - DNA, 79 bp, Glycine max
  unsure at all n locations
  Clone ID: LIB3094-047-Q1-K1-B11
aaaaaaaaaaaaaaaaaatttaattaaaaaaaaaaaaaaannaaacnttttattttttttattnnaaaacgcccggccc

SEQ ID NO: 14538 - DNA, 449 bp, Glycine max
  Clone ID: LIB3094-046-Q1-K1-D6
gcggcatgatttccttgatggtaaactcaaccatatcctgaattttgtttgctaattgattggggttccgttttgggaactacgtattataataaatcccatctttactttgagattttctgtggaaggataagagccttgcatttaaatattaactttctgtttcccttgtcaagaacttcaactctgatgctgacgctcaagcaaatttggctatcaatcttgtagatggccaagtccaggaagagtgtgtgtaattcactcatggccgctgctggttatgttttgggtttgttgcagaacacgcctgcaatttacagattactcctaagaattggtgacccaattatttagcaatcaaaccctaagaatgaattattttctactggtcctggctccgtagtcataataacttttagcctcagcgttttcatttccatgattttttt

SEQ ID NO: 14539 - DNA, 277 bp, Glycine max
  Clone ID: LIB3094-045-Q1-K1-H10
cccacgcgtccgcccacgcgtccgccagtcaccaacaaaacaaaatccaatggcgccggctgtggcaatcaacggcgctttccccagcgccagagtcactcctccttccgtcaccggccgattcgccgccgtctacagcgaggtccaaaacagccgcatcgaccacgccctccctgtcccctccgttctcaaaaaccctttcatcatcgtcgacggtccccaaagctccgccgccggcaaccctggtctcgctccctcccattcactacttcaattt

SEQ ID NO: 14540 - DNA, 334 bp, Glycine max
  unsure at all n locations
  Clone ID: LIB3094-045-Q1-K1-H11
cgtncgcgcacgcgtccgnccacgcgtccgccattctcaacaaaacaaaatccaatggcgccggctgcgcaatcaacaacactttccccagcgccacantcactcctccttccgtcaccggccgattcgccgtcgtctacagcgaggtccaaaacagccgcatcgaccacgccctccctctcccctccgttctcaaaaaccctttcatcatcatccacggtccccaaagctccgccgccggcaaccctggtctcgctccctcccattcactacttcaattttccgtcgacaattagttctacgtaattatgatatttgtatgaatattattatg

SEQ ID NO: 14541 - DNA, 396 bp, Glycine max
  Clone ID: LIB3094-045-Q1-K1-H2
gaagttgcgagagtgaagaaatggcgcaagacttggcattggatttggaggagcttcgccgcgtccacagcatcgccaaaagacctcgaaccctctctcttctctcctccgaaattcgtaacctcgaaaagttatcgtcagaggaagcttctgcgcagattccggcgccgatttcgaccggaactaaagtggcgccttcacctgcgctgaagtatgcggcactcgcgtcgttcagttgggaccaggatagtgacaaagttaagatatatgtgttaatggagggaatcgatgagaataaggttgaatccgagtttaagtcgatgtcattcgatgttaagttccatgatgttcaagggaagaactaccgatgtgcaaatatcaaaatgcacaatgaga

SEQ ID NO: 14542 - DNA, 348 bp, Glycine max
  unsure at all n locations
  Clone ID: LIB3094-045-Q1-K1-H3
cgaccacgcgtccggaaggtcnanagtgaataaatggcgcaagtcttgtcattggatttggaggagcttcgccgccttctttcatcgccaaaagacctccaaccctctctcttctctcctccgaaattcgtaacctcgaaaagttatcgtcagaggaagcttctgcgcatattcctgctcctatttcgaccgtaactaaagtggcgccttcacctgcgctgaagtatgcggcactcgcgtcgttcatttgggaccaggatagtgacaaagttaagatatatgtgttaatggagggaatcgatgagaataatgttgaatccgagtttaagtctatgtcattcgatgtta

SEQ ID NO: 14543 - DNA, 407 bp, Glycine max
  Clone ID: LIB3094-045-Q1-K1-H4
cccacgcgtacaaaaaggcctgggcttagtttataagcataactgggtgaggaagaaagagagagagtgaagaagatggcgtcgagcggagcggtaccgttttggagggcggcggggatgacgtacataacatactcaaacatatgcgcgaatctgctcaggaattgcctcaaggaaccctacaaggccgaatccctctctcgtgagaagctccattttgttctctccaaatgggtcgacgccaagcctgaaaaacctactattcgttcagacaccccagagcagtgatctggaatagttggaagctataaatgcataaatctttgagatctggaagttcattgtcattttgaacctttctgtgatgtttaattcctttgtttttttctcttcatgaaatggaacat

SEQ ID NO: 14544 - DNA, 334 bp, Glycine max
  unsure at all n locations
  Clone ID: LIB3094-045-Q1-K1-H5
acatgttgagggtttcagttataaagcnctcttcttctctctcatcatagttnttcttacaaaaccaatcacgccccttccacttttctctctcgaaacgacgtcgtcgtcgatgaccgcatatctgctccttcctcccatccccttcttcccttcagaggttatgctactgaatccctgatccacacaaaaaaaaacagcattactcctgagattccgccaactgttactgctgttaagaaccctacttctaagattgtctatgatgatcacaaccatgaaagatttcccccaagtgacccaaacaaaatgtcatttgcctacttcaaactta

SEQ ID NO: 14545 - DNA, 256 bp, Glycine max
  Clone ID: LIB3094-045-Q1-K1-H7
cccacgcgtcctcccacgccgttcgcccaagtccttctcggaccccgtggggttctataggctcagacctctgtgtccttgagttctaaggagacaggaacctacgtctggtggatgaatcatgaccgtgtgatcagagcgtgattaacggcccgggtgagtttctctttggagtagtctcatctttggctgtagaggatcgttcttaggacacttccatgtgcctgggaatggtcatacggttgtctgacagacc

SEQ ID NO: 14546 - DNA, 265 bp, Glycine max
  Clone ID: LIB3094-045-Q1-K1-H9
gccgatcttaatgacgcaaatgccacacatgtagcaagttgtgatgtgagggtgttgcatccagtggtcaaggtttacggtggggccaccgcgttctccggccccgttgtcaccgtgaaggtgtttgaagacaacgtgttggtgagggagcttcttgagacgaaaggcgaaagaagagtattggttgttgatggaggaggaagcttgaagtgtgcattggtgggagggaatttggcactgattgcacataacatgggttgggctg

SEQ ID NO: 14547 - DNA, 439 bp, Glycine max
  Clone ID: LIB3094-046-Q1-K1-A3
cggacccttggggtttctaagtttccagggtaaagattcagcaaatttcacccccggttcgacgggtaccatgttgacaaaggtctaccgagttgcattttgttcttgtaacctcctcaacccactggaggtcgtgatctgtaaattttgagtgaattatacaacaaattcttgaaaaagaaatgattttctcttctgagctgctgcttattgatcgatgaatccagctgcaattattttcgaagatggcaataaaatctcttctgcggtgttatctctttgactgaattccaaattttgtaagtataatagttggctatgaaagagactgtaccaagaagcatagtgtgagagtcagagatcagttgttaagtatgagatgtgagaacatttgttgaatgtatattgctaaatagaagtgccaaagatgattatagat

SEQ ID NO: 14548 - DNA, 406 bp, Glycine max
  Clone ID: LIB3094-046-Q1-K1-A6
gccgacccacgcggcggaaatgtgaaagccttatcatacagtgtttgtaagattctaaggtagaagttgaagaagtggatgatgtgataattgtaggcggatgttcttacatcccgagggtgaaaaatcttgttactaacgtatgtaaaggcaaggaactttataaaggcatgaatcctttagaagctgctgtttgcggtgcagcagtggaaggagctattgcttcaggcgtcaatgatccctttgggaacttggacttgttaactatccaagctacacctcttgccattgggattcgagctgatgggaacaagtttgtccctgtaattccgagggatactacaatgccagcacggaaggagctagttttcacaactactcatgacaatcaaactgaggcgttgat

SEQ ID NO: 14549 - DNA, 437 bp, Glycine max
  unsure at all n locations
  Clone ID: LIB3094-046-Q1-K1-B10
cccacgcctccgtgattgataagaactagattataccttgaaatttgcgacatcgagtttggccaaaccctaagcatctggtcgtcgttgtcatcatccatccatttccatgccatggaagttactcctctctcttccccttctccaatccatggtctccatctccgtcacaaagaagcgagattcttggcggtggcttctaccctctactttgatggaatcccattcatattgcagttgcgtactcatagaggaacaaccacttataaacacccaattttgaggacttcacacaatgctcctcaatgtagcttgcgagcaatctccaagaagcatgaaaatgtggcgtggttatctgttagtcctaaatngcatgttcaaaataaattccccagagatgtagttgtaagatctgaacttactgctgctgggtctgc

SEQ ID NO: 14550 - DNA, 385 bp, Glycine max
  Clone ID: LIB3094-046-Q1-K1-B7
ttcaagaacaatttattgcacaaattttgattagaagcttactcaagccgatgtcggacagttctttgaatctatttgtggagaggttcaacggttgaggcttcttggagattaccatcattcaactcgaattgcttttgttgagttcacagtggctgagagtgcaattgcagctctaagctgtagtggggtgattctgggttcactgcccataagggtaagtccatcgaagacaccagttcgatcacgtgctcctcgccctactatgcactgaatcaactttccatgtttctggggttgattgctgctgagatatatttacatatatatatatacatagaaacagctttgttctaaggaacatgttgcatttaattggtacttt

SEQ ID NO: 14551 - DNA, 373 bp, Glycine max
  unsure at all n locations
  Clone ID: LIB3094-046-Q1-K1-C11
aaaacccgggccgaccgacgcgtccggcgcgatatcncgtatctttctctttttttttcctacgatggagttttnangtggggagtgtaaggtttttgagtctgttaaggtatatccaacctaattcgaggcatgcatacacctttctcaggctgctcttggtgaggcaaagaaagacaaatcaaatgaaccagttgttctctacttgaaagttggtcaacagaaatttgtcttgggaaccctttccagggagaaaattcctcaaatacctctggaattggttttggaaaaggagtttgagctttcccacaactcaaagaatgccagtgttcatttctgtggatacaaggcattttatgatgcttgcgattat

SEQ ID NO: 14552 - DNA, 341 bp, Glycine max
  unsure at all n locations
  Clone ID: LIB3094-046-Q1-K1-C3
cccacgcgtccgctncttttttttttctcttttttttatttccttaaaccattgcccaaacgctgggcttaaatcctcctgttcctcctcnaacctgtaantaatgtttttcctgtaaaccttgaacttaaaactcttccaccctcttaccctcaccctcaccctgttcactcccccacaccagcacctcttcacccaccagcaaatgcttctaacccacaccaccaccaccaccaccaccacccttcagcaccagcacctgttccttcaccttctcaccacaattaccctcctacccctgcccctgctaagcctcctactcaccaccatcaccatcaccc

SEQ ID NO: 14553 - DNA, 390 bp, Glycine max
  Clone ID: LIB3094-046-Q1-K1-C6
ggctggcattgttggaaaatacggtacccgttatggcgccagtctgcgtaagcagattaagaagatggaagttagtcaacacagcaagtttttctgtgaattttgtggaaagtatgctgtgaagaggaaagctgtgggaatatggggatgcaaggactgtggtaaagtgaaagctggcggtgcttacactttgaataccgcaagtgccgtgactgtacggagcaccatcaggaggttgagggagcaaactgagagttaagcttttttgtttatgctatcaattactattagactttgcatgaagtgcctagtttgtattcactgaactgcactggttgtattcaaaagaaactccttaagtttaattttgagatgactcttttaatttta

SEQ ID NO: 14554 - DNA, 468 bp, Glycine max
  unsure at all n locations
  Clone ID: LIB3094-046-Q1-K1-C8
gggccgaccgacgcgtccggtcatatgctccaagtgcactggttatggttctaagtctggtgcttcgatnaagggggctggttgtcaaggaactggtatgaacgtttctataagacatcttggcccgtccatgattcagcagatgcagcatgcttgcaatgaatgcaagggtactggagaaaccatcaacgacagagatcgctgcccacagtgcaagggagaaaaggttgtgcaggagaaaaaagtccttgaagttattgtggaaaagggaatgcagaacgggcagaagattacattccctggcgaagctgatgaagcgccagacacaattactggggatattgtctttgtccttcagcagaaagaacatcccaaattcaaaagaaaggctgaagatctttttgtaaagcacattttgtcccttactgaaaccttatgtggcttccaatttgtgctgactcactttga

SEQ ID NO: 14555 - DNA, 299 bp, Glycine max
  unsure at all n locations
  Clone ID: LIB3094-045-Q1-K1-G8
ggccattnncatttttttcacaatcctactccaactccacacagactnnntcacaaagaacttttttacaaaaacacatccccccccctcanacaattcttcatcatatatccaatatatcaatcaacatctcctactttattcatttccccatatcaaattttcatacaactacaaactccactctcatatacattaaaataaattttattaactcccacatttattaaaaagagancgnacttatacccataataaaaatagttcactctcatatattcttattaaaataaacaaat

SEQ ID NO: 14556 - DNA, 332 bp, Glycine max
  unsure at all n locations
  Clone ID: LIB3094-045-Q1-K1-D10
cccacgcgtccgagaaggcctgggcttagttgataagcataactgggtgaggaagaaagggggagagtgaagaagatggcgtcgagcggagcggtaccgttttggagggcggcggtgatgacgtacataacatactcaaacatatgcgcgaatctgctcaggaattgcctcaaggaaccctacaaggccgaatccctctctcgtgagaaagctccatttgttctctccaaatgggtcgacgccaagcctgaaaaacctactattcgttcagacaccccagagcagtgatctggaatagttggaagctatanatgcataaatctttgagatct

SEQ ID NO: 14557 - DNA, 302 bp, Glycine max
  unsure at all n locations
  Clone ID: LIB3094-045-Q1-K1-D12
tcttcttaaaaattccaacaacaatccaagtgatagacactcgttgcgatggaacttgtagcggaatccgagcgaactctgtacccatacgtgactggatcctctgtagtcgctatcaaatacaaagatgggattctaatggccgctgacatgggaggttcgtatggatctaccctgcggtataagagtgttgagcgtatcaagcctattggaaagcattctcttcttggtgctagcggngagataagtgactttcaagaaattttgcgctaccttgacgagcttatcctttatgacaacat

SEQ ID NO: 14558 - DNA, 98 bp, Glycine max
  unsure at all n locations
  Clone ID: LIB3094-045-Q1-K1-D5
cctttactttttttcttttgcatgattngaatcttgattggaaaaacgacgattgtagaagtttacccatcaattcaattttaagccgtgccttcttc

SEQ ID NO: 14559 - DNA, 390 bp, Glycine max
  unsure at all n locations
  Clone ID: LIB3094-045-Q1-K1-D6
aagcacaacngggtgaggacgaagaagacagttttaaaaagatggcgggccccccacctctaccgttttggacggcggcggggatgacgtacataacatactcaaacatatgcgcgaatctgctcaggaattgcctcaaggaaccctacaaggccgaatccctctctcgtgagaagctccattttgttctctccaaatgggtcgacgccaagcctgaaaaacctactattcgttcagacaccccagagcagtgatctggaatagttggaagctataaatgcataaatctttgagatctggaagttcattgtcattttgaacctttctgagatgcttaattcctttgtttctttctctccatgaaatggaacatgcactggattttgattt

SEQ ID NO: 14560 - DNA, 323 bp, Glycine max
  unsure at all n locations
  Clone ID: LIB3094-045-Q1-K1-E10
ttcctntatattctctatcaaatacaaacatagaattctaatatcctattaccttgcactttcatatgaatctaccctactttatcatattcttgaacatcccaaacctattcaaactcattctcatcttagttctaactctcatacaacttactatcaaaaaaattatctctaacttgaagaccttatcctatatcacaacatttttgaaaataataatcctctaataactaaagattttcataattattcaaccccaaaaaatttttaataaacctaacaattctcaaccattgtaaaattcacttatacctttttccttt

SEQ ID NO: 14561 - DNA, 387 bp, Glycine max
  Clone ID: LIB3094-045-Q1-K1-E3
cggttttagcctttttcggtttcgaacattctgacgaatttctctctctctctcttcaatggaggacttggaggacatgagatggatcgggaagaatatttggggaagtgttccaatatgaaatgccaaagagtggatgaatcatatgtacatgctcttcaagatgaagtaatggaagttgagcatttgcttgcagaacctagaaatgatcatgcttccctggatggtagtttggattctcatacaactttgaatggaaaggatgatttggaactggaggcccttgatggattgctggatgatgttgaaatcaatgatcttgaaggaactgttggtttccctggtggtacatgtgaagaatattttttggaattttggatttgctga

SEQ ID NO: 14562 - DNA, 184 bp, Glycine max
  unsure at all n locations
  Clone ID: LIB3094-045-Q1-K1-E7
cccccacccccctcacatctcactttcaaaacaatccatatntcccactctttaaaaaacctcataatactatataaccctttctcaccctatnaaaacacaataacttacatactnaanatacttaaatataatatcacacttaaaacttcaaatacaaaacacttaacacacacacactcaa

SEQ ID NO: 14563 - DNA, 277 bp, Glycine max
  Clone ID: LIB3094-045-Q1-K1-F10
cccaggcgtcctcccacgcgtccgctgggttgctgggaaaaagaaaaataaaatgggttccaataattcttactaggagttctcgaacgaaatcggtttgggctcctccaacattggttcttacattaatggccaatggaaagccactggttcttctgtcacttctgttaatccttctaacaatcagagcatagctcaagtgactgaagcgactttgcaagattatgaggagggattgcaagcttgcagtgaagcatccatgacatggattactatt

SEQ ID NO: 14564 - DNA, 376 bp, Glycine max
  unsure at all n locations
  Clone ID: LIB3094-045-Q1-K1-F11
cggacgcctnnnctntttttgaatctcagtttttgccagctgtcacggagcttgtcgttacggaattgatgtacttgcagtatatggatcctaaagagccaatctatatttacataaattccactgggactacgcgagatgatggtgaaacggtaggcatggagacagaaggttttgccatttatgatgcaatgatgcagttgaaaaatgagatacacacagtggcggttggatctgctataggtcaagcctgtttgctactttcagcagggtctccgggtaaacgctttatgatgccacatgctaaagccatgattcagcagcctcgtattccttcctctgggttgatgcctgcaagtgatgttcttattcgtgc

SEQ ID NO: 14565 - DNA, 353 bp, Glycine max
  Clone ID: LIB3094-045-Q1-K1-F4
aaacattattctcgaattagggttttccactgatctccgagcacacaccactactctttgcctcagattcaacaccaccttgcgtggcgccaatgggaaaagccttcgacatcggagccgttccgttcaacgccgacgggtggggtccgccggacaacgcgacctcaggcagcaacaacaacaacctccctctgaacgtccccttcgcccccttctcccgctccgacaaattgggccgcatcgccgactggacccgcaacttcaacaatccaacccgctccaagaaccccgccgatgccgtcttcgacttcggcaacgacgactccttccccggcttcgccgacgacgacgcc

SEQ ID NO: 14566 - DNA, 347 bp, Glycine max
  unsure at all n locations
  Clone ID: LIB3094-045-Q1-K1-F5
cccacgcctccttcaagcattgcatccctcttgattngnagcacgctctgcgctttaaatgaaagttttgacaaatcaagagggcttctaaaatcatagtgtgtgttttgcaacaatggctaagttctttgctgctatgatcttggcactctttgccatttccatacttcaaacagtggtaatggctgctaatgaacaaggaggccacttgtatgacaacaagagcaaatatggaagtggaagtgtcaagagttaccaatgcccatcacaatgctcgaggagatgtagccagacccaataccacaagccctgcatgtttttctgtcaaaagtgctgcaggacatgcc

SEQ ID NO: 14567 - DNA, 118 bp, Glycine max
  unsure at all n locations
  Clone ID: LIB3094-045-Q1-K1-F6
tctcnaatttttttttcctcttcatctccnancacacaccactcctctatagattaattatacaccacctgggcccccnccaatcntaaaanccttcnacatccaatcccttcctttc

SEQ ID NO: 14568 - DNA, 433 bp, Glycine max
  Clone ID: LIB3094-045-Q1-K1-F7
cccacgcgtccgcggacgcgtgggggtttttgtggataagagtgagctataatggctggggggagaccgggtttaattgctttgtttgatgttgacgggactcttacagctcccaggaaggtggtcacaccggaaatgttgacattcatgcaagaactacgaaaggttgtaacggttggagttgttgggggttctgaccttataaagatatcagagcaacttggcagcacagttaccaatgagtatgattacgtattttctgagaatggtcttgtggctcacaaggaaggaaagctcattggaactcagagcttgaagtcattccttggtgaagaaaagctcaaggagtttattaactttacacttcattatattgctgatttggacatccccattaagaggggaacatttatggagttcccgaatgggatgc

SEQ ID NO: 14569 - DNA, 412 bp, Glycine max
  Clone ID: LIB3094-045-Q1-K1-F8
cccacgcttcctcgcgtccctgctcctttcttttttcactacataaatttgatagatgacgctgcactcatgttggttgatcaggaccaccttacaggtaactatcctctttcgaacaccgtgctcaacaatgaaatggagacagtaatgcagtaactagtagaggttatgacggttggaattgtagcaggttatgacctcataaagacataacatcaacttgacagcacagataccaatgaatatgattacgcattttctgagaatggtctcgtggctcacacggaaggaaagctcattggaactcagagcttgaagtcattccttggtgaagaaaagctcaaggagtttattaactttacacttcattatattgctgatttgcacattcccattaagaagggaacattta

SEQ ID NO: 14570 - DNA, 431 bp, Glycine max
  Clone ID: LIB3094-045-Q1-K1-G1
cgggtcgcgacaccacgcgtgcgcccacgcgtccgcccacgcgtccggaagaaaggaatataccttacggatggtggaatcaaggggcatttgggattgcatagtgcgggtggtgacgaagatggaagacaaagagagtgagagagagaaaaatcttcgctttatgtcaatggcacgaagcaggggtttttacagaagtgagcaacgacgccagatatgagaaaagtgagtttatttggggtcatatttgtaaaaagtggttttgtaattataccctctaattcaagagtgaagaaacaagggtgggatggaaatataaatagtacaatttggtcctagtggtggcttaccctttggcctctttttctaattcagaattttttttaaatatataaaaggggggtggatatggttacctaaaaaaagggcgg

SEQ ID NO: 14571 - DNA, 252 bp, Glycine max
  unsure at all n locations
  Clone ID: LIB3094-045-Q1-K1-G10
tcgggcacgcggtnnaaatcaagttatatgtcttctggttgtagacaggaggggcacaatacggattatctagatcatgttcttagagaatccacatgcgccacgatatttgcgacatggttcaagngtgataagacagtgaaaatctgggccatagagatgggagtctgtcaaggcancttatgttctttaccctcatatttacggagtaggtgtaaacagccattttctntggtgttgggtctcccatca

SEQ ID NO: 14572 - DNA, 399 bp, Glycine max
  Clone ID: LIB3094-045-Q1-K1-G2
cccacgcgtccgcccacgcgtccggaagaatggaatataccttacggatggtggaatcaaggggcatttgggattgcatagtgcgggtggtgacgaagatggaagacaaagagagtgagagagagaaaaatcttcgctttatgtcaatggcacgaagcaggggtttttacagaagtgagcaacgacgccagatatgagaaaagtgagtttatttggggtcatatttgtaaaaagtggttttgtaattataccctctaattcaagagtgaagaaacaagggtgggatggaaatataaatagtacaatttggtcctagtggtggcttaccctttggcctctttttctaattcagaattttttttaaatatataaaagtggggtgatatgtttacttaaaaa

SEQ ID NO: 14573 - DNA, 394 bp, Glycine max
  Clone ID: LIB3094-045-Q1-K1-G3
cccacgcgtccgcccacgcgtccggaagaatggaatataccttacggatggtggaatcaagaggcatttgggattgcatagtgcgggtggtgacgaagatggaagacaaagagagtgagagagagaaaaatcttcgctttatgtcaatggcacgaagcaggggtttttacagaagtgagcaacgacgccagatatgagaaaagtgagtttatttggggtcatatttgtaaaaagtggttttgtaattataccctctaattcaagagtgaagaaacaagggtgggatggaaatataaatagtacaatttggtcctagtggtggcttaccctttggcctctttttctaattcagaattttttttaaatatataaaagtggggtgatatgtttacct

SEQ ID NO: 14574 - DNA, 361 bp, Glycine max
  Clone ID: LIB3094-045-Q1-K1-D1
cccacgcgtccgcccacgcgtccgctcgctttatcttcccttcccttcatctccgcttcaaaatggtatcctcctctctatctctgttcgaaacaagtccaacaccagcaacacactgcttcaatctcaatcgggcacattgagaaatggttttgagtaatgggaaaactgaggcaccattgccaagtagtaatgggggaggtgctgagattgataacaatgagaagaagcccttcaagatcttcgtagggtatgaccctcgcgaagatcttgcctatgaggtatgtcgccactccatcttgaaaaggtcttcaatccctgttgagatcataccaattaagcagtcagatctgaggaaaag

SEQ ID NO: 14575 - DNA, 352 bp, Glycine max
  Clone ID: LIB3094-045-Q1-K1-G4
aaaaaaaaaaaaaaaaaaaaaaaaaaaaattttaaaaaaaaaaaaaaaaaaaaaaaaaaaaagaaaattttaaaaaaaaaaaaaaccccaaaaaaaaaaaaaaaaaaaaaaaaaaaaaattttttttttttttaaaaaaaaaaaaaaaaaaaaaaaaaaaaaaaaaaaaaaaagccccccccctttaaaaaccccaaatttttccccccctttctaacaaattaaatttttttttttttcccccccaaaataaattcccccccccctttttaaaaaactttgtaattgaaaaacccctcttttccccaaattaaaaccctttaaaaaaaaccccctttccccaatttgtatt

SEQ ID NO: 14576 - DNA, 450 bp, Glycine max
  Clone ID: LIB3094-044-Q1-K1-G8
atcacccaacaggaaaaaagaaatccgagttttaggaccttgtccccaccccaaagatccaggggagagtgggcgttccattgcctgattctaacttacgtggtcgcagctgaggctgccgtggccattctgctaacccttcccacgcccaaactcctaagggaccgtttcgcctctctcgtttccctcattcttcaacccgcgcttttcattgtcccctttgcggggttccaactccttgatatatactggaaaaatgagcatcggttgatgtgtacctctgaagtttgtactgctgcggagagagatcgatatgagaaatctatatacaaagctcagaggaatgtaatacttgtgtgtacagcatgtcttctctactggtctatcagccgcatttgcaagtatcagaaagaaatccagagtctggaggaagggagaaagagatcaagt

SEQ ID NO: 14577 - DNA, 430 bp, Glycine max
  unsure at all n locations
  Clone ID: LIB3094-044-Q1-K1-H1
tttctgaaccacaactacgagactttcatggtatccctgtcccactcaccgatgaatactagaatccttttatcttaactgactagcgcgttaatcccgtccaactcactggtgtcgctaccaccgctaccggcacagcaggttctgggtttgggtcctatggtaccggtgcttactgtggtggtgcaagtgcaaccaccgttgcagatcttttgtcaacccaaccaatgagtggcatggaggctagagagcttcgtcgttcctccatttcaagctctagctcgtctgatgatgattggcaaggtgggaagaggaagaaaggaatgaatgataaaataaaagagaaactaccangggtaggaggagggaataataataaggagcatgcacacacaacatctgctccaaccaccgtcactaaccacccttc

SEQ ID NO: 14578 - DNA, 267 bp, Glycine max
  Clone ID: LIB3094-044-Q1-K1-H5
cccccccccccccccccccccccccccccccccgccaccacccccccccccccccccccccccccccccccccccccccccaccccccccccccccccccccccccccccccacccccccccccccccccccccccccccccaccccccccccggcccccccccccccccccccccccccccccccccccccccccccccccccccccccccccccccccacccccccccccccccccccccccccccccccccccccccccccccc

SEQ ID NO: 14579 - DNA, 454 bp, Glycine max
  Clone ID: LIB3094-044-Q1-K1-H6
cccacgcgtccgcccacgcgtccgcaaaatttatcaacaccaatctcacccatttcaaaaaggggccgttggtgttactattcgtaaaatggccactcttgttctttaccaattctttctcaaactcttgctcctaatttcagtctttcagctttcctttgctgctaggagactcaaccagctggttcaggaccagtcacagttactccattaccacaacggtcctcttctatacggcaaaatcgccgtgaacctaatctggtatggtcacttcaaaccatcccaaaaggccatcatcaccgatttcgttacctcactgtcatccccatcgtctcagagcagccagccatctgttgccacgtggtggaaaaccacggagaagtactaccacctgagtcccaagaaccaagaggctgcttcttctctttctctatcactgggcgatcaagttctc

SEQ ID NO: 14580 - DNA, 269 bp, Glycine max
  unsure at all n locations
  Clone ID: LIB3094-045-Q1-K1-A1
ttttacacaccnnctnattnaaaaaaagatgttttttatacatgacgcgcacccctcaacaaattcattttccttcaaatcttttctttagaaatacaatcaacacaagttcaaatatgtatctaatcttccttcccctccacatttaccaatttattacttttaataacatttattcactgtaaatttcttaatatataaaattcattcgaaaaaatataaaacttttttaaantatctactcttattaaaccttttatcttttaaat

SEQ ID NO: 14581 - DNA, 250 bp, Glycine max
  Clone ID: LIB3094-045-Q1-K1-A10
gactcaaatgcaacacatgtagcaagttgtgatgtgagggtgttgcatccagtgttcaaggtttacggtggggccaccgcgttctccggccccgttgtcaccgtgaaagtgtttgaagacaacgtgttggtgagggagcttcttgagacgaaaggcgaatgaagagtattggttgttgatggaggaggaaacttgatgtgtgcattggggggagggaaattgacactgattgcacataacatgggttggg

SEQ ID NO: 14582 - DNA, 339 bp, Glycine max
  Clone ID: LIB3094-045-Q1-K1-A11
tcggtattgcatacttcttccctggctgaatgccttggttaccccaccgcctgtttaaaaaaaatgggtcctcatctggcatgacttgaatttgtcaagaaaggcagtgtccttcaaagctgttcgggagaaatacaagcaacacaagttcaaatatgtagctaatctgccttcccctccacatgtaccaagttattactttgaagaacagtgatgcactggaaatttcttaatagataaaattcatttgaaaaaatagaagactttttgaagtgatctactcttatggaacttggtatcttttaaatcatgcctgatcaagcatgtcatgtgttgaac

SEQ ID NO: 14583 - DNA, 357 bp, Glycine max
  unsure at all n locations
  Clone ID: LIB3094-045-Q1-K1-A12
gatgggtgcaaaccgcctattaccggtctgtttgttggactgaacaaaggtcacgtcgtcaagtanattgtatagcctncacgcccctcanatcntaaggngaaaacaagcaagagggtgcactttgtgaggaacctcataagagaggtagccggttttgcaccctatgaaaagcgtataactgagttgctgaaggttgggaaggataagagggcactgaaggttgcaaagagaaagctcggaacacacaaacgcgcaaagaagaagcgtgaggaaatgtccagtgttctcaggaagatgagggctggtggtgctggagacaagagaaataagtctatttactgttttcagatcact

SEQ ID NO: 14584 - DNA, 402 bp, Glycine max
  Clone ID: LIB3094-045-Q1-K1-A3
gttctagatcgcgatctagaactagccaattcactctttttcttctcgccctctgccgtgggaggagtttgtaacatggctgctctaccaacggcggagcttagtgacgcaaatgcaacacatgtagcaagttgtgatgtgagggtgttgcatccagtgttcaaggtttacggtggggccaccgcgttctccggccccgttgtcaccgtgaaggtgtttgaagacaacgtgttggtgagggagcttcttgagacgaaaggcgaaggaagagtattggttgttgatggaggaggaagcttgaggtgtgcattggtgggagggaatttggcactgattgcacataacatgggttgggctgggattgtggtgaatggctgcatcagagatgtggatgagatcaat

SEQ ID NO: 14585 - DNA, 387 bp, Glycine max
  unsure at all n locations
  Clone ID: LIB3094-045-Q1-K1-B3
gcgatggctcccaaaccgcctagtacgggtctgttttttggactgaacaagggtcacgtcgtcaggggagaagaattgcctccacgcccctcanatcgtaaggggaaaacaagcaagagggtgcactttgtgaggaacctcataagagaggtagccggttttgcaccctatgaaaagcgtataactgagttgctgaaggttgggaaggataagagggcactgaaggttgcaaagagaaagctcggaacacacaaacgcgcaaagaagatgcgtgaggaaatgtccagtgttctcaggaagatgagggctggtggtgctggagacaagaagaaataagtcttatttactgttttcagattcactagatggacctgtgtattgatggac

SEQ ID NO: 14586 - DNA, 300 bp, Glycine max
  unsure at all n locations
  Clone ID: LIB3094-045-Q1-K1-B7
cccccccccccccaaannnnnnnnannnnannanaaaaaanccccccccccacccncccccccaccccccccccccccccccccnacacccccacccccccccccccccacccccccccncccccccccccccacaacaccccccccccccccccccccacacccccccaccaccccacccccaaccccccnccccacccccccccccaaccccccccccccccccnccccccacacccccccacccccccaaccccccccccccaaccccaccccaccccccaccccccccccgccccc

SEQ ID NO: 14587 - DNA, 396 bp, Glycine max
  Clone ID: LIB3094-045-Q1-K1-C11
gataactactattgaagaagcaaaacgattctacccactgttcggactcggggccaatggggcccttattttctctggccggacagtcaaatacttttctaatctgaggcagaatttaggtcctggagttgatggttgggccatctctctgaaagcaatgatgagcatagttgtgggtatggggtttgcaatctgtttcctgtactggtgggtgaacaattatgttcctcttcctactcgtagcaagaagaagaaggagaagcccaaaatgggaacaatggagagcttgaagttcttggtgtcttcaaagtacatcagagatcttgccactttagtggttgcttatggaatcagcatcaatcttgttgaggttacctggaagtctaagctcaaagc

SEQ ID NO: 14588 - DNA, 361 bp, Glycine max
  unsure at all n locations
  Clone ID: LIB3094-045-Q1-K1-C12
atggctcccaaaccgcctagtacgggtctgtttgttggactgaacaagggtcacgtcgtcggcaagtatgaattgcctccacgcccctcanatcgtaaggggaaaacaagcaagagggtgcactttgtgaggaacctcataagagaggtagccggttttgcaccctatgaaaagcgtataactgagttgctgaaggttgggaaggataagagggcactgaaggttgcaaagagaaagctcggaacacacaaacgcgcaaagaagaagcgtgaggaaatgtccagtgttctcaggaagatgagggctggtggtgctggagacaagaagaaataagtcttatttacttgtttccagattcact

SEQ ID NO: 14589 - DNA, 261 bp, Glycine max
  unsure at all n locations
  Clone ID: LIB3094-045-Q1-K1-C2
ttttcaacaatttctaatttctttnctcctataatcttatcactcttttccatttccatacttcaaacanttttaatnnctcctaattaacaataattccacttttattacaacaatatcaaatatttaacttnaaatatcaatacttcccaatccccatcacaatcctctattatatttatccaaacccaataccacataccctccatatttttctttcaaaaattcttcaatacattcctttttattcccccaaattat

SEQ ID NO: 14590 - DNA, 487 bp, Glycine max
  unsure at all n locations
  Clone ID: LIB3094-045-Q1-K1-C5
ggccgaatcccggtcgccacgcgtgcacgctcatgctattgcttcctatctctttttcatgaccccttcatggagtccactttgctgaccaatctactagtcttcaacaacaccctccaaccagagttaatgaggagtgtgcatgtgtaccgccgaggggatggagagaaaagggaagttgagagagagtttgtgttttcagagagcggctcctatggggaaatgcaggctaccccaattcctggattggtaaaatctcgtgtttctgaagtgtgtgaagggcaccgaaatggagtgtggctttgtgtctttgcgttccatgccgatcacactcctcaattttgccgcattccaccggttttgttggtcacatgaaacccaaagcttaagatgattccaaacttgcttgatgatctncatgtgatatacaagttggaccggaagggaggaagacagtgatatatcacaagactatacaggggaagaa

SEQ ID NO: 14591 - DNA, 369 bp, Glycine max
  Clone ID: LIB3094-045-Q1-K1-C7
cccacgcgtccgtcaagcattgcatccctcttgatttgtagtttgttttgtgctttagatgaaagttctgccaaatcaagaggggttttaagatcatagtgtgtgttttgcaacaatggctaagttctttgctgctatgatcttggcactctttgccatttccatacttcaaacagtggtaatggctgctaatgaacaaggaggccacttgtatgacaacaagagcaaatatggaagtggaagtgtcaagagttaccaatgcccatcacaatgctcgaggagatgtagccagacccaataccacaagccctgcatgtttttctgtcagaagtgctgcaggacatgcctgtgtgtgcccccggggtatta

SEQ ID NO: 14592 - DNA, 321 bp, Glycine max
  Clone ID: LIB3094-045-Q1-K1-C8
gaaaacccggggggaccgacgcgtgcggtgggggatcccaacactttcggttacatgtttcacaggatgctgaagcttggactgatagtagtgatgacgctggtgaagcacatgctgacatgcctgctcttgaggacgctgatgcatatgctgagggttgcaagatggaagaagttgattaaatctgacttaattgcctgttacgtttttagaaacaatgattggagaaacagtctttttactatgttttatgttttttgaattttcgaaattttggaacgttggctagttaggtgccgtatgtagtaatttctttatggt

SEQ ID NO: 14593 - DNA, 367 bp, Glycine max
  Clone ID: LIB3094-044-Q1-K1-G6
ctccctaaaaaaaaccctaggcttttcaaaccctctttctccgttccacccaagctcttgcattccttcgaccaaaagcctcattgggacgaccaaggcaccgttaacaccaactactcctcctttggcgttctctctgaccctaactccctcaccgaactctcttccgatcctcaaaccatcgattccggcagcgatctcgaagaagacgacttgaaatctgccctaggaaagaagcgaagggatgggaggagcgcgccgcctcagcctctgactgcaatgcaacggattcatatcagtcgtctcgtcgctaaatacggagatgattatcagagtatgttggtggatataaagctgaatccgatgc

SEQ ID NO: 14594 - DNA, 440 bp, Glycine max
  Clone ID: LIB3094-044-Q1-K1-B2
cccacgcgtccgcccacgcgtccgcagggaagttgtggaagttgttgggcgtgctcaacggtggccacagtggaagcaataaacaagatagtgacagggaagtttgtgtccttatctgaacaagaacttgtggactgtgacagagcctacaatgaaggatgcaatggtggccttatggactatgcattcgaattcatcattcaaaatggaggcattgacacagacaaagattacccataccgtggctttgatggcatctgtgatccaactaagaaaaatgcaaaggttgtgaacattgatgggttcgaggatgttccaccgtatgatgagaatgccttgaagaaagctgtcgctcatcaacccgtaagcattgctattgaagcctctggcagagatttgcaactttatcaatcgggtgtatttactggtaaatgtgggac

SEQ ID NO: 14595 - DNA, 281 bp, Glycine max
  Clone ID: LIB3094-044-Q1-K1-B3
cccacgcgtccgcccacgcgtccgcagggatgttgtggaagttgttgggcgttctcaacggtggccacagtggaagcaataaacaagatagtgacagggaagtttgtgtccttatctgaacaagaacttgtggactgtgacagagcctacaatgaaggatgcaatggtggccttatggactatgcattcgaattcatcattcaaaatggaggcattgacacagacaaagattacccataccgtggctttgatggcatctgtgatccaactaagaaaaatgc

SEQ ID NO: 14596 - DNA, 375 bp, Glycine max
  unsure at all n locations
  Clone ID: LIB3094-044-Q1-K1-B4
ctctacatcctgctctcccaaattccactgctgttagaatcatctcaaattctcgtttgtatacacgtaaatcacttatctattagtaggattttaatgtatttcaaatatttgtataagtagaaatttctttctgtcatctggttttggttcaattatgtaggtggtttaacattcatagcttcatgaccaccaagttctcaaatactgtaaatagctgcaaaaaaatatatccaacaacaaaaataacaaaaataaattcgcattttacatcggttctaggnaaaaaaaatttaatataataaataattaattataaatttttttttattataatataattaatattattattttattattatttataataat

SEQ ID NO: 14597 - DNA, 386 bp, Glycine max
  unsure at all n locations
  Clone ID: LIB3094-044-Q1-K1-C3
gctaaaatttttctcacttgttcatcncannatnnnnagagatgctagacaagtttttctaaaaccnntacattcctatataaacatgcatcttaatttccaattacttctcgtgaatctgtaccattttgttataacaatttactacaataagcaatcaaatattttgaagaatgttcaaaatcaatccaaatctatcatgttgccattagagctcttaaagaaactgctaataaggtttgcaccataaaaaatcatagttcttgaacatcataattatctacatcaaccaattgaagcatgttttaattgcttgtatcatattaagatgttccaatcaatcaatctttggcctaaaatcataataaaatattaaaattgacttc

SEQ ID NO: 14598 - DNA, 418 bp, Glycine max
  unsure at all n locations
  Clone ID: LIB3094-044-Q1-K1-C4
gcccggatcccggtcgccacgcgtcgccacgcgtcgccacctccgggattttgctagtttgaacaagatgttgcagctagtctacactgcgattttctccgaaatgcttttgattctcacgctcgtcttcaaaaccccactgagaaaactcgtcatcgtttccctcgatagtgtgaagcgcggtcgcggtcccgtggtggtttccaccgtgggcgccacattgatggtggttctcgcttcgagcctctacagcatggccaagatccagcaacgcaccctcgaggccggcatagtcaaccccaccgaccaagtcctcatgtccaagcacatgctcgaagcttctctcatggggtttctgctggtcctctctctgatgattgatagattgcaccattacataagagagcttcngtcactc

SEQ ID NO: 14599 - DNA, 268 bp, Glycine max
  Clone ID: LIB3094-044-Q1-K1-C6
aaaataaataaaaaaaataataaaaaaaaaaaaaaataaaaaaaataaaaattaaaaaaaaaaaaaaaaaaaaaaaaaaaaaaaaaaaaaaaaaaaaaaaaaaaataaaaaaaaaaaaaaaaaaaaaataaaaaaaaaaaaaaaaaaaaaaaaaaaaaaaaaaaaaaaaaaaaaaaaaaaaaaataaaaaaaaaaaaaaaaaaaattaaaaaaaaaaaaaaaaaaaatataaaaaaaaaaaaaaaaaaaaaaaaaaaaaataaaaaaa

SEQ ID NO: 14600 - DNA, 451 bp, Glycine max
  unsure at all n locations
  Clone ID: LIB3094-044-Q1-K1-C8
ttttgattttctgaacccgggtttttaaaataagggttttatttaaccgatggtttttaggataaggtgattggttaagccatcctttggtgtttgggttaatcgggccgttgtggaacttgcaaagggcagagggtttccgatttgtgataaacagagacgagtgtttctcccatgatgtgaagtacgagggtgacactgttcatgtctctttcgttgttattaaagctgattctccctggcattacggcgacgaaggtgtcgatctcgtggtaaagggaccttctggcgagcaaattcaagaatttcgggacaagaccagtgagaagtttgactntgtggctcacaaatccggggtccataaattctgcttcaccaacaagtctccttatcatgaaactgtcgattttgatgtacatgttggtcacttctcttactttgagcaacatgc

SEQ ID NO: 14601 - DNA, 406 bp, Glycine max
  unsure at all n locations
  Clone ID: LIB3094-044-Q1-K1-E1
cttttctactttgagtcttctttatccgtttttttctccttgaactcaaacgtggcatatgaagtgtttctactagatttctgnccaagtccatttgggatgagggtcaggattgcacttgctgaaaagggtatcaaatatgagtacaaagaagaggacttgaggaacaagagtcctcttctcctccaaatgaacccggttcacaagaagattccggttctcatccacaatggcaaacccatttgtgaatccctcattgctgttcagtacattgaggaggtttggaatgacagaaatcccttgttgccttctgacccttaccatatagctcangctagattctgggctgattatgttgataagaagatatatgatcttggaaggaagattttgacatcaaaatgag

SEQ ID NO: 14602 - DNA, 319 bp, Glycine max
  Clone ID: LIB3094-044-Q1-K1-E12
acttaaaaaacaacaccctcttctttacaatttatccactatacaccctcttattattatcattctctatttcaccatcaacacttcttccttcaaaacatgtctcacacattattacttattcattctatcttttttcccattttctactactattcttataaaatcacttaataaatcatatttcataatttacatttaattcatatttttcttccattctttctcttaaggatgagaaggcattgctcaaaacataatccaacaatttggtttatttcactttcttaacttttttccttaacatgctaacaaaaac

SEQ ID NO: 14603 - DNA, 333 bp, Glycine max
  unsure at all n locations
  Clone ID: LIB3094-044-Q1-K1-E2
tcccactcgtcctcccacgcgtcttgaagaattgaatataccttacggatggtggaatcaagaagcatttgggattgcatagtgcggntggtgactaagatggaagacaaagagagtgagagagagaaaaatcttcgctttatgtcaatggcacgaagcaggggtttttacagatgtgagcaacgacgccagatatgagaaaagtgagtttatttggggtcatatttgtaaaaagtggttttggaattataccctctaattcaagagtgaagaaacaagggtggtatggaaatataaatagtacaatttggtgctagtggtggcttacccttt

SEQ ID NO: 14604 - DNA, 273 bp, Glycine max
  unsure at all n locations
  Clone ID: LIB3094-044-Q1-K1-E4
acttccacacctnaaatcaaccatttcctaattctaataatcaacaccttctactccaacaagaaaattttccttcttaaactcatcaccaactcctccaatgcttttaacaaaattctatttaagagtttaacaaataagagcaagctctatgctcagccatattttttcattcatattattccatacaatactaacaatacacttaccattttttacaattttattttcatgaccaaatcttatttgttgaacaactttgttacaatttct

SEQ ID NO: 14605 - DNA, 447 bp, Glycine max
  Clone ID: LIB3094-044-Q1-K1-E9
ggctggcattgttggaaaatacggtacccgttatggcgcctgtctgcgtaagcagattaagagagatggaggttagtcaacacagcaagtttttctgtgaattttgtggaaagtatgctgtgaagaggaaagctgtgggaatatggggatgcaaggactgtggtaaagtgaaagctggcggtgcttacactttgaataccgcaagtgccgtgactgtacggagcaccatcaggaggttgagggagcaaactgagagttaagcttttttgtttatgctatcaattactattagactttgcatgaagtgcctagtttgtattcactgaactgcactggttgtattcaaaataaactccttaagtttaattttgagatgactcttttaattttaaattgtttggaactttgtcggggtgattttgcttcatagtttcatttattgtttgc

SEQ ID NO: 14606 - DNA, 453 bp, Glycine max
  Clone ID: LIB3094-044-Q1-K1-F1
tctacccctccgtcacccccttccttcaggatctccaggccaggatcctccgcgaccaccaggagactctgtccgatgccaacgccaaccctgacgactccatcaagattctccccttcgagttcgtagcccttgaggcctgtctggaggccgcttgtagcgtcttggaaaacgaggctaagactttggagcaggaggctcatccggccttggacaagctcacctccaagatcagtactctcaatttggaacgcgttcgtcaaattaagagccgattagtcgccatcactggccgtgttcagaaggtcagggacgaattggagcacctgctcgacgacgacgatgatatggctgagatgtatctctctgaaaagctagccgaacaagatgacttggagaaggcggatgatacctcttctgccgacgatgttgatgatcacattgacaggaccg

SEQ ID NO: 14607 - DNA, 433 bp, Glycine max
  unsure at all n locations
  Clone ID: LIB3094-044-Q1-K1-F7
ggttttgaccattcaacttcctccttgagaggttttggggttggaaaaaggagagaaaaaacgggcccaggattggtccttcctcacctgggttttctgaataacctacttgctccaagaaaagacactagttgaagtagtgctttgtccactgggttgaatgagttactactccctagtggttggagctttgactcttttgataagaaccaaggtttatccactttgaatccctcatttgctgcattttcaactccactagaccacaganttgaatgcccttatggaagtgaagcagcatacccttttgttgatggcttcacattgcctgagcttgattcttcatacaccaggaatgatgagtcagcaccccttttgccacaagaagataacccatcattggaggatgaagagtttggctttctaggaagtg

SEQ ID NO: 14608 - DNA, 412 bp, Glycine max
  unsure at all n locations
  Clone ID: LIB3094-044-Q1-K1-G11
tatcacacacttgaaagcgagatctcccttgtttgttttagctcctaanttgaaggcttgtgtattgattttcactgccaancaaaanaaagtgagggaatctaacccttaattgaacacaatgagttcattttacatgtctctgaacccttcaatttctcaatcgtgttacaaacccaagcaatttttcaatttggagagagagagtactttggtgggaagaagtcctgttattcagattatatgccggagggttgtgagtgcgtgtcttaacgtggatgttgatgcacctgatagtgggaagacagcattggagaaaaccaaggatgtgatcgagatggaagggaagttcttggtggggacatatgcaataacaccggtggtgcttgagaggggggaaggtttcaaattg

SEQ ID NO: 14609 - DNA, 449 bp, Glycine max
  Clone ID: LIB3094-044-Q1-K1-G2
aaacacccttgtcgaccacaccttaattaattacataaaaaagcataaaagcagagaaagagataaaaaagggaaaataaaacattttgaagtcatatttgcacacttgattaaaggctgtcgtcccttgtgacggatgcgtggggtgctaataccttccctgtgcgtaaaaacaactcccgaactattcacacttaaagttcgtagaccacaccttttcaattttcccgacgctttcctcaaataaaagttggtggcgactccgcgcattttcctttcatggaagacgcacttgtgagtcccgcatcgccctcccgtcaaagggtaggttgcgacagtacttgccctcccgccgaagggtaggttccttaattgaattaactaataacaaaagtgaaactaaggctaaaataaactcacatatcaagctttgtccataaaaatcactt

SEQ ID NO: 14610 - DNA, 357 bp, Glycine max
  Clone ID: LIB3094-044-Q1-K1-B11
caacagagtaatatgcaaaagctcagggacgtaacccaagagcaagttctgggggctgatgatatcattatctgtgggatgaatagtcatcttcccttcatattaaagcagttaaataagtatcaggaatttgctgttctcttaggcacagctacagctaggtaaatggttcagacaaggaggcagagaatccttcttatgtctgatcttccaagaaaacagattgatagagtagcagacaatattgcaaaagatttaaatcatattgatgtccttacaaagaggtatcaatgctggttgcagccttaatatgaccaaatcatttgaaagagcagcagctaacagggcacgtgcaat

SEQ ID NO: 14611 - DNA, 448 bp, Glycine max
  Clone ID: LIB3094-043-Q1-K1-G12
cgtccgcccacgcgtccgattgttttaacaaaatttctaaaccaacctcttctggctacttttgcattcacagttgctgttcctcccggtcgttgtttgcacaaactcagcctcaatccaatacgatctaatctgataaaatagtaaggatacttataactgttttcccttggtatggtatttcatcatatgggtgtgtttaagttttcatctttcaccggataaacatgaagaattaaccatgctctagtcaaaacttgttttgctcaaaattcaataacttggtctgcttaaagatattggcttgatccctcacacctgcaaaattgaatggcaccctcaatttgttttcttcttctatcccttctgttcctttcatccttcacaagtggtactgatgaagagggtttcatctttgtgatcatatctgataagggccttgattttg

SEQ ID NO: 14612 - DNA, 409 bp, Glycine max
  Clone ID: LIB3094-043-Q1-K1-G2
tcgacccacgctccgaaaaatgtaattttcagcactgtccaagataattaaagaatggaaattcttaatccctagtttaattagaaaaaaaaaaaaaaaaaaaaaaaaaaaaaaaaaaaaaaaaaaaaaaaaaaaaaaaaaaaaaaaaaaaaaaaaaaaaaaaaaaaaaaaaaaaaataaaaaaaaaaaaaaaaaaaaaaaaaaaaaaaaaaaaaaaaaaaaaaaaaaaaaaaaaaaaaaaggggggccctttaaaaaaaacaaaatttaaaaaaacatgattttaaataaaaaaattttaataagggaacaaaaaaaaaaaataaagggcccgtttaaaaaaaaagttaaatgaaaaaaaactctgattaaaaaaaaaaaaaccacttagaaaaaaaaaccttttttt

SEQ ID NO: 14613 - DNA, 159 bp, Glycine max
  Clone ID: LIB3094-043-Q1-K1-G3
ataaatctcatatacctcagactatttggaaaaattaaaaaaacataaaaaccaaaaaaaaaaaaaaaaaaataataaaaaaaaaaaaaaaaaaaaaaaaaaaataaaaataataataacaaactaataaaaaaaactctacaaaaataaataaacaaa

SEQ ID NO: 14614 - DNA, 322 bp, Glycine max
  Clone ID: LIB3094-043-Q1-K1-G5
cccacgcgtccgacaagcatttcatccctttttacttctatcatgtcttaagctttataggaaagttttcacaaatcaacagggcttctacgatcatattctatcccttccaacaatgcctaactaccttgctgctatgatcttgacactctttgccatttccatacttcaaacagacataatgcctgctaatcaacacacatgccacttgcatcacaacaaaacccaatattcaagctcaagtctcaatacttaccaatgcccatcacaatgctcaatgaaatatttccagacccaataccacaagccctgcatgcttttc

SEQ ID NO: 14615 - DNA, 393 bp, Glycine max
  Clone ID: LIB3094-043-Q1-K1-G6
acgcacgcgtccgtttggattttctggatccgtttttttgatatgagtgtatgaatttaccgattgtttttggaatgatgttatcgttgaggcatgctttggtgtttgtgttaatcgggccgttgtggaacttgcaaagggcaaaggttatccgatttgtgataaacagagacgagtgtttctcccatgatgtgaagtccaagggacacactgtacatgtctctttcggtgatattaacgctgattctccctggcattacggacacaaatgtgtatatctcgtggtaaagggaccttctggcgagcaaattcaaaaatttcggcacaagaccagtgaaaagtttgactttgtggctcacaaatccggggtccataaattctgctttaccaaca

SEQ ID NO: 14616 - DNA, 155 bp, Glycine max
  Clone ID: LIB3094-043-Q1-K1-G8
tcctatatctatatttacaacattttatactactactgttcctggtgcttctagaactatttcaacatccacgtatcaatcactcacttaccataataattattaataaccatgaccccacttactttcacacttccaattccctacaacaatat

SEQ ID NO: 14617 - DNA, 395 bp, Glycine max
  Clone ID: LIB3094-043-Q1-K1-G9
cgacccactcataacaatgtccaacttcataccacgttctctcattctctacttatcactaataaatcaaatccgtcactttctgtatcttatctagaaatctcaattctattatataaaatccacatcaaagacaacaaaaaatacacaacaaacatatgactcaacattaccacatgcaatctacttttacactctaacaacaccgatatttgaaatacaaaccgattctacacagacaacaaagaactaaagaacgatcaactccaccaagcaccctcaaaatttcgactgcacacctacactaatatactctttctgctcattatacatatgacaatccaacaccttacgcactctaagaccctcaaacatcacattaatgcttacaacta

SEQ ID NO: 14618 - DNA, 316 bp, Glycine max
  Clone ID: LIB3094-043-Q1-K1-H12
gcgtccgagagaagaaaaatcaaaggacggtggtgtttgctgcttttgcttcatcatcatcagagaggaatgttggatactgtgtcggctgcgtggtcaaagcccggcgcgtgggctctcgattccgaggaacacgaagccgaactccttcaacagaacaacgacaagccactcgccgacttcccttccttcgccgccgccgttgccaagcccaaaagaaaaaaggccaaaacctattccttggccaatttaacggccaaaccggcaacttctttggcgaccaaaaacccggcggtcttcccaacgggccccggca

SEQ ID NO: 14619 - DNA, 444 bp, Glycine max
  Clone ID: LIB3094-043-Q1-K1-H8
ttcaagaacaatttattgcacaaatattgtcaagaagcttactcaagccgatgtcaaacgcttctttgaatctatttgtggagaggttcaacggttgaggcttcttggagattaccatcattcaactcgaattgcttttgttgagttcacagtggctgagagtgcaattgcagctctaagctgtagtggggtgattctgggttcactgcccataagggtaagtccatcgaagacaccagttcgatcacgtgctcctcgccctactatgcactgaatcaactttccaatgttctggggttgattgctgctgagatatatttacatatatatatatacatagaaacagctgtgttcttaagaacatgtggcatttagttgggacttttggtctcatgtcttacaatatgggtaacttgctttccctttggggattatgggtctctg

SEQ ID NO: 14620 - DNA, 331 bp, Glycine max
  Clone ID: LIB3094-044-Q1-K1-A1
cagagggtgagtggacctgtctcagctacctttcaccttggttattcactactcatggccaagacgatcatgttgtcaaccggcaccattggcttccttatgtcattctactttgtgcactacttgttctcatcagtaaagatagattgaggttcttgttgtcattgcatattaactatgaaaaaggttgattgatataacttgatcacattgcatagtagggcaacggatgtttaattcattgtctgattttatattgcgatgggatctgcagtttgttctccttctgcctgtttcccaaagtagtgtactcattcaagtattcaactag

SEQ ID NO: 14621 - DNA, 261 bp, Glycine max
  unsure at all n locations
  Clone ID: LIB3094-044-Q1-K1-A10
cccacgcgtccgcccacgcgtccgcgaaacgttcaaccgcacacaacacaacagcggcgtttgagcaattgaacaagcaaagaaggctccttgaacaggacaaaacaaaacaaactggtcttgttgtgttgagcctaattgctatcaatattcaatattttatactattncttattctaaatctnccagttatatggtttggatttgctaataactcccatcaaggcccaaaaatgggtaccatcgttgagcagatacaca

SEQ ID NO: 14622 - DNA, 407 bp, Glycine max
  unsure at all n locations
  Clone ID: LIB3094-044-Q1-K1-A2
gcgccgagttttactcccactcctccacccacgctttatcntatgtattcacttctataggccaggacatttatgtggtttacttctaccattacctaacctacttattgtactttaatcactacttgttcacatcagtaaaaataaattcccgtgctagttgtcattgcatattaactatgaaaaaggttgattgatataactttatcacattgcattgtacctcaacatatgcatacttcattctctcattccatattacaataatatacacaatattttctccttctgcctgtttcccaaattaatttactcattcaagtattcaactattttataagatcaaatttcaagtattttgttcaagtttctttaaaaaggtgtaattcaaactctcatatcatttc

SEQ ID NO: 14623 - DNA, 305 bp, Glycine max
  unsure at all n locations
  Clone ID: LIB3094-044-Q1-K1-A3
aacctcaccccatcctacntcttntntattaatcattaccttnttaccaaaacatcattaacaacccaantgaatttctctttaaaataatctcatctttctctctaaatcatctttcttataacacttccatcttcctataaatcctcatacttttttctaacacaccaaaaatcaaaaaaatacaaaaaattaataataaacattaaataatacatcacttaacaaaaaacttaaataaaactcaactaaacattcctaacatatattctcttaatataaaaaatattaattacttccttccc

SEQ ID NO: 14624 - DNA, 387 bp, Glycine max
  unsure at all n locations
  Clone ID: LIB3094-044-Q1-K1-A4
ggcagcggcctatgagcaaatcaaatctgctatttatgagttancananggcaaacacaaagggagnnagggcacaccaaanacaaanacacccccacnaacaanacaaaacaaaacaaacgggncngggggngcngagccnaacggctatcaatattcaatattttatactattctttattcttattcttccagttatatggtttgtatttgctaatagctcccatcaaaggcccaaaaatgggtaccatcgttgaagcagataacacatataccaagatcctaggaagatggccagtcttttattatggcatgggacacatgctcaatgacataactgctgcttgttggtcacatatttattattgttcttgacagatattggac

SEQ ID NO: 14625 - DNA, 371 bp, Glycine max
  unsure at all n locations
  Clone ID: LIB3094-044-Q1-K1-A6
gttccaagaagtgtaaaagggaaaggccctgttgttttgtgtttttccatttggccattggcgattcgtggtggtcagcactctacttgctgctctgccaaatcccactgctgttagaaccatctcaaatcctcgttgggttccacgtaaatcacttatctattagtaggattttaatgtattccaaatattggaataagtagaaattcctttctgccatctggtttgggtccaattatgtaggtggtttaacattcatagctgcatgaccaccaagttctcaaatactgtaaatagctgcaaaaaaatatttccaacaacaaaaataacaaaattaaattcgcattttacatcggttctaggganaaaaa

SEQ ID NO: 14626 - DNA, 431 bp, Glycine max
  Clone ID: LIB3094-044-Q1-K1-A7
cagagtttgagtggacctgtctcagctaccctttaccttggttattcactactcatggccggggcaatcatgttgtcaaccggcaccattggcttccttatgtcattctactttgtgcactacttgttctcatcagtaaagatagattgaggttcttgttgtcattgcatattaactatgaaaaaggttgattgatataacttgatcacattgcatagtagggcaacggatgtttaattcattgtctgattttatattgcgatgggatctgcagtttgttctccttctgcctgtttcccaaagtagtgtactcattcaagtattcaactagtgtttgagatcatgtttcaagtattttgttcaagtttctttagaaggttgtaattcaaactctcatctcatttcaatactttagaaaaatgatgttagat

SEQ ID NO: 14627 - DNA, 253 bp, Glycine max
  Clone ID: LIB3094-044-Q1-K1-A8
cccacgcgtccgcccacgcgtccgcccacgcgttcgcggacgcgtggggttctataggctcgtacctctgtgtccttgagttctaaggagacaggaacctacgtctggtggatgaatcatgaccgtgtgatcagagcgtgattaacggcccgggtgagtttctctttggagtagtctcatctttggctgtagaggatcgttcttaggacacttccatgtgcctgggaatggtcatacggttgtctgacagacc

SEQ ID NO: 14628 - DNA, 389 bp, Glycine max
  unsure at all n locations
  Clone ID: LIB3094-044-Q1-K1-A9
cccacgcgtccggctccctctcctctcttctcttctgttcaaacaatgtcgcaaacgttgcgtgctttcggcgccaaaaatcttggctgtggaatggcanaaggcaagtgtctcccatgttcaggtgtttctggaagaactgctgctgtatattcctactcttctctaggtcatcacagaattcattcccgtgtccaagttagaggactaaagtgtggctttaggggtgcatcttttgtatgtgaagcaaagaggaacccagatttctcaaggcaaaacaagcacgggtcctccagaagcagaaatcggaacagtgatgggagagacagctttgagagctttgacgacgatatgttttcattaaaaaatggaccgcctgtgtctctttc

SEQ ID NO: 14629 - DNA, 207 bp, Glycine max
  unsure at all n locations
  Clone ID: LIB3094-043-Q1-K1-G11
tctccgtaccagtttcactgtttaaatntgttagaaaactctgcaaacatggtggtttatgataacctccttgcatgtgatgagcttctctcggactccttccgttacaatgaaattgagaatggaatgctgtgggaagtttgatgggaagtgtgttgttaaggtagcaggtgatgttgacattggtgcaaacccttcttctgaagg

SEQ ID NO: 14630 - DNA, 366 bp, Glycine max
  unsure at all n locations
  Clone ID: LIB3094-043-Q1-K1-C5
gctagaatcaggcanaatcagaactcttctaaaagaacacatgcccatctcaaggaacttgctacttgcactttttacattatccaccctcctccatggctcatcatcccaaaccagacacatcatccttaataccacagtctggatcatccctactaactacacttccacctacaccgcctgatctaccaacaaaacctataccgttaactacactctctttttcaacatcgtcaactaccaacacaacttatccaaagtaactaaatcctcctatctacaccttcaaccacctaaacacccttttcacccttacctactatccatcaaccttgaccctgaaccaaacactgtaacaatactaca

SEQ ID NO: 14631 - DNA, 431 bp, Glycine max
  unsure at all n locations
  Clone ID: LIB3094-043-Q1-K1-C6
gcgacgtcgtccggtcttgcctcctcttacgaagcctnntatcctttcattgtctcattgattcggtgaggtgcggggtgcatcggaaactctagctagagccctgatgcggcgtcggcacactcgtcggagaacaagatgattgtctgcgtcgccgtcgtcggtcaccagaacaatccgctgtacatacagagcttcacggaggccgatgatgctctcaagctccaccacatcgtccattgctcgctcgatgtggtcgacgagcgagtgaacaatcctaaaaagtctgggccgatgcttaatgagacgtttttgggactgctttatcctattgaaaactacaaagtatatggatatctgactaatacgaaggtgaaatttatcttggtgaccacggatctggatgttaaagatgcggatgtaaggaattt

SEQ ID NO: 14632 - DNA, 285 bp, Glycine max
  Clone ID: LIB3094-043-Q1-K1-C7
cccgcgcgtccggtcgcaagtgagacaggtctgcctacttttcccgccacggcgccttcggacgccttctccgcttgccggagcccgcggaggaagagacgcctaccatgagaccggcgccgccgtccgcggtggtcgtgatgggcctcccccaggactgctccgtcctcgatctcaagtcccgattcgagatctacggcgccatctcccgcatctgcatcgaccgcgacgccgtcggattcatcacttaccggaccaatgactccttctactctgccatctttc

SEQ ID NO: 14633 - DNA, 432 bp, Glycine max
  Clone ID: LIB3094-043-Q1-K1-C8
cttgtcttcctcagaaacacatcctaatgtcagagcgcggaggtggcgatggtggcggcgaccgttgcggtttcggacgtggattcggcgggcgaggacgcggaggtgacaggggccgaggccggcgccgaggcccccgccgcgaggaagaggagaagtgggtcccagtgaccaaactgggccgcctggtgaatgagggaagaatccgaagccttgaacagatctacctccactcgctcccgatcaaggagcaccagatcatcgacacgctcgtgggtcccaccctcaaggacgaggtgatgaagatcacgccggtccagaagcagacccgggccgggcagaggacccggttcaaggtcttcgtcgtcgtcggagacaacaacggtcacgttgggcttggctttaagtgcaacaaggaagtggcgacagtta

SEQ ID NO: 14634 - DNA, 474 bp, Glycine max
  Clone ID: LIB3094-043-Q1-K1-C9
gcgtccgcccgggcgtccgcggacgcgtgggttgctttggacctttttcaggttcataggaacactgatgctgtgggagttagcactgagaacattactcagaattggtactttgggaacaagaaatccatgctcattcccaattgcctatttcgtgtgggctgctctgcgctgcttctctctaacaagccggcagatcgaaggagggccaagtaccggcttgtccacgtcgtgaggactcatcgcggggccgacgacaaggcgttccggtgtgtttaccaggagcaggatgatgctgggaaaactggtgtttccttgtctaaggatttgatggcaattgctggtggagcattgaagactaacatcaccacacttggtcctcttgtgctgccaattagtgagcagcttctgtttttcgtgactctgctgatgaacaagttatttaaggctgggtgtgaagccttacataccgga

SEQ ID NO: 14635 - DNA, 394 bp, Glycine max
  Clone ID: LIB3094-043-Q1-K1-D1
acccacgcgtgcgcacggcacgaatatcttgttgtttggagctatccgagattaactctgtaaacatgttggggtaccatgagctccttacaggtgatgagcttctctctgactccttccgttacaaggaaattgagaatggaatgctgtgggaagttgaggggaagtgggttgttaaaggagcagttgatgtatacattggtgcaaacccttctgctgagggtggatgagaagatgagggagttgatgatgcagctgttaaggttgttgacattgttgacacattcagactttaggagcaacccgcattcgataagaagcagtttgataccttcatgaagaggtttatcaagaatttgactcccaaactcgatgcaaagcaacatgagttgtt

SEQ ID NO: 14636 - DNA, 450 bp, Glycine max
  Clone ID: LIB3094-043-Q1-K1-D2
cccacgcgtccgattgaatatccatggttctcttagttcttttatccattaaaaaactcgagattaatgtttctaagaagaactatagtagttgaaagatatcttttgcaaatatgcatatttaactgaggttgttataacttgttccttccctcaaaaaaaaaaaaaaaagaaagaaaaagaacctattagcctccttcattggatatattacatctataaggagtaaattctaccggttcagagaatagaaaaataatcaaaataaaagtcagcagtctcacatctctaattttggtgacagattcaaggggttaaatttgatccagaaggtgaatatgtgagacaatggctacctgagttggcaagaatgccaactgagtggatccatcatccttgggatgcaccgcttactgttcttagagcagcaggagttgagctgggtcaaaa

SEQ ID NO: 14637 - DNA, 433 bp, Glycine max
  Clone ID: LIB3094-043-Q1-K1-D3
gaccgacgcgtccggccaggcgtccgattgaatatccatggtttttttagttcttttatccattaaaaaactctgtattaataggtctaataagaactatagtagttgaaagatatcttttgcaaatatgcatatttaactgaggttgttataacttgttccttccctcaaaaaaaaaaataaaagaaagaaaaagaacctattagcctccttcattggatatattacatctataaggagtaaattctaccggttcagagaatagaaaaataatcaaaataaaagtcagcagtctcacatctctaattttggtgacagattcaaagggttaaatttgatccaaaaggtgaatatgtgagacaatggctacctgagtttgcaagaatgccaactgaatggatccatcattcttgggattcacccgttactgttc

SEQ ID NO: 14638 - DNA, 179 bp, Glycine max
  unsure at all n locations
  Clone ID: LIB3094-043-Q1-K1-D5
atggctcccaaaccgcctattacgggtcttttngnnggacngaacaaggggcacntctagaccaattttgaattgcctccaggcccctcagatcgtaaggggaaaacaagcatgagggtgcactttgtgaggaacctcatatgataggtagccggttttgcaccctattaaaagcgtat

SEQ ID NO: 14639 - DNA, 420 bp, Glycine max
  Clone ID: LIB3094-043-Q1-K1-D8
gacggacgcgtccgatcgcccatcaagaaaaaagttaatcgatttggaagagcaaggacacaacagaaagatgcgaaaaatacatggcgttgcaggggctgattctcacttacgtggtcgcagctgatgctgccgtggccattctgctaacccttcccacgcccaaactcctaagggaccgtttcgcctctctcgtttccctcattcttcaacccgcgcttttcattgtcccctttgcggggttccaactccttgatatatactggaaaaatgagcatcggttgatgtgtacctctgaagtttgtactgctgcggagagagatcgatatgaaaaatctatatacaaagctcataggaatgtaatactgtgtgttacaacatgtcttctctactggtctatcaaccgcattttcaagtatc

SEQ ID NO: 14640 - DNA, 274 bp, Glycine max
  Clone ID: LIB3094-043-Q1-K1-D9
gacccaggcatccgcccaggcttccgtacaattttgagttctgtagatataaaccaaacactatgtagaatcgcgggatattctggaccatatttgtgaaaaatgaacagaagtgccaaatctcccaaaaagtgcaccatagctatgggaaaatatttgagattcttaacataatgatatccatttaattacaagccaatctatccggatttcgggattcttaatgtaagacaataaatgatttctttaaacataatcctatttgtacaatttt

SEQ ID NO: 14641 - DNA, 295 bp, Glycine max
  Clone ID: LIB3094-043-Q1-K1-E2
cttggggatcccaacactttcggtaacattattcacatgatgctgaagcttggactgaggattgatgaggatgctggtgaagcagatgctgacatgcctcctcttgaggacgctgatgcagatgctgagggtagcaagatggaagaagttgattaaatctgacttaattgcctgttacgtttttagaaacaatgattggagaaacagtctttttactatgttttatgttttttgaattttcgaaattttggaacgttggctagttaggtgccgtatgtagtagtttctttatggt

SEQ ID NO: 14642 - DNA, 442 bp, Glycine max
  Clone ID: LIB3094-043-Q1-K1-E8
agagaacctaagcttagaattagaaacattgaaaagaagaaaggaaagaatggatcgttgaaaatgcatggaggaaagaaagcgggagagtccattaaggaaacagctacaaacattggtgcttctgccaaggctggcatggagaagaccaaggccactgtccaagagaaggcagaaagaatgacagcacgtgatccggtgcaaaaggagttggcaacccaaaagaaagaggcaaagatgaaccaggcggagctggacaagcaggcggcgcgtcagcataacacggcggccaaacagtccgccaccacggctgggcacatgggacatggccaccacaccaccggaaccgggactggaaccggcacgtattccaccaccggggaatatggtcagcccatgggggcccaccagacgtcggcaatgccttgccatggaaccgggc

SEQ ID NO: 14643 - DNA, 459 bp, Glycine max
  Clone ID: LIB3094-043-Q1-K1-F6
acgcacgcgtccgcccgggcgtccgaaataggttaagaggtttaacaattggcaaagaaagccagggaaaacagcttgaaaccccaagaatatgagggaggtacatttacagtgactaacctgggagggccatttggtgtcaaacaattctgtgcaatcatcaatcctcctcaggcaggcattcttgccgttggatctgctgagaggagggtcgttccgggttcgggtgctgaagaattcaagtttgcttccttcatgtctgtgaccctcagctgtgatcatcgtgttatagatggtgcaattggtgccgaatggttaaaagcattcaaaggctatattgaaaatccagagaccatgttgttgtaagaataaatagaaggctcccatgacgtactaaattcctttcaagtcattctaggcaggggatgagattttgttcacctgggtatttctgtttgg

SEQ ID NO: 14644 - DNA, 441 bp, Glycine max
  Clone ID: LIB3094-043-Q1-K1-F7
gaaggtcctacagtatagatttagagcactatcaatcatcaaataaagccggggaatacagcttgattccccaagaatatgaggcatgtacatttacagtgactaacctgtgaaggccatttggtgtcaaacaattctgtgcaatcatcaatcctcctcaggcaggcattcttgccgttggatctgctgagaggatggtcgttcctggttctggtgctgaagaattcaagtttgcttccttcatgtctgtgaccctcatctgtgatcatcgtgttatatattgtgcaattggtgcctaatggttaaaagcatttaaaggctatatttaaaatccatagaccatgttgttttaagaataaatataaagcttccatgacgtactaaatttctttcaaatcattctaagcatgtgatgagaattatgttcaacctgggtatttt

SEQ ID NO: 14645 - DNA, 110 bp, Glycine max
  Clone ID: LIB3094-041-Q1-K1-H11
gcttttcctaaagctccttttggtcttctttgggggggcattccacaattccaaaaaagaggccaatggggtggatgatgccaaaatttccgggggaagcttttgggggg

SEQ ID NO: 14646 - DNA, 303 bp, Glycine max
  unsure at all n locations
  Clone ID: LIB3094-041-Q1-K1-H5
ccggtgatttcagtgagtgattggtgttcactngatctcatcataaggggcggggttaattgaagaagatgccgatcagaaacatcgccgccggaaggcctgaaaaggcgactcaccccgacacgttgaaggcggctttggctgagttcatctcaaccttcatcttcgtgttcgccggctcaggctccggcatcgcctacaacaagctcaccgacaacggcgctgccacccctgccggcctcatctccgccttcatcgcccatgcattcgccctcttcgtcgccgtctccgtcggcgccaaca

SEQ ID NO: 14647 - DNA, 424 bp, Glycine max
  Clone ID: LIB3094-041-Q1-K1-H8
ttggaatacattccttgtagtttatactgtaagatgggtttgaagatggcgttactgagcctaggcctttccctcatgctccttttggtctcctctgaggtggcatccacgaatacaaaagaggaggcaaatggagtggatgatgccaaatatcccggtggaagctatggagggggttacccaggtcatggcggtggcggttatcctggccatggcggtggcggttatcctggccatggcggtggtggtggctatcctggtcatggtggtggccaccctggtcatggtggcggctaccctggccgtggtggtggatactgtaggcatggctgttgcggtggccggacatacaacggaggttgcagaaggtgctgctataacgctggcgaagctgttgctgcacaaactcaagataagactcacg

SEQ ID NO: 14648 - DNA, 464 bp, Glycine max
  unsure at all n locations
  Clone ID: LIB3094-043-Q1-K1-A10
ttttgattttctggatccgtgtttttgagatgagtgtatgaatttaccgattgtttttcggatgaggttatcgttgaggcatgctttggtgtttgtgttaatcggggcgttgtggaacttgcaaagggcagagggtatccgatttgtgatagacagagacgagtgtttctcccatgatgtgaagtacgagggtgacactgttcatgtctctttcgttgttattaaggctgattctccctggcattacggcgacgaaggtgtcgatctcgtggtaaagggaccttctggcgagcaaattcaagaatttcgggacaagaccagtgagaagtttgactttgtggctcacaaatccggggtccataaattctgcttcaccaacaagtctccttatcatgaaactgtcgattttgatgtacatgttggtcacttctcttactttgagcaacatgcanaagatgagcatt

SEQ ID NO: 14649 - DNA, 409 bp, Glycine max
  Clone ID: LIB3094-043-Q1-K1-A5
cccacgcgtccgatttccctggtgttgtttatcctcttgacaacgtgcatgggacacaagaaacaccaagtggtatgtatcagtattttattaaggttgtgcctacagtatacactgacgtgagtgggcatactatccagtcaaaccagttctctgtgacagaacacttcaggactggagacgtgggtcgtctgcagtcccttcccggggttttctttttctatgacctctctccaattaaggttacttttacagaagaaaatgtctcattcttacattttcttactaatgtttgtgccatagttggaggtattttcaccgtttctggaatactagattcattcatctatcacggtcaaagggctatcaagaagaagatggagcttggtaaatttaactgatgggattt

SEQ ID NO: 14650 - DNA, 334 bp, Glycine max
  Clone ID: LIB3094-043-Q1-K1-A6
cccttttgttgtttttcctctagacaacgagcattggacacaatgaacacttataagtatgtatgagcattttattaatgttttgcctacagtatacactgacttgagtgaacatactatccagtcaaaccatttctctgtgacagaacacttcatgacttgagacttgtatcatctgcattcccttcccagtgttttctttttctataacctctctccaattaatgttacttttacataataaaatgtctcattcttacatttttttactaatttttgatccatatttttaagtattttaaccgtttctttaatactaaattcattcatctat

SEQ ID NO: 14651 - DNA, 242 bp, Glycine max
  Clone ID: LIB3094-043-Q1-K1-A9
acaaaccctctctccctttaccacccttttctcaatctctctctaatggtacctttgtaaaactctcaccgactcaatatcaacaccaccaccatcatcatcattatctattccaatctctataaccttcaatcactcaaaaccttaccattaaaccaaatgaatttacccatttctaacaacaattcttcctaataaaaacttcaaattcttcaaccttttcttaaccaatctcacaacat

SEQ ID NO: 14652 - DNA, 452 bp, Glycine max
  Clone ID: LIB3094-043-Q1-K1-B1
cccacgcgtccgattgaatatccatggttctcttagttcttttatccattaaaaaactcgagattaatggttctaagaagaactatagtagttgaaagatatcttttgcaaatatgcatatttaactgaggttgttataacttgttccttccctcaaaaaaaaaaaaaaaagaaagaaaaagaacctattagcctccttcattggatatattacatctataaggagtaaattctaccggttcagagaatagaaaaataatcaaaataaaagtcagcagtctcacatctctaattttggtgacagattcaaggggttaaatttgatccagaaggtgaatatgtgagacaatggctacctgagttggcaagaatgccaactgagtggatccatcatccttgggatgcaccgcttactgttcttagagcagcaggagttgagctgggtcaaaatt

SEQ ID NO: 14653 - DNA, 390 bp, Glycine max
  Clone ID: LIB3094-043-Q1-K1-B12
gtttcattttccctcactttctcgctcgccttacgccccttgctctcctccaatggccgaggagctctcggacaaccagatcgccgagttcaatgaggccttcagcctcttcgacaaggacggcgatggttgtattactactaatgaacttgggactgtgatgcggtcactagggcaaaacccaactgatgcataactgcatgatatgattaatgaggttgatgctgatggcaatggaaccatcgacttcccagagttcctcaacctgatggctcgcaagatgaaagacaccgactccgatgaggagcttaatgaggctttccgtgtgttcgacaaggatcaaaatggtttcatctctgcaactgagctccgccatgtcatgacaaatct

SEQ ID NO: 14654 - DNA, 281 bp, Glycine max
  unsure at all n locations
  Clone ID: LIB3094-043-Q1-K1-B3
ttttatccatcaaaaaactcggganatttagaactattaaaagctatattagttcaaagatatcttttgcaaatatgcatatttaactgatgttattataacttgttccttccctcaaaaaaaaaaatataataaagaaaaataacctattaacctccttcattggatatattacatctataacgaataaattctacctgttcacataatataaaaataatctaaataaaattcatcaatctcacatctctaattttttttacaaattcaatagtttaaat

SEQ ID NO: 14655 - DNA, 388 bp, Glycine max
  unsure at all n locations
  Clone ID: LIB3094-043-Q1-K1-B4
atatccatngtttttttacattttttatccattaaaaaactatgcattattagaactattaaaagctatactagttcaaatatatcttttacaaatatacatatttaacttatattattataacttattccttccctcaaaaaaaaaatattaccatataataataacctattatcctccttcatttaatatattacatctataattaataaattctaccctttcacataatataaaaataatcaaaatcaaatacatcaatctcacatctctaattattataacaaaattcaaacaccaaattttatccaaaatatcaatatatctcacaatatctaccttatatttacaaaaattcccaccttattcaattccataatccttttta

SEQ ID NO: 14656 - DNA, 438 bp, Glycine max
  Clone ID: LIB3094-043-Q1-K1-B5
attgattcctatagctatagctacaacatttcatactactactgttgttggggctgctagtgctgttgctgctgccgcgtatcaatcactcgcttaccataatgggtagggatagccatgaccccacttcctttcactcttccattgcccttctacaagagaggtttagacagcttcagagagtaaaagaaatgagggaggagagggagcttcagaagatgctcaatgaacctaaacaattcagttccaacaccaccacctctatgagtcgtacttatcacaattccaacaattctatcctctctcaccctgaattgattatgccatcaaagtcaccaccccatgtttctctctctctctggccaacatctcagggcaagcaagaggactatagaagtgctcaaaccccggtttcaatgaactatgcacattcacagt

SEQ ID NO: 14657 - DNA, 432 bp, Glycine max
  Clone ID: LIB3094-043-Q1-K1-B6
cctatatctatatttacaacattttatactactactgatattggggctactacgactgtttctactgccacagagtcaatcactcgcttaccataatgggtatgtatagccatgaccccacttcctttcactcttacattgcccttctacaatagaggtttatacatcttcagatagtaaaagaaatgacgtatgataggaaacttcacaagatgctcaatgaacctaaacaatacacttccaacaccaacacctttaataatcctacttatcacaattccaacaattctatcctctctcacccttaaattattattccatcaaagtcaccacccacagttactctctctatatcaccaacattttaacataagcaaacaggactaataaaagtgcttaaaccacctgtatcaatgaaactatcacattcac

SEQ ID NO: 14658 - DNA, 398 bp, Glycine max
  unsure at all n locations
  Clone ID: LIB3094-043-Q1-K1-B8
tcttctcttgcggctagggttgtttcgcagctncttctagatttaaggaagatgggtaaggaaaagggtcacatcagtattgtggttattggccatgttgactctgggaagtccactaccactggccacctgatctacaagcttggaggcattgacaagcgtgttattgagagatttgagaaggaagctgctgagatgaacaagaggtctttcaagtatgcctgggtgcttgataagcttaaggctgagcgtgaaagaagaatcacaattgatattgccttgtggaagtttgaaaccaccaagtactattgcacagtcattgatgccccttgacacaaggatttcatcaagaacctgatcactgggacatcccaagctgactgtgctgttcttatcat

SEQ ID NO: 14659 - DNA, 471 bp, Glycine max
  Clone ID: LIB3094-043-Q1-K1-C11
aaaaaatgggttcttcttcttctatgtggacggtgtgtgtgattttggcatcactggccgctgcagcactctgtgccaacccacgcaggccagtggatgtacaatttggccgaaactacgtgcccacatgggcctttgatcacatcaaatatttcaatggtggttctgacattcagcttcatcttgacaagtacactggtactggcttccagtccaaagggtcttacttgtttggtcacttcagcatgtacataaagatggttcctggagattctgctggcacagtcactgctttctatttatcttcccaaaacgcggagcatgatgagatagactttgagttcttggggaacagaacaggacaaccttacattctgcaaacaaatgtgttcaccggaggcaagggtgatagagagcaaagaatctatctctggtttgatcccacgaaagaataccacagatactccattt

SEQ ID NO: 14660 - DNA, 433 bp, Glycine max
  Clone ID: LIB3094-043-Q1-K1-C12
ggcggcgctgtggcggacgcgccggcggtggttgaggataagacggagttcgacgtggggatcgaggaggtgccgagcaacgctcgaatcgcggtgattaaggcggtgagggcattgacgaacctagcgctgaaggaggcgaaggagttgatcgaagggttgccgaagaagttcaaggaagggatttcaaaggacgaagctgaagatgcgaagaagcaactcgaagaagctggtgccaaggttaccattgcttaaacactgtttagctgcagcatatatgttctgcttcttcttttgttggttgtagttgagttcaccagtacactgtaatttcatttccattttgtctggatttcaatcttttatttgtaatgaggaaatatgagttcttatttttatattattttttttaatgcgtatgaagtgtttgttg

SEQ ID NO: 14661 - DNA, 453 bp, Glycine max
  Clone ID: LIB3094-040-Q1-K1-H5
aaaaaaaaaaaaaaattaatttaaaaaaaaaaaaaaaaaaaaaagaaacgaaaaatattaaaagagggaaaacaaaccacaataaaaaaaaaaaaaaataaaaaaaaaataaaaaaaatataaaaaaaaaaaataaaaaaaaatataataaaaaaaaaaaaataatataaaaaaaataaaataaaaaaaaaaacaaataaaaaaaaaaaaaaaaaaaaaaaaataaaaaaaaaaaaaataaaaaaaaaaaataaaaaaaaaaaaaaaaaaaaaaataataaaaaaaaaataaaaaaaaaaaataaataaaataataataataaaaaaaaataaaaaaaaaaaaacaaaaaaaataaaaaaaaaaataaaataaaatacaaaaataataaataaataaaaaaaaaaataaaaaataaaaataaaaataaaaataaaaaaaataataaaaatata

SEQ ID NO: 14662 - DNA, 105 bp, Glycine max
  Clone ID: LIB3094-040-Q1-K1-H8
aaaaaaaaaaaaaagaaacgaaaaattaaaaaagaggataaaccaacccaaaaataaaaaaaaaaaataaaaaaataatatcaaataaaaaaaaaaatatataat

SEQ ID NO: 14663 - DNA, 425 bp, Glycine max
  unsure at all n locations
  Clone ID: LIB3094-041-Q1-K1-A1
cccttgggggtttttgtgattataagggacctataatgcctgcggggggaccggtttaaatggcttggtttgatgttaacggaactcttacagctcccaggaaggtggtcacaccggaaatgttgacattcatgcaagaactacgaaaggttgtaacggttggagttgttgggggttctgaccttataaagatatcagagcaacttggcagcacagttaccaatgagtatgattacgtattttctgagaatggtcttgtggctcacaaggaaggaaagctcattggaactcagagcttgaagtcattccttggtgaagaaaagctcaaggagtttattaactttacacttcattatatngctgatntggacatccccattaagaggggaacatttatggagttccgtagtgggatgctgaatgtc

SEQ ID NO: 14664 - DNA, 287 bp, Glycine max
  unsure at all n locations
  Clone ID: LIB3094-041-Q1-K1-A10
tcccaacactttcggtaacagtaantacaggacgctgaagcttggactcagcattgttgaagatgctggtgaagcacatgctgacatgcctcctcttgaggacgctgatgcagatgctgagggtagcaagatggaagaagttgattaaatctgacttaattgcctgttacgtttttagaaacaatgattggagaaacagtctttttactatgttttatgttttttgaattttcgaaattttggaacgttggctagttaggtgccgtatgtagtagtttctttatggt

SEQ ID NO: 14665 - DNA, 448 bp, Glycine max
  Clone ID: LIB3094-041-Q1-K1-A11
cgcgtccgggggtgtgcaacccattggggaagtctgtggtgccctcatccagcaatttatgatgtggacttttgggtcactagctaattcaaccccatacttgggaggagtgcttctgctgattgtttctgcctggctagcagcggcaaaatccttggatacccaatttactgcattgcgtaaagaggaagaactcgagaaagagatggaacgagcagccgccgtcaagataccagtggtggctgagactgagagtggaaatggttctcttgcaactggttcaccactgaatccatcctcaggtgactcctcaagcagtccatctgaagcctcaactcctcgcaattaaaatgtgccttctttctgtgagaaattgcctcacagaatgagcaaatagagctcttttgagagcagtgttaggtgaaactatttgttgtaggtttatata

SEQ ID NO: 14666 - DNA, 450 bp, Glycine max
  Clone ID: LIB3094-041-Q1-K1-B8
cgcgtccggtgagaattatcatacccttcaagatgataccgtacctacgtccaatattcctattagtccttatccttctcgaccaatccatttcggcgagtgctgctataaatattaatggtctgagaaacaaaattagagaagttctaaacaagcacccgagcatcaatcttccggcagataaactgaagaaggtgaagagaccactgaaggcactggattatctgcttggcgaatgtaaggacaggccgcctcaagaatttcaagaattttgcccgaaatttaagaacgattatcaacaaaattgcccgaatgccgcgtatgaagcagtttgcccgttactgaagcaagcgattcaaatatgttgccagaaacacgcataactctgcaagccacggtgggcgtttggatgtgcttttagttaccactttctctcttggatttgcttac

SEQ ID NO: 14667 - DNA, 257 bp, Glycine max
  unsure at all n locations
  Clone ID: LIB3094-041-Q1-K1-C10
cgcgtccgggggccnncctctaccgtggtttcaacaatttatgtgttggaatcatcgtgtatcggggtctgttctttggattgtatgattctgttaaaccagttgtcctcacagggtcattgcaggatagcttttttgccagctttgcccttggatggctcatcaccaatggtgcaggtcttgcatcatacccaatagacactgttagaagaagaatgatgatgacctttggtgaacctgtcaagtccaaaacctcc

SEQ ID NO: 14668 - DNA, 387 bp, Glycine max
  unsure at all n locations
  Clone ID: LIB3094-041-Q1-K1-D10
aaacccgccggaggcacgcgtccgtcgctctctctctcactttgtcctccatattcaagtgtcggaaagtttgcttcttttcgactctgaatcaccctatttattttgggtctctcatctttcttcttccttccaagttgtttttggtgttggtgttggtgttgaattgagttgagaagaaaagaagaggtcatagacacacacacaagacatgtctgctgttgagtcagctgaacacaacaacatcagaggagtaccaactcatggtggacgctatgttcagtacaatatctatggcaatctcttcgaagtttccagaaagtatgtccctcctattcgccctgtcngtagaggtgcttatggtattgtttgcgctgctgtaaatgc

SEQ ID NO: 14669 - DNA, 374 bp, Glycine max
  unsure at all n locations
  Clone ID: LIB3094-041-Q1-K1-D11
ccggctccctctcctctcnatacttctgnncaaacaatgtcncaaacctggcatgctttcaacgccaaaaatcttgcctgtggaatggcaaaaggcaagtgtctcccatgttcaggtgtttctggaagaactgctgctgtatattcctactcttctctaggtcatcacagaattcattcccgtgtccaagttagaggactaaagtgtggctttaggggtgcatcttttgtatgtgaagcaaagaggaacccagatttctcatggcaaaacaagcacgggtcctccagaagcagaaatcggaacagtgatgggagagacagctttgagagctttgacgacgatatgttttcattaaaaaatggaccgcctgtgtc

SEQ ID NO: 14670 - DNA, 195 bp, Glycine max
  Clone ID: LIB3094-041-Q1-K1-D4
aaaacccggcccgaccgacgcgtccgaggagcaggaactcacttttttcgcagctgtcttttgggggctttcattttcttggggtggcaagatgtaccccttggaggaaaaaattccccagggttagggtgctgtgcccactggatttgggggatcaggtggaccggccttggttggtcttaaaaatccccacca

SEQ ID NO: 14671 - DNA, 60 bp, Glycine max
  Clone ID: LIB3094-041-Q1-K1-D5
ggtttggaaaacccggcccgacgcacgcgaccgttggtttttttttttcggatttcttgc

SEQ ID NO: 14672 - DNA, 144 bp, Glycine max
  unsure at all n locations
  Clone ID: LIB3094-041-Q1-K1-E11
aaacccggcggcgggcacgcgnccggtggtgtangtgttccaagcttcaaggtatttaataatgttaggtccaagtagatatgggattgagttgtaatacaatgattctaatatcctatctccaccattcatattaatatttgc

SEQ ID NO: 14673 - DNA, 140 bp, Glycine max
  Clone ID: LIB3094-041-Q1-K1-E12
aacccggcccggcccacaccgcgcgggagctttggatatctatagcgaaagcgtgtcaccaccaaaaaccgaactggtcccgagtgttttttttactctttcaaccatcgaaattcaaaacccttccgaccccacactta

SEQ ID NO: 14674 - DNA, 141 bp, Glycine max
  Clone ID: LIB3094-041-Q1-K1-E2
gaaaacccggcccgaccgacgcgtccaatggatcttggttattttttataaaggggttgccaggcctttatttggaatttacccggggaagtttgttccagcaaaaccccccccaaacaaagtgtacatttataaaggggg

SEQ ID NO: 14675 - DNA, 421 bp, Glycine max
  unsure at all n locations
  Clone ID: LIB3094-041-Q1-K1-F10
aaacccggcccggaggacaggcgtccgaggacccattnngtttcctagtatgcatgtaaaagaatcagcaaatttcaaccccgnagccacgagtaacaatgtggacaaaagtctaccaagtggcattttgttcttgtaacctcctcaacccactggaggtcgtgatctgtaaattttgagtgaattatacaacaaattcttgaaaaagaaatgattttctcttctgagctgctgcttattgatcgatgaatccagctgcaattattttcgaagatggcaataaaatttcttctgcggtgttatctctttgactgaattcaaaatttgtaagtataatagttggctatgaaagagacttgtccaagaagcatagtgtgagaagtagagatcagtttgtaagtatgagatgtgagaacatttg

SEQ ID NO: 14676 - DNA, 113 bp, Glycine max
  Clone ID: LIB3094-041-Q1-K1-F2
gtccgttgcctaaaaccttaaacaccttttttttttttccctccgctcggggctctccctggggtaattgcacatgggcggacacagaccctttggtttccaaggttgaaaca

SEQ ID NO: 14677 - DNA, 77 bp, Glycine max
  unsure at all n locations
  Clone ID: LIB3094-041-Q1-K1-F5
gcgtacgagagaatgtaatttcaacccctgcccagaatttttaaggatggnaatctttatgccttagtttttttttt

SEQ ID NO: 14678 - DNA, 435 bp, Glycine max
  Clone ID: LIB3094-041-Q1-K1-F8
gcgtccgccgcgcgtccgcgcgtcgctgctccgtatcatgtttcactgcataaatttgagagaaagctctgcttacatgttggtttatcaggacctccttacaggtgatgagcttctctcggactccttccgttacaatgaaattgagaatggaatgctgtgggaagttgaggggaagtgggttgttaagggagcagttgatgttgacattggtgcaaacccttctgctgagggtggagaagatgagggagtcgatgacgcagctgttaaggttgttgacattgttgatacattcagacttcaggagcaacccgcttttgataagaaacagtttgttaccttcatgaagaggtttatcaagaatttgactcccaagctcgatgcagagaaacaagagttgtttaagaagcacattgagggagcaactaaatacct

SEQ ID NO: 14679 - DNA, 115 bp, Glycine max
  Clone ID: LIB3094-041-Q1-K1-G10
ctctctacatatatttttttttttattgttatatttttttttcttttttttttttaattttttttttttttatatttttattttttttatattatttgtgttttttttttttttt

SEQ ID NO: 14680 - DNA, 62 bp, Glycine max
  unsure at all n locations
  Clone ID: LIB3094-041-Q1-K1-G2
gcgtccgccggcgcttccgcccacgcgtccgcccactcgtccgcggacgcgnggggttctat

SEQ ID NO: 14681 - DNA, 326 bp, Glycine max
  unsure at all n locations
  Clone ID: LIB3094-041-Q1-K1-G6
gtaggaggtctttcatcactgccgcgccactcgtcgnnggggtccttgccgaacatcacttcgttgtgtcatcttctttcaacaatcaatcaccgcttcctctctcactttccctaacttcgaagtcaccaacttcttatatttcaagacaaaaggaatggtgggtttatctctgggagaaacacatttcatccaaggtggcattgctcaagatcttcgttgtgatggtagaaagagattgacatatcgaccaatctctgttgaaactggagtgattccccagaccaatggttcagcaagagtcagaatgggtgccacagatgtca

SEQ ID NO: 14682 - DNA, 310 bp, Glycine max
  Clone ID: LIB3094-040-Q1-K1-H1
acgattgtatcttgttattttttataaaagggattccaattccttatattgtaattatacgtggggatggtgctacatcaaaatcaccccacaacaaatgtttacattcataaggtggttcatcaaaccaatgtattattccccaggataactgtcatcaacatttaatcagcagcataattgtcttaaaataaaatcttctttgtcttcaaagatacactccaagtttaaactattcatttaaagacaatccaaatggtgacattctcgtctgggtggtttagttttttatcacgctagtctcacacac

SEQ ID NO: 14683 - DNA, 445 bp, Glycine max
  Clone ID: LIB3094-041-Q1-K1-G7
ccggcgggagccacgcgtccgccgacgcgtccggataaattgtctcactctgacatgattgctgtcctctgggaaatgggggttatggggaccgacacggtggcggttttgattgagtggatactggcgaggatggtgcttcatccggaggtgcaaaggaaggtacaagaggagttggacgcggtggttaggggtggcgctttgacggaggaggtcgtggcggcgacggcgtatcttgcggcggtggtgaaagaggttctgaggctgcacccgccgggcccgcttctctcgtgggcccgcttggccatcactgatacgaccattgatgggtatcacgtgcctgcggggaccaccgctatggttaatatgtgggccatagcaagggacccggaagtgtggctggacccacttgagttcaagcccgagaggttcatgggtctggaaa

SEQ ID NO: 14684 - DNA, 349 bp, Glycine max
  Clone ID: LIB3094-040-Q1-K1-D2
cagagtttgagtggacctgtctcagctaccctttaccttggttattcactactcatggccattgcggtcatgttgtcaaccggcaccattggcttccttatgtcattctactttgtgcactacttgttctcatcagtaaagatagattgaggttcttgttgtcattgcatattaactatgaaaaaggttgattgatataacttgatcacattgcatagtagggcaacggatgtttaattcattgtctgattttatattgcgatgggatctgcagtttgttctccttctgcctgtttcccaaagtagtgtactcattcaagtattcaactagtgtttgagatcatgtttc

SEQ ID NO: 14685 - DNA, 131 bp, Glycine max
  Clone ID: LIB3094-040-Q1-K1-D3
acgcgtactcacactcttactatacctttcacatctactctctatcttattcatacactactcataaccggttcagttaaatttacaaccaacactatccactcacttatatcattctactttcttcacta

SEQ ID NO: 14686 - DNA, 437 bp, Glycine max
  Clone ID: LIB3094-040-Q1-K1-D5
cccacgcgtccgatttctttggaccttcacaggaacaactaagattaagaacctggatcaagacataggtgccttagcagtgaaactgtcagaaaaagacctgagagaaatttctgaggcggttcccattggtgatgtagcaggtggtagatactacaatggattggatcacttttcatggaagtatgctaacacacctccaaaagattcaaaaatctcaacctgacgcacccaaccaaccctttggttagggaatctaccaagtcatcatgaattgagggtaacaaggctggcaaaggctaatatcaggatgctatttaaatatcaataatgtagcccttcttgatgttggactttctaaatatttgggtgggtaaaaattttaaattaaactggtattcttttttatatgccaccagttattattaaccagttcc

SEQ ID NO: 14687 - DNA, 354 bp, Glycine max
  Clone ID: LIB3094-040-Q1-K1-D6
ccttactttacactagattaaaacctggtcagggcatatttccttacagtgaaactgcacaaaagacctaacaaatctcagcggttcccattgtatgttcatgtgtagatctcaatggattgatacttttatggaatatgctaacacacctgaaaagattcaaaaatctaacctgatcacccaaccaaccttagttaggaatctaccaagtcatcatgaattgacggtaacaacgcttgcaaaggctaatatcatgatgctatttaaatatcaataatgtaacccttcttgatgttggacttcctaaatatttggttggttaaaatttttaatttatactgtaatactatttta

SEQ ID NO: 14688 - DNA, 253 bp, Glycine max
  Clone ID: LIB3094-040-Q1-K1-D7
cccacgcgtccgggaagatggtgctttcggatgaggaaatgggtcgtctgtaccgagtaacgaagactgtgatgcaaatgcttcggtacacgggttttctggtgggtgacttcgagatcaacatgtcgaagcatgaattcaagtccaaagtacgggcaagcacatgaagcgcgaggacctggtcatcaacaagtccaagaaggacaactccggcgaccagatctacgtcttcttccccgacgagcccaaggtc

SEQ ID NO: 14689 - DNA, 304 bp, Glycine max
  Clone ID: LIB3094-040-Q1-K1-E1
ggagaacaagaagaaaaaaccgacacaaatatctagtcctagctagaatcaaacaggggcgatctcgccttcaagaacacatcgccatggcaaggaacttgcttcttgtgctttttgcagtagccacccttctccatggctcagcagcccaaaccagacacatggtcggtgatgccacgggctggatcatccctgctggcggcgctgccacctacaccgtctgggcttccaacaaaaccttcaccgtaaacgacactctcgtgttcaacttcgacaccggccaacacaacgtggccaaggtaac

SEQ ID NO: 14690 - DNA, 341 bp, Glycine max
  Clone ID: LIB3094-040-Q1-K1-E3
atcgaaaccttaagtttcggatcaggtctgagcaatctggttggtagaacctttggtcttggagagtcaagttttatgtctgaattagacgatcaaattcctactgccttcgatccttttgctgatgcaaatgctgatgactcgggtgctgggtcaaaggagtatgtgcatattcgcgtacagcagcgaaatggaaggaaaagcctgacaaccgttcagggattgaaaaaagaattcagctataacaagatacttaaagatgttaagaaagagttctgttgcaatggaacagttgttcaggacccagaactaggacaggttattcaactttcaaggtgatc

SEQ ID NO: 14691 - DNA, 273 bp, Glycine max
  Clone ID: LIB3094-040-Q1-K1-E4
acgatcgaaaactcaaacactttatcaaacactttcaatatgatgcttaaaccctgacttatcggagaggtttattctatagatgcacatgcccaccaacctcctactgactacgctcattcagatgctgcaaatactaatatctaagaagctgattaaaacttacttaatcacatgctaccacattagaaacaatgaaagggaaaaacatgacaacctactaagtgatataaaaaattagaatcatcctaaacaatataccgaaagatatta

SEQ ID NO: 14692 - DNA, 246 bp, Glycine max
  Clone ID: LIB3094-040-Q1-K1-E5
gaggtttttgtctgatgatgttggtaggtctagcaatcgagggcgagggcaagggggatctgctcgaaattatgggaggaatggagcggatggtgatggcagaatgaggaagaatgggaatgggagaaggtttttgtccaataatgttgatcggtctagcggtggagaacagtcttctcctttgaattatgggggggatggaatgaatggtgatggtagattgaggaggaatgggaatgggaggag

SEQ ID NO: 14693 - DNA, 459 bp, Glycine max
  Clone ID: LIB3094-040-Q1-K1-E6
aaactgaagaaggtgaagagaccactgaattctactggattatctgcttggcgaatgtgagtgcatgccttctcaagaatttcaagaattttgcccgaaatttaagaacgattatcaacaaaattgcccgaatgccgcgtatgaagcagtttgcccgttactgaagcaagcgattcaaatatgttgccagaaacacgcataactctgcaagccactgtgggcgtttggatgtgcttttagttaccactttctctcttggatttgcttacgtattgctccttttgtattagtggctcctgtcccaccttgcttttggacttgagctttttatatttctgattgttcaatgtctgttgtgtgtgctctccaacctgtggtgactttccggtttattcctgtggctgtttcttgtaggcctttcgaccttcagtattaaataaaagatcatcttgtagcttt

SEQ ID NO: 14694 - DNA, 394 bp, Glycine max
  Clone ID: LIB3094-040-Q1-K1-E7
cccacgcgtccgcccacgcgtccggaagaatggaatataccttacggatggtggaatcaaggggcatttgggattgcatagtgcgggtggtgacgaagatggaagacaaagagagtgagagagagaaaaatcttcgctttatgtcaatggcacgaagcaggggtttttacagaagtgagcaacgacgccagatatgagaaaagtgagtttatttggggtcatatttgtaaaaagtggttttgtaattataccctctaattcaagagtgaagaaacaagggtgggatggaaatataaatagtacaatttggtcctagtggtggcttaccctttggcctctttttctaattcagaattttttttaaatatattaaagtggggtgatatgtttactt

SEQ ID NO: 14695 - DNA, 359 bp, Glycine max
  unsure at all n locations
  Clone ID: LIB3094-040-Q1-K1-E8
cccaggcgtccggaaaagggaagtatcttatttgaataatatgaagggcggtcaaggaatcgcaaaaacaccgtcctcttctaagagaacactaagtcagggttcagttgatatatatgctgctcagtgcaaaaattgcttgaaatggagagagattgatacacaggaagagtttgaagaaattaaaagtaaagttgctaagaaaccttttctttgcaccaaaaaggctaatagttcctgtaataaacctggtgatattaaatatgattcctttcggacatggttgattgacaagcctaacctcccaaagactccacanggttttaagaggagcttggtgcttagaaaagattactcca

SEQ ID NO: 14696 - DNA, 361 bp, Glycine max
  Clone ID: LIB3094-040-Q1-K1-F4
cccacgcgtccgtcaagcattgcatccctcttgatttgtagtttgttttgtgctttagatagaagtgctgccaaatcaagaggggttttaagatcatagtgtgtgttttgcaacaatggctaagttctttgctgctatgatcttggcactctttgccatttccatacttcaaacagtggtaatggctgctaatgaacaaggaggccacttgtatgacaacaagagcaaatatggaagtggaagtgtcaagagttaccaatgcccatcacaatgctcgaggagatgtagccagacccaataccacaagccctgcatgtttttctgtcaaaagtgctgcaggacatgcctgtgtgtccccccg

SEQ ID NO: 14697 - DNA, 360 bp, Glycine max
  Clone ID: LIB3094-040-Q1-K1-G3
caaagacatccttctcctggatgtggctcccctcactctcggaattgaaactgttggtggagtgcatggcaaagttgattcccagaaacactgttatcccaaccaagaaatctcaggtgttcaccacctatcaggaccagcagactacagtctccattcaggttttcgaaggcgagaggagtctcacaaaggattgccgccttcttgggaaatttgatctgtctggaattcctccagccccaaggggtacgcctcaaattgaagtgaccttcgaagttgatgccaacggcattctaaatgtgaaggcagaagacaagggcactggtaaatcagaaaagatcaccattacaaacgaaaagg

SEQ ID NO: 14698 - DNA, 412 bp, Glycine max
  Clone ID: LIB3094-040-Q1-K1-G4
cgcaaattcaaaggaggatctctcttgcgttttctctaggttttcgctatggcgtcgaagcgaatgttgaaggagcttaaggatttgcaaaaggatcctccaccattttccattgccggtcctgtggttgctgaaaatatgtccaattgccaagctccaataatgggtcctccaaacagtccttatgcaggaggtgttttcctagtgaccattcatttccctccagattatccctttaagccacccaaggttgcattcaggacaaaggttttccacccaaatataaatagcaatggaagcatttgccttgatatattgaaggagcaatggagccctgctctaaccatttccaaagtgttgctctcaatttgttccctattgacggatccaaatcctgatgatcctttggtcc

SEQ ID NO: 14699 - DNA, 428 bp, Glycine max
  Clone ID: LIB3094-040-Q1-K1-G5
aaaaaaagaaaaaaaaaaaaaaaggaaaagaaaaaaaaaaaaaagaagaggaaacccacacaaaaaaataaaaaaaaaaaaaaacaacaaaaaacaaaacaaaacaaaaaaaaataaaaaaaaaaaaacaaaaaaaaaaaaaaaaaaaaaaaacaaaaaaaaaaaaaaaaaacaaacaaaaaaaaaaaaacaaaaaaaaaaaacaaaaaacaaaaaaaaaaacacaaaaaaaaaaaacaaaaaaataaaaaaaaaccaaaaaaaaaaaaaaagataaaaaaaaaaaaaaaagaaacaaaaaaaaaacaaaaaacaaaaaataaaaacaaaaaaaaacaaaaaaaaaaaaaaaaaaaaaaaacaaaaaagaaacaaaaaacaaaaaaaaaaaaaaaaaaaaaaaaaaaaaaaaaaaaaagaaaaaaaaa

SEQ ID NO: 14700 - DNA, 322 bp, Glycine max
  Clone ID: LIB3094-040-Q1-K1-G7
cttcttctctggttgattcggatctagagtcttcagtttctcctcgttgttcttcggtttcgtgttttcaatttcgattctttcgttaatttaataagatgtttgggagggcaccgaagaagagcgataatacgaggtactacgaaatcctcggcgtctccaagaacgcttcgcaggatgatctgaagaaggcttacaagaaagccgccattaagaatcaccccgacaagggcggtgatcccgagaagtttaaagagctggcgcaagcttatgaggttctgagtgaccctgagaagcgtgagatatatgatcagtatggtga

SEQ ID NO: 14701 - DNA, 390 bp, Glycine max
  unsure at all n locations
  Clone ID: LIB3094-040-Q1-K1-D1
cacgtactcggtctctgaattcctcgtggtcgactccacgtcgttccgtcccacgtcgtctcgtatttaaattctataannttggtgcctantgttatactcnnaatcttaagttctcgtaaattggtcaatgtgtaaaattatctggtgaaaactaagttgccataagccatgaaggtttggttgaagtnnctttttttattagtnntttttttacttctacttcnntagagctcattctaagtttcnntcttcgagggtcctaagctttgcttctaaatgtccttttcaattgcttttaattgtttgaatannatccttgaannaaattgtcttgttataaactttccattggtttaagctttcattttcattttttttttaggtctt

SEQ ID NO: 14702 - DNA, 225 bp, Glycine max
  Clone ID: LIB3094-039-Q1-K1-E7
actaacaatttctgaattttctataaaatttacttatatactatcttctactaacacaatttccaatacttttctcttaatttttttttcttaatttaactacaagtcatttttctccacaatttccctttcatcaacttcttctccccttttattcatatcttaatcactatcttttcatttatatttcaacttttctatctttacttttttatactttaactt

SEQ ID NO: 14703 - DNA, 337 bp, Glycine max
  Clone ID: LIB3094-039-Q1-K1-F1
attgctgctgtttgcctattggtgtactttggggtctctaccctgctggatgcctcatcgggcgatggccaaaaatcagatgaagagcagaaggaggcagaactagcagtttctgaattttctggaaatggtgctgggatactatctgctgctagcacagttgccagtacttttctcttagtttttgttgctgaatggggcgacaagtcatttttctccacaattgcccttgcagcagcttcttctccccttggagtcatagctggagcactggctggtcatggtgttgcaactttgctagctgtacttggggttctttacttgggacgtatttgtc

SEQ ID NO: 14704 - DNA, 385 bp, Glycine max
  Clone ID: LIB3094-039-Q1-K1-F2
acgcgtccgattgctgctgtttgcctattggtttacttttgggtttctaccctgctggatgcctcatcgagcggtttccattaatcagatgaagagcagaacgaggcagaactagcagtttctgaattttctggaaatggtgctgggatactatctgctgctagcacagttgccagtacttttctcttagtttttgttgctgaatggggcgacaagtcatttttctccacaattgcccttgcagcagcttcttctccccttggagtcatagcttgagcactgtctggtcatggtgttgcaactttgctagctgtacttgggggttctttacttgtgacgtatttgtcagataaggttattgcctacatcggatgtgttctctttc

SEQ ID NO: 14705 - DNA, 435 bp, Glycine max
  Clone ID: LIB3094-039-Q1-K1-F5
ggcggcgctgtggcggacgcgccttcggtggttgaggagaagacggagttcgacgggggggtcgaagaggtgccgagcaacgctcgaatcgcggtgattaaggcggtgagggcattgacgaacctagcgctgaatgaggcgaaggagttgatcgaagggttgccgaagaagttcaaggaagggatttcaaaggacgaagctgaagatgcgaagaagcaactcgaagaagctggtgccaaggttaccattgcttaaacactgtttagctgcagcatatatgttctgcttcttcttttgctggttgtagttgagttcaccagtacactgtaatttcatttcattttgtcttgattttaatcctttaatttgtaatgaggaaaatatgaattcctaattttaatataatttttttaatggctattaaggggttggttg

SEQ ID NO: 14706 - DNA, 322 bp, Glycine max
  Clone ID: LIB3094-039-Q1-K1-G1
gtcatatgctccaagtgcactggtaagggttctaagtctggtgcttcgatgaagtgtgcgggttggcaaggaactggtatgaaggtttctataagacatcttggcccgtccatgattcagcagatgcagcatgcttgcaatgaatgcaagggtactggagaaaccatcaacgacagagatcgctgcccacagtgcaagggagaaaaggttgtgcaggagaaaaaagtccttgaagttattgtggaaaagggaatgcagaacgggcagaagattacattccctggcgaagctgatgaagcgccagacacaattactggggata

SEQ ID NO: 14707 - DNA, 305 bp, Glycine max
  Clone ID: LIB3094-039-Q1-K1-G2
tccaacttctactttaaggtttctaattccaacccttccatcaactgctccgcatgtttaaaaactaatatgaccctccctatcacacatcttttcccctccattattcatcacatccatcattcttacaataaattcaaccttactacaaaaaccatcaacgacatacaacactccccacaatacaaggaataaaatgttcttcacaataaaaaagtcctatcaattcattttaaaaactaaatccacaactttcataaaattacattccctaactaaactgattaatcaccatacacaactac

SEQ ID NO: 14708 - DNA, 376 bp, Glycine max
  Clone ID: LIB3094-039-Q1-K1-G3
caccgattagattaggggcttcgaacaaggtatcccttaaacccaaaccctaatctgattcgctttgtattatggcgtctgagagcgcttctcgatcgagttccgcggccgattcgtacattgggagcttgataagcttgacctctaagagtgagatcagatacgaaggtattctctacaacatcaacaccgaagagtccagtattggcctcagaaacgtgcggtcttttggaacagaatgaaggaaaaaggatggcccacaaatccctcccagtgacaaggtttatgagtatatacttttccgtgggactgacatcaagggattacagggttaatcttcttcaactggcctgcctaattcacaagtcagctttga

SEQ ID NO: 14709 - DNA, 401 bp, Glycine max
  unsure at all n locations
  Clone ID: LIB3094-039-Q1-K1-G4
attcattcctatagctatagctacaacatatcatactactactgttgttgttgctgctagtgctgttgctgctgccgcgtatcaatcactcgcttaccataatgggtagggatagccatgaccccacttcctttcactcttccattgcccttctacaagagaggtttagacagcttcagagagtaaaagaaatgagggaggagagggagcttcagaagatgctcaatgaacctaaacaattcagttccaacaccaccacctctatgagtcgtacttatcacaattccaacaattctatcctctctcaccctgaattgattatgccatcaaggtcaccaccccatgtttctctctctctctggccaacatctcanggcaagcaagaggactatagaagtgct

SEQ ID NO: 14710 - DNA, 405 bp, Glycine max
  unsure at all n locations
  Clone ID: LIB3094-039-Q1-K1-G8
cgcaaattcaaaggaggatctctcttgcgttttctctaggttttcgctatggcgtggaagggaattttgaaggagcttaaggatttgcagaaggatcctccaacatcttgcagtgccggtcctgttgttgctgaagatatgttccattggcaagctacaattatgggtcctccagacagtccctatgcaggaggtgttttcctagtgaccattcatttccctccagattatccctttaagccacccaaggttgcattcaggacaaaggttttccacccaaatataaatagcaatggaagcatttgccttgatatattgaaggagcagtggagccctgctctaaccatttncaaggtgttgctctcaatttgttcctattgacggatccaaatcctgatgatcctt

SEQ ID NO: 14711 - DNA, 303 bp, Glycine max
  Clone ID: LIB3094-039-Q1-K1-H2
tcctataactataacttcaacacttcattttacaaccgatgctgaagatgctacggctgggtcatttgaaaagtgacaatgactctctcaccctaatggaacaatatacccatcaccacacttacttacactctaacattaaccttatacaagataatgataaacatcttcagaaaacccaaacaataattgaaaatatgcatcttcacaatatacacattgcacctaaacaatctaggtacaacaacaccacctttattaatcgtactcatcacaaattcaacaattctatactcttttaaa

SEQ ID NO: 14712 - DNA, 380 bp, Glycine max
  Clone ID: LIB3094-039-Q1-K1-H3
ccggcccgacgcacgcgtccgatggctcccaaaccgcctagtacgggtctgtttgttggactgaacaagggtcacgtcgtggccaggtttgaattgcctccacgcccctcagatcgtaaggggaaaacaagcaagagggtgcactttgtgaggaacctcataagagaggtagccggttttgcaccctatgaaaagcgtataactgagttgctgaaggttgggaaggataagagggcactgaaggttgcaaagagaaagctcggaacacacaaacgcgcaaagaagaagcgtgaggaaatgtccagtgttctcaggaagatgagggctggtggtgctggagacaagaagaaaataatcttatttactgttttcagattcac

SEQ ID NO: 14713 - DNA, 267 bp, Glycine max
  Clone ID: LIB3094-039-Q1-K1-H4
caatttgaacaatattctttactgacattttcaattatagtgtaaattaattttattcaatatgattataatccattatatattaccctaactaaatttaaaaatttgcttaaaatacatttatattttacacaacatcttactaaaaattcttacaatataatatttaaacttctacataaagaattttaaacttcactaacttttcaaactgaaaatatatttttaaaactataatagtttaattatcttctactaactacaata

SEQ ID NO: 14714 - DNA, 461 bp, Glycine max
  unsure at all n locations
  Clone ID: LIB3094-040-Q1-K1-A3
aaaaaaaaaaaaaattanatataaaaaaaaaaaaaaaaaaaaaaaggaaacgataaaaatttcaaaaaaagcaaaccaaaacccaacaaaaaataaaaaaaataacaaaaaaaaaaaaaaaaaaataataaaaaaaaaaaaaaaaaaaaaaaaataaaaaataaaaaaaaaataaaaaaataaaaaaaaaaaaaaaaaaaaaaaaaaataaaaaaaaaataaaaaaaaataaaataaaaaaaaaaaaaaaaaaaataaaaaaaaaaaaaaaaaaataaaaaaaaaatatataaaaaaaaaaaaacaaaaaaataaaaaaaaaaataaaaaaaaaaaaaaataaaaaaaaaacataaaaaaaataaaacacaaaaaaaaaaaaaaacaaaaaataaaaaaaaaaaaatatataaaaaataataaaaaaaataaaataaaatatataaataataaaataaaaa

SEQ ID NO: 14715 - DNA, 352 bp, Glycine max
  Clone ID: LIB3094-040-Q1-K1-A4
atcgaaaccttaagtttcggatcaggtctgagcaatctggttggtagaacctttggtcttagagagtcaagttttatgtctgaattagacgatcaaattcctactgccttcgatccttttgctgatgcaaatgctgatgactcgggtgctgggtcaaaggagtatgtgcatattcgcgtacagcagcgaaatggaaggaaaagcctgacaaccgttcagggattgaaaaaagaattcagctataacaagatacttaaagatgttaagaaagagttctgttgcaatggaacagttgttcaggacccagaactaggacaggttattcaacttcaaggtgatcagaggaagaatg

SEQ ID NO: 14716 - DNA, 346 bp, Glycine max
  Clone ID: LIB3094-040-Q1-K1-A5
aaaaaaaaatacaaaaaacaaaaaaaaaaaaataaaaaaaagacaaaaaataaaaaaaaaaataaaaaacaaataaataaaaaaaaaaaaaaataaaaacaaaaaaatcataacaaaaaaaaaaaaaaacaaaacaaaaaaaaaaaaaataaaaaaaaaaaaaaaatcaaaaaataaaaaataaaataaaaataacaataaaaaaaaaaaatattaataaaaataaacaaaaaaaaaaaaaaaaaaaaaaaaaaaaataaaaaatacaaaaaaaaaaaaaaaataaaaaaaaaaaaaaaaaaaaaaaaaaaaaaaatataaacaaaaaaaaaaaaaaaaaaaaaaa

SEQ ID NO: 14717 - DNA, 371 bp, Glycine max
  Clone ID: LIB3094-040-Q1-K1-A7
aaaaaaataaaaaaaaaaaaaaaaaaaaaaaaaaaaaaaaaataaaaaaaaaaaaaaaatataaaataaaaaaaaaataaaaataaaaaaaaaaaaaaaaaaaaataataaaaaaaatataaataaaaaaaaaataaaaaaaaaaaaaaaaaaaaaaaaaacaaaaaaaaaaaaataaaaaataaaaaaaaaaaaaaataaaaataaaaaaaaaataaataaaaaaaaaaaaaaaaaaaaaaaaaaataaaaaaaaaaaaaaaaaaataaaaaataaaataaataaaaaaataaaaaaaaaaataaaaaaaaaaaaataataaataaaaaaaaaaaaataaaaaaaaaaaaaaaaaaaataaaaaaaaaaa

SEQ ID NO: 14718 - DNA, 350 bp, Glycine max
  Clone ID: LIB3094-040-Q1-K1-B2
cttttctactttgagtcttcttgatccttctttttctccttgaactcaaacatggcagatgaggtggttctgctagatttctggccaagtccatttgggatgagggtcaggattgcacttgctgaaaagggtatcaaatatgagtacaaagaagaggacttgaggaacaagagtcctcttctcctccaaatgaacccggttcacaagaagattccggttctcatccacaatggcaaacccatttgtgaatccctcattgctgttcagtacattgaggaggtttggaatgacagaaatcccttgttgccttctgacccttaccagagagctcaggctagattcttggctga

SEQ ID NO: 14719 - DNA, 62 bp, Glycine max
  Clone ID: LIB3094-040-Q1-K1-B4
tctctttgctacttttaatcttcttgatcctttttattttcctttaactcaaacatttcata

SEQ ID NO: 14720 - DNA, 295 bp, Glycine max; identical to SEQ ID NO: 11959
  Clone ID: LIB3094-039-Q1-K1-E4

SEQ ID NO: 14721 - DNA, 237 bp, Glycine max
  Clone ID: LIB3094-039-Q1-K1-A1
tcaaattcctactgccttcaatccttttgcttattcaaatgctaatgactcctattctgtttcaaaagactattttcatattctcttacaacatctaaatgtaattaaaatccttacaacctttcatgtatttaaaaaataattcaactataacaagatacttaaatatgttaataaagacttctgttacaattcaacattttttcaagacccataactataacactttattcaact

SEQ ID NO: 14722 - DNA, 410 bp, Glycine max
  unsure at all n locations
  Clone ID: LIB3094-039-Q1-K1-A2
agaaaacctaagcttagaattagaaacaaagaaaagaagaaaggaaagaattgatcgttgggaatgcagggaggaaagaaagcgggagagtccattaaggaaacagctacaaacattggtgcttctgccaaggctggcatggagaagaccaaggccactgtccaagagaaggcagaaagaatgacagcacgtgatccggtgcaaaaggagttggcaacccaaaagaaagaggcaaagatgaaccaggcggagctggacaagcaggcggcgcgtcagcataacacggcggccaaacagtccgtcaccacggctgggcacatgggacatggccaccacaccaccggaaccgggactgggaccgncacgtattccacccaccgggaaatattggcaagccaatgggggccaac

SEQ ID NO: 14723 - DNA, 303 bp, Glycine max
  Clone ID: LIB3094-039-Q1-K1-A3
aaaaaaagccctagcaccccattaaagaaacatctacaaacatttgtacttctgccaaggcttccatggataataccaaggccactgtccaagataatgcataaagaatgacatcactttatccgctgcaaaattatttaccaacccaaaataaatatgcatacatcaaccattcatatcattacaaacattctactcgtcatcataacacagttaccaaacaatccaccaccactgcttaacacattttacattgccaccacaccaccataacccttacttgaaaccacactaattccacca

SEQ ID NO: 14724 - DNA, 315 bp, Glycine max
  Clone ID: LIB3094-039-Q1-K1-A4
acatttaaaataccaaagcaaagaattgatcgtaggaaaggtttaaaataaaaaaagcgccagacaccattaaggaaacagctacaaacattggtgcttctgccaaggctggcatggagaagaccaaggccactgtccaagagaaggcagaaagaatgacagcacgtgatccggtgcaaaaggagttggcaacccaaaagaaagaggcaaagatgaaccatgcagaactggacaatcaagcgtcgcgtcagcataacacggcggccaaacagtccgtcaccacggcttgtcacatgggacaagtccaccacacca

SEQ ID NO: 14725 - DNA, 427 bp, Glycine max
  Clone ID: LIB3094-039-Q1-K1-A5
caaagacatccttctcctggatgtggctctcctcactctcggaattgaaactgtgggtggagtcatgacaaagttgattcccagaaacactgttatcccaaccaagaaatctcaggtgttcaccacctatcaggaccagcagactacagtctccattcaggttttcgaaggcgagaggagtctcacaaaggattgccgccttcttgggaaatttgatctgtctggaattcctccagccccaaggggtacgcctcaaattgaagtgaccttcgaagttgatgccaacggcattctaaatgtgaaggcagaagacaagggcactggtaaatcagaaaagatcaccattacaaacgaaaagggacgtcttagccaggaagaaattgagagaatggttcgcgaagcagaggagtttgcagaggaagacaag

SEQ ID NO: 14726 - DNA, 377 bp, Glycine max
  unsure at all n locations
  Clone ID: LIB3094-039-Q1-K1-B1
ataatgatgatattgaggttgaggttgtggagggtgttgatctttggttgaagattcaagaggaggcaaggttagatgttgatcaagaaccaattttatccagctactatttcagttccattttgtctcacaaatctttggagagtgccttggccaaccacctctccacaaatttgagcagcttgagccttccaagcagcaccctttttgaccttttcatgggtgttttggttgatgatggagatgatgacatcgtangtgctgtgaaggatgatttgatagctgttaaggagagggaccctgcttgcataagttatgtgcattgcttgctgaatttcaagggttttttggcatgtcaggctcataggattgctcac

SEQ ID NO: 14727 - DNA, 349 bp, Glycine max
  unsure at all n locations
  Clone ID: LIB3094-039-Q1-K1-B2
cttttctactttgagtcttcttgatccttctttttctccttgaactcaaacatggcagatgaggtggttctgctagatttctggccaagtccatttgggatgagggtcaggattgcacttgctgaaaagggtatcaaatatgagtacaaagaagaggacttgaggaacaagagtcctcttctcctccaaatgaacccggttcacaagaagattccggttctcatccacaatggcaaacccatttgtgaatccctcattgctgttcagtacattgaggaggtttggaatgacagaaatcccttgttgccttctgacccttaccagagagctcangctagattctgggctg

SEQ ID NO: 14728 - DNA, 241 bp, Glycine max
  unsure at all n locations
  Clone ID: LIB3094-039-Q1-K1-B4
ccatcaactcaaacatancaaagganggttttaatttaaatttttccccacatacatttaatataaatatcattatttcactttctcaaaatgttatcaaatattattacaaataataatactttattaacaaaattcctcttctcctccaaataaacccatttcacaataatattccatttctcatccacaatttcatacccatttataaatccctcattactattcattacatttatta

SEQ ID NO: 14729 - DNA, 399 bp, Glycine max
  Clone ID: LIB3094-039-Q1-K1-B5
cccacgcgtcctcccactcgtccgtaaaatttacaacaccaatctcacccatttcgaaaagttgcctttagtgttactattcgtaaaatggccactcttgttctttaccaattctttctcaaactcttgctcctaatttcagtctttcagctttcctttgctgctaggagactcaaccagctggttcaggaccagtcacagttactccattaccacaacggtcctcttctatacggcaaaatcgccgtgaacctaatctggtatggtcacttcaaaccatcccaaaaggccatcatcaccgatttcgttacctcactgtcatccccatcgtctcagagcagccagccatctgttgccacgtggtggataaccacggataagtactaccacctgagtccc

SEQ ID NO: 14730 - DNA, 434 bp, Glycine max
  Clone ID: LIB3094-039-Q1-K1-B7
atacccggctcgacgcacgcatgcggtcatatgctctatgtttactggttagggttctaagcctggtgcttcgatgaagggtgcgttttatataaggaactggtatgagacgtttctataagacatcttggcccgtccatgattcagcagatgcagcatgcttgcaatgaatgcaagggtactggagaaaccatcaacgacagagatcgctgcccacagtgcaagggagaaaaggttgtgcaggagaaaaaagtccttgaagttattgtggaaaagggaatgcataacgggcagaagattacattccctggcgaagctgatgaagcgccagacacaattactggggatattgtctttgtccttcagcataaggaacattccatattcaaaagaaaggcttaagatctttttgtagagcacattttgtcccttac

SEQ ID NO: 14731 - DNA, 395 bp, Glycine max
  Clone ID: LIB3094-039-Q1-K1-B8
cggaacgatgactcggcgtcggatccacggtgaggttgccgacgtggaaggagagggagagcttcaatatgagagagagaagacgaagagcgattgcagctaagatctacactggccttcgagcccaggggaactacaagcttccaaagcactgcgacaacaacgaggtcctgaaagctctctgcgccgaagctggctggatcgtggaagaagatggcacaacttatcgaaagggatgtaagagacccacgagtgagattggaggaacaccactgaacttaagcgcgtgttcttccattcaggcaagtccacaatcctcgtcatacccgagtcctgtaccatcctaccatgctagcccaacctctttctcgttcccaaccccacgcgcattgacg

SEQ ID NO: 14732 - DNA, 297 bp, Glycine max
  Clone ID: LIB3094-039-Q1-K1-C2
gcttggtgatcccaacactttcgttaacatgattcatacgatgctgaagcttggactgatggttgagttttgattctaatgaagcagatgctgacatgcctcctcttgaggacgctgatgcagatgctgagggtagcaagatggaagaagttgattaaatctgacttaattgcctgttacgtttttagaaacaatgattggagaaacagtctttttactatgttttatgttttttgaattttcgaaattttggaacgttggctagttaggtgccgtatgtagtagtttctttatggt

SEQ ID NO: 14733 - DNA, 344 bp, Glycine max
  Clone ID: LIB3094-039-Q1-K1-C7
aaacacccttgtcgaccacaccaattttattaacataaaaaagcataaaagcacagaaaggcttaaaaaagggaaaataaaagattttgaagtcatatttgcacacttgattaaaggctgtcgtcccttgtgacggatgcgtggggtgctaataccttccctgtgcgtaaaaacaactcccgaactattcacacttaaagttcgtagaccacaccttttcaattttcccgacgctttcctcaaataaaagttggtggcgactccgcgcattttcctttcatggaagacgcacttgtgagtcccgcatcgccctcccgtcaaagggtaggttgcgacagtacttg

SEQ ID NO: 14734 - DNA, 369 bp, Glycine max
  unsure at all n locations
  Clone ID: LIB3094-039-Q1-K1-C8
ggggcgaagaatcagattcagggattgaattataagggtaatggcgccaacaatggtngggtttcgtcatgctccttctccagccttggacttgattccaatttatgtgaacaacttcgtgataggttggggtttgaagttccaacgctggtgcaagctcaagcaattcccgttattctctcggggcggcatgcattggtgaatgctgcaacgggcacggggaagactgttgcgtatttggctccgattattcatcacttgcagggttatgaaaatcggattcagcgctctgatggaacatttgcgttggttcttgtaccgacgcgggagctatgcttgcaggtttatgaaattcttcaaaagttattg

SEQ ID NO: 14735 - DNA, 358 bp, Glycine max
  unsure at all n locations
  Clone ID: LIB3094-039-Q1-K1-D1
gcgttgtgttgtgattgaaaatggagagcgatgttgaagaatctatgcggaagaggcccggaaaatatcctttctccgccgattcatcctctcgcaagcaatttgaacaatattctggacggacatttgcaattatgggggaagtgaattttatgcaagatgatgataatcgtttggagattacccgaactaaatttggaagtttgcttaaaagacatggagatttgacagagcggcttgctagggattctgacaagataatatttgagcgtctacagaaggagtttgaagctgcacgagcttctcaaactgaagagatatgtttagacggngaagagtggaatgatggtctactagc

SEQ ID NO: 14736 - DNA, 369 bp, Glycine max
  Clone ID: LIB3094-039-Q1-K1-D2
cactcttcttctcttgcggctagggttttagcgcagcttcttctagatttaaggaagatgggtaaggaaaaggttcacatcagtattgtggttattggccatgttgactctgggaagtccactaccactggccacctgatctacaagcttggaggcattgacaagcgtgttattgagagatttgagaaggaagctgctgagatgaacaagaggtctttcaagtatgcctgggtgcttgataagcttaaggctgagcgtgaaagaggaatcacaattgatattgccttgtggaagtttgaaaccaccaagtactattgcacagtcattgatgcccctggacacagggatttcatcaggaacatgatcact

SEQ ID NO: 14737 - DNA, 211 bp, Glycine max
  Clone ID: LIB3094-039-Q1-K1-D3
tcttctcattttaaatttatagcttatattcccaatctataccgaagaaacccgggaagtttcaaaactcacacgacccatccactcacaagccattttaacaatattctggacacacatactcaactattgagcaactaaattttatgcaataacatgataatcatttagagattacccaaactaaattctgaaattaacataaaataca

SEQ ID NO: 14738 - DNA, 70 bp, Glycine max
  Clone ID: LIB3094-039-Q1-K1-D4
aaataaaaaaaaaaaatttaaaaaaaaaatttaaattacaaaaaaaaaaaaaaaaatattggggatgatt

SEQ ID NO: 14739 - DNA, 455 bp, Glycine max
  unsure at all n locations
  Clone ID: LIB3094-038-Q1-K1-H8
ggcggcgctgtggcggacgcgccggcggtggttgaggagaagacggagttcggggtggtgatggaggatgtgccgagcaacgctcgaatcgcggtgattaaggcggtgagggcattgacgaacctagcgctgaaggaggcgaaggagttgatcgaagggttgccgaagaagttcaaggaagggatttcaaaggacgaagctgaagatgcgaagaagcaactcgaagaagctggtgccaaggttaccattgcttaaacactgtttagctgcagcatatatgttctgcttcttcttttgttggttgtagttgagttcaccagtacactgtaatttcatttccattttgtctggatttcaatcttttatttgtaatgaggaaatatgagttcttatttttatattattttttttaatgcgtatgaagtgtttgttgaaaaaaaaaaanntnnnaatat

SEQ ID NO: 14740 - DNA, 187 bp, Glycine max
  Clone ID: LIB3094-039-Q1-K1-D5
tctcgcaagcaatttgaacaatattctggacggacatttgcaattatgggggaagtgaattttatgcaagatgatgataatcgtttggagattacccgaactaaatttggaagtttgcttaaaagacatggagatttgacagagcggcttgctaaggattctgacaagataatattttagcgtctac

SEQ ID NO: 14741 - DNA, 478 bp, Glycine max
  Clone ID: LIB3094-038-Q1-K1-E3
gttgccgggctctaccgtggtttcaacatctcatgtgttggaatcatcgtgtatcgtggtcctggctttttattgaatgattgtgttaaaccagttgtcctcacagggtcattgcaggatagcttttttgccagctttgcccttggatggctcatcaccaatggtgcaggtcttgcatcatacccaatagacactgttagaagaagaatgatgatgacctctggtgaagctgtcaagtacaagagctccttggatgcattcacacagatcctcaagaatgagggtgccaagtccttgttcaaaggtgccggtgccaacatccttcgtgccgttgccggtgctggtgtgcttgctggttatgacaagttgcaggttcttgtgttcggcaagaagtacggctctggtggggcttaagttctaatgctgagtcagtactattatttgtttttagatggcgattgaaaaaaccattgagttc

SEQ ID NO: 14742 - DNA, 368 bp, Glycine max
  Clone ID: LIB3094-038-Q1-K1-E5
gtcgagcccgcgtccaggagatgctgatttgttctctcagatctgagcttaccgtcgccggaatccaacgcaacctttggcggattcttgggtatcatcgcatcgccattcgttttagcctctcaataagagattttagttcgcttcaaattcgaggtttgatttgaagttgaaagttggaatagcttaactgttgtgtaaaacaaccaacacacacgagcatgggaagccaagacaacaacgtagaattgtcatccaattcatttctagcttacaaatctgctaaggtgtttgttgctggtcaccggggtcttgttggctcggccattggtcgcaagctcacccaacttgggttcactaatctagtc

SEQ ID NO: 14743 - DNA, 485 bp, Glycine max
  Clone ID: LIB3094-038-Q1-K1-E6
cccacgcgtccgcggacgcgtgggggtttttgttgataagagtgagctataagggctgccaggggaccgggtttaattgctttgtttgatgttgacgggactcttacagctcccaggaaggtggtcacaccggaaatgttgacattcatgcaagaactacgaaaggttgtaacggttggagttgttgggggttctgaccttataaagatatcagagcaacttggcagcacagttaccaatgagtatgattacgtattttctgagaatggtcttgtggctcacaaggaaggaaagctcattggaactcagagcttgaagtcattccttggtgaagaaaagctcaaggagtttattaactttacacttcattatattgctgatttggacatccccattaagaggggaacatttatggagttccgtagtgggatgctgaatgtctcacctattggccgaaactgtagccaagaagaaagagatgagtt

SEQ ID NO: 14744 - DNA, 173 bp, Glycine max
  Clone ID: LIB3094-038-Q1-K1-E7
aaaaaaaaaaaaaaaaaaaaattaaaaaaaaaattaaaaaaaaacaaacaaaaaagagaattcgaggaaaattacacaaacatacaaagaaaatacaactaaaataaagacaccaaaaaacaaaacaatggccgccttttaacaaaaaaaaaaactaaaaaaacacaaacaaa

SEQ ID NO: 14745 - DNA, 315 bp, Glycine max
  Clone ID: LIB3094-038-Q1-K1-F2
taccgggtttcaacatcttttttattcgaatcatcctaaatacgactctaggctatttatgaaatgatttcaacaaaccacaaatcctcacatagtcattgcaacataactattttgccatctttgcccttgaatggctcatcaccaatcatgcaagactaacatcatacccaatagacactgctacaagaagaatgatgatgacctctggagaaactgtcaaatacaataactccttagatacattcacacagatcctcaaaaatgatggttccaagtccttattcaaagaagccaataccaacatcctacaaa

SEQ ID NO: 14746 - DNA, 462 bp, Glycine max
  Clone ID: LIB3094-038-Q1-K1-F3
cgtccactttttgagaacaagagggcattggatctggtttttctgccaaattgtctcaaatttgcgtattgttatttattagattgtgattggtgacgttgaatttggttgcaggaattccgacggggcgattctccggtcgtcggccggcgagactaggaaatcggcgtcgccggagaaggaggaccggtactacacgacgcggggttcggcggaggagaacggcaaggtcaccggcgacggcaacaacggcgaggaacgtgccctagtttggcccaagctctacatcactctctcaagcaaggagaaagaggaagactttctcgccatgaagggttgtaagcttcctcagcgacccaaaaagagagccaaaatcatccaaagaagcttacttttggtgagtcctggggcgtggttgtctgatatgtgccaagaaagatatgaagttagggagaagaaaag

SEQ ID NO: 14747 - DNA, 326 bp, Glycine max
  Clone ID: LIB3094-038-Q1-K1-F7
atgtggacattcatcgcaagaactacaaagcgattgcacgtctgaacttgatgggggtgattaccttataaatatatctaaggatctgggcatcacagacaccaatgagaacaattacttatcgccctacaatgcactggaggatcacaacgtatgaaagctgattatagctcataacatgtagtcacacctaggtgaatacatactcacagcggtgatcaactgtacacttcataataatgctgatctggacatctccattatgacgggaacatttatggagttccgcattgggatgcttaatgccttacctattggtcgaaact

SEQ ID NO: 14748 - DNA, 484 bp, Glycine max
  Clone ID: LIB3094-038-Q1-K1-F8
cgtcagttcaagaacaatttattgcactaatattgacattaagcttactcaagccgaggtcaaactcttgtttgaatctatttgtggagaggttcaacggttgaggcttcttggagattaccatcattcaactcgaattgcttttgttgagttcacagtggctgagagtgcaattgcagctctaagctgtagtggggtgattctgggttcactgcccataagggtaagtccatcgaagacaccagttcgatcacgtgctcctcgccctactatgcactgaatcaactttccatgtttctggggttgattgctgctgagatatatttacatatatatatatacatagaaacagctgtgttctaaggaacatgtggcatttagttggtacttttgtcctcatgtcttacagtatggttactttgcttccccttgggggattatggttctctgatttagcttgtagtcggatcgaactttgaggatc

SEQ ID NO: 14749 - DNA, 493 bp, Glycine max
  unsure at all n locations
  Clone ID: LIB3094-038-Q1-K1-G8
ttcaagaacaatttattgcacaaatattgacaagaagcttactcaagccgatgtcaaacacttgtttgaatctatttgtggagaggttcaacggttgaggcttcttggagattaccatcattcaactcgaattgcttttgttgagttcacagtggctgagagtgcaattgcagctctaagctgtagtggggtgattctgggttcactgcccataagggtaagtccatcgaagacaccagttcgatcacgtgctcctcgccctactatgcactgaatcaactttccatgtttctggggttgattgctgctgagatatatttacatatatatatatacatagaaacagctgtgttctaaggaacatgtggcatttagttggtacttttgtcctcatgtcttacagtatggttactttgcttccccttggnggattatggttctctgttttagcttgtagtcggatcgaactttgaggatcttgatgacttaatta

SEQ ID NO: 14750 - DNA, 280 bp, Glycine max
  Clone ID: LIB3094-038-Q1-K1-G9
ttcaaacatctcaacttctatcttctgtaaatatcacgaatcacaatacatgttaataaataccagaacacaacactctcacttcaacactcaacaccttcactatctaccgtttccacatctcacatacaactcaataaatgaattgaaaaactcgattctacagcttacaacataggaactcaaagaacgaatcgatttctcgaagccgctctcaaaatgtcgtcgtgcactccttcactttctttccccttacgtcctcattatcacttctgtcaat

SEQ ID NO: 14751 - DNA, 292 bp, Glycine max
  Clone ID: LIB3094-038-Q1-K1-H1
caccggttaaatcactgatactcttcttgttttacattcatttcacaaactaattatctagagatgtttttggaatccatattatcacaaatttaccacaccttcaatgcataatacagccaaaatctataccatacatagacaatctgtcaagcatcttatgtctttacctcaatttactaatactgtaacatcattatcttcgatatatctccatcatcctaagaataatagacttctaactctcataatttaaaataaccaaatatatcaatagaacctgtcttataac

SEQ ID NO: 14752 - DNA, 446 bp, Glycine max
  unsure at all n locations
  Clone ID: LIB3094-038-Q1-K1-H12
aaactgaagaaggtgaagagttcactgaatgcactggattatctgcttggcgaatgttttgacaggccgcctcaagaatttcaagaattttgcccgaaatttaagaacgattatcaacaaaattgcccgaatgccgcgtatgaagcagtttgcccgttactgaagcaagcgattcaaatatgttgccagaaacacgcataactctgcaagccacggtgggcgtttggatgtgcttttagttaccactttctctcttggatttgcttacgtattgctccttttgtattagtggctcctgtcccaccttgcttttggacttgagctttttatatttctgattgttcaatgtctgttgtgtgtgctctccaacctgtggtgactttccggtttattcctgtggctgtttcttgtangcctttcgacctccagttttaaataaaagatca

SEQ ID NO: 14753 - DNA, 439 bp, Glycine max
  unsure at all n locations
  Clone ID: LIB3094-038-Q1-K1-H2
cggacgcgtggggtttcctagtatgcaaggtaaagaatcagcaaatttcaaccccggatccacgggtaacatgttgacaaaagtctaccgagttgcattttgttcttgtaacctcctcaacccactggaggtcgtgatctgtaaattttgagtgaattatacaacaaattcttgaaaaagaaatgattttctcttctgagctgctgcttattgatcgatgaatccagctgcaattattttcgaaaatggcaataaaatctcttctgcggtgttatctctttgactgaattccaaattttgtaagtataatagttggctatgaaagagactgtaccaagaagcatagtgtgagagtcagagatcagttgttaagtatgagatgtgagaacatttgttgaatgtatattgctaaatagaagtgcaaaagatgantatagat

SEQ ID NO: 14754 - DNA, 497 bp, Glycine max
  unsure at all n locations
  Clone ID: LIB3094-038-Q1-K1-H3
atggctcccaaaccgcctagtacgggtctgtttgttggactgaacaagggtcacgtcgtcaccgggaaggaattgcctccacgcccctcagatcgtaaggggaaaacaagcaagagggtgcactttgtgaggaacctcataagagaggtagccggttttgcaccctatgaaaagcgtataactgagttgctgaaggttgggaaggataagagggcactgaaggttgcaaagagaaagctcggaacacacaaacgcgcaaagaagaagcgtgaggaaatgtccagtgttctcaggaagatgagggctggtggtgctggagacaagaagaaataagtcttatttactgttttccagattcactagatggacctgtgtattgatggacgagctttcatatttttgctttggttcaattagtttacttcaagattttgtttgagaaatatgttttgcttaactgagacatgatttatggaagaagctagnatggattattt

SEQ ID NO: 14755 - DNA, 464 bp, Glycine max
  Clone ID: LIB3094-038-Q1-K1-H7
tcgcccacgcgttcgttttccccttttgccttggcttttgacgccttataatagaggcaacgatgaagatagttttggttccgctgagagggccttcaatactgcgcatgacaatgcgatggggttgcttggggatgcgtttgcgaggcttcgtgccagctggcggcttctcgcggcttccaggaagtggaagcgggactgtgttgagcatttgccctttgtgcttgatgctggttgcttattgcataattttgttctcaagttcaatgaggcaatgccggatgaaggggtggaaaaggaagaagggcttccttcgtttgatggagtggaggatgaaagtgctgttaaggtgagagatgcacttgctttgcatttgagtaggttgagcttgagaaaatgaattaatgaaaggttggaagaactaatggggggtttcattggtgaaactgtttgaaaaccattta

SEQ ID NO: 14756 - DNA, 469 bp, Glycine max
  Clone ID: LIB3094-038-Q1-K1-D8
tgattttctggatccgtgtttttgagatgtttgtatgaatttaccgattggttttcatagggggttatcgttgacgcatgctttggtgtttgtgttaatcggggcgttgtggaacttgcaaagggcagagggtatccgatttgtgatagacagagacgagtgtttctcccatgatgtgaagtacgagggtgacactgttcatgtctctttcgttgttattaaggctgattctccctggcattacggcgacgaatgtgtcgatctcgtggtaaagggaccttctggcgagcaaattcaagaatttcgggacaagaccagtgagaagtttgactttgtggctcacaaatccggggtccataaattctgctttaccaacaagtctccttatcatgaaactgtcgattttgatgtacattgtggtcacttctcttactttgagcaacatgcaaaagatgagcatttcaccccc

SEQ ID NO: 14757 - DNA, 333 bp, Glycine max
  unsure at all n locations
  Clone ID: LIB3094-037-Q1-K1-H5
cgacccaccccgtccgcctgcctcctctaacaaccctttcctttcagtccattaatccggnggntccggttccaccgaactctattctagaccctaatctgcctccccacaccgncggagaacaaaatgattgtctgcgtcgccgtcttcggtcaccagaacaatcccctgtacatacagagcttcacggaggccgattattctctcaagctccaccacatcttccattgctcactcgatattgtctaccagctactcaacaatcctaaaaagtcttttcccattcttaattaaactatcntttaacttcttttattcaattttaaactataa

SEQ ID NO: 14758 - DNA, 431 bp, Glycine max
  Clone ID: LIB3094-038-Q1-K1-A5
acccacgcgtccgcccacgcgttcgctccagatttaagaagaaacttaatcgagatcactttaggtcactaatacatcatggcagacgagacccacaacaagtatgagagctctgaggttgaggtccaggatcgtggtgtttttgactttctcggtaagaaaaaggatgaagaagacaagcctcatcctcaggaggaggtcatcgccaccgagtttcaaaaagtcactgtctcagaccaaggagagaacaagcacagcctcttagaaaagcttcaccgatctgacagcagctctagctcttcaagtgaggaggaaggagaagatggagagaaaaggaagaagaagaataaggaaaagaaagggctgaaagagaagatcgaggagaaaatagaaggtgatcatcatcatcacaaggatgaggacacaagtgt

SEQ ID NO: 14759 - DNA, 401 bp, Glycine max
  Clone ID: LIB3094-038-Q1-K1-B1
tcaactaccctttaccttgactattcactactcatggccattacaatcattttggaaactcttaacattggctatcttatgccattctacatttagcactactttttctcatcagtaaacatagattgatgctcttgttgtcattgcatattaactatgaaaaacgttgattgatataacttgatcacattgcatattaaaacaactgatgtttaattcattgactgattttatattactatggcatcttcatattgttctccttcttcctgtttcccaaattattctactcattcaactattcaactaatgttttatatcatctttcaaatatttacatcaaaaattcttcacaaacttataattaaaacatctatctcattttaatactttataaaaat

SEQ ID NO: 14760 - DNA, 417 bp, Glycine max
  Clone ID: LIB3094-038-Q1-K1-B10
cccacgcgtccgggagaagcttaaggagcaaaagcaatggcgccgaagaaggggagaaccgggacaaggaaccctgatttggttagggggattggcaagtattcgaggtcgcagatgtaccacaagaggggcatctgggccatcaaggccaaaaacggtggcgttttgccccgccacgatcccaagcccaagcccgaggccccggcccagaagccgcccaagttctaccccgcggacgatgttaagaagcccctcgtcaacaagcacaagcccaaacccgcgaaactcagggctagcattactccagggactgtgttgatcctgcttgctgggaggttcaagggaaagagggttgttttcctgaagcagctcccatctggatggcttcttgtaactggtccctttaagatcaatggg

SEQ ID NO: 14761 - DNA, 437 bp, Glycine max
  Clone ID: LIB3094-038-Q1-K1-B12
tttgaatacattccttggagtttatactgaaagatgggtttgaagatggcgggactgatggtaggcctttccgtcatgctccttttggtctcctctgaggtggcatccacgaatacaaaagaggaggcaaatggagtggatgatgccaaatatcccggtggaagctatggagggggttacccaggtcatggcggtggcggttatcctggccatggcggtggcggttatcctggccatggcggtggtggtggctatcctggtcatggtggtggccaccctggtcatggtggcggctaccctggccgtggtggtggatactgtaggcatggctgttgcggtggccggacatacaacggaggttgcagaaggtgctgctataacgctggcgaagctgttgctgcacaaacctcaagatagactcacgattaagacgatgc

SEQ ID NO: 14762 - DNA, 173 bp, Glycine max
  Clone ID: LIB3094-038-Q1-K1-B8
ttcactactcataaccattcgaatcatttagacaattttcaaaattggccatcctaacccaatctactttttacactacttgatctcatcaataaacatatattcaagttcttgctatcacttcatattaactatcaaaaatgatcatttatataactctatcacatttcata

SEQ ID NO: 14763 - DNA, 199 bp, Glycine max
  Clone ID: LIB3094-038-Q1-K1-B9
accttcaacctcacccttctttcaagactctttgaaaaattctaatgccccttataaaccaaccactcactcttctcatcaatatatcacctctaatttccgacctacatctctattatatttcaaatctcattttacatactccttacatcaatcactacaacaccccctcacaactcacatatatcactacaacttc

SEQ ID NO: 14764 - DNA, 434 bp, Glycine max
  unsure at all n locations
  Clone ID: LIB3094-038-Q1-K1-C11
cccacgcgtccggataaattgtctcactccgacatgattgctgtcctctgggaaatgatggttanggggaccgacacggtggcggttttgattgagtggatactggcgaggatggtgcttcatccggaggtgcaaaggaaggtacaagaggagttggacgcggtggttaggggtggcgctttgacggaggaggtcgtggcggcgacggcgtatcttgcggcggtggtgaaagaggttctgaggctgcacccgccgggcccgcttctctcgtgggcccgcttggccatcactgatacgaccattgatgggtatcacgtgcctgcggggaccaccgctatggttaatatgtgggccatagcaagggacccggaggtgtggctggacccacttgagttcaagcccgagaggttcatgggtctgggaaacgagttttc

SEQ ID NO: 14765 - DNA, 257 bp, Glycine max
  Clone ID: LIB3094-038-Q1-K1-C2
cagagtttgagtggacctgtctcagctaccctttaccttggttattcactactcatggccatttgaatcatgttgtcaaccggcaccattggcttccttatgtcattctactttgtgcactacttgttctcatcaataaagatagattgaagttcttggtgtcattgcatattaactatgaaaaaaggtgattgatataacttgatcacattgcataataaggcaacggatgtttaattcattgtctgattttatat

SEQ ID NO: 14766 - DNA, 496 bp, Glycine max
  unsure at all n locations
  Clone ID: LIB3094-038-Q1-K1-C3
gcagagcagagatctagcgtattctctcgctctttctttcactgtcacagagccacatccatgggcttcccatccgacggcgcctctgcggcccagcccctaaacttcctcatctacggccgcacgggctggattggcggcctcctcggctccctctgccgggcccagggcatctccttccattacggctcgggccgcctcgagaaccgggcctccctcgaaaccgacatagccctcctcaagccctcccacgtcttcaacgccgccggcgtcacgggccgccccaacgtcgactggtgcgagtcccacaaagtcgagaccatccgaaccaacgtcgtcggaaccctcactctcgccgacgtctgccgcgaccacggcctcattctcatcaactacgccaccggttgcattttcgagtacgactccgatcaccccctcggatccggtatcggcttcaaagaaaccgactctnccaatttcaccggttctttttact

SEQ ID NO: 14767 - DNA, 254 bp, Glycine max
  Clone ID: LIB3094-038-Q1-K1-C4
ccacctcgaatgcaataaaagccagacttgcatgattgagacttccccgccacatgcaagacctgacccttttttctctcaaatctacctaaagtatcgcaaaactttgccaatcgcccatttcacgactaatgcccttactcctaatatcgcactcctgtattggaccgatggacagtaatattggtaatggagaatcataaataagtaatcatttaatcagcattcagtagtccatatcaaggaaactccga

SEQ ID NO: 14768 - DNA, 176 bp, Glycine max
  Clone ID: LIB3094-038-Q1-K1-C5
acgagaaaatgtaattttcagcactgtccaggaaatttaaagattgtaattctttatgcctcattttattattaaaaaaaaaaaaaaaaaaaaaaaaaaaaaaaataaaaaaacaaaaaaaaaaaaaatataaatatacaaaaaatatatattaaaaaaacatagcatactatttt

SEQ ID NO: 14769 - DNA, 266 bp, Glycine max
  Clone ID: LIB3094-038-Q1-K1-D1
ccacgctttcacacaaaccttctctccctctatccccattctcttttctaactctttttttgaacctttctaaatcacctccttaatctcatcaccaccaccatcatcatcatcatcttctccaatctctataaccttcaatcactcaaaaccttaccattaaaccaaattaatttacccatttattaaaacaattctccctaaaaaaaaatcaaaaacttcaactttttcttaaccaatctcacaacatttttcaaccttttttc

SEQ ID NO: 14770 - DNA, 391 bp, Glycine max
  Clone ID: LIB3094-038-Q1-K1-D10
atccaagttgaagaagaggtttaagaagattgggttgtggttcggaggaccgaggtttttgagagcgtcttggtgaagaagcttggggatgattttgacagggttgccctggaaaacgatgagtccaatacggtgtcgtcgttgaagacgactcgtggtcggaaattggttaagaatggtgaacttgggaacaaaacggtggttgaagtagctgaaaaatcaaacaccaaaggaaagaagagtgcaagtgaagccgataagagccctggggttagaacttcttccagattggctaaacgtgtgtccaatcaaacgtcttgtaattagatgtttgataaaattgtggttttccttttccttttattatttgccaattagccattctgtgtat

SEQ ID NO: 14771 - DNA, 442 bp, Glycine max
  Clone ID: LIB3094-038-Q1-K1-D12
cggacgcgtgggcagacttcccattccaatttccaagtttttcaaagaaggggagtgatgagcatggagcatttgccaggagaattggtgtccaacgtgctctcaaggttaccatcgaaggtgttgcttctatgcaagtgcgtgtgcaagtcctggttcgatctcataaccgatcctcattttgtttccaattactatgttgtctacaacagtcttcaaagccaagaggagcatctcttggtaattcgaagaccctttttttctggcctcaaaacttacatttctgttctttcttggaacaccaatgaccccaaaaagcatgtttcttctgatgttctaaaccctccctatgaatacaactctgaccacaaatactggaccgaaatcttgggtccttgcaatggcatatactttttagaaggcaatcctaatgtcttgatga

SEQ ID NO: 14772 - DNA, 354 bp, Glycine max
  Clone ID: LIB3094-038-Q1-K1-D2
aaaaaacaaaaacaaaaaaaaaaaaaataaacaaacaaaactaaaaacaaaaaaaaaaaaaaaaaaaaaaaaaaaaaaaaaaaaaaaataacaaaacaaaaaaaaaaaaaaataaaaaaaaaatataaaaaaaaaacaaaaaaaataaaaaaaaaaaaaataaaaacaaaaaaaaaacaaaaaaaaaaataaacaaaaaaacaaaataacaaaaaaaacaaaacaaatacaaacaaactaaataataaacaaaaaaaaaaataataacaaacaaacaaaaaaattaataaaataaaataaaataataaaaaaaacataattaaaacataaaataaaaaaaaaaaaaaaaaaaaa

SEQ ID NO: 14773 - DNA, 321 bp, Glycine max
  Clone ID: LIB3094-038-Q1-K1-D5
cccacgcgtccgcacaaaccctctctccctctaccacccattctcttttctctgtctttctttggccctccctctctcacctactcaatctcatcaccaccaccatcatcatcatgatcttctccaatctctataaccttcaatcactcaaaacctcaccattaaaccaaatgagttgacccatttgtgagaacaattctccctaagaaaaggtcaaaggctgcaactttttcttaaccaatctcacaacattttgcaacgttttttctggttcggtttggttttctgggtcgtcttggaattcaaaaaagattccaactt

SEQ ID NO: 14774 - DNA, 435 bp, Glycine max
  unsure at all n locations
  Clone ID: LIB3094-037-Q1-K1-H11
ggcggctctntnnctgacgcgccggctgttgttgaggagaagacggagttcgacntggtnatcgatgaggtgccgagcaacgctcgaatcgcggtgattaaggcggtgagggcattgacgaacctagcgctgaaggaggcgaaggagttgatcgaagggttgccgaagaagttcaaggaagggatttcaaaggacgaagctgaagatgcgaagaagcaactcgaagaagctggtgccaaggttaccattgcttaaacactgtttagctgcagcatatatgttctgcttcttcttttgttggttgtagttgagttcaccaatacactgtaattttaatttccattttggctggatttcaatcttttatttgtaatgaggaaatatgaagtcctaattttataatatttttttttaatgcgaattaggtgtttgttg

SEQ ID NO: 14775 - DNA, 453 bp, Glycine max
  Clone ID: LIB3094-037-Q1-K1-C9
aaaaaccgggccgacgccacgcgtccgcccacccctccggcgaaaacccccattttttacctctgttcatcgtctaccgcgctttgttttttatcagaactatgattgagctttttaaagtaaaggaaaagcagagagaacttgcagaaaatgcaagtggcggaccacctgttaagaagcaaagtgctggagagttgcgtcttcacaaagatataagtgagctgaatctaccaaaatcatgtaccatgcaattccccaatggcaaagatgatctgatgaactttgaagtttcaattcgacctgatgatggatattacttaggtggcacatttttgttttcctttcaagtgtctcccatctatccacacgaagcaccaaaggttaagtgtaagacaaaggtctatcatccaaatattgacttggaaagaaatgtttgtcttaacatcttacgag

SEQ ID NO: 14776 - DNA, 119 bp, Glycine max
  unsure at all n locations
  Clone ID: LIB3094-037-Q1-K1-D11
gtaatgtangtgttccaagcttcaatgttggtaataatgttaggtccaagtanatatntgattgatttgtaatacaatgattctaatatcctatctccaccattcatattaatatttgc

SEQ ID NO: 14777 - DNA, 442 bp, Glycine max
  Clone ID: LIB3094-037-Q1-K1-D12
cccacgcgtccgtcaagcattgcatcttttttgatttgtagtttgttttgtgctttgggtaaaagttctgccaaatcaagaggggttttaagatcatagtgtgtgttttgcaacaatggctaagttctttgctgctatgatcttggcactctttgccatttccatacttcaaacagtggtaatggctgctaatgaacaaggaggccacttgtatgacaacaagagcaaatatggaagtggaagtgtcaagagttaccaatgcccatcacaatgctcgaggagatgtagccagacccaataccacaagccctgcatgtttttctgtcagaagtgctgcaggacatgcctgtgtgtgcccccggggtattatggtaataaagctgtgtgcccttgctacaacaactggaagaccaaggaaggaggacccaagtgcccttgagct

SEQ ID NO: 14778 - DNA, 353 bp, Glycine max
  unsure at all n locations
  Clone ID: LIB3094-037-Q1-K1-D4
ttgaaacagagaaggggttgacggaaaggaaaaccaaatcaaacccaacccaccttgtccgatctgccaccaggtgtggttgttgtgatttgaatggaggcaagtggaggtggcggtggcggtgcttcaccgtctgcaccagtgaagcaatatctgcacgatttctcgaagctgtttcagtactatctggataaatccactccacattccacgtacagatggattgggactnttgtgatagcatccatctacgttttacgcgttgtttatgtgcaggggttttacattgtctcttatggcctcggaatctaccttctgaatctcttgattgttttctctcccctttggtcgat

SEQ ID NO: 14779 - DNA, 323 bp, Glycine max
  unsure at all n locations
  Clone ID: LIB3094-037-Q1-K1-D7
cccacgcgtccgttccataacgccgtttatctaacccgaattgaagtccaaagaaaagaacatttccgcgagttacagcaataataatattaataacaacagcgacaggggtggcagtaacagtaatagtaattgtaacatggaacatcatcatcacagccaccatgtgaatagtgggttcttgccctgaaaatagtagttattgtatttatttattatagcttttttcttttcttttttttaactttgtacctttttatctcttcaagttgatcaaagagatcggaaattgggcaantnaaataataaataaatttttatat

SEQ ID NO: 14780 - DNA, 406 bp, Glycine max
  Clone ID: LIB3094-037-Q1-K1-E2
ccacgcgtccgcccgtcgctgctccgtaccagtttcactgtttaaatttgagagaaaactctgcaaacatgttggtttatcaggacctccttacaggtgatgagcttctctcggactccttccgttacaatgaaattgagaatggaatgctgtgggaagttgaggggaagtgggttgttaagggagcagttgatgttgacattggtgcaaacccttctgctgagggtggagaagatgagggagtcgatgacgcagctgttaaggttgttgacattgttgatacattcagacttcaagagcaacccgcttttgataagaaacagtttgttaccttcatgaagaggtttatcaagaatttgactcccaagctcgatgcagagaaacaagagttgtttaagaagcacat

SEQ ID NO: 14781 - DNA, 382 bp, Glycine max
  Clone ID: LIB3094-037-Q1-K1-E3
cgtccgtttttctactttgagtcttctggatccttttttttctccttgaactcaaacatggcagaggaggtggttctgctagattgctggccaagtccatttgggatgagggtcaggattgcacttgctgaaaagggtatcaaatatgagtacaaagaagaggacttgaggaacaagagtcctcttctcctccaaatgaacccggttcacaagaagattccggttctcatccacaatggcaaacccatttgtgaatccctcattgctgttcagtacattgaggaggtttggaatgacagaaatcccttgttgccttctgacccttaccagagagctcaagctagattctgggctgattatgttgataagaagatatatgatc

SEQ ID NO: 14782 - DNA, 102 bp, Glycine max
  unsure at all n locations
  Clone ID: LIB3094-037-Q1-K1-E8
atctcctcgaacncaaacatnngcgcgtgtattataaatgctagaggcccccccaaaaccatttgggatgaaggtcatgattgcacttgctgaaaatggtat

SEQ ID NO: 14783 - DNA, 280 bp, Glycine max
  unsure at all n locations
  Clone ID: LIB3094-037-Q1-K1-E9
acgtgccatatcaaanaacccgcngatttataaaagatcaagggcgcaccacccangcacttcaatcatgggtttcaaagcacaagctcgccagcattggggcactctgggcctctggaattggagcaacacttgtggcttattcatgcaaaaagtctccaatgaagccaagtctcaggcttatccatgctaggatgcatgctcaagctctaactttagcagtgctaaccagtgcaactgctaatcaatattatgaaaaacatgatgttcagccaaaacc

SEQ ID NO: 14784 - DNA, 324 bp, Glycine max
  Clone ID: LIB3094-037-Q1-K1-F1
aaaaaaataaaaaataaaaaaaatataaataaacaaaaaaaaaataaaattaatcaatccataaaaaaaaaaaataaaaaactttttaaaaaaaataaaaaataaaaaaaaaaaataaaaaaaatacaaaataaaaaaactaataataaaaaaaataaaaataaaataatctaaaaaaaataataaaaaaaaaaaaaaaaaaaaaaaaaaaataaaataaaataaaaaaaaaaaaaaaaaaaaatcaaaaataaaaaaaaaaaaataaaaaaaaataatatataaaaaaatataaaaataaaaataaataaataatcataatat

SEQ ID NO: 14785 - DNA, 333 bp, Glycine max
  unsure at all n locations
  Clone ID: LIB3094-037-Q1-K1-F11
aaaacatcaacnttccagggctgcagttttcactatgatcgatagacccccaataccagagttggtgaaccatccaaccgtccaaagcaagattcgtgatgagatatcaaaagtgctaaaaggggagccagttacagaatccaacctacacgagctaccatacttacaagccacggtgaaagagacactgagacttcacaccccaattcctcttctggtgccccacatgaacctggaagaagcaaagctaggagggcacactgttccaaaagagtcaaaggtggtggtgaatgcttggtggcttgccaacaacccttcatggtggaagaaccc

SEQ ID NO: 14786 - DNA, 97 bp, Glycine max
  Clone ID: LIB3094-037-Q1-K1-F12
ccatccaaataaaccaaaattcattctttaaattacacataatcactatattataacatccaaacttccaaattaaacaacttctaatcataccata

SEQ ID NO: 14787 - DNA, 263 bp, Glycine max
  unsure at all n locations
  Clone ID: LIB3094-037-Q1-K1-F3
ccgcccacccgtccgcccacccgtccgggganggtagattagttagaacaagatgttgcanctacgctatttttcgattttctccgaaatgcttttgattctcacgctcgtcttcaaaaccccactgagaaaactcgtcatcgtttccctcgatagtgtgaagcgcggtcgcggtcccgtggtggtttccaccgtgggcgccacattgatggtggttctcgcttcgagcctctacagcatggccaagatccagcaactcaccc

SEQ ID NO: 14788 - DNA, 312 bp, Glycine max
  Clone ID: LIB3094-037-Q1-K1-F5
caccataacaatccgctgtacatacagagcttcacggaggccgatgatgctctcaagctccaccacatcgaccattgctcgctcgatgtcgtcgaccagcgagtgaacaatcctaaaaagtctgtgcctatgcttaatgagacgtttttgggactgctttatcctattgaaaactacaaagtatatggatatctgactaatactaaggtgaaatttatcttggtgaccacagatcttgatgttaaacatgcgtatgtaaacgatcttttcaagaggttccatgcctcatatgtacatgcactttcaaaccca

SEQ ID NO: 14789 - DNA, 352 bp, Glycine max
  Clone ID: LIB3094-037-Q1-K1-G1
cccacgcgtccgcccacgcgtccgcttttgcaagctcaatttcggaactgaataattgcgccagatataggaatttactgtcttttttcttactttttttaatacttccaattccatatgtattatgctcggaatttctggaaaaaaaaaagctttgaaattgagctgatttttctttctttccttcaagaatcacatgtattttatatttatatttattcaaactgttttaacgacgtgctaactcttctgaaacccttgcccttcgcttattctccactatatatagccttaatcgcaggaacaggacaattctgaaaaaaaaaatgcttgttcgggtgctatcagcgac

SEQ ID NO: 14790 - DNA, 327 bp, Glycine max
  Clone ID: LIB3094-037-Q1-K1-G11
aaaaataataaaaaaaaaataaaaacaaaaaaacacacacaaaataaaaaaataataaaaaaaaaaaaacaaaaaaaaaaaaaaaaaaaaaatcacaaaaaaataaatacaaacaaaaaaaataaaaaataataaaaaaaaaaaaaaaaaaacaaaaaaaacaaaaaaaaaaataaaaaaaactaataccaatcaaaaaaaaaaaaaataaatcatcttaaaaaaatcaaaaaatataaacatcatataaaaaaaaacattaaaaaaaattaaaaaaacatttttaaaaaacataaaaaaaaataacaaaaaaaaaataattatata

SEQ ID NO: 14791 - DNA, 315 bp, Glycine max
  unsure at all n locations
  Clone ID: LIB3094-037-Q1-K1-G2
ccgtttttcttcctcaaaaacacatcctaatgttcttaccgcggaggtggcgatcgtggcggcggccgtgtcggtttcggacgtggattcngcgggcgaggacccggaggtgacaggggccgaggccggcgccgaggcccccgccgcgaggaagaggagaagtgggtcccagtgaccaaactgggccgcctggtgaaggagggaagaatccgaagccttgaacagatctacctccactcgctcccgatcaaggagcaccagatcatcgacacgctcgtgggtcccaccctcaaggacgaggtgatgaagatcacg

SEQ ID NO: 14792 - DNA, 324 bp, Glycine max
  Clone ID: LIB3094-037-Q1-K1-G7
gtcagtcttcagagctaaaaatgttctcactcttccatctcagtatgtgttgacatggtggacaaggaatgctaaaaccggtacattgttagatgaacatgcatctgaattgccaagtacttctcgtgaatctgtaccagtttgttataacaatttacgacaagaagcaatcaaatatgttgaagaaggtgcaaaatcaatccaaatctatcatgttgccatgagagctctgaaagaagctgctaagaaggtttgcaccataaaaaatcagagttctggaacagcagagggagctacagcaaccaatggaagcaggggtgaatt

SEQ ID NO: 14793 - DNA, 262 bp, Glycine max
  Clone ID: LIB3094-037-Q1-K1-G8
aaaaccccgccgacccacacgtccggctatacaacatacatactaacgtacgctcacatccaacttaatatctcttcaatcccgtcacttataaaaaatacactcccccccccctaacaacacattcacttgaaaaaccctgtccttacccaacataatcaccatgcagcacatacaacttacgacaactatcaatataacaaatagaccaacacccatcacccttccaaacatatcctcatcccaaatgaccaatgaaaca

SEQ ID NO: 14794 - DNA, 417 bp, Glycine max
  Clone ID: LIB3094-037-Q1-K1-H1
gcccccggtaaaatcagttatagtcttcttgtgagacaggaggggcacaaacggattatgtggtcatgttcttggaatccacatggtcacgaatttgcgacaggttcaagggataagacagtgaaaatctgggccatagagagggagtctgtcaagcagcttatgtctttacctcaatttacgagtagtgtaacagcattatcttgggttggtctccatcatcggaagaataatggacttctagctgttggaatggaaaatggccaaatagagttgtggaatctgtcttataacagagcagatgatgggagcatagcagcaccaggtttggctgcttctcttgctgtacgtatagatccttttatatgccatgcgtctaccgtaaaccgtctagcatggaaaaaaaatgaggatgat

SEQ ID NO: 14795 - DNA, 367 bp, Glycine max
  unsure at all n locations
  Clone ID: LIB3094-037-Q1-K1-C7
aaaaccggccgacccacacgtccgcccatcattctttaaaacccccaattctaacctctgntcatcgnctaccncgcttgctttttaatcaaaactatgatcaaccctcccaaaccaaaagaaaatcataaagaactttcagaaaatgcaatttgcggaccacctgttaaaaatcaaagtgcttgaaagtttctttttcacaaatatataagttagcttaatctaccaaaatcattttccatgcaattccccaatgtcaaatataatctcataaactttgaaatttcaatttcaccctaataaggatattacttaaagtgcacattttttattttcctttcaaattttctttcaaactatttcacac

SEQ ID NO: 14796 - DNA, 448 bp, Glycine max
  unsure at all n locations
  Clone ID: LIB3094-036-Q1-K1-H4
acccacgcgtgcgggcggctctgtgtcggacgcgccggcggtttttgattagaagacggagttcnacntgaggatcgtgttaattccaancaacgctcgcatcncgctaattaaggcggtgagggcattgacaaacctagcgctgaaggaggcgaaggagttgatcgaagggttgccgaagaagttcaaggaagggatttcaaaggacgaagctgaagatgcgaagaagcaactcgaagaagctggtgccaaggttaccattgcttaaacactgtttagctgcaacatatatgttctgcttcttcttttgtgggttgtagttgagttcaccagcacactgtaattccattcccattttgtctggatttcaatcttttatttgtaatgaagaaatatgagctcttaattttataattattttttaaaacgcatatgaggtgtttgtgtg

SEQ ID NO: 14797 - DNA, 110 bp, Glycine max
  unsure at all n locations
  Clone ID: LIB3094-036-Q1-K1-H5
cgcgtgcgggcggctctgtggcggacgcgccggcggttgttgatgtatgaagacggagttcgacctggtgatcgatgaggtgcctagcaacgctcgactcncggcgatta

SEQ ID NO: 14798 - DNA, 436 bp, Glycine max
  Clone ID: LIB3094-036-Q1-K1-H7
gcgttgtgttgtgattgaaaatggagagcgatgttgaagaatctatgcggaagaggcccagaaaatatcctttctccgccgattcatcctctcgcaagcaatttgaacaatattctggacggacatttgcaattatgggggaagtgaattttatgcaagatgatgataatcgtttggagattacccgaactaaatttggaagtttgcttaaaagacatggagatttgacagagcggcttgctagggattctgacaagataatatttgagcgtctacagaaggagtttgaagctgcacgagcttctcaaactgaagagatatgtttagacggggaagagtggaatgatggtctactagctacaataagagagcgggtgcatatggaggcggacagaaaagcaatgcaaggtgatgcggacatattagcatgtcccct

SEQ ID NO: 14799 - DNA, 129 bp, Glycine max
  Clone ID: LIB3094-037-Q1-K1-A10
aaaaatataaaaaaataaaattaaaaaacaatccacaaaaaaaaaatcaaacaaaacataaaaaaaaaatatataaaaaataaaaaaaaaaaaaacaaaaaataaaaaaaaaaaataaaaacatcaatt

SEQ ID NO: 14800 - DNA, 400 bp, Glycine max
  Clone ID: LIB3094-037-Q1-K1-A11
cccacgcgtccggacagaagagagcgttctagtcgcaaccctaataagaagaaccagcgggtcaagcgagtgacatccaccagccatgggtcgtatgcacagccgcggtaagggtatatcctcttctgctttgccctacaaaaggacaccccctagctggctcaagatctcttcgcaagatgtggaagaaaatatctgcaagtttgcgaagaagggtttgaccccgtctcagattggtgtcattcttcgagattctcacggtattgctcaggtcaacagcgtcactggcagcaaaatccttcgcatcctcaaagctcacgggcttgcgcctgaaattccagaggatctttaccatttgattaagaaagcaagttcaattaagaaacatcttgagaggaac

SEQ ID NO: 14801 - DNA, 332 bp, Glycine max
  Clone ID: LIB3094-037-Q1-K1-A3
accgacgcgtgcgacggttcatgctattgcttcctatctctttctcatgaccccttcatggagtccactttggtcagcattctactagtcttcaacaacaccctccaaccagagttaatgaggagtgtgcatgtgtaccgccgaggggatggagagaaaagggaagttgagagagagtttgtgttttcagagagcggctcctatggggaaatgcaggctaccccaattcctggattggtaaaatctcgtgtttctgaagcgtgtgaagggcaccgaaatggagtgtggctttgggtatttgcgttccatgccgatcacactccttcaatttt

SEQ ID NO: 14802 - DNA, 260 bp, Glycine max
  Clone ID: LIB3094-037-Q1-K1-A4
aaaaaaaaaaaaaaaaaaaaaaacaaaaaaaaaaaaaaaaaaaaaaaaaaaaaaaaaaaaaaaaaaaaaaaaaaaaaaaacaaaaaaaaaaataaaaaaaaaaaaaaaacaaaaaaacaaaaaaaaaataaaaaaaaaaaaaaaaaaaaaataaaaacaaataaataaaaaaaataaaaaaaaaaaaaaaaataaaaaataaaaaaaaaaataaaaaaaaaaaaaataaaaaaaaaaaaaaaaaaaaaaacaaaaaaaaa

SEQ ID NO: 14803 - DNA, 459 bp, Glycine max
  Clone ID: LIB3094-037-Q1-K1-A6
agccgtcggccaacccttccaaaaaggcctgggcttagttgataagcataactgggtgaggaagaaagaaggagagtgaagaagatggcgtcgagcgcagcggtaccgttttggagggcggcggggatgacgtacataacatactcaaacatatgcgcgaatctgctcaggaattgcctcaaggaaccctacaaggccgaatccctctctcgtgagaagctccattttgttctctccaaatgggtcgacgccaagcctgaaaaacctactattcgttcagacactccaaagcaatgatctggaatagttggaagctataaatgcataaatctttgagatctggaagttcattgtcattttgaacctttctgggatggttaattcctttggttttttctcttcatgaaatggaacatgcacttgaattttgattgcaccggtaatcttgtaataatacaa

SEQ ID NO: 14804 - DNA, 292 bp, Glycine max
  Clone ID: LIB3094-037-Q1-K1-A8
cccacgcgtccgttccagaacgccggcgaccgaacccgaattgaagtccagagaggacaggaatgccgcgagttacagcaataataatattaataacaacagcgacaggggtggcagtaacagtaatagtaattgtaacatggaacatcatcatcacagccaccatgtgaatagtgggttcttgccctgaaaatagtagttattgtatttatttattatagcttttttcttttcttttttttaactttgtacctttttatctcttcaagttgatcaaggagatcggaaattg

SEQ ID NO: 14805 - DNA, 342 bp, Glycine max
  unsure at all n locations
  Clone ID: LIB3094-037-Q1-K1-B2
ggctacttttgattgcttgatgaaaacctatggattcctgacaccagaattctggaangggagtcgcttctccaaatctccattccaagagtacacaaatctactgccaaaaccaacaggaaaaactttattcttgaagaaggaaagggtgaatcctgaattggtagttttgctttatggatgttttaggaactttattactttacatactttgttggttctgtgctttacttttgtgtttgatagacagtatgtctctgtatgcattttgattgtttccaaaatttaattgactgcgcnnnaaaaaaaaaaccaatttttatttttttttccaaaaaataa

SEQ ID NO: 14806 - DNA, 434 bp, Glycine max
  unsure at all n locations
  Clone ID: LIB3094-037-Q1-K1-B3
ggcggcgctgtggcggacgctccggcggtttttgaggagaagacggagttcgacctgntggatcgattatgtgccgagcaacgctcccatcncngtgattaaggcggtgagggcattgacgaacctagcgctgaaggaggcgaaggagttgatcgaagggttgccgaagaagttcaaggaagggatttcaaaggacgaagctgaagatgcgaagaagcaactcgaagaagctggtgccaaggttaccattgcttaaacactgtttagctgcagcatatatgttctgcttcttctttttgtggntgtagttgagttcaccagtacactgtaatttcatttccaattttgcctgatttcaatcttttattttgtatgaggaaaaatgagttcctaattttataatattttttttaaagccgaatgaggggttggtg

SEQ ID NO: 14807 - DNA, 310 bp, Glycine max
  Clone ID: LIB3094-037-Q1-K1-B4
aaaataaaaaaaaaaaaaaaaaaaaaaaaaaaaaaaaaaaaaaaacaaacaaaaaaaaaaaaacaataaaaaaaaaaaaaaaaaaaaaaaataataaaaaaaaacaaaaatataaaaataataaaaaaaaataaaaaaaaattaaaaaaaaaataaaaataaaaaaaataaaaaaatcaaaataaaaaaataaaaaaaaaaacaaaaaacaaaaaaataaaaaattaaataaaaaaaaaaaaaaaaaaaataaaaaataaaaaacaaaaaaaaccaaaaaaaaaaaaaaaaaaaaaaataaataaaaaaa

SEQ ID NO: 14808 - DNA, 335 bp, Glycine max
  unsure at all n locations
  Clone ID: LIB3094-037-Q1-K1-B5
ttggaatccatccctggtagttaatactgtattatgggtttgaagatggcgttactgatccgangcctttccctcatcctccttttggtctcctctgaggtggcatccacgaatacaaaagaggaggcaaatggagtggatgatgccaaatatcccggtggaagctatggagggggttacccaggtcatggcggtggcggttatcctggccatggcggtggcggttatcctggccatggcgggggtggtggctatcctggtcatggtggtggccaccctggtcatggtggcggctaccctggccgtggtggtggatactgtangcatggctgttg

SEQ ID NO: 14809 - DNA, 81 bp, Glycine max
  unsure at all n locations
  Clone ID: LIB3094-037-Q1-K1-B6
agccttccgnnaaaaaaaaaaaaaaaaaaaaaaaaaaattatttaaaaaaaaaaaaaaaaaaaaaaaaangggagattttt

SEQ ID NO: 14810 - DNA, 214 bp, Glycine max
  unsure at all n locations
  Clone ID: LIB3094-037-Q1-K1-B7
gttttaaatataaaaatcattagcatttaatttgttaattccggtgaagctnctccgggaggctttttttcacatntttactgtcccacctcaacaactgaaaactctacaaaagaatcattatctaatgccatgacaactctaactgtcaactctaaagcatcacctacacttccaaggattgcaaaacatctcaactttatcatttttttat

SEQ ID NO: 14811 - DNA, 343 bp, Glycine max
  unsure at all n locations
  Clone ID: LIB3094-037-Q1-K1-B8
caaaccgaccacgcgtccgggcggctctttatctcattcttcaaccctttagtaacataacaccaaaatccacnaagtcggctttttttaacaaatcaacactcccccaccacacataaatactgtcaaaaccaacacgaaacaatctaataatgaagcaaaaaaaattatataatcgatttcctacaattgctttatagatattttaaaaactttattactttacatacttaatcaattctaagcatcactttccaattttataaacgctaaaacatctgtatacatcatcatatattccaagctttaatttactgcggtttaaaataatatcaccaataca

SEQ ID NO: 14812 - DNA, 383 bp, Glycine max
  unsure at all n locations
  Clone ID: LIB3094-037-Q1-K1-C2
cggacgcgtgggcggacgcgtgggctgcttacaaagcaagcaaaacaaaagacgcagtnagggagaggatgaagagggtgcttctgctgcttctggccttcactgttcttctcatgttgccagaagcttctgctacaaagtttactgttggaaacaaccagttttggaaccccaatattaactacactgagtgggctaaaggcaaacatttctaccttggtgactggctctattttgtgtacgataggaaccaagcgagcgtgttggaagtgaacaagacagattatgaaacatgtaactctgatcatccactcacaaattggactaagggagctggaagagacgtggttccattgaatgtaacaaaaacttactacattatc

SEQ ID NO: 14813 - DNA, 421 bp, Glycine max
  Clone ID: LIB3094-037-Q1-K1-C4
agccttcgcaacccttaacccttccaaaccaaaaaaagtctcacccttgggccaaaaacccgcaagggggggtaggcaaattaagaacaaaccataccccaagtcacggttttgccgtggtgttcctgatcccaagatcaggatttacgatgttggtatgaagaagaagggtgttgatgaatttcctttctgtgtccatctggttagttgggagaaggaaaacgtttctagtgaggccctggaagctgctcgtattgcttgcaacaagtacatggccaaatttgctggaaaggatgctttccacttgagagtcagggtgcacccattccatgttcttaggatcaacaagatgctttcgtgtgccggagctgataggctccaaactggaatgagaggtgcttttggaaagccacagggtact

SEQ ID NO: 14814 - DNA, 360 bp, Glycine max
  Clone ID: LIB3094-037-Q1-K1-C5
ccccctacctatagcacaaaatatgggtaccatttattttgaagaacctaactttgaaaattaaaaaccaagtttttcttcttcttcaacaaaagggaacaatagccacaactcagacaagccaaagcaaccacagagaggtcttggatttgctcaatttgagaaaatcagattacatggctatcacccttctctgcacgctccttacccttctaatttttccaaccaagatccaagagtgcaaatagcatattcatcggtgccatcatcttctttttcttactcatcatcatacgccgctttcttatgaatccacacccaacatcatgaatggccctatcccaatttaaaaaacaaaca

SEQ ID NO: 14815 - DNA, 357 bp, Glycine max
  unsure at all n locations
  Clone ID: LIB3094-036-Q1-K1-G8
ccctcttattatttncatttaatatctctccttctttaaatcttcctcccaattataacttaattttttatctattcctaataaacacatttcttcaaaacaattaccttaaatccccaacctttctcaaaatcttcaccactattttctatttaattttccaaaattttttcattcatcatacattatactatttcaacttaattacctatattaacttataaatacttttttaaaaatatattttattcaacacaacatatatttcttatttatcaatacacatccttctaaataaataaacatttaacaaaacatatttttcttaacaatttcaattacatattataccattat

SEQ ID NO: 14816 - DNA, 400 bp, Glycine max
  Clone ID: LIB3094-036-Q1-K1-D12
cagacaagcatccagcgcagcatccaccacgtccgcaaaaatcccacaccgctggcttcgctggcccctcccctctctcacatcaaatccatttcgccaaatttcacatcactcttcacaaacagaaaaatagtcctccgccgccggcaatcctaggtttccggtgacgatgctcccctacgcttccatcccggaggccgtggcggcgctgggccgcaacctcaccttcgcggagaccctctggttcaactactccgccgccaagtccgattacttcctctactgccacaacattctgttcctcttcctcgtcttctccctcgtccccctccccctcgtcttcctcgaattcaagcgcttctccttcgtctcttcccacaagatccaaccaaaagtccgc

SEQ ID NO: 14817 - DNA, 454 bp, Glycine max
  Clone ID: LIB3094-036-Q1-K1-D2
acccacccgtcctcttacccttttggtcactatttttccatcttccacctgctgaaagaaactccgaattgtgaattgttgtaaagaaaaaaaccgaaaacactgacactgttattctctgaattttctcaccatctacaactgaagttttaaccaatatggaaactgaaaagtctaatgtttcaaaggctgaagaatttaaactccttgccaatgaagtgttcaatgctcgaaaatactcccaagccattgatctatatacacaatcaattgagctgaacagtcaaaatgcagtttacttttctaatcgtgcctttgcccatcttcggcttgaggaatatggtagtgcaatacaagatgccacaaaggctattgaaattgatcctaaatattcgaagggttattacaggcgaggcgctgctcatcttggactggggaaattcaaggaagcact

SEQ ID NO: 14818 - DNA, 428 bp, Glycine max
  Clone ID: LIB3094-036-Q1-K1-E10
gtcagtcttcagagctaaaaatgttctcactcttccatctcagtatgtgttgacatgctggacaaggaatgctaaaaccggtacattgttagatgaacatgcatctgaattgccaagtacttctcgtgaatctgtaccagtttgttataacaatttacgacaagaagcaatcaaatatgttgaagaaggtgcaaaatcaatccaaatctatcatgttgccatgagagctctgaaagaagctgctaagaaggtttgcaccataaaaaatcagagttctggaacagcagagggagctacagcaaccaatggaagcaggggtgaattgcttgtagcagatgaagatgttccaagcaatcaatctgtggcggagaagcaaaagaaaataggagagttgactgctgagttagaggccacaaatcaacgatgtg

SEQ ID NO: 14819 - DNA, 445 bp, Glycine max
  Clone ID: LIB3094-036-Q1-K1-E11
cccacgcgtccgcccacgcgtccggtttcgttacgttctgcttcgcgtggacgaacaagaagtgtaagttttcattcaatggccagcgctcagctctcagcaatatcttcgtcgatctctacggcgtcgtttgaagggcttcgaccttcggctgttcagtttgcttccgcgggcagaattagaattggcaatctctcccaaaggtctttccggggcttggttgtcaaagccgccaccgttgttgcccccaaatacaccgcgattaagcctctgggagacagagtgctgataaaaattaaggaagcagaggagaaaactgagggtgggattttgcttccatcaactgctcaaacgaagcctcaagggggtgaggtggttgctgttggagaaggaaagacaattgggaagaacaatgtagagattagtgtgaagactggtgcacaag

SEQ ID NO: 14820 - DNA, 344 bp, Glycine max
  unsure at all n locations
  Clone ID: LIB3094-036-Q1-K1-E12
tcccactcattttttttctttactttctacttcactttcacagaacaatgtttaattttttataaattcaacccccacccctcatctctcancaatatcttcctcaatctctactgaataatatgaactccttctaccttactcttataactttccttactcttacataattaaaatatcctatctctcccaaaaatccttccagtccttctttatcaaaacctacacctaatatacccccatatacaccactaataaacctctctaacacatatttcttataaaaattaaaaaatcaaatcataaaacttattatcttattctacttccatcaacttctcaaa

SEQ ID NO: 14821 - DNA, 449 bp, Glycine max
  Clone ID: LIB3094-036-Q1-K1-F10
cacgcgtccgcaaccatttccgactcatctcaagaccttgtccaacttttcgatagtgctttatatcattgtcagtgtttcatcttcaatcctccccctccaaccccctaatctactacaaataacaccaaacatactccttctttgacgtccgccgttcacaaatctagcatacctttacccaatttgaaaacaaagaaaaatgctaaacagacagcttccaaagacagccacttctcggatgcactcaacaatctcatatagcaaaccatacaagctattaaagctctggagtctatatccccacccacttccgatgatttatataaggataccttgattgaatattcaatcaaacaatctgaccatctttctctctctcaggacatggaatctattgtgtagaccatgatacatcaacttctttccaatgatattcttcattaacc

SEQ ID NO: 14822 - DNA, 425 bp, Glycine max
  unsure at all n locations
  Clone ID: LIB3094-036-Q1-K1-F11
atttcctactcatctcaagaccttttccaacttctcgatagtgctttnnatgatgttcagtgtttaattttcaatcctccccccccaacccgtgaagcaactgctaatagcaagaatgagagtccttctttgccgtcgggggttcaaggattgggcatgggtttacccgatttgagaacgaataaaaaggggaaacagaaggcttccaaagacagccacgtgtcggaggcgctcaacaagctcagggagcagaccaaagaggctgtgaaggggctggagtctatatccccacccactgccgatgatttatgtaaggatgccttgatggaagattgngtcaaacaatttgagcagcttgctggctctcaagacatggaatctattgtggagaccatgatgcatcaacttctgtccaaggatattct

SEQ ID NO: 14823 - DNA, 348 bp, Glycine max
  Clone ID: LIB3094-036-Q1-K1-F12
gacggccactcgtccgcccacgcatacgaaaaaaatgggttcttcatgttccataaggacagagtgtgtgattttggcataaatgacctctgaagcactctgtgccaaccttctgtagactaatgtatgtacaacatggcccaaaactacgtgcccacatggtcctgtgatcacatgacatacttaagtggacgttatcacattcagcttcatctggacaagtacactgctactggcttccaatccaaaggggaatacttgtctgatcacttcacacatgacataaatatggttcctgaaaattcacctggcacatgcactgctttgtattcatcttcccaaaatgcg

SEQ ID NO: 14824 - DNA, 418 bp, Glycine max
  Clone ID: LIB3094-036-Q1-K1-F3
gcgcaaagacatccttctcctgtatgtggctcctctcactctcggaattgaaactgttggtggagtcatgtcatatttgattcccacaaacactgttatcccaaccaagaaatctcatgtgttcaccacctatcatgaccagcagactacagtctccattcaggttttcgaaggcgagaggagtctcacaaaggattgccgccttcttgggaaatttgatctgtctggaattcctccagccccaaggggtacgcctcaaattgaagtgaccttctaagttgatgccaactgcattctaaatgtgaaagcagaagacaagggcactggtaaatcagaaaagatcaccattacaaacgaaaagggacgtcttaaccaggaagaaattgagagaatggttcgcgaagcagaggaatttgca

SEQ ID NO: 14825 - DNA, 378 bp, Glycine max
  Clone ID: LIB3094-036-Q1-K1-F4
cccttatctttctctcttctctctccccgtccaaaccctaactccctaccctattccgcgttctctgatccatcatgaaaggaggaaagtccaacaccgaatctaagagagccgatgccaaacttgctgtgaataagaagggcgccgccaccaagactaggaaacccgccggaaaggggaaggcagcgaaagatcctaacaagccaaagaggcctccaagtgctttcttcgttttcatgtaattataatatattgttatctctacgattcatttgacttccgatgcgctctcttatctttcctccgaataattttatcgtcaaaacttttatccttgtccaattgtaggtccacgcgttctttacctgttgttgtttg

SEQ ID NO: 14826 - DNA, 442 bp, Glycine max
  unsure at all n locations
  Clone ID: LIB3094-036-Q1-K1-F5
caaccatggccgactcatctcaagaccttgaccaacttctcgatagtgctttggatgatgttcagggcttcaacctcaatcctccccctccaagtggggaagcaactgcgaatagcaagaaggagagtccttctttgccgtcgggggttcaaggattgggcatgggtttacccgatttgagaacgaagaaaaaggggaaacagaaggcttccaaagacagccacgtgtcggaggcgctcaacaagctcagggagcagaccaaagaggctgtgaaggggctggagtctatatccccacccactgccgatgatttaggtaaggatgccttgatggaagattgggtcaaacaatttgagcagcttgctggctctcangacatggaatctattgtggagaccatgatgcatcaacttctgtccaaggagattcttcatgaaccaat

SEQ ID NO: 14827 - DNA, 438 bp, Glycine max
  Clone ID: LIB3094-036-Q1-K1-F6
tctcccactcttccgcccacacgttctaaaaaaatgggttcttcttcttccatatagaccgggtgtttgattttagcatcactcccctcttcagcactctgtgccaaccctcgtagaccaatggatgtacaatttggccgaaactacatgcccacatgggcctttgatcacatcaaatacttcaatggaagttctgacattcagcttcatcttgacaagtacactggtactggcttccaatccaaagggtcatacttgtttggtcacttcagcatgtacataaagattgttcctggagattcagctgtcacagtcactgctttctatttatcttcccaaaatgcggagcacgacgagatatactctgagttcttggggaacagaacaggacaaccttacattttgcaaacaaatgttttcacatgaagcaagggtgac

SEQ ID NO: 14828 - DNA, 409 bp, Glycine max
  Clone ID: LIB3094-036-Q1-K1-G10
tcccactcttccgcccacgcgtcctaaaaatatgggttcttcttcttccatatgggaccgtgtgtttgattttggcatcactgccctctgcatcactctgtgccaaccctcgtagaccagtggatgtacaatttggccgaaactacgtgcccacatgggcctttgatcacatcaaatacttcaatggaggttctgacattcagcttcatcttgacaagtacactggtactggcttccagtccaaagggtcatacttgtttggtcacttcagcatgtacataaagatggttcctggagattcagctggcacagtcactgctttctatttatcttcccaaaatgcggagcacgacgagatagactttgagttcttggggaacagaacaggacaaccttacatttttcaaac

SEQ ID NO: 14829 - DNA, 447 bp, Glycine max
  Clone ID: LIB3094-036-Q1-K1-G3
gttgtgtccaacccattggggaagtctggaggtgccctcatccaccaattaatgatattggctttggggtcactagctaattaaaccccatacttgggaggagtgcttctgctgattgtttctgcctggctagcagcggcaaaatccttggatacccaatttactgcattgcgtaaagaggaagaactcgagaaagagatggaacgagcagccgccgtcaagataccagtggtggctgagactgagagtggaaatggttctcttgcaactggttcaccactgaatccatcctcaggtgactcctcaagcagtccatctgaagcctcaactcctcgcaattaaaatgtgccttctttctgtgagaaattgcctcacagaatgagcaaatagagctcttttgagagcagtgttaggtgaaactatttgttgtaggtttatatataagct

SEQ ID NO: 14830 - DNA, 298 bp, Glycine max
  Clone ID: LIB3094-036-Q1-K1-G4
atttgaaggttgttttgtgcttatagataaaagttctgccaaatcaagaggggttttcggatcatagtgtgtgtgtgtgtgttaaacaatggctaagttctttgctgctatgatcttggcactcattgccatttccatgcttcaaacagtggttatggctgctaatgagcaaggaggccacttgtatgacaacaagagcaaatatggaagtgggagtgtcaagagataccaatgcccatcacattgctcgaggagatgtagccagacccaataccacaggccctgcatgtttttctgt

SEQ ID NO: 14831 - DNA, 440 bp, Glycine max
  unsure at all n locations
  Clone ID: LIB3094-036-Q1-K1-D11
gcaaatacttttaatcctcttatatcttactcaaacctgngacatccactatagatacagtatcattatcactttacaaccccccccccccatcaccttatccatcaataaattaaattctccaatctttcttcaattatcttaaacttttaaatctattctcataaataccaatctctttactttcataattaaaccctcatccctttatcctttttctccatttcttttctttttcaatatattatatttttccatttacttctaccatttccttcacctaaactaatatncattatattcccattaatttctaatccatcttaaatcatctttccaaaaattaaatcaaaaatacttcctcaaattttctttccttcaaattttccaacttactatataaatccccncccccaataaattttaattccattaaccca

SEQ ID NO: 14832 - DNA, 348 bp, Glycine max
  Clone ID: LIB3094-036-Q1-K1-A10
acacacaccccttctttaatttgtttaaaatatctgtgaataaaaaagctttgaaatattggatgcaaggactgtataaaatgaaagcttctgttcttacacttttaatacctcaagtccttactgtacttaacaccatcagaggttgaaggccaaactcatattaatctttttgtttatctatcaattactatttactttcatgaaatcctatttgtattactaaaactcacttttttattcaaataaactccttaatttaatttttagatgacttctttaattttaattttttgaaactttgtcggtgtgatttttcttcataaattcattttattgttttcaaaa

SEQ ID NO: 14833 - DNA, 442 bp, Glycine max
  Clone ID: LIB3094-036-Q1-K1-A4
gttcatttctacacatccctagctctgtcgttccgtcgttgacgatggcgtttcgggtgcgaagccctgacctccgctctctctttcttctctctctcttgtccatcgcttccgccaatgtcttcttcgaagagcgtttcgatgacgggtgggaaaatcgatgggttaaatcagattggaaaaaagatgagaacgtggctggggagtggaaccacacctctggtcaatggaatggagacgctaatgacaaaggtattcaaaccagtgaggattacagattctatgctatttcagctgagtaccctgaattcagcaacaagggtaagacactagtctttcaattttctgttaagcacgaacagaagcttgactgtggtggtggctacatgaagttgctcagtggggatgttgatcagaagaaatttggcggggatactcctta

SEQ ID NO: 14834 - DNA, 437 bp, Glycine max
  unsure at all n locations
  Clone ID: LIB3094-036-Q1-K1-A5
nttcatttctacacatccctagctctgtctttccgtcgntgaccatngcntttggggttcgaagcctttacctacgctctccctttcttctctctctcttgtccatcgcttccgccaatgtcttcttcgaagagcgtttcgatgacgggtgggaaaatcgatgggttaaatcagattggaaaaaagatgagaacgtggctggggagtggaaccacacctctggtcaatggaatggagacgctaatgacaaaggtattcaaaccagtgaggattacagattctatgctatttcagctgagtaccctgaattcagcaacaatggtaagacactagtctttcaattttctgttaaacacgaacagaatcttgactgtggtggtggctacatgaagttgctcagtggggatgttgatcaaaagaaatttggcggggatact

SEQ ID NO: 14835 - DNA, 416 bp, Glycine max
  unsure at all n locations
  Clone ID: LIB3094-036-Q1-K1-A6
gggccgacccacgcgtcctcccactcttcctcccactcttttttttttttttcaataacaaacanctctnaagacttatgttaattcttatttaaccccccccccccatctttactntacttttacaaatcccataaaaatcttcacaccctaaattttcacattcatccaataactactaaatgttttaacaactaaattttttaaatcttcttaccttataaacatatcataacaacttttcatcacaattaccaattattattattacctattttctaataatcatcttttacctcacaaataattaaatctcattataacttatatcttaaattcattcctattttaaaaaaatctcaattattttattaactttacacttcattatatttcttattttaacatccccatta

SEQ ID NO: 14836 - DNA, 252 bp, Glycine max
  unsure at all n locations
  Clone ID: LIB3094-036-Q1-K1-A9
gtccgcccacgcgtccgcccacccttccgcccactcttccgttgacgcgtggggttctataggctgcgaccggtgtgtccttgagttctaaggagacacgaacctacgtctggtggatgaatcatgaccgtgtgatcagagcgtgattaacggcccgggtgagtttctctttggagtagtctcatctttggctgtagaggatcgttcttaggacacttncatgtngcctggatggtcatacggttgtctgac

SEQ ID NO: 14837 - DNA, 444 bp, Glycine max
  unsure at all n locations
  Clone ID: LIB3094-036-Q1-K1-B11
gcgagacagcanagcaaaaatctaccgtattctctcgctctttctttcactgtcacanacccagatccaggggcttcccagccaacggcgcctctgcggcccaacccctaaacttcctcatctacggccgcacgggctggattggcggcctcctcggctccctctgccgggcccagggcatctccttccattacggctcgggccgcctcgagaaccgggcctccctcgaaaccgacatagccctcctcaagccctcccacgtcttcaacgccgccggcgtcacgggccgccccaacgtcgactggtgcgagtcccacaaagtcgagaccatccgaaccaacgtcgtcggaaccctcactctcgccgacgtctgccgcgaccacggcctcattctcatcaactacgccaccggttgcattttcgagtacgactccgatcaccccc

SEQ ID NO: 14838 - DNA, 445 bp, Glycine max
  Clone ID: LIB3094-036-Q1-K1-B3
cccacgcgtccgcggacgcgtgggggtttttgtggataagagtgagctataatggctgcgaggagaccgggtttaattgctttgtttgatgttgacgggactcttacagctcccaggaaggtggtcacaccggaaatgttgacattcatgcaaaaactacaaagggttgtaccggttgaagttgtggggggtcctacccttataaaaatttaaaaccacctggccagcacagttaccaatgagtatgattacgtattttctgagaatggtcttgtggctcacaaggaaggaaagctcattggaactcagagcttgaagtcattccttggtgaagaaaagctcaaggagtttattaactttacacttcattatattgctgatttggacatccccattaagaggggaacatttatggagttccgtagtgggatgctgaatgtctcac

SEQ ID NO: 14839 - DNA, 251 bp, Glycine max
  unsure at all n locations
  Clone ID: LIB3094-036-Q1-K1-B6
aaaaaccctnnaaccagactaaatttacttttcaaaaaaacaacccacntcccacctattacaaactttttaaataacatatacattaccaacatataaattatcatcccatacaaaaaacaatttcctaacaataataaaatacatatataatcttaactaccctaaaaaaacaacaacttattacaacctaaattctacataccaatacccaacattttataaattttacaaaccaccttcacaaaata

SEQ ID NO: 14840 - DNA, 448 bp, Glycine max
  Clone ID: LIB3094-036-Q1-K1-B9
cggacccctggaaaaaccaattttcactgttttttttagaaatggaatcccagctatcgggagtggcctcgctcgtatgataagttgcgctttgatccaagtaaaccaaaatgcaggctgttagttacacatgatgactatagtataacgtccaaacttccaagggagagaacttctgttgttaccatacttagggatccagttgaccgtgtttttagtacttatgaattctcaatagaggttgcagctagatttttggtgcatccaaacttgacgtccgcaacaaagatggctttacgcctaagctctaagactaaaggagtaagcacactggatatctggccttggaagtatctggttccatggatgagggaagacctatttgctaggagagaagctaggtacagtaggggactgaatatcattgaaagcaatgattcttatgaca

SEQ ID NO: 14841 - DNA, 153 bp, Glycine max
  Clone ID: LIB3094-036-Q1-K1-C1
taatttaaaaaaaaccaaacccccccaattcatattttcacacttaattaaaaactttcatcccttgttacaaatgcttaatttgctaataccttccctattcataaaaacaacttcctaactatacacacttaaaattcttaaaccacacct

SEQ ID NO: 14842 - DNA, 451 bp, Glycine max
  Clone ID: LIB3094-036-Q1-K1-C11
cccacgcgtccgcccagcgtccgaattcctcaaccacacttgccatatcaaagaaaagaggatcagcatcagatcaaagatacaacatggaggcacttcaatcatgggtttcaaagcacaagctcgccagcattggggcactctgggcctctggaattggagcaacacttgtggcttattcatgcaaaaagtctccaatgaagccaagtctcaggcttatccatgctaggatgcatgctcaggctctaactttagcagtgctatccggtgcagctgcttatcattattatgagaaacgtgatgttcagccaaaaccagaggcagattatattattcctgctcccaatgtcacccagatggttgaatatgaacttcaatgtcctttctaaaaattaaaaataaaactgtaggggtcatgttattaagattaggagatattcctatcatcgag

SEQ ID NO: 14843 - DNA, 51 bp, Glycine max
  Clone ID: LIB3094-036-Q1-K1-C2
cgacgttctcgatagcacctggaaccaaccctttccttcaatttttggccc

SEQ ID NO: 14844 - DNA, 446 bp, Glycine max
  Clone ID: LIB3094-036-Q1-K1-C3
ggcaaagatggggatgtggcactcttctttggactctcaggtaccggaaagaccactctgtcgaccgatcacaataggtatctaatcggagatgatgaacactgttggggtgacaatggtgtctccaacattgaaggtggttgctatgccaaatgcattgacctctcacgggagaaagagccagatatttggaatgcaatcaggtttggcacagtgttggaaaacgtggtgtttgatgagcacgaccgagaagttgattactctgacaaatcagttacagaaaatactcgtgctgcttatcctatagagtacattccaaatgcaaagttaccttgcgttggccctcatccaaagaatgtcatacttttggcatgtgacgcatttggggtactcccacccgttagcaagctaaacctggcacagaccatgtaccatttcattagtgg

SEQ ID NO: 14845 - DNA, 330 bp, Glycine max
  unsure at all n locations
  Clone ID: LIB3094-036-Q1-K1-C5
actgcataaatttaagagaaatgtcttaatacatattggcccacccacacccccttacannttattatcttctctcnaactccttccnttacaattaaatttataatgtaatgctctctcaattttacgagaattgtgttgttaaaggagcagttgatgttgacatttttgcaaacccttctgctgatggtggagaatattagggagtccatgacgcaactgttaagtttgtttacatttttgatacattcagacttcatgatcaacccgctttttataaaaaacattttgttaccttcattaagaagtttatcaaaaattttactccca

SEQ ID NO: 14846 - DNA, 445 bp, Glycine max
  Clone ID: LIB3094-036-Q1-K1-C7
gcgcccacgcgtccgtcaagcattgcatccctcttgatttgtagtttgttttgtgctttagagaaaagtggtgccaaatcaagaggggttttaagatcatagtgtgtgttttgcaacaatggctaagttctttgctgctatgatcttggcactctttgccatttccatacttcaaacagtggtaatggctgctaatgaacaaggaggccacttgtatgacaacaagagcaaatatggaagtggaagtgtcaagagttaccaatgcccatcacaatgctcgaggagatgtagccagacccaataccacaagccctgcatgtttttctgtcagaagtgctgcaggacatgcctgtgtgtgcccccggggtattatggtaataaagctgtgtgcccttgctacaacaactggaagaccaaggaaggaggacccaagtgcccttgagct

SEQ ID NO: 14847 - DNA, 322 bp, Glycine max
  unsure at all n locations
  Clone ID: LIB3094-036-Q1-K1-C8
ccctttttattttttccttccactgcccttcacatgaaaagttttctttataaaaaacccttccaataccatantntntnttttncaacaatttctcaattctttgctcctattatcttgncactcttntccatttccatacttcaaacacttgtaatttcttctaatgatacaacaccccacttatattacatcaatatcaaacttcataatcctattttcaacatttaccaattcccatcacaattctctacgaaattttaccaaacccaataccacaaacccttcatttttttcttccataaatacttacttacattcc

SEQ ID NO: 14848 - DNA, 234 bp, Glycine max
  Clone ID: LIB3094-036-Q1-K1-A1
gggaaacctgctgttcttacacgtgttgtgtatagcatgactgacaacttgagaccaactggtgctgagtcaacatatgtcgccaatgctgttttagatggaagtgatgccattcttctgggtgctgagactttacgtgggttgtaccctattgagactatatctactgttggcagaatttgttcagaggctgagaaagttttcaatcaagacctttattttaaaaagacagtc

SEQ ID NO: 14849 - DNA, 327 bp, Glycine max
  Clone ID: LIB3094-035-Q1-K1-E6
gtcacaccggaaatgttgacattcatgcaagaactacgaaaggttgtaacggttggagttgttgggggttctgaccttataaagatatcagagcaacttggcagcacagttaccaatgagtatgattacgtattttctgagaatggtcttgtggctcacaaggaaggaaagctcattggaactcagagcttgaagtcattccttggtgaagaaaagctcaaggagtttattaactttacacttcattatattgctgatttggacatccccattaagaggggaacatttatggagttccgtagtgggatgctgaatgtctcacctatt

SEQ ID NO: 14850 - DNA, 211 bp, Glycine max
  Clone ID: LIB3094-035-Q1-K1-F1
agaaaataaataattttatatcctacatttttttttttattatttatatttttttttttaattatataataaaataactcttttttttttaaaaaaattattatttttttttaaatattatttattatttatatttttatttttatattttttttaatataattattttttttatataattaatttatttatattaaaaaattttttttat

SEQ ID NO: 14851 - DNA, 94 bp, Glycine max
  unsure at all n locations
  Clone ID: LIB3094-035-Q1-K1-F10
aaaaaaataaaaaaaaaattttattaaaaaaaaaaaaaaaaaaaaaacgattcgtttaatttaaagaaggccgggcaaacaaaaaanannaana

SEQ ID NO: 14852 - DNA, 262 bp, Glycine max
  unsure at all n locations
  Clone ID: LIB3094-035-Q1-K1-F11
gaaaagaaaaaaaaaaaaaaataaataaaaaaaaaaaaaaaaccgatcgttaatnaaaagggcagcccaccaaaanaaaaaaaaaaaaaaaaaaaaaaaaaaaaaaaaaaaaaaanaacaaaaaaaaaaaacaaaaaaaaacaaaaaaaaaaaaaaaaaaaaaaaaaaaaaaaaaaaacaaaaaaaaaaaaaaaaaaaaaaaaacaaacaaaaaaaaaacaaaaaaaacaaaaaaaaaaaacaaaaaaaaacaccacgaccc

SEQ ID NO: 14853 - DNA, 408 bp, Glycine max
  unsure at all n locations
  Clone ID: LIB3094-035-Q1-K1-F2
aaaaaaaaaaaaaattaattaaaaaaaaaaaaaaaaacaccaagcttttattaaaaangcccnccccacccaaanaanaanaaannnnnnaaaaanaaananagaaaagaaactgaaaaaaaaagaacaaaaaaaacaaaaaaaaaaaacaacagacaaaaacaaacacacaaacacccacgacccaaaaacaaaaaaaaaaggaaacgaaaaaaacaaccaaccaaataaaccaacaaaaaaacgcaacaaaaacaaaactgcaacaaaaaaaaaccaaaaaaaaaaaaacccccggaaacaacaataaaaaaaaaccattaaaaaaaaaattaaataaaaaaaatcaatccaaaaaaaaaaaaaataaaaaaaaaaatactttaaaaaaataaaaattaaccaact

SEQ ID NO: 14854 - DNA, 445 bp, Glycine max
  unsure at all n locations
  Clone ID: LIB3094-035-Q1-K1-F4
cgcgtcgctgctccgtaccacttttactgttggtaggaaaatgacgtnactgatgctagggctttttctaatgctgcttttgctctcctctgaggtggcatccacgaatacaaaagaggaggcaaatggagtggatgatgccaaatatcccggtggaagctatggagggggttacccaggtcatggcggtggcggttatcctggccatggcggtggcggttatcctggccatggcggtggtggtggctatcctggtcatggtggtggccaccctggtcatggtggcggctaccctggccgtggtggtggatactgtaggcatggctgttgcggtggccggacatacaacggaggttgcagaatgtgctgctataacgctggcgaagctgttgctgcacaaactcaagataagactcacgattaagacgatgcagttctacttaat

SEQ ID NO: 14855 - DNA, 416 bp, Glycine max
  Clone ID: LIB3094-035-Q1-K1-F8
gcgaccgacgaatatttggtggttggagccatcccaaaaaaacttttgaaaccatgtgggggacgcgggaccttcttacaggtgatgagcttctctctgactccttccgttacaaggaaattgagaatggaatgctgtgggaagttgaggggaagtgggttgttaaaggagcagttgatgtagacattggtgcaaacccttctgctgagggtggaggagaagatgagggagttgatgatgcagctgttaaggttgttggacattgttgacacattcagacttcaggagcaacccgcattcgataagaagcagtttgttaccttcatgaagaagtttatcaagaatttgactcccaagctcgatgcagagcaacaggagttgtttaagaagcacatcgagggagcaactaaatacct

SEQ ID NO: 14856 - DNA, 374 bp, Glycine max
  Clone ID: LIB3094-035-Q1-K1-F9
tctgttcattattatgtgcaagcacaccttttaatttattaatatcgggaacctataatcgtgcggtttgcatcaaaaaagccaggggcgacctaataccacttgtataaaaggttttagacatgactggtctgaaattatcagccctgaatcagattaagttgctaactattatatcatccattgatgatctgaactaccctgagaagacaaatacttattacattgtaaatgctccatacatattttctgcttgttggaaggttgtgaagccacttttacaagagaggacaagaagaaaaatacaggtgttaccaggttgtggacgagatgagctattgactatcatggattactcgtctctaccacatttc

SEQ ID NO: 14857 - DNA, 375 bp, Glycine max
  Clone ID: LIB3094-035-Q1-K1-G12
gacccacgcgtccgcaaagacatccttctcctggatgtttctcttctcactctcggaattgaaactctgcgttgtgtcattacaaagttgattcccacaaacactgttatcccaaccaagaaatctcaggtgttcaccacctatcaggaccagcagactacagtctccattcaggttttcgaaggcgagaggagtctcacaaaggattgccgccttcttgggaaatttgatctgtctggaattcctccagccccaaggggtacgcctcaaattgaagtgaccttcgaagttgatgccaacggcattctaaatgtgaaggcagaagacaagggcactggtaaatcagaaaagatcaccattacaaacgaaaaggga

SEQ ID NO: 14858 - DNA, 300 bp, Glycine max
  unsure at all n locations
  Clone ID: LIB3094-035-Q1-K1-G2
aaaaacccgagccgacccacgcgaccgcccacacaaccatccacccaaacatcatgtataaaaaaacaacaaaaaaanatacgcacgctttcttataaaaacttgaccccccacccccacannaacatacntntnntaaattaatcatcaccaccttatcataccacaattaacttcccctttgagaacttattatcaataccctcatctttttctacaaaatatcattcttaagacacttacatatgacctagcaataatcatacccatatctgacacaccatataataaaaaaacaca

SEQ ID NO: 14859 - DNA, 56 bp, Glycine max
  Clone ID: LIB3094-035-Q1-K1-G3
aaaaaaaaaaaataataaaaaaaaaaaaaaacagcttgataaaaaaagcgccaacc

SEQ ID NO: 14860 - DNA, 458 bp, Glycine max
  unsure at all n locations
  Clone ID: LIB3094-035-Q1-K1-G6
cgcgtacgaaaaaaantcaaaaaaaaattaatttgatttataatttaaggggggcccaactatttatcggcttgtttcattcaacatatatttaaccctcttcagaatgcctaggacccctatgtttttgtgccactgccacatgttggataaatagagatttcgttcagtcaagtttgaacatggaaagtaacatctgttgtcgttttggctttctcaaaaacacatgcccttctctgtacgccatcgttagctcctactactaataaccgagtacacttatttaattcttactactaatttctccccctattattagtattatttattagtttataatttgtacattattccatttttttcacaaacttccccataatttatccaaaataaagacaattaaaatatgtagaggaattatattcattttcacaattgtgcttatttgaatagtgaaa

SEQ ID NO: 14861 - DNA, 299 bp, Glycine max
  unsure at all n locations
  Clone ID: LIB3094-035-Q1-K1-G8
ctttcataaaattcaantttctgaccacctgttaaaaaacaaagttctttagattttcttcttcacaaagatataagtgagctgaatctaccaaaatcatttaccattcaattccccaattgcaaagatgatcttattaactttgaagtttcaattccacctcattattcatattacttaagtcccacattttttttttccttttaaagtgtcttccatctatccacacgaaacaccaaaagttaagtttaaaacaaaagtctatcattcaaatatttacttttaaccaaaattttttc

SEQ ID NO: 14862 - DNA, 264 bp, Glycine max
  Clone ID: LIB3094-035-Q1-K1-G9
tgttactattcgtaaaatcgccactcttgttctttaccaattctttctcaaactcttgctcctaatttcagtctttcagctttcctttgctgctaggagactcaaccagctggttcaggaccagtcacagttactccattaccacaacggtcctcttctatacggcaaaatcgccgtgaacctaatctggtatggtcacttcaaaccatcccaaaaggccatcatcaccgatttcgttacctcactgtcatccccatcgtctca

SEQ ID NO: 14863 - DNA, 98 bp, Glycine max
  unsure at all n locations
  Clone ID: LIB3094-035-Q1-K1-H1
aaaaaaaaaaaaanttaaattaaaaaaaaaaaaaaaaaaaaaaactccagccttttaaataaaaaagggcccccnccaacccaaaaaannnnnnaana

SEQ ID NO: 14864 - DNA, 415 bp, Glycine max
  unsure at all n locations
  Clone ID: LIB3094-035-Q1-K1-H3
aaaaaaaaaaaaaaatttaaattaaaaaaaaaaaaaaaaaannnaaccctcttngtttntngaatttaaaaaagggccccgcccccaccccaaaaaannnnnaaaannaaaaaaaaaaaaaaannaaaaaaaaaaaaaacaaaaaaaaaaaggaaaacaaaaaaanaaaaaaaaaaagaaaaaaaaaaaaaggaaaaaaanaaaaaaaaaanaaaaaacacaaaaaaaaaaaaaccaacaaacaaaaaaangaaaaacaaaaaaacaaaaacagaaaacaaaaaaacacaaaacaaaaaaaacaaaaaaaaaaaaaaaaaaaaaaaggcacaaaaaacaaaaaaaacaaacaaaaaaaaaaaaaaaaaaaaacaaaaaaaaaaaaaaaaaaaaaaaaaaaagaaaaaccaacacc

SEQ ID NO: 14865 - DNA, 334 bp, Glycine max
  unsure at all n locations
  Clone ID: LIB3094-035-Q1-K1-E5
aaaaaaaaaaaaaaattaaattaaaaaaaacaaaaaaaacacgaatcgttnatttaaaaanggacgcccaccccaaaaaaaanaaaaaaaaaaaaaanaaaaaacaaaaaaaaaaaaaaaaaaancaaaaaaaaaaaacaaaaacaaaaaacaaaaaaaaaaaaaaaaaaaaaaaaaaaaaacaaaaaaaaacaaataaaaaaaaacacaaaaaaaaaacaaaaaaaacacaaaaaaaaaaaaaaaaacaaaaaaaaaaaaaaacaaaaaacaaaaaacacaacagagaacaaaaaaaaaaacaaaaacaaaaaaacaaaaaaaacaaaacaaa

SEQ ID NO: 14866 - DNA, 329 bp, Glycine max
  Clone ID: LIB3094-035-Q1-K1-H5
accacgcgtgcggaaacatttccaccgaaacaactcacgggctcgcttttacataaactacctccaaccaggtgatcgctctattacactttaccaaaaccctactctcttgcggcgtccatgtgaacgatctggtcacacactacatcgataccttacttgcaaaaaactattcccgtattgtacaaacgcttctcctacatgaacctaaattctcgaactcgaagcaaaacagactcgtatccatggtaaccttcatgcggcaccaccactacccgatcattatggactgtgcccaagcccaccccattccttctgaggctattata

SEQ ID NO: 14867 - DNA, 415 bp, Glycine max
  unsure at all n locations
  Clone ID: LIB3094-035-Q1-K1-H6
cgcgtcgctgctccgtaccantttcactgcttaaatttgagagaaaactctgcaaacatcgtggtttatcagtacctccttacaggtgatgagcttctctcggactccttccgttacaatgaaattgagaatggaatgctgtgggaagttgaggggaagtgggttgttaagggagcagttgatgttgacattggtgcaaacccttctgctgagggtggagaagatgagggagtcgatgacgcagctgttaaagttgttgacattgttgatacattcagacttcangagcaacccgcttttgataagaaacagtttgttaccttcatgaagaggtttatcaagaatttgactcccaagctcgatgcagagaaacaagagttgtttaagaagcacatttgagggagcaactaaatac

SEQ ID NO: 14868 - DNA, 390 bp, Glycine max
  Clone ID: LIB3094-035-Q1-K1-H7
ggctggcattgttggaaaatacggttcccgttatggcgccagtctgcgtaagcagggtaggaagatggaagttagtcaacacaccaagtttttctgtgaattttgtggaaagtatgctgtgaagaggaaagctgtgggaatatggggatgcaaggactgtggtaaagtgaaagctggcggtgcttacactttgaataccgcaagtgccgtgactgtacggagcaccatcaggaggttgagggagcaaactgagagttaagcttttttgtttatgctatcaattactattagactttgcatgaagtgcctagtttgtattcactgaactgcactggttgtattcaaaagaaactccttaaagttaattttgaaatgactcttttaatttta

SEQ ID NO: 14869 - DNA, 209 bp, Glycine max
  unsure at all n locations
  Clone ID: LIB3094-035-Q1-K1-H8
ttacactttnaatacctcaattnccntaactttacttatcaccatctattattttatntatcaaacttaaaattaaacttttttttttattctatcaattactattanacttttcattaactncctantttctattcactcaactccactttttntattcaaaataaactccttaaatttaatttttaaatcactcttttaattttaat

SEQ ID NO: 14870 - DNA, 77 bp, Glycine max
  Clone ID: LIB3094-035-Q1-K1-H9
aaaaaaaaaaaaaaaatttattaaaaaaaaaaaaaaaaaaaaaaccagccttttatttaaaaagggcccgcccaccc

SEQ ID NO: 14871 - DNA, 367 bp, Glycine max
  Clone ID: LIB3094-035-Q1-K1-B10
taaataaaaaaaataaaaaaaaaaataaaaaacaaaaaaaaaaaaaaactaaaaaaaaaaaatattaatctcaacacaaaaacaaatcataaataaaaataaaataaataaaaaaaatatatcttaaataaaaaaagtaaataaaataaaaaaaacaaacaaaaataaatatataaaaatatataaaaaaataaaataatattatattataatcattatatttaaaaatcaaaaaaaaaaatataaaattaattaaaataaaaacaacaaaaaaaaacaaattaaaaaataaaaaaaaaaaaaataataaaaaataaaaaaatcaaacattaaaaataaaaataaaaaaaaaaatcaattactatat

SEQ ID NO: 14872 - DNA, 249 bp, Glycine max
  unsure at all n locations
  Clone ID: LIB3094-035-Q1-K1-B3
gaggtttttgtctgatgatgttggtaagtctatccattcaaggccaaggccaagggcaatcgtctcgtaatttattggaaggaatggaaccgcatgctgatggcagaatgangaagaatgggaatgggagaaagtttttgtccaataatgttgatcggtctagcggtggagaacagtcttctcctttgaattatgggggggatggaatgaatggtgatggtagattgaggaggaatgggaatgggagga

SEQ ID NO: 14873 - DNA, 447 bp, Glycine max
  unsure at all n locations
  Clone ID: LIB3094-035-Q1-K1-B4
ntccggtctcttaatttcactttctttgccttaggtcaccttccttcttttggaactctaagagggggggggtttaataataattcctaatcctctctaatcaggtccattgaatatgtctccgtcgttgaatcttcctcccaagggtggcttcagttttgatctatgccgaaaaaacgcaatgcttcaaaacaagggcctcaaagccccaacctttctcaaaactggcaccactattgtcggttagttttccaggatggtgtcattcttggtgctgatactanggcaactgaaggacctatagtggctgataaaaactgtgagaaaattcattatatggcacccaacatatattgctgtggagcangcacagctgctgatacagaggctgtaacagacatggttagctcacagcttgcattacatcgctaccatactggtcgagaa

SEQ ID NO: 14874 - DNA, 452 bp, Glycine max
  unsure at all n locations
  Clone ID: LIB3094-035-Q1-K1-B5
cccacgcgntccgggaaacctgatcaattcttccgcggaatcaaggtgacccgtttacctgctggggttgattgcgaaaaggaagcaggtgtttcatctccaaacagcacggtttctagcgtcagtggaaagcgcagcgagagggaaaccaatggagaagaaaacgacacagacagagcttgttccagaggcatcatcagcgacgaagaagatgctgaaacctctagaaagaaacttagactctccaaagatcagtcaattgtcctggaagagagcttcaaagaacacaacactcttaaccccgtaagtaaacgtacacatgccaattaattttttttgtcctgtatcagagacatagtatcctctgatctactggatcatatattaatctcactcacgatgtataggtgcgattgatcatagaaaattttgtacacaatgtgaatcaaata

SEQ ID NO: 14875 - DNA, 55 bp, Glycine max
  Clone ID: LIB3094-035-Q1-K1-C1
aaaaaaaaattaaaaaaaaaaaatttaaatttaaaaaaaaaaaaaaaaaaaaaaa

SEQ ID NO: 14876 - DNA, 447 bp, Glycine max
  Clone ID: LIB3094-035-Q1-K1-C12
aaacacccttgtcgaccacaccaaaattaataacataaaaaagcataaaagcacgggacggcataaaaaagggaaaataaaacattttgaagtcatatttgcacacttgattaaaggctgtcgtcccttgtgacggatgcgtggggtgctaataccttccctgtgcgtaaaaacaactcccgaactattcacacttaaagttcgtagaccacaccttttcaattttcccgacgctttcctcaaataaaagttggtggcgactccgcgcattttcctttcatggaagacgcacttgtgagtcccgcatcgccctcccgtcaaagggtaggttgcgacagtacttgccctcccgccgaagggtaagttccttaattgaattaactaataacaaaagtgaaactaaggctaaaataaactcacaaatcaagctttgtccataaaaatcac

SEQ ID NO: 14877 - DNA, 293 bp, Glycine max
  Clone ID: LIB3094-035-Q1-K1-C2
atcataacacctttactccacaagagattttcttcgtaactcatacaacacctccgatctttgacagattcatttagagtttacagatagagcagctctattctcaccagagttgtcattcatattattcagacaagactaacaatacactaccattttacagtgtattgcatgaccaaaactatttgttacaacttggtacaattctaatcttgtaccaagaatttattaacctttctgctttgctgatttaaattattgcacattttgtgtggggtctactctgcatatct

SEQ ID NO: 14878 - DNA, 393 bp, Glycine max
  unsure at all n locations
  Clone ID: LIB3094-035-Q1-K1-C3
cccacgcgtccgcttaaatagttcaacacttgcaggcaattgataccctcgttcgagccgcaatgagcagcagtcctgcaccttgcanccgatcctggtcaataagtgaggactccctaagaaggtatgtgcagtttgcgagtgaaagctgcgtacaagagttattggcagcttcggacacaaacaaaggaaatggcaatgatggatggaagatgctcactcttgacaatggagtggagatatcaaaacgcaggtcaggctcactccacacgtttcgcagccgttgggttcttagagctgtctctccccaacagttcataacagtggccaatgccattgatgctgcaaagcaatgggactctgatctggtggaagccaggtacataaaagatc

SEQ ID NO: 14879 - DNA, 93 bp, Glycine max
  unsure at all n locations
  Clone ID: LIB3094-035-Q1-K1-C4
aaaataaattaaaaattaaattaaaaaaaaaaaaaaaaaacactcttgcctttatataaaaaaaagggccgcccaaacaaaaaaaanananaa

SEQ ID NO: 14880 - DNA, 249 bp, Glycine max
  unsure at all n locations
  Clone ID: LIB3094-035-Q1-K1-C6
aaattaaattaaaaaaaaaaaaaaaaaaacctagctttaataaaaaaggccgcaaacaaaaannnaaaaaaaaaaaaaaaaaaaaaaaaaaaaaaaaaaaaaaaaaaaaaaaanaaaaaaaaaaaaaaaaaaaaaaaaaaaaaaaaaaaaaaaaaaaaaaaaaaaaaaaaaaaaaaaaaaaaaaaaaaaaaaaaaaaaaaaaaaaaaaaaaanaaaaaaaaaaaanaaaaaaaaaaaaagagaagagag

SEQ ID NO: 14881 - DNA, 324 bp, Glycine max
  unsure at all n locations
  Clone ID: LIB3094-035-Q1-K1-C9
atcctnnncaataantnaagactccctaaaaaagtattttcaattttctagtgaaaactgcatacaaaagttattgtcaacttcttacacaaacaaaagaaatgtcaattattgattgaaaatgctcactctttacaattgaatttaaatattaaaactctattcaggctcactccacacgtttcgcaacccttttgttcttagaactttctctccccaacatttcataacaatggccaatgccatttattctgcaaaacaattagacttttatctttttcaaaccacgtacataaaaaaactttaaatacaacctcaacataa

SEQ ID NO: 14882 - DNA, 295 bp, Glycine max
  unsure at all n locations
  Clone ID: LIB3094-035-Q1-K1-D11
aaaaannaaaaaaaaaaaannaaaaaacanaaaaaaaanaaaaaaaaanaaaaaaaacaaaaaaaaaaaaaaaaaaaaaaaaaaaaaaaaaaaaaaaaaaaaanaaaaaaaaaanaaaaaaaaaaaaaaaaaaaaaacaaaaaaaaaacaaacaaaacaaaaaaaaaaaaaaaaaaaaaaaaaacaaaaaaaaaaaaacaaaaaaagaaaagaggaaaaaaaaaaaaaaaaaaaaaaaacaaaaacaaaaaaaaaaaaaaaaancaaaaaaaaacaaaacaaaacaaaaaaaaaa

SEQ ID NO: 14883 - DNA, 447 bp, Glycine max
  unsure at all n locations
  Clone ID: LIB3094-035-Q1-K1-D12
cggacgcgtgggtttttcttcaaattccttttaagagacactcanaaagatgagggtatgtttgatgcatgctttggtgtttgcgttaatcggggcgttgtggaacttgcaaagggcagagggtatccgatttgtgatagacagagacgagtgtttctcccatgatgtgaagtacgagggtgacactgttcatgtctctttcgttgttattaaggctgattctccctggcattacggcgacgaaggtgtcgatctcgtggtaaagggaccttctggcgagcaaattcaagattttcgggacaagaccagtgagaagtttgactttgtggctcacaaatccggggtccataaattctgcttcaccaacaagtctccttatcatgaaactgtcgattttgatgtacatgttggtcacttctcttactttgagcaacatgcaaaagatga

SEQ ID NO: 14884 - DNA, 308 bp, Glycine max
  Clone ID: LIB3094-035-Q1-K1-D4
tttcctgaaattgcaaaaatactgtctccggaattcggtcatggcgcgattaatgtgaaggacagtagtattggggattcttccggggacgccaccaaggggaaaggccctaaaaaaaaagggaagtcctctaagaagtaggataggacttgcacatgctttgaaatcaccttcttctatgacccaattaagtttgatgtttgaaagttgaaaattttagcctgttgtgacttggttgggtatttgtgtgtgttgtcttcacaataattttagcgcatccattacttacatgatatgcttgttcattg

SEQ ID NO: 14885 - DNA, 454 bp, Glycine max
  unsure at all n locations
  Clone ID: LIB3094-035-Q1-K1-D5
gctttcattctctccattttcatcaaacgttanattttcaagagtcccggcattaaaacggacacgtnttttttaacagaaggtgcagacactgctgcgtggcaaaaacaatgttggttttcctgagattgcgaagatactgtctccggaattcggtcatggcgcgattaatgtgaaggacagtagtattggggattcttccggggacgccaccaaggggaaaggccctaaaaaaaaagggaagtcctctaagaagtaggataggacttgcacatgctttgaaatcaccttcttctatgacccaattaagtttgatgtttgaaagttgaaaattttagcctgttgtgactggtttgggtattgtgtgttgttgtcttcacaataattgtagcgcatccattacttacatgatatgcttgttcattggttcaaggaacagcaaaaactgttttgt

SEQ ID NO: 14886 - DNA, 326 bp, Glycine max
  unsure at all n locations
  Clone ID: LIB3094-035-Q1-K1-D6
attccaaaaatactgtctccaaaattcggtcatggcgcgattaatgtaaaggacagtagtatttnttattctttcggggacgccaccaatgggaaaagccctaaaaaaaaatggaattcctctaagaagtatgataggacttgcacatgcttttaaatcaccttcttctatgacccaattaaatttgatgtttcaaaattgaaaattttagccttttttgactctttttactattctgtgttgctctcttcacaataattttaccgcatccattacttacatgatattctttttcattgtttcaaagaacaacaaaaatttttttt

SEQ ID NO: 14887 - DNA, 272 bp, Glycine max
  unsure at all n locations
  Clone ID: LIB3094-035-Q1-K1-D8
aaaaaaaaaaaaattgactgttttatttaacaaacccttccaacaaaattttgntcttgnaacctcctcaacccactggaggtcgtgatctgtaaatttttagttaattatacaacaaattttttaaaaaaaaattattttctcttctgagctccttcttatttatcgactaatccaccttcaattattttccaagatttcaataaaatcttttcttccgtgttatctcttttacttaattccaaattttgtaagtataatacttggctatg

SEQ ID NO: 14888 - DNA, 65 bp, Glycine max
  unsure at all n locations
  Clone ID: LIB3094-035-Q1-K1-B1
aaaataaaaaaaattaaattaaaaaaaaaaaaaaattgtacgttgattaaaaaggcccnccaacc

SEQ ID NO: 14889 - DNA, 457 bp, Glycine max
  unsure at all n locations
  Clone ID: LIB3094-035-Q1-K1-D9
gcggcaaatactaaaattcctttattacctacttcagttttgtgccatcaattataaatccgggggcgggaccacttaacaaggttttttgcccatcccctgatccagcagggaaggaaatgcgccaagcttgcttcgattatcttagtcttggaggtctattctcggaagggccagtctctttgctttcangattaaaccctcggcccttgagcctggttctacatttctttgctgttgcaatatatggtgttggccgtttactgctaccatttccttcacctaaacggatgtggattggagtccgattaatttctagtgcatctggaatcatcttgccaataattaaagcagaaggagtccgtcagatgttcttccctgcaactgttccagcttactataaaaatcccccggcccaataaatgtgagttccgtgaacccatcatgagtcattcaa

SEQ ID NO: 14890 - DNA, 449 bp, Glycine max
  Clone ID: LIB3094-035-Q1-K1-E12
cgcgtcgctgctccgtaccagtttcactgcataaatttgagagaaaactctgcaaacatggtggtttatcaggacctccttacaggtgatgagcttctctcggactccttccgttacaatgaaattgagaatggaatgctgtgggaagttgaggggaagtgggttgttaagggagcagttgatgttgacattggtgcaaacccttctgctgagggtggagaagatgagggagtcgatgacgcagctgttaaggttgttgacattgttgatacattcagacttcaggagcaacccgcttttgataagaaacagtttgttaccttcatgaagaggtttatcaagaatttgactcccaagctcgatgcagagaaacaagagttgtttaagaagcacattgagggagcaactaaatacctgctctctaagattaaggatttccagttttttgt

SEQ ID NO: 14891 - DNA, 440 bp, Glycine max
  Clone ID: LIB3094-034-Q1-K1-D6
cggacgcgtggggtttcctagtatgcaaggtaaagaatcagcaaatttcaaccccggagccacgagtaacatgttgacaaaagtctaccgagttgcattttgttcttgtaacctcctcaacccactggaggtcgtgatctgtaaattttgagtgaattatacaacaaattcttgaaaaagaaatgattttctcttctgagctgctgcttattgatcgatgaatccagctgcaattattttcgaagatggcaataaaatctcttctgcggtgttatctctttgactgaattccaaattttgtaagtataatagttggctatgaaagagactgtaccaagaagcatagtgtgagagtcagagatcagttgttaagtatgaaatgtgagaacatttgttgaaagtatattgctaaatagaagtgcaaaagatgattataggat

SEQ ID NO: 14892 - DNA, 423 bp, Glycine max
  Clone ID: LIB3094-034-Q1-K1-D9
gaactctaacacagattcactcacctaccgtccctacccttctctctctcgccggctggggttcttcctctcgcatgctccttctctgaaccaaaccaatccattatttatttgaatcttcttatacatcccaaataaacccaatacaaaaggggtctttagaaggttctggtcgatgggtaggagaggaatcaagctattcgatgaagaaaggaacggacttttttcaatttccaattttgggtctcaatggtgtggtgttagaggtgatggtgatcaagaccctgtgaatttggctgcgtatgcaagcattagtcaaatgggaatggggtttggtgttcaagaaccaaacccttcttcttcttcttctgatggagataattcccaacacaacggtggcatgagcatgagaatgaggattcc

SEQ ID NO: 14893 - DNA, 194 bp, Glycine max
  Clone ID: LIB3094-034-Q1-K1-E10
aaaaataaaaaaaaaaaaaaaaaaaaaaaaaaaaaaaaaaaaaacaaaaaaaaaaaaacaaaaaaaaaaaaaaaaaaaaaaaaaaaaaaaacaaaataaaaaaaaaaaaaaaaaaaaaaaaataacaaaaaaaaaaaaaaaaaaaaaaaaaacaaaaaaaaaaaacaaaaataaaaataaaaaaaaaaaaaaaa

SEQ ID NO: 14894 - DNA, 417 bp, Glycine max
  Clone ID: LIB3094-034-Q1-K1-E9
acggaagctggtggataagtctttacttttagtaaagagaataatgaaagtcagggtaagtatcatttagatgagaaatcaccggtccaactggatgacagtttacagaaaagttatggtttcactgcaagaaaagatgatccacctactatgaggaaaagacttgcatttagggagaagaagatccctgcggattcagcagatgctaatccagcttctatagtgtaagtaaagccaagccatactgaccatcctccggaaaggaatgaaaggaaggatgaaagaagcagcaatcctcatcatctggatagacctgataagcaaaatgcatagggcagagcacccaataagattgaagctagataggatggtttttcatcaaaagcaaagtatgggggcagtggaggcaataacaat

SEQ ID NO: 14895 - DNA, 359 bp, Glycine max
  Clone ID: LIB3094-034-Q1-K1-F10
aaataaaaaaaaaaaataaacaaataataaaatcaaaaaaaaaaatataaaataattaaaagaaaaaataaaaaaataaaaaattaaataaataaaaaaaaacaaacaaaaaaaaacatataaaaaaaataaaaaaaataaaatatataaaaaaaaaaaaaataaaaaaataaaaataaaaaaataaaaaaaaaaaataaaaaaaataaataaaaaaataaaaaaaacataaaaaaaaaataaataaaaaaaaaaaataaaaaaataaaataataaaaaaaaataactaaaaaaaaaaatattaaaataaaaaaataataaacaaatataaaaataaataaaaaaaattaaaaaataaa

SEQ ID NO: 14896 - DNA, 435 bp, Glycine max
  Clone ID: LIB3094-034-Q1-K1-F12
attgctgctgtttgcctattggtgtactttggggtctctaccctgctggatgcgtcatctagcgatggccaaaaatcagatgaagagcagaaggaggcagaactagcagtttctgaattttctggaaatggtgctgggatactatctgctgctagcacagttgccagtacttttctcttagtttttgttgctgaatggggcgacaagtcatttttctccacaattgcccttgcagcagcttcttctccccttggagtcatagctggagcactggctggtcatggtgttgcaactttgctagctgtacttgggggttctttacttgggacgtatttgtcagagaaggttattgcctacatcggaggtgttctctttctcgtctttgccgcaataaccttatttgaaattgtgcaatatgggttaaaagaaatgcaa

SEQ ID NO: 14897 - DNA, 425 bp, Glycine max
  unsure at all n locations
  Clone ID: LIB3094-034-Q1-K1-G11
atgatcttggcatgtccaactatcccatggtcccaggacatgaagtggttggtgaggtgctggaggtgggatcaaacgttagcaggttcagagtgggagagttggtgggagttggactcctcgtaggttgctgcaaaaactgccagccatgccaacaagacattgagaattactgcagcaagaagatctggtcttacaatgatgtttatgtcgatggaaaacccacacagggtggctttgctgaaaccatgatcgttgagcaaaagtttgtggtgaagattccagagggtttggcgccagagcaagtggcaccattactgtgtgcgggtgtgacagtgtacagtccactggtacactttgggctgaaagagagtgggctaagaggtggaatattggggcttggaggagtgggacacatggnggtg

SEQ ID NO: 14898 - DNA, 268 bp, Glycine max
  Clone ID: LIB3094-034-Q1-K1-G12
ttatcttttcatattcaacttttccattttcccacaacattaagtatttatagcatagattcaatataaaatcaaacatcccccatcctcacaatatcacacttattcttcaatttctactcctcctatattactacaaaaactaccaaccattccaacaatacattaataattactacatcaaaaacatctattcttacaattatatttattacaatataaaaacccacacaaattttcttttcttaaaccatcatcttttatcaaa

SEQ ID NO: 14899 - DNA, 446 bp, Glycine max
  Clone ID: LIB3094-034-Q1-K1-G2
cccacgcgtccggcgaaaacccccaactccaacctctgttcatcgtctaccgcgctttgttttcagccagaactatgattaagctttttaaagtaaaggaaaagcagagagaacttgcagaaaatgcaagtggcggaccacctgttaagaagcaaagtgctggagagttgcgtcttcacaaagatataagtgagctgaatctaccaaaatcatgtaccatgcaattccccaatggcaaagatgatctgatgaactttgaagtttcaattcgacctgatgatggatattacttaggtggcacatttttgttttcctttcaaggggctcccatctatccacacgaagcaccaaaggttaagtgtaagacaaaggtctatcatccaaatattgacttggaaggaaatgtttatgctaacatcttacgagaagattggaaacctgtcctt

SEQ ID NO: 14900 - DNA, 284 bp, Glycine max
  Clone ID: LIB3094-034-Q1-K1-G4
aaagaaaatgaggacagtgctttcgcgcttgatccattccacgccttccatttccagggtcaatggagtgtcaatccgcgggagagatctctcctttccaaatgtctgctttaaagttgaagaagcagttaatgtgcctccacccccaacggaaaaggttgttctgtttggaggcgattggtttgttggatcacacttttttagagaagccctagaacgtggcatgtctgctgggagtcctagcaggtctggtaggtcatcctatcatgattcctgggctagga

SEQ ID NO: 14901 - DNA, 370 bp, Glycine max
  Clone ID: LIB3094-034-Q1-K1-G6
cccacgcgtccgtcaagcattgcatccctcttgatttgtagtttgttttgggctttaggtaaaagttctgccaaatcaagaggggtcttaagatcatagtgtgtgttttgcaacaatggctaagttctttgctgctatgatcttggcactctttgccatttccatacttcaaacagtggtaatggctgctaatgaacaaggaagccacttgtatgacaacaagagcaaatatggaagtggaagtgtcaagagttaccaatgcccatcacaatgctcgaagagatgtagccagacccaataccataagccctgcatggttttctgtcaaaaatgctgcaagacatgcctgtgtgtgcccccggggttatta

SEQ ID NO: 14902 - DNA, 444 bp, Glycine max
  Clone ID: LIB3094-034-Q1-K1-G7
cctaaacaactctttctcttcttccttcgctcgttgttctccctcgcgtagagcgacaggggcggagacagagacgtttgctttccaggctgagatcaaccagctcctcagtctcatcatcaacaccttctactccaacaaggagattttccttcgtgaactcatcagcaacgcctccgatgctttggacaagattcgatttgagagtttgacagataagagcaagctcgatgctcagccagagttgttcattcatattattccagacaagactaacaatacactgaccattgttgacagtggtattggcatgaccaaagctgatttggtgaacaacttgggtacaattgctagatctggtaccaaggaattcatggaagccttggctgctggtgctgatgttagtatgattggacagtttggtgtggggttctactctgcata

SEQ ID NO: 14903 - DNA, 333 bp, Glycine max
  Clone ID: LIB3094-034-Q1-K1-G9
aaaaaaataaaaaaaaaaaaaaaaaaaaaaaaaaaaataaaaaaaaaaaaaaaaaataaaaaataaaaaataaaaaaaaaaaaaaaaaataaaaaaataaaataaaaaaaaaaaaaaaaaaaaataaaaaaaataaaaaaaaaaaaaaaaataaaaaaaaaataaaaaaaaaaaaaaataaaaaaaaaaaaaataaaaaaaaaaaataaataaaaaacataaaataaaaaaaataaaaaaaaaaaaaaaataaataaataaaaaaaaaaataaaaaaaaaaaaaaaaaaaaaaaaaaaaaaaaataaaaaaaaaaaaaaataaaaaaaataaa

SEQ ID NO: 14904 - DNA, 309 bp, Glycine max
  Clone ID: LIB3094-034-Q1-K1-H4
cttctccttctcaatcttgtaattctatttcctccaccataatgctgcgcaagcttgtgtcagggccacgcatgaacaagcctggcacagttcccgttcacctcaacgtctatgatctcaccccaatcaacggctatgcctattggcttggccttggagtctaccattctggggttcaagttcatggattggaatatggttttggtgcgcacgagcacgacacaacggggattttcgaagtccaacccaaacactgccctgggttcactttcagaaagtcaattttcatcggaacaacagatctgggtc

SEQ ID NO: 14905 - DNA, 215 bp, Glycine max
  Clone ID: LIB3094-034-Q1-K1-H8
catccgcactgggtcctggcctacatccacaatggttcgcattcccacggaaaatggcagagaggaacgcatggaagagatcatcagggaccatatggaccccatttcaaagcaagcgatggggatctggaaggatcattgagctagtgccaagcgacaagtcgcagacgcagaaagagcttaacttaagaaaagggatggtctcatcagaaaca

SEQ ID NO: 14906 - DNA, 364 bp, Glycine max
  Clone ID: LIB3094-034-Q1-K1-H9
cccacgcgtccgcccacgcgtcctttgtcgcgtgggcggacgcgtgggcaatcgggtaggctttattctaacataatggcggctgctctgacgtcgtgttcttccgcaatcgccgccgcgtccgaaaccctagccaaacctgcttccaccataaccttctccgccaccaacctcgctcttcaatcgtcaacttccaagctcggtttcaaatccctaagacttcgccgatgcgccgccgtcttcagctacacccttagcgcgcgcatagtgtctgtgccagctttcaaagcccccgcgctactcgatttcgacacgaatgttttcaagaaggagaaaattaacctagccagacactaccagtaca

SEQ ID NO: 14907 - DNA, 345 bp, Glycine max
  unsure at all n locations
  Clone ID: LIB3094-035-Q1-K1-A10
aaaaaaaaaaaaaaaanaaaaaaaaaaaaaaaaaaaaaaaaaaaaannaaaaaaaaaaaaaaaanaaaaaaaaaaaaaaaaaaaaaaaaaaaaaaaaataaaaanaaaaaaaaaaaaaaaaaaaaaaaaaaaaaaaaaaaaaaaaaaaaaaaaaaaaaaaaaaaaaaaaaaaaaaaaaaaaaaaaaaaaaaaaaaaaaaaaaaaaagagaaaaaaaaaagaaaaaaaaaaaaaaaaaaaaaaaaaaaaaaaaaataagaaaaaaaaaaaaagaaaaaaaaaaaaaaaaaaaaaagaagaaaaaaaaaaaaaaaaagaaaaaaagaaacaaaaaaaaaaaaaaaaa

SEQ ID NO: 14908 - DNA, 227 bp, Glycine max
  unsure at all n locations
  Clone ID: LIB3094-034-Q1-K1-D4
aaccccggagccacnaggaacatgttgacaaaagtctacccgattgcattttgttcttgtaacctcctcaacccactggaggtcgtgatctgtaaattttgagtgaattatacaacaaattcttgaaaaagaaatgattttctcttctgagctgctgcttattgatcgatgaatccaactgcaattattttcgaagatggcaataaaatctcttctgcggtgttatc

SEQ ID NO: 14909 - DNA, 383 bp, Glycine max
  Clone ID: LIB3094-035-Q1-K1-A3
ggcaagatgggaattgcccttctctttttacctttcaggtcccgaaaaaaccactctgtcgcgcgatcacaataggtatctaatcgcaaatgatgaacactgttggggtgacaatggtgtctccaacattgaaggtggttgctatgccaaatgcattgacctctcacgggagaaagagccagatatttggaatgcaatcaggtttggcacagtgttggaaaacgtggtgtttgatgagcacgaccgagaagttgattactctgacaaatcagttacagaaaatactcgtgctgcttatcctatagagtacattccaaatgcaaagttaccttgcgttggccctcatccaaagaatgtcatactttttgcatgtgacgcatttg

SEQ ID NO: 14910 - DNA, 339 bp, Glycine max
  Clone ID: LIB3094-033-Q1-K1-G3
gcaaaattgcttgacaggatcagttggtatttatctcccacatagtttgtggttacgattgtttgatcaagtgatcttctctgtgcttgatgacctgcttgaaatttctcagacacactctcaaaaagacttccgcaacatagaaggaacccttgttcttgctttgaagctcttgtgtaaagttttcctccagttaatccaagacctatcacaattgccaggcttcaacaaattatggttggctgtactaagtcggttagaaatttatatgaaagtgaaagttaagggaaagagaagtgagaagcttcaagagcttgtgcctgagcttcttaaaaacac

SEQ ID NO: 14911 - DNA, 408 bp, Glycine max
  unsure at all n locations
  Clone ID: LIB3094-033-Q1-K1-G5
aaaaaaaacccacgcggccgcgaccccnccgncacccccttccttcaagatctcctttccaagatcctacgccaccaccacctgcctgcttttctataccaaccccaacccccaccacaccatcaaaattctccccttcaagttcttaacccttgangcctttctgtaatccccttttatcttcttgtaaaactatgctaaaactttttatcaggaagctcatcctcccttttacaaactcaccttcaaatcaatactctcaatttttaactctttcttcaaattaataacccattagtctccatcactttcccttttcataaattcatggactaattttaacaccttctctactaccacgatgattttgcttaaatttatctctcttaaaaactaccctaacaaaat

SEQ ID NO: 14912 - DNA, 368 bp, Glycine max
  unsure at all n locations
  Clone ID: LIB3094-033-Q1-K1-G6
aaaaaaccgaccgacccacgcggccggaaaaacaaaaccaaattgnnatcgattaattttaagaacaccacaagcaanatgccgtttgtttnttttctcaacacncactcctactccanangcctanaacctccttcatcttctccttccgtcgtttccaacaagggaacaaggactttgaatttcaggaggctgctgctgcgtccttctcttgggattcatttatcgcgtagctttgctttaaaatgtgttgttactccgaacccagctgttgaattgccattaacttcttaaaatttagaaagtttattggatgaaattcgaccctatctcattgcaaacggttggaatgtggctttacatcaaat

SEQ ID NO: 14913 - DNA, 87 bp, Glycine max
  unsure at all n locations
  Clone ID: LIB3094-033-Q1-K1-G7
aaaaaaaaaaaaaaaaaaattttttttaaaaaaaaaaaaaaaaaaaccctcctgcaaatttttaaaaaaannnnnccccccccaacc

SEQ ID NO: 14914 - DNA, 328 bp, Glycine max
  unsure at all n locations
  Clone ID: LIB3094-033-Q1-K1-G8
ggctacttttgattgcttgatgaaaacctatggattcctgacaccagaattctggaaggacgctcgcttctccaaatctccattccaagagtacacagatctactggcanaaccaacangaaagactctaatcttggaagaggaaagggtggatgcttgatttgctagttttgctttatggatgttttaggaactttattactttacataacttgttggttctgtgctttacttttggttttgatagacggtatgtctctgtatgcattttgattgtttccaagttttaattgactgcaaaaaaaaaaaaaaaaaaaanattnnaatt

SEQ ID NO: 14915 - DNA, 119 bp, Glycine max
  unsure at all n locations
  Clone ID: LIB3094-033-Q1-K1-H4
gtaatgtaagtgttccaagcttcaatgtatgtaataatgttaggtccaagtanatctgtgcgtgttttttaatacaatgattctaatatcctatctccaccattcatattaatatttgc

SEQ ID NO: 14916 - DNA, 119 bp, Glycine max
  unsure at all n locations
  Clone ID: LIB3094-033-Q1-K1-H5
ccgcccacgcatccgcccancntccnaatttctttttcacacttnccatatcaaanancgggggcggtttcttttanancaaanatacaacatnnacncacttcaatcatttttttcaa

SEQ ID NO: 14917 - DNA, 341 bp, Glycine max
  unsure at all n locations
  Clone ID: LIB3094-033-Q1-K1-H8
aaaagaaaaaaaaaaaaattataaaaaaaaaaaaaaaaacnnaaaactttcgtnnnntgnnaaaaaaaanncccccccccccacaaaacaanaaaaaaaaaaaaaaaaaaaaaaaanaaaaatacaaaaaaacaaaatncaaaaaacaaataacaaaaactaacacaaaaaaaaaaacaaaaaaaataaaaaaaaaacaaaaaaaaaaaaaaaaaaaaaataaataaaaaaaaaaaaaaaaaaaaaaaacaaaaaacaaaaaaaacaaaaaaaaaaaaaaaaaattaaaataaaaaacaaaaaacacaatacaaaaaaaaaaaaaaaacaaccccaacctc

SEQ ID NO: 14918 - DNA, 262 bp, Glycine max
  unsure at all n locations
  Clone ID: LIB3094-033-Q1-K1-H9
tttcctttctgtgtccatctggttagttgggggaaggaaaacgtttctagtgaggccctggaagctgctcgaattgcttgcaacaagtacatggccaaatttgctggaaaggatgctttccacttgagagtcagggtgcacccattccatgttcttaggatcaacaagatgctttcgtgtgccggagctgataggctccaaactggaatgagaggtgcttttggaaagccacanggtacttgtgctagagtggctattggac

SEQ ID NO: 14919 - DNA, 373 bp, Glycine max
  Clone ID: LIB3094-034-Q1-K1-A1
ctctcttccttctttctctttacctcgtcattggcattgccagtggcgttcaaaccaggacctttcacttgcagaggaaactgcagcatggcaccccggagtgcctcctcccccaatcaagaaaggagaaaggcgctattatactggaaatgaaggacagaggtgagtgctcagagtcagagagaaaaggtgattgggttgagaaacagttggtactggatggtctccacgttcgttcaattcaaaatcacattcgaaaaaggacctgtagtagccaaattgcagattcctcggaaacccaagttctattaacttttggcctataattccaaactctaaacttacttgtgacaataggaattgggtagccaga

SEQ ID NO: 14920 - DNA, 267 bp, Glycine max
  unsure at all n locations
  Clone ID: LIB3094-034-Q1-K1-A12
gggttctgtggggcgtcgtactctcnntgtgtccttgagtgtctaagggagaccaggaactnctacgtctggtggatgaaatcantgtnaccgtgtgatnctagagcgtgattatatcggcccgggtgaagtttctctttnggagtnagtctcatctnttggctttgtagaggaatcgttcttaggacactttccatgntgcctgggaatggtcatacggnttgtctgaccagaccaaaatgaaaaataagaccaaaaaagtaataa

SEQ ID NO: 14921 - DNA, 391 bp, Glycine max
  Clone ID: LIB3094-034-Q1-K1-A5
ggcggcgctgtggcggacgctccggcggtggttgaggagaagacggagttcgacgtggggatcgaggaggtgccgagcaacgctcgaatcgcggtgattaaggcggtgagggcattgacgaacctagcgctgaaggaggcgaaggagttgatcgaagggttgccgaagaagttcaaggaagggatttcaaaggacgaagctgaagatgcgaagaagcaactcgaagaagctggtgccaaggttaccattgcttaaacactgtttagctgcagcatatatgttctgcttcttcttttgttggttgtagttgagttcaccagtacactgtaatttcatttccattttgactggatttcaatcttttatttggaatgaggaaatatgagttctt

SEQ ID NO: 14922 - DNA, 260 bp, Glycine max
  unsure at all n locations
  Clone ID: LIB3094-034-Q1-K1-A7
ccggcccgacccacgcgnccgcccacgcgnccgccanaaccgaggagaagaaaaacgccgaaanccccaaaagcgaaaagaagaaaaccaaaagcgcngaaaccccnccaaccganggcaaaacgaagagggagagagaaancgccaaagaggagaacaagaagaagacgaagaaacccaagcncagcaanggcaccccaaaacagcgagacgagggaaccaaaaagggagcagcagaaggaaaaggagaagaggggaaa

SEQ ID NO: 14923 - DNA, 447 bp, Glycine max
  Clone ID: LIB3094-034-Q1-K1-A8
cctaaacaactctttctcttcttccttcgctcgttgttctccctcgcgtagagggacagtggcggagacagagacgtttgctttccaggctgagatcaaccagctcctcagtctcatcatcaacaccttctactccaacaaggagattttccttcgtgaactcatcagcaacgcctccgatgctttggacaagattcgatttgagagtttgacagataagagcaagctcgatgctcagccagagttgttcattcatattattccagacaagactaacaatacactgaccattgttgacagtgggattggcatgaccaaagctgatttggtgaacaacttgggtacaattgctagatctggtaccaaggaattcatggaagccttggctgctggtgctgatagtagtatgattggacagtttggtgtggggttctactctgcatatct

SEQ ID NO: 14924 - DNA, 372 bp, Glycine max
  Clone ID: LIB3094-034-Q1-K1-B11
cccgcgcgtccgcccacgcgtccgccctttcgtccgcggacgcgtggagttctgtatcgtcgtacttctagagtccttgagttctaaggagacaggaacctacgtctggtggatgaatcatgaccgtgtgatcagagcgtgattaacggcccgggtgagtttctctttgcagtagtctcatctttggctgtataggatcgttcttaggacacttccatgtgcctgggaatggtcatacggttgtctgacagaccaaataagaaaaaaagacaaaaaagtaataaaaaagaatataaataaaacaatttaattcaaaaaataaaatacaagataggacaatatttattaattcaaaataggaattagatcatt

SEQ ID NO: 14925 - DNA, 436 bp, Glycine max
  Clone ID: LIB3094-034-Q1-K1-C10
ggctggcattgttggaaaatacggtacctgttatggcgccagtctgcgtaagcggattgagaagatggaagttagtcaacacagcacgtttttctgtgaattttgtggaaagtatgctgtgaagaggaaagctgtgggaatatggggatgcaaggactgtggtaaagtgaaagctggcggtgcttacactttgaataccgcaagtgccgtgactgtacggagcaccatcaggaggttgagggagcaaactgagagttaagcttttttgtttatgctatcaattactattagactttgcatgaagtgcctagtttgtattcactgaactgcactggttgtattcaaagtaaactccttaagtttaattttgagatgactcttttaattttaattgtttggaactttgtcggtgtgattttgcttcatagtttcattt

SEQ ID NO: 14926 - DNA, 430 bp, Glycine max
  Clone ID: LIB3094-034-Q1-K1-C11
caaccatggccgactcatctcaagaccttgaccaacttctcgatagtgctttggatgagtttcagtccttcaacctcaatcctccccctccaagtggggaagcaactgcgaatagcaagaaggagagtccttctttgccgtcgggggttcaaggattgggcatgggtttacccgatttgagaacgaagaaaaaggggaaacagaaggcttccaaagacagccacgtgtcggaggcgctcaacaagctcagggagcagaccaaagaggctgtgaaggggctggagtctatatccccacccactgccgatgatttaggtaaggatgccttgatggaagattgggtcaaacaatttgagcagcttgctggctctcaggacatggaatctattgtggagaccatgatgcatcaacttctgtccaaggagattct

SEQ ID NO: 14927 - DNA, 459 bp, Glycine max
  unsure at all n locations
  Clone ID: LIB3094-033-Q1-K1-G2
aaaaaaaaaaaaaaaaaaattttttaaaaaaaaaaaaaaanncaccnttcgttaattntaaaaaaaaancccccccacacacaaananaaaanaaaaaaaaaaataaaaaacaataaaaaaanaaaaaaaaaaaaaaaaaaaaaaaaaaactaaaaatatccaataaaaaaatcaaaaaaaaacaatataacaaaaaaaaaattcaatataaatcacaaaaaaaaatttataaaaaaaaaaaaaaaaacaaataaaaaaataaaaaaattcaaaaaaataaataatccaatctanaaaaaacaaataataaatacaaattccaacaaaataaacaaaataaaaatatcaaaaaatcaaaatatcacacccctttaataaaaaataacacaaaaaaaaatctaaatataataaaaaaaataaaaaataaaaaaaaaaaaaaaacaataataaaataaaaa

SEQ ID NO: 14928 - DNA, 446 bp, Glycine max
  Clone ID: LIB3094-034-Q1-K1-C2
cctaaacaactctttctcttcttccttcgctcgttgttctccctcgcgtagatcgacaggggcggagacagagacgtttgctttccaggctgagatcaaccagctcctcagtctcatcatcaacaccttctactccaacaaggagattttccttcgtgaactcatcagcaacgcctccgatgctttggacaagattcgatttgagagtttgacagataagagcaagctcgatgctcagccagagttgttcattcatattattccagacaagactaacaatacactgaccattgttgacaggggtattggcatgaccaaagctgatttggtgaacaacttgggtacaattgctagatctgggtccaaggaattcatggaagccttggctgctggtgctgatgttaggatgattggacagtttggtgtggggttctactctgcatatc

SEQ ID NO: 14929 - DNA, 421 bp, Glycine max
  unsure at all n locations
  Clone ID: LIB3094-033-Q1-K1-B9
gtgtactttggggtctctaccctgctggatgcctcatctcgcgcgggccaaaaataagatgaagagcacaacgaggcagaactagcagtttctgaattttctggaaatggtgctgggatactatctgctgctagcacagttgccagtacttttctcttagtttttgttgctgaatggngcgacaagtcatttttctccacaattgcccttgcagcagcttcttctccccttggagtcatagctggagcactggctggtcatggtgttgcaactttgctagctgtacttgggggttctttacttgggacgtatttgtcagagaaggttattgcctacatcggaggtgttctctttctcgtctttgccgcaataaccttatttgaaattgtgcaatangggttaaaagaaatgcaatataatc

SEQ ID NO: 14930 - DNA, 454 bp, Glycine max
  Clone ID: LIB3094-033-Q1-K1-C1
aaacacccttgtcgaccacaccaaaattaaaaacataaaaaagcataaaagcacaaggggagataaaaaagggaaaataaaacattttgaagtcatatttgcacacttgattaaaggctgtcgtcccttgtgacggatgcgtggggtgctaataccttccctgtgcgtaaaaacaactcccgaactattcacacttaaagttcgtagaccacaccttttcaattttcccgacgctttcctcaaataaaagttggtggcgactccgcgcattttcctttcatggaagacgcacttgtgagtcccgcatcgccctcccgtcaaaaggtaagttgcgacagtacttgcccttccgccgaaaggtaagttccttaattgaattaactaataacaaaagtgaaactaaagctaaaataaactcacaaatcaagctttgtccataaaaatcacttaaaaa

SEQ ID NO: 14931 - DNA, 430 bp, Glycine max
  unsure at all n locations
  Clone ID: LIB3094-033-Q1-K1-C10
cccacgcctccncngacgcgtgggggtttttgtggataagagtgagctataatgggtggctgtagaccttgtttaattgctttgtttgatgttaaccggactcttacagctcccaggaaggtggtcacaccggaaatgttgacattcatgcaagaactacgaaaggttgtaacggttggagttgttgggggttctgaccttataaagatatcagagcaacttggcagcacagttaccaatgagtatgattacgtattttctgagaatggtcttgtggctcacaaagaaggaaagctcattggaactcagagcttgaagtcattccttggtgaagaaaagctcaaggagtttattaactttacacttcattatattgctgatttggacatccccattaagaggggaacatttatggaattccgtaatggga

SEQ ID NO: 14932 - DNA, 287 bp, Glycine max
  unsure at all n locations
  Clone ID: LIB3094-033-Q1-K1-C11
cccacgcggccgcccacgcataacaaaaccattacatatttttttatataaaanaaaaatataaaaacccctgctcttttctttctaaaaanccccccccccaccancatanactnttacancaacaataactaanttctaccctactattatcttatcactctttaccatctacatacttcaaacattcnaaatatcttctaatcaacacttattccacttttataacaacaatatcaaacatttaacacaaaatatcaatacttaccaattcccattacaattct

SEQ ID NO: 14933 - DNA, 320 bp, Glycine max
  Clone ID: LIB3094-033-Q1-K1-C2
cccacgcctccgcgtttccaaatattcacattagagaagaacaatagttctctccctgcaagctcatgatatgctagataagccatccttaggagcaatatatccgtcctcttcaatttattagcagaaggtgtgttgcgtattagaccatagtctttttgtcattgttgtttcccaacaacgcagtttagcctttgagagcatcagcaatcacatggtgatcagaatatcattcagcaattgaagatcagtggcatcaggcataggctagcaagcaatgatatggctttcttcccagcaaatttcatgctacaaacacc

SEQ ID NO: 14934 - DNA, 330 bp, Glycine max
  unsure at all n locations
  Clone ID: LIB3094-033-Q1-K1-C4
aaaaaaccaaccgacccacgcggacgcattctcctctctaaattcctcttattctattttttanacaatattaatatatcatggttccgtttttttattaaccaangacaacctccccttatctataattttcattnttaacaacattatccttcttttcaattcaacattttccaaaactgctantcctccctctctnaacccaactccatcaccaacccctacaccatacttcattaacctcacttanttactcactctnntctctccctttcacaaccttcctttatacctttaatccactaaaattatttacactttccaaaacca

SEQ ID NO: 14935 - DNA, 345 bp, Glycine max
  unsure at all n locations
  Clone ID: LIB3094-033-Q1-K1-C6
aaaaaaaaaaaaaaattttattttaaaaaaaaaaanaaaannnnnnncctttccgacctctgttataaaaaaaanancccccncccccacacccaaaaaaaaanaaanaaaaaaaaaaaaaancaaaaaaaaaaaaaaacaaaaaaaaataaaaaaacncaacaacaaaaaaaaaaatttaaaaaaaacaaaaacaaaataaaaaaaaaaataaaataaaaaatacaaaaaaaaaaaaaattaaaaaataacaacatttaaaataaaaatcaaaacataaaataaaattaatcacaaaataaaaacaaaaaataataaaaataatcaaccaaacatattaatctt

SEQ ID NO: 14936 - DNA, 421 bp, Glycine max
  unsure at all n locations
  Clone ID: LIB3094-033-Q1-K1-C9
cttctcatcattcattcatcttcgttctaagagccatgtctagcaccgttggccaaaccatcgagtgcatagctgcgattgcatgggaggctgggaagccgctggtgattgaagaagtggaggttgcgccaccgcaagccggtgaagtccgtttgaagatcctctacacctctctttgccacactgatgtttacttctgggatgcgaanggccagactccattgtttcctcgcatttttggccatgaagcttcggngattgtggagagcgtangcgagggtgtgactcatctgaaaccaggtgaccatgccctccctgtgttcacaggagagtgtggagattgcgcccattgcaagtcaaaggagagcaacatgtgtgagctactcangatcaacaccgataggggtgtcatgatccatga

SEQ ID NO: 14937 - DNA, 189 bp, Glycine max
  unsure at all n locations
  Clone ID: LIB3094-033-Q1-K1-D1
accattgcttaaacactgtttagctgcaacatatatgttctgcttctttcttttgtggntgtagttgagttcaccactacactgtaatttcatttccattttgtctggatttcaatcttttatttgtaatgaggaaatatgacgtcttatttttatattatttttttaatgcgtatgacgtgtttgttg

SEQ ID NO: 14938 - DNA, 441 bp, Glycine max
  unsure at all n locations
  Clone ID: LIB3094-033-Q1-K1-D11
cacccgctaccttttcccgtgttcgttctaatccaatccaccaaatcggcggggtgggcttttttctatctcnaaaccacacatctgcngcngaaccnccntctccaactatctcctattgatcttccngtaaagtggaccggaaatgccggttgccgcttccgccatttacttcctcaacctccgcggcgacattctcatcaaccgcctctatcgcgacgatgtcgggggaaatatggtggatgcttttaggacgcatattatgcaaacgaaggaacttggtacttgcccaatgaagcaaattgttggatgctctttcttttacatgaagatcagtaatgtctacattgtcattggtgtcaacaacaaccccaatgtcgcttgcgctttaaagtttttgttaaggcttgtgcatttttcccacatactttgtggaacttt

SEQ ID NO: 14939 - DNA, 238 bp, Glycine max
  unsure at all n locations
  Clone ID: LIB3094-033-Q1-K1-D4
tcttcgcttctgtcttcatactctctgcttaccaacaaattaatgaatattgaatttatgggggaccttctacaaaaacactcaaacctaagtttgatgcctttacacatncggtgcattctcaaatgggctttccaattccaaaaattaatctgaaatttttaattgcttgggctatttctcttaaaggtcttggaagggttcttttcatattttgcaactctttttgaacttttct

SEQ ID NO: 14940 - DNA, 367 bp, Glycine max
  unsure at all n locations
  Clone ID: LIB3094-033-Q1-K1-D5
cccgctaccttttcccgngtactttctaatccaatccaccaaatcggcggcgcgtccttctttctgtctcgaaaccacacatctgcggcggaaccgccgtctccgactatctccgattgatcttccggtaaagtggaccggagatgccggttgccgcttccgccatttacttcctcaacctccgcggcgacgttctcatcaaccgcctctatcgcgacgatgtcgggggaaatatggtggatgcttttaggacgcatattatgcaaacgaaggagcttggtacttgcccaatgaagcaaattggtggatgctctttcttttacatgaagatcaataatgtctacattgtcattgttgtcagcaacaa

SEQ ID NO: 14941 - DNA, 131 bp, Glycine max
  Clone ID: LIB3094-033-Q1-K1-E10
cccacgcgtccggtaggattaattgatgtatagaagaatcaattgctcacttatgaaaggtgtatgaggagactttggcacaatccaaccaaccaaccacaaagtggatattttgactctttttttccctt

SEQ ID NO: 14942 - DNA, 116 bp, Glycine max
  unsure at all n locations
  Clone ID: LIB3094-033-Q1-K1-E11
aaaaattaaaaaaattttattaataaaaaaaaaaaaaaaaacccgtctttgttgttaaatnncccncccccaaccaaccaaccacaaaannnatatttttactctttttttccctt

SEQ ID NO: 14943 - DNA, 84 bp, Glycine max
  unsure at all n locations
  Clone ID: LIB3094-033-Q1-K1-E2
aaaaaaaaaaaaaaaaaattatttaaaaaaaaaaaaaaaancnnncccttactttcttgaaaaaaaaaaannccccccccaacc

SEQ ID NO: 14944 - DNA, 114 bp, Glycine max
  Clone ID: LIB3094-033-Q1-K1-E8
aaaaaaaaaaaaataaaaaataaaaaataaaaaaaaaaaatcacaaacaaaaaaaaaaaaacaaaatattaaatactaaataaaattataaaaaatataaaatacaaaaaaaaa

SEQ ID NO: 14945 - DNA, 384 bp, Glycine max
  unsure at all n locations
  Clone ID: LIB3094-033-Q1-K1-E9
cccacgcgggcgcggaaccaccgtttctctctctctcacacacacatgtttctgccactgtcactcttctcttgtccttgctgcttctccaattctctatttttccccacaatcnattgtatgctttgggccagtcgttaatgataacttgaggtctggatgatgctttctgattggttgtttacatattgtaattcagaatgtggaactttgcatcgaattgcattgctggaactgtgggactgaaaaatgattcaaagcctactcattctgcttcggaatgttctgatgatgaaaactctgttatatgcagaaaaggaaaggctggaattcccaatatgcntggaatctttcaatattgttgaaaatgtgccctatgtttta

SEQ ID NO: 14946 - DNA, 424 bp, Glycine max
  unsure at all n locations
  Clone ID: LIB3094-033-Q1-K1-F5
gaattaaaaaacgacccacgcggccgcccacgcgtgcnnccacgcctacngaaaaaattatttttccttacggatggtggaatcaccgcgccgttgtgattgcatagtgcccntccccaccaagatggaagacaaagagagtgagagagagaaaaatcttcgctttatgtcaatggcacgaagcacgggtttttacagaagtgagcaacgacgccagatatgagaaaagtgagtttatttggggtcatatttgtaaaaagnggntttgtaattataccctctaattcaagagtgaagaaacaagggtgggatggaaatataaataagacaattttggtcctagtggtgggcttacccctttggcctcttttttctaattcaaaattttttttaaatatataaaagttgcgtgatatgtttactt

SEQ ID NO: 14947 - DNA, 115 bp, Glycine max
  Clone ID: LIB3094-033-Q1-K1-F9
acccacgctccgcccacgctccgtagattaattattattaaaatcaagctactataaagtgttgagaacttgcacatcaccaacaacacaatgatatttgactcttttttccctt

SEQ ID NO: 14948 - DNA, 351 bp, Glycine max
  Clone ID: LIB3094-031-Q1-K1-H2
gtcagtcttcagagctaataatgttctcactcttccatctcagtatgtgttgacatgctgggcaaggtgggctaaaaccggtacattgttagatgaacatgcatctgaattgccaagtacttctcgtgaatctgtaccagtttgttataacaatttacgacaagaagcaatccaatatgttgaagaaggtgcataatcaatccaaatctatcatgttgccatgagagctctgaaagaagctgctaaaaaagtttgcaccataaaaaaatagagttctggaacaacaaaaggagctaccacaaccaatggaaaccagggtgaattgcttgtaacacattaaaatggtttttt

SEQ ID NO: 14949 - DNA, 247 bp, Glycine max
  Clone ID: LIB3094-031-Q1-K1-H3
tcgaccactcgtccggtcaggcttcatagctaatatatgttcttacttttacatctcagtatatgttcacatgctacagaagttttgcaaaatccaatacactgttagattaacatgcatcttaattgccaactacttctccttaatctgtaccagtttgatataacaatctaccacaagaatcaatccaatatgttaaataatgtccataatcaatccaaatctatcatttttccattataactct

SEQ ID NO: 14950 - DNA, 356 bp, Glycine max
  Clone ID: LIB3094-031-Q1-K1-H5
cgtcagtagactcacacctgaaactctcaatggctgaaactcccacaatccgtggcggcgtgatcagctgcgccgacatcgcgcgcaaggtctcgcgcgccatctccctcgcccccaacgccgacctttacgccgtcggcagccgctccctcgacaaggcgcgtgccttcgccgacgtcaacggcttccccgccgccgccaaggtgcacggctcctacgaggcggtcctcgacgatcccgacgtcgacgccgtgtacgtaccgctccccactagcctgcaagtgcgctgggccgtgctcgccgcgcaaaaaaaaaaagcacgtcttggctccaaaagaaaaaggcccccccccggt

SEQ ID NO: 14951 - DNA, 283 bp, Glycine max
  Clone ID: LIB3094-031-Q1-K1-H7
ccacgcgtacacgtcagtagactcacaccttaaactctcaatttctgaaactcccacaatccgaagcggcttgataaatttcacaaacatcgcgcgcaaagtctcgcgcgccatctccctcgcccccaacgccaccctttacgccgtctgcagccgctccctcgacaaggcgcgtgccttcgccgccgccaacggcttccccgccgccgccaaagtgcacggctcctactaagcggtcctcgactatcccgacatcgactccttgtacgtaccgctccccact

SEQ ID NO: 14952 - DNA, 447 bp, Glycine max
  unsure at all n locations
  Clone ID: LIB3094-032-Q1-K1-A10
ctcaggaggagaataaggatgtctcacaggaagttcgagcacccaaggcacgggtcactgggatttctccccaggaagcgtgctgctcgtcacaggggaaaagtgaaggcattccccaaggatgacccatccaaggcacccaagctcactgcattcttgggttacaaggctggtatgactcacattgttagagaggtcgagaagccaggatcaaagcttcacaagaaggaaacatgtgagcctgttacaattattgagacccctccaatggttattgttggtgttgtgggttatgtgaaaactccccgtggtctccgaacattgaacactgtatgggctcagcacttgagtgaggaactgaaacgtangttttataagaactggtgcaagtccaagaagaaggccttcaccaagtactcaaagcagtatgaaactgaagagggaaag

SEQ ID NO: 14953 - DNA, 418 bp, Glycine max
  Clone ID: LIB3094-032-Q1-K1-B11
gacccacgcgtgcgcccacgcgtccgcccacgcgtccgcccactcgtccgctttcaatggaagtcatgtctgcgtctatcttgaatcccaacgctccgatgttcgagccactcgcctatcggacggtggaggatttctccgaccagtggtgggacctcgttcactcctccccctggttcctcgactactggctccgctagtgcttccaagatccccagttccaaaacgacgacgctttcgacttcgactttgacctagatctccaagatgaagatgaaagggaacgaaaggaagggaaggaggtggtgtcgttggggctgctgaaatggcgaagctgtggaggaggatgggcccaggcgccgaagtatgtggaaaaggcccccaagtttgtgaagcccaaggtgagcccacgggctat

SEQ ID NO: 14954 - DNA, 459 bp, Glycine max
  Clone ID: LIB3094-032-Q1-K1-B12
catgctcctctctgaattcctcttattcaggaatttggagagtattgatatatgaaggtgggataaaccagtagccaaggaagatatggagttttctatgattttcattgttagcaacattatgctgcttttcagttcagcatttgccaaaactgctagtcctccctctctgagcccaactccagcaccagccccggcaccagacttcgtgaacctcactgagttactcagtgttgctggtccgtttcacaccttccttggataccttgagtccactaaagtgattgacactttccaaaaccaagccaacaacactgaagaaggaattaccatctttgttcctaaggacagtgccttcaatgctataaagaaaactaccctatccaacctcacctctaaccagctaaagcaagtgatcctcttccatgccttgccacatttctattctctggctgagtt

SEQ ID NO: 14955 - DNA, 458 bp, Glycine max
  Clone ID: LIB3094-032-Q1-K1-C11
cccacgcgtccgtcaagcattgcatccctcttgatttgtagtttgttttgtgcgttagaggaaagttctgccaaatcaagaggggttttaagatcatagtgtgtgttttgcaacaatggctaagttctttgctgctatgatcttggcactctttgccatttccatacttcaaacagtggtaatggctgctaatgaacaaggaggccacttgtatgacaacaagagcaaatatggaagtggaagtgtcaagagttaccaatgcccatcacaatgctcgaggagatgtagccagacccaataccacaagccctgcatgtttttctgtcagaagtgctgcaggacatgcctgtgtgtgcccccggggtattatggtaataaagctgtgtgcccttgctacaacaactggaaataccaaggaaggaagacccaagtgcccttgagctttaacttgttcaact

SEQ ID NO: 14956 - DNA, 403 bp, Glycine max
  unsure at all n locations
  Clone ID: LIB3094-032-Q1-K1-C12
gctgcctccttttacnagcctttcctttcattccattgattctgtgggtgcgggtgcagggaaacctagctagaccctgatcggcgtcagcacaccgtcggataacaagatgattgtctgcgtcgtcgtcgtcggtcaccataacaatctgctgtacatacagagctttactgatgccgaagatgctcttaagctccaccacatcgtccattgctcgctctatgttgtctactagcgagtgaacaatcctaaaaagtctgggccgatgcttaatgagacgtttttgggactgctttatcctattgaaaactacaaagtatatggatatctgactaatacgaaggtgaaatttatcttgattaccacggatctggatggtaaagatgctgatgtaaggaatttt

SEQ ID NO: 14957 - DNA, 398 bp, Glycine max
  Clone ID: LIB3094-032-Q1-K1-E10
cccacgcgtccggtgatttcagttagtgatcggtgttcacttgatctcatcatgatcgtgttcgtctattgaagaagatgccgatcagaaacatcgccgtcggaaggcctgaataggcgactcaccccgacacgtttaatgctgctttgtctgaattcatctcaaccttcatcttcgtgttctcctgctcaggctccttcatctgctactacaagctcaccgactactgcgcttccacccctgccgtcctcatctccgcctccatcgcccatgcattcgccctcttcgtcgccgtcttcgtcggttccaacatctccggcggccacgtcaaccccgccgtcaccttcggcgccttcgttctctgcaacatcaccttcctcctcggcatcgtctacgtc

SEQ ID NO: 14958 - DNA, 377 bp, Glycine max
  Clone ID: LIB3094-033-Q1-K1-A12
gaatcccggtcaccacgcgtcgaagacatcttctctgatgtgctccctcactctcgaattgaactgttggtggagtcatgacaaattgattcccagaaacactgttatcccaaccaagaaatctcaggtgttcaccacctatcaggaccagcagactacagtctccattcaggttttcgaaggcgagaggagtctcacaaaggattgccgccttcttgggaaatttgatctgtctggaattcctccagccccaaggggtacgcctcaaattgaagtgaccttcgaagttgatgccaacggcattctaaatgtgaaagcagaagacaagggcactggtgaatcagaaaagatcaccattacaaacgaaaagggacgtc

SEQ ID NO: 14959 - DNA, 255 bp, Glycine max
  Clone ID: LIB3094-033-Q1-K1-A2
aaacaacaaggtattcttatcaatggccaattcccaggccctggaatctattctggtaccaatgacaatttgatcattaacgtgcacaataacttgaccgagccgtttcttctatcatggaatggtgttcaacaaaggagaaattcttattaagatggagtttatgggaccacatgctccatccctcctggggagaaacttacctacacactttaaggtaaagatcaaattggaggggggttgtatttcccatct

SEQ ID NO: 14960 - DNA, 363 bp, Glycine max
  unsure at all n locations
  Clone ID: LIB3094-033-Q1-K1-A5
aaaaaaaaaaccggccacgcggacggcagganaaaaataaanatnaaaaatttctttttccagcacccaacccacncncctgccctgctttttttacatcaanncccctcccccacacannncaaaannnaatacactcccaaactcacacccatccaaagcacccaacctcactacatacattaataacaaatcttaaacaactcacattaccatatangaccataaacccctatcaaaacttcacaaaacacaaacatttaanccataaacaattattcaaacccctccaataaataaaattntcaatatnncacatatcaaaactcccaaagttctccaaacatttaacactatattacc

SEQ ID NO: 14961 - DNA, 176 bp, Glycine max
  unsure at all n locations
  Clone ID: LIB3094-033-Q1-K1-B12
gaaaaaaaaaaanaaacacttttaactttttttctttttgcattgaatttgaaatacttgaattggaaaaagcgttcgggtttttttgttgttttaacccatcaaattcaaattttaaagccgtgctcttctttcnnnaaaaaaaaanaaaaaaaaaaaaaaaaaaaaaanaaaaa

SEQ ID NO: 14962 - DNA, 427 bp, Glycine max
  unsure at all n locations
  Clone ID: LIB3094-033-Q1-K1-B2
aaaaaaccgaccggcgacgcgtccggaaaacaanaantantganaaaaagttatattatggaggaaaaggcaaaagctgagcgggccgttgatttttataaccnanactcccctccccaancaccntcttctttacaatgganccactatacaccctcttattattagcattcgcgatggcaccatcaacactgcttccttcaaaacatggctcgcacaggattacttgttcgttcgggcgtttgtcccatttgtggctagtgtgctgataaaagcgtggaaggaatcagattgcagtggtgacatggaagtcatattggggggcatggcttctctggaggatgagatttcatggttcaagacaaaagccaacaaatggggtatttcactttctgacgttgttcctcagcaggctaacaaaaactat

SEQ ID NO: 14963 - DNA, 450 bp, Glycine max
  unsure at all n locations
  Clone ID: LIB3094-033-Q1-K1-B3
aaaaaacggaccggcggcgcgtgcggaaagcaataagtantgataaaaattttgagtatggaggaaaaggcaaaagctgagcgctcgcgtttatgtataaccganactcccctccacaaacaccntattatttacaatgnanccactaaacaccctcttattattagcattcgcaatggcaccatcaacactgcttccttcaaaacatggctcgcacaggattacttgttcgttcgggcgtttgtcccatttgtggctagtgtgctgataaaagcgtggaaggaatcagattgcagtggtgacatggaagtcatattggggggcatggcttctctggaagatgagatttcatggttcaagacagaagccaacaagtggggtatttcactttctgacgttgttcctcagcaagctaacaaaaactattgtgggttgctggaaaagttaatg

SEQ ID NO: 14964 - DNA, 360 bp, Glycine max
  Clone ID: LIB3094-033-Q1-K1-B4
caggaatcccacgccacttgcaattccatctctgtgtttgattctctgcttcgtcctgtctgtcctcttccgaatcgttaatcgctcgatcgatccatctcccgcttccaatgacaacccctaccgacaacaataacaaccctgcacaggaaacccctaccaaacccttaaacccaaccaaaccaaatccaatccttgccaccgagaacaaccccgccgccaacactaaggactccaacgccaaactttccctcccgcccaatcttgaaaccacccctccctttctcctttttcaaaaaaaattcccctcccccaaccgattcggcatttccgtccaattttccaaaaaaaaaaacccca

SEQ ID NO: 14965 - DNA, 440 bp, Glycine max
  unsure at all n locations
  Clone ID: LIB3094-031-Q1-K1-H1
aaacacccttgtcgaccacaccaaaattaaaaacataaaaaagcataaaagcacaaaaagacgtaaaaaagggaaaataaaacattttgaagtcatatttgcacacttgattaaaggctgtcgtcccttgtgacggatgcgtggggtgctaataccttccctgtgcgtaaaaacaactcccgaactattcacacttaaagttcgtagaccacaccttttcaattttcccgacgctttcctcaaataaaagttggtggcgactccgcgcattttcctttcatggaagacgcacttgtgagttccgcatcgcccttcccgtcaaaagggtangtttccgacaagggttaacccttttttggccccccctttttttcccccccggggcccccccccggaaaaaaaaaaggggggggttttttaaaaagggggtttttttttcc

SEQ ID NO: 14966 - DNA, 397 bp, Glycine max
  Clone ID: LIB3094-031-Q1-K1-C12
gggccgacgcacgcgtccggctgcctcctgttacgatcctttcctttcattccattgattcggtgggtgcgggtgcatgtaaacggatctagaccctgatcggcgtcagcacaccgactgagaacaagatgattgtctgcattaccgttatcggtcaccagaacaatcctgtgtacatacatagctttacagatgcctatgatgctcttaatcttcaccacatttgctatagctcgatcgaagtgacgacttgctagagaacaatcctagaaagtctgggccgatgcttaatgagacgtttttgggactgctttatcctatttaaaactacaaagtatatggatatctgactaatacgaaggtgaaatttatcttggtgaccactgatctggatgtt

SEQ ID NO: 14967 - DNA, 286 bp, Glycine max
  Clone ID: LIB3094-031-Q1-K1-C2
gaagttgcgagagtgaagaaatggcgcaagacttggcattggatttggaggagcttcgccggctccacagcatcgccaaaagacctcgaaccctctctcttctctcctccgaaattcgtaacctcgaaaagttatcgtcagaggaagcttctgcgcagattccggcgccgatttcgaccggaactaaagtggcgccttcacctgcgctgaagtatgcggcactcgcgtcgttcagttgggaccaggatagtgacaaagttaagatatatgtgttaatggagggaat

SEQ ID NO: 14968 - DNA, 317 bp, Glycine max
  Clone ID: LIB3094-031-Q1-K1-C4
attaagggtgagatatatagaaaaacaaaggagaaaagatagaaatggagaagtttccaggggttgacatggggaaccttaataatgaagagagatcagcaaccatggagataatcaaagatgcctgtgagaactggggtttctttgagttggtgaaccatgggatatccatagagttgatggacaccgtggagaggatgacaaaagagcactacaaaaagtgtatggagcaaaggttcaaagaaatggtagcaagcaaaggtttggagtctgctcaatctgaaatcaatgatttggattgggaaagcactttcttt

SEQ ID NO: 14969 - DNA, 259 bp, Glycine max
  Clone ID: LIB3094-031-Q1-K1-C5
ttcccttgtcgacaccacgcctgcggtccttccttcatccattttctacacgtatctcctttcactttattgcctccatgtgtacgggtgcatttgaaccgttctagaccctgatcggcgtctgcacaccgtcggagaacaagatgattgtctgcgtcgccgtcgtccgtcaccataacaatccgctgtacatacaaagcttcactgaggccgatgatgctctcaagctccaccacatcgtccattgctcgctcgatgt

SEQ ID NO: 14970 - DNA, 221 bp, Glycine max
  Clone ID: LIB3094-031-Q1-K1-C7
ctctactttattgttcaaacaatttcgcggacctttcgtgcttttttcagaccaaaatcgtggctgtggaatggcagaaggcaagtgtctcccatgttcatgtgtttctggaagaactgctgctgtatattcctactcttctctaggtcatcacagaattcattcccgtgtccaagttagaggactaaagtgttgctttaagggtgcatcttttgtatgtg

SEQ ID NO: 14971 - DNA, 246 bp, Glycine max
  Clone ID: LIB3094-031-Q1-K1-D1
cccacgcgttcggctccctctcctctcttctcttctgttcaaacaatgtcgcgaacgttgcgtgctttcgtcgccaaaaatcttggctgtggaatggcagaaggcaagtgtctcccatgttcaggtgtttctggaagaactgctgctgtatattcctactcttctctaggtcatcacagaattcattcccgtgtccaagttagaggactaaaatgtggctttaggggtgcatcttttgtatgtgaa

SEQ ID NO: 14972 - DNA, 406 bp, Glycine max
  Clone ID: LIB3094-031-Q1-K1-D11
cttgtctctgaaaaaacatgttgagggtttcagctataatgctctcttcttctctctcagcttctgttccaatgcggcccagtcacgccacttccgcttttctctctctaaactacattatcgtctattaccgcatatcttctccttcctaccatacacttcttcccttcatatgttatgctacttaatctctgatccacacaataatatacagcaatactctctataattcttcaactaatactgctgttaagaaccctacttctaagattgtctatgatgatcacaaccatgaaagatttcccccagttgacccaagcaagagggcatttgcctacttcgtacttacaggttgtaagtattcttatgcctctgtggtccgtctccttttcctcaagtttgtgct

SEQ ID NO: 14973 - DNA, 188 bp, Glycine max
  Clone ID: LIB3094-031-Q1-K1-D5
cccacgcttttatctccctcttttctcttcttttctgttcaaacaatttctcagacattttagacattcttaagcaaaaatcttccctccaaaattacataattcaaatatctcccatattcaagtatttcttgaacaactgcttctttatattcctactcttctctaagtcattacaaaattcattc

SEQ ID NO: 14974 - DNA, 459 bp, Glycine max
  Clone ID: LIB3094-031-Q1-K1-E12
cccacgcgtccgcgagcttcagcaatggtgtacgtcaaggctcagaaatcaaaagcctagttcaagagatatcaagtcaagttcaagagaagaagagagggaaaaaccgattaccgtgccaggattcggttgattaatcaggacaagaacaaatataacactccgaaataccgatttgtggttcgctttagcaacaaggacattgttgcacaaataatatctgctagcattgccggcgatttagttcttgctacagcatattcacatgagctgccacgatatggtcttgaagtaggacttacaaattatgcagcagcttattgcactggtctcctgttggcccgaagagtcctcaaaacacttgaaatggatgaagagtatgaaggaaatgttgaggctactggagaggattattcagtggaacctgccgagagcaagaggccattccgggcactcctt

SEQ ID NO: 14975 - DNA, 285 bp, Glycine max
  Clone ID: LIB3094-031-Q1-K1-E6
cagagtttgagtggacctgtctcagctaccctttaccttggttattcactactgatggccgttgcaatcatgttgtcaaccggcaccattggcttccttatgtcattctactttgtgcactacttgttctcatcagtaaagatagattgaggttcttgttgtcattgcatattaactatgaaaaaggttgattgatataacttgatcacattgcatagtaaggcaacgggatgtttaattcattggctgattttatattggcatgggatctgcaatttggtcttc

SEQ ID NO: 14976 - DNA, 426 bp, Glycine max
  Clone ID: LIB3094-031-Q1-K1-F12
gaagaaatcaaggacattgtaagtttcaactcttattataaagaagaggagcgttatgcgacaagcgccaatcaccagccttaaaaattataacagaggttggagagaccaatcttaaacaacagcccttgtactgtgtgatgatatcagtctacttttattctcagctacttttaactgtctttgggatatgttcattgttcaataccgaatgatgaatatcgatcttaatgtctgtctgtttagtagtattttatcaaaataaataagacccgtctaattaatcatggagtaaatttcgtgataaatggcaaggttgctcaaccagttaacgatgacaaaattgactttttcatgcttgtcgtcaaggatgcatgtttgtggatgccgatttagactgagtgaatgaagttgaaagggattttt

SEQ ID NO: 14977 - DNA, 326 bp, Glycine max
  Clone ID: LIB3094-031-Q1-K1-F3
cccacgcgttcggcgaaatcccccaactccatcctctgttcatcgtctaccgggctttcttgtgaaccataactatgattaaggtttttaaagtaaaggaaaagcagagagaacttgcagaaaatgcaagtggcggaccacctgttaagaagcaaagtgctggagagttgcgtcttcacaaagatataagtgagctgaatctaccaaaatcatgtaccatgcaattccccaatggcaaagatgatctgatgaactttgaagtttcaattcgacctgatgatggatattacttaggtggcacattttttgttttcctttcaagtgtc

SEQ ID NO: 14978 - DNA, 131 bp, Glycine max
  Clone ID: LIB3094-031-Q1-K1-G1
aatcaaattaaactcctacaacattggctcttacattaattgccaatccaaatccactgaatcttctgtcacttctgttaatccttctaacaatcataacatatctcaagttactgaaaccactttccaac

SEQ ID NO: 14979 - DNA, 396 bp, Glycine max
  unsure at all n locations
  Clone ID: LIB3094-031-Q1-K1-G12
gacgcacgcgtccgcaacagagtaatatgcttaagctcagggtctgaacccaagagcaagttctatagactgagcatatgtttaactgttnnatgactngtcatcttcccttcatattaaatcattttaataagtatcattatatttctgttctcttattctcatctacatatatgttaatggttcatacacttattcataaatatctacttatatcatatcttacaataaaacatgattaatgattatcagactaaattgcaaaagatataaatcatattgatgtccttacaaagaggtatcaatgctggttgcagccttaattattccaaatcatttaaaatagcagcagctaacagggcacgtgcaataattatactttcaacaaaaagagat

SEQ ID NO: 14980 - DNA, 260 bp, Glycine max
  Clone ID: LIB3094-031-Q1-K1-G2
acgggaaagatgacctgcactttgtagataacgttctggattcagctgctcaggagtatgctagcaaatctgataactttccaacagagatcattgttgacaaccaagtctatcttccacctggacccagtcgtcacaattctcacgatctctactgctccggtggggtggtgttggcttctcgtgatggaaagattgtgtgtgaaaatactcttgatgcacgtcttgatgtagttttccgtaaaaagctttcaaaaatc

SEQ ID NO: 14981 - DNA, 229 bp, Glycine max
  Clone ID: LIB3094-031-Q1-K1-G4
gcgcccacgcgtccgagaaggctctgggcttagttgataagcataactgggtgaggaagaaagaaggagagtggggaagattgcgtcgagccgaaccgtacccgttttgaaggccgccgggattaacgtccttaccttactcaaccttatgcccgaatctgctcaggaattgcctcaaggaaccctacaaggcgaatccctctctcgtgagaagctccattttggtctc

SEQ ID NO: 14982 - DNA, 325 bp, Glycine max
  Clone ID: LIB3094-031-Q1-K1-C1
cgaaccacgcctgcggtccttccttcatccatttcctgaacgaaaccaacttcactttccttccgccatttgcattggtcactttgtcttctgaatgggcactgcactgcacctctgcgttagtttcaatcctgctcaaggtagaaaatgcaagtacgaagcccaatcagtgagagcacttcctatacgtatattatcagtggggaagaagcgatcacgtggactgcaactcatggttgatgagtatgtggataagctcaggtactattgcaatgttgaggatgttcaaatacggccaaatcctcaaaatgcacgttacccaaag

SEQ ID NO: 14983 - DNA, 319 bp, Glycine max
  Clone ID: LIB3094-031-Q1-K1-G5
ggaaagatgacctgcacttggtagagaacgtgctggattcagctgctcaggagtatgctgaggaagcaagtgtcgatcccccagagatcattgttgacaaccaagtctatcttccacctggacccagtcgtcacaattctcacgatctctactgctccggtggggtggtgttggcttctcgtgatggaaagattgtgtgtgaaaatactcttgatgcacgtcttgatgtagttttccgtaaaaagcttccagagatccgaaagcagctctttggacaaattgttgcttgaagattttgattgtaatgtttgggtacccc

SEQ ID NO: 14984 - DNA, 297 bp, Glycine max
  Clone ID: LIB3094-031-Q1-K1-G6
aaaaaaaaaaaaaaatacaaaataaaaataataataaaaaaaaaaaaaaataaataaaaaaaataataaaaaaaaaaattaataaatatataaaaaaaaaaaaaaaaaaaaaataaaaaaaaaaaaaaaaaaaacaaaaaaaaaaaaaaaaaaaaaaaaaccacaaaatacaattaataaaaaaataataaaaacaaataaaataaaaaaaaaaattaaaaatacaaaaaaaaaaattaaacaaaaaaaaaaaaatataatacaaaaaaaaaaaaaacaatataattataatattac

SEQ ID NO: 14985 - DNA, 436 bp, Glycine max
  Clone ID: LIB3094-030-Q1-K1-G3
tctctctcactcactttttctgctttcactgtcactcttctcttctgctttcttatgacactattctatatttttgcgctcaatcgattgtattctttgtgccattcgttaatgataacttgagatcttgatcattctttctgattgtttgtttacatattgtaattcataatttataacttttcatcgaattgcattgctagaactgtcgtacttaaaaatcattcaaagcctactcattctgcttcgtaatgttctgatgatgaaaactctcttatacgcataaatgaaagtctgtaatgcccaatatgcttggaatctttcaatattttctaaaatgtgccctatgttatatgatgtggccacaccctttttaaaaattgtatcctcggacttcattgatctgtttttaaatttccaacacttccttttcaac

SEQ ID NO: 14986 - DNA, 410 bp, Glycine max
  Clone ID: LIB3094-030-Q1-K1-G5
ggaagcaccgtttctctctctctcacgcacttatggtgcttccactgtcactcttctcttcagctttcttttgtaccgattctcgatttttgcgcgcaatcgattgtatgctttgggccagtcgttaatgataacttgaggtctggatgatgctttctgattggttgtttacatattgtaattcagaatgtggaactttgcatcgaattgcattgctggaactgtgggactgaaaaatgattcaaagcctactcattctgcttcggaatgttctgatgatgaaaactctgttataggcagagaggaagggctggaatgcccaatatgctgggaatctttcaatattgttgaaaatgtgccctatgttttatggtgtggccacaccctttgtaaaaattgtatcctctgac

SEQ ID NO: 14987 - DNA, 464 bp, Glycine max
  Clone ID: LIB3094-030-Q1-K1-G6
tcccgtttcgggccacgcgtgcgcggaacgaccgtttctctctctctcacgcacacatggtgctgccactgtcactcttctcttctgctttctggtgcgccgattctctatttttgcgcgcaatcgattgtatgctttgggccagtcgttaatgataacttgaggtctggatgatgctttctgattggttgtttacatattgtaattcagaatgtggaactttgcatcgaattgcattgctggaactgtgggactgaaaaatgattcaaagcctactcattctgcttcggaatgttctgatgatgaaaactctgttataggcagagaggaagggctggaatgcccaatatgctgggaatctttcaatattgttgaaaatgtgccctatgttttatggtgtggccacaccctttgtaaaaattgtatcctcggactgcagtgggctgttgtgaaatttccaacac

SEQ ID NO: 14988 - DNA, 410 bp, Glycine max
  Clone ID: LIB3094-030-Q1-K1-G7
cggaagcaccgtctcactgtctctcacgcacacatggtgcttacactgccactcttctctacggtttctggtgccgcgatactatattttagcgcgcaatcgattgtatgctttgtgccagtcggtaatgataacttgagatctggatcacgctttctgataggttgaacacatattgcaatttagaatgtggaacttttcatcgaattgcattgctggaactgtcggactgaaaaatgattcatagcctactcattctgcttcggaatgttctgatgatgaaaactctgatataggcagagatgaacggctgtaatgcccaatatgcttggaatctctcaatattgtcgaaaatgtgccctatgtcatatgatgtggccacacccttttgaaaaattgtatactaggac

SEQ ID NO: 14989 - DNA, 395 bp, Glycine max
  Clone ID: LIB3094-030-Q1-K1-G8
ccgtttctctctctctcactcacttatggtgctttcactgtcactcttctcttaagctttcttttgaaacctattctgtatttttgcgctcaatcaattgtatgctttgtgccaatcattaatgataacttgaggtctgtatgatgctttctgattggttgtttacatattgtaattcataatgtgtaacttttcatctaattgcattgctggaactgtttgactgaaaaatgattcaaagcctactcattctgcttcataatgttctgatgatgaaaactctgttataatcagaaatgaatttctgtaatgcccaatatacttggaatctttcaatattgttgaaaatgtaccctatgttttatggtgttgccacaccctttgtaaaaaatgta

SEQ ID NO: 14990 - DNA, 391 bp, Glycine max
  Clone ID: LIB3094-030-Q1-K1-G9
ggcgaagatggggatgtggcactcttcttttgactctcaggtaccgtaaagaccactctgtcgaccgatcacaataggtatctaatcggagatgatgaacactgttggggtgacaatggtgtctccaacattgaaggtggttgctatgccaaatgcattgacctctcacgggagaaagagccagatatttggaatgcaatcaggtttggcacagtgttggaaaacgtggtgtttgatgagcacgaccgagaagttgattactctgacaaatcagttacagaaaatactcgtgctgcttatcctatagagtacattccaaatgcaaagttaccttgcgttggccctcatccaaagaatgtcatacttttggcatgtgacgcatttggggtac

SEQ ID NO: 14991 - DNA, 190 bp, Glycine max
  Clone ID: LIB3094-030-Q1-K1-H1
ctgcgcggacgcgtgggctcgttgctgctaggaggactggtcgtcttagggggcaagctgctgccactggtgctaaagcggataatactacttgagaagatttttagggtgttatttgttctcaaattttgtttctttcatagtttatgttgaactctttgggttctattttgaacagcatttccgccat

SEQ ID NO: 14992 - DNA, 390 bp, Glycine max
  unsure at all n locations
  Clone ID: LIB3094-030-Q1-K1-H6
tttctctctctctcacacacttataatnctnccactgtcactcttctcttaagctttcttcttaaacgattctggatttttgcgctcaatcgattgtatgctttgggccagtcgttaatgataacttgaggtctggatgatgctttctgattggttgtttacatattgtaattcataatgtggaactttgcatcgaattgcattgctggaactgtgggactgaaaaatgattcaaagcctactcattctgcttctgaatgttctgatgatgaaaactctgttataggcagagaggaagggctggaatgcccaatatgctgggaatctttcaatattggtgaaaatgtgccctatgttttatggtgttaccacaccctttgtaaaaatttg

SEQ ID NO: 14993 - DNA, 236 bp, Glycine max
  Clone ID: LIB3094-030-Q1-K1-H8
cactcgtccgcggacgcgtgggctcagtgctgctaacacgtctgttgcgcttacggtgcaagctgctgccacggctgctttagcggataatactacttgagaagactcttacgatgttattcgttctcaaattctgtatctatcataggttatgttgaactctctgggttctattttgaacaccatttccgccataaatatgaaaagctttgttaaaaaaacaatactaggactgt

SEQ ID NO: 14994 - DNA, 193 bp, Glycine max
  unsure at all n locations
  Clone ID: LIB3094-031-Q1-K1-A10
ctgagttgcaagattcacttcaaattatgcgtttcgctgatcggttcctcatcacatcaggcgacgtctcanatcatcgcaattccttgattatttccttttgttgatactcggaatcgcgcacacggttctggtgtgtgcactgatgtagaaagtagaagattgaattgtaaacagctataattaccttctt

SEQ ID NO: 14995 - DNA, 442 bp, Glycine max
  unsure at all n locations
  Clone ID: LIB3094-031-Q1-K1-A7
acgatggctcccaaaccgccttgtacgggtctgtttgttggactgaacaagggtcgggtcgtcagcaagattgaattgcctccacgcccctcagatcgtaaggggaaaacaagcaagagggtgcactttgtgaggaacctcataagagaggtagccggttttgcaccctatgaaaagcgtataactgagttgctgaaggttgggaaggataagagggcactgaaggttgcaaagagaaagctcggaacacacaaacgcgcaaagaagaagcgtgaagaaatgtccagtgttctcaagaaagattaaggccttggtggttcttgggagaccaagaaagaaaaaaaatttaaaaaggtttccttttttaaaatttttttttttaaacccctttttggggggntttttttttttttttcccccccaaaaaggaaaaaattttttt

SEQ ID NO: 14996 - DNA, 168 bp, Glycine max
  Clone ID: LIB3094-031-Q1-K1-A8
aaggggaaaacaagcaagagggccactatgagaggaacctcataagagaggtaaccgattatgcaccctatgaaaagcgtataaccgaattgctaaaagatgaaaaggataagagggcactgaaggatgcaaagagaaagctcgcaacacacaaacgcgcaaagaaaa

SEQ ID NO: 14997 - DNA, 384 bp, Glycine max
  Clone ID: LIB3094-031-Q1-K1-B1
accgcctattacgggtctgtttgttggactgaacaagggtcgggtcgtcagcaagattgaattgcctccacgcccctcagatcgtaaggggaaaacaagcaagagggtgcactttgtgaggaacctcataagagaggtagccggttttgcaccctatgaaaagcgtataactgagttgctgaaggttgggaaggataagagggcactgaaggttgcaaagagaaagctcggaacacacaaacgcgcaaagaagaaacgtgaggaaatgtccagtgttctcaagaaaatgaaggcttgttggtgcttgaagacaagaagaaaaaattttaaagggtttcccttttaaaatttttttttaaaacccttttggggtttttttttttt

SEQ ID NO: 14998 - DNA, 406 bp, Glycine max
  unsure at all n locations
  Clone ID: LIB3094-031-Q1-K1-B4
ccgcccacgcgtccgagaaggcctgggcttagttgataagcataactgggtgaggaagaaagaaggagagtggagaagatggcgtcgagcggagcggtaccgttttggagggcggcggggatgacgtacataacatactcaaacatatgcgcgaatctgctcaggaattgcctcaaggaaccctacaaggccgaatccctctctcgtgagaagctccattttgttctctccaaatgggtcgacgccaagcctgaaaaacctactattcgttcagacaccccagagcagtgatctggaatagttggaagctataaatgcataaatctttgagatctggaaagntttcccaaattttgggttcccaaatttttttttttttgggaaaaaaaacccccctttttttttt

SEQ ID NO: 14999 - DNA, 367 bp, Glycine max
  Clone ID: LIB3094-031-Q1-K1-B6
taagcattaatgcgccaggaagaaataaggagatttggagaatatttcaaagaccggagccctaccgatttggagggcggcggggatgacgtacataacatactcaaacatatgcgcgaatctgctcaggaattgcctcaaggaaccctacaaggccgaatccctctctcgtgagaagctccattttgttctctccaaatgggtcgacgccaagcctgaaaaacctactattcgttcagacaccccaaatcactgatctggaatagttggaaactataaattcataaatcttttaaatctggaaatttcccaaattttgagttaccaaatatttttttttttgtaaaaaaaaccccccccttttttt

SEQ ID NO: 15000 - DNA, 164 bp, Glycine max
  Clone ID: LIB3094-031-Q1-K1-B8
taaaacccccaaccccctcccatctctcctcccaaattcctaacctccaaaaattatcctcacataaaacctcttctcacattcccactcccatttctaccccaactaaactcacacctttacctgcgctcaaatattccccactctcctcaatcaattttcac

SEQ ID NO: 15001 - DNA, 428 bp, Glycine max
  Clone ID: LIB3094-031-Q1-K1-B9
gcgcccacgcgtccggcttgcgctcttgccgttcacgagcactttatgaagggctgaaggtaggtgcagcatctgatctgatgctgggatatctggatttcttccttggtggggatgagaaaagacctgatctgcctcctcgtctttatcaaagatttcccatgtctataatttttgggggagatggaagttacatgagtcctttctctattcacagtgataatattcttactagcatcatgagtcagtctgttccaccaactatatggtatcgattagtggctggtcttaatgctcaactacgattggttcgccgtggacatctaaaaataacttttggtcctgttatcagctggcttgatgtatatgcaaaccctaagttggctacatatggggtacgtgttgatcttgcatggtgtcaacctaca

SEQ ID NO: 15002 - DNA, 354 bp, Glycine max
  Clone ID: LIB3094-030-Q1-K1-G1
cttctcttaagctttcttagaaccttttaaatattttttctctcaatccaactcaatccattttatccattcagccattatttaatgataacttgatgtctaaatgatactttctaattacatatttacatatagaaattcaaaatttacaactattcatataattgcatctctagaactgaaatactaaaaaatgattcaaaacctactcattctacttcacaatgttctaatcataaaaactctcttataatcagatactaaaatctcaaattcccaatatactaataatctttcaatattattaaaaatatgccctatgttttatggtgtggccacaccctttttaaaaat

SEQ ID NO: 15003 - DNA, 254 bp, Glycine max
  Clone ID: LIB3094-030-Q1-K1-D11
attcatacaatttttatctactttatatataattcaaacactatgaatattttgaaaatattttagaccctataaatcaaaatacaatataaatacaaaataacacataaatatcaccatatctatattatattattaaacttactcatcatatttatatccatatatatacaatccaatctaaccttatatacttaatcataatattatacaataattaacttctttaacataatacctattttaacattatc

SEQ ID NO: 15004 - DNA, 461 bp, Glycine max
  Clone ID: LIB3094-030-Q1-K1-D3
gggtcggccgactcgtacgcccacgcgtccgatttattctataattggggtctatgttataccaatcttagtggcgaaattggaatttttaaaactgtgaaaacaagtgccaaagccagaggtttgttgagtctttttttatagttctttttactctactctacagccattctaagtttctattcgagtcctagcttgcttctatgtccttttcattgctctaattgttgaataatccttgaaaaattgtcttgataaaactccattggtttagctttcatttcatttttattaagcctttggttattgctagtctctctgtttcctagattgtgagttgccacatattgaattgcaaacgaagattggtgccatcccttgaagaattagagtcaagaatcaaggtgccaaccaccttaagagctattggactaagatgcactccaaattgagtgaatcac

SEQ ID NO: 15005 - DNA, 459 bp, Glycine max
  unsure at all n locations
  Clone ID: LIB3094-030-Q1-K1-D4
aaacagccttgtcgaccacaccaaaattaatttcataaaatttcataaaagcacaaaaagacatganaaattgaaaattttacatagggaagtcatatntgcacactcgattaaaggctttcgtcccttttgacagatgcgtggggtgctaataccttccctgtgcgtaaaaacaactcccgaactattcacacttaaagttcgtagaccacaccttttcaattttcccgacgctttcctcaaataaaaattggtggcgactccgcgcattatcctttcatggaagacgcacttgtgagtcccgcatcgcccttccgtcaaaaggtaagttgccacagtacttaccctcccgccgaatggtaggttccttaattgaattaactaataacaaaactgaaactaaagctaaaataaactcacaaatcaaactttgtccataaaaatcacttaaaaaccatt

SEQ ID NO: 15006 - DNA, 452 bp, Glycine max
  Clone ID: LIB3094-030-Q1-K1-D6
cccacgcgtccgatttattctataattggtgtctatgttataccaatcttagttgcgaaatttcaattgttaattactgtgaaaacaagtgccaaagccagaggtttgttgagtctttttttatagttttttttactctactctagagccattctaagtttctcttcgagtcctagcttgcttctatgtccttttcattgctttaattgttgaataatccttgaaaaattgtcttgttaaaactccattggtttagctttcatttcatttttttttagtctttggttattgcttgtctctttgtttccttgtttgtgagttgccacatagggaattggaaaggaggattggtgccatcccttgaagaatttgagtcaagaagcaaggggccaaccaccttaagagctattggactaagaagcactccaaattgagtgaatcaccaaagagat

SEQ ID NO: 15007 - DNA, 178 bp, Glycine max
  unsure at all n locations
  Clone ID: LIB3094-030-Q1-K1-D9
cccacgcgtncggacaattttgagttctgtatatataaagcaagcactatgtagaagctgaggatatcgtggaccatatttgtgaaaatagaagagaggtgcataataacacagaaagtgcaccatatctaggagagaagttttgagtttctgatcatagtgatatccattgatttac

SEQ ID NO: 15008 - DNA, 344 bp, Glycine max
  unsure at all n locations
  Clone ID: LIB3094-030-Q1-K1-E4
ctctctctctctctgtattactatttttaancaatgaccaaaaccagggcatttagacaactttttatactcatatctaccattaatatgtttactgtataacttgaacttcaaactcttccaccctcttacccttaccatcacccttttcactctttcacaccatcacctcttcacccaccatcaaattctcctcacccacaccaccaccaccaccaccaccaccctccatcaccatcacctattccttcaccttctcaccacaattaccctactaccccttcccctactaatccttctactcaccaccatcaccatcaccctccttctccttttaatccacc

SEQ ID NO: 15009 - DNA, 281 bp, Glycine max
  Clone ID: LIB3094-030-Q1-K1-E7
accaaccttttcactcctttttcttctcttcctcttccatgacactttagaataccttcaaaggtccacccctcccatatcgtccacctcttcgtacgcctcaccttctgttacttctactctgctagttccctcgcccctaacatcggtcccctcagtctctcccccaagaagatcagaaaatatatcaccaaggaaacccccaatgacttgaaacgcctccccgtcaccatcaaactcaccttgcagaaccttcaatccaaggtcactattgtcccatc

SEQ ID NO: 15010 - DNA, 412 bp, Glycine max
  Clone ID: LIB3094-030-Q1-K1-E8
gcggccacgcgtccgcttgtctctctctctctcttctttacttgcttgaagcaatggccaaagcctgggcatcaagtctgctgtttctcctcgtagctgtgagtaatgtgtttgctgtagagcttgaacttgaaactcttccaccctcttaccctcaccctcaccctgttcactcccccacaccagcacctcttcacccaccagcaaatgctcctcacccacaccaccaccaccaccaccaccaccctccagcaccagcacctgttccttcaccttctcaccacaattaccctcctacccctgcccctgctaagcctcctactcaccaccatcaccatcaccctcctgctcctgttaatccacctcctgttccggttcatcctccagttaaacctcctgttccggttcaccc

SEQ ID NO: 15011 - DNA, 428 bp, Glycine max
  Clone ID: LIB3094-030-Q1-K1-E9
ccgacgcgttcgcgcacgcatgggtagaatacgacccgtttcctcccttggacgtatccgcccaaaatctgagatctcttggaatggctaactctatctcaagctcaagttgcaaacttgcccgatttacggttactggaagtctgaattgctgtatgaatgtcacaagctacgctgaaggacacttcctattatcacatatcacgtgtcaatcataatacatgtgctgcaaaaatcaagaaagcttattatccctaggctagaattgctcactcccttacagatcttgaagatcctaaggcctcataaaactgctataaactccactaggcttaccatgttctaagtgatcctcggaagcttgctaccatatgattagcatggaaaggagggagtaccacaagattccatgatggaccctacaactg

SEQ ID NO: 15012 - DNA, 415 bp, Glycine max
  Clone ID: LIB3094-030-Q1-K1-F1
cattggctggctaaccaaccctgacactccttcttctccgcttcctcttcgatggtcgcttcggaatgcctccgaagttcgacccctcccagatcgtcgacgtcttcgtacgcgtcaccggcggtgaggtcggcgcggcgagttccctcgccccgaagatcggtcccctcggtctctcccccaagaagatcggagaagatatctccaaggaaaccgccaaggactggaagggcctccgcgtcaccgtcaagctcaccgtgcagaaccgtcaggccaaggtcacggtggtcccatccgccgacgcgctcgtcatcaaggccctcaaggagcccgagcgtgaccgcaagataacgaagaacatcaagcacaactggcacatctcgctagacgacttcatcaagatcgctagggttat

SEQ ID NO: 15013 - DNA, 461 bp, Glycine max
  Clone ID: LIB3094-030-Q1-K1-F11
ggagttgttgttttcacaatgaagacagttctattcctccttctggtgtcaggcgttaatgcccatctccgtcgcgcagccgaatgacttctccgacgcaaacctcaacgagttcaactcctccgtagccataatcataatcatattagtagtcgcgtttttcctcatggcctttttctccatctacgtgcgccactgcgctgattccccttccaacaccgtcaggcctctcaccaccgcacgctccaggagggccgcgcgtggccttgaccccgctctgattcaaacattccctatcctcgaatactccgttgttaagatccacaaaatcggaaaagaagctttggaatgcgctgtgtgtttgtgcgagttcgaggacaccgaaacgctgcgtttgctccccaagtgcgaccacgttttccaccccgagtgcatcgacgagtggttgagctcccacacca

SEQ ID NO: 15014 - DNA, 433 bp, Glycine max
  unsure at all n locations
  Clone ID: LIB3094-030-Q1-K1-F2
ctctctctctcttttttactggtttgaagcaatggccaaagcctgggcatctcagtctctttttatgctcntanctgcgagtaatgtgtttgctgtagagcttgaacttgaaactcttccaccctcttaccctcaccctcaccctgttcactcccccacaccatcacctcttcacccaccagcaaatgctcctcacccacaccaccaccaccaccaccaccaccctccagcaccagcacctgttccttcaccttctcaccacaattaccctcctacccctgcccctgctaagcctcctactcaccaccatcaccatcaccctcctgctcctgttaatccacctcctgttccggttcatcctccagttaaacctcctgttccggttcaccctccagttaaaccttctgttccggctcaccctcctgttaaaccc

SEQ ID NO: 15015 - DNA, 387 bp, Glycine max
  Clone ID: LIB3094-030-Q1-K1-F3
ccctcagtttctcgctcgccaatctcccctctttctcctccaatggccgaccaggtcaccttcgaccagatcgccgagttcaaggaggccttcagcctcttcgacaaggacggcgatggttgtattactactaaggaacttgggactgtgatgcggtcactagggcaaaacccaactgaggcagaactgcaggatatgattaatgaggttgatgctgatggcaatggaaccatcgacttcccagagttcctcaacctgatggctcgcaagatgaaagacaccgactccgaagaggagcttaaagaggctttccgtgtgttcgacaaggatcagaatggtttcatctctgcagctgagcttccgcatgtcatgacaaatcttggggag

SEQ ID NO: 15016 - DNA, 379 bp, Glycine max
  Clone ID: LIB3094-030-Q1-K1-F5
tccctcagtttctctctcaccaatttcccctctttctcctccaatggcctaccagggcaccttcggccacatctccgagttcaacgaggccttcatcctcttctacaaggactgcgatggttgtattactactaaggaacttgggactgtgatgcggtcactagggcaaaacccaactgaagcaaaactgcaggatatgattaatgaagttgatgctgatggcaatggaaccatctacttcccagagttcctcaacctgatggctcgcaagatgaaagacaccgactccgacgaggagcttaaggatgcttttcatgtgttctacaaggatcagaatggtttcatctatacacctgaacttcgacatgtcatgacaaat

SEQ ID NO: 15017 - DNA, 260 bp, Glycine max
  Clone ID: LIB3094-030-Q1-K1-F8
aggccttcatcctcttcgacaaggacggcgatggttgtattactactaaggaacttgggactgtgatgcggtcactatggcaaaacccaactgaggcagaactgcaggatatgattaatgaggttgatgctgatggcaatggaaccatcgacttcccagagtttctcaacctgatggctcgcatgatgaaagacaccgacttcgatgaggagcttaatgaggctttccgtgtgttcgacatgtgatcagaatggtttcat

SEQ ID NO: 15018 - DNA, 374 bp, Glycine max
  Clone ID: LIB3094-030-Q1-K1-D1
ttgtctacgacaccaaaattaaaatcataaagtttcataaaagcacaaaaagacatgaaaaatgtgaaatattacattttgaagtcatatttgcacacttgattaaaggctgtcgtcccttgtgacagatgcgtggggtgctaataccttccctgtgcgtaaaaacaactcccgaactattcacacttaaagttcgtagaccacaccttttcaatttttccgacgctttcctcaaataaaagttggtggcgactccgcgcattttcctttcatggaagacacacttgtgagtcccgcatcgccctcccgtcaaagggtaggttgcgacagtacttgccctcccgcccaatggtatgttccttaaatgaattaac

SEQ ID NO: 15019 - DNA, 423 bp, Glycine max
  Clone ID: LIB3094-030-Q1-K1-A2
caaagacatccttctcctggatgtggctcccttcactctcggaattgaaactgtgggtggagtgatgacaaagttgattcccagaaacactgttatcccaaccaagaaatctcaggtgttcaccacctatcaggaccagcagactacagtctccattcaggttttcgaaggcgagaggagtctcacaaaggattgccgccttcttggaaaattgatctgtctgaaattcctcagccccaaaggggtccccctaaaatggaattgaccttcaaagttaatcccaccggattcttaaatttaaagccgaagaacagggcccttggtaaatcaaaaagatccacatttccaaccaaaagggacctcttaacccagaagaaattgaaaaaattgttccccaaaccaaaggattttgcagaggaagac

SEQ ID NO: 15020 - DNA, 354 bp, Glycine max
  Clone ID: LIB3094-030-Q1-K1-A5
caaaggcatccttctcctggatttttctccttttactctcggaattgaaactgggggtgtatgataacttgtagattcccaggaacactgttatcccaaccaagaaatctcaggtgttcaccacctatcatgaccagcagactacagtctccattcatgttttcgaaggctataagagtctcacaaaggatttccgccttctttggaaatttgatctgtctggaattccttcaaccccaaagggtactcctcaaattgaagtgaccttctaaatttattccaactgcattctaaatgttaaggcataatacaagggcacttgttaatcaaaaaatatcaccattacaaaccaaa

SEQ ID NO: 15021 - DNA, 221 bp, Glycine max
  unsure at all n locations
  Clone ID: LIB3094-030-Q1-K1-A6
ttaatgctttcctcctttacctctctaaactttattnattttatnnnnatttcanctattcaggtcttttaaaaaactttntaaggaccagcaaaccttcaattttcaaaattttcatattttttattcccatatctccattttttacaattcaacttttccttaatttaaatttacttcctcaaaattttttttatactttaattaccttattcattcct

SEQ ID NO: 15022 - DNA, 177 bp, Glycine max
  Clone ID: LIB3094-030-Q1-K1-A8
gttaatctttccggccttgacctctctaaactggatttatcttatgttgatttcagctatgcgtgtcttaaagacgtgtttttttcacgagcaaaccttcaatgtgcaaagtttcgagatgttgatgccgagggctccatctttcacaatgcaactttgcgtgaatgtgaatttact

SEQ ID NO: 15023 - DNA, 428 bp, Glycine max
  Clone ID: LIB3094-030-Q1-K1-A9
cccacgcgtccgcacaaaccctctctccctctaccacccattctcttttctctctctttcgttccccctccctctctcacctactcaatctcatcaccaccaccatcatcatcatgatcttctccaatctctataaccttcaatcactcaaaacctcaccattaaaccaaatgagttgacccatttgtgagaacaattctccctaagaaaaggtcaaaggctgcaactttttcttaaccaatctcacaacattttgcaacgttttttctggttcggtttggttttctgggtcgtcttggaattcaaaaaagattccaactttgaagatgggtaggggcggaaccgccgcggcggcggtggagatcgccgaacccggttcaaggccggtttttttcaaagaaccgcgttataagggcgtcagaaaaaga

SEQ ID NO: 15024 - DNA, 410 bp, Glycine max
  Clone ID: LIB3094-030-Q1-K1-B1
ttacctctctaaactttattaattctatgtatattacaactattcaggccttaagaaccttttaaaatgaccagcaaaccttcaatacccaaaatttcaatatatcaatgccaaccatctccatctctcacaactcaacaattcatcattgcaacactactactatacaacttcataactctcaattaactcatacattcatacatacctcaaatctacaaaattattccatactcaactctaactaatatgcatcatatctacatactacacatctacacaattcatatattaccaacttcactatacaaatataccacctacaatgatctaatttcaatccttcaaaacttcacaaatcaaacctgaaaacctcaaaccttcaaccatcttatctttctaaatcaatc

SEQ ID NO: 15025 - DNA, 443 bp, Glycine max
  Clone ID: LIB3094-030-Q1-K1-B11
gacgcacgcgtccgtctgcctgtaagagtgaaaataccttctcttttccttctctcaagtctcaggagatttcatcatggctccaaagaaggacaaggctccaccaccttcctccaagcccgccaaatctggcggtggcaagcagaagaagaagaagtggagcaagggaaagcaaaaggagaaggtgaataacatggtgctgtttgatcagggcacctatgataagctcctttctgaagctcccaaattcaagctcatcactccttccattctttctgatcgtttgaagattaatggatcacttgcaaggaaggctataagagaattgatggctaggggttcaatcaggatggtgtctgcccatgcaagccagcaaatttacaccaaggcaacaaacacctaggtgtggaactgatcttagcttaccgagtatttgtaggaat

SEQ ID NO: 15026 - DNA, 288 bp, Glycine max
  Clone ID: LIB3094-030-Q1-K1-B2
tttccttagtttacctctctaaactttatttattttatgttaatttcagctattctggtcttatggacatgtttttttcactagcaaaccttcaatgtgcaaagtttccagatgttcatgccgatgactccatctttcacaatgcaacttttcgtgaatgtgaatttactgcatcaaatcttcatgatgctttattggctggtgcatgccttcatagtgcaaatctacaagatgcttgcttactaaactctatcttctgtggatcagatctgcgtacttcacatctac

SEQ ID NO: 15027 - DNA, 226 bp, Glycine max
  unsure at all n locations
  Clone ID: LIB3094-030-Q1-K1-B4
attactattcatgatatnttggactctttagaaactttttaaagccaaacaagacctaccattgaaatccatttttattgaccaattagaattccccaccattaccaatacttgtctcaaaaaatccaattttcatacattataaaaactttcaaataacattcaaaaacaccttctcaaaattgaacattttcgcgtagaatatgtcaaatatatattgtacttt

SEQ ID NO: 15028 - DNA, 429 bp, Glycine max
  unsure at all n locations
  Clone ID: LIB3094-030-Q1-K1-B5
attcagagaactcatgatagatttacgcatggttcctgacagcaaaaaattngggggagggccaggagaatttacaggggctgtgggtctattaaatcacttccaattactcccacattttgagtttttctgcaagaggccacttcctgtttcaatttcagatgcacactatttatacaatgtagtaggtgacatagaaatcagaaaaggagatgggatgcagttggatcaacttattcaagatacatctttgtccagtggttctaattatcatatacaacctttggacctcgatattctaaaggaggcttttcaactcaaggaaactgttcccattgatttgcctgctgccgagaaggggattctgactgttgcaagaaaatcaaaaggtgaatctaaagatgtggagaagaagcataaaaaacacaa

SEQ ID NO: 15029 - DNA, 446 bp, Glycine max
  Clone ID: LIB3094-030-Q1-K1-B6
ctttaagttataaaacaatcaacacatagattctatgcaccttattactattcatgatatattgtctaatgagaaactaatgaaaaagaaacaagaaatagcattgaaatccatttttattgaccaattagaattgtctaccaggatctataattgtctcaaaagatccaatattcatacattattagaacttttgaataacagtcatgaagaccttctgaaaattgaacattttcgcgtagaagatgtcaaatatatattggactttttagaaatagaaaagcattttgcataaatttgaaatccattgtcatatgattttttcagatttcttctttctatttttctaaacttacgatagggatgaaaatatgtaatttagatctttaaaaaaaaatccatatgttcggaatagacctaaaatggaatagatgtatctagggatt

SEQ ID NO: 15030 - DNA, 448 bp, Glycine max
  Clone ID: LIB3094-030-Q1-K1-B8
ggttgaaagactttgttggtgcaattggggattccactatttccaaatcttctgtggacccagttcctattccaagtgttaagtcgggtgaagacttgcttgatgatctggaaacagaagagagagacaaatgctgtgaagcttatagtggtgattcggtttatgagctgaatgaagtggcagctgcaaagggatgtctggggcgtttccctgggggagaaatgatgggaattataaagaaattcattaacttagatgcgggaactgattaactaaggaagctaggacttgttatgagactttttcttttctcactctgaaatcaaagtgatttcagtttcagggtacaaaaaatcaaattttgaacttttgtactaagtgtagaataagaagctttgttctcaaaataactatgtaaactcaacttaaataaatttctctggtgttt

SEQ ID NO: 15031 - DNA, 374 bp, Glycine max
  unsure at all n locations
  Clone ID: LIB3094-030-Q1-K1-C1
tccttctgctgnatgtagctccttttactctcttttattgaaactgttgctgcagagatgacttagataattcccaaagacactgttatcccaaccaagaaatctcaggtgttcaccacctatcacgaccagcagactacagtctccattcacgttttccaacgctatacgagtctcacaaaagattgccgccttcttggcaaatttgatctgtctcaaattcctccagccccaagacgtacacctcaaattgaaatgaccttctaagttgatgccaactacattctaaatgttaacgcataatacaaaggcactagttaatcataaaatatcaccattacaaacgaaaatgtacgtcttatccattaataaat

SEQ ID NO: 15032 - DNA, 158 bp, Glycine max
  Clone ID: LIB3094-030-Q1-K1-C2
caaagacatccttctcctggatgtggctcccctcactctcggaattgaaactgttggtggagtcatgacaaaggtgattcccagaaacactgttatcccaaccacaaaatatcaagggtttaccacctatttcggcccgcggactacagagtccattt

SEQ ID NO: 15033 - DNA, 459 bp, Glycine max
  Clone ID: LIB3094-030-Q1-K1-C3
gcgagacagccttgtcgagcacaccaaaattaatttcataaaatttcataaaagcacaaaaagacatgaaaatttgaaaatataacattgtgaagtcatatttgcacacttgattaaaggctgtcgtcccttgtgacggatgcgtggggtgctaataccttccctgtgcgtaaaaacaactcccgaactattcacacttaaagttcgtagaccacaccttttcaattttcccgacgctttcctcaaataaaagttggtggcgactccgcgcattttcctttcatggaagacgcacttgtgagtcccgcatcgccctcccgtcaaagggtaggttgcgacagtacttgccctcccgccgaagggtaggttccttaattgaattaactaataacaaaagtgaaactaaggctaaaataaactcacaaatcaagctttgtccataaaaatcacttaaaaacc

SEQ ID NO: 15034 - DNA, 454 bp, Glycine max
  Clone ID: LIB3094-030-Q1-K1-C7
acgcttgtccagccaccaaaattaaaatcataaaatttcataaaagcacataaagacatggaaaatgagaaataatacattttgaagtcatatttgcacacttgattaaaggctgtcgtcccttgtgacggatgcgtggggtgctaataccttccctgtgcgtaaaaacaactcccgaactattcacacttaaagttcgtagaccacaccttttcaattttcccgacgctttcctcaaataaaagttggtggcgactccgcgcattttcctttcatggaagacgcacttgtgagtcccgcatcgccctcccgtcaaagggtaggttgcgacagtacttgccctcccgccgaagggtaggttccttaattgaattaactaataacacaagtgaaactaaggctaaaataaactcacaaatcaagctttgtccataaaaatcacttaaaaaccatt

SEQ ID NO: 15035 - DNA, 399 bp, Glycine max
  Clone ID: LIB3094-030-Q1-K1-C8
atataccgacaggggaacaccgcacactttccaaaacgcatccacctctccacatgtaaaaccctgcctttacccaccttcaacgcccagcagctcacccacctgtcaccaacagacacaattgccaataccaccacaccaatcacccttcccacactgttcacatccctaacggcgaaattaacgctcactctacctgcccttacagcgccgaacgtgtcgatctcacgctcaacgtaccctctacacatcacatccaacaatctcccgacactaccactgacaaccctcacttctcgcctcacaaatccgctttccacaaatacctctaaaccaacaactctccttatcattcaactgtagatctttacatacattttacccactaaaactacttta

SEQ ID NO: 15036 - DNA, 347 bp, Glycine max
  Clone ID: LIB3094-030-Q1-K1-A1
caaaggcatccttctcctggatgtggctcctttcactctcggaattgaaactgtgggtggaaggatgacttagaagattcccaggaacactgttatcccaaccaagaaatctcaggtgttcaccacctatcaggaccagcagactacagtctccattcaggttttcgaaggctagaggagtcttacaaaggattgccgccttcttgggaaatttgatctgtctggaatttcttcagccccaaggggtacgcctcaaattgaagtgaccttcgaagttgatgccaacggcattctatatgtgaaggcataagacaagggcactggtaaatcataaaagatcaccatta

SEQ ID NO: 15037 - DNA, 464 bp, Glycine max
  Clone ID: LIB3094-029-Q1-K1-F11
cccacgcgtccgcccacgcgtccggtgattgattctagttagaacaagatgttgcagctactctgcactgcgattttctccgaaatgcttttgattctcacgctcgtcttcaaaaccccactgagaaaactcgtcatcgtttccctcgatagtgtgaagcgcggtcgcggtcccgtggtggtttccaccgtgggcgccacattgatggtggttctcgcttcgagcctctacagcatggccaagatccagcaacgcaccctcgaggccggcatagtcaaccccaccgaccaagtcctcatgtccaagcacatgctcgaagcttctctcatggggtttctgctgttcctctctctgatgattgatagattgcaccattacataagagagcttcggtcactcaggaagaccatggaagctattaagaaacaaagccgaagttttgaagatggtaaaaatggaaattc

SEQ ID NO: 15038 - DNA, 462 bp, Glycine max
  Clone ID: LIB3094-029-Q1-K1-F2
gtaaaagtttggtgtgaggtgtgagtgttctgcacgcaccgaatcaacaataatttctagacagcgtgtgaaaagaaacacattagactaggcagataactatggctgtacattctgattcggcttcatccgagaagaaatcaagcaatggagtgaatgagttgctgacttttaatgctgagaacatgcaaagcaacatgaaaattatctattacagccgaacatttttatctataattggtggagttgttgctggtattttgggatttacaggcttgaaaggatttgtgttttacttacttctcatggcatttacttcacttgggctcgtggccaaagcaaagttttccacccacacatactttgactcctggaatcgagtgctacttgatggctttctgggtggcctaatgtcgttcgtgctgttctggacatttgcctatgacattgatcatatatttt

SEQ ID NO: 15039 - DNA, 196 bp, Glycine max
  Clone ID: LIB3094-029-Q1-K1-F3
caacgctaacgcgtgcatatcacatagagtttcaccctttttgccaatacccccgagccagaatcttgtgattattaacaaaccatacctcaagtcacgattttgctcatcttttcctgatcccaacatcaggatttactatcttgctttcaataatacatgtgtcgatcaatttcctttctctgtacatctggtt

SEQ ID NO: 15040 - DNA, 114 bp, Glycine max
  Clone ID: LIB3094-029-Q1-K1-F5
gaaaaaaaaaaaagccttttactttttttcttttgcatgatttgaatcttgaggggaaaagcttcgaattgaggtgttttacccatcaattcaattttaagccgtgccttcttc

SEQ ID NO: 15041 - DNA, 293 bp, Glycine max
  Clone ID: LIB3094-029-Q1-K1-F7
caacggtaacgcgtgcatagcacagagagactcagccattgggcgaatacccagagccgggataggggattaagaacaaaccataccccaagtcacggttttgccgacgtgttcctgatcccaacatcaggatttacgatgttggcttgaagaataactgtgtcgatcaatttcctttcttgtccatctggtagtccgacaggaaacgttctagtaggccctgaaaactgctcgtattgcttgcaacaagtacatagccaaatttgctggaaaggatgctttacacttaatag

SEQ ID NO: 15042 - DNA, 347 bp, Glycine max
  Clone ID: LIB3094-029-Q1-K1-G1
caaccgtaacgcgtgcatagcacagagagactcagtcatggggcgaatacccgagaggtgtgataggcggattaagaacaaaccatacctcaagtcacggttttgccgaggtgttcctgatcccaacatcaggatttacgatgttggcatgaagaataagggtgttgatgacatttcctttctgtgtcacatctggttagttgcgacaaggaaaacgtttctagtgaggccctggatgctgctcgtattgcttgcaacaagttcataggcaaatttgctggaaaggatgctttacacttgatagtccgagtgcaaccatttcatgttcttacgatcaaacagatgct

SEQ ID NO: 15043 - DNA, 366 bp, Glycine max
  Clone ID: LIB3094-029-Q1-K1-G2
attgatctcaaggtggaaacacatcagtaatggctcaattgggttaaatccatacagccgctatgcagatgattctgtttggatgattgctgaggcactcaaattgttttttgatcggaatggtaccattttattctctaacaatacaaatttaagtggtacgagatttcaaggacacagggtgggaatgggacttcaagtggcagagaccattatttgacagtgagatagatatggcggtctcatttatacaagaagttgaggggtacaaaatccagtctcatattggtgatcagtgggtgtgggcggcagatcctagtggccagtattcgattaggagtgcctatagtgtgcttagagaggaca

SEQ ID NO: 15044 - DNA, 337 bp, Glycine max
  Clone ID: LIB3094-029-Q1-K1-G5
cacgcggccaactcggtctaactacatactctttcccacttttgacgaagtacccctatacagggtcgacgtgcccatatcaaactacaccctcattctagggtcttctcaactagtgctcctccactattcattaatgaactaaaaggttaaaataataatatttacatcatatgaccttatcaaaaccaaccatgtagaacgcacttttataccttccaataaaaaacctcagaaccttaatccgtatgctctcaacactttttaacacttaccttcattaaatacttctcatcacattattatcattgtacaacaaatgccctaccttatgacc

SEQ ID NO: 15045 - DNA, 417 bp, Glycine max
  Clone ID: LIB3094-029-Q1-K1-G6
gcgtccgaacgccaacgcgtgcagagcagagagagactcagccatggggcgaagaccggcgagggggtataggcaaattaagaacaaaccataccccaagtcacggttttgccgtggtgttcctgatcccaagatcaggatttacgatgttggtatgaagaagaagggtgttgatgaatttcctttctgtgtccatctggttagttgggagaaggaaaacgtttctagtgaggccctggaagctgctcgtattgcttgcaacaagtacatggccaaatttgctggaaaggatgctttccacttgagagtcaaggtgcacccattccatgttcttaggatcaacaagatgctttcgtgtgcccgaactgataagctccaaactggaataagatgtgcttttggaaagccacagggtac

SEQ ID NO: 15046 - DNA, 278 bp, Glycine max
  Clone ID: LIB3094-029-Q1-K1-G9
attacaacaaaatatttcaaatacactcgactacttttaaaaccgaaataccccacatactcacactcatcttcaaaacccctcttaaaaaactcctcatcatcctccctctaaaatctacaatcactcttcaacttccctctcccatcttccacctttcactaccacattcatctttcatctcccttctatcctctacatcatttccaatctccatctactcaccctctaaccccccataatcaaccacacccaccaaatcctcatttccaaacaca

SEQ ID NO: 15047 - DNA, 440 bp, Glycine max
  Clone ID: LIB3094-029-Q1-K1-H1
agacagcagagcagagatctagcgtattctctcgctctttctttcactgtcacagagccagatccatgggcttcccagccaacggcgcctctgcggcccagcccctaaacttcctcatctacggccgcacgggctggattggcggcctcctcggctccctctgccgggcccagggcatctccttccattacggctcgggccgcctcgagaaccgggcctacctcgaaaccgacatagccctcctcaagccctcccacgtcttcaacgccgccggcgtcacgggcccgcccaacgtcgactggtgcgagtcccacaaagtcgagaccatccgaaccaacgtcgtcggaaccctcactctcgccgacgtctgccgcgaccacggcctcattctcatcaactacgccaccggttgcattttcgagtacgactccgatcacccc

SEQ ID NO: 15048 - DNA, 456 bp, Glycine max
  Clone ID: LIB3094-029-Q1-K1-H11
cagagtttgagtggacctgtctcagctacgctttaccttggttattcactactcatggccattggaatcatgttgtcaaccggcaccattggcttccttatgtcattctactttgtgcactacttgttctcatcagtaaagatagattgaggttcttgttgtcattgcatattaactatgaaaaaggttgattgatataacttgatcacattgcatagtagggcaacggatgtttaattcattgtctgattttatattgcgatgggatctgcagtttgttctccttctgcctgtttcccaaagtagtgtactcattcaagtattcaactagtgtttgagatcatgtttcaagtattttgttcaagtttctttagaaggttgtaattcaaactctcatctcatttcaatactttagaaaaatgatgttagataaaaaaaaaaaaaaagggcggccgc

SEQ ID NO: 15049 - DNA, 317 bp, Glycine max
  unsure at all n locations
  Clone ID: LIB3094-029-Q1-K1-H12
cctgtctcatctacccataatcttgnatattcactactcataaaaatatcgaaacatttttacaaccttcaccccccncctaacttatgtcattctactttttacactactttttctcatcattaaatatatattaatgttctttttttcatttcatattaactattaaaaacttttatttatataactttatcacatttcatattatttcaactaatctttaattcattttctcattttatatatccatcttatctacacattaatctccttctaccttttacccaaaatatattactcattcaaatattcaaact

SEQ ID NO: 15050 - DNA, 277 bp, Glycine max
  unsure at all n locations
  Clone ID: LIB3094-029-Q1-K1-H3
gacccacccgtccgngacggcanancggacatctancatatnctttcactctttctttcactaccacananccagatccatgggcattctaaccaaccccacctcttcaacccatcccctaaacttcctcatctactgcctcacagacttaattggctacctcctcttctccctctgccatacccaatgcatctccttccattactgctcattccatctctaaaaccgagcctacctcgaaacctacatagccctcctcaaaccctcccacatcttc

SEQ ID NO: 15051 - DNA, 452 bp, Glycine max
  Clone ID: LIB3094-029-Q1-K1-H6
cccacgcgtccgcccacgcgtccgcccacgcgtccgctgacctaaaggcagcaaaggaaggagcagactacataggaactgtacatcatgaatttcactacactgttcaggatggcatagatgccattgaggatgtgatctatcacattgaaacatatgatgtgacaacaattagagcaagcattcccatgtttcttatgtctcgtaagatcaagtcattgggagtcaaatgggttatatctggagaaggatctgatgagatctttggagggtatctatatttccacaaggcaccaaacaaagaagagtttcatcaagaaacatgccgcaagattaaagcactccacaaatatgattgcttgcgagccaataaatcgacctttgcctggggtctagaagccagagtgccatttttggacaaagattttatcagagttgcaatgaacattgat

SEQ ID NO: 15052 - DNA, 179 bp, Glycine max
  unsure at all n locations
  Clone ID: LIB3094-029-Q1-K1-H8
aaggcaggaaaggaaagaacatactacaaangaactggccatcatgaattacactacactgatcaggatggcatagatgccattgaggatgagatctatcacattgaaacatatgatgtgacaacaattagagcaagcattcccatgtttcttatgtctcgaaagaacaagtcattggg

SEQ ID NO: 15053 - DNA, 458 bp, Glycine max
  Clone ID: LIB3094-029-Q1-K1-F10
cccacgcgtccgcggacgcgtgggttgaaaactacccgtttcctccctcgcacggatccaccctgaatctgagattccttcgaattgttaactctctttcagtttcaagttggaaactttttcgattttcgctttctggaggtgtgaattgttgtttgaaagtcacaagcaatggtgaaggacactgcgtattatgacatattaggtgtcaattatgatgcatctgctgcagagatcaagaaagcttattatgtcaaggctagaattgttcaccccgataaaaatcctgaggatcctaaggccgcagaaaactttcagaaacttggtgaggcttaccaggttttaagtgatcctgggaagcgtgcggcatatgatgagcatggaaaggaaggagtaccacaagattccatgatggaccctacaactgtatttggaatgatttttggaagtgaattttt

SEQ ID NO: 15054 - DNA, 358 bp, Glycine max
  Clone ID: LIB3094-029-Q1-K1-B3
cgacgcacgcgtccgcccaggcctccggacttcccaagatgtatcttcaatgtttcagtgcgggcaaaaaacctgatctttgtgatcaacaatgggggatacaccatccatgtttaaactcatgatgatccgtacaatatgatttataactgcaattacactgcgttgattgatgcaatccacactggtgtagggaaatgctagactgccaagaagttcttttaagaggatctcattgaatcaattgccacatccacaggacccaatatagactccttatgcttcattgaggttattgttcataatgatgacacccagtaagaatttcttgaatggatctcaaggttttctgcttcca

SEQ ID NO: 15055 - DNA, 119 bp, Glycine max
  Clone ID: LIB3094-029-Q1-K1-B6
gtaatgtaggtgttccaagcttcaaggtatgtaataatgttaggtccaagtagatatgtggttgagttgtaatacaatgattctaatatcctatctccaccattcatattaatatttgc

SEQ ID NO: 15056 - DNA, 254 bp, Glycine max
  Clone ID: LIB3094-029-Q1-K1-B7
gggcaaaaaaccatgatctttgtgatcatcaatggtggatacaccatctaggttgaaattcatgatgggccgtacaatgtgattaagaactggaattacacttggtttattgatgcaatccacaattgtgaatggaaatgctggacttccaaagtgttctgtgaaaaggagctagtttaaacaattgccacagccacaagacccaataaagactccttatgcttcattgaagttattgttcataaagatgacac

SEQ ID NO: 15057 - DNA, 446 bp, Glycine max
  Clone ID: LIB3094-029-Q1-K1-C1
cccacgcgtccggactgcccaagatgtatcgacaatgttacggtgcgggcaaaaaaccatgatctttgtgatcaacaatggtggatacaccatcgaggttgaaattcatgatgggccgtacaatgtgattaagaactggaattacactgggttgattgatgcaatccacaatggtgaagggaaatgctggactgccaaggtgttctgtgaagaggagctagttgaagcaattgccacagccacaggacccaagaaagactccttatgcttcattgaggtgattgttcataaggatgacaccagtaaagaattgcttgaatggggctcaagggtttctgctgccaatagccgtccttccaatcctcagtaatcttcaaaatttatcctatgactaaattgctgcaattgccctttaactttatgaaagtgagaatcatttgagatga

SEQ ID NO: 15058 - DNA, 466 bp, Glycine max
  Clone ID: LIB3094-029-Q1-K1-C10
cttgaatcttcgttatccttctttttttctccttgaactcgaatattcactatggcagatgagggggttctgctagatttctggccaagtccatttgggatgagggtcaggattgcacttgctgaaaagggtatcaaatatgagtccaaagaagaggacttgcagaacaagagccctttgctcctcaaaatgaacccggttcacaagaaaatcccggttctcatccacaatggcaaacccatttgtgaatctctcgttgctgttcagtacattgaggaggtctggaatgacagaaatcccttgttgccttctgacccttaccagagagctcaggctagattctgggctgactttgttgacaataagatatttgatcttggaagaaagatttggacatcaaagggagaagaaaaagaagctgccaaaaaggagttcatagaggcccttaaattattggaggaacagc

SEQ ID NO: 15059 - DNA, 289 bp, Glycine max
  unsure at all n locations
  Clone ID: LIB3094-029-Q1-K1-C11
acccacgcctccaatttaatcttctttatccttctttttttctcctataactcaaatattcactataacagaaaaccgacaatttttataaaatcttnccacccccatttatcatcattttcattattacactttcttaaaattctatcaaatattattccaaataacattacttccacaacaaaatcccttttctcctcaaaatcaaccctcttcacaataaaatcccatatctcatccacaatctcaaacccatttcttaatctctcttttcttttcacttcattca

SEQ ID NO: 15060 - DNA, 464 bp, Glycine max
  Clone ID: LIB3094-029-Q1-K1-C12
aaacacccttgtcgaccacaccaaaattaaattcataaaaaagcataaaagcacaaaaagacatagaaaatgttaaaataaaacattttgaagtcatatttgcacacttgattaaaggctgtcgtcccttgtgacggatgcgtggggtgctaataccttccctgtgcgtaaaaacaactcccgaactattcacacttaaagttcgtagaccacaccttttcaattttcccgacgctttcctcaaataaaagttggtggcgactccgcgcattttcctttcatggaagacgcacttgtgagtcccgcatcgcccttccgtcaaagggtaggttgcgacagtacttgcccttccgccgaagggtatgttccttaattgaattaactaataacaaaagtgaaactaaggctaaaataaactcacaaatcaagctttgtccataaaaatcacttaaaaaccattttga

SEQ ID NO: 15061 - DNA, 440 bp, Glycine max
  Clone ID: LIB3094-029-Q1-K1-C3
cgcagattcaaaggaggatctctcttgcgttttctctaggttttcgctatggcgtcgaagggaattttgaaggagcttaaggatttgcagaaggatcctccaacatcttgcagtgccggtcctgttgttgctgaagatatgttccattggcaagctacaattatgggtcctccagacagtccctatgcaggaggtgttttcctagtgaccattcatttccctccagattatccctttaagccacccaaggttgcattcaggacaaaggttttccacccaaatataaatagcaatggaagcatttgccttgatatattgaaggagcagtggagccctgctctaaccatttccaaagtgttgctctcaatttggtccctattgacggatccaaatcctgatgatcctttggtccctgaaattgcacacatgtacaagacaga

SEQ ID NO: 15062 - DNA, 243 bp, Glycine max
  Clone ID: LIB3094-029-Q1-K1-C5
ggcaaaaaaccatgatctttgtgatcaacaatggtggatacaccatcgatgttgaaattcatgatgggccgtacaatgtgattaataactggaattacactgggttgattgatgcaatccacaatggttaaaggaaatgcttgactgccaaggtgttctgttaaaaggagctagttgaagcaatttccacatccacaagacccaataaagactccttatgcttcattgaagtgattgttcata

SEQ ID NO: 15063 - DNA, 351 bp, Glycine max
  unsure at all n locations
  Clone ID: LIB3094-029-Q1-K1-C6
agacggcagagcanagatctagcgnannctttcgctctttctttcactgtcagagagccagatccattggcttcccagccaacggcgcctctgcggcccagcccctaaacttcctcatctacggccgcacgggctggattggcggcctcctcggctccctctgccgggcccagggcatctccttccattacggctcgggccgcctcgagaaccgggcctccctcgaaaccgacatagccctcctcaagccctcccacgtcttcaacgccgccggcgtcacgggccgccccaacgtcgactggtgcgagtcccacaaagtccagaccatccgaaccaacgtcgtcggaaccc

SEQ ID NO: 15064 - DNA, 466 bp, Glycine max
  Clone ID: LIB3094-029-Q1-K1-D10
cccacgcgtccgcgcgtcgctgctccgtaccagtttcactgcataaatttgagagaaaactctggaaacatgttggtttatcaggacctccttacaggtgatgagcttctctcggactccttccgttacaatgaaattgagaatggaatgctgtgggaagttgaggggaagtgggttgttaagggagcagttgatgttgacattggtgcaaacccttctgctgagggtggagaagatgagggagtcgatgacgcagctgttaaggttgttgacattgttgatacattcagacttcaggagcaacccgcttttgataagaaacagtttgttaccttcatgaagaggtttatcaagaatttgactcccaagctcgatgcagagaaacaagagttgtttaagaagcacattgagggagcaactaaatacctgctctctaagattaaggatttccagttttttgttgggg

SEQ ID NO: 15065 - DNA, 387 bp, Glycine max
  Clone ID: LIB3094-029-Q1-K1-D2
gatttggatgctaatttttttgatcagccagaaatgcttggagagcccattgcaactctgggtttgctgcactatgaaggtcaagtttcggatcccttgaaaggattatatggagctggagctcatactgactatggtttaattacactgttagcaacagatgatgtctcgggtcttcaaatatgcaaagatagggatgctaaacctcagaaatgggaggatgtagcaccattgaagggagcattcatagtgaatcttggtgacatgctggagcgctggagcaactgcgtttttaagtccacactgcacagagttctaagaaacggtcaaggaagatattctattgcatacttcttggagcccaatcatgattgtctagtggagtgc

SEQ ID NO: 15066 - DNA, 346 bp, Glycine max
  unsure at all n locations
  Clone ID: LIB3094-029-Q1-K1-D3
atgctgatttttttgatcatccattaaaagcttgnaaagcccattgcaactctagggannttgtcactattaanatcgccctttcacatccctttaaaagattatatgtagctatatctcatactaactatggtttaattacactattatcaacatataatgtctcttttcttcaaatattcaaatatagtgatactaaacctcaaaaaatttattatttatcaccattgaaagtaacattcatatttaaacttgttgacatgctctaacacttaaacaactacatttttaattccacacttcacatagttctaagaaactatcaaagaaatatattctattacat

SEQ ID NO: 15067 - DNA, 294 bp, Glycine max
  unsure at all n locations
  Clone ID: LIB3094-029-Q1-K1-D5
aagtactgaagatggcaanttgaaacttttaaatgaacagcagacaactatttataagagagctgttgacaagagctatcacttgaagatgaaagcatctaagttcattttcagtgaaataagccaaaagtttcccatcatgcccttctctgcaaggtctttagaagagaaaagagctcgtttgggtttagtggaatgtgtgaatcatgatctcctgcaaccttattctgttctgcatgaaaagccttgtgattatgtatcacatatcaaattcactgtcttgctaatgcccaa

SEQ ID NO: 15068 - DNA, 462 bp, Glycine max
  Clone ID: LIB3094-029-Q1-K1-D9
ctacctgtcaagtttttgaagtatagagatgttatagacattcctatttacctcagagtcagttgacgatggacaccctgacaagctctgtgaccaaatctctgatgctgtcctcgacgcttgcctcgaacaggacccagacagcaaggttgcctgcgaaacatgcaccaaaaccaacttggtcatggtcttcggagaaatcacgaccaaggccaatgttgactacgagaagatagtgcgtgacacctgcaggaacatcggctttgtctcaaacgatgtgggactggatgccgacaactgcaaggtcctcgtcaacattgagcagcagagccctgatattgctcagggtgtacacggccacctcaccaaaaaacctgaagaaattggtgctggtgaccaaggtcacatgtttggctatgccactgatgaaacccctgaattgataccattgagccatgttct

SEQ ID NO: 15069 - DNA, 329 bp, Glycine max
  unsure at all n locations
  Clone ID: LIB3094-029-Q1-K1-E2
cgcggcagtttcgccgcacgaatatcttgttttttggatcgatccgagaaaaactcttagacatgtgggtttaccaggacctccttacaggtgatgagcttctctctgactccttccgttacaaggaaattgagaatggaatgctgtgggaagttgaggggaagtgggttgttaaaggagcagttgatgtagacattggtgcaaacccttctgctgaaggtggaggagaagatgagggagttgatgatgcagctgttaaggttgttgacattgttgacacattcagacttcangagcaacccgcattcgataagaagcagtttgttacc

SEQ ID NO: 15070 - DNA, 385 bp, Glycine max
  unsure at all n locations
  Clone ID: LIB3094-029-Q1-K1-F1
tcatcgctaactcgttcatatcaaatatagttttancctttttgctaaaaccctctagatagtatatttttaataataacaaaccataccccaaatcacatttttaccattttattccttatcccaacatcattatttactatctttctattaataataatgtcgttaattaatttcctttctatatccatcttatttactttaaacaatgaaaacttttctaaatattccctacaatcttctcctatttctttcaacaagtacatttcctaattttcttgaaataattcttttcacttttaaatcatatttcacccattccatatttctaatatcaacaaaattcttttatattattttaataatattttttttacttttaatt

SEQ ID NO: 15071 - DNA, 456 bp, Glycine max
  Clone ID: LIB3094-029-Q1-K1-B2
tgttgacctcacagtgaggctggagaaggaagcctcctacgatgaaattaaaaatgctatgaaggaggaatcagagggcaagttgaagggaattcttggttacactgaagatgatgtggtctccaccgactttgtgggcgatagcagatcaagtatttttgatgcaaaggctggaattgcattgaataagaactttgtgaagcttgtctcttggtatgacaacgagtggggatacagctcacgtgtcattgacctgcttgtattcgttgccaagaagtctttttaaggttgtactgaaaaaaaagtagcttgtctagacattatgtgctggtgtctagctgcgatttagtgtcttcttgcttgggcagaaatgagaagtatgaataaatcggtttcgggaaccggtgttgttaccctgttaagagcattaagcttttttttggtgtctcttctgtg

SEQ ID NO: 15072 - DNA, 453 bp, Glycine max
  Clone ID: LIB3094-028-Q1-K1-G5
atttacaacaacaatggcttctgtgcctcaaccaaaaatctcccttctaaccttattcttcttctcttccttcaccatcattgcgcatgcaattgttcctcaaaacgaaaccttcaaatttgagaactcaggtgaacttggaccctacatcgttgagtacggtgcagattacagaatgataagcatcttcaactctccattccaagttggtttctacaacaccaccccaaatgccttcactctagctttgcgtgtagggctccaacgctcggagcagctatttcgttgggtttgggaggccaacagggccaacccagttggagaaaatgccactttttcacttggcactgatgggaaccttgtgttggcagatgctgatggcagaattgcatggcaaactaacactgccaacaagggtgttgtggccttcaggcttctttcaaatggtaacat

SEQ ID NO: 15073 - DNA, 227 bp, Glycine max
  Clone ID: LIB3094-028-Q1-K1-G8
aaaacctccccctccaatcctcaatcaacttctaatatcaataaatataatccttctttaccttctattcttcaaatattacacattactttaccccattttataaccaataaaaaactcaaacctaaaaccttcaaacacatccacttatcataatctctcaacaaactcaattaacataccaaaaattcttttaaatatctttaatctatatccccacccacttc

SEQ ID NO: 15074 - DNA, 450 bp, Glycine max
  Clone ID: LIB3094-028-Q1-K1-G9
acaaacgtgaaagccttatcatacagagttatcttgattccaacataaaatttcaacaactctagactgttattaataaacgcatacgttctaacatcacgctcgtgaaaaatatccctactaacaaacttaaaatcaatgaactttataaagtcaagaatcctttacaatctcctgtttgctttcacaccaatcaccacatctattgcttcactcatcaattatcccttacagaacttttactattcaactatccaagctacacctcttgtcattaacattcaacctcatatccacaagttcaaccacatactttcaacttatactacaatgcctgtactgaaactgtcacttatcacaactactaatcaccattaaactagagagcttaatccactctataaaaccatagatactatttccaaacaaaaccccctatttgaatatttt

SEQ ID NO: 15075 - DNA, 404 bp, Glycine max
  Clone ID: LIB3094-028-Q1-K1-H1
cccacgcgtccggtgatttcagtgagtgatcgtgtgttcacttgatctcatcataatcgtcagcgggcgttgaagaagatgccgatcagaaacatcgccgtcggaaggcctgaagaggcgactcaccccgacacgttgaaggcggctttggctgagttcatctcaaccttcatcttcgtgttcgccggctcaggctccggcatcgcctacaacaagctcaccgacaacggcgctgccacccctgccggcctcatctccgcctacatcgcccatgcattcgccctcttcgtcgccgtcttcgtcggcgccaacatctccggcggccacgtcaaccctcgccgtaccttcggcgccttcgtcggcggcaacaacacctttctccgcggcatcgtctacgtcatcgc

SEQ ID NO: 15076 - DNA, 162 bp, Glycine max
  Clone ID: LIB3094-028-Q1-K1-H11
taaaaaagaaaaaaaccttttactacttagctttttcatgatttgaatcttgattggaaaaactgcaaattgttaataaatacccatcaatccaattttaaaccgtaccttcttcaaaacaaaaaaaaaaaaaaaaaaaaaaaaaaaaaaaaaaaactgctc

SEQ ID NO: 15077 - DNA, 428 bp, Glycine max
  Clone ID: LIB3094-028-Q1-K1-H12
cgtccgcagagaggccgcttccatgagcgcgagcatctaatggagagcaatgtcgcaccaccaacatcacgctcttttcacacgcacgcaccagatcggcgccctcctcctcgtggcgaccaccttcttcttcacgagaatgctttccacctccacgctctccaccagcgtcgtccacgtgtcgcaaccccggttccagtgggggcagtcccagctatccctcaagatctacgtctaccaagaagactaaatcgacggtttgaaggagctcttgcgcggaagggacgctaagatcacagacgaagcttgcctcaaaagccagtggggcagtcaggtgaaaatacacaagttacttctgcaatctaaacaacggacattgaagaaagatgaagcggatttgtttttcgtcccatcttatgtgaaatgtg

SEQ ID NO: 15078 - DNA, 462 bp, Glycine max
  unsure at all n locations
  Clone ID: LIB3094-028-Q1-K1-H3
cccacgcgtccgcccagcgtccgaattcctcaaccacacttgccatatcaaagaaaagagcatcggcggtcagatcaaagatacaacatggaggcacttcaatcatgggtttcaaagcacaagctcgccagcattggggcactctgggcctctggaattggagcaacacttgtggcttattcatgcaaaaagtctccaatgaagccaagtctcaggcttatccatgctaggatgcatgctcaggctctaactntagcagtgctatccggtgcagctgcttatcattattatgagaaacgtgatgttcagccaaaaccagaggcagattatattattcctgctcccaatgtcacccagatggttgaatatgaacttcaatgtcctttctaaaaattaaaaataaaactgtangggtcatgttattaagattaggagatattcctatcatcgagtttttgcttt

SEQ ID NO: 15079 - DNA, 384 bp, Glycine max
  unsure at all n locations
  Clone ID: LIB3094-028-Q1-K1-H4
attcctcatcctttactttccatatcaaagaaaagatcatcgacgtcatatcaaanatacaacatcccaccacttcaatcatctatttcaaancacaatctctccatcattatctcactcttcacctcataaattatatcaacacttttaatcttattcatacaaaaantctccaatcaatccaattctcaaccttatccatnnctatatncatnctctaactctaactttancanttctatctctttcaactacttatcattattatnataaactttatattcatccaaaaccaaaaccatattatattattccttctcccaatttcacccacatttttcaatattaacttcaatttcctttctaaaaaataaaaaataaaac

SEQ ID NO: 15080 - DNA, 438 bp, Glycine max
  Clone ID: LIB3094-028-Q1-K1-H5
gccagactgggttaagcaaattgctttaaaatttttgaagccagataagaaaactgctgacgtggttggaaatacaaaaatgaaggccagcaccaatgttaggcatattgttcttccttgtactagttctgccagggcccaacttatcccagatattattcgctgttatagcagtggaggccggacaattgtatttaccgagacaaaagaatgtgcttctcagcttgcagggatcttgaatggagcaaaagctctccatggtgacatacagcaatcaacacgtgaggttactctgtctggctttaagtctgggaaattcatgacattagttgccacaaatgtggcagctcgaggtcttgatatcaatgatgttcagttaattatccagtgtgaacccccacgagatgtagaagcctatatccatcgttctggacgcac

SEQ ID NO: 15081 - DNA, 478 bp, Glycine max
  Clone ID: LIB3094-028-Q1-K1-H6
aaaaaatgggttcttcttcttctatgtggacggtgtgtgtgattttggcatcactggcctctgcagcactctgtgccaacccacgcaggccagtggatgtacaatttggccgaaactacgtgcccacatgggcctttgatcacatcaaatatttcaatggtggttctgacattcagcttcatcttgacaagtacactggtactggcttccagtccaaagggtcttacttgtttggtcacttcagcatgtacataaagatggttcctggagattctgctggcacagtcactgctttctatttatcttcccaaaacgcggagcatgatgagatagactttgagttcttggggaacagaacaggacaaccttacattctgcaaacaaatgtgttcaccggaggcaagggtgatagagagcaaagaatctatctctggtttgatcccacgaaagaataccacagatacttcattctctggaa

SEQ ID NO: 15082 - DNA, 459 bp, Glycine max
  Clone ID: LIB3094-028-Q1-K1-H7
ccagcgcgtcctcccacacaagcgcccatccttctaatatctcatctttacttgccatatcaaacataatagcattaagctcaaatcaaaaatacaacatgcaggcacttcaatcatcaatttcaaagcacaatctcgccaacattggcgcactctcagcctctagaattcaatcaacacttttaccttattcatgcaaaaaatctccaatcaaacccagtctcacacttatccatgctatgatgcatgctcaagctctaactttaccaatgctatccggttcaactacttatcattattatgacaaactttatattcatccaaaaccacacgcaaattatattattcctactcccaatgtcacccaaatagttcaatatgaaccttcatgtcctttctaaaaattaaaaataaaactgtaagggtcatgttattaagattatgacatattcctatcat

SEQ ID NO: 15083 - DNA, 445 bp, Glycine max
  unsure at all n locations
  Clone ID: LIB3094-029-Q1-K1-A2
cccacgcgtccggataaattgtctcactccgacatgattgctgtcctctgggaaatgatagttanggggaccgacacggtggcggttttgattgagtggatactggcgaggatggtgcttcatccggaggtgcaaaggaaggtacaagaggagttggacgcggtggttaggggtggcgctttgacggaggaggtcgtggcggcgacggcgtatcttgcggcggtggtgaaagaggttctgaggctgcacccgccgggcccgcttctctcgtgggcccgcttggccatcactgatacgaccattgatgggtatcacgtgcctgcggngaccaccgctatggttaatatgtgggccatatcaagggacccggaagtgtggctggacccacttgagttcaaacccgaaaggttcatgggtctggaaaaacaggtttctggtttcgggt

SEQ ID NO: 15084 - DNA, 341 bp, Glycine max
  unsure at all n locations
  Clone ID: LIB3094-029-Q1-K1-A9
aaacacccttgtcgaccacaccaaaattaaaaacataaaaaagcataaaagcacaaaaagacatggaaaagggaaaataaaacattttgaagtcatatttgcacacttgattaaaggctgtcgtcccttgtgacggatgcgtggggtgctaataccttccctgtgcgtaaaaacaactcccgaactattcacacttaaagttcgtagaccacaccttttcaattttcccgacgctttcctcaaataaaagttggtggcgactccgcgcattttcctttcatggaagacgcacttgtgagtcccgcatcgccctcccgtcaaagggtangttgcgacagtac

SEQ ID NO: 15085 - DNA, 332 bp, Glycine max
  Clone ID: LIB3094-029-Q1-K1-B1
gtccgcccaggcgtccggactgcccaagatgtatttacaatgttacggtgcgggcaaaaaaccatgatctttgtgatcaacaatggtggatacaccatcgaggttgaaattcatgatgggccgtacaatgtgattaagaactggaattacactgggttgattgatgcaatccacaatggtgaagggaaatgctggactgccaaagtgttctgtgaagaggagctagttgaagcaattgccacagccacaggacccaagaaagactccttatgcttcattgaggtgattgttcataaggatgacaccagtaaagaattgcttgaatggggctc

SEQ ID NO: 15086 - DNA, 457 bp, Glycine max
  unsure at all n locations
  Clone ID: LIB3094-029-Q1-K1-B11
cccacgcgtccgcccagcgtccgaattccgcatccacacttgccatatcaaagaaaagagcatcggcatcatatcaaagatacaacatggaggcacttcaatcatgggtttcaaagcacaagctcgccagcattggggcactctgggcctctggaattggagcaacacttgtggcttattcatgcaaaaagtctccaatgaagccaagtctcaggcttatccatgctaggatgcatgctcaggctctaactttagcagtgctatccggtgcagctgcttatcattattatgagaaacgtgatgttcagccaaaaccagaggcagattatattattcctgctcccaatgtcacccagatggttgaatatgaacttcaatgtcctttctaaaaattaaaaataaaactgtangggtcatgttattaagattaagagatattcctatcatcgagttttgc

SEQ ID NO: 15087 - DNA, 413 bp, Glycine max
  Clone ID: LIB3094-028-Q1-K1-G4
agaccttgtctattttctcgatagtgctttggatgattttcaggccttcaacctcaatcctccccctccaagtggggaagcaactgcgaatagcaagaaggagagtccttctttgccgtcgggggttcaaggattgggcatgggtttacccgatttgagaacgaagaaaaaggggaaacagaaggcttccaaagacagccacgtgtcggaggcgctcaacaagctcagggagcagaccaaagaggctgtgaaggggctggagtctatatccccacccactgccgatgatttaggtaaggatgccttgatggaagattgggtcaaacaatttgagcagcttgctggctctcaggacatggaatctattgtggagaccatgatgcatcaacttctgtccaaggagattcttcatg

SEQ ID NO: 15088 - DNA, 469 bp, Glycine max
  unsure at all n locations
  Clone ID: LIB3094-028-Q1-K1-E5
acgaacagatcaatgtggagtacaatgtttcgtacgtttatcatgcgatgtttgcctactgggagagggacaatgttgcgctcaagggtcttgccaagtttttcaaggagtcaagcgaggaggaaagggagcatgctgagaaattgatggaatatcagaacaagcgaggtggaaaggtgaagttacaatctatagtgatgcctcttactgaanttgaccatgaggaaaagggagatgcgctatatgcaatggaacttgccctgtcgttggagaagctgacaaatgaaaagctgcttaacttgcacagtgttgcctcaaagaacaatgatgtgcaattggcagattttattgaaagcgagtttttgggtgaacaggtggaagccataaaaaaaatctctgaatacgttgctcaactcagaagagttggcaaaggacatggtgtgtggcactttgatcagatgctactcca

SEQ ID NO: 15089 - DNA, 461 bp, Glycine max
  unsure at all n locations
  Clone ID: LIB3094-028-Q1-K1-E6
gttgtgtgcaacccattggggaagtctggagtgtgccctcatccagcaatttatgatattggctgttgggtcactagctaattcaaccccatacttgggaggagtgcttctgctgattgtttctgcctggctagcagcggcaaaatccttggatacccaatttactgcattgcgtaaagaggaagaactcgagaaagagatggaacgagcagccgccgtcaagataccagtggtggctgagactgagagtggaaatggttctcttgcaactggttcaccactgaatccatcctcaggtgactcctcaagcagtccatctgaagcctcaactcctcgcaattaaaatgtgccttctttctgtgagaaattgcctcacagaatgagcaaatagagctcttttgagagcagtgttaggtgaaactatnntgtgtaggtttatatataagctcttataggataag

SEQ ID NO: 15090 - DNA, 450 bp, Glycine max
  Clone ID: LIB3094-028-Q1-K1-E7
gaagttgcgagagtgaagaaatggcgcaagacttggcattggatttggaggagcttcgccgccgccacagcatcgccaaaagacctcgaaccctctctcttctctcctccgaaattcgtaacctcgaaaagttatcgtcagaggaagcttctgcgcagattccggcgccgatttcgaccggaactaaagtggcgccttcacctgcgctgaagtatgcggcactcgcgtcgttcagttgggaccaggatagtgacaaagttaagatatatgtgttaatggagggaatcgatgagaataaggttgaatccgagtttaagtcgatgtcattcgatgttaagttccatgatgttcaagggaagaactaccgatgtgcaatatcaaaattgcacaatgagatagtaccagagaaatgcaaggttgtggtcaagcctaaaagggcaatcatcacat

SEQ ID NO: 15091 - DNA, 474 bp, Glycine max
  Clone ID: LIB3094-028-Q1-K1-E8
tctgcctgtaagagtgaaaaaaccttctcttttccttctctcaagtctcaagagatttcatcagggctccaaagaaggacaaggctccaccaccttcctccaagcccgccaaatctggcggtggcaagcagaagaagaagaagtggagcaagggaaagcaaaaggagaaggtgaataacatggtgctgtttgatcagggcacctatgataagctcctttctgaagctcccaaattcaagctcatcactccttccattctttctgatcgtttgaggattaatggatcacttgcaaggaaggctataagagaattgatggctaggggttcaatcaggatggtgtctgcccatgcaagccagcaaatttacaccagggcaacaaacacctaggtgtggaactgatcttagcttacggagtattggtaggaatagtaatgaagtattggtcttttgcactttgggaagcatctcatat

SEQ ID NO: 15092 - DNA, 281 bp, Glycine max
  Clone ID: LIB3094-028-Q1-K1-F1
tctcctcccaaattcataacctctaaacactatcatcctatcaacctttttcacaaattccaccacctatttctaccttaactaaacttacaccttcacctactcttaattattcaccactcccctctctcaattttcaccaccatacttacatatttaacatatacatcttaatcctaataatccataataataaaattcaatccaactataatatacatttcattccattttaaaatccatcattttcaacacaataactacctaatttcaatatcaaa

SEQ ID NO: 15093 - DNA, 307 bp, Glycine max
  Clone ID: LIB3094-028-Q1-K1-F11
ggcgggcgtccgcttgaggatcccaacactttcggtaacaggtgtcacaggatgctgaagcttggactgagcattgatgaatattctagtgaagcagatgctgacatgcctcctcttgaggacgctgatgcagatgctgagggtagcaagatggaagaagttgattaaatctgacttaattgcctgttacgtttttagaaacaatgattggagaaacagtctttttactatgttctatgttttttgaattttcgaaattttggaacgttggctagttaggtgccgtatgtagtagtttctttatggt

SEQ ID NO: 15094 - DNA, 414 bp, Glycine max
  Clone ID: LIB3094-028-Q1-K1-F2
gaggagatatatgtacctaaacgaagagatcttgaaagagaatccaaacatgtgtgcttacatggcaccttctttggatgctaggcaagacatggtggtggtagaggtaccaaagctagggaaagaggctgcagtaaaggccataaaggagtggggccagccaaagtcaaagattacccacttgatcttctgcaccaccagtggtgttgacatgcctggtgctgattaccaactgaccaaacaattgggccttcgcccctatgtgaagaggtatatgatgtaccaacaaggttgctttgcaggtggcacggttcttcgtttggccaaagatttggctgagaacaacaaaggtgcacgtgtgcttgttgtctgttctgagatcactgcagtcacatttcgtggaccaagtgacac

SEQ ID NO: 15095 - DNA, 442 bp, Glycine max
  unsure at all n locations
  Clone ID: LIB3094-028-Q1-K1-F3
attgctgctgtttgcctattggtgtactttgttgtctctaccctgctggatgcctcatctagcagtngccaaaaatcagatgaagagcagaaggaggcagaactagcagtttctgaattttctggaaatggtgctgggatactatctgctgctagcacagttgccagtacttttctcttagtttttgttgctgaatggggcgacaagtcatttttctccacaattgcccttgcagcagcttcttctccccttggagtcatagctggagcactggctggtcatggtgttgcaactttgctagctgtacttgggggttctttacttgggacgtatttgtcagagaaggttattgcctacatcggaggtgttctctttctcgtctttgccgcaataaccttatttgaaattgtgcaatangggttaaaagaaatgcaatataatc

SEQ ID NO: 15096 - DNA, 215 bp, Glycine max
  unsure at all n locations
  Clone ID: LIB3094-028-Q1-K1-F5
cccacgcgtccgcgatgagtggcttcgttagatactactcgtggtctttttttgcttgatntgtttgcttctgtacccaaaatatatagtaataaataataataataaagtactacgtantttctaaactgacattgctaatcatcatttataaatgttgtccctaataacctttaagttttagcataatttaaaatataattaataatatggtt

SEQ ID NO: 15097 - DNA, 463 bp, Glycine max
  Clone ID: LIB3094-028-Q1-K1-F6
ttttgattttctggatccgtgtttttgagattagtgtatgaatttaccgattgtttttcaaggaggttatcgttgaggcatgctttggtgtttgtgttaatcggggcgttgtggaacttgcaaagggcagagggtatccgatttgtgatagacagagacgagtgtttctcccatgatgtgaagtacgagggtgacactgttcatgtctctttcgttgttattaaggctgattctccctggcattacggcgacgaaggtgtcgatctcgtggtaaagggaccttctggcgagcaaattcaagaatttcgggacaagaccagtgagaagtttgactttgtggctcacaaatccggggtccataaattctgcttcaccaacaagtctccttatcatgaaactgtcgattttgatgtacatgttggtcacttctcttactttgagcaacatgcaaaagatgagcatt

SEQ ID NO: 15098 - DNA, 453 bp, Glycine max
  Clone ID: LIB3094-028-Q1-K1-F8
cgcaccagtttcaccgcacgaatatcttgttttttggagcgatccgagaaaaactctgtaagatgttggtttaccaggacctccttacaggtgatgagcttctctctgactccttccgttacaaggaaattgagaatggaatgctgtgggaagttgaggggaagtgggttgttaaaggagcagttgatgtagacattggtgcaaacccttctgctgagggtggaggagaagatgagggagttgatgatgcagctgttaaggttgttgacattgttgacacattcagacttcaggagcaacccgcattcgataagaagcagtttgttaccttcatgaagaggtttatcaagaatttgactcccaagctcgatgcagagcaacaggagttgtttaagaagcacatcgagggagcaactaaatacctgctctctaagattaaagatttccaatttt

SEQ ID NO: 15099 - DNA, 437 bp, Glycine max
  Clone ID: LIB3094-028-Q1-K1-G1
ggaactttggatatctatagcgaaagcgtgactctcaccaaaaaccgaactgttcccagatctctgtcgcactcttccaacaatcgaaatccaaaaccctaccgacaccacactcaatcgaaattcttcattctcttctcatcgatggggcagaagtctctgatctacgcgttcgtgtcgcggtgaacagtgattctcgcggagtacaccgaattcagcggaaacttcaactccatcgccttccagtgccttcagaagctccctgccaccaacaacaagttcacctacaattgcgacgcacacaccttcaattacctcgtcgacaatggctacacatattgtgttgttgcagatgaatcaattggaagacagttacccattgcttttctagagcgtgtcaaagatgaatctgtgtcaaaatatggtggtggaaaggc

SEQ ID NO: 15100 - DNA, 436 bp, Glycine max
  Clone ID: LIB3094-028-Q1-K1-G10
caaccatggccgactcatctcaagaccttgtctcaacttctcgatagtgctttggatgattttcggtccttcaacctcaatcctccccctccaagtggggaagcaactgcgaatagcaagaaggagagtccttctttgccgtcgggggttcaaggattgggcatgggtttacccgatttgagaacgaagaaaaaggggaaacagaaggcttccaaagacagccacgtgtcggaggcgctcaacaagctcagggagcagaccaaagaggctgtgaaggggctggagtctatatccccacccactgccgatgatttaggtaaggatgccttgatggaagattgggtcaaacaatttgagcagcttgctggctctcaggacatggaatctattgtggagaccatgatgcatcaacttctgtccaaggagattcttcatg

SEQ ID NO: 15101 - DNA, 463 bp, Glycine max
  Clone ID: LIB3094-028-Q1-K1-G11
aaaaaaaggttcatagttgatatctccagcggtactatgaagtttgaagatttggcaaaaagatgcatagtttaaatactgtcctacaccactcttgcggatgtatgcatgctttctctggtttccaaaacctttcattccgcggctgaagccaacactgtgtgggattgctttctcccctctgatttgtcctctatcatctccccttcttcttccgttcctccctttcgctctattaaagatctctatctctatctctcctatcgtcccaccatcatctatcaatgtataaagagttttcaattggaaaatcagactgggaacaagtgttacatgctttcctctatatatctgatcattatattttgtgacactactcattatttgtagtgtacaaccctaccataatccaatttctaaaaagttgctatgctttcatctgtgttttggtttgacattactt

SEQ ID NO: 15102 - DNA, 84 bp, Glycine max
  Clone ID: LIB3094-028-Q1-K1-G2
aaaaccaaactcaacacaaaacacccgcacttttaaaaacaatctacccccacaaccctaccaacaccacactcaatctaaatt

SEQ ID NO: 15103 - DNA, 408 bp, Glycine max
  Clone ID: LIB3094-028-Q1-K1-G3
cctggcaatactcaattgctttttaattcatgtgatgattggacttcaaatgttcttcccaatggctgtgttttctttggactaccagcatctcccgacgctgctccaagtggtggttatataccaccacaggtgctcatttctgaggtgcttccctatgtaaagcaagcttccaactatggaggagttatgctgtgggacaggtaccatgatgttttaaattatcacagcgatcagataaaggattatgttccaaaatatgcaatgcggtttgtgaccgcagtttccgacgctatttatgagagtgtctctgcagctacgcaccgcatcttacagaagaaaccatattagaaatatggggagccgtacgtgcaaactatttatcagctatctatgcatgtgtccgtc

SEQ ID NO: 15104 - DNA, 287 bp, Glycine max
  Clone ID: LIB3094-028-Q1-K1-E4
cccacgcgtccgttccagaacgccggcgacctaactccgaattgaagtccagagaagacaacaatgcggcgagttacagcaataataatattaataacaacagcgacaggggtggcagtaacagtaatagtaattgtaacatggaacatcatcatcacagccaccatgtgaatagtgggttcttgccctgaaaatagtagttattgtatttatttattatagcttttttcttttcttttttttaactttgtacctttttatctcttcaagttgatcaaggagatcgg

SEQ ID NO: 15105 - DNA, 266 bp, Glycine max
  Clone ID: LIB3094-028-Q1-K1-A4
tccacccactcgtccactccatgctattcttttatctacaaactctcatccttattttatatttactctacaccaaaatggtggattttttaatcatacaatttccccaactcaaccctatattctttcataattataacacaaaacatctatctttcataatcatcaaaaccatataacatctttttccacaaactccaaatctttttatccaattatcaaacaaaaccctattatatatataaatcaataataaaactacttat

SEQ ID NO: 15106 - DNA, 449 bp, Glycine max
  Clone ID: LIB3094-028-Q1-K1-A5
cttctccttctcaatcttgtaattctatttcctccaccataatgctgcgcaagcttgtgtgagggccacgcaagaacaagcctggcacagttcccgttcacctcaacgtctatgatctcaccccaatcaacggctatgcctattggcttggccttggagtctaccattctggggttcaagttcatggattggaatatggttttggtgcgcacgagcacgacacaacggggattttcgaagtccaacccaaacactgccctgggttcactttcagaaagtcaattttcatcggaacaacagatctgggtccgaaggatgttcgagcattcatggagaagctggctcaggattactccggcaacacctatcatctcatttccaagaattgcaaccatttctgtaacgatgtttgtctcaaattgaccggaaagtcaatccctcgttgggtc

SEQ ID NO: 15107 - DNA, 199 bp, Glycine max
  Clone ID: LIB3094-028-Q1-K1-A6
cacccacgcctccacttctccttctcaatcttgtaattctatttcctccaccataatcctacacaaacttaaatgacgtcctttttaaaacaatcctctcaccctccccattcacctcaacttctataatctcaccccaatcaactactattcctattcacttttccttatattctaccattctttactttcaaattca

SEQ ID NO: 15108 - DNA, 459 bp, Glycine max
  Clone ID: LIB3094-028-Q1-K1-A8
cggacgcgtgggctgagaaaccctccactctctagtccaaactctcctcctacccaaaatggatgcaagggcatcatcttcttcagcttcctcgattcttttccttgcagcaattgtagctgcttatttctattcatcagaagcagctgtgtccaaaggatcttttgaggacaatttcagcataatgtggtctgaggaccattttactacctctaaagatggacagatctggtatctctcactagacaaagacacaggatgtggatttcaaacaaaacaacgctacagatttgggtggttcagtatgaagctgaagttggtagcaggtgactctgctggtgttgtgacagcttattatatgtgctcagaaaatggtgcgggaccagaaagagatgagcttgattttgagtttttggggaacagaacaggagagccttatttgattcagactaatgtata

SEQ ID NO: 15109 - DNA, 329 bp, Glycine max
  Clone ID: LIB3094-028-Q1-K1-A9
tcgaaacacccttgtcgaccacaccaaaattaaggacataaaaaagcataaaagcacaaaaagacataggaaaggtaaaataaaacattttgaagtcatatttgcacacttgattaaaggctgtcgtcccttgtgacggatgcgtggggtgctaataccttccctgtgcgtaaaaacaactcccgaactattcacacttaaagttcgtagaccacaccttttcaattttcccgacgctttcctcaaataaaagttggtggcgactccgcgcattttcctttcatggaagacgcacttgtgagtcccgcatcggccttccgtcaaagggt

SEQ ID NO: 15110 - DNA, 399 bp, Glycine max
  unsure at all n locations
  Clone ID: LIB3094-028-Q1-K1-B1
tatttcttcctatctctgtctcattaccccttcattgagtccactttactcacgaatcttctaaacttcaacaacaccctccaaccatatttaatgatgatttttcatatntacctcccattttatttatataaaatataattttatatataattttttttttcatatatcctctcctatatttaaatacatactaccccaattcctctatttttaaaatctcttttttcttaaatatattaaaatcacctaaatttaatttttctttatatcttttcattccatacctatcacactcctcaatttttccccattccacccattttttttttcacaataaacccaaatcttaatattattccaaactatctttattatctccatattatatacaaattt

SEQ ID NO: 15111 - DNA, 340 bp, Glycine max
  Clone ID: LIB3094-028-Q1-K1-B11
ggctagttttgattgcttgatgaaaacctatttattcctgacaccagaattctggaaggatagtcgcttctccaaatctccattccaagagtacacagatctactggcaaaaccaacaggaaagactctaatcttggaggaggaaagggtggatgcttgatttgctagttttgctttatggatgttttaggaactttattactttacatactttgttggttctgtgctttacttttggttttgatagacggtatgtctctgtatgcattttgattgtttccaagttttaattgactgcaaaaaaaaaaaaccaaaaacaaattataaaataacatctaac

SEQ ID NO: 15112 - DNA, 404 bp, Glycine max
  Clone ID: LIB3094-028-Q1-K1-B3
acgcttgcatgctattgcttcctatctcttgctcatgaccccttcatggagtccactttgctcaggagctactagtcttcaacaacaccctccaaccagagttaatgaggagtgtgcatgtgtaccgccgaggggatggagagaaaagggaagttgagagagagtttgtgttttcagagagcggctcctatggggaaatgcaggctaccccaattcctggattggtaaaatctcgtgtttcttaaatgtgtgaagggcaccgaaatggagtgtggctttgtgtctttgcgttccatgccgatcacactcctcaattttgccgcattccaccggttttgttggtcacaagaaacccaaagcttaagatgattccaaacttgcttgatgatctccatgtgatatac

SEQ ID NO: 15113 - DNA, 335 bp, Glycine max
  unsure at all n locations
  Clone ID: LIB3094-028-Q1-K1-B5
tattacttcctatctctttcgataaccccttcatataatccacttttctcaccgatctattattcttcaacaacaccctccaaccacanttaataaggatttttcatatttaccacctacattatttatataaaatttaattttatatataatttattttttcaaataaaccctcctatttttaaatacactctaccccaattcctctattattaaaatctcttntttcttaattatattaaaatcacccaaatttaatatatctatttntcttttctttccattcccatcacactcctcaatttttccccatttcaccacttttttttttcaca

SEQ ID NO: 15114 - DNA, 461 bp, Glycine max
  Clone ID: LIB3094-028-Q1-K1-B6
caaagacatccttctcctggatgtggctcccctcactctcggaattgaaactgttggtggagtgatgacaaagttgattcccagaaacactgttatcccaaccaagaaatctcaggtgttcaccacctatcaggaccagcagactacagtctccattcaggttttcgaaggcgagaggagtctcacaaaggattgccgccttcttgggaaatttgatctgtctggaattcctccagccccaaggggtacgcctcaaattgaagtgaccttcgaagttgatgccaacggcattctaaatgtgaaggcagaagacaagggcactggtaaatcagaaaagatcaccattacaaacgaaaagggacgtcttagccaggaagaaattgagagaatggttcgcgaagcagaggagtttgcagaggaagacaagaaggtgaaggagaggatcgatgctcgcaacagtc

SEQ ID NO: 15115 - DNA, 105 bp, Glycine max
  Clone ID: LIB3094-028-Q1-K1-C1
gtcgtgcatgataaatttgggcaaaattccaacattgagctatagttttaaattctatatacaggtgccaacattgttattttaacaattaaagcattatgtttt

SEQ ID NO: 15116 - DNA, 106 bp, Glycine max
  unsure at all n locations
  Clone ID: LIB3094-028-Q1-K1-C2
atgataaattttgtcaaaattccaatanttanctataggtaaaaattctatatacaaagttccaacattaaaaacttaacaactaacccattatnttatacacttt

SEQ ID NO: 15117 - DNA, 180 bp, Glycine max
  Clone ID: LIB3094-028-Q1-K1-C3
aaaaatgtaattttcagcactgtccaggaaatttaaggattgtaattctttatgcctcattttagtattaaaaaaaaaaaaaaaaaaaaaaaaaaaaaaaaaaaaaaaaaaaaaaaaaaaaaaaaaaaattaaaaaaaaaaataaaaaataaaaaaaaaaaaaaaaaaagcctcccattt

SEQ ID NO: 15118 - DNA, 213 bp, Glycine max
  Clone ID: LIB3094-028-Q1-K1-C5
aaaaaaaacaacaaccccaaaccaccaaaaaaaaaacaaaaaaaaaaaaaaaaaaaaacacaacacacactaaaaaaaccaaacaaaaaatacacatacatcccaccacaaaacaccacaaaaaacacacacaaaatcaaaacaacaaaccaccaaaaacaacaaccaaaaaacaaaaacccaaacaaaacccaacaaaaacaccaaacaaaa

SEQ ID NO: 15119 - DNA, 197 bp, Glycine max
  unsure at all n locations
  Clone ID: LIB3094-028-Q1-K1-D11
tctaaaaatatactcatatactcatctcaaatacctcacatacttgacgctaatttctaaaacccntacactcttaccaaaacattcatcttaatctccaaactctctctcaacatctcccccacattattataacattctacacctacacccaatccaacatattcattaacttccaataaataaccacctatatc

SEQ ID NO: 15120 - DNA, 449 bp, Glycine max
  unsure at all n locations
  Clone ID: LIB3094-028-Q1-K1-D6
tcacccactctcctaattctatatgaataaattcgcatattttcattgtattttaggatcttcacccgccacattatcacaaagacctccaaccctctctcttctctcctcctaaattctaacctcnaaagttatcttcatataatcttctctcatattcctnctcctatttctaccctaactaaatnttctccttcaccttctcttaantattctncactctcntctttcatttnttaccattatatttacaaatttaatatatatntnnttaattatttaatctataataataatgtttaatcccaatttaaatctatntcattctattttaaattccattattttcaatttaataactacccattttcaatatcaaaatttcacaattaaataataccatataatatccaatttnttntcaatcctaaaaattcaatcatcacatt

SEQ ID NO: 15121 - DNA, 464 bp, Glycine max
  unsure at all n locations
  Clone ID: LIB3094-028-Q1-K1-D7
atcacccagcaagaaaaaagaaaatcgattattaagagcaaggacacaacacaaagaagcaaganaagacatggcgttgcagtggctgattctcacttacgtggtcgcagctgaggctgccgtggccattctgctaacccttcccacgcccaaactcctaagggaccgtttcgcctctctcgtttccctcattcttcaacccgcgcttttcattgtcccctttgcggggttccaactccttgatatatactggaaaaatgagcatcggttgatgtgtacctctgaagtttgtactgctgcggagagagatcgatatgagaaatctatatacaaagctcagaggaatgtaatactgtgtgttacagcatgtcttctctactggtctatcagccgcatttgcaagtatcagaaggaaatccagagtctggangaaggggagaagagaatcaagtcccactagattc

SEQ ID NO: 15122 - DNA, 462 bp, Glycine max
  unsure at all n locations
  Clone ID: LIB3094-028-Q1-K1-D8
attgtatcttgttattttttataaaagggaggccaatgccttatattgtaattatacgtgnggatgttgctccagcaaaatcaccccacaacaaatgtttacattcataaggtggttcatcaaaccaatgtattattccccaggataactgtcatcaacatttaatcagcagcataattgtcttaaaataaaatcttctttgtcttcaaagatacactccaggtttaaactattcatttaaagacaatccaaatggtgacattctcgtctgggtggtgtagttggttatcacgctagtctcacacactagaggtccccggttcgaacccgggctcagacatttcaatattttgtagcccatgtctgtaaattactttgagatatgtttttaggtttttttttaatgctttgtaataaaattttacagattccacaatcaangaggacatgggttgagtatgt

SEQ ID NO: 15123 - DNA, 416 bp, Glycine max
  Clone ID: LIB3094-028-Q1-K1-E12
taaacaaccattcttaacacgtgttttttataccatttaaactccacctcacctctattctctttcatattttattatctcataaatctataaattctctatatctaaccatacattctctaaaccaaatccatttacaattttactcatacttcccacctcatcctcactaacatctttatattttttcaaccccttcaacccttattccaacccaatttatttatccatcacttttaatcaatcaaattccatattaatatacaatttcacgaaatttcatattaactccattctacaatttataccaatttattaaaaaacttctataataccttcaccatatttattataattcacaatatactataatctatatatccattttcaaaatatttcctacctttataaaacat

SEQ ID NO: 15124 - DNA, 381 bp, Glycine max
  unsure at all n locations
  Clone ID: LIB3094-028-Q1-K1-A3
cgccatgctgttcttggagctacaaactctcgtcctgatttgatattgactggacaccaagatgatggagaatttgctcttgcaatgtgcccaactgaaccctatgttctttcaggaggaaaggacaaaacagtggtgttgtggagtattgaagaccatataacatctgctgccacagactccaaatctggtgggtcaattatcaaacaaaactctaaatctggagaaggcaatgataaaactgctgatggccctactgttggaccacgaggcatttattgtgggcatgaggatacagttgaagatgtgactttctgcccatctagtgcacaggagttctgtagtgttggagatgattctngtctcatcttatgggatgca

SEQ ID NO: 15125 - DNA, 249 bp, Glycine max
  Clone ID: LIB3094-026-Q1-K1-H8
acaaaaacgtttgctttccaagctgatatcaaccaactttctcattctcatcatcaacaccttctactccaacaaggaaattttccttcaagaacttatcaacaacacctcctattctttgtacaatattcaattttatagtttgacatataataacaatcttttatcttaaccacatctgttcattcatataattccatacaagactaacaatacacttaccattgtttacagtaatattggcattac

SEQ ID NO: 15126 - DNA, 284 bp, Glycine max
  Clone ID: LIB3094-027-Q1-K1-A12
ctgtgttgcaagattcacttcaaattatgcgtttcgctgatcggttgcggatcacggcaaacgacgtcgcagatcatcgcaattccttgattatttccttttgttgatacgcggaatcgcgcacacggtgctggtgtgtgcactgaggtagaaagaagaagattgaattgtaaacagcatgaattaccttcttggagctttcaagcctgcatgtaatgtcttgatcacgtttaatgatgggaagaactcggagcatgttgcgtttttgaaagaaaatggtcaaa

SEQ ID NO: 15127 - DNA, 422 bp, Glycine max
  Clone ID: LIB3094-027-Q1-K1-B10
caacagagtaatatgcaaaagctcagggacggaacccaagagcaagttctggagactgatcatatcattatctgtgggatgaatagtcatcttcccttcatattaaagcagttaaataagtatcaggaatttgctgttctcttaggcacagctacagctaggtaaatggttcagacaaggaggcagagaatccttcttatgtctgatcttccaagaaaacagattgatagagtagcagacaatattgcaaaagatttaaatcatattgatgtccttacaaagaggtatcaatgctggttgcagccttaatatgaccaaatcatttgaaagagcagcagctaacagggcacgtgcaataattatactgccaacaaaaggagatcggtatgaagttgacacagatgccattctttctgttttag

SEQ ID NO: 15128 - DNA, 211 bp, Glycine max
  Clone ID: LIB3094-027-Q1-K1-B11
tcgggggttgctgtaatcactgccccgattttggttcacgagttgatgaagctcgaagggggcattgatgaagatcctagcgacgctcatgctgacatgactaatgcggaggacgcagatacaaatgcagaggttaacaagatgaaagatttgaactaaaggtgacttaataatctgtatcgaggtaagaaacaggactaagctaaacatg

SEQ ID NO: 15129 - DNA, 402 bp, Glycine max
  Clone ID: LIB3094-027-Q1-K1-C10
cccacgcgtccggtgaagttggatcattcctccgcggaatcgatgtgggccgtttgccttctgtggttgattgcgaaaaggaagcaggtgtttaatttccaaccagcacggttcttaccttcagtgaaaaccccaccaggggggaacccatggaggaggaaaccgccccaaccgaacctggttcacaaggcttattcacggccaaaaaaatatcctgaaacctctagaaagaaccttacactctccaaagatcagtcaattgccctggaagagagcttcaaagaacacaacactcttaaccccgtaagtaaacgtacacatgccaattaattttttttgtcctgtatcagagacatagtatcctctgatctactggatcatatattaatctcactcacgatg

SEQ ID NO: 15130 - DNA, 384 bp, Glycine max
  Clone ID: LIB3094-027-Q1-K1-C11
cggtacgcgtgggattttgtaattgtaaggatcaataagttgtttgttttgacttgatggactacaaaaatgctccacaactcataagatacttgtacccaaaagataacctttgtacattctgtgagaaaatcgatgacgaagtgcccaactaaactttattcccaggacttaattggttttatgcccatctttgaactttgttctcgagactgaaaacatattttttcttctgctgcaggtagtattaagcatctttggtccaccttcaagatgttcaatcattgagcaagaggaagatcgttcatcaacctcttcatagctgtaaactactcattggacgatgggatgtccgcaagtagtgcagaagcatctgtaaagtac

SEQ ID NO: 15131 - DNA, 390 bp, Glycine max
  Clone ID: LIB3094-027-Q1-K1-C12
cccacgcgtccggttgaggattgagtaacggagatgtagcagagtcacccggctagtcaacaggactttccgttttattcatttcacttttgaatcttcgaatcacatccgatgggtagcagagggcacactctcttggaggttggacccgacgacggggttgccgtcatcaccatcgtcaaccctcccgttaattcactctcatttgacgtattgcgcagtttaaaggagagttttgatcaggcgatacagagagatgatgtcaaggcaattgttgttacaggtgcaaagggaaaattttctggaggtttggatatttctgcatttggtggtattcaagaggcaaaagagcgtccaaaacctggttgggtatcagtagaaatcatcact

SEQ ID NO: 15132 - DNA, 216 bp, Glycine max
  Clone ID: LIB3094-027-Q1-K1-D10
gttgagatcccaacactttcggtacaggattcacaggatgctgaagggggactgagcattgatgaagatgctggtgaagcagatgctgacatgcctcctcttgaggacgctgatgcagatgctgagggtagcaagatggtaagaagttgattaaatcggacttaattgcctgttacgtttttagaaacaatgattgtagaaacagtctgtttacta

SEQ ID NO: 15133 - DNA, 421 bp, Glycine max
  unsure at all n locations
  Clone ID: LIB3094-027-Q1-K1-D11
cgcgtcgctgctccgtaccagtttcactgcataaatttgagagaaaactctgcaaacatgttggtttatcaggacctccttacaggtgatgagcttctctcggactccttccgttacaatgaaattgagaatggaatgctgtgggaagttgaggggaagtgggttgttaagggagcagttgatgttgacattggtgcaaacccttctgctgagggtggagaagatgagggagtcgatgacgcagctgttaaggttgttgacattgttgatacattcagacttcaggagcaacccgcttttgataagaaacagtttgttaccttcatgaagaggtttatcaagaatttgactcccaagctcgatgcagagaaacangagttgtttaagaagcacattgagggagcaacttaatacctgctct

SEQ ID NO: 15134 - DNA, 371 bp, Glycine max
  Clone ID: LIB3094-027-Q1-K1-E10
ttttatctttattccactgtaatagaacatgagcatataaatggataccctttatatgatctatctttatattatctataaagggtaaagatatccgatgtgaatctatttgtttagttttctatcggtatgtatataggtgaataatccaacatgcctttttgtgaagtaaaaaaactaccctcgatccatgcctcaaaagggttgataataagtaaaaaaaatcaatgaattcatgataaaacccttctgcgtttgtttattataaatttttttgtcaataaagggatcaaggggttgggggatcaaatggtgaagttcttttgttggtaaattggaggattagaaacatgactattgctttccaatta

SEQ ID NO: 15135 - DNA, 399 bp, Glycine max
  Clone ID: LIB3094-027-Q1-K1-E11
aaactgaagaaggtgaagtgaccactgaaggcactggattatctgcttggcgaatgtaaggacaggccgcctcaagaatttcaagaattttgcccgaaatttaagaacgattatcaacaaaattgcccgaatgccgcgtatgaagcagtttgcccgttactgaagcaagcgattcaaatatgttgccagaaacacgcataactctgcaagccacggtgggcgtttggatgtgcttttagttaccactttctctcttggatttgcttacgtattgctccttttgtattagtggctcctgtcccaccttgcttttggacttgagctttttatatttctgattgttcaatgtctgttgtgtgtgctctccaacctgtggtgactttccggtttattcctgtg

SEQ ID NO: 15136 - DNA, 418 bp, Glycine max
  Clone ID: LIB3094-027-Q1-K1-E9
gttcttctaccttattttctttccctagtcaaggagattcatctctgcagcaggttgttttagaaaagaaaaaatgctgaagatttgctgcattggggctggatatgtggggggtccaacaatggcagtcattgcactgaaatgcccctcaattgaagtggctgttgttgacatctctaaatccaggattgcagcatggaacagtgaccagctccctatctatgagccaggccttgatgatgtggtgaagcaatgtcgtggcaagaaccttttcttcagcactgatgttgagaaacatgtctatgaggccgacatagtgttcgtctccgtcaacaccccgacaaaaactcgtggtcttggagccggaaaggctgcagatttgacttactgggagagtgcaacacgcatgattgctgat

SEQ ID NO: 15137 - DNA, 382 bp, Glycine max
  unsure at all n locations
  Clone ID: LIB3094-027-Q1-K1-F9
cctaaacaactctttctcttcttccttcgctcgttgttctccctcgcgtagatcgacaatggcggagacagagacgtttgctttccaggctgagatcaaccagctcctcagtctcatcatcaacaccttctactccaacaaggagattttccttcgtgaactcatcagcaacgcctccgatgctttggacaagattcgatttgagagtttgacagataagagcaagctcgatgctcagccagagttgttcattcatattattccagacaagactaacaatacactgaccattgttgacagtggtattggcatgaccaaagctgatttggtgaacaacttgggtacatttgctagatctggtaccaangatttcatggaagcc

SEQ ID NO: 15138 - DNA, 394 bp, Glycine max
  Clone ID: LIB3094-027-Q1-K1-G9
cccacgcgtccgcccacgcgtccggaagaaaggaatataccttacggatggtggaatcaagaagcatttgggattgcatagtgcgggtggtgacgaagatggaagacaaagagagtgagagagagaaaaatcttcgctttatgtcaatggcacgaagcaggggtttttacagaagtgagcaacgacgccagatatgagaaaagtgagtttatttggggtcatatttgtaaaaagtggttttgtaattataccctctaattcaagagtgaagaaacaagggtgggatggaaatataaatagtacaatttggtgctagtggtggcttaccctttggcctctttttctaattcagaattttttttaaatatataaaagtggggtgatatgtttactt

SEQ ID NO: 15139 - DNA, 403 bp, Glycine max
  unsure at all n locations
  Clone ID: LIB3094-027-Q1-K1-H10
cccacgcgtccgtcaagcattgcatccctcttgatttgtagtttgttttgtgcttgagataaaagttctgccaaatcaagaggggttttaagatcatagtgtgtgttttgcaacaatggctaagttctttgctgctatgatcttggcactctttgccatttccatacttcaaacagtggtaatggctgctaatgaacaaggaggccacttgtatgacaacaagagcaaatatggaagtggaagtgtcaagagttaccaatgcccatcacaatgctcgaggagatgtagccagacccaataccacaagccctgcatgtttttctgtcagaagtgctgcangacatgcctgtgtgtgcccccggggtattatggtaataaagctgtgtgcccttgctacaacaac

SEQ ID NO: 15140 - DNA, 334 bp, Glycine max
  Clone ID: LIB3094-027-Q1-K1-H9
agcgtcgccacgcgtccgatttattctataattgggcctatgttataccaatcgtgggtccgaaatttcaattgaaaattactgtgaaaacaagtgccaaagccagaggtttgttgagtctttttttatagttttttttactctactctagagccattctaagtttctcttcgagtcctagcttgcttctatgtccttttcattgctttaattgttgaataatccttgaaaaattgtcttggtaaaactccattggtttagctttcatttcatgtttttttagtctttggttattgcttgtctctttgtttccttggttgtgagttgccacata

SEQ ID NO: 15141 - DNA, 463 bp, Glycine max
  Clone ID: LIB3094-028-Q1-K1-A10
cggacgcgtgggtttttcttcaaattcccgttatagagacactcagaaagatgaggttatcgtggaggcatgctttggtgtttgtgttaatcggggcgttgtggaacttgcaaagggcagagggtatccgatttgtgatagacagagacgagtgtttctcccatgatgtgaagtacgagggtgacactgttcatgtctctttcgttgctattaaggctgattctccctggcattacggcgacgaaggtgtcgatctcgtggtaaagggaccttctggcgagcaaattcaagattttcgggacaagaccagtgagaagtttgactttgtggctcacaaatacggggtccataaattctgcttcaccaacaagtctccttatcatgaaactgtcgattttgatgtacatgttggtcacttctcttactttgagcaacatgcaaaagatgagcatttcaccccctt

SEQ ID NO: 15142 - DNA, 314 bp, Glycine max
  Clone ID: LIB3094-026-Q1-K1-H6
tcccggactccacccacgcgttcgtccgaacatatcagcgatctttcggcctttataaacaatcaccataatcaggaacactgtccaaataacaaacccatcacaatcatactctaccataaaccatattatgcgactcatcatcacacccttaaatcgtacatgactgaactcctctaaacactcattttccactactaccactcattctccaatattacataccacaagctcaccaacaacagcaatttcaatcctaaacccctaatattcaattacatcattcacacatacactaacaacatccttaccat

SEQ ID NO: 15143 - DNA, 166 bp, Glycine max
  Clone ID: LIB3094-028-Q1-K1-A11
cataaacacaaaaactcgagatttaaaaaaacatttgaatctatttcacacttattaaaacctcatccttttaccattctgggtgctataccttccttctaaaaacaactccaacttcacacttaaattctaacacaccttttaattttcccacctttctaaataa

SEQ ID NO: 15144 - DNA, 320 bp, Glycine max
  unsure at all n locations
  Clone ID: LIB3094-026-Q1-K1-F1
tttcggctccctctcctctctttactncttttcaaacaatgtcacataccttgcattctgtcaatttcaaaaatccttgctcctgaatatccaattgcacttatctcccattttcacgttttcttttaataactccttctccatatatctactattatctatgtcatcacacaattcatttccccattcaactcttacgactaaataattactataacctttcatcattcttatatgtaccaaatatcatcccatacttctacacacatactaaacacttatccttccaaatcctaaatcaaaactaccattgccaacac

SEQ ID NO: 15145 - DNA, 396 bp, Glycine max
  Clone ID: LIB3094-026-Q1-K1-F4
taggagtgtaaaaaccttcttttttccttctctcaagtctcaagagatttcgtcatgggtccaattaaagacaaggctccaccaccttcctccaagcccgccaaatctgtcggtttcaagcataacaagaagaagtggatcaagggaaatcaaaatgagaatgtgaataacatggtgctgtttgatcaaggcacctatgataagctcctttctgaagctcccaaattcaagctcatcactccttccattctttcttatcgtttgatgattaatggatcacttgcaacgaatgctataagacaatatattgctatgggttcaatcatgatggtgtcttcccatgcaagccatcaaatttacaccattgcaactaacacctatgtttttaactgatct

SEQ ID NO: 15146 - DNA, 465 bp, Glycine max
  unsure at all n locations
  Clone ID: LIB3094-026-Q1-K1-F6
cccgcgcgtccggtgatttcagtgagtgatcggtgttcacttgatctcatcataatcgggagcgtgaattgaagaagatgccgatcagaaacatcgccgtcggaaggcctgaagaggcgactcaccccgacacgttgaaggcggctttggctgagttcatctcaaccttcatcttcgtgttcgccggctcaggctccggcatcgcctacaacaagctcaccgacaacggcgctgccacccctgccggcctcatctccgcctccatcgcccatgcattcgccctcttcgtcgccgtctccgtcggcgccaacatctccggcggccacgtcaaccccgccgtcaccttcggcgccttcgtcggcggcaacatcaccttcctccgcggcatcgtctacgtcatcgcccagctcctcggctccatcgtcgccttcctccttctggccttcgtcaccgncttcactgttc

SEQ ID NO: 15147 - DNA, 449 bp, Glycine max
  Clone ID: LIB3094-026-Q1-K1-F7
cccgcgcgtccgcccagcgtccgaattcttcaaccacacttgccatatcaaagaaaagagcatcaacatcagatcaaagatacaacatggaggcacttcaatcatgggtttcaaagcacaagctcgccagcattggggcactctgggcctctggaattggagcaacacttgtggcttattcatgcaaaaagtctccaatgaagccaagtctcaggcttatccatgctaggatgcatgctcaggctctaactttagcagtgctatccggtgcagctgcttatcattattatgagaaacgtgatgttcagccaaaaccagaggcagattatattattcctgctcccaatgtcacccagatggttgaatatgaacttcaatgtcctttctaaaaattaaaaataaaactgtaagggtcatgttattaagattaggagatattcctatcatcg

SEQ ID NO: 15148 - DNA, 469 bp, Glycine max
  Clone ID: LIB3094-026-Q1-K1-F8
tctgcctgtaagagtgaaaaaaccttctcttttccttctctcaagtctcaagagatttgagtcatggctccaaagaaggacaaggctccaccaccttcctccaagcccgccaaatctggcggtggcaagcagaagaagaagaagtggagcaagggaaagcaaaaggagaaggtgaataacatggtgctgtttgatcagggcacctatgataagctcctttctgaagctcccaaattcaagctcatcactccttccattctttctgatcgtttgaggattaatggatcacttgcaaggaaggctataagagaattgatggctaggggttcaatcaggatggtgtctgcccatgcaagccagcaaatttacaccagggcaacaaacacctaggtgtggaactgatcttagcttacggagtattggtaggaatagtaatgaagtattggtcttttgcactttgggaagcatc

SEQ ID NO: 15149 - DNA, 443 bp, Glycine max
  Clone ID: LIB3094-026-Q1-K1-G2
cccacgcgtccgctcgagaatatgacccgtcctaaaatttacgaaacataatgatttaggatttatgatatataatgagaggaacataaacgaacaatcagatgctgctagtcatttggataataaacaacattaggatttaggcatatcacatgatcgctttacttataatttagggatatcagctcaataccacatgattcaagtaatattaccaaaatcaaagccttatcctacaagatgcggtcagctacatgggtcatgacgtcattcggcaagtttagaaaccaaagtgtagcaaacgggaaaaaagtacacttctccttacagaggtatcccatatgacacaataactctgaaatagtatagtataccatagtcttaatcagcggaatatacaatttcttacatgacaaaaggacagccactgatcccagacaata

SEQ ID NO: 15150 - DNA, 457 bp, Glycine max
  unsure at all n locations
  Clone ID: LIB3094-026-Q1-K1-G3
cccactcgtccgtacacatatgcattctttctctcactccattccatttccgggattttgatttgcgtacatacacttacctctctggtctctagctatagcacaagatatgggtagcagttattttggagaacctaactttggaaatgaaagagcaagttgttcttcttcgtcaagaaaagggaagaagagccacaactcagacaagccaaagcaaccacagagaggtcttggagttgctcaattggagaaaatcagattacatggctatcacccttctctgcacgctccttacccttctaatttttccaacgaagatccaagagtgcaaatagcatattcatcggtgccatcatcttctttttcttactcatcatcatacgcagcttcctatggattccaacccaacatcatgatgggcctatccgaatatcaaaaaacanacatcagatatgga

SEQ ID NO: 15151 - DNA, 463 bp, Glycine max
  Clone ID: LIB3094-026-Q1-K1-G4
cggacgcgtgggctgagaaaccctccactctcgagtccaaactctcctcctacccaaaggggatgcaagggcatcatcttcttcagcttcctcgattcttttccttgcagcaattgtagctgcttatttctattcatcagaagcagctgtgtccaaaggatcttttgaggacaatttcagcataatgtggtctgaggaccattttactacctctaaagatggacagatctggtatctctcactagacaaagacacaggatgtggatttcaaacaaaacaacgctacagatttgggtggttcagtatgaagctgaagttggtagcaggtgactctgctggtgttgtgacagcttattatatgtgctcagaaaatggtgcgggaccagaaagagatgagcttgattttgagtttttggggaacagaacaggagagccttatttgattcagactaatgtatacaag

SEQ ID NO: 15152 - DNA, 449 bp, Glycine max
  Clone ID: LIB3094-026-Q1-K1-G5
cttgtccttctcaatcttgtaattctatttcctccaccataatgctgcgcaagcttgtgtcagggccacgcaagaacaagcctggcacagttcccgttcacctcaacgtctatgatctcaccccaatcaacggctatgcctattggcttggccttggagtctaccattctggggttcaagttcatggattggaatatggttttggtgcgcacgagcacgacacaacggggattttcgaagtccaacccaaacactgccctgggttcactttcagaaagtcaattttcatcggaacaacagatctgggtccgaaggatgttcgagcattcatggagaagctggctcaggattactccggcaacacctatcatctcatttccaagaattgcaaccatttctgtaacgatgtttgtctcaaattgaccggaaagtcaatccctcgttgggtc

SEQ ID NO: 15153 - DNA, 263 bp, Glycine max
  Clone ID: LIB3094-026-Q1-K1-G7
aagaatcaaagaaaggggtggtggctgcttcgaaagcttaataatttgtttggttccatgacatcatagttatcgcagcagcaaactaacaaattactcatatcatataataagatggcccgttctctctcgcaagccaaacgtattggtgtccttgttgctcaatctatctccctaattcccgttcatcggctaggttacgcagtggcatccgatgtatcggtaagagttggattgggtaatattgtgcgaacgaatggaat

SEQ ID NO: 15154 - DNA, 450 bp, Glycine max
  Clone ID: LIB3094-026-Q1-K1-G8
acgcacgcgtccgtcggcctgtaagagtgaaaaaaccttcttttttccttctctcaagtctcaagagatttggtcatgggtccaaagaaggacaaggctccaccaccttcctccaagcccgccaaatctggcggtggcaagcagaagaagaagaagtggagcaagggaaagcaaaaggagaaggtgaataacatggtgctgtttgatcagggcacctatgataagctcctttctgaagctcccaaattcaagctcatcactccttccattctttctgatcgtttgaggattaatggatcacttgcaaggaaggctataagagaattgatggctaggggttcaatcaggatggtgtctgcccatgcaagccagccaaattacaccagggcaacatacacctaggtgtggaactgatcttaagctacggaatattgttaggaatagtaatga

SEQ ID NO: 15155 - DNA, 198 bp, Glycine max
  unsure at all n locations
  Clone ID: LIB3094-026-Q1-K1-H10
gcgattcattcctatagctatttctacaacatatcatactactactgttggggttgctgctactgctgttgctgctgccgcgtatcaatcactcgcttaccataatgggtagggatagccatgaccgcacttcctttcactcttgcattgcccttctacaagatgggtgtagacagcttctnagagtaaaagaaatga

SEQ ID NO: 15156 - DNA, 249 bp, Glycine max
  Clone ID: LIB3094-026-Q1-K1-H11
tcgcgcacgcgtccgtcaagcattgcatctctcttgatttgtagtttgttttgtgcttggtataaatgttctgccaaatcaagaggggttttaagatcatagtgtgtgttttgcaacaatggctaagttctttgctgctatgatcttggcactctttgccatttccatacttcaaacagtggtaatggctgctaatgaacaaggaggccacttgtatgacaacaagagcaaatatggaagtggaagtgt

SEQ ID NO: 15157 - DNA, 151 bp, Glycine max
  Clone ID: LIB3094-026-Q1-K1-H2
acataaactaacaatcacactctactacacattataatcataaacaacatcaccacctaggcatatcacattatcgctttactcataaactacccatatcaactaaataccacataattcaaaccttataacaaaaaccaaatcctaatcc

SEQ ID NO: 15158 - DNA, 456 bp, Glycine max
  Clone ID: LIB3094-026-Q1-K1-H4
cctaaacaactctttctcttcttccttcgctcgttgttctccctcgcgtagatcgacaatggcggagacagagacgtttgctttccaggctgagatcaaccagctcctcagtctcatcatcaacaccttctactccaacaaggagattttccttcgtgaactcatcagcaacgcctccgatgctttggacaagattcgatttgagagtttgacagataagagcaagctcgatgctcagccagagttgttcattcatattattccagacaagactaacaatacactgaccattgttgacagtggtattggcatgaccaaagctgatttggtgaacaacttgggtacaattgctagatctggtaccaaggaattcatggaagccttggctgctggtgctgatgttagtatgattggacagtttggtgtggggttctactctgcatatctggctgctga

SEQ ID NO: 15159 - DNA, 408 bp, Glycine max
  Clone ID: LIB3094-026-Q1-K1-H5
gacccacgcgtccgctcgtccttctcaatcttgtttttctatttccttcaccataatgctgcacaggcttcttgaaagtctacccaagaacaagcctgtcacacataccgttcacctcaacacctatgatctcacccaaatcaactgctatacctattgactagaccacatagtctaccattctgaggttcaagttcatggattggactatgagccttgacgcgcacaagcacaactcaaccaagatttctcactttcaacacatacactgcacctgcatcacttatacaaactcaattttcatcgccacatcagatctcgataacaaagatgcttgaccattcatcgaaaaacttcctctaaattacttcatcaacacctatcatctcatttccaacaatttccacc

SEQ ID NO: 15160 - DNA, 440 bp, Glycine max
  unsure at all n locations
  Clone ID: LIB3094-026-Q1-K1-E9
agaatacacatatgcattctttctcttactccattccatttccgggatttgcattggcatacatacacttacctctctggtctctagctatagcacaagatatgggtagcagttattttggagaacctaactttggaaatgaaagagcaagttgttcttcttcgtcaagaaaagggaagaagagccacaactcagacaagccaaagcaaccacagagaggtcttggagttgctcaattggagaaaatcagattacatggctatcacccttctctgcacgctccttacccttctaatttttccaacgaagatccaagagtgcaaatagcatattcatcggtgccatcatcttctttntcttactcatcatcatacgcagcttcctatggattccaacccaacatcatggntaatttaatttggctttttcaaatgctagtt

SEQ ID NO: 15161 - DNA, 308 bp, Glycine max
  Clone ID: LIB3094-026-Q1-K1-C4
gacccactcgtcctttcggcgctgtggcggacgctctctgcggttgttgacgagaagacggagttcgacgtgtgtatcatattaaagccgagcaacgctcgaatcgcggtgattaaagctgtgagggcattgaccaacctagcgctgaatgaggcgaatgagttgatcaaagggttgccgaagaagttcaaggaacggatttcaaaggactaagctgaagatgctaagaagcaactcgaagaagcttgtgccaaagttaccattgcttaaacactgattagctgcagcatatatgttctgcttcttct

SEQ ID NO: 15162 - DNA, 469 bp, Glycine max
  Clone ID: LIB3094-026-Q1-K1-C5
ccggccggacgcacgcgtccgcccagataagagagatagctttttggttttctgagtaccatatggattccaggtgcttcgttacatttaacttgtctgatgcatggttcccatcggctctttctctgggtgatgttgattgtggaatggcatcagttagagtaactgcaaaagacgtagtattttggtttcagtcacacactgctgcacaaatccgatggggtggcgcaaagcatgaagctggagaaaaagatgatggtacgaggatgcatccaagatcatcattcaaggttttccttgatgttgagaaggcaaggagcttaccatggaacgaatatgaaatagatgctatgcattccttgcacttaatactgagaaatgcattcaaagataccgacagtatggatttaaacacaaaagcatttaatacaagactaatcgatttgaacattgaggggatgcaagaact

SEQ ID NO: 15163 - DNA, 241 bp, Glycine max
  unsure at all n locations
  Clone ID: LIB3094-026-Q1-K1-C7
cccactcgaccactcgaatctccatacacaatttcacacattattcacancactaacaaacacgggaccaaggagaaccatcaaatgccccataacccacatcctaacaataacacaccctactacaataattccagacccaaaacttaacatcaatcaacaaacatacaaaataacaatcacacaccaaccaaacacctcaaaacatgcatcatcaaaacaacaccaccacccaaaacaa

SEQ ID NO: 15164 - DNA, 457 bp, Glycine max
  Clone ID: LIB3094-026-Q1-K1-C8
cccgcgcgtccgcccacgcgtccgctccttagagattaagaaacttaatcgatcatcacgtcacttgactaatacatcatggcagacgagacccagaacaagtatgagagctctgaggttgaggtccaggatcgtggtgtttttgactttctcggtaagaaaaaggatgaagaagacaagcctcatcctcaggaggaggtcatcgccaccgagtttcaaaaagtcactgtctcagaccaaggagagaacaagcacagcctcttagaaaagcttcaccgatctgacagcagctctagctcttcaagtgaagaggaaggagaagatggagagaaaaggaagaagaagaagaaggaaaagaaagggctgaaagagaagatcgaggagaaaatagagggtgatcatcatcatcacaaggatgaggacacaagtgtccctgttgacaaagttgacgttgttg

SEQ ID NO: 15165 - DNA, 434 bp, Glycine max
  Clone ID: LIB3094-026-Q1-K1-D11
cccacgcgtccggtgatttcagtgagtgatcggtgttcacttgatctcatcataagggtcagcgtcaattgaagaagatgccgatcagaaacatcgccgtcggaaggcctgaagaggcgactcaccccgacacgttgaaggcggctttggctgagttcatctcaaccttcatcttcgtgttcgccggctcaggctccggcatcgcctacaacaagctcaccgacaacggcgctgccacccctgccggcctcatctccgcctccatcgcccatgcattcgccctcttcgtcgccgtctccgtcggcgccaacatctccggcggccacgtcaaccccgccgtcaccttcggcgccttcgtcggcggcaacatcaccttcctccgcggcatcggctacgtcatcggccagcttctcgggtccatcggtcgctccttc

SEQ ID NO: 15166 - DNA, 302 bp, Glycine max
  Clone ID: LIB3094-026-Q1-K1-D12
ttctctttctctctcatccagatcttgcaaaaaaaaaaaaaacacaatggcagcgagcgctcccactccacgcgaagagttcgtgtacatggcgaagctggcggagcaggccgagcgctacgaggagatggtggagttcatggagaaggtctccgcctccgccgagagcgaggagctgaccgtggaggagcgcaacctgctctccgtcgcctacaagaacgtaatcggcgctcgccgcgccttctggcgcatcatctcctccattgagcagaaggaggagagccgcggcaacgaggaccacg

SEQ ID NO: 15167 - DNA, 432 bp, Glycine max
  Clone ID: LIB3094-026-Q1-K1-D2
gtggaagcttcatgcacaatttcacatgttttgtcttgtcactaaagatgagggtgtcatgtgaaccaatggtttgttatatttggttcttttgaatatgacacccttcttcaataatttgagtttaaaactgaagatctatcagcctatgtattatttgattattttgcaagaggttataggttcaaatcttgtgtcattattgtaacaccctctcccaaaacaaaaagatattttgtatatagtatctggattagtgctgttaattaattgcatgtgtgttgaatatctcaaggctaataaggagcgttatacatacagttcaacaaagacaaagctactgctacatatggagtgctgcctgctgccaatgtccctccaccttatgcccttgcatcaatttcagccttgcagtttgaccactttggacac

SEQ ID NO: 15168 - DNA, 295 bp, Glycine max
  Clone ID: LIB3094-026-Q1-K1-D7
ctggatgatcccaacactttcggtaacattattcacaggatgctgaagcttggactgagcattgatgaagatgctggtgaagcagatgctgacatgcctcctcttgaggacgctgatgcagatgctgagggtagcaagatggaagaagttgattaaatctgacttaattgcctgttacgtttttagaaacaatgattggagaaacagtctttttactatgttttatgttttttgaattttcgaaattttggaacgttggctagttaggtgccgtatgtagtagtttctttatggt

SEQ ID NO: 15169 - DNA, 430 bp, Glycine max
  unsure at all n locations
  Clone ID: LIB3094-026-Q1-K1-D8
cccgctcgtccgtacacatatgcattctttctctcactccattccatttccgggatttggatttgcgtacatacacttacctctctggtctctagctatagcacaagatatgggtagcagttattttggagaacctaactttggaaatgaaagagcaagttgttcttcttcgtcaagaaaagggaagaagagccacaactcagacaagccaaagcaaccacagagaggtcttggagttgctcaattggagaaaatcagattacatggctatcacccttctctgcacgctccttacccttctaatttttccaacgaagatccaagagtgcaaatagcatattcatcggtgccatcatcttctntttcttactcatcatcatacgcagcttcctatggattccaacccaacatcatgatgggcctatccgaa

SEQ ID NO: 15170 - DNA, 404 bp, Glycine max
  Clone ID: LIB3094-026-Q1-K1-E1
aatactcgggccaacccacgcatccatccgctcttccgcacacatatgcatactttttacatttatacatttcccaatatggaacccgtacattcactaacgtctacgctctctatctatagcacacaatatggttaacatttatccagaacaacctaactttataaatgaaagagcaagtaaatcttcatcatcaacaaatacattacgagccacaactcatacaagccaaagcaaccacatagagttcttagaccaactcaattgcataaactcatattacatggctatcaccctactctgcacgctccttaccctactaataatctcaactaagatccaatagtgctaatagcaaattcatcgctaccatcatcttcattttcatactcatcatcatactc

SEQ ID NO: 15171 - DNA, 117 bp, Glycine max
  Clone ID: LIB3094-026-Q1-K1-E10
tcggaaaaaaaaaaaagccttttactttttttcttttgcatgatttgaatcttgattgggaaagcttcgaattggggtgttttacccatcaattcaattttaagccgtgccttcttc

SEQ ID NO: 15172 - DNA, 438 bp, Glycine max
  Clone ID: LIB3094-026-Q1-K1-E11
agaaaatgggttcttcttcttctatgtggacggtgtgtgtgattttggcatcactggcctctgcagcactctgtgccaacccacgcaggccagtggatgtacaatttggccgaaactacgtgcccacatgggcctttgatcacatcaaatatttcaatggtggttctgacattcagcttcatcttgacaagtacactggtactggcttccagtccaaagggtcttacttgtttggtcacttcagcatgtacataaagatggttcctggagattctgctggcacagtcactgctttctatttatcttcccaaaacgcggagcatgatgagatagactctgagttcttggggaacagaacaggacaaccttacattctgcaaacaaatgtgttcaccggaggcaatggtgatagagagcaaagaatctatctttggtttg

SEQ ID NO: 15173 - DNA, 304 bp, Glycine max
  Clone ID: LIB3094-026-Q1-K1-E12
tcgggctcttgctctctcatccagatctttcaacagagagagagacacagtggcagcgggcgctcgcactccacgcgaagagttcgcgtacatggcgaagctggcggagcaggccgagcgctacgaggagatggtggagttcatggagaaggtctccgactgcgccgagagcgaggagctgaccgtggaggagcgcaacctgctcttggtcgcctacaagaacgtaatcggcgctcgccgcgcttcctgacgcattatctgctgcattgagcagaaggaggagagccgcggcatcgaggaccac

SEQ ID NO: 15174 - DNA, 454 bp, Glycine max
  Clone ID: LIB3094-026-Q1-K1-E3
cccacgcgtccggctccctctcctctcttttcttctgttcaaacaatgtcgcaaacgttgcatgcttgcgtcgccaaaaatcttggctgtggaatggcagaaggcaagtgtctcccatgttcaggtgtttctggaagaactgctgctgtatattcctactcttctctaggtcatcacagaattcattcccgtgtccaagttagaggactaaagtgtggctttaggggtgcatcttttgtatgtgaagcaaagaggaacccagatttctcaaggcaaaacaagcacgggtcctccagaagcagaaatcggaacagtgatgggagagacagctttgagagctttgacgacgatatgttttcattaaaaaatggaccgcctgtgtctctttcaacctcaggaaaattccaggccacttcagcccctggtcctagggagaaggagattgttgagctat

SEQ ID NO: 15175 - DNA, 457 bp, Glycine max
  Clone ID: LIB3094-026-Q1-K1-E7
gttgccgggctctaccgtggtttcaacatttcatgtgttggaatcatcgtgtgtcgtggtctgtactttggattgtatgattctgttaaaccagttgtcctcacagggtcattgcaggatagcttttttgccagctttgcccttggatggctcatcaccaatggtgcaggtcttgcatcatacccaatagacactgttagaagaagaatgatgatgacctctggtgaagctgtcaagtacaagagctccttggatgcattcacacagatcctcaagaatgagggtgccaagtccttgttcaagggtgccggtgccaacatcctccgtgccgttgccggtgctggtgtgcttgctggttatgacaagttgcaggttcttgtgttcggcaagaagtacggctctggtggggcttaagttctaatgctgagtcagtactattatttgtttttagatggcg

SEQ ID NO: 15176 - DNA, 267 bp, Glycine max
  Clone ID: LIB3094-026-Q1-K1-E8
tttcaattaatattctcccttttcttcatctcatataatcaagatcttgttaatttaaaatgcccatcacaaacatctccttcataaaacctcaataatctactcacccctacacttttataacttctttttctcatttcatctcaaccttcatctttctcttctcctcctcatactccttcatctcctacaacaatctcacccacaacttctctttcaccccttccttcctcatctcctcctccatctcccattcattctccctct

SEQ ID NO: 15177 - DNA, 467 bp, Glycine max
  Clone ID: LIB3094-026-Q1-K1-C3
tctgtctctctctcactttgtcctccaaactcaagtgtcggaaagtttgcttcttttccgctctgagtcaccctatttattttgggtctctcatctttcttcttccttccaagttgtttttggtgttggtgttggtgttgaattgagttgagaagaaaagaagaggtcatagacacacacacaagacatgtctgctgttgagtcagctgaacacaacaacatcagaggagtaccaactcatggtggacgctatgttcagtacaatatctatggcaatctcttcgaagtttccagaaagtatgtccctcctattcgccctgtcggtagaggtgcttatggtattgtttgcgctgctgtaaatgcagagacaggcgaggaagttgccattaagaagattggcaatgcattcgacaacagaatagatgccaaaaggaccttacgggaaattaaacttctttcgcacatgg

SEQ ID NO: 15178 - DNA, 327 bp, Glycine max
  unsure at all n locations
  Clone ID: LIB3094-025-Q1-K1-H2
attgtatcttgttattttttataaaagggaggccaatgccttatattgtaattataccgtgggaatggtgtgctccagcaaaaataaccccacaacanatgtttacattcataaggtggttcatcaaaccaatgtattattccccaggataactgtcatcaacatttaatcagcagcataattgtcttaaaataaaatcttctttgtcttcaaagatacactccaggtttaaactattcatttaaagacaatccaaatggtgacattctcgtctgggtggtgtagttggttatcacgctagtctcacacactaaaggtccccggttc

SEQ ID NO: 15179 - DNA, 248 bp, Glycine max
  unsure at all n locations
  Clone ID: LIB3094-025-Q1-K1-H3
aaaatcgccccacaacaaaaatttacattcataangtggttcatcaaaccaatgtattattccccacaataactgtcatcaacaattaatcatcatcataattgtcttaaaataaaatcttctttttctttaaagatacactccacctttaaactattcatttaaagacaatccaaattgtgacattctcctctcggtggtgtaaatgtttatcacactattcttacacactaaaaatcccctgttct

SEQ ID NO: 15180 - DNA, 457 bp, Glycine max
  Clone ID: LIB3094-025-Q1-K1-H5
aatcccgaacgaccacgcgtacgcggacgcgtggggtttcctagtatgcaaggtttagttttagcaaatttcaaccccggatcctgtagtgttatgttgacaaaagtctaccgacttgcattttgttcttgtaacctcctcaacccactggaggtcgtgatctgtaaattttgagtgaattatacaacaaattcttgaaaaagaaatgattttctcttctgagctgctgcttattgatcgatgaatccagctgcaattattttcgaagatggcaataaaatctcttctgcggtgttatctctttgactgaattccaaattttgtaagtataatagttggctatgaaagagactgtaccaagaagcatagtgtgagagtcagagatcagttgttaagtatgagatgtgagaacatttgttgaatgtatattgctaaatagaagtgcaaaagatgatta

SEQ ID NO: 15181 - DNA, 241 bp, Glycine max
  unsure at all n locations
  Clone ID: LIB3094-025-Q1-K1-H6
aaaaggggtttgacgatcataangngtgttttgcaacaatggctaagttctttgctgctatgatcttggcactctttgccatttccatacttcaaacagaggtaatggctgctaatgaacaaagaggccacttgtttgacaacaagagcaaatatggaagtggaagtgtcaagagttaccaatgcccatcacaatgctcgaggagatgtagtcagacccaataccacaagccctgcatgtt

SEQ ID NO: 15182 - DNA, 330 bp, Glycine max
  unsure at all n locations
  Clone ID: LIB3094-025-Q1-K1-H7
aaaaaaaaaaaaaaaaaaatttaattttaaaaaaaaaaaaaaaaaaaaatttgatgttttttttttaaaaacctccgcccaaaaaaaaaaaaannnnaaaaaaactaaaccaaacaaacctattatttactattataatttttttatactttttatttttttttttatttacttaaaataaaaaattatttttttttttatattaaatttatctttttaattatttttttaattttacaattaaattattaacatttatttttttttttatttttatattaatatttattatttaattttttatacttttaatttttatttttttttttt

SEQ ID NO: 15183 - DNA, 236 bp, Glycine max
  unsure at all n locations
  Clone ID: LIB3094-025-Q1-K1-H8
aaagaaaaccaaatttnttaatctatcacactgatatacnacgcggaggggtggtatataaatatggccgcgccaccaacaatacaaataatgacgtggggcatgaaacctatgcattataccccaggataactctcattcacattgaatcccaagcataattgaacacccactaaatctaccatttttacgaacatacactacaggggtaaactatacatttaaaaacaatccaa

SEQ ID NO: 15184 - DNA, 52 bp, Glycine max
  Clone ID: LIB3094-025-Q1-K1-H9
aaaaaggaagaaaaaaaaaaaaaaaaattttttaaaaaaaaaaaaaaaaaaa

SEQ ID NO: 15185 - DNA, 301 bp, Glycine max
  Clone ID: LIB3094-026-Q1-K1-A11
ctgagttgcaagattcacttcaaattatgcgtttcgctgatcggttccgcatcacatcaaacgacgtcgcagatcatcgcaattccttgattatttccttttgttgatacgcggaatcgcgcacacggtgctggtgtgtgcactgaggtagaaagaagaagattgaattgtacacagcatgaattaccttcttggagctttgacgcctgcgtggtgtgtgatcgacacttaatgatgggaagaaccggcagcaggttccgtttaaaaaagaaaatggtcaaatggtcacagtcccactttt

SEQ ID NO: 15186 - DNA, 294 bp, Glycine max
  Clone ID: LIB3094-026-Q1-K1-A3
ccatcaaaaacatccccttccaaaaacctaaaaaagccactcacccctacaccttaaaagctgctttagcttaattcatctcaaccttcatcttcatattccccagctcaagctccagcatcgcctacaacaaactcaccaacaactgctcctccaccccttccaacctcatctcctcctccatcacccatacattctccctcttcatccccatctccctcagctccaacatcttcctcagccacctcaacccctccatcaccttcagcaccttcctccgcagcaacatcacct

SEQ ID NO: 15187 - DNA, 449 bp, Glycine max
  Clone ID: LIB3094-026-Q1-K1-A4
cttgtccttctcaatcttgtaattctatttcctccaccataatgctgcgcaagcttgtgtgagggccacgcaagaacaagcctggcacagttcccgttcacctcaacgtctatgatctcaccccaatcaacggctatgcctattggcttggccttggagtctaccattctggggttcaagttcatggattggaatatggttttggtgcgcacgagcacgacacaacggggattttcgaagtccaacccaaacactgccctgggttcactttcagaaagtcaattttcatcggaacaacagatctgggtccgaaagatgttcgagcattcatggagaagctggctcaggattactccggcaacacctatcatctcatttccaagaattgcaaccatttctgtaacgatgtttgtctcaaattgaccggaaagtcaatccctcgttgggtc

SEQ ID NO: 15188 - DNA, 463 bp, Glycine max
  unsure at all n locations
  Clone ID: LIB3094-026-Q1-K1-A7
cccacgcgtccggtgatttcagtgagtgatcggtgttcacttgatctcatcataatcgggagcgtcaattgaagaagatgccgatcagaaacatcgccgtcggaaggcctgaagaggcgactcaccccgacacgttgaaggcggctttggctgagttcatctcaaccttcatcttcgtgttcgccggctcaggctccggcatcgcctacaacaagctcaccgacaacggcgctgccacccctgccggcctcatctccgcctccatcgcccatgcattcgccctcttcgtcgccgtctccgtcggcgccaacatctccggcggccacgtcaaccccgccgtcaccttcggcgccttcgtcggcggcaacatcaccttcctccgcggcatcgtctacgtcatcgcccagctcctcggctccatcgtcgcctccctcctcctggccttcgtcaccgncttcactgt

SEQ ID NO: 15189 - DNA, 220 bp, Glycine max
  Clone ID: LIB3094-026-Q1-K1-B1
gcgtccgtccactcgtccgattgaatatccatggtattcttagttcttttatccattaaaaaactggagattagtatttttaagaagaactatagtagttgaaagatatcttttgcaaatatgcatatttaactgaggttgttataacttgatccttcctttaactgatttcatctcagccttaatcttaacctattagcctcattcattcgatatatta

SEQ ID NO: 15190 - DNA, 291 bp, Glycine max
  Clone ID: LIB3094-026-Q1-K1-B11
agtcgcatcagagtaatatgcattttctcattgacggatacccaagaacaagtgggggagactgatcatatcattatctgtgggatgaatagtcatcttcccttcatattaaagcagttaaataagtatcaggaatttgctgttctcataggcacagctacagctaggtaaatggttcagacaaggaggcagagaatccttcttatgtctgatcgtgcaagaaaacagattgatagagtagcagactatattgcataagatttaaatcatattgaggtccttacaaagagg

SEQ ID NO: 15191 - DNA, 240 bp, Glycine max
  Clone ID: LIB3094-026-Q1-K1-B2
tagtcattgaaagatatcttctgcaaatatgcatatttaactgacgttgttataacttgtaccttccctcaaaaaaaaaaacactataacgaaaaagaacctattatcctccttcattgtatatattacatctataatgattaaattctaccgtttcacaaaatacaaaaataatcaaaataaaaatcatcattcttacatctctaatattcttaacagattcaattagttaaattttat

SEQ ID NO: 15192 - DNA, 307 bp, Glycine max
  Clone ID: LIB3094-026-Q1-K1-B3
cccccccaccccccaccccccccccccccccccccccacccccaccccccccccccccccccccccccccccccccccccccccccccccccccccccccccccccccccccccccccccccccccccccccccccccccccccccccccccccctccccccccccccccccccccccccccccccccccccccccccccccccccccccccccccccccccccccccccccccccccccccctccccccccccccccctccccccccccccccccccccccccccccccaccctcctccccctccc

SEQ ID NO: 15193 - DNA, 291 bp, Glycine max
  Clone ID: LIB3094-026-Q1-K1-B9
acggagtttcataggatcaaccatacttgtgttataccgttaacatccgaactgtttactctcctacagacataatggttcgcattctgacggataatggcggtgtggaacgcatggaggagatcatcagggaccatttggaccccattttaaagcaagtgttggggatctggttggatcattgtgcttgtgccaagcgacaagttggagaggcagaaagagcttatcttaagaaaagggatggtctcattagaaacaagaccattgagattgatcttggttcaagctttc

SEQ ID NO: 15194 - DNA, 459 bp, Glycine max
  unsure at all n locations
  Clone ID: LIB3094-026-Q1-K1-C1
tttgattttccctcactttctcgctcgcctaacgcctttctctctcctccaatggccgagcagctgaccgacgaccagatcgccgagttcaaggaggccttcagcctcttcgacaaggacggcgatggttgtattactactaaggaacttgggactgtgatgcggtcactagggcaaaacccaactgaggcagaactgcaggatatgattaatgaggttgatgctgatggcaatggaaccatcgacttcccagagttcctcaacctgatggctcgcaagatgaaagacaccgactccgaggaggagcttaaggaggctttccgtgtgttcgacaaggatcagaatggtttcatctctgcagctgagctccgccatgtcatgacaaatcttggggagaagctgaccgatgaggaggttgatgagatgatccgcgaggccgacgtcnatggtgatggacag

SEQ ID NO: 15195 - DNA, 296 bp, Glycine max
  Clone ID: LIB3094-026-Q1-K1-C10
tcgtccacgcgtccggtgaagttggatcattcctcctcggtaatcgatgtggggcgtttagcttctgtggttgattgcgaagaggaagcatgtgtttcatctccaaacagcacggtttctagcgtcagtggaaagcgcagcgagagggaaaccaatggagaagaaaactactcatacagagcttgttccagaggcatcatcagcgacgaagaatatgctgaaacctctagaaagaaacttagactctccaaagatcagtcatttgtcctggaagagagcttcaaagaacacaacac

SEQ ID NO: 15196 - DNA, 149 bp, Glycine max
  Clone ID: LIB3094-026-Q1-K1-C11
acaaaaatgctccacaactcataagatacttttacccaaaagataacctttgtacattctgtgagaaaatcgatgacgaagtgcccaactaaactttattcccaggacttaattggttttatgcccatctttgaactttgttctctata

SEQ ID NO: 15197 - DNA, 355 bp, Glycine max
  Clone ID: LIB3094-025-Q1-K1-H11
cccacgcgtccgtcaagcattgcatccctcttgatttgtagtttgttttgtgctttagataaaagttctgccaaatcaagaggggttttaagatcatagtgtgtgttttgcaacaatggctaagttctttgctgctatgatcttggcactctgtgccatttccatacttcaaacagtggtaatggctgctaatgaacaaggaggccacttgtatgacaacaagagcaaatatggaagtggaagtgtcaagagttaccaatgcccatcacaatgctcgaggagatgtagccagacccaataccacaagccctgcatgtttttctgtcagaagtgctgcaagacatgcctgtgtgtg

SEQ ID NO: 15198 - DNA, 404 bp, Glycine max
  Clone ID: LIB3094-026-Q1-K1-C2
acccgtccgtttggtcttccggcactttctcgctcgctttacgcctttttctctcctccaatggccgagcagctttgcgacgtccaaatcgccgagttcaaggaggccttcagcctcttcgacaaggactgcgatggttgtattactactaaggaacttgggactgtgatgcggtcactagggcaaaacccaactgatgcagaactgcacgatatgattaatgatgttgatgctgatggcaatggaaccatcgacttcccagagttcctcaacctgatggctcgcaagatgaaagacaccgactcctaagaggagcttaaagaggctttccatgtgttcgacaaggatcagaatggtttcatctctgcatctgaactacttcatgtcatgacaaatcttcgtga

SEQ ID NO: 15199 - DNA, 224 bp, Glycine max
  Clone ID: LIB3094-025-Q1-K1-F2
cagaacagggactcactctcttcgcagcggttctctcggtggctttcatcttctcgggttgggagggtgtacacatcgaggaagaaaattcacaaggataaggatgctgagccaactgaatttgacgaatcagattgacaggcattgtttgatctagaaaataccaacaatgagctgaaaagtgatctgaaagatttatacataaactcagctcgtcaaattga

SEQ ID NO: 15200 - DNA, 272 bp, Glycine max
  Clone ID: LIB3094-025-Q1-K1-F3
cagaacagggactcactctcttcgaagcggtactttcggtggctttcatcttctcgggttgtcaggatgtacacatcgaggaagaaaattcacaaggataaggatgctgagccaactgaatttgaggaatcagttggacaggcattgtttgatctagaaaataccaacaatgagctgaaaagtgatctgaaagatttatacataaactcaactgtccaaattgatgtttctggcaaccgaaaagctgtggttatccatgtcccctacaaact

SEQ ID NO: 15201 - DNA, 302 bp, Glycine max
  unsure at all n locations
  Clone ID: LIB3094-025-Q1-K1-F5
gggggggggaagganaaaaaaaaaaaaaaaaaaacaattaatttataaaaaaaaaaaaaaataaaactggatggggtttatttanaaangcgcncccccacaaaaccaccaacataatacaatncctatcctcttcttccttaacatattttccatntccaaactacaattataatttcttcatacaaaccctattcacaactaattttcctatttaccattcattttcctccatattatccctttaaaccacccaattttccattcaacacaaactttttccacccaaatataaatatcaa

SEQ ID NO: 15202 - DNA, 361 bp, Glycine max
  unsure at all n locations
  Clone ID: LIB3094-025-Q1-K1-F6
aaaaaaaaaaaaaaaaaaattaatttttaanaaaaaaaaaaaaaaaaatctagcttttttttttaaaagggggccgcccaaaaaaaannaaaaaaanaaattccaatcctttttttttttaatatttttttcattgtcaatgtagaatttttgtttttttttattatccttatttcaaactaaaaataatttttttaccttttatttcgctatttaatatttctttttaatctcaatctttactttctttttattacataactttttccactctttttatttaaattaattgaaaaaactttttcctttgtttatttttaagaattttttctactcccctcttcttactaatttttatatt

SEQ ID NO: 15203 - DNA, 343 bp, Glycine max
  Clone ID: LIB3094-025-Q1-K1-F7
atttgaaggttgttttgtgcttatagataaaagttctgccaaatcaagaggggtttgcagagcatagtgtgtgtgtgtgtgttaaacaatggctaagttctttgctgctatgatcttggcactcattgccatttccatgcttcaaacagtggttatggctgctaatgagcaaggaggccacttgtatgacaacaagagcaaatatggaagtgggagtgtcaagagataccaatgcccatcacaatgctcgaggagatgtagccagacccaataccacaagccctgcatgtttttctgtcagaagtgctgcaagaaatgcctgtgtgtgcccccggggtattat

SEQ ID NO: 15204 - DNA, 449 bp, Glycine max
  unsure at all n locations
  Clone ID: LIB3094-025-Q1-K1-G1
aaaaagaangaaaaaaaaaaaaaaaaattttataataaaaaaaaaaaaaaaaaaatttagtctttattttnaaaacggcccccccaaaaaaaaaannannannnaanaaaacacaacaaaacaaaccacaacaaaaaaaaaaaaacaacaacaccaaaaattttttataaanaaaccaaaaaaataaaaaacatttttttccttatttttatttaattattttttatacatacttttttttaattattctatttttttactttttttttatttttttaatttaattttattttttttaaaaatatattattttttttatatttttttttttttattttttattatttatatatatatcacttttattttttcatttactatttttttaatatttatttatctttttattattattttttttatttttttatttttatttttatttttta

SEQ ID NO: 15205 - DNA, 401 bp, Glycine max
  Clone ID: LIB3094-025-Q1-K1-G10
gaccactgaatgtactgtattatctgcttggcgaatgtaagcgcacgccgtctcaagaatttcgggaattttgcccgaaatttaagaacgattatcaacaaaattgcccgaatgccgcgtatgaagcagtttgcccgttactgaagcaagcgattcaaatatgttgccagaaacacgcataactctgcaagccacggtgggcgtttggatgtgcttttagttaccactttctctcttggatttgcttacgtattgctccttttgtattagtggctcctgtcccaccttgcttttggacttgagctttttatatttctgattgttcaatgtctgttgtgtgtgctctccaacctgtggtgactttccggtttattcctgtggctgtttcttgtaggcctttc

SEQ ID NO: 15206 - DNA, 352 bp, Glycine max
  unsure at all n locations
  Clone ID: LIB3094-025-Q1-K1-G11
aaaaactgaanaaaaaaaaaaaacacacaaaaaattaatttataaaaaaaaaaaaaaaaaaaattctatctttttctttttaatatcgccccgcgcaaccacaaaannaanaacnattatcaacacaattttcctaatgccgcatattaatcattttacccgttactcaaacaatcttttttaaatattttctcaaaaacacacataacttttctatcctcatataacattttaattttcttttaactaccactttctttttttaatttatttacctacttcttcttttatattaatatctacttttccaccttccttttaaactaaacatttttatattctcttattcttc

SEQ ID NO: 15207 - DNA, 260 bp, Glycine max
  Clone ID: LIB3094-025-Q1-K1-G12
cccacgcgtccgaacaattctgagttctgaaaatttaaagcaggccctatttaaaaccgcgggaggtggtggacgatattggtgaaaatagaaaaaaggtgcaaaataacacagaaagtgcaccatagctaggggagagtttttgagtttctgatcatagtgatatccattgatttacaagccaatctagccggatttcgtttttcttagtgtaagacaataattgatttcttcaacatgatgcctattgtaacattttc

SEQ ID NO: 15208 - DNA, 321 bp, Glycine max
  Clone ID: LIB3094-025-Q1-K1-G2
gccacgctcgccaccgtcgcccttcttctttctaaatctaattgcggcggatatcacaccagacccgcatgcacctccaccatgggccagcagccgccgcaacagtaccagcagcctccgccgcagcagcagcaaccctacgtcatgatgccgccgcaagcccaggccccgcaagccatgtgggcccccttcgcccagccttcgcctcagcagcagcccgccagcgccgacgaggtccgaaccctctggatcggggatctgcagtactggatggacgagaactatctctatacctgctttgctcacaccggcgaagttaca

SEQ ID NO: 15209 - DNA, 414 bp, Glycine max
  Clone ID: LIB3094-025-Q1-K1-G4
cccacgcgtccgaaaaagtttatggaactgtctaaggtgtatgatggatttgttgactcttcagacaatctaataataaaagctcaagttcaagtcataagggaaaaatcagacaggcctttccgttgccttgattgccagtataggagggaacttgttagagtatatttgacaaatgtagagcaaatttgtcggcgttttgtggaggagagaagaagcaagcttggaaagttgatagaggataaagctaggtggtcaagcttctttactttctggcgagaagttgatcaaacttccaggcgccgcatgtctagggagaagacagatgtaattttgaaagtagttgtaaaacacttctttatagagaaagaagtcacttctactttggtaatggattccttgtatagtggattg

SEQ ID NO: 15210 - DNA, 368 bp, Glycine max
  Clone ID: LIB3094-025-Q1-K1-G5
ctccacgccgccatcaccacacaaccatgccttcgctctctctctctgaccctgacagcccgaaacctattgccaagaagaaaaccaaaacccagtccctcaccgatcccgacctcgatggggtttcggggaagaagacgaagaagcgcaaggcttcagatttagaacaagaggccatgccccccgccgcttacaacaacgatggggacgacgagaccagctccgacctcgtccaacccgaacctgcttccagagaagacgacaacaagaataagaagaaaaagaagaaaaaggttgttaagtccgaaaaaaaggaacagcctttggtcacggaagctaatggaaaaaaagaggaggatcccaacgcg

SEQ ID NO: 15211 - DNA, 350 bp, Glycine max
  unsure at all n locations
  Clone ID: LIB3094-025-Q1-K1-G6
tcgcactatctaaccctngcggcttgttttcttttaacaagaggagcgccaaaacccannccctcaccaatcccaacctcgattgtgtttcggcgaagaagacgaagtagcgcaaggcttcatatttataacaagacgccatgccccccgccgcttacaacaactattggtacaacgaaaccagcttctaccttattcaacccgaacttgctttcagagaatacgactacaaaaattataagaaaaagatgaaaaaggttgttaactccgaataaaaggaacagcctttggtcacggatgctaatggagaaaaaaaagaggatcctaacgcgctttacaactttaggatt

SEQ ID NO: 15212 - DNA, 256 bp, Glycine max
  Clone ID: LIB3094-025-Q1-K1-G7
atttgaaggttgttttgtgcttatagataattgttctgccaaatcaagaggggtttgcgcgtcatagtgtgtgtgtgtgtgctaaacaatggctaagttctttgctgctatgatcttggcactcattgccatttccatgcttcaaacaggggttatggctgctaatgagcaaggaggccacttgtatgacaacaagagcaaatatggaagttggagtgtctagagatactaatgcccatcacaatgcctccaggga

SEQ ID NO: 15213 - DNA, 159 bp, Glycine max
  unsure at all n locations
  Clone ID: LIB3094-025-Q1-K1-G9
cccanaacaagtatgagaactctcaagttcagctccaggatcgtggtgtttttgactttctcactaagaaaaacgattaaaaagacaaacctcatcctcagcaggaggtcatccccacctaatttcaaaaagtcactgtctcagaccaatgataaaaca

SEQ ID NO: 15214 - DNA, 434 bp, Glycine max
  unsure at all n locations
  Clone ID: LIB3094-025-Q1-K1-H1
ggcggcgctgtggcggacgcgccggcggtggttgatgagaagacggagttcgacgtggtgggcgagggttgtgccgagcaacgctcgaatcgcggtgattaaagcggtgagggcattgacgaacctagcgctgaangaggcgaangagttgatcgaagggttgccgaagaagttcaaggaagggatttcaaaagacgaagctgaagatgcgaagaagcaactcgaagaagctggtgccaaagttaccattgcttaaacactgtttagctgcaacatatatgttctgcttcttcttttgttgggttgaattgagttcaccaatacactttaatttcatttccattttgtctggatttcaaacttttattttgaatgaggaaatatgagttcctatttgtatattaatttttttaaatcctaataagtgttttgtg

SEQ ID NO: 15215 - DNA, 341 bp, Glycine max
  Clone ID: LIB3094-025-Q1-K1-F12
aaactgaagaaggtgaagagaccactgaaggcactggattatctgcttggcgaatgtaaggacaggcgcggctcaagaatttcaagaattttgcccgaaatttaagaacgattatcaacaaaattgcccgaatgccgcgtatgaagcagtttgcccgttactgaagcaagcgattcaaatatgttgccagaaacacgcataactctgcaagccacggtgggcgtttggatgtgcttttagttaccactttctctcttggatttgcttacgtattgctccttttgtattagtggctcctgtcccaccttgcttttggacttgagctttttatatttctgatt

SEQ ID NO: 15216 - DNA, 347 bp, Glycine max
  Clone ID: LIB3094-025-Q1-K1-H10
cggacgcgtggggtttcctagtatgcaaggtaaagaatcagcagatttcaaccccggatccacgagtgacatgttgacaaaagtctaccgagttgcattttgttcttgtaacctactgaacccactggaggtcgtgatctgtaaattttgagtgaattatacaacaaattcttgaaaaagaaatgattatctcttctgagctgctgcttattgatcgatgaatccagctgcaattatttgcgaagatggcaataaaatctcttctgcggtgttatctctgtgactgaatttcaaatattgtaagtataataggtggctatgaaagagactgtaccaagaatcatagt

SEQ ID NO: 15217 - DNA, 342 bp, Glycine max
  Clone ID: LIB3094-025-Q1-K1-D3
aaacacccttgtcgaccacaccaaaattaataacttaaaaaagcataaaagcacaaaaagacgatagaaaagggaaaataaaacattttgaagtcatatttgcacacttgattaaaggctgtcgtcccttgtgacggatgcgtggggtgctaataccttccctgtgcgtaaaaacaactcccgaactattcacacttaaagttacgagaccacaccttttcaattttcccgacgctttcctcaaataaaagttggtggcgactccgcgcattttcctttcatggaagacgcacttgtgagtcccgcatcgccctcccgtcaaagggtaggttgcgacagtac

SEQ ID NO: 15218 - DNA, 207 bp, Glycine max
  Clone ID: LIB3094-025-Q1-K1-D4
aacaacaccggagaacatgatgattgactccgacgcccacaggaaggaccaagacgagccggacgccatacagaggggtgccgctgccacggatgaggtcaagcgcgcccacagcgtatcattgctgcgcgcgagaaagacgatatgaggctgaacacccctaacccgctgctctcgagggcccacatgaccatcactgaaacgacc

SEQ ID NO: 15219 - DNA, 261 bp, Glycine max
  Clone ID: LIB3094-025-Q1-K1-D5
gaggggaagggataataatgttggtagggcttgctttcgagggcgagggcaagggcaatcttcgctaatttattggaggaatggcccgcctggtgatggcagaatgaggaagaatgggaatgggagaaggtttttgtccaataatgttgatcggtctagcggtggagaacagtcttctcctttgaattatgggggggatggaatgaatggtgatggtagattgaggaggaatgggaatgggaggagggttttgtatgatga

SEQ ID NO: 15220 - DNA, 423 bp, Glycine max
  unsure at all n locations
  Clone ID: LIB3094-025-Q1-K1-D6
gaaaaagaagaaaaaaaaaaaaaaatttatttaanncaaanccaaanacaatattgttgtttttttttaaaatgtttctccccaaaaaaacaaaatnaagaaaaattgtaatggtacaaagtttttttccaataatgtttatctgtcttgctttttagaatattttttttcttttaattaattttacatatttaattaattttttattttatatttattactaattgaaatgccatttattcttttttttaaatatataaactattcttttacaaccccccatctataaacccatttattcttttttatttctttttatttcacacctattttatatttctattttcatatattttactttattatttttatttatatttttttttttatatttattctttttatatttattttatttaatat

SEQ ID NO: 15221 - DNA, 334 bp, Glycine max
  Clone ID: LIB3094-025-Q1-K1-D8
cacacacacacaaaacagaacacaacacatacacatacacatgttgttgatgagtggaggcagcaaaaaacacagatccatcacacacatgaacaattgatctttgtcctttgtatataatttgattctaatttttggcactaagagagccactcaaggctctgggatgtactatacgccattcggggttctgattttcggcggagagaaggttcaagagacccagtgggagaaggagcgataagtaattcatattccattatctccatttctagatccttccattaactctcataggatcctccaatttcaattcaatcccttccgatatttc

SEQ ID NO: 15222 - DNA, 351 bp, Glycine max
  Clone ID: LIB3094-025-Q1-K1-D9
gcttcctcctcttacgagcctttcctttcagtccattgattcggtgggtgcgggtgcagcgaaaccgagctagaccctgatcggcgtcggcacaccgccggagaacaagatgattgtctgcgtcgccgtcgtcggtcaccagaacaatccgctgtacatacagagcttcacggaggccgatgatgctctcaagctccaccacatcgtccattgctcgctcgatgtggtcgacgagcgagtgaacaatcctaaaaagtctgggccgatgcttaatgagacgtttttgggactgctttatcctattgaaaactacaaagtatatggatatctgactaatacgaaggtgaaatt

SEQ ID NO: 15223 - DNA, 428 bp, Glycine max
  Clone ID: LIB3094-025-Q1-K1-E10
gtaatgattattgtattgtagtagtagccatggggactttcaatcactatgtgattgttaaggtggggatggtgtggctgttgatgaactcattcaagggttggagaagatggtctcggggattgaccatgtcaagtccttcgaatggggaaaggacattgaaagtcatgatatgctaagacaaggtttcactcatgttttcttgatggcattcaatgggaaggaggagttcaacgcatttcagactcacccaaatcaccttgagtttactggagtattttcacctgctattgagaaaaattgggtgctggatttcccatctaaccttgtgaaagcaccagcaagatcctcaacttattcaagcaaataaaattttccatttttaaagtgcatgcatgtgtgtgcatctgctatttgtagtctggtat

SEQ ID NO: 15224 - DNA, 231 bp, Glycine max
  Clone ID: LIB3094-025-Q1-K1-E11
ccatctcaactccttctaatgtccaaagcacattgaaaatcatgatatgctaacacaagctttcactcatctattattgactacatccaatacaaatcaacatttcaacgcatttcagactcacccaaatcacctttaacttactaaactattttcaacctctatacaaaaaaatcctgtactaaatttcccatctaacctttacaaaccaccaccaatatcctcaactta

SEQ ID NO: 15225 - DNA, 212 bp, Glycine max
  unsure at all n locations
  Clone ID: LIB3094-025-Q1-K1-E12
ntccgcccacgcgtccgccaaaaccgaaaagaagaaaaacgctgaaatccccaaaatcgaaaagaagagaacgaaaagcgctgaaatccctctaaccgatggcaaaacgaagagggatagagaaatcgccaaagaggagaacaagaagaagactaagaaacccaagctcagcaatggcacttcaaaacagcgagacgagggatccaaaaagg

SEQ ID NO: 15226 - DNA, 102 bp, Glycine max
  Clone ID: LIB3094-025-Q1-K1-E2
aaaaaaaaaaaaaaaaaaaaaaaatatttaattttaaaaaacaaaaaaaaaaaaaaaaaaaatcgcaccgtttttatattaaaaaaaaccccccccccacac

SEQ ID NO: 15227 - DNA, 418 bp, Glycine max
  Clone ID: LIB3094-025-Q1-K1-E4
gccacgcgtacgaaaagagtaccaaacttttcaatctcgcacactgatatatgactgtggtgggggcatatgtatatggtactgattcaacaatacagagaatggcttttgggttggaccatttccatttaagtgggtgcttggcctcagtcaccttgtcacccagccaaaatagaacacccactttttgtaccaatatgagttcctcattgaagtggggtttccgtactggtcaaaaatgttgtaacatactcgcatcttggtcctccctagcaatgcagtatcggttgtctgtatcctggaaatgctatgagaccggtttcacaagcaagatgatgaggcaagtccaatgctaacttgcatttctgtggtttatatacatgatgcagcatactcaagagtaaccttattggaattg

SEQ ID NO: 15228 - DNA, 269 bp, Glycine max
  unsure at all n locations
  Clone ID: LIB3094-025-Q1-K1-E5
catatgaatgtggccctgctcaaacaangcanagaaaagatggtctctgggatcaaccatatcaaatccttcgcatggccaaaggacattgaaaaccaagacatactaaaacacccgctcactcatccaatatgaatggcttacaaaaggaaggatgacgtactcgccaaaaatactcacacatactaccatgatggtactgcataacaatgccctatcatttgtaagattgctggaaatgctatgacacctaacccacaaacaacacc

SEQ ID NO: 15229 - DNA, 312 bp, Glycine max
  Clone ID: LIB3094-025-Q1-K1-E6
cccacgcgtccgggaagatggtgctttcggaggaggaaatgggtcgtctgtaccgggtaaggaagacggtgatgcaaatgcttcgggacaggggttttctggtgggtgacttcgagatcaacatgtcgaagcatgagttcaagtccaagtacggcgagcacatgaagcgcgaggacctggtcatcaacaagtccaagaaggacaactccggcgaccagatctacgtcttcttccccgacgagcccaaggtcggcgtcaagaccatgaagacctacaccaaccgcatgaactccgaaaacgtctatagagcca

SEQ ID NO: 15230 - DNA, 80 bp, Glycine max
  Clone ID: LIB3094-025-Q1-K1-E7
aaaaaaaaaaaaaaaaaatttaattaaaaaaaaaaaaaaaaaaaaaaatctagtcttttatattaaaaaacgcccccccc

SEQ ID NO: 15231 - DNA, 507 bp, Glycine max
  unsure at all n locations
  Clone ID: LIB3094-025-Q1-K1-E8
aaaaaaaanaaaaaaatttanattaacaaaaaaaaaaaaaaaaaaaaaaattcttagtttttgtattttaaaaaaaaccctcccaccacaaaaaaaaaaaaaannaaaaaanaanatatttatacaattttattaanataaaaaattattaatattatatttatattattttttaattttttttttttttatatatttttaaataatttatttatttttttttattttatattataatttttttttttttaattaattttattttttttttataaatattttatattaatatttttttttttattttaataattttaatttattttatatttaaattatatttaatttatttctatattattttttctcatattattttttttttatattatatttaataattttatttttaataatttcattttattttattattaaatttattatttaaatttttttaattattatattttataattatttatttatatattaaatttttttatt

SEQ ID NO: 15232 - DNA, 320 bp, Glycine max
  Clone ID: LIB3094-025-Q1-K1-F1
cccacgcgtccgagaaggcctgggcttagttgataagcataactgggtgaggaagaaagagagagagtgaagaagatggcgtcgagcggagcggtaccgttttggagggcggcggggatgacgtacataacatactcaaacatatgcgcgaatctgctcaagaattgcctcaaggaaccctacaaggccgaatccctctctcgtgagaagctccattttgttctctccaaatgggtcgacgccaagcctgaaaaacctactattcgttcagacaccccagagcagtgatctggaatagttggaagctataaatgcataaa

SEQ ID NO: 15233 - DNA, 363 bp, Glycine max
  Clone ID: LIB3094-025-Q1-K1-D2
cccacgcgtccgcccacgcgtccgcccacgcgtccgcggacgcgtgggcttcaacttggatgaccggcctaactaccctgattctgatcagattccttactttgaggatggtgattctgtgacatacaataatgagaaggaggggatcattgagtgcttgaaaaggaatgtgggtggtgatttagatagtgaggtttcttctctccctgattggataccaaccaaagtgatggccaccacttggcttgctgatgcacttgagtatgaactgtgggtgggatgtgatggttcctctgcttatagcatctattattctgatcttccctggcctatcggcaaggttctcttttggaagaaagctta

SEQ ID NO: 15234 - DNA, 324 bp, Glycine max
  unsure at all n locations
  Clone ID: LIB3094-025-Q1-K1-F10
caaaaccnaaaagaagattttcgttgaaatccccaaaatcnaaaagaggcacggtttaacgctaaaatggctctaaccaatggcaaaacgaagagggatagagaaatcgccaaagaggagaacaagaagaagactaagaaacccaagctcagcaatggcacttcaaaacagcgagacgagggatccaaaaagggagtagcagaaggaaaaggagaagaggggaaaatgaacgtgtttccgatgaatcgcatcaaaacgatgattaaaggcgaagatcccgatatgcgtgtttctcaaggaagcattgttgggcatcaacaacgc

SEQ ID NO: 15235 - DNA, 427 bp, Glycine max
  unsure at all n locations
  Clone ID: LIB3094-025-Q1-K1-F11
cgcaggttcaaangangatctctcttgcgttttctctatgaattcgctatggcgtcnaagcgcagggtgtaggagcttaagggtttgcacaacgatcctccaacatcttgcagtgccggtcctgttgttgctgaagatatgttccattggcaagctacaattatgggtcctacagacagcccctatgcacgacgtgttttcctagtgaccattcattgccctgcagattatccctttaagccacccaaggttgcattcacgacaaacgttttccacccaaatataaatagcaatggaagcatttgccttgatatattgaatgaacagtggagccctgctctaaccatnttcaaagtgttgctctcaatttgatccctattgacggatccaaatgctgatgatcctctggtcccttgaattgcacaca

SEQ ID NO: 15236 - DNA, 201 bp, Glycine max
  Clone ID: LIB3094-025-Q1-K1-B10
catataacaaaataacattttacattgcctttaacaaacaccaaaacaagccgccgatcttacagatctatacttacgcccacgatcataccacactatacctcatctatcattgcacctaacatcaattcaatgaccgtcttaacacaactacaaaacttggaacaccctttcattacacaacttaatcacctctctata

SEQ ID NO: 15237 - DNA, 411 bp, Glycine max
  unsure at all n locations
  Clone ID: LIB3094-025-Q1-K1-B11
aaaaaaaaaaaaaaaaaaattttgtttttttttttanaaaaactcctccacaaaaaaaaanannannaaaaaaaaaaaaacaaaaanaaaacncnaaaaacaaaaaaaaaaaaaaacacactcaacaaaaaaaatttttttttttattatttaataataaaatttaaattatttttttttttttatttatttttttatcttttatttatttttttattttttcatatttttattatactcttttatttatatatttattattttatttttttattaatttcttttttcttttttcatttattttatatttattttatatttttaataatattttatttatttttttttttttttttatttatataattttaatttatattttttttattctttattttaatatttttatta

SEQ ID NO: 15238 - DNA, 208 bp, Glycine max
  unsure at all n locations
  Clone ID: LIB3094-025-Q1-K1-B12
caataacaaatntcactgtgtcggcgtttttataactntgggtcggcaacacataacatatgattaggttagttactcaattggcctcgtgtgctagagatttctgttagacagtcaattttcaattatctttgtaacatgagagaatcatggcatgcacataaacaaggatttttgctgcaatgtggagctgacattatatattagt

SEQ ID NO: 15239 - DNA, 359 bp, Glycine max
  unsure at all n locations
  Clone ID: LIB3094-025-Q1-K1-B4
cttttctactttgagtcttcttgatccttctttttttccttgaactcaaacatggcaaatgggggggtctgctaaaattctggcccaatcccattggggataagggtcaggattgcacttgctgaaaagggtatcaaatatgagtacaaagagaggactngaggaacaagagtcctcttctcctccaaatgaacccggttcacaagaagattccggttctcatccacaatggcaaacccatttgtgaatccctcattgctgttcaatacattgaggaagtttggaatgacagaaatcccttgttgccttctgacccttaccagagagctcangctagattctgggctgattatgttgat

SEQ ID NO: 15240 - DNA, 369 bp, Glycine max
  unsure at all n locations
  Clone ID: LIB3094-025-Q1-K1-B5
actttnaatcttcttgatccttcttttttttcttgaactcaaacatgacanatcgcgcggttcttatagatttctggccaactccatttgggatgagggtcaagattgcacttgctgaaaaaggtatcaaatatgagtacaaagaagaggacttgaagaacaagagtcctcttctcctccaaatgaacccggttcacaagaagattccggttctcatccacaatggcaaacccatttgtgaatccctcattgctgttcaatacattgaagaagtttggaattacaaaaatcccttgttgccttctgacccttaccagagagctcangctagattctgggctgattattttgataaaaaaatatattatc

SEQ ID NO: 15241 - DNA, 361 bp, Glycine max
  Clone ID: LIB3094-025-Q1-K1-B7
gttccaagaagtgttagagtggaaagacctgctgattaggtttttacaatttgccgggtgcgagttccttgatgtcagcactctacatgctgctctgccagattccactgctgttagaatcatctcaaattctcgtttgtatacacgtaaatcacttatctattagtaggattttaatgtatttcaaatatttgtataagtagaaatttctttctgtcatctggttttggttcaattatgtaggtggtttaacattcatagctgcatgaccaccaagttctcaaatactgtaaatagctgcaaaaaaatatatccaacaacaaaaataacaaaaataaattcgcattttacatcggttcta

SEQ ID NO: 15242 - DNA, 131 bp, Glycine max
  Clone ID: LIB3094-025-Q1-K1-B8
caattccctactatattacgggaagaaacaaaggtggagcgaagctgcatctttgagtttgaagagaatagccaaagctagtgtactacaacttttttccatataaagaaagagcattttaaattgttttt

SEQ ID NO: 15243 - DNA, 157 bp, Glycine max
  unsure at all n locations
  Clone ID: LIB3094-025-Q1-K1-B9
aaaaaccgggccgaccgcacgcgtacgcaatgccctactatattacngaaagatacattgtggagcgaagctgcatctttggggttggcttgaataaacaaagctagtgtactacaacttttttccatataaagaaagagcattttaaattgttttt

SEQ ID NO: 15244 - DNA, 378 bp, Glycine max
  unsure at all n locations
  Clone ID: LIB3094-025-Q1-K1-C1
gatggcggcgtcgcggcgtctccgggaccttcaatcccaaccggcgaacaagatctgcgtggactggtcccagaagaacccgcaatgggcctccgtatcgtacggcgtcttcatgtgcctagagtgctcangcaagcaccgcggcctgggcgtgcacatctccttcgtgcgatccgtgacgatggattcgtggtccgaaatccagatcaagaaaatggaagccggaggcaacgacaaactcaacgccttcctcacgcaatacggcatccccaaggaaaccgacatcgtcgccaagtacaactccaatgccgcagccgtctaccgcgaccgcatccaggccctcgccgacgggcgtccctggcgggatcccccagtcgt

SEQ ID NO: 15245 - DNA, 306 bp, Glycine max
  Clone ID: LIB3094-025-Q1-K1-C10
aattaattaaaactgaatctaaattaattgtttatcttatcaatttatgatctaatttccaattttatattttttatattattctatatatttttttttaaatttttttcatttattaatttatttcttttttttcattaccatatttcattattttccacccttattttttttctcctttttttttattaatttttatcatatatatatctttcttttctttaatttttctattttttttttttttattttattaatttatttacttttattatctaatttttttttttcttttttattttattt

SEQ ID NO: 15246 - DNA, 400 bp, Glycine max
  unsure at all n locations
  Clone ID: LIB3094-025-Q1-K1-C11
aaaaaaaaaaaaaaaatttattataaaaaacaaaaaaataaaaatttagtttttattttnaaaagttctcccaaaaaaanaaaaaaaaaaaaaaaaattttttttattatttttattttatttttattattttttttaaaataattttttttttattttattatttttaaaatattttttatttattttatacttttttttaaatttttttttttaatttttttatattttataatttatttttttttaaattttttttttttttttttttttttatttttttttaaatttatcacctatataatttttttattattttttttaattttataatttttttaatttttttttattattttatttttttttaaatatatttatttatttttatttttcatta

SEQ ID NO: 15247 - DNA, 351 bp, Glycine max
  unsure at all n locations
  Clone ID: LIB3094-025-Q1-K1-C12
cccacgcgtccggataaattgtctaactcctccttgattgctgtcctctggaaaatgatttgtagggggaccgacacggtggcggttttgattgagtggatactggcaaggatggtgcttcatccggaggtgcaaaggaaggtacaagaggagttggacgcggtggttaggggtggcgctttgacggangaggtcgtggcggcgaccgcgtatcttgcggcggtggtgaaagaagttctgaggctgcacccgccgggcccgcttctctcgtgggcccgcttggccatcactgatacgaccattgatgggtatcacgttccttgcgggggacaaccgctatggttaatatgt

SEQ ID NO: 15248 - DNA, 386 bp, Glycine max
  Clone ID: LIB3094-025-Q1-K1-C2
gcttgctcctcttacgagcctttcctttcagtccattgattcggtgggtgcgggtgcagcgaaaccgagctagaccctgatcggcgtcggcacaccgccggagaacaagatgattgtctgcgtcgccgtcgtcggtcaccagaacaatccgctgtacatacagagcttcacggaggccgatgatgctctcaagctccaccacatcgtccattgctcgctcgatgtggtcgacgagcgagtgaacaatcctaaaaagtctgggccgatgcttaatgagacgtttttgggactgctttatcctattgaaaactacaaagtatatggatatctgactaatacgaaggtgaaatttatcttggtgaccacggatctggatgttaaaaatg

SEQ ID NO: 15249 - DNA, 291 bp, Glycine max
  Clone ID: LIB3094-025-Q1-K1-C5
cccacgcgtccgcccacgcgtccgctccagagagaagaagaaacttaatcgatcatgagttggcttcactaatacatcatggcagacgagacccagaacaagtatgagagctctgaggttgaggtccaggatcgtggtgtttttgactttctcggtaagaaaaaggatgaagaagacaagcctcatcctcaggaggaggtcatcgccaccgagtttcaaaaagtcactgtctcagaccaaggagagaacaagcacagcctcttagaaaagcttcaccgatctgacagcagc

SEQ ID NO: 15250 - DNA, 310 bp, Glycine max
  unsure at all n locations
  Clone ID: LIB3094-025-Q1-K1-C6
accacncatccgctttattttgaagaacaaacttaatcatcatggctgggntcattaatacagcggggcggccnanacccanaacaagtatgagagctctgaggttgaggtccaggatcgtggtgtttttgactttctcggtaagaaaaaggatgaagaagacaagcctcatcctcaggaggaggtcatcgccaccgagtttcaaaaagtcactgtctcagaccaaggagagaacaagcacagcctcttagaaaagcttcaccgatctgacagcagctctaactcttcaagtgaggaggaaggagaagat

SEQ ID NO: 15251 - DNA, 316 bp, Glycine max
  unsure at all n locations
  Clone ID: LIB3094-025-Q1-K1-C7
aaaaaaaaaaaaacatttaattaacaacaaaaaacacaaaaacaactgaaccgtttttatatcaaaancgccccccccacaccaacnnacaacaaaataattttcttcgacaccttaaacaatcaccacaacaatcccctgcacatacaaaactttacataccccaataatgctttcaagctccaccacatcatccattactctctcgacctcatcgacgaccaacttaacaatcctaaaaaatcaaacccgattctctaataaacacactttttactcctttatcctattcaaaactacaaaccatatctatatc

SEQ ID NO: 15252 - DNA, 363 bp, Glycine max
  unsure at all n locations
  Clone ID: LIB3094-025-Q1-K1-C9
aaaagaaagaaaaaaaaaaaaattattaaaaaaaaaaaaaaaaattagcttttttaaaaagccccccaaaaaaaaaaaaaaaaaaaaanaaaaaaacaaaacaaaaaaaaaacaacccccaaaaacaattttttcctagcaaaataaattcttcatttttttttttttttttttttttttataaatcttatttttttaattttattttttatttttttatttttttttattttttattctaattactttattttattttttttttttttaattttttttttttttttttatttatattattttttttaaattttatttttttttttttataatataaaatcattttttttttattatattttt

SEQ ID NO: 15253 - DNA, 270 bp, Glycine max
  Clone ID: LIB3094-025-Q1-K1-D11
gaggtttttgtctgatgatgttggtaggtcttgcaatcgagggcgagggcaagggcaatctgctggttattatgggaggaatggagcggatggtgatggcagaatgaggaagaatgggaatgggagaaggtttttgtccaataatgttgatcggtctagcggtggagaacagtcttctcctttgaattatgggggggatggaatgaatggtgatggtagattgaggaggaatgggaatgggaggagggttttgtctgatgacgatagtag

SEQ ID NO: 15254 - DNA, 460 bp, Glycine max
  unsure at all n locations
  Clone ID: LIB3094-025-Q1-K1-D12
aaaaaaaaaaaaaaaaaattttattanaaaaaaaaaaaaaaaaaaaaaaaatttagttttttaattttnanaaaagcccccccccaaaaaaaaaaaaaaaaaaanaannnnnaaaaaaaaaaaacaacaancacaacaaaanaattaaggacaccgccccccttttttttttttaaaaaaacaaaaaataaatccaaatattatttttttttttttataaaattaaataaaaaaaaaaataaattttttaaataaaacaaaagataattttaatatattaaatactataacaaaatttaattttttttattattttttttttatacacttttccaaaaaaaaaaataaaatatcttttttaaaatatataaataattaaatatttattatttttaaatttttaattttttttttaattttttctttttttatattttttattttattatttttttttttt

SEQ ID NO: 15255 - DNA, 393 bp, Glycine max
  Clone ID: LIB3094-025-Q1-K1-B1
ctctgctgcgtttgcttctcctccacccatccacaaacgaacacacactttgattgagaatggggcgtgttcgcacaaagacagtgaagaagtcctcgcggcaagtgatcgagaggtactactctcgcatgacgctggacttccacacgaacaagaaggttctggaagaggtggccatcattccctccaagaggctccgcaacaagatcgcgggattctccacccacctcatgaagcggatccagaagggtcccgtacgtggaatctccctcaagctgcaagaggaggagcgcgagcgccgcatggacttcgtccccgatgtctccgccatcagaaccgaccagatcgaagtcgacaaggagacgctcgacatgctcgccgccctcggaatgt

SEQ ID NO: 15256 - DNA, 350 bp, Glycine max
  Clone ID: LIB3094-023-Q1-K1-H1
cgggacgaacgacgcgtgcaagtgcgagagtgaataaatggcgccaggcttggcattggatttggaggaacctccgcggcggcgcctgattcgccaaaggacctcgaaccctctttcttttctcctccgaaattcgtaacctcgaaaagttatcgtcagaggaagcttctgcgcagattccggcgccgatttcgaccggaactaaagtggcgccttcacctgcgctgaagtatgcggcactcgcgtcgttcagttgggaccaggatagtgacaaagttaagatatatgtgttaatggagggaatcgatgagaataaggttgaatccgagtttaagtcgatgtcattcgat

SEQ ID NO: 15257 - DNA, 187 bp, Glycine max
  unsure at all n locations
  Clone ID: LIB3094-023-Q1-K1-H10
tctatgtgttgaacatcggatcggggggagcttgatagatgattctgtaaaaccaagtgtcctcacagggtcattgcaggatangcttttgccagcttgcccttggatggctcatcaccaatggtgcaggtcttgcatcatacccaatagacactgttaggaagaagaatgatgatgacctctggtg

SEQ ID NO: 15258 - DNA, 248 bp, Glycine max
  Clone ID: LIB3094-023-Q1-K1-H11
taaaaccccactgataaaactcgtcatcgtttccctctatagtgtgaaagcgcggtctcggtcccgtggtggtttccaccgtgagcgccacattgatggtggttctcgcttctagcctctacaccatgtccaatatccaacaacgcaccctctatgccggcatattcaaccccaccgaccaaatcctcatttccaaacacattctcgaaacttctctcattgggttttctccttttcctctcttttat

SEQ ID NO: 15259 - DNA, 485 bp, Glycine max
  Clone ID: LIB3094-023-Q1-K1-H3
cggtccggaaccccccgacgaccacgcgtgcggtgtggtgtaactgcatgctctttgcctttgttgacggagtctgccattaaatttaccgtcggcctctaatcaaatacacaacactgtatgcacttcattcatgcctttgaaagcacaagctcggcagcattgcggcactgtgagcctctggaattggagcaacacttgaggcttattcatgcaaaaagtctgcaatgaagccaagtctcacgcttatccatgctaggatgcatgctcaggctctaactttaccagtgctatccggcgcagctgcttatcattattatgagaaacgtgatgttcagccaataccagccgcagattatattattcctgctcccaatgtcacccaggtggtagaacatgaacttcaatggcctttctaaaaattaaaaataaaactgtaggggtcatgttattaagattaggagatattcctatcatcgagtttt

SEQ ID NO: 15260 - DNA, 461 bp, Glycine max
  unsure at all n locations
  Clone ID: LIB3094-023-Q1-K1-H4
cggccgacgcacgcgtccggtttgntntaactgcattctctttgctttttttgatggagtttgcctttaaattttgaaggggtccatataattatacaacttcattttaaagtcttgttgactagtgttcctagactattggttaaggaactaaaaggagaagtttttaatatgtaaatcataggaaagtataaaaaaaaatcatgaagaacgcaatttttatgccttccaataaaaaaccttatttccttaacccgtgtcctctggacacttgttagcatttgccttcattttatatgtatcattagattattataattgaaaaaaatagggcctactttttgacgtcattttattcattttattaagggtcaataaatactttcaacttgtggcagtgttttgcaaaaattgacacatttttgtttttttttccttcaacaaaatttctttatttcttt

SEQ ID NO: 15261 - DNA, 361 bp, Glycine max
  unsure at all n locations
  Clone ID: LIB3094-023-Q1-K1-H5
cccacgcgtccgcccacgcgtccggtgattgatgctagttagaacaagatgttgcagctaggctacactgcgattttctccgaaatgcttttgattctcacgctcgtcttcaaaaccccactgagaaaactcgtcatcgtttccctcgatagtgtgaagcgcggtcgcggtcnccgtggtggtttccaccgtgggcgccacattgatggtggttctcgcttcgagcctctacagcatggccaagatccagcaacgcaccctcgaggccggcatagtcaaccccaccgaccaagtcctcatgtccaagcacatgctcgaagcttctctcatgggggttctgctggtcctctctctgatgatt

SEQ ID NO: 15262 - DNA, 335 bp, Glycine max
  Clone ID: LIB3094-023-Q1-K1-H7
agtggattttgctttgtttcttcgaaactaagcataaaacagcgtaacagtatccaggcatggcttcacctgcaagccaacccaccaaacccttgtcattcactcccacctatctgcaactctaaacccaatatacccacgggccacggtcggtgacgctataatccaaattacggtgtcgttttcagttcgtttaagcatcacccttcccaattgtattcactactaccagtatcttaatctaatccccaaccacacctaaaccaaaccatcagcataatggggaactgtttggggaagtcggagaaattaacggcggaaattgttccacgcga

SEQ ID NO: 15263 - DNA, 205 bp, Glycine max
  Clone ID: LIB3094-023-Q1-K1-H8
taaaaatacaaccccccttacccttctcattcactcccacctatctgcaactctaaacccaatatacccacgggccatcttcattgacgctataatccaaattactgtatccatttatttcgtttaaacatcacccttcccaattgtattcactactaccattatcttaatctaatccccaaccacacctaaaccaaaccatcat

SEQ ID NO: 15264 - DNA, 372 bp, Glycine max
  unsure at all n locations
  Clone ID: LIB3094-023-Q1-K1-H9
gaaaccccgccgacgaccgacgcgtgcggggtggtgtaactgcatgctctttgcctttgttgatggagtttgcctttagattttgggggggcccatatagttatacaatttcattttagggtcttgttgactagtgttcctagactattggttaaggaactaaaaggagaagtttttaatatgtaaatcataggaaagtataaaaaaaaatcatgaagaacgcaattttatgccttccaataaaaaaccttagttccttaacccgtgtcctcgggccacttgttagcatttgccttcattttatatgtatcattagattattataattgaaaaaaatagggcctactttntgacggcattttattcatttta

SEQ ID NO: 15265 - DNA, 404 bp, Glycine max
  Clone ID: LIB3094-025-Q1-K1-A1
caccaacgccaaacaagccctaaatctctcttctctttcttcttcttcctttaaccatgagagagatcttgcacgttcagggaggccaatgcggtaaccaaatcggttccaagttctgggaggtgatctgcgacgagcacggcatcgatcccaccggaaagtacaacgaggaaggcaacagcagcatccaactcgaaaggatcaatgtgtattacaacgaggcctctggcggaaggtacgttccccgtgccgtgcttatggatctcgaacctggaaccatggacagcatcagatctggcccctactgcaagatcttccgccccgacaacttcgtcttcggccagtccggcgccggtaacaattgggccaaaggtcattatactgaaggcgccgagctgatcgac

SEQ ID NO: 15266 - DNA, 414 bp, Glycine max
  unsure at all n locations
  Clone ID: LIB3094-025-Q1-K1-A10
ctcatctcaagactttngtctacttctagataaaactaaaaggatcgcggtttttcaacctcgggccgccccctccaannggggaagcaactgcgaatagcaagaaggagagtccttctttgccgtcgggggttcaaggattgggcatgggtttacccgatttgagaacgaagaaaaaggggaaacagaaggcttccaaagacagccacgtgtcggaggcgctcaacaagctcagggagcagaccaaagaggctgtgaaggggctggagtctatatccccacccactgccgatgatttaggtaaagatgccttgatggaagattgggtcaaacaatttgaacagcttgctggctctcaagacatggaatctattgtggagaccatgatgcatcaacttctggccaaggagattc

SEQ ID NO: 15267 - DNA, 238 bp, Glycine max
  Clone ID: LIB3094-025-Q1-K1-A11
caccaaatcatctgatgcctgtcctcagacgccttgcactcgaaccaggacccagacacgcataggttgctcttgcgaaacgatgcacgcatatactcaacttggtgcatggtcattcggagaaatcactgaccaaggctcaatgttgactaccgagaagattagtgcgtgacaccttgcaggaacaatcggcttctgtctcaaactgatgtgggaactggatgccgacaacaactgc

SEQ ID NO: 15268 - DNA, 251 bp, Glycine max
  unsure at all n locations
  Clone ID: LIB3094-025-Q1-K1-A12
taaaaatgtttgtttcattcctatttacctcaaaatctggggtgcttttttaccatgacgggctggtcnaccaaatctatgatgctgtcctcgacgcttgcctcgaacaggacccaaacagcaaggttgcctgcgaaacatgcaccaaaaccaacttggtcatggtcttcggagaaattaccaccaaagccaatgttgactacgaaaagatagtgcgtgacacctgcaagaacatcggctttgtcttaaac

SEQ ID NO: 15269 - DNA, 375 bp, Glycine max
  unsure at all n locations
  Clone ID: LIB3094-025-Q1-K1-A2
cgaacaanccctaaataacacttttatttcttctacaacacanaaccataaggtacctgtttcattttaaaggaccccaccccacnaaccaaatcgattccaagttctgtaaagtgatctacgacgagcacatcatctatcccaccggaaagtacaactattaattcaacagcagcatccaactctaaaggatcaatgtttattacaactaatcctcttacaaaaggtacgttccccataccctgcttattcatctccaacctgcaaccatggacagcatcatatacttcccctactgcaagatcttcctccccgacaactttctcttcggccaatcctgccccattaacaattttaccaaaaatcattatactt

SEQ ID NO: 15270 - DNA, 299 bp, Glycine max
  Clone ID: LIB3094-025-Q1-K1-A3
cccacgcgtgcgcccacccgtccgttccaaaaagaaaaaaaaactaaatcgatcatcactgggcttggctaatacataatggcagacgagacccaaaacaagtataagagctctgaggttgaggtccaggatcgtggtgtttttgactttctcggtaagaaaaaggatgaagaagacaagcctcatactcaggaggaggtcatcgccaccgagtttcaaaaagtcactgtctcagaccaaggagagaacaagcacagcctcttagaaaagcttcaccgatctgacagcagctctatctc

SEQ ID NO: 15271 - DNA, 313 bp, Glycine max
  Clone ID: LIB3094-025-Q1-K1-A4
cccaaaacaaatatgagaactctgaggttgaagtccaaaatcgtggtgttttttactttctcggtaagaaaaaggatgaataatacaagcctcatcctcaagaggaggtcatcgccaccgagtttcaaaaagtcactgtctcataccaatgatagaacaagcacagcctcttagaaaaacttcacctatctgacagcagctctatctcttcaaattaggaggaatgataagattgatacaaaatgaataacaataataatgaaaagaaaagccttaaagacaacatcgatcagaaaataaaaggttatcatca

SEQ ID NO: 15272 - DNA, 438 bp, Glycine max
  Clone ID: LIB3094-025-Q1-K1-A6
ctacctctcaagtttttgaagtatagagatggcagagacattcctatttacctcagagtcagtgaacgagggacaccctgacaagctctgtgaccaaatctctgatgctgtcctcgacgcttgcctcgaacaggacccagacagcaaggttgcctgcgaaacatgcaccaaaaccaacttggtcatggtcttcggagaaatcacgaccaaggccaatgttgactacgagaagatagtgcgtgacacctgcaagaacatcggctttgtctcaaacgatgtgggactggatgccgaccacctgcaaggtcctcgtcaacattgagcagcagagccctgatattgctcaaggtgtacacggccacctcaccaaaaaacctgaaaaaattggtgctggtgaccagggtcacatgtttggctatgccactgatgaaacccctg

SEQ ID NO: 15273 - DNA, 169 bp, Glycine max
  unsure at all n locations
  Clone ID: LIB3094-025-Q1-K1-A8
acccacccccacgcaangncctactatatcacnaaaaaatacattcttctanccaanctncatctaaccgctccgttatatattaaaaagctccctccctacaacantnnnccatataaagaaaaatcattttaaatttattctaaaaaaaaaaaaaaaagtccaacca

SEQ ID NO: 15274 - DNA, 406 bp, Glycine max
  unsure at all n locations
  Clone ID: LIB3094-025-Q1-K1-A9
caaccatggccgactcatctcaagaccttgaccaacttctcgatagtgctttggatgatttgcagtccttcaacctcaatcctccccctccaagtggggaagcaactgcgaatagcaagaaggagagtccttctttgccgtcgggggttcaaggattgggcatgggtttacccgatttgagaacgaagaaaaaggggaaacagaaggcttccaaagacagccacgtgtcggaggcgctcaacaagctcagggagcagaccaaagaggctgtgaaggggctggagtctatatccccacccactgccgatgatttaagtaaggatgccttgatggaagattgggtcaaacaatttgagcagcttgctggctctcangacatggaatctattgtggagaccatgatgca

SEQ ID NO: 15275 - DNA, 319 bp, Glycine max
  unsure at all n locations
  Clone ID: LIB3094-023-Q1-K1-G9
cgcccacgcgtccgcccctgatatatcatatatcgtatcatccttaatatgaactgtatttagtgtcaagggggcactncttaatttctacaaatatcaaagatcccccttcctcttttagtcaaaccatatttcatatttgcaccaaattttttttaccaagatttgtaagatcacaattcacaagccccagagaagaaaagggaaaataaatccttgaaaggttcatttttgacaaatacagttgaagcaaaattggaataggtaaatagtatccttcaagggcatagggggggctatataaacccttccttctgat

SEQ ID NO: 15276 - DNA, 432 bp, Glycine max
  unsure at all n locations
  Clone ID: LIB3094-023-Q1-K1-D8
ggcggcgctgtggcggacgcgccggcggtggttgaggagaagacggagttcgacgtggtgatcgaggaggtgccgagcaacgctcgaatcgcggtgattaaggcggtgagggcattgacgaacctagcgctgaaggaggcgaaggagttgatcgaagggttgccgaagaagttcaaggaagggatttcaaaggacgaagctgaagatgcgaagaagcaactcgaagaagctggtgccaaggttaccattgcttaaacactgtttagctgcagcatatatgttctgcttcttcttttggtggttgtagttgagttcaccagtacactgtaatttcatttccattttgtctggatttcaatcttttatttgtaatgaggaaatatgagntcttatttttatattattttttttaatgcgtatgaggtgttgttg

SEQ ID NO: 15277 - DNA, 445 bp, Glycine max
  Clone ID: LIB3094-023-Q1-K1-D9
gagaacactttcatcgactgctcagaccaccattgaaattgattctctatacgagggagagtgatttctactccactgttactcgtgccagatttgaggagctcaacatggatctcttcaggaaatgtatggagccggtggagaaatgtttgagggatgctaagatggacaaaagaagtgttgatgatgttgtccttgttggtggttctaccagaattcccaaggttcaacaactgctgcaggacttctttaatggaaaagagctttgcaagagcattaatcccgatgaggctgttgcatatggtgcggctgttcaggctgcaatcttaagtggtgagggcaatgagaaggttcaggatcttctcctcctggatgtcacccctctgtctcttggtttggagactgccggtggtgtgatgactgtcctgatccctatgaacactac

SEQ ID NO: 15278 - DNA, 253 bp, Glycine max
  Clone ID: LIB3094-023-Q1-K1-E10
ttccccaattataacccatccaattcacccaatctcacttcattcttaatttacaattctattattactcacattattataaaactctataatccaccatcaaaacttcacaatattaaaacatattaacctattacaattattcatacccctccaatcactattaatcacattatttctttattaaaaactccccctgacctcccaacattcaacactctattatctcatctacttaatttactaacctaaa

SEQ ID NO: 15279 - DNA, 298 bp, Glycine max
  unsure at all n locations
  Clone ID: LIB3094-023-Q1-K1-E12
acaatttgtcctaaactacnttcccacataaaccttatatcacatcaaatatttcaataattgttcttacattcagcttcatcttaacaaaaacacttttactttcttccattccaaaaattcttactttttttttcacttcatcatatacataaagatatttcctttatattcttcttacacaatcacttctttctattaatcttcccaaaactcttatcattattatatatactttctattctttttaaacataacaatacaaccttacattctacaaacaaattttttcacccaa

SEQ ID NO: 15280 - DNA, 435 bp, Glycine max
  unsure at all n locations
  Clone ID: LIB3094-023-Q1-K1-E2
cttggccttccaagtacccggtgaagggttcttaaaatttggggggtggtttttccttagccagaggattcatccttgactcaaactgtctaaagaaggggtatagttctttggaagctgaactgtaatgtgtccctgtggaatatcaatggggggaatctggcttttgacaaaggataggtcaaatcgtccctgttactaaaacaaaagctacctattaccattctgaaagtgcctggagatggttnngtatgaatgattctgcaaagtaagtgatctaccatatgtctctatgtcaagatctgcttgtatagatgtttggaggttaccagaactaaaggattctgtcgcttacctgaatattggggatgagaaatctcgcaccattcgtcattctgtaattgctcccttggcagttagtgcatcaagaggcgt

SEQ ID NO: 15281 - DNA, 371 bp, Glycine max
  Clone ID: LIB3094-023-Q1-K1-E3
gttgccgggctctaaccctggtttcaacatctaatgtgttggaatcatcgtgtatcgtgggggggactttggattgtatgattctgttaaaccagttgtcctcacagggtcattgcaggatagcttttttgccagctttgcccttggatggctcatcaccaatggtgcaggtcttgcatcatacccaatagacactgttagaagaagaatgatgatgacctctggtgaagctgtcaagtacaagagctccttggatgcattcacacagatcctcaagaatgagggtgccaagtccttgttcaagggtgccggtgccaacatcctccgtgccgttgccggtgctggtgtgcttgctggttatgacaagttgc

SEQ ID NO: 15282 - DNA, 175 bp, Glycine max
  unsure at all n locations
  Clone ID: LIB3094-023-Q1-K1-E4
cctcacantttcattacattatatctttttttccaacttttcccttatattactcatcaccaatattacatttcttacatcatacccaataaacacttttaaaacaacatatatcataacctctctctaatctctcaattacaatatctcctttnattcattcacacacatcctc

SEQ ID NO: 15283 - DNA, 262 bp, Glycine max
  Clone ID: LIB3094-023-Q1-K1-E9
ctcaggaggagaataaggatgtctcacaggaagttcgagcacccaaggcacgggtcactgggatttctccccaggaagcgtgctgctcgtcacaggggaaaagtgaaggcattccccaaggatgacccatccaaggcacccaagctcactgcattcttgggttacaaggctggtatgactcacattgttagagaggtcgagaagccaggatcaaagcttcacaagaaggaaacatgtgagcctgttacaattattgagaccc

SEQ ID NO: 15284 - DNA, 438 bp, Glycine max
  unsure at all n locations
  Clone ID: LIB3094-023-Q1-K1-F11
cttttctactttgaatccttttgaatccttctttttctccttgaactcaaacatggcagagggggtggttctgctagatttctggccaagtccatttgggatgagggtcangattgcacttgctganaagggtatcaaatatgagtacaaagaagaggacttgaggaacaagagtcctcttctcctccaaatgaacccggttcacaagaagattccggttctcatccacaatggcaaacccatttgtgaatccctcattgctgttcagtacattgaggaggtttggaatgacagaaatcccttgttgccttctgacccttaccagagagctcangctagattctgggctgattatgttgataagaagatatatgatcttggaaagaagatttggacatcaaaaggagaagaaaaagaagctgccaagaaggagttcat

SEQ ID NO: 15285 - DNA, 333 bp, Glycine max
  Clone ID: LIB3094-023-Q1-K1-F3
aaaaaatgggttcttctttttttaagggggacggtgggggggattttggcatcactggccgggggagcactctgtgccaacccacgcaggccagtggatgtacaatttggccgaaactacgtgcccacatgggcctttgatcacatcaaatatttcaatggtggttctgacattcagcttcatcttgacaagtacactggtactggcttccagtccaaagggtcttacttgtttggtcacttcagcatgtacataaagatggttcctggagattctgctggcacagtcactgctttctatttatcttcccaaaaccgcggagcatgatgagat

SEQ ID NO: 15286 - DNA, 374 bp, Glycine max
  unsure at all n locations
  Clone ID: LIB3094-023-Q1-K1-F4
aaccaggacgcccccacanntnatnatcttctctctgactccttccgttacaaggaaattgagaatggaatgctgtgggaagttgaggggaagtgggttgttaaaggagcagttgatgtatacattggtgcaaacccttctgctgacggtggaggagaagataagggagctgatgatgcacctgttaaggtggttgacattgttgacacattcaaacttcatgagcaaccggggtgcgataagaagcaatttgttaccttcatgaagaggtttatcaagaatttgactcccaagctcgatgcagatcaacaggagttgtttaataagcacatctagggagcaactaattacctgctctctaatattaaagattt

SEQ ID NO: 15287 - DNA, 408 bp, Glycine max
  unsure at all n locations
  Clone ID: LIB3094-023-Q1-K1-F7
ctttnantcttcttnatctccttttttctccttcaactcaaacattaaggaggggtgtttataatanatgtctccccaantccattnttnatntatctcaatattgcactttctnaaaatggtatcaaatatgagtacaaagaagaggacttgaggaacaagagtcctcttctcctccaaatgaacccggttcacaagaagattccggttctcatccacaatggcaaacccatttgtgaatccctcattgctgttcagtacattgaggaggtttggaatgacagaaatcccttgttgccttctgacccttaccagaaagctcatgctagattctgggctgattatgttgataagaagatatatgatcttggaaggaagatttggacatcaaaagggaataaaaaaaga

SEQ ID NO: 15288 - DNA, 373 bp, Glycine max
  Clone ID: LIB3094-023-Q1-K1-F9
cgcaccagtttcaccgcacgaatatcttgttgtttggagcgatccgagaaaaactctgggacatgttggtttaccaggacctccttacaggtgatgagcttctctctgactccttccgttacaaggaaattgagaatggaatgctgtgggaagttgaggggaagtgggttgttaaaggagcagttgatgtagacattggtgcaaacccttctgctgagggtggaggagaagatgagggagttgatgatgcagctggttaaggttgttgacattgttgacacattcagacttcaggagcaacccgcattcgataagaagcaagttggtaacctcatggagagggttatcaagaatttgactcccaagctcgatg

SEQ ID NO: 15289 - DNA, 213 bp, Glycine max
  unsure at all n locations
  Clone ID: LIB3094-023-Q1-K1-G6
ctcttacanctcccatgaatgtggtcacaccggaaatgttgacattcatgcaagaactacgaaaggttgttacggttgcagttgttggggagttctgaccttataaaagatatctggtatttttctgacagcacagattaccaattgttgtattgatttacgtaatatttcttgaataaatggttcttggttggcctcacaatggtaaacgaa

SEQ ID NO: 15290 - DNA, 280 bp, Glycine max
  Clone ID: LIB3094-023-Q1-K1-G8
cccacgcgccgcccacgcgtccgccccagaaatatcatatatcgtatcatccttaatataagctttattttgtgtcaattttgcactgtttaatttctacaaatatcaaagatcccccttcctcttttagtcaaaccatatttcatatttgcaccaaattttttttaccaagatttgtaagatcacaattcacaagccccagagaagaaaagggaaaataaatccttgaaagtttcatttttgacaaatacagttgaagcaaaattgaattaggtaatag

SEQ ID NO: 15291 - DNA, 415 bp, Glycine max
  Clone ID: LIB3094-023-Q1-K1-D4
tgtcattccacaaaactcgccatttaaggaatccatacaatgagaacttaccagtgaagagaagtagagattgtcaggagctggagccctctattggagagcagctggcatccttgctttatcttgagccagatagtgaacttatggtatattctcctttgagtcatcatcttgctttgtgaataaaaactgataagcaataatcatgatgtacaaatgggaaaaaaccaaattgttctgttatgttactgtgagaaattgagtgactctggaatctggattgatatggtaattgttttacttgatataaaatggaactttcttgctaagaaattttatacatgattattggttggtctcaacaaacttatgtagttgaaagtccctgaaaagacacagatatcatcattaagct

SEQ ID NO: 15292 - DNA, 382 bp, Glycine max
  Clone ID: LIB3094-023-Q1-K1-A8
ggcagcgcttaaatcagttatagtcttcttgtgagacaggaggggcacaaacggatgatcgtgtcatgttcttggaatccacatggtcacgaatttgcgacaggttcaagggataagacagtgaaaatgttggccattaaaagggagtccggcaaagcactttatgcgttaacctgaatttacaagtaggggaccagcattccattgggttgagctccatcatcgaaagaataatggacttctagctgctggaatggaaaatggccaaatagagttgtggaatctgtcttattacaaagcaaatgatgggagcatatcaccaccaggtctggccgcttctgttgctgtacgtatagatccttttgtatgccatgcgtgtacc

SEQ ID NO: 15293 - DNA, 62 bp, Glycine max
  Clone ID: LIB3094-023-Q1-K1-B12
tataaatataaataaaggttttcttatttgtatcatttggaataaaaaaaaagaaatggggt

SEQ ID NO: 15294 - DNA, 426 bp, Glycine max
  Clone ID: LIB3094-023-Q1-K1-B2
gaggaatcggggcgatccgcacgcgtccggaagttgcgagagtgaacaaatggcgcaagacttggcattggatttggaggagcttcggggcgggcacagcatcgccaaaagacctcgaaccctctctcttctctcctccgaaattcgtaacctcgaaaagttatcgtcagaggaagcttctgcgcagattccggcgcctatttcgaccggaactaaagtggcgccttcacctgcgctgaagtatgcggcactcgcgtcgttcagttgggaccaggatagtgacaaagttaagatatatgtgttaatggagggaatcgatgagaataaggttgaatccgagtttaagtcgatgtcattcgatgttaagttccatgatgttcaagggaagaactaccgatgtgcaatatcaaaattgcacattgagat

SEQ ID NO: 15295 - DNA, 375 bp, Glycine max
  Clone ID: LIB3094-023-Q1-K1-B3
cccacgcgtccgtatcactgtgtaagcagtgatcgattctgcgaactgcgattcgcatcggcagttcaaaagcgttcgttcgtcggagatggagacgctaccgacgacgacgacaaagcgaggaggagcgagatcgaagcccgttcagacctcgaaatcgtctctcgttatggccttcttctcctgcgtcgcgtggctctacgtcgccggaaggttatggcaagacgcagagaatcgcaatttactcgctagtcttctgaaaaagaattcagctcagaggcctaaggttcttacagtggaagataagttaatggtgcttgggtgcagggatctggagaggaagattgtggaagctgagatggaattgacattggc

SEQ ID NO: 15296 - DNA, 244 bp, Glycine max
  Clone ID: LIB3094-023-Q1-K1-B7
cgccgtgccgctactgatctcaatctctcgtctctccgcgtccaaacccttacttcctaccctatggggctttctctcatccatcatgaaaggaggaaagtccatgaccgcttctaaaacagccgatgcccaacatcgctagtgaataagaagggcaccgccccaacaccaggaaacccgtcggaaaggggcggccaccgatggacctaacaagccaaagaggcctccgaatgcctaatgcgac

SEQ ID NO: 15297 - DNA, 375 bp, Glycine max
  Clone ID: LIB3094-023-Q1-K1-B8
cccacgcgtccgcccacgcgtccgcccacgcgtacgcggacgcgtggggttctatgggcgcgtacctatgtgtccttgagttctaaggagacaggaacctacgtctggtggatgaatcatgaccgtgtgatcagagcgtgattaacgtgccgggtgagtttctctttggagtagtctcatctttggctgtagaggatcgttcttaggacacttgcatgtgcctgggaatggtcatacggatgtctgacacgaccaaaaaagatataaagacatagaggtattcgatgtgatgaaggttgaatccgagtttaagtcgatgtcattcgatgataaatgccatgatgttaaagggaagggctaccgaagtgcaatatc

SEQ ID NO: 15298 - DNA, 267 bp, Glycine max
  unsure at all n locations
  Clone ID: LIB3094-023-Q1-K1-B9
tctgcgaactgcgattcncaataggctgttttaatttgtattgtcgtcggacaannanacacctaccgacaacaacaacaaaccaggtggagcgttatccaaacccgttcaaaccctcaaaatgggttttggtttgggcctttttttccggggggcgtggattttcgtcgccagaaggttatggcaagacccaaaaaatcgcaatctactcgctagtcttctgaaaaagaattcagctcagaggcctaatgttcttacagtggaaga

SEQ ID NO: 15299 - DNA, 346 bp, Glycine max
  Clone ID: LIB3094-023-Q1-K1-C10
gttgcttttcttgcagtgtatgcttttggaatgtacttttctggacattttggtgagaggggtaatttgaggatatttctaacagtggggatgctaggaactggcttgtttacttcactgtttggggtagggtactggggaaacatccacaacttctactattatttagtagttcaaatgattgctggattgtttcaatccactggatggccgtccgtagttgctgttgtgggtaactggtttgggaagagcaagagaagggtgatcatgggaatttggaatgctcacacttcaattgggaacattgctggttctttgattgcttctgccatgttgagctatggat

SEQ ID NO: 15300 - DNA, 352 bp, Glycine max
  unsure at all n locations
  Clone ID: LIB3094-023-Q1-K1-C11
cagaacagggactcactctcttcgcagcggcactctcggtggctttcatcttctcgggttgtcaagatgtacacatcgaggaagaaaattcacaaggataaggatgctgagccaactgaatttgaggaatcagttggacaggcattgtttgatctagaaaataccaacaatgagctgaaaagtgatctgaaagatttatacataaactcagctgtccaaattgatgtttctggcaaccgaaaggctgtggttatccatgtcccctacagactaaggaaaggattccggaagattcatgtcaggcttgtgagagaactngaagaaaaagttagtggaaaagatgtaatcttga

SEQ ID NO: 15301 - DNA, 447 bp, Glycine max
  Clone ID: LIB3094-023-Q1-K1-C2
cctaaacaactctttctcttcttccttcgctcgttgttctccctcgcgtagatcgacaatggcggagacagagacgtttgctttccaggctgagatcaaccagctcctcagtctcatcatcaacaccttctactccaacaaggagattttccttcgtgaactcatcagcaacgcctccgatgctttggacaagattcgatttgagagtttgacagataagagcaagctcgatgctcagccagagttgttcattcatattattccagacaagactaacaatacactgaccattgttgacagtggtattggcatgaccaaagctgatttggtgaacaacttgggtacaattgctagatctggtaccaaggaattcatggaagccttggctgctggtgctgatgttagtatgattggacagtttggtgtggggttctactctgcatatct

SEQ ID NO: 15302 - DNA, 404 bp, Glycine max
  unsure at all n locations
  Clone ID: LIB3094-023-Q1-K1-C3
cccacgcgtccgtcaagcattgcatccctcttgatttgtagtttgttttgtgctttagataaaagttctgccaaatcaagaggggttttaagatcatagtgtgtgttttgcaacaatggctaagttctttgctgctatgatcttggcactctttgccatttccatacttcaaacagtggtaatggctgctaatgaacaaggaggccacttgtatgacaacaagagcaaatatggaagtggaagtgtcaagagttaccaatgcccatcacaatgctcgaggagatgtagccagacccaataccacaagccctgcatgtttttctgtcagaagtgctgcangacatgcctgtgtgtgcccccggggtattatggtaataaagctgtgtgcccttgctacaacaact

SEQ ID NO: 15303 - DNA, 338 bp, Glycine max
  Clone ID: LIB3094-023-Q1-K1-C4
aacaattactaacttcttttctgctatcatcttgtcactctttgccatttccatactttaaacatttttaattgctgctaattaacaatttatccacttttatgacaacaacatcaaatattttaatgtaattgtctatatttaccatatcccatcacattccctctaatagatttatccttacccaatacctcattcccttcatgtttttttttcagaaattctactttacatcccttttttttccccccctttattattttcataaaacctttttccctttctactactactttataacaattaattatgacccaacttccctttatcttaacttt

SEQ ID NO: 15304 - DNA, 475 bp, Glycine max
  Clone ID: LIB3094-023-Q1-K1-C7
ccgggccgaccgacgcgtccgcctagacgactctttctcttcttccttcgctcgttgttctccctcgcgtagatcgacaagttgttggactgagacgtttgctttccaggctgagatcaaccagctcctcagtctcatcatcaacaccttctactccaacaaggagattttccttcgtgaactcatcagcaacgcctccgatgctttggacaagattcgatttgagagtttgacagataagagcaagctcgatgctcagccagagttgttcattcatattattccagacaagactaacaatacactgaccattgttgacagtggtattggcatgaccaaagctgatttggtgaacaacttgggtacaattgctagatctggtaccaaggaattcatggaagccttggctgctggtgctgatgttagtatgattggacagtttggtgtggggttctactctgcatatcttgttgct

SEQ ID NO: 15305 - DNA, 431 bp, Glycine max
  unsure at all n locations
  Clone ID: LIB3094-023-Q1-K1-C8
caccgtcacttttccttaacggcgaagctatcgccgaagggcacaaccgtcattccgactgcaaaccgtttcttctatcctccactctccccatcccaataacaaagagaggaatcgaagtctgttccgttctgatcagaaagggaataacggtaacggagatatggggcttctgtctaacagagtaactagagagagcctgaaaccaggggatcacatctactcttggaggactgcttacatatacgctcatcacggcatttatgtcggcgatgacaaagtcattcacttcactagacatgggcaagaagtaggaaccggtactgcactagatcttctcctcatcagttcaggaccagccaagcctcgagaaagttgcccaacttgtacagcaccccaagaggaacacggngttatctnctcatgcatga

SEQ ID NO: 15306 - DNA, 446 bp, Glycine max
  unsure at all n locations
  Clone ID: LIB3094-023-Q1-K1-C9
gaacgcgaacacagattcattcacctaccgttcctacccttctctctctcgccgccgcttcttcttcctctcgcatgctccttctctgaaccaaaccaatccattattcatttgaatcttcttatacatcccaaaaaaacccaataaaaaaggggtctttagaaggttctggttgatgggtaggagaggaatcaagctattcgatgaagaaaggaacggtcttttttcaatttccaattttgggtctcaatggggtggtgttagaggtgatggtgttcaagaccctgtgaatttggctgtgtatgcaagcattagtcaaatgggaatgggggntggtgttcaagaaccaaacccttcttcttcttcttctgatggtgataattcccaacacaacggtggcatgagcatgagaatgaggattccgtgcaccgagttgtacgttcggt

SEQ ID NO: 15307 - DNA, 327 bp, Glycine max
  unsure at all n locations
  Clone ID: LIB3094-023-Q1-K1-D10
ctttatcgactgctcaaacctcatttaaatgattctctaaccaggaaagatatttttacaacactggtacgccccccanatttgaggagctcaacatggatctcttcaggaaatgtatggagccggtggagaaatgtttgagggatgctaagatggacaaaagaagtgttgatgatgttgtccttgttgttggttctaccagaatccccaaggttcaacaactgctgcatgacttctttaatggaaaagagcttcgcaagaacattaatcccgattaggctgtagcatatggagcggctgttcacgcttcaaccttaaatggttatt

SEQ ID NO: 15308 - DNA, 460 bp, Glycine max
  Clone ID: LIB3094-023-Q1-K1-A7
gctgccgaaacccttccggaaccctaaggtaagtgagtaatcagtggttgagaatggtggggagggcgaagggtagaaaggaggaggtggttacacgtgagtacaccattaacctccacaagcgcctccatggctgcacatttaagaagaaagctcctaaagctattaaggagataaggaaatttgcccaaaaggccatggggaccaatgatgtgagggtggatgtgaagttgaacaagtttgtctggagccagggaatcaggagtgttccaaggaggattagagtaagaattgctcgcaagagaaatgatgatgaagatgccaaggaagagctgtactctcttgttaccgttgttgagatccctaaggacgagctcaaagggttaggcactaaggttattgatgacgaggattgatttatatctgtttgaaacccggagacatacatgtagctttttgg

SEQ ID NO: 15309 - DNA, 435 bp, Glycine max
  Clone ID: LIB3094-023-Q1-K1-D11
cccacgcgtccgcgagcttcagcaatggtgtacgtcaaggctcagaaatcaaaagcgtggggcaagagatatcaagtcaagttcaagagaagaagagagggaaaaaccgattaccgtgccaggattcggttgattaatcaggacaagaacaaatataacactccgaaataccgatttgtggttcgctttagcaacaaggacattgttgcacaaataatatctgctagcattgccggcgatttagttcttgctacagcatattcacatgagctgccacgatatggtcttgaagtaggacttacaaattatgcagcagcttattgcactggtctcctgttggcccgaagagtcctcaaaacacttggaaatggatgaggagtatgaaggaaatggtggaggctctggagagggatattcagtggaacctgccgagag

SEQ ID NO: 15310 - DNA, 134 bp, Glycine max
  Clone ID: LIB3094-022-Q1-K1-F9
aggacacgcacatgatcaccgcattaatcacgacagttattgatgctacgcgcagcgaggccgttacactctgcatcgcaatatcgcccgttcctatcgctgtctttgcatcctttcttgacacgatcatcggc

SEQ ID NO: 15311 - DNA, 114 bp, Glycine max
  Clone ID: LIB3094-022-Q1-K1-G10
gaaaaaaaaaaaagcctttaactttttttctttggcatgattggaatcttgattggaaaaggttcaaattgaggtgtttaacccatcaattcaattttaagccgtgccttcttc

SEQ ID NO: 15312 - DNA, 284 bp, Glycine max
  Clone ID: LIB3094-022-Q1-K1-G3
gaccgacgcgtacggaaaggctaccaaaccttcaactacaactcttatcctcaatcttcgtacaaagttgcactcggttgattttggtagatgtatagctcagacactctcgcttatcatcaagatgtcaactctagtttccgacctgcatctatataatattgctaatgtcaaggcacttgcatgctgatatcactcactgcatcacccactcacaagacatgaataacacttcatcttcttaattacctaattgtttgaatgatttaaatcttgttgacata

SEQ ID NO: 15313 - DNA, 174 bp, Glycine max
  Clone ID: LIB3094-022-Q1-K1-G5
gacccactcgtacggcttgctcctcttactatcctttcctttcatttcatttattcatatgatacgggttcattggaacctttttataccctaatcgtcttcttcacaccgtcatataacaaaattattttctacttattcatcatctatcaccataacaatcctttcatcata

SEQ ID NO: 15314 - DNA, 455 bp, Glycine max
  Clone ID: LIB3094-022-Q1-K1-G6
ggaaaacgaccaaaacttcaactacaactcgcagcctcaggcttcgtacaaagttgcagtggttggtgctgctggagggataggtcagccactcgcgcttctcatcaagatgtcgcctctagtttccgacctgcatctctatgatattgcgaatgtcaagggagttgctgctgatatcagtcactgcaacaccccctcacaagtcagggatttcactggagcttctgagttggcgaattgtttgaaggatgtgaatgttgttgtcatacccgccggtgttccaaggaagcctggcatgactcgtgatgaccttttcaacatcaatgccggcatagtcagggacttggtttctgctgttgcggataatagccctgatgcttttattcaaatcatcagtaaccctgtgaactctaccgtgcctattgccgcagaagttttgaaacagaagggtgtgt

SEQ ID NO: 15315 - DNA, 439 bp, Glycine max
  Clone ID: LIB3094-022-Q1-K1-G7
tgtacttgtgtttcaattcattcttcggttgttctctatttgcgttttctcaggttctttggttcgttctcttccgtggaacgagtagtagaaacttgaaatcaaaaggcagcgggggaaaaagaaaagagagaagtagggttcgaaaatggcagcagaatcatcagagggcgaagaagaaaccaagttaagcggaggtaaccaattgctcatagttgacgatgacttaacggaaatgggaaagaaagccgcttggagcgtgagttcctgcaaacccggtaacggcgtttcctctctccgtgacgacaatctcgaaacttattggcaatccgacggagggcaaccccatttagttaacattcagtttcagaagaaagttagacttcaattaattgtgctgtacgtggatttcaagcttgacgagagttacacgccgagc

SEQ ID NO: 15316 - DNA, 216 bp, Glycine max
  Clone ID: LIB3094-022-Q1-K1-G9
atggctcccaaaccgcctagtacgggtctgtttgttggactgaacaagggtcacgtcgtcaggaataagggattgcctccacgcccctcagatcgtaaggggaaaacaagcaagagggtgcactttgtgaggaacctcataagagaggtagccggttttgcaccctatgaaaagcgtataactgagttgctgaaagttgggaaggataagaggcac

SEQ ID NO: 15317 - DNA, 214 bp, Glycine max
  Clone ID: LIB3094-022-Q1-K1-H1
gacccactcttacgcttacgcattctttcactattcctacacctttcctgctttaacaaactcctaattctcagtttctttggataaattaattgcatacactgactcttataaactttaaattaacttaccatctacaacaaaatattttatccaatatttatactaaaaaatctaattaatcatcatacttcaaattataaaactccctttt

SEQ ID NO: 15318 - DNA, 202 bp, Glycine max
  unsure at all n locations
  Clone ID: LIB3094-022-Q1-K1-H11
tcctagggtttttccttcaaccgtgggaaacggctcccaaaccgcctagtacaggtctgattanaagactgaacagagcctcacaacgtcaccaacaaggaattgcccccacgcccctcaaatcgtaaggggaaaacaaccattagggtgcactttgtaaatatcctcataagacaggctgcaaaaaatgcaccctatgaaa

SEQ ID NO: 15319 - DNA, 451 bp, Glycine max
  Clone ID: LIB3094-022-Q1-K1-H3
cggtcacatggggtcactattcctccacctccacctgctatatgaaactcctaattgtcagttgttgtgaagaatttaactgagaacactaacactgttattctctgaattttctcaccatctacaactgaagttttaaccaatatggaaactgaaaagtctaatgtttcaaaggctgaagaatttaaactccttgccaatgaagtgttcaatgctcgaaaatactcccaagccattgatctatatacacaagcaattgagctgaacagtcaaaatgcagtttacttttctaatcgtgcctttgcccatcttcggcttgaggaatatggtagtgcaatacaagatgccacaaaggctattgaaattgatcctaaatattcgaagggttattacaggcgaggcgctgctcatcttggactggggaaattcaaggaagcactgaaagattttc

SEQ ID NO: 15320 - DNA, 440 bp, Glycine max
  Clone ID: LIB3094-022-Q1-K1-H4
cgaaccacgcctgcgcccacgcgtccggactgtccaagatgtatcgacaatggtttggtgcgggcaaaaaaccatggtctttctagtcaacttttgtggatacaccatcgatgttgaaattcatgatgtggccgtacaatgcgattaagaactggaattacactgggttgattgatgcaatccacaatggtgatgggaaatgctggactgtcaaagtgttctgtgaagaggagctagttgaatcaattgccacagccacatgacccaagaaagactccttatgcttcattgatgcgattgactcataatgatgacaccagttaagaattgcttgaatggggcttcaagggttctgctgaccatagcccgactgccaatcctcaggaatcttcagaatttaatctatgactcaaatgctgcacttgccctttagctctatg

SEQ ID NO: 15321 - DNA, 452 bp, Glycine max
  Clone ID: LIB3094-022-Q1-K1-H7
ggcttgctcctcttacgagcctttcctttcataccattgattcggtgggtgcgggtgcagggaaacctttctagggcctgatcggcgtcggcacaccgccggagaacaagatgattgtctgcgtcgccgtcgtcggtcaccagaacaatccgctgtacatacagagcttcacggaggccgatgatgctctcaagctccaccacatcgtccattgctcgctcgatgtggtcgacgagcgagtgaacaatcctaaaaagtctgggccgatgcttaatgagacgtttttgggactgctttatcctattgaaaactacaaagtatatggatatctgactaatacgaaggtgaaatttatcttggtgaccacggatctggatgttaaagatgcggatgtaaggaattttttcaggaggttccatgccgcatatgtagatgcagtttcaaacccattc

SEQ ID NO: 15322 - DNA, 404 bp, Glycine max
  unsure at all n locations
  Clone ID: LIB3094-022-Q1-K1-H8
cggctggctcctcttacgagccttaccttncataccattgattcggtgggtgcgggtgcagcgaaacctttctaggccctgatcggcgtcngcacaccgccggagaacaagatgattgtctgcgtcgccggcgtcggtcaccagaacaatccgctgtacatacagagcttcacggaggccgatgatgctctcaagctccaccacatcgtccattgctcgctcgatgtggtcgacgagcgagtgaacaatcctaaaaagtctgggccgatgcttaatgagacgtttttgggactgctttatcctattgaaaactacaaagtatatggatatctgactaatacgaatgtgaaatttatcttggtgaccacggatctgggatgtaaaaatgcggatgtaaaggaatt

SEQ ID NO: 15323 - DNA, 457 bp, Glycine max
  unsure at all n locations
  Clone ID: LIB3094-023-Q1-K1-A1
gctgccgaaacccttccggaaccctaaggtaagtgagtaatcagtggttgagaatggtggagaaggcgaagggtagaaaggaggaggtggttacacgtgagtacaccattaacctccacaagcgcctccatggctgcacatttaagaagaaagctcctaaagctattaaggagataaggaaatttgcccaaaaggccatggggaccaatgatgtgagggtggatgtgaagttgaacaagtttgtctggagccagggaatcaggagtgttccaaggaggattagagtaagaattgctcgcaagagaaatgatgatgaagatgccaaggaagagctgtactctcttgttaccgttgttgagatccctaaggacgagctcaaagggttaggcactaaggttattgatgacgaggattgatttatatctggntgaaacccggagacatacatgtagctttt

SEQ ID NO: 15324 - DNA, 458 bp, Glycine max
  Clone ID: LIB3094-023-Q1-K1-A2
gctgccgaaacccttccggaaccctaaggtaagtgagtaatcagtggttgagaatggtggggagggcgaagggtagaaaggaggaggtggttacacgtgagtacaccattaacctccacaagcgcctccatggctgcacatttaagaagaaagctcctaaagctattaaggagataaggaaatttgcccaaaaggccatggggaccaatgatgtgagggtggatgtgaagttgaacaagtttgtctggagccagggaatcaggagtgttccaaggaggattagagtaagaattgctcgcaagagaaatgatgatgaagatgccaaggaagagctgtactctcttgttaccgttgttgagatccctaaggacgagctcaaagggttaggcactaaggttattgatgacgaggattgatttatatctgtttgaaacccggagacatacatgtagcttttt

SEQ ID NO: 15325 - DNA, 417 bp, Glycine max
  Clone ID: LIB3094-023-Q1-K1-A3
ggcaccggtgaaatcagttatagtcttcttgtgagacaggaggggcacaaacggatgatgtggtcatgttcttggaatccacatggtcacgaatttgcgacaggttcaagggataagacagtgaaaatctgggccatagagagggagtctgtcaagcagcttatgtctttacctcaatttacgagtagtgtaacagcattatcttgggttggtctccatcatcggaagaataatggacttctagctgttggaatggaaaatggccaaatagagttgtggaatctgtcttataacagagcagatgatgggagcatagcagcaccaggtttggctgcttctcttgctgtacgtatagatccttttatatgccatgcgtctaccgtaaaccgtctagcatggaagaaaaatgaggatgat

SEQ ID NO: 15326 - DNA, 402 bp, Glycine max
  Clone ID: LIB3094-023-Q1-K1-A4
ggctgaagcacaactacgagaccagcatggctatccctgtcccactcaccgatcaataccggggggccgtttatctaaactgacgagcgcggtattcccgtccaactcactggtgtcgctaccaccgctaccggcacagcaggttctgggtttgggtcctatggtaccggtgcttacggtggtggtgcaagtgcaaccaccgttgcagatcttttggcaacccaaccaaggagtggcagggaggctagagagcttcgtcgttcctccagttcaagctctagctcgtctgaggatgatgggcaaggtgggaggaggaagaaaggagtgaaggataaaataaaagagaaactaccaggggtaggaggagggaataattataaggagcatgcacacacaacaact

SEQ ID NO: 15327 - DNA, 428 bp, Glycine max
  unsure at all n locations
  Clone ID: LIB3094-023-Q1-K1-A6
gtttggtgtaacctcattcctcttggccattgttgatggagttggcctttaaatttttgaggggcccatatagttatacaatttcattttagggtcttgttgactagtgttcctagactattggttaaggaactaaaaggagaagtttttaatatgtaaatcataggaaagtataaaaaaaaatcatgaagaacgcaattttatgccttccaataaaaaaccttagttccttaacccgtgtcctcgggacacttgttagcatttgccttcattttatatgtatcattagattattataattgaaaaaaatagggcctactttttgacgtcattttattcattttattaggggtcatcaaatactttcacttggtggcagtgtttgtcaaaattgtacacaatttgtattttgttcctncaacaaattt

SEQ ID NO: 15328 - DNA, 450 bp, Glycine max
  Clone ID: LIB3094-022-Q1-K1-F8
cgcagattcaaaggaggatctctcttgcgttttctctaggttttcgctatggcgtcgaagcgaattttgaaggagcttaaggatttgcagaaggatcctccaacatcttgcagtgccggtcctgttgttgctgaagatatgttccattggcaagctacaattatgggtcctccagacagtccctatgcaggaggtgttttcctagtgaccattcatttccctccagattatccctttaagccacccaaggttgcattcaggacaaaggttttccacccaaatataaatagcaatggaagcatttgccttgatatattgaaggagcagtggagccctgctctaaccatttccaaggtgttgctctcaatttgttccctattgacggatccaaatcctgatgatcctttggtccctgaaattgcacacatgtacaagacagataggaacaag

SEQ ID NO: 15329 - DNA, 131 bp, Glycine max
  Clone ID: LIB3094-022-Q1-K1-D5
ttccaactttcttaatatctaataaaccctcacctaatctcctttccaacaatttttcattcttaatttctaattgtacactccctttaacctttcatttatcccctctatatttgtttttactctcaatt

SEQ ID NO: 15330 - DNA, 470 bp, Glycine max
  Clone ID: LIB3094-022-Q1-K1-D9
ttcaagaacaatttattgcacaaatattgactagaagcttactcaagccgatgtcaaacactgctttgaatctatttgtggagaggttcaacggttgaggcttcttggagattaccatcattcaactcgaattgcttttgttgagttcacagtggctgagagtgcaattgcagctctaagctgtagtggggtgattctgggttcactgcccataagggtaagtccatcgaagacaccagttcgatcacgtgctcctcgccctactatgcactgaatcaactttccatgtttctggggttgattgctgctgagatatatttacatatatatatatacatagaaacagctgtgttctaaggaacatgtggcatttagttggtacttttgtcctcatgtcttacagtatggttactttgcttccccttgggggattatggttctctggtttagcttgtaatcggatcgaactt

SEQ ID NO: 15331 - DNA, 61 bp, Glycine max
  Clone ID: LIB3094-022-Q1-K1-E10
aaaaaaaaatatgacagcctaaaataaaattaaaaaataaaaaaaaaaacaaaaacaaagg

SEQ ID NO: 15332 - DNA, 407 bp, Glycine max
  unsure at all n locations
  Clone ID: LIB3094-022-Q1-K1-E11
gcttcgtcctcttacgagcctttcctttcattttatngattcggtgggtgcggttgcatctggaccgagctagaccctgatcggcgtctgcacaccgccggagaacaagatgattgtctgcgtcgccgtcgtctgtcaccagaacaatccgctgtacatacacagcttcacggatgccgatgatgctctcaagctccaccacatcgtccattgctcgctcgatgtggtctacgagcgagtgaacaatcctaaaaagtctggtccgatgcttaatgagacgtttttttgactgctttatcctattgaatactacaaagtatatggatatctgactaatactaaagtgaaatttatcttggtgaccacttatcttgattttaaagatgccgttgtatggaattttttta

SEQ ID NO: 15333 - DNA, 428 bp, Glycine max
  Clone ID: LIB3094-022-Q1-K1-E12
acgcgtccggcttgctcctctgacgagcctttcctttcagtccattgattcggtgggtgcgggtgcagctgagcctagcgtagaccctgatcggcgtcggcacaccgccggagaacaagatgattgtctgcgtcgccgtcgtcggtcaccagaacaatccgctgtacatacagagcttcacggatgccgatgatgctctcaagctccaccacatcgtccattgctcgctcgatgtggtcgacgagcgagtgaacaatcctaaaaagtctgggccgatgcttaatgagacgtttttttgtctgctttatcctattgaaaactactaagtatatggatatctgactaatacgaaggtgaaatttatcttggtgaccactgatctggatgttaaagatgccgatgtaaagaattttttaggaggtttcatg

SEQ ID NO: 15334 - DNA, 230 bp, Glycine max
  Clone ID: LIB3094-022-Q1-K1-E2
aaaacttggtacattggttttaaacctctacactatactcttctactttctacaataaattaattaatctctcaattatttaatcttttaagacattatttacattccaacccttctctatctcataatatatatcataccattctaatttatacattttatcatcaactcaacacccctttataaaacatttttccttcataaagttatcaaatttactccaactcatc

SEQ ID NO: 15335 - DNA, 72 bp, Glycine max
  Clone ID: LIB3094-022-Q1-K1-E3
cccactcctactaaatcaaatacattgctactgctgtactcactacagatctatagtcttctaaccctccat

SEQ ID NO: 15336 - DNA, 447 bp, Glycine max
  Clone ID: LIB3094-022-Q1-K1-E4
cgcgtcgctgctccgtaccagtttcactgcataaatttgagagaaaactctggaaacatgggggtttatcaggacctccttacaggtgatgagcttctctcggactccttccgttacaatgaaattgagaatggaatgctgtgggaagttgaggggaagtgggttgttaagggagcagttgatgttgacattggtgcaaacccttctgctgagggtggagaagatgagggagtcgatgacgcagctgttaaggttgttgacattgttgatacattcagacttcaggagcaacccgcttttgataagaaacagtttgttaccttcatgaagaggtttatcaagaatttgactcccaagctcgatgcagagaaacaagagttgtttaagaagcacattgagggagcaactaaatacctgctctctaagattaaggatttccagtttttt

SEQ ID NO: 15337 - DNA, 359 bp, Glycine max
  Clone ID: LIB3094-022-Q1-K1-E9
tgcttgctcctcttactatcctttcctttcattctataaattccataaatgcaaatgcatctggaaccttttaaaccctaatcggcctacacacacacacgaataacaagataattgtctacgtctccttctactaacaccataacaatccactatacatacacatcttcacagattccgattatgctctcaaactccaccacatcttccattactctctctattttctctaccatcgatttaacaatcctaaaaagtcttttccaatacttaatcatacatttttttgactgctttatcctattgaaaactacaaaatatattcatatcttactaataccaacgttaaatctatcttc

SEQ ID NO: 15338 - DNA, 444 bp, Glycine max
  Clone ID: LIB3094-022-Q1-K1-F1
gacccacgcgttctcaacgattgccgactcatctctataccttgtccaacttctcgatagtgcttgggatgattggcaatccttcaacgtcaatcctccccctccaagtggggaagcaactgcgaatagcaagaatgagagtccttctttgccgtctggggttcaaggattgggcatgggtttacccgatttgagaaccaagaaaaaggggaaacaaaaggcttccaaagacagccacgtgtctgaggcgctcaacaagctcatggagcataccaaagaagcttttaaggggctggagtctatatccccacccactgccgatgatttaagtaaggattccttgatggaagattgggtcaaacaatttgagcagcttgctggctttcaagacatggaatctattttggagaccattatgcatcaacttctgttcaaagagatttt

SEQ ID NO: 15339 - DNA, 376 bp, Glycine max
  Clone ID: LIB3094-022-Q1-K1-F10
cccaggcatcctcagggctcacatgaacttctatgcgactagggacctgtcgtttcctgtcgccgatgtgtaagttacgttcattgatgatactgccgcgttaccgataccttctaatcaaatccaagattcatctccatgcgcacatgacgcttttccagtttgcctcatcccaagaagactgcatatagcgcctattgaaacacgtcatcacctcggattctgataatgacacgcacatgatcaccacattaatcaacacagttattgatccaacgcgcagggaggatgtatcgctctgtatgccaatattgccgcttcataacgctgcttctcaatccgggtataacacgatcattctcttgtcatgcatatc

SEQ ID NO: 15340 - DNA, 425 bp, Glycine max
  Clone ID: LIB3094-022-Q1-K1-F12
cccacgcgtccgcccacgcgtccgcccacgcgtccgcccacgcgtccgtctccctctttctgtcactagctctgtgcattcttctctcgctctctgccttccatcacactcggcatttcctttcccaagatagtagaagatggcagacactgaggatattcaacctcttgtttgtgacaatggaacaggaatggttaaggctggatttgctggagatgatgccccacgtgctgtgtttcccagcattgtaggtcgtcctcgtcacactggtgtgatggttggcatgggccaaaaagatgcatatgttggtgatgaggcacaatctaagaggggtattttgactctcaagtaccccattgaacatggaattgtgagcaattgggatgatatggaaaagatttggcatcataccttctataatgagc

SEQ ID NO: 15341 - DNA, 407 bp, Glycine max
  Clone ID: LIB3094-022-Q1-K1-F3
ctgcgcacgcgcgcggcctgattttctaatcaacttttcatgtcattccattaattgcgagtgtgcggcgtcaaggggacccctctagaccctgatcggcacctgctcaccgggttacaacaagatgattggctgctatgccagcgcctgtgaccataacaattcgatgctcatacacagctttacggaggccgatgatgctctcaagctctaccacatcgtccattgctcgctcgatcttgtctacgagcgactgaacacttctaaaacgtcctctccaatgcttaatgagactcttttgggactgctctatcctattgaaaactacaaagtatatggatatctgactaatacgaatgtgaactttatctaggtgaccaccgatctcgatgataaagatgctgatg

SEQ ID NO: 15342 - DNA, 456 bp, Glycine max
  Clone ID: LIB3094-022-Q1-K1-F5
caaccatggccgactcatctcaagaccttgaccaacttctcgatagtgctttggatgattggcagtccttcaacctcaatcctccccctccaagtggggaagcaactgcgaatagcaagaaggagagtccttctttgccgtcgggggttcaaggattgggcatgggtttacccgatttgagaacgaagaaaaaggggaaacagaaggcttccaaagacagccacgtgtcggaggcgctcaacaagctcagggagcagaccaaagaggctgtgaaggggctggagtctatatccccacccactgccgatgatttaggtaaggatgccttgatggaagattgggtcaaacaatttgagcagcttgctggctctcaggacatggaatctattgtggagaccatgatgcatcaacttctgtccaaggagattcttcatgaaccaatgaaggaaatagcag

SEQ ID NO: 15343 - DNA, 460 bp, Glycine max
  Clone ID: LIB3094-022-Q1-K1-F6
cggacgcgtgggcagacttcccattccaatttccaagtttttcaaagaaggtgagtgatgagcatggagcatttgccaggagaattggtgtccaacgtgctctcaaggttaccatcgaaggtgttgcttctatgcaagtgcgtgtgcaagtcctggttcgatctcataaccgatcctcattttgtttccaattactatgttgtctacaacagtcttcaaagccaagaggagcatctcttggtaattcgaagaccctttttttctggcctcaaaacttacatttctgttctttcttggaacaccaatgaccccaaaaagcatgtttcttctgatgttctaaaccctccctatgaatacaactctgaccacaaatactggaccgaaatcttgggtccttgcaatggcatatactttttagaaggcaatcctaatgtcttgatgaacccttcattgggtgagg

SEQ ID NO: 15344 - DNA, 454 bp, Glycine max
  Clone ID: LIB3094-022-Q1-K1-F7
gcttgctcctcttacgagcctttcctttcagtccattgattcggtgggtgcgggtgcagcggaaccgagctagaccctgatcggcgtcggcacaccgccggagaacaagatgattgtctgcgtcgccgtcgtcggtcaccagaacaatccgctgtacatacagagcttcacggaggccgatgatgctctcaagctccaccacatcgtccattgctcgctcgatgtggtcgacgagcgagtgaacaatcctaaaaagtctgggccgatgcttaatgagacgtttttgggactgctttatcctattgaaaactacaaagtatatggatatctgactaatacgaaggtgaaatttatcttggtgaccacggatctggatgttaaagatgcggatgtaaggaattttttcaggaggttccatgccgcatatgtagatgcagtttcaaacccattccat

SEQ ID NO: 15345 - DNA, 248 bp, Glycine max
  Clone ID: LIB3094-022-Q1-K1-D2
acaattctttattctgattatataaatcaagcactatttggaacctcggaatatgtttaaacgacatttggcaaaatacaataaaggtgcaaaataacacataaagtgcaccatacctatggaaaattttttgagtttctgatcatattgatatccattgatttacaagccaatctatccagatttcgtttttcttagtgtaagacaataattgatttcttcaacattatgcctattgtaacattttc

SEQ ID NO: 15346 - DNA, 453 bp, Glycine max
  Clone ID: LIB3094-022-Q1-K1-B8
cgccatgctgttcttggagctacaaactctcgtcctgatttgatattgactggacaccaagagtaatgcagaatttgctcttgcaatgtgcccaactgaaccctatgttctttcaggaggaaaggacaaaacagtggtgttgtggagtattgaagaccatataacatctgctgccacagactccaaatctggtgggtcaattatcaaacaaaactctaaatctggagaaggcaatgataaaactgctgatggccctactgctggaccacgaggcatttattgtgggcatgaggatacagttgaagatgtgactttctgcccatctagtgcacacgagttctgtagtgttggagatgattcttgtctcatcttatgggatgcacgtgttggctctagccctgtggataacgttgagaaagctcataatgctgatcttcactgtgtggactggaa

SEQ ID NO: 15347 - DNA, 270 bp, Glycine max
  Clone ID: LIB3094-022-Q1-K1-B9
cacaggctgactggacctctctcaactgccctttaccttagccattcactactcatggccggagccatcatgatgtcaaccgggaccataggctctcttatgtcattctactctgagcactactcgatatcatacgtcactatacattgaagatctcgcatgtacattgcatattaactatgaaaaaggctgattgatataacttgatcacattgcataatatggcaactgctgactaattcaatgtctgaatgcataatgcgatgggat

SEQ ID NO: 15348 - DNA, 446 bp, Glycine max
  Clone ID: LIB3094-022-Q1-K1-C1
gaaatgtgaaagccttatcatacagtgtttgcaagatgccaaggtagaagttgaagaagtggatgatgtgataattgtaggcggatgttcttacatcccgagggtgaaaaatcttgttactaacgtatgtaaaggcaaggaactttataaaggcatgaatcctttagaagctgctgtttgcggtgcagcagtggaaggagctattgcttcaggcgtcaatgatccctttgggaacttggacttgttaactatccaagctacacctcttgccattgggattcgagctgatgggaacaagtttgtccctgtaattccgagggatactacaatgccagcacggaaggagctagttttcacaactactcatgacaatcaaactgaggcgttgatccttgtctatgaaggagagggtgaaaaggcagaagaaaaccacctattgggatatt

SEQ ID NO: 15349 - DNA, 333 bp, Glycine max
  Clone ID: LIB3094-022-Q1-K1-C10
gcgtccgcttctcatcattcattcatcttcgttctaatttccatgtctagcaccgttggccataccatggagttcgtagctgcgattgcatggcaggctaataagccgctggtgattgaagaaatgtacgttgcgccaccgcaagcctgtgaattccgtttgaagatcctctacacctctctttgccacactgatgtttacttctgggatgcgaatggccagactccattgtttcctctcatttttgaccatgaagcttctgagattgtggagagcgtaggctaagatgttactcatctgaaaccatttgaccatgcccttcctgtgttcaca

SEQ ID NO: 15350 - DNA, 477 bp, Glycine max
  Clone ID: LIB3094-022-Q1-K1-C11
gcgtcgcttcgatcattcattcatcttcgtctaataccatgtctagcaccgttggccagaccatggagtgcgtagctgcgattgcatgggaggctgggaagccgctggtgattgaagaagtggaggttgcgccaccgcaagccggtgaagtccgtttgaagatcctctacacctctctttgccacactgatgtttacttctgggatgcgaagggccagactccattgtttcctcgcatttttggccatgaagcttcggggattgtggagagcgtatgcgagggtgtgactcatctgaaaccaggtgaccatgccctccctgtgttcacaggagagtgtggagattgcgcccattgcaagtcagaggagagcaacatgtgtgagctactcaggatcaacaccgataggggtgtcatgatccatgatggccaatcaaggttctctaagattggacaacccatacaccatttcttgggaa

SEQ ID NO: 15351 - DNA, 414 bp, Glycine max
  Clone ID: LIB3094-022-Q1-K1-C12
cccacgcgtccggctccctctcctctcttctcttctgttcaaacaatgtcgcaaacgttgcgtgctttcgtcgccaaaaatcttggctgtggaatggcagaaggcaagtgtctcccatgttcaggtgtttctggaagaactgctgctgtatattcctactcttctctaggtcatcacagaattcattcccgtgtccaagttagaggactaaagtgtggctttaggggtgcatcttttgtatgtgaagcaaagaggaacccagatttctcaaggcaaaacaagcacgggtcctccagaagcagaaatcggaacagtgatgggagagacagctttgagagctttgacgacgatatgttttcattaaaaaatggaccggctgtgtctctttcaacctcaggaaaattccaggccact

SEQ ID NO: 15352 - DNA, 453 bp, Glycine max
  Clone ID: LIB3094-022-Q1-K1-C3
tttgaatacattccttgtagtttatactgaaagatgggtttgaagatggcgtgactgatcgtaggcctttccctcatgctccttttggtctcctctgaggtggcatccacgaatacaaaagaggaggcaaatggagtggatgatgccaaatatcccggtggaagctatggagggggttacccaggtcatggcggtggcggttatcctggccatggcggtggcggttatcctggccatggcggtggtggtggctatcctggtcatggtggtggccaccctggtcatggtggcggctaccctggccgtggtggtggatactgtaggcatggctgttgcggtggccggacatacaacggaggttgcagaaggtgctgctataacgctggcgaagctgttgctgcacaaactcaagataagactcacgattaagacgatgcagttctacttaattag

SEQ ID NO: 15353 - DNA, 456 bp, Glycine max
  Clone ID: LIB3094-022-Q1-K1-C4
cccacgcgtccgtcaagcattgcatccctcttgatttgtagtttgttttgtgctttagatagaagttctggcaaatcaagaggggttttaagatcatagtgtgtgttttgcaacaatggctaagttctttgctgctatgatcttggcactctttgccatttccatacttcaaacagtggtaatggctgctaatgaacaaggaggccacttgtatgacaacaagagcaaatatggaagtggaagtgtcaagagttaccaatgcccatcacaatgctcgaggagatgtagccagacccaataccacaagccctgcatgtttttctgtcagaagtgctgcaggacatgcctgtgtgtgccctcggtgtattatggtaataaagctgtgtgcccttgctacaacaactggaagaccaaggtaggaggacccaagtgcccttgagcttcaacttgttcaac

SEQ ID NO: 15354 - DNA, 442 bp, Glycine max
  Clone ID: LIB3094-022-Q1-K1-C5
cggacgcgtgggattttgtaattgtaaggatcaataagttgtttgtttttacttgatggacgacaaaaatgctccacaactcataagatacttgtacccaaaagataacctttgtacattctgtgagaaaatcgatgacgaagtgcccaactaaactttattcccaggacttaattggttttatgcccatctttgaactttgttctcgagactgaaaacatattttttcttctgctgcaggtagtattaagcatctttggtccaccttcaagatgttcaatcattgagcaagaggaagatcgttcatcaacctcttcatagctgtaaactactcattggacgatgggatgtccgcaagtagtgcagaagcatctgtaaagtacagaaatttataggcgaaacagaagataggaaatacagcaattttgacatattcggcccc

SEQ ID NO: 15355 - DNA, 299 bp, Glycine max
  Clone ID: LIB3094-022-Q1-K1-C6
ctacccacgccgacccacacgtgcgcaaaagccatagcattattattcaatggtagcaagatgccaagctacaaatggaagaactggctaatcttaaaatactttacgaacattctgacatccctgcaacaatacatattgtcctaacttatttatctcaacgctctttatcatgtccatacttcttacaaagctgatgactgctaatcaacaatgaaaccacctatttctcaacgcgaccatgattccatttggaactcacactagttacctatgcacattacacctctcgacattat

SEQ ID NO: 15356 - DNA, 434 bp, Glycine max
  Clone ID: LIB3094-022-Q1-K1-C7
cgacccacgcgttcgtttggatacattccttgtagtttatactgattgatgggtttgaagatggcgggactgatcgtaggcctttccctcatgctccttttggtctcctctgaggtggcatccacgaatacaaaagaggaggcaaatggagtggatgatgccaaatatcccggtggaagctatggagggggttacccaggtcatggcggtggcggttatcctggccatggcggtggcggttatcctggccatggcggtggtggtggctatcctggtcatggtggtggccaccctggtcatggtggcggctaccctgtccgtggtggtggatactgtatgcattgctgatgcggtggccggacatacaaccgaagttgcagatagtgctgctataacgctggcgaaactgttgctgtacaaactcaagataagac

SEQ ID NO: 15357 - DNA, 260 bp, Glycine max
  Clone ID: LIB3094-022-Q1-K1-C8
cccacgcgtccggacaattctgagttctgaagatataaagcaagcactatttagaagcgcaggatatggtggacgatatttgtgaaaatagaagagaggtgcaaaataacacagaaagtgcaccatagctaggggagagtttttgagtttctgatcatagtgatatccattgatttacaagccaatctagccggatttcgtttttcttagtgtaagacaataattgatttcttcaacatgatgcctattgtaacattttc

SEQ ID NO: 15358 - DNA, 476 bp, Glycine max
  Clone ID: LIB3094-022-Q1-K1-C9
aattaccggtcgagcacgcgtccgcttctgatcattcattcatcttcgttctaatatccatgtctagcaccgttggccagaccatgaagtgcagagctgcgattgcatgggaggctgggaagccgctggtgattgaagaagtggaggttgcgccaccgcaagccggtgaagtccgtttgaagatcctctacacctctctttgccacactgatgtttacttctgggatgcgaagggccagactccattgtttcctcgcatttttggccatgaagcttcggggattgtggagagcgtatgcgagggtgtgactcatctgaaaccaggtgaccatgccctccctgtgttcacaggagagtgtggagattgcgcccattgcaagtcagaggagagcaacatgtgtgagctactcaagatcaacaccgataggggtgtcatgatccatgatggccaatcaaggttctttaaaaatggacaa

SEQ ID NO: 15359 - DNA, 405 bp, Glycine max
  unsure at all n locations
  Clone ID: LIB3094-022-Q1-K1-D10
ttcaagaacaatttattgcacaaatattgactttaaccttactcaanccnatatcaaacacggctttttatcaatttctaaacaccctcaacactttaaacttctattatattaccatcattcaactctaattgcttttatttaattcacactttctcacatttcaattacatctctaatctgtattataatcattctgcgttcacttcccataattctaattccatccaatacaccacttctatcacatacttcctcccctactatgcactgaatcaactttccatgtttcttatattaattactccttacatatatttacatatatatatatacatataaacaactcttttctaattaacattttccatctacttcatacttttatcctcatatcttacaata

SEQ ID NO: 15360 - DNA, 420 bp, Glycine max
  Clone ID: LIB3094-022-Q1-K1-D11
cccacgcgtccgcgagcttcagcaatggtgtacgtcaaggctcagaaatcaaaagcctacttcaagagagatcaagtcaagttcaagagaagaagagagggaaaaaccgattaccgtgccaggattcggttgattaatcaggacaagaacaaatataacactccgaaataccgatttgtggttcgctttagcaacaaggacattgttgcacaaataatatctgctagcattgccggcgatttagttcttgctacagcatattcacatgagctgccacgatatggtcttgaagtaggacttacaaattatgcagcagcttattgcactggtctcctgttggcccgaagagtcctcaaaacacttgaaatggatgaggagtatgaaggaaatgttgaggctactggagaggattattcagtg

SEQ ID NO: 15361 - DNA, 226 bp, Glycine max
  Clone ID: LIB3094-022-Q1-K1-D12
caagtgggggagaacaatagagggataaaccgattaccgagccaggattctcgttgattaatcaggacatgaacaaatgtatcactccgaaattccgatttgtggttcgctttagcaacaaggacattgatgtacaattaatatctgctaacattgcccgccatttagatcttgctactgcatattcacatgagctgtcacgatattgtcttgaagtaagactttc

SEQ ID NO: 15362 - DNA, 449 bp, Glycine max
  Clone ID: LIB3094-022-Q1-K1-B6
caacagagaggtagtcattgaacaaaaaaaaaatggagcaatctaggcgataggaactgatgggcacaggaagtagtggacgcgtggcacgatagcagcatgtcccgtcgacgggacaagaaaatttggaccgttgaaggctccttggttgcggcgccgttgaccggagccataggttacgtgattcgatgattgcatctaatcatcaatcatcagttaattaatgcaaaattctcgaatcagttgtaaccatgttggtgctggcgctaacttcctttgcacccgccgcgaatccctttcgatttcgaccccgcgcgttctgtcgccgtaagctcaaaatcaataactctctcccaccgccttcttcacccgcagttcctttcgagaatctctttcacagcttaataactcagttcccttccgtcaactcactcaatttcattactccc

SEQ ID NO: 15363 - DNA, 366 bp, Glycine max
  Clone ID: LIB3094-022-Q1-K1-A1
acgcccacgcgtccgcccacgcgtccggtgattgaagctagttagaacaagatgtggcagctacgctacactgcgattttctccgaaatgcttttgattctcacgctcgtcttcaaaaccccactgagaaaactcgtcatcgattccctcgatagtgtgaagcgcggtcgcggtcccgtggaggtttccaccgtgggcgccacattgatggtggatctcgcttcgagcctatacagcatggccaagatccagcaacgcaccctcgaggccggcatagtcaaccgcaccgaccaagtcctcatgtgcaagcacatgctcgaagcttctctcatggggtttctgctggcactctctctgatgattgat

SEQ ID NO: 15364 - DNA, 455 bp, Glycine max
  Clone ID: LIB3094-022-Q1-K1-A10
cccacgcgtccgcccacgcgtccggtgattgaagctagttagaacaagatgttgcagctactctacactgcgattttctccgaaatgcttttgattctcacgctcgtcttcaaaaccccactgagaaaactcgtcatcgtttccctcgatagtgtgaagcgcggtcgcggtcccgtggtggtttccaccgtgggcgccacattgatggtggttctcgcttcgagcctctacagcatggccaagatccagcaacgcaccctcgaggccggcatagtcaaccccaccgaccaagtcctcatgtccaagcacatgctcgaagcttctctcatggggtttctgctgatcctctctctgatgattgatagattgcaccattacataagagagcttcggtcactcaggaagaccatggaagctattaagaaacaaagccgaagttttgaagatggtaaaat

SEQ ID NO: 15365 - DNA, 471 bp, Glycine max
  Clone ID: LIB3094-022-Q1-K1-A11
attgctgctgtttgcctattggtgtactttggggtctctaccctgctggatgcctcatctagcgatggccaaaaatcagatgaagagcacaaggaggcagaactagcagtttctgaattttctggaaatggtgctgggatactatctgctgctagcacagttgccagtacttttctcttagtttttgttgctgaatggggcgacaagtcatttttctccacaattgcccttgcagcagcttcttctccccttggagtcatagctggagcactggctggtcatggtgttgcaactttgctagctgtacttgggggttctttacttgggacgtatttgtcagaaaaggttattgcctacatcggaggtgttctctttctcgtctttgccgcaataaccttatttgaaattgtgcaatatgggttaaaagaaatgcaatataatctccctgcaaagggttcaagaacgtgatga

SEQ ID NO: 15366 - DNA, 365 bp, Glycine max
  Clone ID: LIB3094-022-Q1-K1-A3
cccacgcgtccggacagaagagagcgtcctagtcgcaaccctaataagaagaaccacagctgcaagcgagtgacatccaccagccatgggtcgtatgcacagccgcggtaagggtatatcctcttctgctttgccctacaaaaggacaccccctagctggctcaagatctcttcgcaagatgtggaagaaaatatctgcaagtttgcgaagaagggtttgaccccgtctcagattggtgtcattcttcgagattctcacggtattgctcaggtcaacagcgtcactggcagcaaaatccttcgcatcctcaaagctcacgggcttgcgcctgaaattccagaggatctttaccatttgattaaga

SEQ ID NO: 15367 - DNA, 457 bp, Glycine max
  Clone ID: LIB3094-022-Q1-K1-A4
tttgaatacattccttgtagtttatactgaaagatgggtttgaagatggcgttactgatccgaggcctttccctcatgctccttttggtctcctctgaggtggcatccacgaatacaaaagaggaggcaaatggagtggatgatgccaaatatcccggtggaagctatggagggggttacccaggtcatggcggtggcggttatcctggccatggcggtggcggttatcctggccatggcggtggtggtggctatcctggtcatggtggtggccaccctggtcatggtggcggctaccctggccgtggtggtggatactgtaggcatggctgttgcggtggccggacatacaacggaggttgcagaaggtgctgctataacgctggcgaagctgttgctgcacaaactcaagataagactcacgattaagacgatgcagttctactttaatagtact

SEQ ID NO: 15368 - DNA, 360 bp, Glycine max
  Clone ID: LIB3094-022-Q1-K1-A5
cggacgtatgaatacattccttgtagtttatactgaaagatgggtttgaagatggcgttactgatcggaggccttgccctcatgctccttttggtctcctctgaggtggcatccacgaatacaaaagaggaggcaaatggagtggatgatgccaaatatcccggtggaagctatggagggggttacccaggtcatggcggtggcggttatcctggccatggcggtggcggttatcctggccatggcggtggtggtggctatcctggtcatggtggtggccaccctggtcatggtggcggctaccctggccgtggtggtggatactgtaggcatggctgttgcggaggtcggacatacaac

SEQ ID NO: 15369 - DNA, 336 bp, Glycine max
  Clone ID: LIB3094-022-Q1-K1-A7
tagtcattgatcaaaaaatttatggagcaatctaagcgatggcaactgatgggcacattaagtattgaacccgtggaccaaaacaacattgtcccgtcgacgggacaagaaaatttggaccgttgaaagctccttggttgcggcgccgttgaccggagccatatgttacgtgattcgatgattgcatctaatcatcaatcatcagttaattaatgcaaaattctcgaatcagttgtaaccatgttggtgctggcgctaacttcctttgcacccgccgcgaatccctttcgatttcgaccccgcgcgttctgtccccgtatgctcaaaatcaataac

SEQ ID NO: 15370 - DNA, 437 bp, Glycine max
  Clone ID: LIB3094-022-Q1-K1-A8
acgtttggaacattccttgtagtttatactgattgatgggtttgaagatggcgttactgatccgaggcctttgcctcatgctccttttggtctcctctgaggtggcatccacgaatacaaaagaggaggcaaatggagtggatgatgccaaatatcccggtggaagctatggagggggttacccaggtcatggcggaggcggttatcctggccatggcggtggcggttatcctggccatggcggcggtggtggctatcctggtcatggtggaggccaccctggtcatgtgggctgctaccctgtccgtggtggtggatactgtatgcatggctgatgcggtggccggacatacaaccgacgttgcagaatgtgctgctataacgctggcgaatctgtagctgcacaaactcaagattagactcacgattaaaacgat

SEQ ID NO: 15371 - DNA, 466 bp, Glycine max
  Clone ID: LIB3094-022-Q1-K1-A9
tgaaagtgcaacacagaacaaatgcctcacctattttcatcggacttctattaccttatccagctccacttcataaccaaaatacctcgaaccctctctctaatctactcctaaatccgtaaccacaaaacataatcacacaaattaaattattccaaatatcccatcacaaactactaactaaattacccatatcatttcacttgcacttatcctatccatatcagattcacttatcctttccatatctactcattattactatcctgctcatattaatgtccaccctattcataatcactactaccctatccataatgcttaatactgttatcattacttttactatatccatacatacaacttatgtttcaaaaagtactactataacactaacaaaactttttctgcacaaactcaatataatactcaccattaataccattcaattctacttaaatattac

SEQ ID NO: 15372 - DNA, 347 bp, Glycine max
  Clone ID: LIB3094-022-Q1-K1-B1
caacaaagaggtagtcattgaacaaaaaaaaaatggagcaatctaggcgatagcaactgataggcacaggaagtagtggacgcgtggcacgatagcagcatgtcccgtcgacgggacaagaaaatttggaccgttgaaggctccttggttgcggcgccgttgaccggagccataggttacgtgattcgatgattgcatctaatcatcaatcatcagttaattaatgcaaaattctcgaatcagttgtaaccatgttggtgctggcgctaacttcctttgcacccgccgcgaatccctttcgatttcgaccccgcgcgttctgtcgccgtaggctcaaaatcaataac

SEQ ID NO: 15373 - DNA, 324 bp, Glycine max
  Clone ID: LIB3094-022-Q1-K1-B10
cacaggcttactgccactctttcaaatgacttttacgtgagccattcagtacttacaaacatgacgcagatagaggatacacgtgaccttaggctctcttatatccatctattcacacacttacactatataacacatcactatacaatgtacatcactcattacactaactcaatccttagactatgcaaattgtcatccatggcacacattgcttcatctgctatctgcagacttatactatgcccgcatgcataatgttattgcatcatctgcacacccttcctctgcttcaccaacacccacaaactatcatctatgtac

SEQ ID NO: 15374 - DNA, 315 bp, Glycine max
  Clone ID: LIB3094-022-Q1-K1-B11
cccaggcttactgccactctttcaaatgacttataccttatccattgcctacttacaaacaggaggcttagtgacgttacaagggaccttaggctctcttatatccatccattcacacacttcctctatataacacatcactatacattttacatcactcattacactaactcaatcctcaatctatccaaattctacatccattgatgtcatcttcatgcatctgcttcctcctaacttatactattcccccatgcttaatcttattcccttatctccacaccctccctttccttcaccatcaccctcaaacta

SEQ ID NO: 15375 - DNA, 154 bp, Glycine max
  Clone ID: LIB3094-022-Q1-K1-B12
tttcaaatgacttttaccttatccatttcctacttacatacaggaccatgtttattataaaagtgaccatcagccttctcttatatccatccacccacacactaccactatataacacaacactaaacaattaacattactcattacactaact

SEQ ID NO: 15376 - DNA, 364 bp, Glycine max
  unsure at all n locations
  Clone ID: LIB3094-022-Q1-K1-B3
gaccgcacgcgtacgcaacggagaagtactcattgaacaaaaaaattatggagcaatctatgcaatggcaacttatgagcacatttaaaantggacgcgtcgcactataccagcatgtcccgtcaacggtacaagaaaatttataccgttgaaagctccttgattgcggcaccattgacctaaaccataagttacgtgattcgataattgcatctaatcatcaatcatcatttaattaatgcaaaattctcgaatcatttgtaaccatgttagcgcttgctctaactttctttacacccgccgctaatccctttcgatttccaccccgcgcgttctgtccccgtatgctcaaaatcaataactc

SEQ ID NO: 15377 - DNA, 259 bp, Glycine max
  Clone ID: LIB3094-022-Q1-K1-B5
aaaaaataattgagcaatctatactatggcaactttggcgcacattaaatactggacgcccctcactataacatcatttcccctctaccatacaagaaaatttttaccctttaatgctcctttgtttcagcgccctttaccccatccatatgttacctgattctataattgcatctaatcatcaatcatcaattaattaatgcaaaattctctaatcatatttaaccatttttgttcttactctaacttccttttcacc

SEQ ID NO: 15378 - DNA, 458 bp, Glycine max
  Clone ID: LIB3094-021-Q1-K1-H9
cccacgcgtccgtcaagcattgcatccctcttgatttgtagtttgttttgtgcttgagataagaagttctgccaaatcaagaggggttttaagatcatagtgtgtgttttgcaacaatggctaagttctttgctgctatgatcttggcactctttgccatttccatacttcaaacagtggtaatggctgctaatgaacaaggaggccacttgtatgacaacaagagcaaatatggaagtggaagtgtcaagagttaccaatgcccatcacaatgctcgaggagatgtagccagacccaataccacaagccctgcatgtttttctgtcagaagtgctgcaggacatgcctgtgtgtgcccccggggtattatggtaataaagctgtgtgcccttgctacaacaactggaagaccaaggaaggaggacccaagtgcccttgagcttcaacttgttcaact

SEQ ID NO: 15379 - DNA, 223 bp, Glycine max
  Clone ID: LIB3094-021-Q1-K1-F7
ccccaactcctacccagttatgtctacccgctttcaggcactaggatattttaagctttttaaagtaaagaaaaaccataaaacttgcacaaaatcaaattgcagaccacctttaagaacaaagtgctcgatattgcgtcttcacaagattaaatgagctaatctaccaaaatctttaccatcaattcccaatgccaaaatatctgataactttaaatttaat

SEQ ID NO: 15380 - DNA, 245 bp, Glycine max
  Clone ID: LIB3094-021-Q1-K1-G10
aaacactgccatcacggctattgcgaccatctaaacattcttcctttcaccttcgacacttgccaacagatctttagtttttaacacagatcctacaagttccacacatccttgatatccgaccacaccactacaaaacttttcacactcaaagcatgtttaatatacatctacactaccgtccatgttttactaaactaaaagtcaatcttgcataatcacctcatgtcttcattatataaccc

SEQ ID NO: 15381 - DNA, 419 bp, Glycine max
  unsure at all n locations
  Clone ID: LIB3094-021-Q1-K1-G2
ttttgactctcangtaccgaaaggaccattttgaaaacctatcagactatntatctaatccgagatgatgaacactgttggggtgacaatggtgtctccaacattgaatgttgttgctatgccaaatgcatttacctctcacgggagaaagaaccagatatttggaatgcaatcaagtttgtcacaatgttttaaaacctggtgtttgattagcactacctaaaaatttattactcttacaaatcaattacagaaaatactcgtgctgcttatcctatagagtacattccaaattcaaaattaccttgccttggccctcatccaaagaatgtcatacttttgtcatgtgactcatttttagtacttccacccgttatccatcttaacctttcacataccatttaccatatcatttattg

SEQ ID NO: 15382 - DNA, 256 bp, Glycine max
  Clone ID: LIB3094-021-Q1-K1-G4
tattttatctcccctttcaaacccaaactccctaagctattctaagaacacttatcaaacattaaaggaacaaaatacaaaaccacacctaatagaacccaatccaaacattctcataaaaaaaaaggccccaccaccaagactttgaaacccacccgaaaaataaaccgatctaaagaacctaacaaaccaaaaacacctccaaatacaaccttccgtttcatgtaaacataatataatgatatctctaccaatc

SEQ ID NO: 15383 - DNA, 455 bp, Glycine max
  Clone ID: LIB3094-021-Q1-K1-G6
ggcaaagatggggatgtggcactcttctttggactctcaggtaccggagagaccactctgtcgaccgatcacaataggtatctaatcggagatgatgaacactgttggggtgacaatggtgtctccaacattgaaggtggttgctatgccaaatgcattgacctctcacgggagaaagagccagatatttggaatgcaatcaggtttggcacagtgttggaaaacgtggtgtttgatgagcacgaccgagaagttgattactctgacaaatcagttacagaaaatactcgtgctgcttatcctatagagtacattccaaatgcaaagttaccttgcgttggccctcatccaaagaatgtcatacttttggcatgtgacgcatttggggtactcccacccgttagcaagctaaacctggcacagaccatgtaccatttcattagtggatatactgg

SEQ ID NO: 15384 - DNA, 394 bp, Glycine max
  Clone ID: LIB3094-021-Q1-K1-G7
cccacgcgtccgcccacgcgttcggaagaaaggaatataccttacggatgggggaatcaagaagcatttgggattgcatagtgcgggtggtgacgaagatggaagacaaagagagtgagagagagaaaaatcttcgctttatgtcaatggcacgaagcaggggtttttacagaagtgagcaacgacgccagatatgagaaaagtgagtttatttggggtcatatttgtaaaaagtggttttgtaattataccctctaattcaagagtgaagaaacaagggtgggatggaaatataaatagtacaatttggtcctagtggtggcttaccctttggcctctttttctaattcaaaattttttttaaatatataaaagtggggtgatatgtttactt

SEQ ID NO: 15385 - DNA, 455 bp, Glycine max
  unsure at all n locations
  Clone ID: LIB3094-021-Q1-K1-G8
cccgtatctttctctcttctctctccccgcccaaaccctaactccctaccctattccgcgttctctcatccatcatgaaaggaggaaagtccaagaccgaatctaagagagccgatgccaaacttgctgtgaataagaagggcgccgccaccaagactaggaaacccgccggaaaggggaaggcagcgaaagatcctaacaagccaaagaggcctccaagtgctttcttcgttttcatgtaattataatatattgttatctctacgattcatttgacttccgatgcgctctcttatctttcctccgaataattttatcgtcaaaacttttatccttgtccaattgtaagtccacgcgttctttacctgttgttgtttggttacctcgattgctttattggtaaaattatgtnttttgagtatgctagatctagcttatgcttcgtgaaacttgat

SEQ ID NO: 15386 - DNA, 445 bp, Glycine max
  Clone ID: LIB3094-021-Q1-K1-G9
cccacgcgtccgggaacagaagcttttccagatttgggtaaacactgccagcaccgcgattgcaaccagctcgattttcttcctttcacctgcgacggttgccaacagatcttttgtttggaacacagatcctacaagtcccacgcgtgcctgaaatccgaccacaacagcagaaaggttgttgtttgcgaagcatgttccatgtccatcgagaccaccggccatgtgggacaagacgaggaggcaatcttgcagaagcacctcaagtctggtaattgtgaccctaccaagaagaagaaaccaatttgtcccgtcaagcgttgcagggaggttttgacgttttccaacaccagcacatgtaaaacttgccacattaaggtgtgcctcaagcatcgtttccctgctgatcatgcctgtagcagaggagcttcagcttcttcatcag

SEQ ID NO: 15387 - DNA, 429 bp, Glycine max
  unsure at all n locations
  Clone ID: LIB3094-021-Q1-K1-H10
cccacgcgtccgcccacgcgtccgtccacgcgtccgcccacgcgtccgtctccgtctttctcgtcactagctctgtgcattcttctctcgctctctgccttccatcacactcggcatttcctttcccaagatagtagaagatggcagacactgaggatattcaacctcttgtttgtgacaatggaacaggaatggttaaggctggatttgctggagatgatgccccacgtgctgtgtttcccagcattgtaggtcgtcctcgtcacactggtgtgatggttggcatgggccaaaaagatgcatatgttggtgatgaggcacaatctaagaggggtattttgactctcaagtaccccattgaacatggaattgtgagcaattgngatgatatggaaaagatttggcatcataccttctataatgagcttc

SEQ ID NO: 15388 - DNA, 456 bp, Glycine max
  Clone ID: LIB3094-021-Q1-K1-H11
gttgaattcttatgcaaagatttctgtccatcttctctggatgatattgccgagatgagttggccactatgtcaagaatcagctcccacttctcactccatgagattcactagaagtttgagtgggctttcggtcaggaggtctttagttggttcatttgaggagtctcttttatctggccggttcttatctggaaacaatagcaagaaaatcgatggttttcttgctgtgctaagcattactggtgggaacttttctcctaaatctcagaagcttccattctctgttactagcgtggatggagattgctatctactgtattatgcatcaatagatcttgctggaaattcctcttcaaacaagttaagaggccaattgctgaaacgagggtttggaaaagatgattcccaaattgtaaaaagccgtctgcgtataccaatgaagggacggattcaa

SEQ ID NO: 15389 - DNA, 393 bp, Glycine max
  Clone ID: LIB3094-021-Q1-K1-H12
ccggccgacccacgcgtgcgctgagctcttatgcacagattttgtccatttctctggagatattgccgaggtgagttgtccactatgtcaagaatcaggtcccacttctcactccatgagattcactagaagtttgagtgggctttcggtcaggaggtctttagttggttcatttgaggagtctcttttatctggccggttcttatctggaaacaatagcaagaaaatcgatggttttcttgctgtgctaagcattactggtgggaacttttctcctaaatctcagaagcttccattctctgttactagcgtggatggagattgctatctactgtattatgcatcaatagatcttgctggaaattcctcttcaaacaagttaaaaggccaatt

SEQ ID NO: 15390 - DNA, 435 bp, Glycine max
  Clone ID: LIB3094-021-Q1-K1-H2
cccacgcgttcgcccacgcgtccgcaaaaattacaacaccaatctcacccatttcaaaaaggggccgttagggttactattcgtaaaatggccactcttgttctttaccaattctttctcaaactcttgctcctaatttcagtctttcagctttcctttgctgctaggagactcaaccagctggttcaggaccagtcacagttactccattaccacaacggtcctcttctatacggcaaaatcgccgtgaacctaatctggtatggtcacttcaaaccattccaaaaggccatcatcaccgatttcgttacctcactgtcatccccatcgtctcagagcatccagccatctgttgccacgtggtggaaaaccacggagaagtactaccacctgagtcccaagaacaagaaggctgcttcttctctttctctatca

SEQ ID NO: 15391 - DNA, 439 bp, Glycine max
  unsure at all n locations
  Clone ID: LIB3094-021-Q1-K1-H4
cggacgcgtggggtttcctagtatgcaaggtaaagaatcagcaaatttcaaccccggatggacgagtaacatgttgacaaaagtctaccgagttgcattttgttcttgtaacctcctcaacccactggaggtcgtgatctgtaaattttgagtgaattatacaacaaattcttgaaaaagaaatgattttctcttctgagctgctgcttattgatcgatgaatccagctgcaattattttcgaagatggcaataaaatctcttctgcggtgttatctctttgactgaattccaaattttgtaagtataatagttggctatgaaagagactgtaccaagaagcatagtgtgagagtcagagatcagttgttaagtatgagatgtgagaaccattgttgaatgtatattgctaaatagaagtgcanaagatgattatggat

SEQ ID NO: 15392 - DNA, 428 bp, Glycine max
  Clone ID: LIB3094-021-Q1-K1-H5
cccacgcgtccgagaaggcctgggcttagttgataagcataactgggtgaggaagaaagagagagagtgaagaagatggcgtcgagcggagcggtaccgttttggagggcggcggggatgacgtacataacatactcaaacatatgcgcgaatctgctcaagaattgcctcaaggaaccctacaaggccgaatccctctctcgtgagaagctccattttgttctctccaaatgggtcgacgccaagcctgaaaaacctactattcgttcagacaccccagagcagtgatctggaatagttggaagctattaatgcataaatctttgagatctggaagttcattgtcattttgaacctttctgtgatgtttaattcctttgtttttttctctccatgaaatggaacatgcactggattttgatttgcac

SEQ ID NO: 15393 - DNA, 268 bp, Glycine max
  Clone ID: LIB3094-021-Q1-K1-H6
ggagattctgatttgttctctcagatctgttcttaccgtcgccggaatggaactcaacctgggtcggattcttgggtatcatcgcatcgccattcgttttagcctctcaataagagattttagttcgcttcaaattcgaggtttgatttgaagctgaaagttggaatagcttaactgttgtgtaaaacaaccaacacacactagcatgggaagccaagacaacatcttataattgacatccaattcatttctagcttacaaatctgct

SEQ ID NO: 15394 - DNA, 366 bp, Glycine max
  Clone ID: LIB3094-021-Q1-K1-H8
ctctgctgcgtttgcttctcctccacccattcacaaacgaacacacactgtgattgagaatggggcgtgttcgcacaaagacagtgaagaagtcctcgcggcaagtgatcgagaggtactactctcgcatgacgctggacttccacacgaacaagaaggttctggaagaggtggccatcattccctccaagaggctccgcaacaagatcgcgggattctccacccacctcatgaagcggatccagaagggtcccgtacgtggaatctccctcaagctgcaagaggaagagcgcgagcgccgcatggacttcgtccccgatgtcttcggcatcagaaccgaccagatcgaggtcgacaaggagacgc

SEQ ID NO: 15395 - DNA, 406 bp, Glycine max
  Clone ID: LIB3094-021-Q1-K1-F6
aacgattttacccacttttcccactcaaccccaatgtagcccttatgaactctttccagacattcaaatacttttctaatccgaagcagaatttacgtcctcaaattcataatcagcccatctctctgaaaccactgatgatcataattatgcgtatgtccaataccatctgctttctctactggtccatcaacaattatctacctcttactactcgcaacaagaagaataacgacaaacccaaaatcctaacaatgcagaactttaaattcttggaatcttcaaagtacattagatatcttgccactttactagttgcttatggaatcagcatcaatctttttgacgttacctttaagtctaagctcaaatctcaatttcctaaacccaacaaatactcttcttt

SEQ ID NO: 15396 - DNA, 361 bp, Glycine max
  Clone ID: LIB3094-021-Q1-K1-C8
cgggccgacgcacgcgtccgtctgcctctaaaccctaaacaactctggcttttcttccttcgctcgttgtgctccctcaggtagatctacaatggcggagacagagacgtttgctttccaggctgagatcaaccagctcctcagtctcatcatcaacaccttctactccaacaaggagattttccttcgtgaactcatcagcaacgccttcgatgctttggacaagattcgatttgagagtttgacagataagagcaagctcgatgctcagccagagttgttcattcatattattccaaacaagactaacaatacactgaccattgttgacagtggtattggcatgacccaaactgatttg

SEQ ID NO: 15397 - DNA, 392 bp, Glycine max
  unsure at all n locations
  Clone ID: LIB3094-021-Q1-K1-C9
gcaaacatgtccaccgcaacaactcacgtgctcgcttatcccttccctacctccggtcacgtgatccctctcttagacttcaccaaaaccctagtctctcgcggcgtccatgtcaccgttctggtcacaccctacaacgaagccttacttccaaaaaactattcccctcttctccaaacgcttctcctccccgaacctcagttcccgaacccgaagcaaaacaggctcgtatccatggtaaccttcatgcggcaccaccactacccgatcattatggactgggcccaggcccagcccattcctcctgcggctattatatcagatttcttcctcggttggacccacctcctcgcacgtgacctncacgtgccgcgcgtagtcttctccccttc

SEQ ID NO: 15398 - DNA, 399 bp, Glycine max
  Clone ID: LIB3094-021-Q1-K1-D4
cccaggcttcccactcactctaaaccctaatttactctttctcttcttccttcactctatgggctcccttgggtagatctacaatcgctcatacagacacatttgctttccacgctgatatcaaccatctcctcattctcatcatcaacaccttctactccaacaaggacattttccttcgtgaactcatcagcaacgcctcctattcttttgacaatattctatttgatagtttgacagataacatcaagctcaatgctcatccatagttgttcattcatattattccagacaagactaacaatacactgaccattgttgacagtggtattgtcatgaccaaaactgatttggtgaacaacttgtgtacaattgctatatcttgtaccaatgaattca

SEQ ID NO: 15399 - DNA, 320 bp, Glycine max
  Clone ID: LIB3094-021-Q1-K1-D8
caacttcttctaaattgggggaatatgagttattaaaaggttcacatgactattgtagtcattggccatgtccactcttggaaatccactaccactggtcacctgatttacaagcttggatgcattgacaagcctgttattgaaaagtttgagaaggaagcttctgaaatgaacaagaagtctttcaagtattcctgggtgcttgacaaacttaaggcttaacgtgaaagacgaatcaccattgatattgctttgtggaaatttgaaacaacaaaatattattgcacatttattgatgcccctggacataaggatttcat

SEQ ID NO: 15400 - DNA, 446 bp, Glycine max
  Clone ID: LIB3094-021-Q1-K1-E12
agaaaaagaaaaatcaaaggacggtggtgagtgctgcttctgcttcatcatcatgagagaagaatggcggctactgtgtcttctgcgtggtcaaagcccggcgcgtgggctctcgattccgaggaacacgaagccgaactccttcaacagaacaacgacaagccactcgccgacttcccctccctcgccgccgccgctgccaagcccaagaagaagaaggcccagacctactccctcgccgaattcaccgccaaacccgacacctcctttgccgaccaagatcccgtcgtcctccccaccggcccccgccagcgcaccgccgaggagctcgaccgcacccgcctcggtggcggcttccgcaactacggcgaccgccccaacaggaacaactccggcggcggcgacgagtcttccaattcccgctggggttcatctagggtttctga

SEQ ID NO: 15401 - DNA, 428 bp, Glycine max
  Clone ID: LIB3094-021-Q1-K1-E2
cacctttgttcactcttcttctcttgcggctagggttttagcgcagcttcttctagattgaaggaagatgggtaaggaaaaggttcacatcagtattgtggtcattggccatgtcgactctgggaaatccactaccactggtcacctgatttacaagcttggaggcattgacaagcgtgttattgagaggtttgagaaggaagctgctgagatgaacaagaggtctttcaagtatgcctgggtgctggacaaacttaaggctgagcgtgaaagaggaatcaccattgatattgctttgtggaagtttgaaacaacaaagtattattgcacagttattgatgcgcctggacatagggatttcattaagaatatgattactgggacatcccaagctgactgtgctgttcttatcattgattcgaccactg

SEQ ID NO: 15402 - DNA, 263 bp, Glycine max
  Clone ID: LIB3094-021-Q1-K1-E3
gcaagcatgtccaccgcaacaactcacgtgttcgcttatcccttccctacctccggtcacggtatccttcgcttagacttcaccaaaaccctagtctctcgcggcttccatgtcaccagtctgttcacactctactacgaagccttactttcaaataactattctccttttctacaaacgcttttactacctccatcctcatcaacctaacccttagcaaaacagtctctaatttatggtaactttcattcaatactaacact

SEQ ID NO: 15403 - DNA, 274 bp, Glycine max
  Clone ID: LIB3094-021-Q1-K1-E4
ctactattgaataatcaaaacgattttacccacttttcaaacatcaaaccaatagaacccttatgaaatctttccaaacattcaaatacttttctaatcttattcataatttacttcctatatttaattctttatccatctctcttaaaccaattattatcatatatctttttattatttttacaatctatttcctatacttttatatcaacaattattttcctcttcctactcacatcaaataacaataattataatcccaaaattttaacaa

SEQ ID NO: 15404 - DNA, 445 bp, Glycine max
  unsure at all n locations
  Clone ID: LIB3094-021-Q1-K1-E7
ctttctccgagaacaaaaaataaaacgtgattcgctcttctcttcgaataggccacaaagcgaacaaacgagaagaggagtgagagaagatggggttgtcgttcacgaagctgttcagcaggttgtttgcgaagaaggaaatgaggattctgatggtaggtctcgatgctgctggtaagacaaccatcttgtacaagctcaagcttggagaaatcgtcaccaccatccccaccatcggatttaatgttgagactgtggagtacaagaacatcagcttcactgtgtgggatgttggtggtcaggacaagatccgtcctctgtggaggcattatttccagaacactcagggtctcatttttgtggttgatagcaatgatagggatcgagtggttgaggcaagggatgagtngcacaggatgttgaatgaggatgaacttagagatgc

SEQ ID NO: 15405 - DNA, 381 bp, Glycine max
  Clone ID: LIB3094-021-Q1-K1-E8
ctactattggagaatcaaaacgattttacccactgttcggactcggggccaatggggcccttatgttctctttccagacagtcaaatacttttctaatctgaagcagaatttaagtcctggagttgatggttgggccatctctctgaaaacaatgatgagcataattgtgggtatggggtttgcaatctgtttcctgtacttgtgggtgaacaattatgttcctcttcctactcgtaacaagaagaagaatgagaagcccaaaatgggaacaatggatagcttgaagttcttggtgtcttcaaagtacatcagagatcttgccactttaatggttgcttatggaatcagcatcaatcttgtttaagttacctggaaatcta

SEQ ID NO: 15406 - DNA, 438 bp, Glycine max
  unsure at all n locations
  Clone ID: LIB3094-021-Q1-K1-F1
tgttctctgaagggctttaacgngtttccctctgaaccctaatctagacccattcggcaattcccagggaatttccttgtaaaagaaagagcgaagaggaaaatgcagaatcacaggctgaagcagcagcagcagcagcaacaacaagctcttatgcagcaagctcttctccaacaacagtctctctaccaccctgaccttcttgctcctcctcagattgaaccatatccaagtggaaatttgcctcctggttttgatccaaatacttgccgcaatgtgtatgttgggaacatccgtacacaggtaactgagccgcttttgcaagaagttttctcggatactggcccagtttaaagttgtaagcttatcagaaaagataagtcatcctatggattcattcattactttgatcgcagatctgctgctcttgccatatta

SEQ ID NO: 15407 - DNA, 379 bp, Glycine max
  Clone ID: LIB3094-021-Q1-K1-F12
tctgtgtcattattatgtgcagtcacacattcaaattaatgaatatcgtgagcgtataatcgggccttctgcatcaaagaagcaggggcgacctattaccacttgtataaaggttttagacatgactggtctgaagttatcagccctgaatcagattaagttgctaactattatatcatccattgatgatctgaactaccctgagaagacaaatacttattacattgtaaatgctccatacatattttctgcttgttggaaggttgtgaagccacttttacaagagaggacaagaagaaaaatacaggtgttaccaggttgtggacgagatgagctattgactatcatggattactcgtctctaccacatttctgtcga

SEQ ID NO: 15408 - DNA, 386 bp, Glycine max
  Clone ID: LIB3094-021-Q1-K1-F2
gataactactattgaagaagcaaaacgattctacccactgttcggactcggggccaatgtggcccttatgttctctggccggacagtcaaatacttttctaatctgaggcagaatttaggtcctggagttgatggttgggccatctctctgaaagcaatgatgagcatagttgtgggtatggggtttgcaatctgtttcctgtactggtgggtgaacaattatgttcctcttcctactcgtagcaagaagaagaaggagaagcccaaaatgggaacaatggagagcttgaagttcttggtgtcttcaaagtacatcagagatcttgccactttagtggttgcttatggaatcagcatcaatctttgtgaggttacctggaagtcta

SEQ ID NO: 15409 - DNA, 433 bp, Glycine max
  Clone ID: LIB3094-021-Q1-K1-F3
cccacgcgtccggcgaaaacccccaactccaacctctgttcatcgtctaccgcgctttctggttaaccagaactatgattaagctttttaaagtaaaggaaaagcagagagaacttgcagaaaatgcaagtggcggaccacctgttaagaagcaaagtgctggagagttgcgtcttcacaaagatataagtgagctgaatctaccaaaatcatgtaccatgcaattccccaatggcaaagatgatctgatgaactttgaagtttcaattcgacctgatgatggatattacttaggtggcacatttttgttttcctttcaagtgtctcccatctatccacacgaagcaccaaaggttaagtgtaagacaaaggtctatcatccaaatattgacttggaaggaaatgtttgtctcaacatcttacgagaagattg

SEQ ID NO: 15410 - DNA, 406 bp, Glycine max
  Clone ID: LIB3094-021-Q1-K1-F4
caggaatcccacgccacttgcaattccatctcggtgtttgattctctgcttcgtccttgggttcctcttgggaatcgttaatcgttcgatcgatccatctcccgcttccaatgacaacccctaccgacaacaataacaaccctgcacaggaaaaccctaacaaaaccctagaccccaccgaaccagatccaatccctgccaccgaggacgacgccgccgccgacactaaggactccgacgccaaaacttccccgccgcccgattctggaaacgacgctccgctctccgatattcagaagaaaatgcgccgcgccgagcgattcggcatttccgtccagttgtccgagaaagagaagcgcaattcccgagccgaaagattcggcactggttccgcttcgcaaggatc

SEQ ID NO: 15411 - DNA, 421 bp, Glycine max
  unsure at all n locations
  Clone ID: LIB3094-021-Q1-K1-F5
gtgctgtgctctgaggggccatagtttgggaccctttgaaccctaatctcgacccaaacggattttcccgggaaattgccttggaaaagaaagagcgaagaggaaaatgcagaatcacaggctgaagcagcagcagcagcagcaacaacaagctcttatgcagcaagctcttctccaacaacagtctctctaccaccctggcctccttgctcctcctcagattgaaccatatccaagtggaaatttgcctcctggttttgatccaagtacttgccgcagtgtgtatgttgggaacatccgtacacaggtaactgagccgcttttgcaagaagttttctcgggtactggcccagttgaaggttgtaagcttatcaganaggataagtcatcctatggattcattcattactttgatcgcaga

SEQ ID NO: 15412 - DNA, 433 bp, Glycine max
  Clone ID: LIB3094-021-Q1-K1-C6
caagtggcgagtgaggaatgcagagaaatgagaattcgtcattggctgaggccttctgaggcaggtggccctgccaaacgcagaagctccggcagaaattgccaccgcaaacacgtcgaagacgggtagtaatagcactcgctttcattctcccacattcccaattctgagcgttaagatgagtgagaaagagaaaggcaataatagtgagggacagtcgacgttgctgcacggcaagtacgagcttggtcgtgtgctggggcacggaacgttcgccaaggtgtaccacgcgcggaacctgaatacagggcagcacgtggccatgaaggtggtgggaaaagaaaaggtgataaaggtcggaatgatggatcaggtgaagagggagatctcggtgatgaagatggtgaagcaccaaaacatcgtctaactccac

SEQ ID NO: 15413 - DNA, 65 bp, Glycine max
  Clone ID: LIB3094-021-Q1-K1-A4
cgcgtcgctgctccgtaccagtttcactgcttaaatttgagagaaaactctgcaaacatgggggt

SEQ ID NO: 15414 - DNA, 431 bp, Glycine max
  Clone ID: LIB3094-021-Q1-K1-A5
cccacgcgtccgggaagatggtgctttcggaggaggaaatgggtcgtctgtaccgaataaggaagacggtgatgcaaatgcttcgggacaggggttttctggtgggtgacttcgagatcaacatgtcgaagcatgagttcaagtccaagtacggcgagcacatgaagcgcgaggacctggtcatcaacaagtccaagaaggacaactccggcgaccagatctacgtcttcttccccgacgagcccaaggtcggcgtcaagaccatgaagacctacaccaaccgcatgaactccgaaaacgtctatagagccatcctcgtcacccagaccaacctcacccccttcgcccgcacctgcatcagcgaaatctccttcaaattccacctcgaggtctttcaggaggccgaacttctcgtaacattaaagagcatg

SEQ ID NO: 15415 - DNA, 429 bp, Glycine max
  Clone ID: LIB3094-021-Q1-K1-A7
gttgccgggctctaccgtggtttcaacatctcatgtgttggaatcatcgggtatcgtggggtgtactttggattgtatgattctgttaaaccagttgtcctcacagggtcattgcaggatagcttttttgccagctttgcccttggatggctcatcaccaatggtgcaggtcttgcatcatacccaatagacactgttagaagaagaatgatgatgacctctggtgaagctgtcaagtacaagagctccttggatgcattcacacagatcctcaagaatgagggtgccaagtccttgttcaagggtgccggtgccaacatcctccgtgccgttgccggtgctggtgtgcttgctggttatgacaagttgcaggttcttgtgttcggcaagaagtacggctctggtggggcttaagttctaatgctgagt

SEQ ID NO: 15416 - DNA, 263 bp, Glycine max
  Clone ID: LIB3094-021-Q1-K1-A9
gaatgataaggtatatgaacaatccttaacagatacttctacaagatgttctatgttttcggagaaaaaaattcgctcaaaaaaaacgcgaaaatattttaatcgtaacttagaggatttgttacgtagaaaaagaaagatagattcatattcccatacatataaattatataggaacaaaaaaaatcttggattactttttgaaaaaaaagtagaaatccatttttttggagtaaaaatactattccaattataataataag

SEQ ID NO: 15417 - DNA, 358 bp, Glycine max
  unsure at all n locations
  Clone ID: LIB3094-021-Q1-K1-B1
gtccaagcttcatgcacaattgcacatgcagttcttgtcactaaagaggagggtgtcattggaaccaatggtttgttatatttggttcttttgaatatgacacccttcttcaataatttgagtttaaaacttgagatctatcagcctatgtattatttgattattttgcaagaggttataggttcaaatcttgtgtcattattgtaacaccctctcccaaaacaaaaagatattttgtatatagtatctggattagtgctgntaattaattgcatgtgtgttgaatatctcaaggctaataaggagcgttatacatacagttcaacaaagacanagctactgctacatatggagtgct

SEQ ID NO: 15418 - DNA, 447 bp, Glycine max
  Clone ID: LIB3094-021-Q1-K1-B10
cgcaaattcaaaggaggatctctcttgcgttttctctaggttttcgctatggcgtggaagcgaattttgaaggagcttaaggatttgcagaaggatcctccaacatcttgcagtgccggtcctgttgttgctgaagatatgttccattggcaagctacaattatgggtcctccagacagtccctatgcaggaggtgttttcctagtgaccattcatttccctccagattatccctttaagccacccaaggttgcattcaggacaaaggttttccacccaaatataaatagcaatggaagcatttgccttgatatattgaaggagcagtggagccctgctctaaccatttccaaggtgttgctctcaatttgttccctattgacggatccaaatcctgatgatcctttggtccctgaaattgcacacatgtacaagacagataggaac

SEQ ID NO: 15419 - DNA, 349 bp, Glycine max
  Clone ID: LIB3094-021-Q1-K1-B11
tcagattcataatattatctctttttcgttttctctacgttttcactatttctgctaatcgtaaaattaaaaaactcaatggcctacacaattatcctccaacatcttacattacctttcctattttttcttaaaatatattccatttacaatctacaaatatatcttttccatacataccctattcaaaataatttcattctaattaccattcattatccttcacattattcctttaatccacccaatatttcattcaacacaatattttttcacccatatatatatatcaattttatcattttcctttatatatttaactatcaattctatcctctctataaccatt

SEQ ID NO: 15420 - DNA, 248 bp, Glycine max
  unsure at all n locations
  Clone ID: LIB3094-021-Q1-K1-B3
aaacacccttgtcnaccacttcaaaancaataacataaaaaaacataaaaagacattttagcataatttttggcccctaaaacattttaaaatcatattctcacactctattaaaaccctacttcccttattaccgatacctcatattccaataccttccctatacataaaaacaactccctaactaatcacacttaaaatacccaaaccacaccttaacaattatccccacactttcctcaaataaa

SEQ ID NO: 15421 - DNA, 448 bp, Glycine max
  unsure at all n locations
  Clone ID: LIB3094-021-Q1-K1-B5
aaacacccttgtcgaccacactcaaaattaaatacataaaaaagcataaaaggacaaatagacataaaaaagggaaaataaaacattttgaagtcatatttgcacacttgattaaaggctgtcgtcccttgtgacggatgcgtggggtgctaataccttccctgtgcgtaaaaacaactcccgaactattcacacttaaagttcgtagaccacaccttttcaattttcccgacgctttcctcaaataaaagttggtggcgactccgcgcattttcctttcatggaagacgcacttgtgagtcccgcatcgccctcccgtcaaagggtaggttgcgacagtacttgccctcccgccgaatggtaagttccttaattgaattaactaataacaaaagtgaaactaangctaaaataaactcacaaatcaagctttgtccataaaaatcac

SEQ ID NO: 15422 - DNA, 299 bp, Glycine max
  Clone ID: LIB3094-021-Q1-K1-B8
tccctaaagactcattatgaactatattaaccatccttaggagcaatatatccgtcctcttcaatttattatcacaaagtgtgttacatattataccatagtctttttatcattgttgattcccaacaactcactttatcctattaaagcatcatcaatcacattgttatcataatatcattcatcaattgaaaatcaattacatcatgcatatgctatcaagcaattatatagctttcttccaacaaatttcatgctacaaacactctacccatattaccattaaccttcaccttcac

SEQ ID NO: 15423 - DNA, 259 bp, Glycine max
  Clone ID: LIB3094-021-Q1-K1-B9
cagtcttcatatctaaaaatgttttcacttttccatctcaccatatcttaacgtgctttgcaaaatattcaaaaacctctacatttttaaattaacattcatcttaattgccaaatacttctcattaatctataccattttattataacaatttactacaataatcaatcaaatatctttaataatgttcaaaatcaatccaaatctatcatattgccattacagctcttaaataaacttctaataatgttttcaccat

SEQ ID NO: 15424 - DNA, 459 bp, Glycine max
  Clone ID: LIB3094-021-Q1-K1-C10
aaacacccttgtcgaccacaccaaaattaaaaacataaaaaagcataaaagcacggaaagacgagtaaaaaagggaaaataaaacattttgaagtcatatttgcacacttgattaaaggctgtcgtcccttgtgacggatgcgtggggtgctaataccttccctgtgcgtaaaaacaactcccgaactattcacacttaaagttcgtagaccacaccttttcaattttcccgacgctttcctcaaataaaagttggtggcgactccgcgcattttcctttcatggaagacgcacttgtgagtcccgcatcgccctcccgtcaaagggtaggttgcgacagtacttgccctcccgccgaagggtaggttccttaattgaattaactaataacaaaagtgaaactaaggctaaaataaactcacaaatcaagctttgtccataaaaatcacttaaaaacca

SEQ ID NO: 15425 - DNA, 393 bp, Glycine max
  Clone ID: LIB3094-021-Q1-K1-C11
cccacgcgtccggactgcccaagatgtatcgacaatgttacggtgcgggcaaaagaccatgagtctttctgatcaacaatggtggatacaccatcgaggttgaaattcatgatgggccgtacaatgtgattaagaactggaattacactgggttgattgatgcaatccacaatggtgaagggaaatgctggactgccaaggtgttctgtgaagaggagctagttgaagcaattgccacagccacaggacccaagaaagactccttatgcttcattgaggtgattgttcataaggatgacaccagtaaagaattgcttgaatggggctcaagggtttctgctgccaatagccgtccttccaatcctcagtaatcttcagaaattatcctatgac

SEQ ID NO: 15426 - DNA, 428 bp, Glycine max
  Clone ID: LIB3094-021-Q1-K1-C12
acgcccaggcgttcggactgaccaatttttatcttcaatgttacggtgcgtacaaaagaccatcgtctttctgatcaacaatggtggatacaccatctatgttgaaattcatgatgggccgtacaatgtgattaagaactggaattacactgggttgattgatgcaatccacaatggtgaagggaaatgctggactgccaaggtgttctgtgaagaggagctagttgaagcaattgccacatccacaggacccaagaaagactccttatgcttcattgaggtgattgttcataatgatgacaccagtaaagaattgcttgaatggggctcaagggtttctgctgccaatagccgtccttccaatcctcagtaatcttcataatttatcctatgactaaattgctgcagttgccctttatctctatgaa

SEQ ID NO: 15427 - DNA, 456 bp, Glycine max
  unsure at all n locations
  Clone ID: LIB3094-021-Q1-K1-C2
cccacgcgtccgcgtttccaaatattcacataagagaagaacaatagttctctccctagagactcatgatatgctagataagccatccttaggagcaatatatccgtcctcttcaatttattagcagaaggtgtgttgcgtattagaccatagtctttttgtcattgttgtttcccaacaacgcagtttagcctttgagagcatcagcaatcacatggtgatcagaatatcattcagcaattgaagatcagtggcatcaggcataggctagcaagcaatgatatggctttcttcccagcaaatttcatgctacaaacacctcaccaagatgaccatcaacctncaccttcactcaactcaattataacttcatgtgcacctcaagagtaccatggtggaggagcatcctttcttggcagagatctatgtcattttcagggattgaacttggagaaa

SEQ ID NO: 15428 - DNA, 370 bp, Glycine max
  Clone ID: LIB3094-021-Q1-K1-C3
aatattcacattctagaagatcaacacttctctccctaaagactcattttgaactctataagccatcctaaataacaatatatccttactactcaatttattaccataatgtctccaacatattacaccataacctttccatcatctattacctccaacaacacaatttacccttttatagcatcaactatcacatggcaatcagaatatcatccatcaatttaatatcaatgacatcattcataatctatcaatcaaagatattacttacttcccatcaaatttcatgctacaaacaccttaccaatattaccatcaacctccaccttcactcaactcaattataacttcatgtgcaccttaatactac

SEQ ID NO: 15429 - DNA, 241 bp, Glycine max
  Clone ID: LIB3094-021-Q1-K1-C4
acattatcaaccacccttacaaacactatatccttccactctaatatataaccactactcattcttatcattaacaccttctacttcaacacataaatttttcttacaacaccattaaccactccttatcatcttcaaacacaattccatcttaaaatcatacatataataacaatctctattctcaaccatatatcttcattcatattattccacacaatactaacaatacactaaccat

SEQ ID NO: 15430 - DNA, 372 bp, Glycine max
  Clone ID: LIB3094-021-Q1-K1-C5
ggcaaagatggggatgtggctctcttctttggactctcaggtaccggaaggaccactctggcgaccgatcacaataggtatctaatcggagatgatgaacactgttggggtgacaatggtgtctccaacattgaaggtggttgctatgccaaatgcattgacctctcacgggagaaagagccagatatttggaatgcaatcaggtttggcacagtgttggaaaacgtggtgtttgatgagcacgaccgataagttgattactctgacaaaataattacagaaaatactcttgctgcttatcctatagagtacattccaaatgcaaagttaccttgctttggccctcattcaaagaatgtcatacttttggca

SEQ ID NO: 15431 - DNA, 366 bp, Glycine max
  unsure at all n locations
  Clone ID: LIB3094-021-Q1-K1-A2
cccacgcgtccgtcaagcattgcatccctcttgatttgtagtttgttttgtgctttaaatgaaagttctgccaaatcaagaggggttttaagatcatagtgtgtgttttgcaacaatggctaagttctttgctgctatgatcttggcactctttgccatttccatacttcaaacagtggtaatggctgctaatgaacaaggaggccacttgtatgacaacaagagcaaatatggaagtggaagtgtcaagagttaccaatgcccatcacaatgctcgaggagatgtatccagacccaataccacaagccctgcatgtttttctgtcagaagtgctgcangacatgcctgtgtgtgcccccggggta

SEQ ID NO: 15432 - DNA, 119 bp, Glycine max
  unsure at all n locations
  Clone ID: LIB3094-020-Q1-K1-F3
gtaatgtangtgttccaagcttcattgtaggtaataatgttaggtccaaatagatatgtgatttanttgtaatacaatgattctaatatcctatctccaccattcatattaatatttgc

SEQ ID NO: 15433 - DNA, 370 bp, Glycine max
  Clone ID: LIB3094-020-Q1-K1-F4
cttctccttctcaatcttgtaattctatttcctccaccataatgctgcgcaagcttgtgtcagggccacgcaagaacaagcctggcacagttcccgttcacctcaacgtctatgatctcaccccaatcaacggctatgcctattggcttggccttggagtctaccattctggggttcaagttcatggattggaatatggttttggtgcgcacgagcacgacacaacggggattttcgaagtccaacccaaacactgccctgggttcactttcagaaagtcaattttcatcggaacaacagatctgggtccgaaagatgttcgagcattcatggagaagctggctcaggattactccggcaacacctatca

SEQ ID NO: 15434 - DNA, 407 bp, Glycine max
  unsure at all n locations
  Clone ID: LIB3094-020-Q1-K1-F5
ccgtcgcgcatgagtttgagggtggactctgtctcaagctactcctcttaacctttgggttgattcaactaacgtcatggcgcaggttgcaatgcagctgttagtcaacgcgcgcaccactatggcccttccttaaatgtcatnnntctacatttgtggcacctacntnntgttctcaatctagtacaatgatagggattggaggcttcttgggttgtcactatgcatttattaannntatgaaaaagggttggattggtatatatacttggatgcacatctgcactagtaggggcacacgggattgtttaattcatctgtctggattttattattgcgatgtggatctgcagatttgttcttccttctggcctgctttcccaaagtagtgtactcattcaaggtat

SEQ ID NO: 15435 - DNA, 296 bp, Glycine max
  Clone ID: LIB3094-020-Q1-K1-F7
ttcctcctctttcaaaccttttacttaaattaacataaatcctcatatcgacggtaaaagggaaaaatagaacattttttagtcatattttcacactttattaaagacattatttccttgttacagatgcatggtgagctaatacattccctgttcttatatacaattccccatccattcacacttaaagttcttagaccacaccttaataattttcccgacgcttttcttaaataaaatattatggctaattctttcattttccttttatgtaagacgcactttagattccctta

SEQ ID NO: 15436 - DNA, 119 bp, Glycine max; identical to SEQ ID NO: 12490
  Clone ID: LIB3094-020-Q1-K1-F8

SEQ ID NO: 15437 - DNA, 351 bp, Glycine max
  Clone ID: LIB3094-020-Q1-K1-G10
ctctctgctcctagggtttctccttcgagtgagggaaatggctcccaaaccgccgagtacgggtctgtttgttggactgaacaagggtcacatcgtcaccaagaaggaattgcccccacgcccctcagatcgtaaggggaaaacaagcaagagggtgcactttgtgaggaacctcataagagaggttgctggttttgcaccctatgaaaagcgtataactgagttgctgaaggttgggaaggataagagggcactgaaagttgcaaagagaaagcttggaacccacaaacgtgcaaagaagaagcgtgaggaaatgttcagtgttctcaagaagatgagggctggtggtgc

SEQ ID NO: 15438 - DNA, 358 bp, Glycine max
  Clone ID: LIB3094-020-Q1-K1-G11
gaggagatatatgtacctaaacgaagagatcttgaaagagaatccaaacatgtgtgcttacatggcaccttctttggatgctaggcaagacatggtggtggtagaggtaccaaagctagggaaagaggctgcagtaaaggccataaaggagtggggccagccaaagtcaaagattacccacttgatcttctgcaccaccagtggtgttgacatgcctggtgctgattaccaactgaccaaacaattgggccttcgcccctatgtgaagaggtatatgatgtaccaacaaggttgctttgcaggtggcacggttcttcgtttggccaaggatttggctgagaacaacaagggtgcacgt

SEQ ID NO: 15439 - DNA, 254 bp, Glycine max
  Clone ID: LIB3094-020-Q1-K1-G2
cctcagctaccctgtaccttggttatacactactcatggccagtgcaagcatgatggcaaccggcaccatcgccttacatatgtcagtctactctgggcactacttgctcttcatcgaggaaccatagattgagggtcttgttgtcatcgcctattaactatgaaaaaagttgattgatataacttgatcacattgcataggacggcaacggatgtttaaatcattgtctgatcatatactgccatgggatctg

SEQ ID NO: 15440 - DNA, 195 bp, Glycine max
  Clone ID: LIB3094-020-Q1-K1-G3
ctcgatggctcccaaaccgcctaatacgggtctgcttgctggaccgaacaacggtcacggttttggctagaaggaattggcttcacaccccttacatcgtatggggaaaacaagcactagggagcactttgcgaggaaccacataagagaggttgccggcattgcaccctatgaaaagcgtataactgagtttgc

SEQ ID NO: 15441 - DNA, 295 bp, Glycine max; identical to SEQ ID NO: 11959
  Clone ID: LIB3094-020-Q1-K1-G4

SEQ ID NO: 15442 - DNA, 167 bp, Glycine max
  unsure at all n locations
  Clone ID: LIB3094-020-Q1-K1-G5
cggaatngccggaggcgcgcactcgatcataccaacactattctgtctcaacgattcacattatgctgaaacttcaactgagcgtggatggggatnctggtgattggatatcctgacatacattctcttgaggacgctaatacagattctgaaagtagcatgatgga

SEQ ID NO: 15443 - DNA, 383 bp, Glycine max
  unsure at all n locations
  Clone ID: LIB3094-020-Q1-K1-G6
gcgtccngaggagatatatttacctaaactaagagatcttgaaagagaatccaaacatgtgggcttacgtggcaccttctttggatgctaagcaaaacattgtggtggtatatgtaccaaaactagggaaaaaagcttcatatatagccataaaagaattgggccagccaaaatcaaaaaatacccactttatccttttcaccaccaacggtgtttacattccttgtgcttattaccaacttaccaaacaaattgggctttttccctatttttaaaagtattttaatttcccaccaagtttctttttaagtggaccggtttttttttgcccaaaatttttttttaacaacaaaggggccccctttcctttttttttgttttta

SEQ ID NO: 15444 - DNA, 319 bp, Glycine max
  Clone ID: LIB3094-020-Q1-K1-G8
atggctcccaaaccgcctagtacgggtctgtttgttggactgaacaagggtcacgtcgtcaccaagaaggaattgcctccacgcccctcagatcgtaaggggaaaacaagcaagagggtgcactttgtgaggaacctcataagagaggtagccggttttgcaccctatgaaaagcgtataactgagttgctgaaggttgggaaggataagaaggcactgaaggttgcaaagagaaagctcggaacacacaaacgcgcaaagaagaagcgtgaggaaatgtccagtgttctcaagaagatgagggctggtggtgctggag

SEQ ID NO: 15445 - DNA, 52 bp, Glycine max
  Clone ID: LIB3094-020-Q1-K1-H12
ttcttttattttattactttttttatttttttttatttttattttttttttt

SEQ ID NO: 15446 - DNA, 432 bp, Glycine max
  Clone ID: LIB3094-020-Q1-K1-H2
cagagtttgagtggacctgtctcagctaccctttaccttggttattcactactcatggccattgcaatcatgttgtcaaccggcaccattggcttccttatgtcattctactttgtgcactacttgttctcatcagtaaagatagattgaggttcttgttgtcattgcatattaactatgaaaaaggttgattgatataacttgatcacattgcatagtagggcaacggatgtttaattcattgtctgattttatattgcgatgggatctgcagtttgttctccttctgcctgtttcccaaagtagtgtactcattcaagtattcaactagtgtttgagatcatgtttcaagtattttgttcaagtttctttagaaggttgtaattcaaactctcatctcatttcaatactttaagaaaatgatgttagatt

SEQ ID NO: 15447 - DNA, 296 bp, Glycine max
  unsure at all n locations
  Clone ID: LIB3094-020-Q1-K1-H3
gtttgagtggaccagnctcagctaacctttaccttgggtattcactactcggggccgtggcaatcatgttggcaaccggcaccattggcttccttatgtcattctactttgcgcactaccttgttctcatcagtaaagatagattgaggttcttgttgtcattgcatattaactatgaaaaaggttgattgatataacttgatcacattgcatagtagggcaacggatggttaattcattgtctgattttataatgcgatgggatctgcagtttgttcttcttttgcctgttttcc

SEQ ID NO: 15448 - DNA, 340 bp, Glycine max
  Clone ID: LIB3094-020-Q1-K1-H5
gcgcccacgcgtccggtgaagctggatcattcctccgcggaatcgatgtgaaccgtttaccttctgtggttgattgcgaagaggaagcaggtgtttcatctccaaacagcacggtttctagcgtcagtggaaagcgcagcgagagggaaaccaatggagaagaaaacgacacagacagagcttgttccagaggcatcatcagcgacgaagaagatgctgaaacctctagaaagaaacttagactctccaaagatcagtcaattgtcctggaagagagcttcaaagaacacaacactcttaaccccgtaggtaaacgtacacatgcccaataatttttttt

SEQ ID NO: 15449 - DNA, 373 bp, Glycine max
  Clone ID: LIB3094-020-Q1-K1-H7
cagagtttgagtggacctgtctcaactaccctttaccttggctattcactactcatggccagggcaatcatgttgtcaaccggcaccattggcttccttatgtcattctactttgtgcactacttgttctcatcagtaaagatagattgaggttcttgttgtcattgcatattaactatgaaaaaggatgattgatataacttgatcacattgcatagtagggcaaccgatgtttaattcattgcctgattttatattgcgatgggatctgcacgttgttctccttctgcctgattcccaaagtatcgtactcattcaagtattcaactagtgtttgagatcatgttccatgtattttggtcaagtttcttta

SEQ ID NO: 15450 - DNA, 420 bp, Glycine max
  unsure at all n locations
  Clone ID: LIB3094-020-Q1-K1-F2
aaacacccttgtcgaccacaccaaaattaaaaacataaaaaagcataaaagcacaaaaagacataaaaaagggaaaataaaacattttgaagtcatatttgcacacttgattaaaggctgtcgtcccttgtgacggatgcgtggggtgctaataccttccctgtgcgtaaaaacaactcccgaactattcacacttaaagttcgtagaccacaccttttcaattttcccgacgctttcctcaaataaaagttggtggcgactccgcgcattttcctttcatggaagacgcacttgtgagtcccgcatcgccctcccgtcaaagggtaggttgcgacagtacttgccctcccgccgaagggtaggttccttaattgaaattactaataacanaagtgaaactaaggctaaaataaactcac

SEQ ID NO: 15451 - DNA, 446 bp, Glycine max
  unsure at all n locations
  Clone ID: LIB3094-020-Q1-K1-H8
gcgtccgcanagnttgagtggacctgnctcatctactctttaccttggttattcactactcatggccagtgcaatcatgttggcaaccggcaccattggcttccttatgtcattctactttgtgcactacttgttctcatcagtaaagatagattgaggttcttgttgtcattgcatattaactatgaaaaaggttgattgatataacttgatcacattgcatagtagggcaacggatgtttaattcattgtctgattttatatttgctatgggatcttcaattttgtctccttctgccttttttccaaaataatgtacttcattcaagattttaacctatggttgatatcatgtttcaagaattattggtcaaggttctttaaaaatgttttaatcaaaacctcatctcatttcatatcctttataaaaaatgattttttataat

SEQ ID NO: 15452 - DNA, 321 bp, Glycine max
  Clone ID: LIB3094-021-Q1-K1-A1
aaatgggtcgtctagaccgattagggaagactgtgatgcaaatgcttcgggacaggggttttctggtgggtgacttcgagatcaacatgtcgaagcatgagttcaagtccaagtacggcgagcacatgaagcgcgaagacctggtcatcaacaagtccaagaaggacaactccggcgaccagatctacctcttcttccccgacgagcccaaggtcggcgtcaagaccatgaagacctacaccaaccgcatgaactccgaaaacgtctatagagccatcctcgtcacccaaaccaacctcacccccttcgcccccacctgca

SEQ ID NO: 15453 - DNA, 121 bp, Glycine max
  Clone ID: LIB3094-020-Q1-K1-D6
aaattaaaatctccacattcttgatttttttacttttgaacacacacaaacgttcagtgtttgaatttattacaccatcttcatttatttttctatataataacctaatttttcttatatt

SEQ ID NO: 15454 - DNA, 329 bp, Glycine max
  Clone ID: LIB3094-020-Q1-K1-D7
cccacgcgtccggactgcccaagatgtatcgacaatgttacggtgcgggcaaaaaaccatcatctttctgatcaacaatggtggatacaccatcgaggttgaaattcatgatgggccgtacaatgtgattaagaactggaattacactgggttgattgatgcaatccacaatggtgaagggaaatgctggactgccaaggtgttctgtgaagaggagctagttgaagcaattgccacagccacaggacccaagaaagactccttatgcttcattgaggtgattgttcataaggatgacaccagtaaagaattgcttgaatggggctcaa

SEQ ID NO: 15455 - DNA, 449 bp, Glycine max
  Clone ID: LIB3094-020-Q1-K1-D9
cggacgcgtgggcggacgcgtgggcggacgcgtgggaaaaaacaaaacactgggcctggggaccccgctcactctcaaggtacttcccactgttcccattttatgcccgtactaatctgacccttttagtggcatagattgaggtacaattacaaaagcatattacccgtatcatatcctttctgctgcaaacccccccccccccaaacacactgcgttatttttttcaacaacttctcttctcttgtactactagctagatagatactaaagcttttctatttatttatttatttcccggcactgagttgagttaatttttgtgtcatagtctcaattagctggatgtgacttgtgtggttagggtttacatgcagaaacgcatgtgcttcgtgtctaattcatcctcaaacaaggttttgggacagagatctgaattttattaagta

SEQ ID NO: 15456 - DNA, 260 bp, Glycine max
  unsure at all n locations
  Clone ID: LIB3094-020-Q1-K1-E1
cngacgcgtgggcagactctttgtctgactcttggtaaaaaacaaaacactggggctgggggccccactcactctcaaggtactgcccactgatcccattttatgcccgtactaatctgacccttttagaggcatagatagaggtacaattacaaaagcttattactccgatcatatcctttctgctgcaaacccccccccccccaaacacactgctgtatttttttcaacacctactcttctcttgtactacaagctag

SEQ ID NO: 15457 - DNA, 387 bp, Glycine max
  unsure at all n locations
  Clone ID: LIB3094-020-Q1-K1-E10
caaccatggccgactcatctcaagaccttgaccaacttctcgatagtgctttggatgattttcagtccttcaacctcaatcctccccctccaagtggggaagcaactgcgaatagcaagaaggagagtccttctttgccgtcgggggttcaaggattgggcatgggtttacccgatttgagaacgaagaaaaaggggaaacagaaggcttccaaagacagccacgtgtcggaggcgctcaacaagctcagggagcagaccaaagaagctgtgaaggggctggagtctatatccccacccactgccgatgatttaggtaaggatgccttgatggaagattgggtcaaacaatttgagcagcttgcttgctctcangacatggaatcta

SEQ ID NO: 15458 - DNA, 218 bp, Glycine max
  Clone ID: LIB3094-020-Q1-K1-E11
caaccatgaccgactcataacaagaccttgttcaacttctcaacagacctttgggggattggcagaacttaaacctgaatcttcccttttcaagtgatgaagcaactgctaatatcaagaaagatagttcttatttgccgtcacgtgttcaaggattgggcatcggtttaccccatttgagaactaataaaaatgggaaacaaaaatctttaaaagac

SEQ ID NO: 15459 - DNA, 336 bp, Glycine max
  Clone ID: LIB3094-020-Q1-K1-E12
cccacgcgtccgattttaactgtgtgtgtgtgacaaacgtgaaaagtacttttttttatgattttaactcaactttgctatttataatctactatgcagctgagaagctaaacttgccatacttaagtgcttatctgaattcccttggaaccaattaccggcatggggcaaattttgccactgggggatccaccattaggaagcagaatgaaaccatatttcaatatggaataagtcctttctctcttgacattcagattgtgcaatttaaccagtttaaagcacgcaccaaacaactctatgaagaagccaaggccccacatgaaaagagcaagc

SEQ ID NO: 15460 - DNA, 354 bp, Glycine max
  Clone ID: LIB3094-020-Q1-K1-E2
tgtaagttacatgatgtgaagttgcaaatgctttggagatcaccaacttcaaaatgcagctgctgctacttgtgtggcacttgttcttcgcaatttaggatggagtatttctgataaatctattaggtatggtttagaggatacataccttcttggaaggagtcaatttctaacatctgaagaagctgaggtattaggacttactggatcaacagtactgcttgatggagcccacaccaaagaatctgccaaagctctgatgaataccataaggatggcatttcccaaggctcaattggtttttgttgttgcaatggcaagtgacaaaaatcatggtggatttgctcgagagat

SEQ ID NO: 15461 - DNA, 225 bp, Glycine max
  unsure at all n locations
  Clone ID: LIB3094-020-Q1-K1-E3
nntaagttacattacgagaatttgcttatacttcatagatcaccaacttccaagtgcaactgctcctactctagaccctcttcttcttcgcacaccggctgaaaacaagatgatagatctattaggcatggtttacacgatacataccttcttggcatgcatcaatttccaacatccgaagaagctgatgaattacgactcattggacattgctcgctcgatgag

SEQ ID NO: 15462 - DNA, 407 bp, Glycine max
  Clone ID: LIB3094-020-Q1-K1-E4
atggctcccaaaccgcctagtacgggtctgtttgttggactgaacaagggtcacgtcgtcaccaagaaggaattgcctccacgcccctcagatcgtaaggggaaaacaagcaagagggtgcactttgtgaggaacctcataagagaggtagccggttttgcaccctatgaaaagcgtataactgagttgctgaaggttgggaaggataagagggcactgaaggttgcaaagagaaagctcggaacacacaaacgcgcaaagaagaagcgtgaggaaatgtccagtgttctcaggaagatgaaggctggtggtgctggagacaagaagaaataagtcttatttactgttttccaagatcactagatggacctgtgtattgatggacgagctttcatatttttgctttg

SEQ ID NO: 15463 - DNA, 420 bp, Glycine max
  unsure at all n locations
  Clone ID: LIB3094-020-Q1-K1-E5
ggcggcgctgtggcggacgcgccggcggtggttgaggagaagacggagttcgacgtggtgatcgaggaggtgccgagcaacgctcgaatcgcggtgattaaggcggtgagggcattgacgaacctagcgctgaaggaggcgaaggagttgatcgaagggttgccgaagaagttcaaggaagggatttcaaaggacgaagctgaagatgcgaagaagcaactcgaagaagctggtgccaaggttaccattgcttaaacactgtttagctgcagcatatatgttctgcttcttcttttggtggttggagttgagttcaccagtacactgtaatttcatttccattttgtctggatttcaatcttttatttgtaatgaggaaatatgagnnnctatttttatattaatttttttaatgcgtat

SEQ ID NO: 15464 - DNA, 439 bp, Glycine max
  unsure at all n locations
  Clone ID: LIB3094-020-Q1-K1-E6
cggacgcgtgggtttttcttcaaattcccgtgaagagacactcaaaaagatgaagttatcggtgaagcatgctttggtgtttgtgttaatcggggcgttgtggaacttgcaaagggcagaaggtatccgatttgtgatagacagagacgagtgtttctcccatgatgtgaagtacgaaggtgacactgttcatgtctctttcgttgttattaaggctgattctccctggcattacggcgacgaaggtgtcgatctcgtggtaaaaggaccttctggcgagcaaattcaagattttcgggacaagaccagtgagaagtttgactttgtggctcacaaaatccgggtccataaattctgcttcaccaacaagtctncttatcatgaaactgtcgattttgatgtacatgttggtcacttctctttactttgagcacatgca

SEQ ID NO: 15465 - DNA, 379 bp, Glycine max
  unsure at all n locations
  Clone ID: LIB3094-020-Q1-K1-E8
tgtaagttacatgatgtgaagttgcaaatgctttggagatcaccaacttcaaaatgcagctactgctacttgtgtggcacttgttcttcgcaatttaggatggagtatttctgataaatctattangtatggtttagaggatacataccttcttggaaggagtcaatttctaacatctgaagaagctgaggtattaggacttactggatcaacagtactgcttgatggagcccacaccaaagaatctgccaaagctctgatgaataccataaggatggcatttcccaaggctcaattggtttttgttgttgcaatggcaagtgacaaagatcatgtgggatttgctcgagagattctctcangtgtacatgtggagact

SEQ ID NO: 15466 - DNA, 454 bp, Glycine max
  unsure at all n locations
  Clone ID: LIB3094-020-Q1-K1-E9
gcttcctcctcttacgagcctttcctttcagtccattgattcggtgggtgcgggtgcagcgaaaccgagctagaccctgatcggcgtcggcacaccgccggagaacaagatgattgtctgcgtcgccgtcgtcggtcaccagaacaatccgctgtacatacagagcttcacggaggccgatgatgctctcaagctccaccacatcgtccattgctcgctcgatgtggtcgacgagcgagtgaacaatcctaaaaagtctgggccgatgcttaatgagacgtttttgggactgctttatcctattgaaaactacaaagtatatggatatctgactaatacgaaggtgaaatttatcttggtgaccacggatctggatgttaaagatgcggatgtaaggaattttttcaggaggttncatgccgcatatgtagatgcagtttcaacccattccatg

SEQ ID NO: 15467 - DNA, 194 bp, Glycine max
  unsure at all n locations
  Clone ID: LIB3094-020-Q1-K1-F1
actctttctcctcttacgagccttttctttcagtccattgattcnntnnnttcggtgtcatcggaacctagctggaccctgatcttcttcttcacaccgccctagaacaagatgattgtctgcgttgcctttctcggtcaccataacaatcccctgttcatacagaactttacggaagccgatgattctcttaa

SEQ ID NO: 15468 - DNA, 396 bp, Glycine max
  Clone ID: LIB3094-020-Q1-K1-F10
cccacgcgtccgattttaactgtgtgtgtgtgacaaacgtgaaaagtactttttgttatgagtgtaactcaactttgctatttataatctactatgcagctgagaagctaaacttgccatacttaagtgcttatctgaattcccttggaaccaattaccggcatggggcaaattttgccactgggggatccaccattaggaagcagaatgaaaccatatttcaatatggaataagtcctttctctcttgacattcagattgtgcaatttaaccagtttaaagcacgcaccaaacaactctatgaagaagccaaggccccacatgaaaagagcaagcttccagtgcctgaggagttctctaaggctctctacacatttgacattggtcaaaatgatc

SEQ ID NO: 15469 - DNA, 336 bp, Glycine max
  unsure at all n locations
  Clone ID: LIB3094-020-Q1-K1-F11
cccactcgtccgattttaactgtttgtgtgttacaaacgtgaaaactactcttcgttatgagggtaactcaactgtgctatttataatctactatgcancttaaaagctaaacttgccatacttaaatgcttatctgaattcccttggaaccaattaccgtcatggggcaaattttgccactgggggattcacctttatcaagcataatgaaaccattatttaatatggaataaatcctttcttcttttgacattcagattgtgcaatttaaccagtttaaagcactcaccacacaactttatgaagaagccaaggccccacatgaaaagaacaaa

SEQ ID NO: 15470 - DNA, 354 bp, Glycine max
  Clone ID: LIB3094-020-Q1-K1-F12
ctctctgctcctagggtttctccttcgagtgagggaaatggctcccaaaccgcctagtacgggtctgtttgttggactgaacaagggtcacgtcgtcaccaagaaggaattgcccccacgcccctcagatcgtaaggggaaaacaagcaagagggtgcactttgtgaggaacctcataagagaggttgctggttttgcaccctatgaaaagcgtataactgagttgctgaaggttgggaaggataagagggcactgaaggttgcaaagagaaagcttggaacccacaaacgtgcaaagaagaagcgtgaggaaatgtccagtgttctcaggaagatgagggctggtggtgctgg

SEQ ID NO: 15471 - DNA, 312 bp, Glycine max
  Clone ID: LIB3094-020-Q1-K1-D5
cccacgcgtccggtgatttcagtgagtgatcggtgttcacttgatctcatcataatcgtcagcgtcaattgaagaagatgccgatcagaaacatcgccgtcggaaggcctgaagaggcgactcaccccgacacgttgaaggcggctttggctgagttcatctcaaccttcatcttcgtgttcgccggctcaggctccggcatcgcctacaacaagctcaccgacaacggcgctgccacccctgccggcctcatctccgcctccatcgcccatgcattcgccctcttcgtcgccgtctccgtcggcgccaaca

SEQ ID NO: 15472 - DNA, 382 bp, Glycine max
  Clone ID: LIB3094-019-Q1-K1-H9
cttcttctctggttgattcggatctagagtcttcagtttctcctcgttgttcttcgctttcctgttttcaatttcgattctttcgttaatttaataagatgtttgggagggcaccgaagaagagcgataatacgaggtactacgaaatcctcggcgtctccaagaacgcttcgcaggatgatctgaagaaggcttacaagaaagccgccattaagaatcaccccgacaagggcggtgatcccgagaagtttaaagagctggcgcaagcttatgaggttctgagtgaccctgagaagcgtgagatatatgatcagtatggtgaagatgcgcttaaggaaggaatgggtggtggccgtggccatgatccatttgatatcttttc

SEQ ID NO: 15473 - DNA, 313 bp, Glycine max
  unsure at all n locations
  Clone ID: LIB3094-020-Q1-K1-A11
ggccggccgacgcgtacncttgattatcccaacactttctcttacagtattcacatnatgcttaatcttgggctgagcggtgattatgatgctggtgaaacacattcttacatgcctcctcttgaggactcttatgcaaattctgatggtaccaagatggaataaattgattaaatctgacttaattgcctgttacttttttataaacaatgattgtataaacactctttttactnatgtttatgttttatgaattttccaaattttgaactttggctaattatgtgccgtaatttaatactttctttattgg

SEQ ID NO: 15474 - DNA, 312 bp, Glycine max
  Clone ID: LIB3094-020-Q1-K1-A4
cacgaatcccacgccactcgcaattacatttcggagttagaatctctgcttacccctttcgggcctcttccgaatggataatgagtcgatcgacccatctcgcgcttccaatgacagccgctaccgacgacaataacaaccctgcacaggataaccctaacaaaaccctagaccccgccgaaccggatcctatccctgccaccgaggacgaggccgacgacgacactaaggactacgacgcgcaaactatccctccgacctgattgtgaaacgacgcttcgctctgcgacaatcagaagaaaatgcgccgag

SEQ ID NO: 15475 - DNA, 304 bp, Glycine max
  unsure at all n locations
  Clone ID: LIB3094-020-Q1-K1-A5
gcgattctccaacttgataccgcgttcgctcactctctactcaacttcaattaatcaaatccctcactttggctctcttgtcttcaaatctcaattctattttggaaaatcagaatcaaagacagttaaaaatacagaacaaacatctcactcaacatcaacacttcagatctacgtttccactctcacaacaacgaanaaggaaagaaaaaccgattctacagcgacaacaaggaacgaaagaacgatcgatttctcgaagcgccctcaaaatggcgcgtgcacccttcacttctttcccctt

SEQ ID NO: 15476 - DNA, 340 bp, Glycine max
  Clone ID: LIB3094-020-Q1-K1-A7
cgcttggcttcccatcaccgagtctcgcaatggaaatgctcactaaccttcattggacaaacttgaatctcggtgttgggtgggaggccctcttttttcccatttcttttgcttaattttggctggaattgggggaaatcttcctttaccctatcatatttgtagcaactttacaccgtatcgaattttggttaacttcaccaaacacctccaggtaaaagataccacagatattttgagctagcacaagcagcatttggggaaagattatgagtctggcttgctctcttcccaacttgtttatttgtcaacaggaactgcaacagctttgaatcttatt

SEQ ID NO: 15477 - DNA, 372 bp, Glycine max
  Clone ID: LIB3094-020-Q1-K1-A8
caggaatcccacgccacttgcaattccatctcggtgtttgattctctgcttcgtcctttcattcctcttccgaatcgttaatcgttcgatcgatccatctcccgcttccaatgacaacccctaccgacaacaataacaaccctgcacaggaaaaccctaacaaaaccctagaccccaccgaaccagatccaatccctgccaccgaggacgacgccgccgccgacactaaggactccgacgccaaaactttcccgccgcccgattctggaaacgacgctccgctctccgatattcagaagaaaatgcgccgcgccgagcgattcggcatttccgtccagttgtccgagaaagagaagcgcaattcccgagccg

SEQ ID NO: 15478 - DNA, 388 bp, Glycine max
  unsure at all n locations
  Clone ID: LIB3094-020-Q1-K1-B12
cacacgtcctcccactcttccggtgatataagctagttataacaagatgttacanctactggacactgcgattttctgcgaagatgctttttattctcacactcatcttcaaaaccccactgagaaaactcttcatcgtttccctctatagtgttaatcgcggtcgcggtcccttggtggtttctaccgtgtgcgccacattgatggttgttctcgcttctagcctctacagcatgtccaatatccatcaactcacccctgatgccttcataattcaacctcaccttaccaattctctcatttttcaaactcatgcttgaagctttttttcattgtagtttcctgcatgtttcctctttcttgattattgatttatttgcaccctttc

SEQ ID NO: 15479 - DNA, 128 bp, Glycine max
  Clone ID: LIB3094-020-Q1-K1-B2
cggacgcgtgggggagtcttacatgtgtgccagtcaaccggcgaataaacccctaaagggcaaggaagcttattggtgggatccccctgtgggttggacccgccaccgacccttatcttttgtgaaag

SEQ ID NO: 15480 - DNA, 360 bp, Glycine max
  unsure at all n locations
  Clone ID: LIB3094-020-Q1-K1-B3
cccacgcgnttcgccacccgtccggtgattgaagctagttagaacaagatgttgcagctactctacacttgcgatttcttccgaaatgctcttgattctcacgctcgtcttcaaacccccctgagagaactcgtcatcgcttccctcgatagtgtgaagcgcggtcgcggtcccgtggtggtttccaccgtgggcgccacattgatggtggttctcgcttcgagcctctacagcatggccaagatccagcaacgcaccctcgaggccggcatagtcaaccccaccgaccaagtcctcatgtccaagcacatgctcgaagcttctctcatggggtttctgctgttcctctctctgatgatt

SEQ ID NO: 15481 - DNA, 397 bp, Glycine max
  Clone ID: LIB3094-020-Q1-K1-B6
cccacgcgtccgcccacgcgtccggtgattgaagctagttagaacaagatgttgcagctactctacactgcgattttctccgaaatgcttttgattctcacgctcgtcttcaaaaccccactgagaaaactcgtcatcgtttccctcgatagtgtgaagcgcggtcgcggtcccgtggtggtttccaccgtgggcgccacattgatggtggttctcgcttcgagcctctacagcatggccaagatccagcaacgcaccctcgaggccggcatagtcaaccccaccgaccaagtcctcatgtccaagcacatgctcgaagcttctctcatggggtttctgctgttcctctctctgatgattgatagattgcaccattacataagagagcttcggtcac

SEQ ID NO: 15482 - DNA, 334 bp, Glycine max
  Clone ID: LIB3094-020-Q1-K1-B7
cccacgcgtccgcgttgatctgattggaattcaggatcaatggcaggggcagcctctgctctgttcctcctcgacatcaaaggccgcgtcctcatctggcgcgactaccgcggcgacgtcttcgccctcgacgccgaacgcttcttcaccaaactcatcgaaaaacaagccgatccgcaagctcaagatccggttgtgcacgacaacggcgtgacctacatgttcattcagcacagcaacgtctacctcatgatagccaccagacataactgcaatgccgccagcctcctcttttttctgcaccgcatcgtcgatgtgtttaagcactactttg

SEQ ID NO: 15483 - DNA, 376 bp, Glycine max
  Clone ID: LIB3094-020-Q1-K1-B8
gcatgcgtccggccacgcatactgtgattgaagctagttagaacaaaataattcacctacggtgcgcggcaattttctgcgagatgctattgattctaacgctcgtcttcaaaaccccactgagaaaactcgtcatcggttccctcgatagtgtgaagcgcggacgcagtcccgaggtggattccaccgtgggcgccacattgatggtggttctcgcttccagcctctacagcatggccaagatccaacaactcaccctcgaggccggcattatctaccccaccgaccaagtcctcatgtttcagcacatgctcgaagcttcgctcaatggggttctgctgttcctctctctgatgattgatagaatgcaccatta

SEQ ID NO: 15484 - DNA, 394 bp, Glycine max
  Clone ID: LIB3094-020-Q1-K1-B9
ccttgctaccaacactgagcttaaccgagcttcgcaaagatgaatcgggaaaagttaatgaagatggccggttcggttagaactggaggaaagggtactgtgagaagaaagaagaaggctgtccacaagacaacaaccacagatgacaaaaggcttcagagcaccctgaagagaataggggtgaatgccatccctgctattgaagaggtcaatatctttaaggatgacgtagttatccagtttctaaatcccaaagttcaagcatccattgctgctaatacttgggttgtcagtggttcaccgcatacaaagaagttgcaggatatactccctagcattatccaccaattaggaccagataactttgaaaacctgaagaagctagccgagcaat

SEQ ID NO: 15485 - DNA, 312 bp, Glycine max
  unsure at all n locations
  Clone ID: LIB3094-020-Q1-K1-C1
cgaccacgcgttcccttgctaccaacactgancttattcgagcttcgcaaaaataaatcttnaaaacgtaatggagatagccgggtgggttagaactggatgaaagggtactgtgagaagaaagaagaaggctgtccacaagacaacaaccacagatgacaaaaggcttcagagcacccttgaaagaatatgggagaatgccatccctgctattgaagaggtcaatatctttaaggatgacatatttatccagtttctaaattccaaagtttaagcattcattgcttgtaatacttgggttgacaagtggtt

SEQ ID NO: 15486 - DNA, 434 bp, Glycine max
  unsure at all n locations
  Clone ID: LIB3094-020-Q1-K1-C4
cggacgcgtgggcagacttcccattccaatttccaagtttttcaaagaaggtgagtgatgagcatggagcatttgccaggagaattggtgtccaacgtgctctcaaggttaccatcgaaggtgttgcttctatgcaagtgcgtgtgcaagtcctggttcgatctcataaccgatcctcattttgtttccaattactatgttgtctacaacagtcttcaaagccaagaggagcatctcttggtaattcgaagaccctttttttctggcctcaaaacttacatttctgttctttcttggaacaccaatgaccccaaaaagcatgtttcttctgatgttctaaaccctccctatgaatacaactctgaccacaaatactggaccgaaatcttgggtccttgcaatggcatatactttttagaanggcatcctaatgt

SEQ ID NO: 15487 - DNA, 415 bp, Glycine max
  Clone ID: LIB3094-020-Q1-K1-C5
ggcggcgctgtggcggacgcgccggcggtggttgaggagaagacggagttcgacgtggtgatcgaggaggtgccgagcaacgctcgaatcgcggtgattaaggcggtgagggcattgacgaacctagcgctgaaggaggcgaaggagttgatcgaagggttgccgaagaagttcaaggaagggatttcaaaggacgaagctgaagatgcgaagaagcaactcgaagaagctggtgccaaggttaccattgcttaaacactgtttagctgcagcatatatgttctgcttcttcttttgttggctggagttgagttcaccagtacactgtaatttcatttccattttgtctggatttcaatcttttatttgtaatgaggaaatatgagctcctaattttagtataatttttttaatg

SEQ ID NO: 15488 - DNA, 279 bp, Glycine max
  Clone ID: LIB3094-020-Q1-K1-D12
agaaaatgagaatctccagattcttgatgttcggacttttgaacacacagaagtttgcaggagtgaatttatgacaccatctgcatttatttttctatatgagaaccaattgttcctgacatttcgaaatcgaactgtggctgtgtggaactttcgtggagagctggtaacttcttttgaggatcacctcttgtggcattctgactgccacaccaaccatatatatattacccgggaccaggatcttatcatatcctactggaaagctgattctgatga

SEQ ID NO: 15489 - DNA, 301 bp, Glycine max
  Clone ID: LIB3094-020-Q1-K1-D3
aaaaacaaaacactggggcgtggggaccccactcactctcaaggtacttcccactgttcccattttatgcccagactaatctgacccttttagatgcatagattgaggtacaattacacaagcatattacccgtatcatatactttctgctgcaaaccccctcccccccaaacacactgcgatattttttttaacaactattattctcttgtactactaactagaaagatactaaaacccctccatccaattacttatttccccgcacttacttgaggtaattttatggccataatcccaa

SEQ ID NO: 15490 - DNA, 460 bp, Glycine max
  Clone ID: LIB3094-019-Q1-K1-H7
tgaatgtgtgatgatttattaatttctttcctgtgacttggtttgttgtcattctgaatggtgttgctaatacatgcgttgttggagttcaattggttgctttgctggctctttttttgcacttagtttttatttttatttccatcaacttgatttgtagttttctctttgagtttaattcccctcaaggtttgaattgtatttgcttttagagtttaattcaaattcactaactatgataaaaatctgatcataaattatcaattatgattagagtattgatttttataataattatttaaaaatcgtatctaaaataattttttagaataattattccataataattatttattcacttgaaatttattaaaaacttttacacctgtatttaatttttaattattctatttttttagacttgttacttttttaataattaatttattaatttttattt

SEQ ID NO: 15491 - DNA, 287 bp, Glycine max
  Clone ID: LIB3094-019-Q1-K1-E12
gaagctgctagagtcaagaaatggtgcatgtctagtcatacgattcggaggagcttctacgactactcagcataaccataatacctacaacactgatgcttatctactacgaaattcgtaacctggaaaagttatcgtcagaggaagcttctgcacagatgccgtcgccaatttcgaccggaactaaagtgacgccttcacctgcactgaagtatgccgcactcgcgtacttgagtcaggaccaggatagtgtcaaatctaagatatatgtattaatggacgtaatc

SEQ ID NO: 15492 - DNA, 405 bp, Glycine max
  Clone ID: LIB3094-019-Q1-K1-E5
gcttcctcctcttacgagcctttcctttcagtccattgattcggtgggtgcgggtgcagcgaaaccgagctagaccctgatcggcgtcggcacaccgccggagaacaagatgattgtctgcgtcgccgtcgtcggtcaccagaacaatccgctgtacatacagagcttcacggaggccgatgatgctctcaagctccaccacatcgtccattgctcgctcgatgtggtcgacgagcgagtgaacaatcctaaaaagtctgggccgatgcttaatgagacgtttttgggactgctttatcctattgaaaactacaaagtatatggatatctgactaatacgaaagtgaaatttatcttggtgaccacggatctggatggtaaagatgccgattgtagggatttttt

SEQ ID NO: 15493 - DNA, 399 bp, Glycine max
  Clone ID: LIB3094-019-Q1-K1-E8
cccacgcgtccgttctaatctcattctccttctgttcaaacactctctctcatggcatcagataagaagattaggatcggcatcaacggatttggaaggattggccgtttggtggccagggttgcccttcaaaggaatgatgttgaacttgttgctgtcaacgatcctttcatcaccactgattacatgacatacatgttcaagtacgacaccgttcatggccagtggaagcattttgatgtgaaggtgaaggactctaagacccttctctttggtgagaagcccgtcaccgtttttggaatcaggaaccctgaggaaattccatggggtgaggttggtgctgattatgttgttgagtcaactggtgtattcactgacaaggacaaggctgctgctcac

SEQ ID NO: 15494 - DNA, 442 bp, Glycine max
  Clone ID: LIB3094-019-Q1-K1-E9
attgctgctgtttgcctattggtgtactttggggtctctaccctgctggatgcctcatcgagcgatggccaaaaatcagatgaagagcagaaggaggcagaactagcagtttctgaattttctggaaatggtgctgggatactatctgctgctagcacagttgccagtacttttctcttagtttttgttgctgaatggggcgacaagtcatttttctccacaattgcccttgcagcagcttcttctccccttggagtcatagctggagcactggctggtcatggtgttgcaactttgctagctgtacttgggggttctttacttgggacgtatttgtcagagaaggttattgcctacatcggaggtgttctctttctcgtctttgccgcaataaccttatttgaaattgtgcaataggggttaaaagaaatgcaatataatc

SEQ ID NO: 15495 - DNA, 422 bp, Glycine max
  Clone ID: LIB3094-019-Q1-K1-F10
gttctagatcgcgatctagaactagccaattcactctttttcttctcgccctctgccgtgggaggagtttgtaacatggctgctctaccaacggcggagcttagtgacgcaaatgcaacacatgtagcaagttgtgatgtgagggtgttgcatccagtgttcaaggtttacggtggggccaccgcgttctccggccccgttgtcaccgtgaaggtgtttgaagacaacgtgttggtgaaggagcttcttgagacgaaaggcgaaagaagagtattggttggtgatggaagaagaagcttgaagtgtgcattggttggaaggaatttggcactgattgcacataacatgggttgggctgggattgtggtgaatggctgcatcagagatgtggatgagatcaatgcaagtgatattggcgtcag

SEQ ID NO: 15496 - DNA, 458 bp, Glycine max
  Clone ID: LIB3094-019-Q1-K1-F11
gaaatgtgaaagccttatcatacagtgtttgcaagatgccaaggtagaagttgaagaagtaaatgatgtgataattgtaggcggatgttcttacatcccgagggtgaaaaatcttgttactaacgtatgtaaaggcaaggaactttataaaggcatgaatcctttagaagctgctgtttgcggtgcagcagtggaaggagctattgcttcaggcgtcaatgatccctttgggaacttggacttgttaactatccaagctacacctcttgccattgggattcgagctgatgggaacaagtttgtccctgtaattccgagggatactacaatgccagcacggaaagagctagttttcacaactactcatgacaatcaaactgaggcgttgatccttgtctatgaaggagagggtgaaaaggcagaagaaaccacctattgggatatttcaagataatggg

SEQ ID NO: 15497 - DNA, 406 bp, Glycine max
  Clone ID: LIB3094-019-Q1-K1-F12
gaagtggcgagagtgaataaatgacgcaagacttgacattggatttggaggagcttaaccgactgcacagcatatccaaaagacctggaaccatatctcttctctcctccgaaatgcgtatcctgtaaaagttatcgtcagacgaagcttctgcgcagattccggcgccgatgtcgaccggaactaaagtggcgccttcacctgcgctgaagtatgcagcactcgcgtcgttcacttgggaccaggatcgagacaaagttcagatatatgcgttaatggacggaatcgatgagactaaggttgaattcgagtttaagacgatgccattcgatgataagctccatgatgttcaagggaagaactaccgatgtgcaatatcaaaagtgcacaatgagatagtaccaga

SEQ ID NO: 15498 - DNA, 346 bp, Glycine max
  Clone ID: LIB3094-019-Q1-K1-F3
cccacgcgtccgggagaagcagaaggagcaaaagcaatggcgccgaagaagccgagaaccacgacaaggaaccctgatttggttagggggattggcaagtattcgaggtcgcagatgtaccacaagaggggcatctgggccatcaaggccaaaaacggtggcgttttgccccgccacgatcccaagcccaagcccgaggccccggcccagaagccgcccaagttctaccccgcggacgatgttaagaagcccctcgtcaacaagcacaagcccaaacccgcgaaactcagggctagcattactccagggactgtgttgatcctgcttgctgggaggttcaagggaa

SEQ ID NO: 15499 - DNA, 359 bp, Glycine max
  Clone ID: LIB3094-019-Q1-K1-F4
cccacgcgtccgggagaagcagaaggagcaaaagcaatggcgccgaagaagccgagaacggcgacaaggaaccctgaggtggttagggggattggcaagtattcgaggtcgcagatgtaccacaagaggggcatctgggccatcaaggccaaaaacggtggcgttttgccccgccacgatcccaagcccaagcccgaggccccggcccagaagccgcccaagttctaccccgcggacgatgttaagaagcccctcgtcaacaagcacaagcccaaacccgcgaaactcatggctagcattactccagggactgtgttgatcctgcttgctgggaggttcaagggaaagaaggttgtttt

SEQ ID NO: 15500 - DNA, 276 bp, Glycine max
  Clone ID: LIB3094-019-Q1-K1-F9
gttctagatcgcgatctagaactagccaattcactctttttcttctcgccctctgccgtgggaggagtttgtaacatggctgctctaccaacggcggagcttagtgacgcaaatgcaacacatgtagcaagttgtgatgtgagggtgttgcatccagtgttcaaggtttacggtggggccaccgcgttctccggccccgttgtcaccgtgaaggtgtttgaagacaacgtgttggtgaaggagcttcttgagacgaaaggcgaaggaagagtattg

SEQ ID NO: 15501 - DNA, 449 bp, Glycine max
  unsure at all n locations
  Clone ID: LIB3094-019-Q1-K1-G12
cccacgcgtccggactgcccaagatgtatcgacaatgttacggtgcgggcaaaaaaccatcatctttctgatcaacaatggtggatacaccatcgaggttgaaattcatgatgggccgtacaatgtgattaagaactggaattacactgggttgattgatgcaatccacaatggtgaagggaaatgctggactgccaaggtgttctgtgaagaggagctagttgaagcaattgccacagccacaggacccaagaaagactccttatgcttcattgaggtgattgttcataaggatgacaccagtaaagaattgcttgaatggggctcaagggtttctgctgccaatagccgtccttccaatcctcagtaatcttcagaatttatcctatgactaaatngctgcagttgccctttagctctatgaaagtgaggatcatttgagatgatgc

SEQ ID NO: 15502 - DNA, 349 bp, Glycine max
  Clone ID: LIB3094-019-Q1-K1-G7
gaaattttggttgagatgggaaagaagaacaaagtgaaggaaaatggaggcaaagagcattgctcctcgactctttttgtctccaacttgccctattccttttccaattctcagttggaggagacgttcagtcaggttgggcctgtcaggcgttgcttcatggtcacacagaaaggatcagctcaacatcgtggtttcggttatgtccaatttgccgttgaggaagacgctaaccgtgctattgagctgaagaatggtacatctgttgaaagccggaaaattgtagtgaagcatgcaatgcctcgtccctcccgttgagaacggcaatcaaaaccaaatcaaggccaga

SEQ ID NO: 15503 - DNA, 431 bp, Glycine max
  Clone ID: LIB3094-019-Q1-K1-G8
cagagtttgagtggacctgtctcagctaccctttaccttggttattcactactcatggccattgcaatcatgttgtcaaccggcaccattggcttccttatgtcattctactttgtgcactacttgttctcatcagtaaagatagattgaggttcttgttgtcattgcatattaactatgaaaaaggttgattgatataacttgatcacattgcatagtagggcaacggatgtttaattcattgtctgattttatattgcgatgggatctgcagtttgttctccttctgcctgtttcccaaagtagtgtactcattcaagtattcaactagtgtttgagatcatgtttcaagtattttgttcaagtttctttagaaggttgtaattcaaactctcatctcatttcaatactttagaaaaatgatgtaggat

SEQ ID NO: 15504 - DNA, 211 bp, Glycine max
  Clone ID: LIB3094-019-Q1-K1-G9
gaaatgtgaaagccttatcatacagtgtttgcaagatgccaaggttgaagttgaagaaggggatgatgtgatgattgggggcggatgttcttacatcccgagggttgaaaaatcttgttactaacgtatgtaaaggccaggaactttattaaggcatgaattctttagaaactgctgtttgccgtgcaacagtggaaggagctattgcttt

SEQ ID NO: 15505 - DNA, 359 bp, Glycine max
  Clone ID: LIB3094-019-Q1-K1-H1
caaagacatccttctcctggatgtggctcccctcactctcggaattgaaactgttggtggagtcatgacaaagttgattcccagaaacactgttatcccaaccaagaaatctcaggtgttcaccacctatcaggaccagcagactacagtctccattcaggttttcgaaggcgagaggagtctcacaaaggattgccgccttcttgggaaatttgatctgtctggaattccttcagccccaaggggtacgcctcaaattgaagtgaccttcgaagttgatgccaacggcattctaaatgtgaaagcagaagacaagggcactggttaatcagaaaagatcaccattaccaaccaaaagg

SEQ ID NO: 15506 - DNA, 166 bp, Glycine max
  Clone ID: LIB3094-019-Q1-K1-H12
cttcacgaacgcttaacacgatacatctgaagagggcctactcgaaggcctgcgcgcggatcccctatacgaggactgtgataactacattgatatatagctgcggtcatgagacgatgaccctggtgaccgctacaagcgtgtggtatatggtcgagtttgagta

SEQ ID NO: 15507 - DNA, 184 bp, Glycine max
  unsure at all n locations
  Clone ID: LIB3094-019-Q1-K1-H2
caagttcccagagttaagaaatggcgcatgacttggcattggatttggaggagctatgcgacctncgcatcatctccggaagacgctcaaccctatctcttctctcctacgaaattcgtatcctcgcaaagttatcgccagaggtagcttctgcgcacattcctgcgcctatttcaaccgtctc

SEQ ID NO: 15508 - DNA, 409 bp, Glycine max
  Clone ID: LIB3094-019-Q1-K1-E11
attgctgctgtttgcctattggtgtactttggggtctctaccctgctggatgcctcatcgggcgatggccaaaaatcagatgaagagcagaaggaggcagaactagcagtttctgaattttctggaaatggtgctgggatactatctgctgctagcacagttgccagtacttttctcttagtttttgttgctgaatggggcgacaagtcatttttctccacaattgcccttgcagcagcttcttctccccttggagtcatagctggagcactggctggtcatggtgttgcaactttgctagctgtacttgggggttctttacttgggacgtatttgtcagagaaggttattgcctacatcggaggtgttctctatctcgtctttgccgcaataaccttatttgaaattg

SEQ ID NO: 15509 - DNA, 434 bp, Glycine max
  Clone ID: LIB3094-019-Q1-K1-B9
cccacgcgtccgcgagcttcagcaatggtgtacgtcaaggctcagaaatcaaaagcctacttcaagagatatcaagtcaagttcaagagaagaagagagggaaaaaccgattaccgtgccaggattcggttgattaatcaggacaagaacaaatataacactccgaaataccgatttgtggttcgctttagcaacaaggacattgttgcacaaataatatctgctagcattgccggcgatttagttcttgctacagcatattcacatgagctgccacgatatggtcttgaagtaggacttacaaattatgcagcagcttattgcactggtctcctgttggcccgaagagtcctcaaaacacttgaaatggatgaggagtatgaaggaaatgttgaggctactggagaggattattcaatggaacctgccgagag

SEQ ID NO: 15510 - DNA, 250 bp, Glycine max
  Clone ID: LIB3094-019-Q1-K1-C1
aatacccggcccgaccgcacgcgtccggaagttgctagagtgaataaatggcgcattacttgtcattggatttggaggagcttcgcgatctgcgcatcatctccgaatgacctctaaccctctctcttctctcctccgaaattcgcaacctcgaaaagttatcgtcagaggaagcttctgctcagattcctgctcctatttcgaccggaactaaagttgctccttcacctgctctgaaatattcagcact

SEQ ID NO: 15511 - DNA, 121 bp, Glycine max
  Clone ID: LIB3094-019-Q1-K1-C10
cccacgcgtccgccacgcgtccggtttctggtggaggatccaacttcagagcaattcatggggccttcaaaaggggatcacttcatggagatgttcttgtgttggtcacaaattaaaatga

SEQ ID NO: 15512 - DNA, 52 bp, Glycine max
  Clone ID: LIB3094-019-Q1-K1-C11
acgaccactccttctcccactcttcctctccatttacaatatcaaacttaat

SEQ ID NO: 15513 - DNA, 409 bp, Glycine max
  Clone ID: LIB3094-019-Q1-K1-C12
cccacgcgtccggccactcgtccggacgtgtgtaatatacctaacggatggtggaatcagggagcatttgagattgcatagtgcgtgtggtgacgaatatggaagacaaagagagtgagagagagaaaaatcttcgctttatgtcaatggctcgaaacatgggtttttacagaagtgagcaacgacgacagatatgagaaaagtgaccttatttgacgacatatttggaaaaagtggttttagaattataccctctaattcaagagtgaagaaacaatggagggattgaaatataattagtacaatttggtcctagtggtggcttaacctgaggccattttttctaattcagaattgttacttcaatatatatcactggggtgatatgtatacttaaaaaaagggcggc

SEQ ID NO: 15514 - DNA, 144 bp, Glycine max
  Clone ID: LIB3094-019-Q1-K1-C2
acgcgtccggaagttgctagagtgaagaaatggcacatgtacttggcattggatttggaggagcttcgccggcttcacagcatcgccggaagacctctaaccctatctcttctctcctccgaaattcgtaacctctaaaagtta

SEQ ID NO: 15515 - DNA, 422 bp, Glycine max
  Clone ID: LIB3094-019-Q1-K1-C3
attgtatcttgttattttttataaaagggaggccaatgccttatattgtaattatacgtgggaatgttgctccagcaaaatcaccccacaacaaatgtttacattcataaggtggttcatcaaaccaatgtattattccccaggataactgtcatcaacatttaatcagcagcataattgtcttaaaataaaatcttctttgtcttcaaagatacactccaagtttaaactattcatttaaagacaatccaaatggtgacattctcgtctgggtggtgtagttggttatcacgctagtctcacacactagaggtccccggttcgaaccccggctcagacatttcaatattttgtagcccatgtctgtaaattactttgagatatgtttttagggttttttttaatgctttggaataaaattt

SEQ ID NO: 15516 - DNA, 279 bp, Glycine max
  Clone ID: LIB3094-019-Q1-K1-C4
attgtatcttgttattttttataaaagggaggccaatgccttatattgtaattatacgtgggaatgttgctccagcaaaatcaccccacaacaaatgtttacattcataaggtggttcatcaaaccaatgtattattccccaggataactgtcatcaacatttaatcagcagcataattgtcttaaaataaaatcttctttgtcttcaaagatacactccaggtttatactattcatttaaagacaatccatatggtgacattctcgtcttggtggtgt

SEQ ID NO: 15517 - DNA, 272 bp, Glycine max
  Clone ID: LIB3094-019-Q1-K1-C7
gcgattgtatcttgttattttttataaaagggatgccaatgccttatattgtaattatacgtgggaatggtgctccagcagaatcaccccacaacaaatgtttacattcataaggtggttcatcaaaccaatgtattattccccatgataactgtcatcaacatttaatcagcagcataattgtcttaaaataaaatcttctttgtcttcaaagatacactccaggtttaaactattcatttaaagacaatccaaatggtgacattctcgtc

SEQ ID NO: 15518 - DNA, 330 bp, Glycine max
  Clone ID: LIB3094-019-Q1-K1-C8
cttctccttctcaatcttgtaattctatttcctccaccataatgctgcgcaagcttgtgtgagggccacgcaagaacaagcctggcacagttcccgttcacctcaacgtctatgatctcaccccaatcaacggctatgcctattggcttggccttggagtctaccattctggggttcaagttcatggattggaatatggttttggtgcgcacgagcacgacacaacggggattttcgaagtccaacccaaacactgccctgggttcactttcagaaagtcaattttcatcggaacaacagatctgggtccgaaagatgttcgagcattca

SEQ ID NO: 15519 - DNA, 423 bp, Glycine max
  Clone ID: LIB3094-019-Q1-K1-C9
attgtatcttgttattttttataaaagggatgccaatgccttatattgtaattatacgtggtaatgttgctccagcagaatcaccccacaacaaatgtttacattcataaggtggttcatcaaaccaatgtattattccccaggataactgtcatcaacatttaatcagcagcataattgtcttaaaataaaatcttctttgtcttcaaagatacactccaggtttaaactattcatttaaagacaatccaaatggtgacattctcgtctgggtggtgtagttggttatcacgctagtctcacacactagaggtccccggttcgaacccgggctcagacatttcaatattttgtagcccatgtctgtaaattactttgagatatgtttttaggtttttttttaatgctttgtaataaaatttt

SEQ ID NO: 15520 - DNA, 432 bp, Glycine max
  Clone ID: LIB3094-019-Q1-K1-D1
cagagtttgagtggacctgtctcagctaccctttaccttggttattcactactcatggccattgcaatcatgttgtcaaccggcaccattggcttccttatgtcattctactttgtgcactacttgttctcatcagtaaagatagattgaggttcttgttgtcattgcatattaactatgaaaaaggttgattgatataacttgatcacattgcatagtagggcaacggatgtttaattcattgtctgattttatattgcgatgggatctgcagtttgttctccttctgcctgtttcccaaagtagtgtactcattcaagtattcaactaagtgttgagatcatgtttcaagtattttggtcaaagttctttagaagggttgtattcaaactctcatctcaattccatactttagaaaaatggtggtagatt

SEQ ID NO: 15521 - DNA, 456 bp, Glycine max
  Clone ID: LIB3094-019-Q1-K1-D10
cccacgcgtccgcccacgcgtccggtgattgaagctagttagaacaagatgttgcagctactctacactgcgattttctccgaaatgcttttgattctcacgctcgtcttcaaaaccccactgagaaaactcgtcatcgtttccctcgatagtgtgaagcgcggtcgcggtcccgtggtggtttccaccgtgggcgccacattgatggtggttctcgcttcgagcctgtacagcatggccaagatccagcaacgcaccctcgaggccggcatagtcaaccccaccgaccaagtcctcatgtccaagcacatgctcgaagcttctctcatggggtttctgctgttcctctctctgatgattgatagattgcaccattacataagagagcttcggtcactcatgaagaccatggaagctattaagaaacatagccgaagttttgaagatggtaaaaat

SEQ ID NO: 15522 - DNA, 432 bp, Glycine max
  Clone ID: LIB3094-019-Q1-K1-D11
cccacgcgtccgcccacgcgtccgctccttgaagctgattagaccaagacgatcatcatagtacacaattcatacatcatggcagtcctgaccattatcacgcatgacagctctgccgttgtgggacaacttcgcagcgtttctgtctatagcgtgaagagcgatcatgagtaccacggtggcttatcactcgcgagcgcggcattgatggcggttctcactacgagcctgtataacacggacgagagcccgcgccgcacctttgaggccagcataaccgatctgaccgaccatgtcgttatgtacgtgcgcatgctggaagctactgtcatggtatgaatgctattactctctatgatgattgactgattgagccattacatgagaaaacttaggtcactcaagatgaccatgggaactattcacaaacat

SEQ ID NO: 15523 - DNA, 224 bp, Glycine max
  Clone ID: LIB3094-019-Q1-K1-D8
acgctagagaattatcatacctcttcattatgatatcctacctactttcaatattcggattatggcttatacttgtggaccaatccatttcagctatttgctgcttataaatattaattgtctaagaaacaaatttatagtagttctatacaatcacccgatcatcaatcttccttcatataaactgattaagttgtatatacctcttaatgcactgtattatc

SEQ ID NO: 15524 - DNA, 435 bp, Glycine max
  Clone ID: LIB3094-019-Q1-K1-D9
cccacgcgtccgcccacgcgtccgctccagagagaagaagaaacttaatcgatcatcactgcacttcactaatacatcatggcagacgagacccagaacaagtatgagagctctgaggttgaggtccaggatcgtggtgtttttgactttctcggtaagaaaaaggatgaagaagacaagcctcatcctcaggaggaggtcatcgccaccgagtttcaaaaagtcactgtctcagaccaaggagagaacaagcacagcctcttagaaaagcttcaccgatctgacagcagctctagctcttcaagtgaggaggaaggagaagatggagagaaaaggaagaagaagaagaaggaaaagaaagggctgaaagagaagatcgaggagaaaatagagggtgatcatcatcatcacaaggatgaggacacaagtgtccct

SEQ ID NO: 15525 - DNA, 259 bp, Glycine max
  Clone ID: LIB3094-019-Q1-K1-E1
cccacgcgtcctcccacgcgtccggaagattggaatataccttacggatggtggaatcaggaatcagttataattgcgtagtgcgggtgttgactaatatggaatacaaagatagtgagagagagaaaaatcttcgctttatgtcaatggcacgaatcattggtttttacagaagttagcaacgactccatatattaaaaatgtgattttattttgattcatattttgaaaaagtgtttttgtaattatactctcttat

SEQ ID NO: 15526 - DNA, 258 bp, Glycine max
  Clone ID: LIB3094-019-Q1-K1-E10
attgctgctgtttgcctattggtgttctttggggtctctaccctgctggatgcctcatcgagcgatggccaaaaatgcggatgaagagcagaaggaggcagaactagcagtttctgaattttctggaaatggtgctgggatactatctgctgctagcacagttgccagtacttttctcttagtttttgttgctgaatggggcgacaagtcatttttcttcacaattgccctttgctcatctttttctccccttggagt

SEQ ID NO: 15527 - DNA, 387 bp, Glycine max
  Clone ID: LIB3094-019-Q1-K1-B12
cccacgcgtccgccaactttacggtttctgttcgacgatcctactacatagcaattcatgaggcctacatatggggatcacttcatgaaaatattattgtgttggtcacatatccgagccattatccaggtgactagtatgcacagaaataatatgtatcactgctatactgccccatatatcataggttgactccaatgccattgaccttcatgatacactatggaacattgacggcgattcaattcttgcatctggatacctacatcatataccactgtattggatccaagcttgccttacatctatatccaacattcattcatcatttcttccagctttcgcaagagtggcattctatctcatgatagatcacgaagctgaaat

SEQ ID NO: 15528 - DNA, 455 bp, Glycine max
  Clone ID: LIB3094-018-Q1-K1-G9
gaaatgtgaaagccttatcatacagtgtttgcaagatgccaaggtagaagttgaagaagtgaatgatgtgatgattgtaggcggatgttcttacatcccgagggtgaaaaatcttgttactaacgtatgtaaaggcaaggaactttataaaggcatgaatcctttagaagctgctgtttgcggtgcagcagtggaaggagctattgcttcaggcgtcaatgatccctttgggaacttggacttgttaactatccaagctacacctcttgccattgggattcgagctgatgggaacaagtttgtccctgtaattccgagggatactacaatgccagcacggaaggagctagttttcacaactactcatgacaatcaaactgaagcgttgatccttgtctatgaaggagagggtgaaaaggcagaagaaaaccacctattgtgatatttcaagataa

SEQ ID NO: 15529 - DNA, 381 bp, Glycine max
  Clone ID: LIB3094-018-Q1-K1-H11
acgcttcttctctggttgattccgatctttagtcttcaggttctcctcgttgttcttggcttggctgttttcaatgtcgagtctttcgttaatataattagatgtttgggagggcacccaataagaacgataattctatgtactactaaatccttggcgtcttcaataacgcttcgcaggatgatctgaagaaggcttacaagatagccgccattaagaatcacccctacaagggcggtgatccccacaagtttaaagagcttgcgcaagcttattatgttcttagtgacccttataagcgtgagaaatattatcagtattgggtatatgccctttatgtatgaaatggttttggccttttgcattatccatttttatatc

SEQ ID NO: 15530 - DNA, 166 bp, Glycine max; identical to SEQ ID NO: 15506
  Clone ID: LIB3094-018-Q1-K1-H12

SEQ ID NO: 15531 - DNA, 295 bp, Glycine max; identical to SEQ ID NO: 11959
  Clone ID: LIB3094-018-Q1-K1-H3

SEQ ID NO: 15532 - DNA, 308 bp, Glycine max
  Clone ID: LIB3094-018-Q1-K1-H4
gcgcccacgcgtccgcggacgcgtgggggtttttgtggataagagtgagctataatggctgccattagaccgggtttaattgctttgtttgatgttgacggtactcttacagatgctagtaaggtggttacaccggaaatgatgacattcatgcaagaactacgaatggttgtaacggttggagttgataagcgttctgaccttatacagattttagaccaactttgatgtacagttaccaatgagtatgattacgtattttctgataatggtcttgatgcttacaatgaatgaaagctcattggaac

SEQ ID NO: 15533 - DNA, 213 bp, Glycine max
  Clone ID: LIB3094-019-Q1-K1-A10
cccacgcgtccgcccacgcgttcgcactttctctctctataactctttctcacccgctagggtttccttttcatcgcatcttgagtttgcaacctcgtcttgtgatttccatggaaggtgctgggatggaagagaataatattattaatgatgatgattataataaccaggctgaagcgcatttgacttctggcgcttcttttggggaaggtg

SEQ ID NO: 15534 - DNA, 450 bp, Glycine max
  unsure at all n locations
  Clone ID: LIB3094-019-Q1-K1-A11
atttgttgctgcaggaattcacagcccggcctgatatagcagatgattgttttttgttggcctcaaggtgtattcgctactgtcctcaactgtttattccctcgtctgtttttccttcattagtggattgctctatgattgggatcacagtacagcatagggaggcttcgaattccatattgcatttcttggctgacatttttgatcttgcgaattcctctgtgggggagcaatttataccaataagagatagtgtaataattcctcgaggtgccagcatcaccagaattttggttgcttcattaacgggagcacttcctaaatctcgagtggatgtggtatcttatacactcctggcattaactcgatcatatgggatgcaagcgctggaatgggcaaaanagagtgttntgttaattccatcaacagcttgtacagatgtagagcgat

SEQ ID NO: 15535 - DNA, 390 bp, Glycine max
  Clone ID: LIB3094-019-Q1-K1-A2
tgaatgtgtgatgatttattaatttctttcctgtgacttggtttgttgtcattctgaatgctgttgctaatacatgcattgttggagttcaattggttgctttgctggctctttttttgcacttagtttttatttttatttccatcaacttgatttgtagttttctctttgagtttaattcccctcaaggtttgaattgtatttgcttttagagtttaattcaaattcactaactatgattaaaatctgatcataaattatcaattatgataagagtattgatttttattataattatttaaaaatcgtatctaaaataatttttagaaaataatattcttagtaaataatttatgcactgaattttattaaaaacttttacacttttaa

SEQ ID NO: 15536 - DNA, 460 bp, Glycine max
  Clone ID: LIB3094-019-Q1-K1-A3
tgaatgtgtgatgatttattaatttctttcctgtgacttggtttgttgtcattctgaatggtgttgctaatacatgcggtgttggagttcaattggttgctttgctggctctttttttgcacttagtttttatttttatttccatcaacttgatttgtagttttctctttgagtttaattcccctcaaggtttgaattgtatttgcttttagagtttaattcaaattcactaactatgataaaaatctgatcataaattatcaattatgataagagtattgatttttataataattatttaaaaatcgtatctaaaataattttttagaataaattatacatagtaaataatttatgcactgaaattttataaaaactttttacacttttatttaaatattaaataatcatatatatttagactggtaacttttattaataattaattaataatttttta

SEQ ID NO: 15537 - DNA, 272 bp, Glycine max
  Clone ID: LIB3094-019-Q1-K1-A4
acgtgaatgtgtgatgatttattaatttctttctctgtgacttggcttgttgtcattctgaatgctgctgctaatacatgcgttgttggagttcaattggttgctttgctgcctctttttttgcacttactttttatacttatttccatcaacttgatttgtagttatctctttcagtttaattcccctcaatgcttcaattgtatttactgttagagtttaattcatattcactaactatgatgaaaatcttatcataaattatccattat

SEQ ID NO: 15538 - DNA, 392 bp, Glycine max
  Clone ID: LIB3094-019-Q1-K1-A5
gagaaaagcgtgtcgaatggatttcacggagaaggatctattcggcgaagattgcgacaacgacaacgggtcccactcctccggttcctcttcttcttcctccgccgcttcctcttcctcatcatcctccgcctcctcttccgcctcttcctccaaagccagcgcaagcagcggcgccgaaaacgacgacgagaatggcgacgtcgtagatagcaccaaagtccgcgcccatcaccatcacgactacgaagacaaagatctgtttggctccgataatgaagattactgtaaaaccctcgctagaagtccttaccccattcctgtattgcctgccatccgcaatgtgcataatcagggtagaggggggtttggcccgtgtcgtgggcaaatga

SEQ ID NO: 15539 - DNA, 354 bp, Glycine max
  Clone ID: LIB3094-019-Q1-K1-A6
cccacgcgtccgcccacgcgtccggtgattgaagctagttagaacaagatgttgcagctgctctacactgcgattttctccgaaatgcttttgattctcacgctcgtcttcaaaaccccactgagaaaactcgtcatcgtttccctcgatagtgtgaagcgcggtcgcggtcccgtggtggtttccaccgtgggcgccacattgatggtggttctcgcttcgagcctctacagcatggccaagatccagcaacgcaccctcgaggccggcatagtcaaccccaccgaccaagtcctcatgtccaagcacatgctcgaagcttctctcatgggggttctgcttgtcctctctctg

SEQ ID NO: 15540 - DNA, 171 bp, Glycine max
  Clone ID: LIB3094-019-Q1-K1-A7
ccgggccgacaccacgcgtcctcccacacatccttccacacgttttttgatttaagctagttatatcaatatattgcaacttgtctacactgggatgttctcccaaatgcttctgattctcacactcgtcttcaaaaccccacttataaaactcatcattttttccctcta

SEQ ID NO: 15541 - DNA, 383 bp, Glycine max
  Clone ID: LIB3094-019-Q1-K1-A9
attctccaactagataccgcattcgctcactctctactcaacttcaattaatcaaatccgtgactttctctctcttgtcttcaaatctcaattctattttggaaaatcagaatcaaagacagttaaaaatacagaacaaacatctcactcaacatcaacacttcagatctacgtttccactctcacaacaacgaaaaaggaaagaaaaaccgattctacagcgacaacaaggaacgaaagaacgatcgatttctcgaagcgccctcaaaatggcgcgtgcacccttcacttctttccccttcgtcctcattatccttctgtcaatcgtccacctttcgcactgcaagaccctcaaacgtgacgttaaggctttgaacgagatc

SEQ ID NO: 15542 - DNA, 318 bp, Glycine max
  Clone ID: LIB3094-019-Q1-K1-B10
cccacgcgtccgccagccgtacggtttctggtcgaggatgctacttcatagcaatccatgtggcctacatatggggatcacttcatgaaaatattattgggatggtcccattatccgagccattattcaggtgactgatatgcacaggaacaatggtatcactgctatactgcaccatatatcataggtttactccaatgccattgaccctcatgatacacttaggaacattgacggcgatttaattcttgctgctggatacctacatcatctgccactataatggatccaagcttgccttacatctatttccaacat

SEQ ID NO: 15543 - DNA, 365 bp, Glycine max
  Clone ID: LIB3094-019-Q1-K1-B11
cccacgcgttcgccacccttacagtttctgttcgagtatcctactacataacaattcatcgtgcctacataaagggatgacttcatgaaaatattcttgtgttgatcacatttccaagccattattcatttgcttaattatgcacataaacaaatatatcactgctatactccacatatatatcatagtatgaatccaatcccattgaccctcatgatacactaatctaactttgccgttgattcaattcttacatctggatactttcatcttataccactataattaatccaagcttacctaacaactatattcaacatcttattcatcatcttcttctagtcttttctatcattcgaattcta

SEQ ID NO: 15544 - DNA, 446 bp, Glycine max
  Clone ID: LIB3094-018-Q1-K1-G8
cttttctactttgagtcttcttgatccttctttctctccttgaactcaaacatggcagatgaggtggttctgctagatttctggccaagtccatttgggatgagggtcaggattgcacttgctgaaaagggtatcaaatatgagtacaaagaagaggacttgaggaacaagagtcctcttctcctccaaatgaacccggttcacaagaagattccggttctcatccacaatggcaaacccatttgtgaatccctcattgctgttcagtacattgaggaggtttggaatgacagaaatcccttgttgccttctgacccttaccagagagctcaggctagattctgggctgattatgttgataagaagatatatgatcttggaaggaagatttggacatcaaaaggagaagaaaaagaagctgccaagaaggagttcatagaagccct

SEQ ID NO: 15545 - DNA, 454 bp, Glycine max
  Clone ID: LIB3094-018-Q1-K1-E2
atccaagaggaagaagaggaagaagaagaaggggttgtggttcggaggaccagtgttcggaagagcggcttggtgaagaagcttggggatgattttgacagggttgccctggaaaacgatgagtccaatacggtgtcgtcgttgaagacgactcgtggtcggaaattggttaagaatggtgaacttgggaacaaaacggtggttgaagtagctgaaaaatcaaacaccaaaggaaagaagagtgcaagtgaagccgagaagagccctggggttagaacttcttccagattggctaaacgtgtgtccaatcaaacgtcttgtaattagatgtttgataaaattgtggttttccttttccttttattattgtccaattagccattctgtgtatgtttcaagatttagggtttgttcaacaattggtattttgcagtaagtcatacatgaatgaatg

SEQ ID NO: 15546 - DNA, 409 bp, Glycine max
  Clone ID: LIB3094-018-Q1-K1-E4
cccacgcgtccgcccacgcgtccggaagaaaggaatataccttacggatggtggaatcaagaagcatttgggattgcatagtgcgggtggtgacgaagatggaagacaaagagagtgagagagagaaaaatcttcgctttatgtcaatggcacgaagcaggggtttttacagaagtgagcaacgacgccagatatgagaaaagtgagtttatttggggtcatatttgtaaaaagtggttttgtaattataccctctaattcaagagtgaagaaacaagggtgggatggaaatataaatagtacaatttggtcctagtggtggcttaccctttggcctctttttctaattcagaattttttttaaatatataaaagtggggggatatgtttacttaaaaaaagggcggtc

SEQ ID NO: 15547 - DNA, 462 bp, Glycine max
  Clone ID: LIB3094-018-Q1-K1-E9
attgctgctgtttgcctattggtgtactttggggtctctaccctgctggatgcctcatcgagcgatggccaaaaatcagatgaagagcagaaggaggcagaactagcagtttctgaattttctggaaatggtgctgggatactatctgctgctagcacagttgccagtacttttctcttagtttttgttgctgaatggggcgacaagtcatttttctccacaattgcccttgcagcagcttcttctccccttggagtcatagctggagcactggctggtcatggtgttgcaactttgctagctgtacttgggggttctttacttgggacgtatttgtcagagaaggttattgcctacatcggaggtgttctctttctcgtctttgccgcaataaccttatttgaaattgtgcaataggggttaaaagaaatgcaatataatcttcgtgcaaagggttcaaga

SEQ ID NO: 15548 - DNA, 462 bp, Glycine max
  Clone ID: LIB3094-018-Q1-K1-F1
aaacacccttgtcgaccacaccaaaattaaaaacataaaaaagcataaaagcacaaaaagacataaaaaagggaaaataaaacattttgaagtcatatttgcacacttgattaaaggctgtcgtcccttgtgacggatgcgtggggtgctaataccttccctgtgcgtaaaaacaactcccgaactattcacacttaaagttcgtagaccacaccttttcaattttcccgacgctttcctcaaataaaagttggtggcgactccgcgcattttcctttcatggaagacgcacttgtgagtcccgcatcgcccttccgtcaaagggtaggttgcgacagtacttgcccttccgccgaagggtaagttccttaattgaattaactaataacaaaagtgaaactaaggctaaaataaactcacaaatcaagctttgtccaataaaatcacttaaaaaccattttg

SEQ ID NO: 15549 - DNA, 462 bp, Glycine max
  Clone ID: LIB3094-018-Q1-K1-F11
gaaatgtgaaagccttatcatacagtgtttgcaagatgccaaggtagaagttgaagaagtggatgatgtgataattgtgggcggatgttcttacatcccgagggtgaaaaatcttgttactaacgtatgtaaaggcaaggaactttataaaggcatgaatcctttagaagctgctgtttgcggtgcagcagtggaaggagctattgcttcaggcgtcaatgatccctttgggaacttggacttgttaactatccaagctacacctcttgccattgggattcgagctgatgggaacaagtttgtccctgtaattccgagggatactacaatgccagcacggaaggagctagttttcacaactactcatgacaatcaaactgaggcgttgatccttgtctatgaaggagagggtgaaaaggcagaagaaaaccacctattgggatatttcaagataatgggaat

SEQ ID NO: 15550 - DNA, 438 bp, Glycine max
  Clone ID: LIB3094-018-Q1-K1-F2
aaacacccttgtcgaccacaccaaaattaataacataaaaaagcataaaagcacaaaaagagataaaaaagggaaaatgaaacattttgaagtcatatttgcacacttgattaaaggctgtcgtcccttgtgacggatgcgtggggtgctaataccttccctgtgcgtaaaaacaactcccgaactattcacacttaaagttcgtagaccacaccttttcaattttcccgacgctttcctcaaataaaagttggtggcgactccgcgcattttcctttcatggaagacgcacttgtgagtcccgcatcgccctcccgtcaaagggtaggttgcgacagtacttgcccttccgccgaaaggtaggttccttaattgaattaactaataacataattgaaactaaggcctaaataaacctacaaatcaagctttgtccat

SEQ ID NO: 15551 - DNA, 415 bp, Glycine max
  Clone ID: LIB3094-018-Q1-K1-F3
cccactcgtccgtacacatatgcattctttctctcactccattccatttccgggatttgcatttgcatacatacacttacctctctggtctctagctatagcacaagatatgggtagcagttattttggagaacctaactttggaaatgaaagagcaagttgttcttcttcgtcaagaaaagggaagaagagccacaactcagacaagccaaagcaaccacagagaggtcttggagttgctcaattggagaaaatcagattacatggctatcacccttctctgcacgctccttacccttctaatttttccaacgaagatccaagagtgcaaatagcatattcatcggtgccatcatcttctttttcttactcatcatcatacgcagcttcctatggattccaacccaacatcatg

SEQ ID NO: 15552 - DNA, 423 bp, Glycine max
  Clone ID: LIB3094-018-Q1-K1-F4
cccactcgtccgtacacatatgcattctttctctcactccattccatttccgggatttgcatttgcatgcatacacttacctctctggtctctagctatagcacaagatatgggtagcagttattttggagaacctaactttggaaatgaaagagcaagttgttcttcttcgtcaagataagggaagaagagccacaactcagacaagccaaagtaaccacagagaggtcttggagttgctcaattggagaaaatcagattacatggctattacccttctctgcacgctacttacccttctaatttttccaaccaagatccaagagtgcaaatagcatattcatcggtgccatcatcttcttttttctactcatcatcatacgcatcttcctatggatttccaacccaacaatattgatgggc

SEQ ID NO: 15553 - DNA, 251 bp, Glycine max
  Clone ID: LIB3094-018-Q1-K1-F5
gaaatgtctaagccttatcatacagtgattgctagatgccaaggtagaagttgatgaaggggatgatgtgataattgtgggcggattttcttacatccctagtgtgaaacatcttgctactaacgtatgtaaaggcgaggaactttattaaggcatgaattctttagaagctgctgtttgcagagcaacatgtgaaagagctattgcttcaggcgtcaatgatccctattggaactttgacttggtaacta

SEQ ID NO: 15554 - DNA, 388 bp, Glycine max
  Clone ID: LIB3094-018-Q1-K1-F6
gaaatgtgaaggccttatcatacagtgattgcaagatgccaaggttgaaggtgaagaagggaatgatgtgataattgtacgcggatgttcttacatcccgagggtgaaaaatcttgctactaacgtatgtagaggcaatgaactttataaaggcatgaattctttagaagctgctgatcgcggcgcatcagtggaaggagctattgcttcaagcttcaatgatccctttgggaacttggacttgttaactatccaagctacacatgtagccattgggattcgagctgatgggaacaagtgtggccctgtaattccgagggatactacaatgccagcactgatagaactagttttgacagctactcatgacaataaaactgaagcgttg

SEQ ID NO: 15555 - DNA, 240 bp, Glycine max
  Clone ID: LIB3094-018-Q1-K1-F9
tcctaccattccagatccccatctataactataccatttaatctttatcttcttgccctccggcccggtaaaaaaccaaaaccgggattatctacccaccgacgcacttatataaccaaattcaacacatttaacaagttcttatattctatattttcctaccacaatcaacatttactttttgtccaccacttttttttaaccctattacaacctatatgtcttcaaaaacaacctttc

SEQ ID NO: 15556 - DNA, 91 bp, Glycine max
  Clone ID: LIB3094-018-Q1-K1-G12
tatcgacaattattttatacaccatcttattttatattcataattttcctttcaatatttattaattaacttttaattacactttttttta

SEQ ID NO: 15557 - DNA, 404 bp, Glycine max
  Clone ID: LIB3094-018-Q1-K1-G2
caaccatggccgactcatctcaagaccttgaccaacttctcgatagtgctttggatgattttcagtccttcaacctcaatcctccccctccaagtggggaagcaactgcgaatagcaagaaggagagtccttctttgccgtcgggggttcaaggattgggcatgggtttacccgatttgagaacgaagaaaaaggggaaacagaaggcttccaaagacagccacgtgtcggaagcgctcaacaagctcaaggagcagaccaaagaagctgtgaaagggctggagtctatattcccacccactggcgatgatttaagtaaggatgccttgatggaagattgggtcaaacaatttgagcagcttgctggctctcaagacatggaatctattgtggagaccatgatg

SEQ ID NO: 15558 - DNA, 450 bp, Glycine max
  Clone ID: LIB3094-018-Q1-K1-G5
cccacgcgtccggactgcccaagatgtatcgacaatgttacggtgcgggcaaaaaaccatcatctttctgatcaacaatggtggatacaccatcgaggttgaaattcatgatgggccgtacaatgtgattaagaactggaattacactgggttgattgatgcaatccacaatggtgaagggaaatgctggactgccaaggtgttctgtgaagaggagctagttgaagcaattgccacagccacaggacccaagaaagactccttatgcttcattgaagtgattgttcataaggatgacaccagtaaagaattgcttgaatggggctcaagggtttctgctgccaatagccgtctctccaatcctcagtaatcttcagaatttatcctatgactaaattgctgcaattgccctttagctctatgaaagtgagaatcatttgagatgatgcc

SEQ ID NO: 15559 - DNA, 451 bp, Glycine max
  unsure at all n locations
  Clone ID: LIB3094-018-Q1-K1-G6
tcgcaaggaaaggaaggaccccagtgattataggtacttcctgtataagcacattcacttcgacgtgttctacaacaaggacagggtcatcgagatcaacgtgcgcaccgatcccaatgcgctcgtggatctcaccaaggattctgaaggtgatgccgagtttttgtacacggtgaagttgaaagagacgaacacgccgttcgagaagaggatggacaggtactctcagtcctcgtcgctgccgcatcatttggaaatccactggttctcgattatcaactcgtgtgtgactgtgctgctcttgaccgggttcctcgccaccattttgatgcgggtgctcaagaacgattttgtcaagtatgcacatgatgaggagtctgcggaggatcaggaagagactgggtggaaatatatccatggngatgtgtttaggttccccaagtttaagtct

SEQ ID NO: 15560 - DNA, 277 bp, Glycine max
  Clone ID: LIB3094-018-Q1-K1-G7
caaggaagggaaggaccccagtgattataggtacttcctgtataagcacattgacttcgacgtgttctacaacaaggacagggtcatcgagatcaacgtgcgcaccgatcccaatgcgctcgtggatctcaccaaggattctgaggttgatgccgagtttttgtacacggtgaagtggaaggagacgaacacgccgttcgagaagaggatggacaggtactctcagtcctcgtcgctgccgcatcatttggaaatccactgggtctcgattatcaac

SEQ ID NO: 15561 - DNA, 403 bp, Glycine max
  Clone ID: LIB3094-018-Q1-K1-E11
attgctgctgtttgcctattggtgtactttggggtctctaccctgctggatgcctcatcgggcgatggccaaaaatcggatgaagagcagaatgaggcagaactagcagtttctgaattttctggaaatggtgctgggatactatctgctgctagcacagatgccagtacttttctcttagtttttgttgctgaatggggcgacaagtcatttttcttcacaattgcccttgcagcaacttcttcttcccttggagtcatagctggagcactggctggtcatggtgttgcaactttgctagctgttcttggggggtctttacttgggacgtatttgtcagataaagttattgcctacatcggaagtggtctctttcttgcttttgcccaataaccctatttga

SEQ ID NO: 15562 - DNA, 115 bp, Glycine max
  Clone ID: LIB3094-018-Q1-K1-C1
ctttctcctattactatccttttctttctttccatctattcatattcttcgttttctgtgaaaccagggtagacccttattacatttctccacacctgcctcagaacaagattat

SEQ ID NO: 15563 - DNA, 407 bp, Glycine max
  Clone ID: LIB3094-018-Q1-K1-C10
acgcggaacgatgaccgtcggcggatccacggttaggtttcctacatgcaacgagagagagaacaacggggggatatagagaagacgactagctattgcagctaatatctacactggccttcgaacccattggaactacaagctttcaaagcactgcgacaacaacgaggtcctgaaagctctcttctcctaagctggctggatcgcggaagtaagatggcacaacttatcgaaagggatgtaagagacccacgagtgagattggaggaacaccactgaacttaatcgcgtgttcttacacttacgcaagatcacaatcctcgatataccctagatctgtaccatcctaccatgctagcccaacctatttctcgttaccaaactccactctcattgactgaaaccac

SEQ ID NO: 15564 - DNA, 104 bp, Glycine max
  unsure at all n locations
  Clone ID: LIB3094-018-Q1-K1-C2
gaagttgcgagagtgaagaaatggcgcaagacttggcattggatttggaggagcttcgccgncttcacagcatcgccaaaagacctcgaaccctctctcttctc

SEQ ID NO: 15565 - DNA, 455 bp, Glycine max
  unsure at all n locations
  Clone ID: LIB3094-018-Q1-K1-C3
gaagttgcgagagtgaagaaatggcgcaagacttggcattggatttggaggagcttcgccgcctccacggcatcgccaaaagacctcgaaccctctctcttctctcctccgaaattcgtaacctcgaaaaggtatcgtcagaggaagcttctgcgcagattccggcgccgatttcgaccggaactaaagtggcgccttcacctgcgctgaagtatgcggcactcgcgtcgttcagttgggaccaggatagtgacaaagttaagatatatgtngtaatggagggaatcgatgagaataaggttgaatccgagtttaagtcgatgtcattcgatgttaagtttcatgatgttcaagggaagaactaccgatgtgcaatatcanaatggcacaatgagatagtaccagagaaatgcaaggttgtggtcaagcctaaaagggcaatcatcacattggtg

SEQ ID NO: 15566 - DNA, 381 bp, Glycine max
  Clone ID: LIB3094-018-Q1-K1-C4
gcggaagttgcgagagtgaagaaatggcgcaagacttggcattggatttggaggagcttcgccgcctccacagcatcgccaaaagacctcgaaccctctctcttctctcctccgaaattcgtaacctcgaaaagttatcgtcagaggaagcttctgcgcagattccggcgccgatttcgaccggaactaaagtggcgccttcacctgcgctgaagtatgcggcactcgcgtcgttcagttgggaccaggatagtgacaaagttaagatatatgtgttaatggagggaatcgatgagaataaggttgaatccgagtttaagtctatgtcatacgaagttaagttccaagaagttcaagggaagaactaccgatgtgcaatat

SEQ ID NO: 15567 - DNA, 446 bp, Glycine max
  Clone ID: LIB3094-018-Q1-K1-C5
gcttcctcctcttacgagcctttcctttcagtccattgattcggtgggtgcgggtgcagcgaaaccgagctagaccctgatcggcgtcggcacaccgccggagaacaagatgattgtctgcgtcgccgtcgtcggtcaccagaacaatccgctgtacatacagagcttcacggaggccgatgatgctctcaagctccaccacatcgtccattgctcgctcgatgtggtcgacgagcgagtgaacaatcctaaaaagtctgggccgatgcttaatgagacgtttttgggactgctttatcctattgaaaactacaaagtatatggatatctgactaatacgaaggtgaaatttatcttggtgaccacggatctgggatgtaaagatgcggatgtaagggaatttttcaggaggttccatgccgcatatgtagatgcagtttcaaacc

SEQ ID NO: 15568 - DNA, 389 bp, Glycine max
  Clone ID: LIB3094-018-Q1-K1-C6
cccacgcgttcgtccacgcgttcgcaaaaattacatcaccaatctcacccatttcaaaaaaaggccgttagtgttactattcgtaaaatggccactcttgttctttaccaattctttctcaaactcttgctcctaatttcagtctttcagctttcctttgctgctaggagactcaaccagctggttcaggaccagtcacagttactccattaccacaactgtcctcttctatacggcaaaatcgccgtgaacctaatctggtatggtcacttctaaccattccaaaaggccatcatcaccgatttcgttacctcactgtcatccctatcgtcttagagcagccagccatctgatgccacgtggtggaaaaccacggagaagtactacca

SEQ ID NO: 15569 - DNA, 429 bp, Glycine max
  unsure at all n locations
  Clone ID: LIB3094-018-Q1-K1-C7
ctagagaattatcatacccttcaagatgaaaccgtacctacgtccaatattcctattattccttatccttctcgaccaatccatttcggcgagtgctgctataaatattaatggtctgagaaacaaaattagagaagttctaaacaagcacccgagcatcaatcttccggcagataaactgaagaaggtgaagagaccactgaaggcactggattatctgcttggcgaatgtaaggacaggccgnctcaagaatttcaagaattttgcccgaaatttaagaacgattatcaacaaaattgcccgaatgccgcgtatgaagcagtttgcccgttactgaagcaagcgattcaaatatgttgccagaaacacgcataactctgcaagccacggtgggcgtttggatgtgcttntagttaccactttctctc

SEQ ID NO: 15570 - DNA, 399 bp, Glycine max
  Clone ID: LIB3094-018-Q1-K1-C8
gcgccatatcgcgtatctttctctgttctattcctacgatggagttttggggtgccgaggttaaggttggtgagtctgttaaggtagatccagccgaattcgaggcatgcatacacctttctcaggctgctcttggtgaggcaaagaaagacaaatcatatgaaccagttgttctctacttgaaagttggtcaacacaaatttgtcttgggaaccctctccagggagaaaattcctcaaatacctctggaattggttttggaaaaggagtttgagctttaccacaactcatagaatgccagagttcattcctgtggatacaaggcattctatgatgctggcgatgatagcgagtaggatgaatatactgactgcgaagtggatgttccattgcttaaag

SEQ ID NO: 15571 - DNA, 443 bp, Glycine max
  Clone ID: LIB3094-018-Q1-K1-C9
gcgcggaacgatgaccggcggcggatccacggggaggttgccgacgtggaaggagagagagaacaacgggaggagagagagaagacgaagagcgattgcagctaagatctacactggccttcgagcccaggggaactacaagcttccaaagcactgcgacaacaacgaggtcctgaaagctctctgcgccgaagctggctggatcgtggaagaagatggcacaacttatcgaaagggatgtaagagacccacgagtgagattggaggaacaccactgaacttaagcgcgtgttcttccattcaggcaagtccacaatcctcgtcatacccgagtcctgtaccatcctaccatgctagcccaacctcttcctcgttcccaagccccacgcgcattgacggaaaccacccttcttcctttctcatcccattcatccgcaacataa

SEQ ID NO: 15572 - DNA, 241 bp, Glycine max
  Clone ID: LIB3094-018-Q1-K1-D10
cttttcaggacgcgagcgtccactcatacactgattttatctatacataacaagatattggggattggctacactgcgattgtggtgctaaatgcatttttaatctcacgcatcgtcttcaaaacaccactgagaaaacatcttcatttatccctctatagtgtgaattatctgtttctcatccctcgtgagtttcaccttttgctccacatctatagtggatcttacttcaagcctctac

SEQ ID NO: 15573 - DNA, 303 bp, Glycine max
  Clone ID: LIB3094-018-Q1-K1-D11
agccacgcgttcgtccacgcgtcctctccatttagaagatgaaacttaatcgatcatcactgggacttactaatacatgagggcatacgagacccagaacaagtatgagagctctgaggttgaggtccaggatcgtggtgtttttgactttctcggtaagataaaggatgaagaagacaagcctcatcctcaggaggaggtcattgccaccgagttttaaaaagtcactgtctcagaccaatgagagaacatgcacatgccttttagaaaagcttcaccgatcttacagcttctttagctctt

SEQ ID NO: 15574 - DNA, 134 bp, Glycine max
  Clone ID: LIB3094-018-Q1-K1-D12
tcgctcacgcgtctcgtctactcgtccgttgatagtagctatatcctacaagatgttggagctaggctacactgcgattttctgcgaaacgcattttatctctaacgctcgccttcaaaacctgactgagaaaa

SEQ ID NO: 15575 - DNA, 394 bp, Glycine max
  Clone ID: LIB3094-018-Q1-K1-D5
cccacgcgtccgcccacgcgtccggaagaaaggaatataccttacggatggtggaatcaagaagcatttgggattgcatagtgcgggtggtgacgaagatggaagacaaagagagtgagagagagaaaaatcttcgctttatgtcaatggcacgaagcaggggtttttacagaagtgagcaacgacgccagatatgagaaaagtgagtttatttggggtcatatttgtaaaaagtggttttgtaattataccctctaattcaagagtgaagaaacaagggtgggatggaaatataaatagtacaatttggtcctagtggtggctaccctttggccttttttctaattcagaaattttttttaaatatataaagtggggtgatatggttacttta

SEQ ID NO: 15576 - DNA, 402 bp, Glycine max
  Clone ID: LIB3094-018-Q1-K1-D6
cccacgcgtccgcccacgcgttcggaagaatggaatataccttacggatggtggaatcaggaatcatttgggattgcgtagtgctggtggtgactaatatggaagacatatagagtgagagagagaaaaatctttgctttatgtcaattgcactaatcaggggtttttacagaagtgagcaacgacgctagatatgagtaaagtgagtttatttggggtcatatttgtaaaaagtggttttgtaattataccctttaaatttagagtgaataaacaatgttgggatggaaatatatatagttacaatttggtttcttattgttggtttactccttttgccttattttttaatttataatttgttttatattttattatattttgttttaatttgttaccttt

SEQ ID NO: 15577 - DNA, 382 bp, Glycine max
  Clone ID: LIB3094-018-Q1-K1-D7
ttcacgcgtccgcccacgcgttttgaagataggaatataccttacagatgggggaatcaggaatcatttgggattgcatagtgcttttggtgacgaatatggatgacatagatagtgagagtgagaataaatctttgttttatgtcaatggcacgaatcattggtttttacagaagtgagcaacttactcctgatatgagataagtgagtttatttggggtcattattttaataagtggttatagtaattatactctataatttaagagttgaataaacatggtttgtaattgaaatatttaatagttcaaatttggtcctaattagttgtttaacacttttgacctcttttttctaattcataatttatatttataatata

SEQ ID NO: 15578 - DNA, 287 bp, Glycine max
  Clone ID: LIB3094-018-Q1-K1-D8
ctagagaattatcatacccttcaagatgaaaccgtacctacgtccaatattcgtattattccttatccttctcgaccaatccatttcggcgagtgctgctataaatattaatggtctgagaaacaaaattagagaagttctaaacaagcacccgagcatcaatctttcggcagatatactgaataaggtgaatagaccactgaatgcactggattatctgcatggctaatgtaaggacaggccgtctcaagaatttcatgaatttttgaccgaattttaatgatcga

SEQ ID NO: 15579 - DNA, 248 bp, Glycine max
  Clone ID: LIB3094-018-Q1-K1-B8
ctgagttgcaagattcacttcaaattatgcttttcgctgatcgattcctcaggacatcaagcgacgtcggagatcatcgcaattccttgattattttcttttgatgatacgcggatatcgcgcacactgtgctggtgagcgcactgaggtataaagaagaagattgaattgcaaacagcatgaattaccttcttggagctttcaagcctgcatgttatgtcttgatcacgtgtaattgatttatgaac

SEQ ID NO: 15580 - DNA, 231 bp, Glycine max
  Clone ID: LIB3094-018-Q1-K1-D9
tcttccacgcttccgtccactctttctctccatatagaataagaaactttattgatcatcactgtactttactaatacattgattcatactatacccatatcaattattattatctttttattttatgtccaagatcttagttttttttactttttttgtataaataatattaatattactagccttattcttattattatgtatctcctcctattttcaaaaatttactt

SEQ ID NO: 15581 - DNA, 76 bp, Glycine max
  Clone ID: LIB3094-018-Q1-K1-E10
actatttctgctgtttgcctatttatttcttttatgtctctacccttctgtatgccttatcggtctatttccaaaa

SEQ ID NO: 15582 - DNA, 211 bp, Glycine max
  Clone ID: LIB3094-017-Q1-K1-G8
cccacgcgtcctgtgaagctgggtcattcctccgcggtatggatgtgaaccgggtaccttctgtggttgggggcgatgagtaagcaggtggttcatcgtcaaacagcacggattctatcgtcagtggaaggcgcagcgagagggaaaccactggagaagaaaacgacacagacagagcttgtgccatgtgcatcatcagcgacgaagaaga

SEQ ID NO: 15583 - DNA, 383 bp, Glycine max
  Clone ID: LIB3094-017-Q1-K1-H10
cccacgcgtccgtcaagcattgcatccctcttgatttgtagttggttttgtgctttagataaaagttctgccagatcaagaggggttctaagatcatagtgcgtgtcttgcatcaatggctaagttctttgctgctatgatcttggcactctctgccattttcatacttcaaacagaggtaatgtgctgctaatgaacaaggaggccacttgtatgacaacacgagcaaatatggaagtggaagtgtcaagagttaccaatgcccatcacaatgctcgaggagatgtatccagacccaataccacaagccctgcatgtgtttctgtcagaagtgctgcacgacatgcctgtgtgtgcccccggagtattatggtaataaagct

SEQ ID NO: 15584 - DNA, 180 bp, Glycine max
  Clone ID: LIB3094-017-Q1-K1-H11
cttatgcttccgaatcgcgttacattattctctacaccttaatgctgctcaaccttatatcaaggcgatgcgagatcaagacgggcacggagatcattcaccttaacgtgtatcatctgatcccaattaacctgttttcatattggctctctcttgcattctactactctagacttcaag

SEQ ID NO: 15585 - DNA, 293 bp, Glycine max
  Clone ID: LIB3094-017-Q1-K1-H12
acgtccatgctttcgtcaagcattacattcttctctacatcttaatgctgctcaaccttatatcaaaggtacagctaaacaatactggctgggttaccattcaccttatcttctatcatctgaccacaatcaacgtctatacatattttctcttccttgcaatttaccactcttatcatcaagtacatctatttaaatacaattaaggcacactctatcactacacaaccatatattttaaaagatcatcccaaacacttcccttcccttactctatcattgtcaatatttat

SEQ ID NO: 15586 - DNA, 236 bp, Glycine max
  Clone ID: LIB3094-017-Q1-K1-H4
agcgcccacgcgtccgggagagacagagggagcaaaagcaagaggcgccgaggagagaggagaaccacgaaggggggaagagagttaggttaagggaagaggagaggtaggagagagcgcagatgtaccaagagaggggcagctaggccagaaggagcaaaatgcggagggtagtgagccgcagcagtccagagccagagcccgaggcagcggcccaagaggcagagaggttctac

SEQ ID NO: 15587 - DNA, 268 bp, Glycine max
  Clone ID: LIB3094-017-Q1-K1-H8
cggtccgaattaggggtcgaccacgcgtccgcccacgcgtccgggagaagcagaaggagcaaaagcaatggcgccgaagaagccgagaaccacgacaaggaaccctgatttggttagggggattggcaagtattcgaggtcgcagatgtaccacaagaggggcatctgggccatcaaggccaaaaacggtggcgttttgccccgccacgatcccaaacccaagcccgaggccccggcccagatagccgccgagttctaccccgcggac

SEQ ID NO: 15588 - DNA, 331 bp, Glycine max
  Clone ID: LIB3094-017-Q1-K1-H9
cttctccttctcaatcttgtaattctatttcctccaccataatgctgcgcaagcttgtgtcagggccacgcaagaacaagcctggcacagttcccgttcacctcaacgtctatgatctcaccccaatcaacggctatgcctattggcttggccttggagtctaccattctggggttcaagttcatggattggaatatggttttggtgcgcacgagcacgacacaacggggattttcgaagtccaacccaaacactgccctgggttcactttcagaaagtcaattttcatcggaacaacagatctgggtccgaaagatgttcgagcattcat

SEQ ID NO: 15589 - DNA, 335 bp, Glycine max
  Clone ID: LIB3094-018-Q1-K1-A1
acgcggacgcgtgggtttcagaggcaccgaatgttcttacagttgcattaaagagatttcagggtgggaaatttgggaaggtgaacaagcctattcaatttcctgaaatacttaacttggcacctttcatgagcgggactagtgataaatcacccatatacagattgtatggggtagttgctcacttagatatcatgaatgctgccttttcaggtcactatgtgtgctatgtgaagaatatccaagacacgtggatcaaggttgatgacagtgtggtgacagctgttgaattggatagaatcttgacaaaaggagcatatatgcctttctatgca

SEQ ID NO: 15590 - DNA, 190 bp, Glycine max
  Clone ID: LIB3094-018-Q1-K1-A10
acgcccacgcttgcgaccacgcgtccgcactatactctatctataaatatttactcacccgctaggggttccttttcaaaggaagcttaacttaccaacctaattttggaattccattgaatgttcctgtatttaagaatattattttattaaataatgatattattattaccaagcctaagcccctttt

SEQ ID NO: 15591 - DNA, 299 bp, Glycine max
  unsure at all n locations
  Clone ID: LIB3094-018-Q1-K1-A11
accaagaggatgctgatggctcacaggaagttcgatcacctcacgcacgggtcactgggatggcttcccaggaagcgtgctgctcgtcacaggggaaaagtgaaggcattgcccatggatgacccatgcaaggcacccaggctcactgcattcttgagttacaaggctgctatgactcacatagttcgagaggtcgataacccaggatcacagcttaacaagaaggaaacatgtcagcctgttccaattatagagacccgtacaatggctataggtgccgncgtggctcatgtgaaaac

SEQ ID NO: 15592 - DNA, 412 bp, Glycine max
  Clone ID: LIB3094-018-Q1-K1-A12
cggacccctgggtttcagaggccccgaatgttcttacagttgcattaaagagatttcagtctgggaaatttgggaagctcaacaagcctattcaatttcctgaaatacttaacttggcacctttcatgagcgggactagtgataaatcacccatatacagattgtatggggtagttgctcacttagatatcatgaatgctgccttttcgggtcactatgtgtgctatgtgaagaatatccaaaacaagtggttcaaggttgatgacagtgtggtgacagctgttgaattggatagagtcttgacaaaaggagcatatatgcttttctatgcaaggtgctcgccaagggccccaagattaattatgaacagaatactgtccccagattcaaaacgtaaagtcagtggaaagac

SEQ ID NO: 15593 - DNA, 336 bp, Glycine max
  Clone ID: LIB3094-018-Q1-K1-A2
ttttgattttctggatccgtgtttttgagatgagtgtatgaatttaccgattgtttttcagatgaggttatcgttgaggcatgctttggtgtttgtgttaatcggggcgttgtggaacttgcaaagggcagagggtatccgatttgtgatagacagagacgagtgtttctcccatgatgtgaagtacgagggtgacactgttcatgtctctttcgttgttattaaggctgattctccctggcattacggcgacgaaggtgtcgatctcgtggtaaagggaccttctggcgagcaaattcaagaatttcgggacaagaccagtgagaaatttgactt

SEQ ID NO: 15594 - DNA, 412 bp, Glycine max
  Clone ID: LIB3094-018-Q1-K1-A3
tgagaagaagggagagaatggaggaaaaggcaaaagctgagcagaagaagataggtatgaccgagacttggttgaagaagcaccgtcttctttacaatggagccactagacaccctcttattattagcattcgcgatggcaccatcaacactgcttccttcaaaacatggctcgcacaggattacttgttcgttcgggcgtttgtcccatttgtggctagtgtgctgataaaagcgtggaaggaatcagattgcagtggtgacatggaagtcatattggggggcatggcttctctggaagatgagatttcatggttcatgacagaagccaacaagtggggtatttcactttctgacgttgatcctcaacaggctaacaaaaactattgtgggttgctggaaaagttaatgag

SEQ ID NO: 15595 - DNA, 98 bp, Glycine max
  Clone ID: LIB3094-018-Q1-K1-A4
ttagcacatggtagatacaggctcctaatgttcttacagtaccttacaagatatttatgtgcgtgacttgttagaagaagcaacactcttattcacaa

SEQ ID NO: 15596 - DNA, 420 bp, Glycine max
  Clone ID: LIB3094-018-Q1-K1-A5
cagaacagggactcactctcttcgcagcggcactctcggtggctttcatcttctcgggttgtcaagatgtacacatcgaggaagaaaattcacaaggataaggatgctgagccaactgaatttgaggaatcagttggacaggcattgtttgatctagaaaataccaacaatgagctgaaaagtgatctgaaagatttatacataaactcagctgtccaaattgatgtttctggcaaccgaaaggctgtggttatccatgtcccctacagactaaggaaaggattccggaagattcatgtcaggcttgtgagagaacttgagaaaaagtttagtggaaaagatgtaatcttgattgccaccaggaggatagtaaggccaccaaaagaaagtttctgctgttcagcgcccccggaccagaac

SEQ ID NO: 15597 - DNA, 121 bp, Glycine max
  Clone ID: LIB3094-018-Q1-K1-A6
attagtcggtcctcgacttctcagcactgtctgttttagcagctgattctgggtcgttggagtaaacgtgtcatcgcgtctggactcaactacttagtccctcgattgaatatcttgatta

SEQ ID NO: 15598 - DNA, 401 bp, Glycine max
  Clone ID: LIB3094-018-Q1-K1-A7
ttttgattttctggatccgtgtttttgagatgagtgtatgaatttaccgattgtttttcagatgaggttatcgttgaggcatgctttggtgtttgtgttaatcggtgcgttgtggaacttgcaaagggcagagggtatccgatttgtgatagacagagacgagtgtttctcccatgatgtgaagtacgagggtgacactgttcatgtctctttcgttgttattaaggctgattctccctggcattacagcgactaaagtgtcgatctcgtggtaaagggaccttctggcgagcaaattcaagaatttcgggacaagaccagtgagaagtttgactgtgtgggttacaaatccggggtccataaattctgctttagcaactagtgttcttatcatgaaactg

SEQ ID NO: 15599 - DNA, 291 bp, Glycine max
  Clone ID: LIB3094-017-Q1-K1-G3
gcttcctcctcttacgagcctttcctttcagtccattgattcggtgggtgcgggtgcagcgaaaccgagctagaccctgatcggcgtcggcacaccgtcggagaacaagatgattgtctgcgtcgccgtcgtcggtcaccagaacaatccgctgtacatacagagcttcacggaggccgatgatgctctcaagctccaccacatcgtccattgctcgctcgatgtggtcgacgagcgagtgaacaatcctaaaaagtctgggccgatgcgtaatgagacgtttttgggact

SEQ ID NO: 15600 - DNA, 187 bp, Glycine max
  Clone ID: LIB3094-018-Q1-K1-A8
ttttgattatctgcaaccgtatttttgagattagtgtattaacttaccgatggtttattggattatgttatcactgatgcatgctttgctgtctatgttaatcgtctctgttgtagaacttgcaaatgtcatatattatccataattactatacacatatactagtggattttatatgatattaaat

SEQ ID NO: 15601 - DNA, 357 bp, Glycine max
  unsure at all n locations
  Clone ID: LIB3094-018-Q1-K1-A9
attctgcaacttgataccgcgttcgctcactctctactcaacttcaattaatcaaatctgactttctctctcttgtggttaaatctcaattctattttggaaaatcagaatcaaagacagttaaaaatacagaacaaacatctcactcaacatcaacacttcagatctacgtttccactctcacaacaacgaaaaaggaaagaaaaaccgattctacagcgacaacaagtgaacgaaatgaacgaatcgatntatctcgaatgcgcacctcaaatatggtcgcgttgcactccttcactttctttcccccttcgtcctcattatccttctgtcaatcgttcacctttcgcactgaag

SEQ ID NO: 15602 - DNA, 169 bp, Glycine max
  Clone ID: LIB3094-018-Q1-K1-B11
tcatactaccactctttctccaacttcaccatttctcttcatctatcctactatattactatcctacgttactatataaaaatacgagttcactataataatatttcataaacccattatccttccataattcatttcactaatcattctcatcaacttatattactac

SEQ ID NO: 15603 - DNA, 435 bp, Glycine max
  Clone ID: LIB3094-018-Q1-K1-B7
ctgagttgcaagattcacttcaaattatgcgtttcgctgatcggttcctcatcacatcaaacgacgtcgcagatcatcgcaattccttgattatttccttttgttgatacgcggaatcgcgcacacggtgctggtgtgtgcactgaggtagaaagaagaagattgaattgtaaacagcatgaattaccttcttggagctttcaagcctgcatgtaatgtcttgatcacgtttaatgatgggaagaaccggaagcaggttccgtttaaaaaagaaaatggtcaaatggtcacagtcccacttttccaaagtcaagaaaacattggtgggaagattacaatagaaccaatgcaagggaagaagattgatcacaatggtgtaaaagttgagctccttggacagattgagatgtattttgacagatgaaatttttatga

SEQ ID NO: 15604 - DNA, 486 bp, Glycine max
  Clone ID: LIB3094-017-Q1-K1-D12
gcgtacggcgttgtgttgtgattgaaaatggagagcgatgttgaataatctatgcggaagaggcccagaaagtgtcctttctccgacgatggatggtgctcgcaagcaatttgaacaatattctggacggacatttgcaattatgggggaagtgaattttatgcaagatgatgataatcgtttggagattacccgaactaaatttggaagtttgcttaaaagacatggagatttgacagagcggcttgctagggattctgacaagataatatttgagcgtctacagaatgagtttgaagctgcacgagcttctcaaactgaagagatatgtttagacggtgaagagtggaatgatggtctactagctacaataagagagcgggtgcatatggaggcggacagaaaagcaatgcaaggggatgcggacatattagcatgtcctctggaaaaaattacatattaaattggaaacaaggtaaattgctg

SEQ ID NO: 15605 - DNA, 306 bp, Glycine max
  unsure at all n locations
  Clone ID: LIB3094-017-Q1-K1-D3
gtttggtgtaactgcatgctctntgccattgntgatggagtttgcctttagatttttgagttgcccatatagttatacaatttcattttagggtcttgttgactagtgttcctagactattggttaaggaactaaaaggagaagtttttaatatgtaaatcataggaaagtataaaaaaaaatcatgaagaacgcaattttatgccttccaataaaaaaccttagttccttaacccgtgtcctcgggacacttgttagcatttgccttcattttatatgtatcattagattattataattgaaaaa

SEQ ID NO: 15606 - DNA, 268 bp, Glycine max
  Clone ID: LIB3094-017-Q1-K1-D4
cccacgcgtccgcgagcttcagcaatggtgtacgtcaaggctcagaaatcaaaagcctacttcaagagatatcaagtcaagttcaagagaagaagagagggaaaaaccgattaccgtgccaggattcggttgattaatcaggacaagaacaaatataacactccgaaataccgatttgtggttcgctttagcaacaaggacattgttgcacaaataatatctgctagcattgccggcgatttagttcttgctacagcatattcacatg

SEQ ID NO: 15607 - DNA, 293 bp, Glycine max
  unsure at all n locations
  Clone ID: LIB3094-017-Q1-K1-D5
cgtctcgcccacgtcgtctcgtcccacgtccgtctcgtagaagccccagttnntttctggtgcctatgcatagctacannccttcacagagacccgcaagatagaatgggaaccgtgggaagaagtaagccagctcttattggtccctttatgtcctnncaactgtcccttggttttcttccagcttttggttctgtctctttcaggatctgctgaggcctacaagtaattataccagttggagacctcgtttaggatggtttgacaatactgaganagtccaatgtcaatta

SEQ ID NO: 15608 - DNA, 340 bp, Glycine max
  Clone ID: LIB3094-017-Q1-K1-D9
cccacgcgtccgcttctctctctctctctctgctttacttgcttgaagcaatggccaaagccttggcatcagtgctgctgtttctcctcgtagctgtgagtaatgtgtttgctgtagagcttgaacttgaaactcttccaccctcttaccctcaccctcaccctgttcactcccccacaccagcacctcttcacccaccagcaaatgctcctcacccacaccaccaccaccaccaccaccaccctccagcaccagcacctgttccttcaccttctcaccacaattaccctcctacccctgcccctgctaagcctcctactcaccaccatcaccatcaccc

SEQ ID NO: 15609 - DNA, 477 bp, Glycine max
  Clone ID: LIB3094-017-Q1-K1-E11
cccacgcgtccgtcaagcattgcatccctcttgatttgtagtttgttttgtgctttagataaaagttctgcgaaatcaagaggggttttaagagcatagtgtgtgttttgcaacaatggctaagttctttgctgctatgatcttggcactctttgccatttccatacttcaaacagtggtaatggctgctaatgaacaaggaggccacttgtatgacaacaagagcaaatatggaagtggaagtgtcaagagttaccaatgcccatcacaatgctcgaggagatgtagccagacccaataccacaagccctgcatgtttttctgtcagaagtgctgcaggacatgcctgtgtgtgcccccggggtattatggtaataaagctgtgtgcccttgctacaacaactggaagaccaaggaaggaggacccaagtgcccttgagcttcaacttgttcaacttcaattgtcgctttcctaca

SEQ ID NO: 15610 - DNA, 264 bp, Glycine max
  Clone ID: LIB3094-017-Q1-K1-E4
cccacgcgtccgcccacgcgttcgcccacgcgtccgcggacgcgtggggttctataggctcgtacctctgtgtccttgagttctaaggagacaggaacctacgtctggtggatgaatcatgaccgtgtgatcagagcgtgattaacggcccgggtgagtttctctttggagtagtctcatctttggctgtagaggatcgttcttaggacacttccatgtgcctgggaatggtcatacggttgtctgacagaccaaaaaagaaaa

SEQ ID NO: 15611 - DNA, 472 bp, Glycine max
  Clone ID: LIB3094-017-Q1-K1-E9
gcaaacatgtccaccgcaacaactcacgtgctcgcttatcccttccctacctccggtcacgtgatccctcggttagacttcaccaaaaccctagtctctcgcggcgtccatgtcaccgttctggtcacaccctacaacgaagccttacttccaaaaaactattcccctcttctccaaacgcttctcctccccgaacctcagttcccgaacccgaagcaaaacaggctcgtatccatggtaaccttcatgcggcaccaccactacccgatcattatggactgggcccaggcccagcccattcctcctgcggctattatatcagatttcttcctcggttggacccacctcctcgcacgtgacctccacgtgccgcgcgtagtcttctccccctccggcgccttcgcgctctccgtctcctactccctctggcgcgacgccccccaaaacgacaacccggaagacccaaacggcg

SEQ ID NO: 15612 - DNA, 495 bp, Glycine max
  unsure at all n locations
  Clone ID: LIB3094-017-Q1-K1-F10
agacagcagagcagagatctagcgtattctctcgctctttctttcactgtcacagagccacatccatgggcttcccagccaacggcgcgtctgcggcccagcccctaaacttcctcatctacggccgcacgggctggattggcggcctcctcggctccctctgccgggcccagggcatctccttccattacggctcgggccgcctcgagaaccgggcctccctcgaaaccgacatagccctcctcaagccctcccacgtcttcaacgccgccggcgtcacgggccgccccaacgtcgactggtgcgagtcccacaaagtcgagaccatccgaaccaacgtcgtcggaaccctcactctcgccgacgtctgccgcgaccacggcctcattctcatcaactacgccaccggttgcattttcgagtacgactccgatcacccnctcggatccggtatcggcttcaaagaaaccgactcttcccaattcaccggttctt

SEQ ID NO: 15613 - DNA, 262 bp, Glycine max
  Clone ID: LIB3094-017-Q1-K1-F5
cccacgcgtccgcccacgcgtccgcccacgcgtccgcggacgcgtgtggttctataggctcgtacctaggtgttcttgagttctaaggagacgggatcctacgtcttggggatgaatcatgaccgtgtgatcagagcgtgatgaacggcccgggtgagtttctctttggagtagtcgcatctttggcggtagaggatcgttcttaggacacttacagaggcctgggaatggtcatgcggtttgcagagagaccaaaaaagaa

SEQ ID NO: 15614 - DNA, 100 bp, Glycine max
  Clone ID: LIB3094-017-Q1-K1-F7
cccacgcgtccgaaaaaaaaaaaaaaaaaaagaaaaaaaaaaaaaaaaaaaaaaaaaaaaaacccacgcgtccgcccacgcgtccggttctagatcgcga

SEQ ID NO: 15615 - DNA, 428 bp, Glycine max
  Clone ID: LIB3094-017-Q1-K1-F8
caaaacaatcaacaatagcttgctagctactcctgttgctgtgagaaccgttgatgtagatgctttgcaagcaagatttagagactccaacaataaaagccatgcttaacacctaccatgcctccaaactctcatcaaaccagtgtggttctagccttgtgcaaacaatagatgcacctttacctctcgtatggtccctcataaggcgctttgagtatccacaagggtacaagctctttgtgaagaagtgcaaccttcttgatagggatggtgtgattggaagcgtgcgtgaggtcatgatcacatgtgggttacccgcttggagtagtgtggagaggattggacagcgtgatgatgacaagcatgtctttgagttgagcatcattggtggtgatcacaggcttggcaattatagttaacgattactt

SEQ ID NO: 15616 - DNA, 486 bp, Glycine max
  Clone ID: LIB3094-017-Q1-K1-F9
ctttgacattcacattcagaacacaagcagaatgcagagaggcacgccggtgagaaagccacacaccaacacctccgatctcctcacttggtcggaaactcctccgccggattccgccgccgccgccaccactcgctctggccagccttccgatagaatcagtaaggttctccacggcggccagctcaccgacgaagaagctcagacgctagccaagagcaaaccatgctcagggtataaaatgaaagaaatgactggaagtggtatatttgctgccaatggggaagattctgcatcagaagccaattctgcaaatttgaataacagaacaagcatacgcatgtgtcagcaagcgatgaatggaattagtcagatatcattcagcactgacgaaagcatttctcctaaaaaacctacctcaatacctgaggtagcaaagcagcgtgaactgagtgggactatgcaaagtgattcggacacaaagag

SEQ ID NO: 15617 - DNA, 473 bp, Glycine max
  unsure at all n locations
  Clone ID: LIB3094-017-Q1-K1-G10
gttgttttcgttcctctgaagtctggagtggtggagcttggttcgtttgaaatggtgcctgaagagcagggtgttgtggaaatggtcaggacagcatttggggaatccagtcctggacaggcaaaggtgtttccaaagatttttgggcatgagttaagcctgggggatacaaaatctcagtctataactattagtttctccccaaaggtggaagatgatccgggtttcacttcagactcctatgaagttcaagcactaggggtgaaccatgcttatggaaattcttccaatgggactttaggtgacggtaatgaaggaacattgtttcctcaattgaatcaaatgatggctgggaattttaatgctcaagcaagggttccttgtctagatctcggtaatgaagactcatcatcaattcatgcagatgagcggaagcccaaaataagaggtaggaaacctgccaatgngagaga

SEQ ID NO: 15618 - DNA, 428 bp, Glycine max
  unsure at all n locations
  Clone ID: LIB3094-017-Q1-K1-G11
atgaagagcattggaacttcatattccacaactaccttaggccttggtaacttcatcagttcctttcttctctcaacagtgtcaaatatcaccaagaaaaatggtcacaaggggtggattttgaacaatctgaatgagtctcatcttgactactactatgcattttttgcaatattaaacttcctcaacctcatcttcttcgcgtatgttactaggtactatgtatatagggttgaagtttcagattccatagacaagcttgcaaaagaactgaaggaaaagaccgtgtccaacgttgtgaatccaaaagactagttgattggggtatctaaggggagaaagaggattaagaccgtgaaaagtttcaaaactactntatgtaccaaattggatggccaaagaactagatatgtgtgtgtctgttgggg

SEQ ID NO: 15619 - DNA, 380 bp, Glycine max
  unsure at all n locations
  Clone ID: LIB3094-017-Q1-K1-G12
gaaatgtgaaagccttatcatacagtgtttgcaagatgccaaggtagaagttgaagaagtaaatgatgtgataattgtaggcggatgttcttacatcccgagggtgaaaaatcttgttactaacgtatgtaaaggcaaggaactttataaaggcatgaatcctttagaagctgctgtttgcggtgcagcagtggaaggagctattgcttcaggcgtcaatgatccctttgggaacttggacttgttaactatccaagctacacctcttgccattgggattcgagctgatgggaacaagtttgtccctgtaattccgagggatactacaatgccagcacggaaagagctangtttcacaactactcatgaccatcaaactg

SEQ ID NO: 15620 - DNA, 447 bp, Glycine max
  Clone ID: LIB3094-017-Q1-K1-D11
ctccttcttctctctcttctctaacttcttaatcatgccaaaccttacatcagtgctctttaactctggagcggtactaatatttactatcatcttaacttctactctttcaccctcttaccctaccctaccctgtcactcctccacaccacacatcttactcaccatcaaattctctacccacactacaccataccaccaccacccttcacacctcacctataccttaccttctaccacattaccctttacccctcccatctaatcctcctactaccatcataccatcaccctacttctcctataatccacctcctctttcgaatcatcctccatataaacctcctgtttcatatcaccctccagttaaacctcctatttcatcttaccctccttttaaacctccttttattacggttcaccctccttttaaacctcctaattttc

SEQ ID NO: 15621 - DNA, 220 bp, Glycine max
  Clone ID: LIB3094-017-Q1-K1-A1
atgtctagcacggagggccagaccatcaggagcgaggagtgagattgcatgagggggggggaagccgctggtggttgaagaagtggaggttgcgccaccgcaagcaggtgaagtgcgtttgaagatcctctacacctgtctttgccagactagtgtgtacttctggagtgcgaaaggccaagctccatagtagcctcgcatagtttggccatagaagctt

SEQ ID NO: 15622 - DNA, 515 bp, Glycine max
  Clone ID: LIB3094-017-Q1-K1-A11
tcccggtcgaccaggcgtacgatcgaaaccttaagtttcggatcaggtctgagcaatctggttggtagaacctttggtcttagagagtcaagggttatgtctgaattagacgatcagattcctactgccttcgatccttttgctgatgcaaatgctgatgactcgggtgctgggtcaaaggagtatgtgcatattcgcgtacagcagcgaaatggaaggaaaagcctgacaaccgttcagggattgaaaaaagaattcagctataacaagatacttaaagatgttaagaaagagttctgttgcaatggaacagttgttcaggacccagaactaggacaggttattcaacttcaaggtgatcagaggaagaatgtctctaccttcctggtccaagctggtatcgtgaagaaggagcatatcaagattcatggtttctgagcggttggagtctcaagtgtcaagtcttacgtgcctgcctatgtgttgggcatatataatctgagttgtgtatgtga

SEQ ID NO: 15623 - DNA, 378 bp, Glycine max
  Clone ID: LIB3094-017-Q1-K1-A12
ctttctccgagaacaaataaaaaaacgtgattcgctcttctcttcgaataaaccacatataccaactgacgagatgagtagtgagagaagggggggttgtcgttcacgaagctgttcagcaggttgtttgctaagaatgaaatgaggattctgatggtaggtctcgatgctgctggtaagacaaccatcttgtacaagctcatgctttgagaaatcgtcaccaccattcccaccatcggatgtaatgttgagactgtggagtacattaacatcagtttcactgtgtgggatgttggtggtcaggacaagatccgttctcttttgaatgcatatttccagaacacttatggtctcattttttgtgggtgatatcaattg

SEQ ID NO: 15624 - DNA, 127 bp, Glycine max
  unsure at all n locations
  Clone ID: LIB3094-017-Q1-K1-A3
catgtctagcgccgtgggccagaccattgggtgctgggtgtgcnantgcatgtgggtgtgagaagccgctgtgggttgaagaagtggaggttgcgccaccgcaagctggtgttgtgcgtttgaagat

SEQ ID NO: 15625 - DNA, 235 bp, Glycine max
  Clone ID: LIB3094-017-Q1-K1-A5
ttctatcattcattcatcttcgttctagagccatgtctagcaccgttggccagaccatcaagtgcaaagctgcgattgcatgggaggctgggaagccgctggtgattgaagaaatggaggttgcgccaccgcaagcccgtgaagtccgtttgaagatcctctacacctctctttgccacactgatgtttacttctgggatgcgaagggccagactccattggttcctcgcatttt

SEQ ID NO: 15626 - DNA, 257 bp, Glycine max
  Clone ID: LIB3094-017-Q1-K1-A6
atttgaaggttgttttgtgcttatagataaaagttctgccaaatcaagaggggttttcagatcatagtgtgtgtgtgtgtgttaaacaatggctaagttctttgctgctatgatcttggcactcattgccatttccatgcttcaaacagtggttatggctgctaatgagcaaggaggccacttgtatgacaacaagagcaaatatggaagtgggagtgtcaagagataccaatgcccatcacaatgctcgaggagat

SEQ ID NO: 15627 - DNA, 464 bp, Glycine max
  unsure at all n locations
  Clone ID: LIB3094-017-Q1-K1-A9
ttttgattttctggatccgtgtttttgagatgagtgtatgaatttaccgattgtttttcagatgaggttatcgttgaggcatgctttggtgtttgtgttaatcggggcgttgtggaacttgcaaagggcagagggtatccgatttgtgatagacagagacgagtgtttctcccatgatgtgaagtacgagggtgacactgttcatgtctctttcgttgttattaaggctgattctccctggcattacggcgacgaaggtgtcgatctcgtggtaaagggaccttctggcgagcaaattcaagaatttcgggacaagaccagtgagaagtttgactttgtggctcacaaatccggngtccataaattctgcttcaccaacaagtctccttatcatgaaactgtccgatttgatgtacatgttggtcacttctcttactttgagcaacatgcnaaagatgagcatt

SEQ ID NO: 15628 - DNA, 366 bp, Glycine max
  Clone ID: LIB3094-017-Q1-K1-B3
aagaatcaaagaaaggggtggtggctgcttcgaaagcttaataatttgtttatttccagaacatcatagttttcgcagcagcaaactaacaaattactcatatcatataataagatggcccgttctctctcgcaagccaaacgtattggtgtccttgttgctcaatctatctccctaattcccgttcatcggcgaggttacgcagtggcatccgatgtatcggtaagagttggattgggtaatattgggctgaggaatggaatcgtgtgaggtgtagaagagaagcctgatacaagagatggttcaaaagcctacttaactgattgggccccagacccagtaacagggtgctatggtgccattaac

SEQ ID NO: 15629 - DNA, 423 bp, Glycine max
  Clone ID: LIB3094-017-Q1-K1-B9
gttgttttcgttcctctgaagtctggagtggtggagcttggttcgtttgaaatggtgcctgaagagcagggtgttgtggaaatggtcaggacagcatttggggaatccagtcctggacaggcaaaggtgtttccaaagatttttgggcatgagttaagcctgggggatacaaaatctcagtctataactattagtttctccccaaaggtggaagatgatccgggtttcacttcagactcctatgaagttcaagcactaggggtgaaccatgcttatggaaattcttccaatgggactttaggtgacggtaatgaaggaacattgtttcctcaattgaatcaaatgattgctgggaattttaatgctcaagcaagggttccttgtctagatctcggtaatgaagactcatcatcaattcatgca

SEQ ID NO: 15630 - DNA, 262 bp, Glycine max
  Clone ID: LIB3094-017-Q1-K1-C1
cccacgcgtccggtgatttcagtgagtgatcggtgttcacttgatctcatcagaatcgtcagcgtcaattgattgagattccgatcagaaacagcggcggcggaaggcctggagaggcgactcaccccgacacgttgaaggcggctgtggctgagtgcatctcaacctgcatcttcgtgttcgccagctcaagctccggcatcgcctacaacaagctgacgggcaacgtggctgccacccatgccggcctggtctccgcctc

SEQ ID NO: 15631 - DNA, 466 bp, Glycine max
  Clone ID: LIB3094-017-Q1-K1-C10
attcgaaatctgatctccaacgattgatctcggtagaggctagtgcactctccaatctgcaaaaatgcctgtcagactcgaaatcaagcgcaagcttgcgcaaagatcagagagagtgaaatgtgtggatctgcatccaacagagccatggattctggcgagtttatactctggaactgtctgcatctggaactaccaatctcagaccatggccaaatcttttgaggttaccgagttaccagttagatcggccaagtttattgcacgcaaacagtgggttgttgctggagcagatgatatgtttattcgtgtatataattacaacacaatggataaagtcaaagtatttgaagcacatactgattacattaggtgtgtggcagttcatcctacccttccttatgtgctttcatcatctgatgatatgctcataaagctctgggatggggaaaaaggctggatctgt

SEQ ID NO: 15632 - DNA, 501 bp, Glycine max
  unsure at all n locations
  Clone ID: LIB3094-017-Q1-K1-C11
gcttcctcctcttacgagcctttcctttcagtccattgattcggtgggtgcgggtgcagcgaaaccgagcgagaccctgatcggcgtcggcacaccgccggagaacaagatgattgtctgcgtcgccgtcgtcggtcaccagaacaatccgctgtacatacagagcttcacggaggccgatgatgctctcaagctccaccacatcgtccattgctcgctcgatgtggtcgacgagcgagtgaacaatcctaaaaagtctgggccgatgcttaatgagacgtttttgggactgctttatcctattgaaaactacaaagtatatggatatctgactaatacgaaggtgaaatttatcttggtgaccacggatctggatgttaaagatgcggatgtaaggaattttttcaggaggttccatgccgcatatgtagatgcagtttcaaacccattccatgtaccangcaaaaagataacctncagaacttttgcagaaagagtgag

SEQ ID NO: 15633 - DNA, 289 bp, Glycine max
  Clone ID: LIB3094-017-Q1-K1-C2
tttgaatacattccttgtagtttatactgaaagatgggtttgaagatggcgttactgatcctaggcctttccctcatgctccttttggtctcctctgaggtggcatccactaatacaaaagaggaggcaaatggagtggatgatgccaaatatcccggtggaagctatggagggggttacccaggtcatggcggtggcggttatcctggccatggcggtggcggttatcctggccatggcggtggtggttgctatcctggtcatggtggtggtcactctggtcatggtg

SEQ ID NO: 15634 - DNA, 262 bp, Glycine max
  Clone ID: LIB3094-017-Q1-K1-C3
cccacgcgtccgcccacgcgtccgcggacgcgtgggcgcgagtgaacacaggttacagcaatggctttcttttgtagaatgtggaatttattaagacaggctgcaagcaggctggttagttcagaattgcgatcatccccttcgatttttcaggctatacgcagtatgtcatctgctccaagcacaaagcttgtaatcggaggggtttcatattctactgacgagcaaagtttgagggaagctttttcaagttatggtgaag

SEQ ID NO: 15635 - DNA, 197 bp, Glycine max
  Clone ID: LIB3094-017-Q1-K1-C6
gttgaattcttatgcaaagatttctgtccatcttctctggatgatattgccgagatgagttggccactatgttaagaatcagctcccacttttgactccatgagattcactagaagtttgagtgggctttcggtcaggaggtctttagttggttcatttgaggagtctcttttatctggctcgttcttatctggaaa

SEQ ID NO: 15636 - DNA, 413 bp, Glycine max
  Clone ID: LIB3094-017-Q1-K1-C7
cggacgcgtgggcggacgcgtgggtctcttacataccccaaatatgggttctaaagcccgttggcgccagagttgggctccacagcctttgacacccttaatggaaggccctggccctgaaatgcaagaggaaggaaccaagaaagagagctcttgggaagtcataagggaatggttcaggactcataagatctccccaggtggaagcttttcacaatcatcatcattctatggaaccattcatgcagagacacaagatttgaggttgttgcttggtgtcttgggttgccccttggctgctattcgctcagcacatgatcccagtcttagtattcacattatagagaccccatttgtaagctctctatacactgcagaatgtgccctttagaccaaacttaaattaaagtttt

SEQ ID NO: 15637 - DNA, 482 bp, Glycine max
  unsure at all n locations
  Clone ID: LIB3094-017-Q1-K1-C9
ctcaaaacttgtcttccccctctctcctcctcggaacgccattcgcatgcagttctcgcacaacacactggacaattatatttcaaagcgcaacccatttcaacatttcatcatttttctcgtgtaaccatcccctcacccacgaacccatcccatgaatttcccaaaatgccctcaacccagaaccccctcttctccttcctcctacattccaccccaccgtacccaactgcaccctcgcatgatctccctctactcttcttcttcttcttccctaaaatatccaaatcccaacaacaaaccccacaacgccaaatgcctcttgttcttcttcgccctcctcttcttcaccgcccccttcctcttctacctcttctccaccgncctccaactctactcctcccccaaattcgccgactcccgcccctactcctttgccctcgccctccgcgccggcccccacgccctccgtctctccgtct

SEQ ID NO: 15638 - DNA, 305 bp, Glycine max
  Clone ID: LIB3094-017-Q1-K1-D1
gcttcctcctcttacgagcctttcctttcagtccattgattcggtgggtgcgggtgcagcgaaaccgagctagaccctgatcggcgtcggcacaccgtcggagaacaagatgattgtctgcgtcgccgtcgtcggtcaccagaacaatccgctggacatacagagcttcacggaggccgatgatgctctcaagctccaccacatcgtccattgctcgctcgatgtggtcgacgagcgagtgaacaatcctgtaaagtctgggccgatgcttaatgagacgtttttgggactgctttatcctattg

SEQ ID NO: 15639 - DNA, 311 bp, Glycine max
  Clone ID: LIB3094-015-Q1-K1-H9
gctgagcgcactacgcactaaagactagcgatcattgtttgatactagcaccttttaacaggaacatgtaacataaaaagggtgacggaaagaaaaccatatcaaacccaacccaccttgtcctatctgccaccatgtgttgatgttgtgactcgaatggatgcacatacatgttacagtggcagtgctttatcatctgcaccaatgaaacaatatttacaccatttctcgaaactgattcagtactatctggataaatccactccacattccacgttcagatagattgagacttacgcgatagcattcat

SEQ ID NO: 15640 - DNA, 267 bp, Glycine max
  Clone ID: LIB3094-015-Q1-K1-E5
cacaaccaagaagaaaaaacacaaagcaaaagagacccaaccaacccaaaaacaagaaacaacaaaaccagcaaaacacaaaccaaaaaaaaccaacaaacaacccaaaaaagaacccaaaaaaacagacacaaacccaaccgaccaaaaaaaaacaccaaacaacccaaaaaccaaagaaaaccacaacccccacagaccaaaaaaaggacacccaaaaacacaaaccaaacacagaaaaaaacccaacaaaaaaaacaaagcaaa

SEQ ID NO: 15641 - DNA, 430 bp, Glycine max
  unsure at all n locations
  Clone ID: LIB3094-015-Q1-K1-E7
cagaacagggactcactctcttcgcagcgttactctcggtggctttcatcttctcgggtggtcaagatgtacacatcgaggaagaaaattcacaaggataaggatgctgagccaactgaatttgaggaatcagttggacaggcattgtttgatctagaaaataccaacaatgagctgaaaagtgatctgaaagatttatacataaactcagctgtccaaattgatgtttctggcaaccgaaaggctgtggttatccatgtcccctacagactaaggaaaggattccggaagattcatgtcaagcttgtgagagaacttgagaaaaagtttagtggaaaagatgtaatcttgattgccaccagggnnaaaaagggggggaaaatttttaagggggttttttaaaaaaaaggccaccaaagaaaggttctgc

SEQ ID NO: 15642 - DNA, 369 bp, Glycine max
  Clone ID: LIB3094-015-Q1-K1-F1
ttacacatctataaataaaatttacaaatataaatattctaatccaacttaatttaatgaatcaattttacattcatctttttatctataaaataccaacaattaactcaaaatctatcttaaatatttattcataaactcaactatccaaattgatctttcttacaacctaatatcttttattatccattttccctacatactaattaaaatattccttaatattcattttatactttttatataactttataaaaaatttaatttaaaatatctaatctttaattaccaccaatttattaataacttttttaaaaatttttaatatttttttttttaattaatgttcaccaaataaattttcttcta

SEQ ID NO: 15643 - DNA, 396 bp, Glycine max
  unsure at all n locations
  Clone ID: LIB3094-015-Q1-K1-F12
gccgtctgtgcattattatgtgcagtcttacantttaattaatgaatatcgngagcggtaatcgggccttcttcatcagggaagcaggggcgacctattaccacttgtataaaggttttagacatgactggtctgaagttatcagccctgaatcagattaagttgctaactattatatcatccattgatgatcttaactacccttagaagacaaatacttattacattgtaaatgcttcatacatattttctgcttgttggaaaggtttgaagccccttttaccaagagaggaccagaaagaaaaaatccangtgttacccaggtttgtggacgaagatgaagctattgaccctatcatggattactttcgtctctaaccacattttcttgtcgaa

SEQ ID NO: 15644 - DNA, 397 bp, Glycine max
  unsure at all n locations
  Clone ID: LIB3094-015-Q1-K1-F2
cccacgcgtccgggaagatggtgctttctgttgaggaaatgggtcgtctgtaccgaatagggaagacggtgatgcaaatgcttcgggacaggggttttctggtgggtgacttcgagatcaacatgtcgaagcatgagttcaagtccaagtacggcgagcacatgaagcgcgaggacctggtcatcaacaagtccaagaaggacaactccggcgaccagatctacgtcttcttccccgacgagcccaaggtcggcgtcaagaccatgaagacctacaccaaccgcatgaactccgaaaacgtctatagagccatcctcgtcacccagaccaacctcacccccttcgcccgcacctgcatcagcgaaatctccttnnccccaaaaaaaaaaattttttt

SEQ ID NO: 15645 - DNA, 360 bp, Glycine max
  Clone ID: LIB3094-015-Q1-K1-F3
taaagaatgcaatcacaacaaatgattcataaacccttggtgtcattctgcaagcaaaagataaattttagattatttacttataatatttttaaagtctgaaaaaacttgttctatgtatggtaaggtattaatccatcccttgcataaaatatgcttgattctatgttcttaatattatttcataaattttgttttcattttggaaggtcttttaaaaaaaaaaaaaagagcctgtctttctaaaagatccaatcttacctacccctgcattcccaactcatatactttttctataaatttatgatttttttctcaaaaattcttcccctttttaaaaaaaaaaaaatttaaatttac

SEQ ID NO: 15646 - DNA, 283 bp, Glycine max
  Clone ID: LIB3094-015-Q1-K1-F7
cccacgcgtccgggaaaaggcttgtaatccattccttcgtacatccagtgctgcaatccggcaatcactaaagattgcagccacagcaaatgatgcagaagcccttggtgtcatccggcaagcaaaggataatttttagattatttacttataatattttgaaagtctgaagaaacttgttctatgtagggtagggtatgaatccatccgtggcataaaatgtgcttgatgctatgttctcaatatgatttcagaaattttgtttccatttgggagggtctgt

SEQ ID NO: 15647 - DNA, 461 bp, Glycine max
  unsure at all n locations
  Clone ID: LIB3094-015-Q1-K1-G10
aaacacccttgtcgaccacaccaaaattaattacataaaaaagcataaaagcacaaaaagagagtaaaagagggaaaataaaacattttgaagtcatatttgcacacttgattaaaggctgtcgtcccttgtgacggatgcgtggggtgctaataccttccctgtgcgtaaaaacaactcccgaactattcacacttaaagttcgtagaccacaccttttcaattttcccgacgctttcctcaaataaaagttggtggcgactccgcgcattttcctttcatggaagacgcacttgtgagtcccgcatcgccctcccgtcaaagggtaggttgcgacagtacttgccctcccgccgaagggtaggttccttaattgaattaactaataacanaagtgaaactaaggctaaaataaactcacaattcaagctttggccataaaaatcactttaaaaaccatt

SEQ ID NO: 15648 - DNA, 461 bp, Glycine max
  unsure at all n locations
  Clone ID: LIB3094-015-Q1-K1-G11
attgctgctgtttgcctattggtgtactttgtggtctctaccctgctggatgcctcatctagcgatggccaaaaatcagatgaagagcagaaggaggcagaactagcagtttctgaattttctggaaatggtgctgggatactatctgctgctagcacagttgccagtacttttctcttagtttttgttgctgaatggggcgacaagtcatttttctccacaattgcccttgcagcagcttcttctccccttggagtcatagctggagcactggctggtcatggtgttgcaactttgctagctgtacttgggggttctttacttgggacgtatttgtcagagaaggttattgcctacatcggaggtgttctctntctcgtctttgccgcaataaccttatttgaaattgtgcaataggggttaaaagaaatgcaatataatctccgtgcaaagggttcaag

SEQ ID NO: 15649 - DNA, 449 bp, Glycine max
  Clone ID: LIB3094-015-Q1-K1-G12
cccacgcgtccgcccacgcgtccgcaaaaattacaacaccaatctcacccatttcaaaaaaaggccgttagtgttactattcgtaaaatggccactcttgttctttaccaattctttctcaaactcttgctcctaatttcagtctttcagctttcctttgctgctaggagactcaaccagctggttcaggaccagtcacagttactccattaccacaacggtcctcttctatacggcaaaatcgccgtgaacctaatctggtatggtcacttcaaaccatcccaaaaggccatcatcaccgatttcgttacctcactgtcatccccatcgtctcagagcagccagccatctgttgccacgtggtggaaaaccacggagaagtactaccacctgagtcccaagaacaagaaggctgcttcttctctttctctatcactgggcgatcagtt

SEQ ID NO: 15650 - DNA, 256 bp, Glycine max
  Clone ID: LIB3094-015-Q1-K1-G7
catccagcggggcaatccgcaaccactaaagagtgcaagcacagcaaatgatgcataagcccttggtgtcatccggcaagcaaaggataaattctagattattaacttataatattttgaaagcctgaagaaactcgttctatgaatggaatggtactgaatccatccatcgcataaaatgtactagatgctatgatctcaatatgatctcagaaattttgtttacattagcaatggacccgaaaaaaaaaaatat

SEQ ID NO: 15651 - DNA, 301 bp, Glycine max
  Clone ID: LIB3094-015-Q1-K1-G9
gctgaacgcagtaagcactaaggagtagcgtgtattggctgatacttgcaccctcttaaacagtaacatgagacaaaaaaagggtttaccggaaaggaaacccaaataaaccccaaccaacttggtcgatctgccacaagtgtggttgttgggaatttgatggaagccagttgaagtggccgtggcggtgcttcaccgtctgcaccagtgaagcaatatctgcacgattttttgaaactggttcagtactatctggataaatccactccacattccacgtacagatggattgggacttttg

SEQ ID NO: 15652 - DNA, 250 bp, Glycine max
  Clone ID: LIB3094-015-Q1-K1-H1
ctccccaactttccatttttttctattctcatcaaattttaattcatcccacttactcattaacatttaatttaaattccaaaaaacatacttctcccactatacttttacataacttctactacagactatcctatcttatttcttcctacatctattttccttaaatccattaccatatcaccactcaccactatacatctctaatctctatatttatctcaaatataatattcaaaactaaaacaaa

SEQ ID NO: 15653 - DNA, 252 bp, Glycine max
  Clone ID: LIB3094-015-Q1-K1-H10
aaagggccttgtcgaccacactcaaaattaaattacataattttatcataaaagcacaaaaagacgtaacatggggaataataaaacattttcaagtcatatttgcacactagattaaaggctttcaacccttgttactaatgcgtgtggttctaatacctttcctttgcgtaaaaacaactcccgaactattcacacttaaagttcttctaccataccttttcaattctcccgactcttacctcaaataaa

SEQ ID NO: 15654 - DNA, 369 bp, Glycine max
  Clone ID: LIB3094-015-Q1-K1-H11
ttctagattgttttgttctgtatatttgtgaactttcaaatgaataagggttttaagatcatattgtgtgttttgcaacaatggctaatttctttgctgctatgatcttgtcactctatgccatttccatacttcaaacaattgtaatggcttctaatgaacaaagatgccacttgtatgacaacaatatcaaatatctaagttcaactgtcaagaattaccaatgcccatcacaatactctacgagatgtatccagacccaataccacaatccctgcatgcttttctgtcataaattcttcattacatgcctatatcttccccacctgtattattgccataaaacttttttccctttttacaacaact

SEQ ID NO: 15655 - DNA, 276 bp, Glycine max
  Clone ID: LIB3094-015-Q1-K1-H4
cccacgcgtccgtcaagcatttcatcccgtttgatttgtagtttgttttgtgctttagagaaaagttctgccaaatcaagaggggttttaagatcatagtgtgtgttttgcaacaatggctaagttctttgctgctatgatcttggcactctttgccatttccatacttcaaacagtggtaatggctgctaatgaacaaggaagccacttgtatgacaactagagcatatatggaagtggaagtgtcatgagttaccaatgcccatttctatgctc

SEQ ID NO: 15656 - DNA, 342 bp, Glycine max
  Clone ID: LIB3094-015-Q1-K1-H8
cgcacatcctctataaggagggaaactgatctcagtaagaagcctcctcgccaatcttgagatggatacaagcacgtggttgatgtggaatactgtcccccagttccttctgatggccctaaatttcctccaaaagcagtaaaagcaaaagaggcagcacaaaatgcgcccaatacacagaatactgtggaatatcatgaaattgtagaagatgagatgattcgaggattacagcagttgggatggaaaaaagttgatgtcagctttcactcagcattctggcctttctttgctcataacaacattcatgtgaaaaatgaatggtttcacaatgctggtgta

SEQ ID NO: 15657 - DNA, 246 bp, Glycine max
  Clone ID: LIB3094-015-Q1-K1-E3
aaaatttacacatctaaggagaaaattcacaaagattatgattcttaaccaactgaattttatgaatcaatttgacaagcattttttgatctaaaaaataccaaccattaacttaaaaatgatcttaaaaatttattcctaaacttaactttccaaatttatttttttggcaacccaaaagcttttgttattcatattccctacaaactaatgaaaagatttccgaaaaattaatttaagcttttt

SEQ ID NO: 15658 - DNA, 404 bp, Glycine max
  Clone ID: LIB3094-015-Q1-K1-B12
gcttgctcctcttacgagcctttcctttcagtccattgattcggtgggtgcgggtgcagcgaaaccgagctagaccctgatcggcgtcggcacaccgccggagaacaagatgattgtctgcgtcgccgtcgtcggtcaccagaacaatccgctgtacatacagagcttcacggaggccgatgatgctctcaagctccaccacatcgtccattgctcgctcgatgtggtcgacgagcgagtgaacaatcctaaaaagtctgggccgatgcttaatgagacgtttttgggactgctttatcctattgaaaactacaaagtatatggatatctgactaatacgaaggtgaaatttatcttggtgaccacggatctggatgttaaagatgcggatgtaaggaattttt

SEQ ID NO: 15659 - DNA, 229 bp, Glycine max
  Clone ID: LIB3094-015-Q1-K1-B2
actactacaacatgtagtattttttgatagaataaaaatctctcaaaaaaaactcgaaaatattttaatcataacttaaaggatttgttacgtacaaaaataaagatagattcatattcccatacatataaattatatatgaacaaaaaaaatcttatattactttttgaaaaaaaagtataaatccattttttttgagtaaaaatactattccaattataataataat

SEQ ID NO: 15660 - DNA, 428 bp, Glycine max
  Clone ID: LIB3094-015-Q1-K1-B3
ctttgaaaccctccaaccttagtttcaattttaaacttgttcaccctttattctctcctggtccaaacagcaaccatggcttcaataataaccttggtgacatccaccttgctctttctttctttcactttgtcatgtgctattgacacctccaccatcaccaactacaccgacaatgaggtcatgaccatgtacgaggagtggttggtgaagcaccaaaaggtgtacaatgggttgagagagaaggacaagaggttccaagttttcaaagacaacttggggttcatacaagagcacaacaacaaccagaacaacacttacaaacttgggttgaaccagtttgctgacatgacaaatgaggaataccgttgggtgttttcccaaatttttggggttttaaaattttttttttttggcaccaagagtga

SEQ ID NO: 15661 - DNA, 99 bp, Glycine max
  Clone ID: LIB3094-015-Q1-K1-B5
tccaagtagatatgtcgttgatttagaatacatttattctaatatcctatctccaccattcatattaatatttgcaaaaaaaaaaaaaaatcacttcca

SEQ ID NO: 15662 - DNA, 318 bp, Glycine max
  Clone ID: LIB3094-015-Q1-K1-B6
tacaaaatcaaggattttttgatatattttaataccctcaaaaaaaactctaaaatattttaatcataactaatacaattatttacctataaaaataaatatatattcatattcccatacatataaattatatatcaacaaaaaaaatcttatattactttttaaaaaaaaattataaatccattttttttaattaaaaatactattccaattataataataataaaaaaaaaataatattacataccttctatataatccaaacttacctactcattcatactacataataacacttatataatacacacctaatat

SEQ ID NO: 15663 - DNA, 301 bp, Glycine max
  unsure at all n locations
  Clone ID: LIB3094-015-Q1-K1-C1
cctaaacaactctttctcttcttccttcgctcgttgttcttcctcgcgtagatcgacaatggcngagacagagacgtttgctttccaggctgagatcaaccagctcctcagtctcatcatcaacaccttctactccaacaaggagattttccttcgtgaactcatcagcaacgcctccgatgctttggacaagattcgatttgagagtttgacagataagagcaagctcgatgctcatccagagttgttcattcatattattccagacaagactaacaatacactgaccattgttgacagt

SEQ ID NO: 15664 - DNA, 454 bp, Glycine max
  unsure at all n locations
  Clone ID: LIB3094-015-Q1-K1-C10
gcaaacatgtccaccgcaacaactcacgtgctcgcttatcccttccctacctccggtcacgggatcccgctcttagacttcaccaaaaccctagtctctcgcggcgtccatgtcaccgttctggtcacaccctacaacgaagccttacttccaaaaaactattcccctcttctccaaacgcttctcctccccgaacctcagttcccgaacccgaagcaaaacaggctcgtatccatggtaaccttcatgcggcaccaccactacccgatcattatggactgggcccaggcccagcccattcctcctgcggctattatatcagatttcttcctcggttggacccacctnctcgcacgtgacctncacgtgccgcgcgtagtcttctccccctccggcgccttcgcgctctccgtctnctactccctctggcgcgacgccccccaaaacgacaacc

SEQ ID NO: 15665 - DNA, 325 bp, Glycine max
  Clone ID: LIB3094-015-Q1-K1-C11
ccttattacctcctacctcgaatccttgaaacatactttacacttacccaaaaccctaatctcttccatcttacatatcacctcacactttacaccctacaactaactcccaacttactaaaaactattttctccaaactccaaatgcttctcctacctcaacctcaaatccctaaccctaaccaaaacatactcatattcatcttaaccctcatccaccactaccactacactatcattatttactaatcccataccaatcctattccttctactattataatatcatatctcttcctcacttatacccacctacttcaacttt

SEQ ID NO: 15666 - DNA, 429 bp, Glycine max
  Clone ID: LIB3094-015-Q1-K1-C2
cccacgcgtccgcccacgcgtccgcccacgcttccggcggctagggttttagcgcagcttcttctagatgtaaggaagatgggtaaggaaaaggttcacatcagtattgtggtcattggccatgtcgactctgggaaatccactaccactggtcacctgatttacaagcttggaggcattgacaagcgtgttattgagaggtttgagaaggaagctgctgagatgaacaagaggtctttcaagtatgcctgggtgctggacaaacttaaggctgagcgtgaaagaggaatcaccattgatattgctttgtggaagtttgaaacaacaaagtattattgcacagttattgatgcgcctggacatagggatttcaaaattttttaaaaaaagggggaaaaaaaattttttaaaattttgattactgggaca

SEQ ID NO: 15667 - DNA, 307 bp, Glycine max
  Clone ID: LIB3094-015-Q1-K1-C3
gaagttgcgagagtgaagaaatggcgcatgtcttggcattttatttggaggagcttcggggcctccacagcatctccaaaagacctcgaaccctctctcttctctcctccgaaattcgtaacctctaaaagttatcgtcagaggaagcttctgcgcatattccggctccgatttcgaccggaactaaagtggcgccttcacctgcgctgaattatgctgcactcgcgtctttcagctgggaccaggatagtgacaaagttaatacatatgtgttaatggatggaatccatgagaataatgtttaatc

SEQ ID NO: 15668 - DNA, 263 bp, Glycine max
  Clone ID: LIB3094-015-Q1-K1-C4
gaatgataaggtatatgaacaatccttaactgatacttctacaagatgttctattttttcatagaaaaagattcgctcaaaaaaaacgcgaaaatattttaatcgtaacttagaggatttgttacgtagaaaaagaaagatagattcatattcccatacatataaattatataggaacaaaaaaaatcttggattactttttgaaaaaaaagtagaaatccatttttttggagtaaaaatactattccaattataataataag

SEQ ID NO: 15669 - DNA, 183 bp, Glycine max
  Clone ID: LIB3094-015-Q1-K1-C6
aaaaaaacaccacaagacccaaaacccaacacacacaaaaccaaacacacaaaaaaaaaaaccacaacacatacccacacacacaacaaacatacaaacaaaaaaaagctaacaataccattaaaaaaaaaatataaaaccacattttcaaaatcaaaataccattcccactataacaatacc

SEQ ID NO: 15670 - DNA, 432 bp, Glycine max
  unsure at all n locations
  Clone ID: LIB3094-015-Q1-K1-C7
cccacgcgtccgctcaactttgccccttatggacccctttctgcagactagaaatggctgcaatttctgggtttgggctgaaacccctgagggctgtgagtgtttcttcttcatcttctgcatcaagtgatgatggatttgtcacactgacagagtatgtggggaaggaaggaatgaatgtgaaagatgatttggtggtgttgcttgatcatattcagtatgcttgcaagaaaattgcagcacttgtggcttctcctttcaattacagccttggcaaacaaactgctcttggttctgttggttctgatagggatgctccaaagcctcttgatattgtctcgaatgaaattatcttgtcatttttcccaaaaaccctttttttccccccccggnnaaaaaaaaaaaacatcccggaagagttgctgtcatggc

SEQ ID NO: 15671 - DNA, 264 bp, Glycine max
  Clone ID: LIB3094-015-Q1-K1-C8
gacgcacgcgtcccgagcctccctcaacttttccccaatttaccatactcaacaggaacactgcaaatctcatgtgactgaaacctcttagactgatactgatccttctccatcttctgatcaagtaatcatagatatgtcacactgacataatatttctacaaacaacgaatgaatgtgaaatatgatttaataaacatgctcgatcatattcattaaactagcaacacaatttcactactagtagctataactttcaattac

SEQ ID NO: 15672 - DNA, 399 bp, Glycine max
  Clone ID: LIB3094-015-Q1-K1-D12
cccacgcgtccgcccacgcgtccggtgattgaagctagttagaacaagatgttgcagctacgctacactgcgattttctccgaaatgcttttgattctcacgctcgtcttcaaaaccccactgagaaaactcgtcatcgtttccctcgatagtgtgaagcgcggtcgcggtcccgtggtggtttccaccgtgggcgccacattgatggtggttctcgcttcgagcctctacagcatggccaagatccagcaacgcaccctcgaggccggcatagtcaaccccaccgaccaagtcctcatgtccaagcacatgctcgaagcttctctcatggggtttctgctgttcctctctctgatgattgatagattgcaccattacataagagagcttcggtcactc

SEQ ID NO: 15673 - DNA, 440 bp, Glycine max
  Clone ID: LIB3094-015-Q1-K1-D4
cggcgaggagcctccagagaagaaggtcctttgcactatcgagaacacgagggaactcgaggagaccgtgtgcaagcccgatgacgaagagttatttgctggaaatgatgctgatgaatttggtccaattttgaatcagcaacaaactcccaagatattaatcaccacttgccgcttccattctactaggggacctgcttttatatcagagttgctttcagttataccaaatgcacattacttcaagagaggaacatatgatctgaaaaagattgtagaatatgcaaagaagaaggacttcacttctattatagttgttcacaccaatcgtagggaaccagatgctcttttaatcataggtgtacctgatgggcccccccctttttaaaaccccttttggggcccttttttttcccatttcaagctctcgaaacttgttt

SEQ ID NO: 15674 - DNA, 425 bp, Glycine max
  Clone ID: LIB3094-015-Q1-K1-D7
cggacgcgtggggtttcctagtatgcaaggttaagaatcagcaaatttcaaccccggatccacgagtaacatgttgacaaaagtctaccgagttgcattttgttcttgtaacctcctcaacccactggaggtcgtgatctgtaaattttgagtgaattatacaacaaattcttgaaaaagaaatgattttctcttctgagctgctgcttattgatcgatgaatccagctgcaattattttcgaagatggcaataaaatctcttctgcggtgttatctctttgactgaattccaaattttgtaagtataatagttggctatgaaagagactgtaccaagaagcatagtgtgagagtcagagatttttcccaaaaagggttttttttgggggttttttttaaaaaagtatgagatgtgagaacattt

SEQ ID NO: 15675 - DNA, 254 bp, Glycine max
  Clone ID: LIB3094-015-Q1-K1-E12
tactacatcatcaggatatatgaaaaacttcatactgccccttctacaattttcaaatcccatctcattatctcttcattcccactaacactaatcctatctccttcaacaaaacaactacaatccactcacctactttccctccctctctcacacctctaccaatcccaaaaataataatacccatacctactccctcacctaattcaccttcaaaccctacacctcctttacctaccaatatcccttcttcc

SEQ ID NO: 15676 - DNA, 369 bp, Glycine max
  Clone ID: LIB3094-015-Q1-K1-E2
gggatgcaaatgcttccacacaggggttttctgctgggtgacttctagatcaacatgtctaatcatgagttcaagtccaagtacggcgagcacatgaagcgcgaggacctggtcatcaacaagtccaagaaggacaactcctgcgaccagatctacgtcttctttcccgactagcccaatgtcggcgtcaagaccatgaagacctacaccaaccgtatgaactccgaaaacgtctatagagccattcttctcacccataccaaccttaccctcttcgtccgcacctgcatcagctaaaatcttcttcccctcaaaaaaaaaaaattttttttttcctccccaaaaaactcctcccttcgagggtctttc

SEQ ID NO: 15677 - DNA, 119 bp, Glycine max; identical to SEQ ID NO: 12490
  Clone ID: LIB3094-015-Q1-K1-B1

SEQ ID NO: 15678 - DNA, 54 bp, Glycine max
  Clone ID: LIB3094-014-Q1-K1-G2
gaccccgcggactatacattcctataactatatctacaacatatcatactacta

SEQ ID NO: 15679 - DNA, 400 bp, Glycine max
  Clone ID: LIB3094-014-Q1-K1-G3
cccttctctctctctccgacgtacatttccatcttattagggtttctttccatggattccgattcttggatttccacgcgcatgtcgtcctcttcacgccgctatcattcgcgatctgatctgtacgtggaggagagtgaagggagcgatgatttcagggcggagtttctgtgccctttctgcgccgaggattacgacgtcgtttccctctgttgccacattgacgaccaccaccctatccaagccaaaaacggggtgtgtcccatttgtgggaagaaggtgggattggatctcgttggacatattactacgcaacatgggaacttcttgagggtgcagcgtaaaaagagggtcaggaaagtatgctctgggtcaacaatggctatattgagaaaagagt

SEQ ID NO: 15680 - DNA, 364 bp, Glycine max
  Clone ID: LIB3094-014-Q1-K1-G4
aaaaaaagtcagaagaaaattaatttgatttaaaagataaggggggcccagctatttatatgcttcgttcatgcaacatatatggaattttcttcagaatgcctaggacccctatgtttttgtgccactgccacatgttggataaatagagatttcgttcagtcaagtttgaacatggaaagtaacatctgttgtcgttttggctttctcaaaaacacatgctcttctctgtacgccatcgttagctcctactactaataaccgagtacacttatttaattcttactactaatttctccccctattattagtattatttattagtttataatttgtacattattccatttttttcacaatactt

SEQ ID NO: 15681 - DNA, 447 bp, Glycine max
  Clone ID: LIB3094-014-Q1-K1-G5
tctgaagttgcgagagtgaagaaatggcgcaagacttggcattggatttggaggagcttcggcgcctccacagcatcgccaaaagacctcgaaccctctctcttctctactccgaaattcgtaacctcgaaaagttatcgtcagaggaagcttctgcgcagattccggcgccgatttcgaccggaactaaagtggcgccttcacctgcgctgaagtatgcggcactcgcgtcgttcagttgggaccaggatagtgacaaagttaagatatatgtggtaatggagggaatcgatgagaataaggttgaatccgagtttaagtcgatgtcattcgatgttaagttccatgatgttcaagggaagaactaccgatgtgcaatatcaaaattgcacaatgagatagtaccggagaaatgcagggttggggcaagcctaaaagggcaatcat

SEQ ID NO: 15682 - DNA, 353 bp, Glycine max
  Clone ID: LIB3094-014-Q1-K1-G6
aaaaaaagtcagaagaatattaatttgatttaaaagttaatgggggcccagctatttataggcttggttcatgcaacatgtatgtaaggttcttcagaatgcctaggacccctatgtttttgtgccactgccacatgttgtataaatagagatttcgttcagtcaagttcgaacatggaaagtaacatctgttgtcgtattggctttctcaaatacacatgctctttcttgtactccatcgttagctcctactactattaacctagtacacttatttaattcttactactaatttctccttctatttattagtattatttattattttataattttgtcatttttccattttt

SEQ ID NO: 15683 - DNA, 445 bp, Glycine max
  Clone ID: LIB3094-014-Q1-K1-G7
acccacgcgtacgcccttctctctctctccgacgtacatttccttcttattagggtttctttccatggattccgggtctgggatttccacgcgcatgtcgggctcttcacgccgctatcattcgcgatctgatctgtacgtgtaggagagtgaagggagcgatgatttcagggcggagtttctgtgcccttttctgcgcccaggattacgacgtcgtttccctctgttgccacattgacgaccaccaccctatctaagccaaaaacggggtgtgtcccatttgtgggaagaaggtgggattggatctcgttggacatattactacgcaacatgggaacattttctagggtgcatcgttaaaagagggtcatgaaagtaaggctttgtttaacaacgtctattttgtgaaaagagttacctgtaggagccttgcactccctttttg

SEQ ID NO: 15684 - DNA, 446 bp, Glycine max
  Clone ID: LIB3094-014-Q1-K1-G8
aaaaaaagtcagaagaaaattaatttgatttaaaagataaggggggcccagctatttatatgcttcgttcatgcaacatatatggaagggtcttcagaatgcctaggacccctatgtttttgtgccactgccacatgttggataaatagagatttcgttcagtcaagtttgaacatgtaaagtaacatctgttgtcgttttggctttctcaaaaacacatgccctttctctgtacgctatcgttagcttctactactaataaccgagtacacttatttaattcttactactaatttctccctctattattagtattatctattaagttataatttgtacattattccattttttttacaatacttttccataatttatccatttttaagacattttatatatgtataggaattatattcattttaacaattgtgcttattttaatt

SEQ ID NO: 15685 - DNA, 237 bp, Glycine max
  Clone ID: LIB3094-014-Q1-K1-G9
acgagacagcagagcagagatctagcgtattctctctctctttctttcactgtcacagagccacatccagtggcttcccatacaacggcgcgggtgcggcccagcccctaaacttcctcatctaccgccgcacgggctggattggcggcctcctcggctccctctgccgggcccagtgcatctccttccattacggctcgggcccgcctcaaaaccgggccttcctctaaaccgaca

SEQ ID NO: 15686 - DNA, 477 bp, Glycine max
  Clone ID: LIB3094-014-Q1-K1-H2
cgactcacgcgttctaaaaaaagtcagaataaaattaatttgatttttaagttaagggttgcccatctatctatatgcttgggtcattcttcatatatggaatggttcttcataattcctattacccctatttttatgtgccactttcacattttgcatatttatatttttcttttaacattttttatctattattgtttctattttatatctatttttcttttctcaaattcactttctcttttcttttacttatcttttcttcttcctatttataatcatatttctcttatttttattatttcttctattttctttctttatctattattattatttcttttttttttatttcttctattttttattttttttcttattctttttacttttttttttttttttttactttttatttttttttttttatttatttctttttcatttactcttttatttttatttattttttttttt

SEQ ID NO: 15687 - DNA, 435 bp, Glycine max
  Clone ID: LIB3094-014-Q1-K1-H4
cccacgcgtccgctcgagaatatgacccgtcctaaaatttacgaaacataattatttattagttatgatatataatgagaggaacataaacgaacaatcagatgctgctagtcatttggataataaacaacattaggatttaggcatatcacatgatcgctttacttataatttagggatatcagctcaataccacatgattcaagtaatattaccaaaatcaaagccttatcctacaagatgcggtcagctacatgggtcatgacgtcattcggcaagtttagaaaccaaagtgtagcaaacgggaaaaaagtacacttctccttacagaggtatcccatatgacacaataactctgaaatagtatagtataccatagtcttaatcagcggaatatacaatttcttacatgacatatggacagccactgatccc

SEQ ID NO: 15688 - DNA, 391 bp, Glycine max
  Clone ID: LIB3094-014-Q1-K1-H6
gttgccgggctctaccgtggtttcaacatctcatgtgttggaatcatcgtgtatcgtgggctgtactttggattgtatgattctgttaaaccagttgtcctcacagggtcattgcaggatagcttttttgccagctttgcccttggatggctcatcaccaatggtgcaggtcttgcatcatacccaatagacactgttagaagaagaatgatgatgacctctggtgaagctgtcaagtacaagagctccttggatgcattcacacagatcctcaagaatgagggtgccaagtccttgttcaagggtgccggtgccaacatcctccgtgccgttgccggtgctggtgcgcttgctggttatgacaagttgcaggttcttgtgttcggcaaga

SEQ ID NO: 15689 - DNA, 461 bp, Glycine max
  Clone ID: LIB3094-014-Q1-K1-H7
cccacgcgtccgtccacgcgtccggttggtattgaggggaatgttggctggctcgaggctggtcacaaaggaggttcagagtggatggaactataaggcttcggaccaggcttcattcccctcaaaagtacttccttcatttgtttatacttcaaacttcaaaccacaagatcataggtgtagctacgtacctagctagcttctctctttattttgaaggatctctctacacacacgtcatgtgtgtggttgagaacttgagatgtttccttgcaaaggtgaagttgagaggaatgttgtctggctcgaggtcatggaggaagaggagagtactgagatcagtgaaagtttccaatggaaatttaccctcttaacacacacacagaaaaaatgattctcggaccaagcttcattcctcccaaccaacatttggttttcatttcctttcattttcttcctct

SEQ ID NO: 15690 - DNA, 358 bp, Glycine max
  Clone ID: LIB3094-014-Q1-K1-H9
tcccaagtcgacccgcgcgtgcgcgtaacttacatgatgtgaagttgcaaatgctatggagttcaccttcttcataatgcagctactgctactggcgtggcacttgaacttggcaagagatgacgtaatatttccgatcaatatattatctatggataagagtatacatactttcttggcattgagttattctcttacatctgtaaaagctgttgtattaagacttactttatcaacagaactgattgatctagtccacaccaatgaatcttccaaagctcttatgaattccatactgatatgcatgtcaaaaggcttaatatcaccttgtttttgcactaacaagtgacaaagatca

SEQ ID NO: 15691 - DNA, 445 bp, Glycine max
  Clone ID: LIB3094-015-Q1-K1-A4
gcttgctcctcttacgagcctttcctttcagtccattgattcggtgggtgcgggtgcagcgaaaccgagctagaccctgatcggcgtcggcacaccgccggagaacaagatgattgtctgcgtcgccgtcgtcggtcaccagaacaatccgctgtacatacagagcttcacggaggccgatgatgctctcaagctccaccacatcgtccattgctcgctcgatgtggtcgacgagcgagtgaacaatcctaaaaagtctgggccgatgcttaatgagacgtttttgggactgctttatcctattgaaaactacaaagtatatggatatctgactaatacgaaggtgaaatttatcttggtgtaccacggatctggtggggggaaatttttgggggttttttttttaaaaaaaaaaaaaaggatgcggatgtaaggaattttttca

SEQ ID NO: 15692 - DNA, 263 bp, Glycine max
  Clone ID: LIB3094-015-Q1-K1-A8
gaatgataaggtatatgaacaatccttaacagatacttctacaagatgttgtattttttgatagaaaaaaattcgctcaaaaaaaacgcgaaaatattttaatcgtaacttagaggatttgttacgtagaaaaagaaagatagattcatattcccatacatataaattatataggaacaaaaaaaatcttggattactttttgaaaaaaaagtagaaatccatttttttggagtaaaaatactattccaattataataataag

SEQ ID NO: 15693 - DNA, 200 bp, Glycine max
  Clone ID: LIB3094-015-Q1-K1-A9
aaattttaaatgggcctttaacactctaaaatattttattcttatcatatattactttttacttataataatatttatatattcatattcccatacatataaattatatattaacaaaaaaaatcttttattacttttttaaaaaaaagtataaatccatttttttgtagtaaaaatactattccaattataataataag

SEQ ID NO: 15694 - DNA, 266 bp, Glycine max
  Clone ID: LIB3094-014-Q1-K1-G12
cttatcatacaatcgtttgctttatttcaaggcataagtttaataactaaatgatgtgagttttctattcagatgtggttacatccctatttttaaaattctatttactaacttatttaatttcatttaactttataatatcataaattctttataatctacaaatttcatttcatctaattaaatatctatttcttcattcttaaatcatccttttatcttctttatactttcaactatcctatctacacttattaccattttta

SEQ ID NO: 15695 - DNA, 446 bp, Glycine max
  Clone ID: LIB3094-014-Q1-K1-D11
cttcctctctctcttctcttctgctttacttgctctgaaccaaatggccaaagcccttagcatcgagtgctggctctttctccttcgagcgtgtgagtaatagttattgcttgtacatcttgatacttgaacactcttccacctctcttactcctcactcctcaaccctgattcacgtcccaccacactcaaccaccatcttcatcccacacaccaacatgcatactcatcccacatccaccactcaccaccatccaccaccactacatcacccagcaccatgtatccttcaccttcatcaccacaatcacacctactactcctacccctgctaatcctactactcaccatcatcaccatcaccctcctgctcctgctaatgcaactcctgctcctgttcatcctccatctaaacctactgtttctgttcaccctccaactaaacc

SEQ ID NO: 15696 - DNA, 234 bp, Glycine max
  Clone ID: LIB3094-014-Q1-K1-D5
cgtacctcacgcgttccgttgagtcattcatatttgtttctagaacactgtttcccaactgggaaggctcatgtttcaccacgtaggagaccagcatactacagtcttcattcatgttttcgaatgctataggagattcacaaaggattgcctccttcttgtcaaatttgatctgtctggaatttcttcatccctaatgtgtactccttatatttaagttaccttctaatttta

SEQ ID NO: 15697 - DNA, 287 bp, Glycine max
  Clone ID: LIB3094-014-Q1-K1-D9
agacccacgcgtacgattccaaatctgatcttcaacgattgatctacttagattgctacagcactctacaatctgcaaaagggcgtggctgactctaaatggagcgcaagcttacgcaaagatcatagagagtgaactgtgaacatctgcatccaacagagccatggattcatgcctgagtaatactctacaactgtctgcatctggaactaccaatctcataccatggacaaatcttttgaggttaccgagatactagatcgatcggacatgtttattgaactcat

SEQ ID NO: 15698 - DNA, 539 bp, Glycine max
  unsure at all n locations
  Clone ID: LIB3094-014-Q1-K1-E10
gcaaacatgtccaccgcaacaactcacgtgctcgcttatcccttccctacctccggtcacgtgatccctcgcttagacttcaccaaaacgcctagtctctcgcggcgtccatgtcaccgttctggtcacaccctacaacgaagccttacttccaaaaaactattcccctcttctccaaacgcttctcctccccgaacctcagttcccgaacccgaagcaaaacaggctcgtatccatggtaaccttcatgcggcaccaccactacccgatcattatggactgggcccaggcccagcccattcctcctgcggctattatatcagatttcttcctcggttggacccacctcctcgcacgtgacctccacgtgccgcgcgtagtcttctccccctccggcgccttcgcgctctccgtctnctactccctctggcgcgacgcccnccaaaacgacaacccggaagacccaaacggcgttgttttcgttcccaaatctcccaaattccccaattctacccccctggggggtttttggggggggg

SEQ ID NO: 15699 - DNA, 464 bp, Glycine max
  Clone ID: LIB3094-014-Q1-K1-E11
tcgacccagcgcgtgcggcaaacatgtccaccgcaacaacttacgtgctcgcttatccctttcctacctccggtcacgtgatccctctgtgaggcttcaccaaaaccgtgaggctctcgcggcgtccatgtcaccgttctggtcacaccctacaacgaagccttacttccaaaaaactattcccctcttctccaaacgcttctcctgcccgaacctcagttcccgaaccctaagcataacaggctcgtatccatggtaaccttcatgcggcaccaccactacccgatcattatggactgggcccaagcccagcccattcctactgctgctattatatcagatttcttcctcggttggacccacctcctcgcacgtgacctccacgtgccgcgcgtaatcttctccctcttcggcgccttcacgctctccgtcttctactacctctggcgcgacgccccccaaaa

SEQ ID NO: 15700 - DNA, 369 bp, Glycine max
  Clone ID: LIB3094-014-Q1-K1-E2
ggcaccggtgaaatcagttatagtcttcttgtgagacaggaggggcacaaacggattatcgggtcgtgttcttggaatccacatggtcacgaatttgcgacaggttcaagggataagacagtgaaaatctgggccatagagagggagtctgtcaagcagcttatgtctttacctcaatttacgagtagtgtaacagcattatcttgggttggtctccatcatcggaagaataatggacttctagctgttggaatggaaaatggccaaatagagttgtggaatctgtcttataacagagcagatgatgggagcatagcatcaccaggtttggctgcttctcttgctggacgtatagatccttttatatgc

SEQ ID NO: 15701 - DNA, 463 bp, Glycine max
  Clone ID: LIB3094-014-Q1-K1-E3
aaacacccttgtcgaccacaccaaaattaaaaacataaaaaagcataaaagcacaaaaagacataaaaaagggaaaataaaacattttgaagtcatatttgcacacttgattaaaggctgtcgtcccttgtgacggatgcgtggggtgctaataccttccctgtgcgtaaaaacaactcccgaactattcacacttaaagttcgtagaccacaccttttcaatttttccgacgctttcctcaaataaaagttggtggcgactccgcgcattttcctttcatggaagacgcacttgtgagtcccgcatcgccctcccgtcaaagggtaggttgcgacagtacttgcccttccgccgaagggtaagtttcctaattgaattaactaataacaaaagtgaaactaaggctaaaataaactcacatatcaagctttgtccatataaatcacttaaaaaccattttga

SEQ ID NO: 15702 - DNA, 366 bp, Glycine max
  unsure at all n locations
  Clone ID: LIB3094-014-Q1-K1-E4
gttgttttcgttcctctgaagtctggagtggtggagcttggttcgtttgaaatggtgcctgaagagcagggtgttgtggaaatggtcaggacagcatttggggaatccagtcctggacaggcaaaggtgtttccaaagatttttgggcatgagttaagcctgggggatacaaaatctcagtctataactattagtttctccccaaaggtggaagatgatccgggtttcacttcagactcctatgaagttcaagcactaggggtgaaccatgcttatggaaattcttccaatgggactntaggtgacggtaatgaaggaacattgtttcctcaattgaatcaaatgatggctgggaattttaatgct

SEQ ID NO: 15703 - DNA, 471 bp, Glycine max
  Clone ID: LIB3094-014-Q1-K1-E6
gcttcctcctcttacgagcctttcctttcagtccattgattcggtgggtgcgggtgcagcgaaaccgagctagaccctgatcggcgtcggcacaccgccggagaacaagatgattgtctgcgtcgccgtcgtcggtcaccagaacaatccgctgtacatacagagcttcacggaggccgatgatgctctcaagctccaccacatcgtccattgctcgctcgatgtggtcgacgagcgagtgaacaatcctaaaaagtctgggccgatgcttaatgagacgtttttgggactgctttatcctattgaaaactacaaagtatatggatatctgactaatacgaaggtgaaatttatcttggtgaccacggatctggatgttaaagatgcggatgtaaggaattttttcaggaggttccatgccgcatatgtagatgcagtttcaaacccattccatgtaccaggcaaaaagat

SEQ ID NO: 15704 - DNA, 386 bp, Glycine max
  Clone ID: LIB3094-014-Q1-K1-E8
ggctgaagcacaactacgagaccagcatggcaaccctgtcccactcaccgatcaatacgggaatccggttatcttaactgacgagcgcggtaatcccgtccaactcactggtgtcgctaccaccgctaccggcacagcaggttctgggtttgggtcctatggtaccggtgcttacggtggtggtgcaagtgcaaccaccgttgcagatcttttggcaacccaaccaaggagtggcagggaggctagagagcttcgtcgttcctccagttcaagctctagctcgtctgaagatgatgggcaaggtgggaggaggaagaagggagtgaaggataaaataaaagagaaactaccaggggtaggaggagggaataataataaggagcatg

SEQ ID NO: 15705 - DNA, 399 bp, Glycine max
  Clone ID: LIB3094-014-Q1-K1-E9
gcgttgtgttgtgattgaaaatggagagcgatgttgaagaatctatgcggaagaggcccagaaaatatcctttctccgccgattcatcctctcgcaagcaatttgaacaatattctggacggacatttgcaattatgggggaagtgaattttatgcaagatgatgataatcgtttggagattacccgaactaaatttggaagtttgcttaaaagacatggagatttgacagagcggcttgctagggattctgacaagataatatttgagcgtctacagaaggagtttgaagctgcacgagcttctcaaactgaagagatatgtttagacggggaagaatggaatgatggtctactagctacaataagaaaacgggtgcatatggaggcggacagaaaag

SEQ ID NO: 15706 - DNA, 131 bp, Glycine max; identical to SEQ ID NO: 14153
  Clone ID: LIB3094-014-Q1-K1-F1

SEQ ID NO: 15707 - DNA, 456 bp, Glycine max
  unsure at all n locations
  Clone ID: LIB3094-014-Q1-K1-F11
agacagcagagcagagatctagcgtattctctcgctctttctttcactgtcacagagccacatccatgggcttcccagccaacggcgcctctgcggcccagcccctaaacttcctcatctacggccgcacgggctggattggcggcctcctcggctccctctgccgggcccagggcatctccttccattacggctcgggccgcctcgagaaccgggcctccctcgaaaccgacatagccctcctcaagccctcccacgtcttcaacgccgccggcgtcacgggccgccccaacgtcgactggtgcgagtcccacaaagtcgagaccatccgaaccaacgtcgtcggaaccctcactctcgccgacgtctgccgcgaccacggcctcattctcatcaactacgccaccggttgcattttcgagtacgactccgatcanccccctcggatccggtatc

SEQ ID NO: 15708 - DNA, 153 bp, Glycine max
  Clone ID: LIB3094-014-Q1-K1-F2
acccacgcgtacgcccacgctctcaatctcattaattagtctattgaattatcaattgctcacttatcaaatgggaatgggtacactttatcgcacttcggctaaccaacctcatagccaacatactgactcttcttctacctttatcaatac

SEQ ID NO: 15709 - DNA, 450 bp, Glycine max
  Clone ID: LIB3094-014-Q1-K1-F6
tttgaatacattccttgtagtttatactgaaagatgggtttgaagattgcgttactgatgcgtaggcctttccctcatgctcgttttggtctcctctgaggtggcatccactaatacaaaagaggaggcaaatggagtggatgatgccaaatatcccggtggaagctatggatgttgttacccaggtcatgtctgttgctgttattctgtttattgcagtttcatttattttttttattgattttttttttttatattttttttttatttattattttttattttttttcttttatttttttttttttatttttatttatattttttttttttttttttttttttttttttttttttttatttttttttaattttttatttttttttttttattttttttttatttttttttatttttttttatttttttttttttattttttttttttt

SEQ ID NO: 15710 - DNA, 454 bp, Glycine max
  Clone ID: LIB3094-014-Q1-K1-D10
cccacgcgtccgcttctctctctctctctctgctttacttgcttgaagcaatggccaaagccttggcatcagtgctgctgtttctcctcgtagctgtgagtaatgtgtttgctgtagagcttgaacttgaaactcttccaccctcttaccctcaccctcaccctgttcactcccccacaccagcacctcttcacccaccagcaaatgctcctcacccacaccaccaccaccaccaccaccaccctccagcaccagcacctgttccttcaccttctcaccacaattaccctcctacccctgcccctgctaagcctcctactcaccaccatcaccatcaccctcctgctcctgttaatccaccttctgttccggttcatccttcagttaaacctcctgttccggttcaccctccagttaaaccttctgttcctgctcaccctcctgttaaaccttc

SEQ ID NO: 15711 - DNA, 298 bp, Glycine max
  Clone ID: LIB3094-013-Q1-K1-H6
cgcttgatgatcccaacaactttcggtaacaggattaacaggatgctgaagcttggactgagcattgatgaaaatgctggtgaagcagatgctgacatgcctcctcttgaggacgctgatgcagatgctgagggtagcaagatggaagaagttgattaaatctgacttaattgcctgttacgtttttagaaacaatgattggagaaacagtctttttactatgttttatgttttttgaattttcgaaattttggaacgttggctagttaggtgccgtatgtagtagtttctttatggt

SEQ ID NO: 15712 - DNA, 140 bp, Glycine max
  Clone ID: LIB3094-013-Q1-K1-H7
cggacgcgtgggcaagtttgttggtttaactagcattttgttttgtctggattaatttggcagtattgtattgattttgttcagaggctgttttctaattgctgttggcatagttattaatttattagtgattatgggat

SEQ ID NO: 15713 - DNA, 443 bp, Glycine max
  Clone ID: LIB3094-013-Q1-K1-H8
attcattcctatagctatagctacaacatatcatactactactgttgttgttgctgctactgctgttgctgctgccgcgtatcaatcactcgcttaccataatgggtagggatagccatgaccccacttcctttcactcttccattgcccttctacaagagaggtttagacagcttcagagagtaaaagaaatgagggaggagagggagcttcagaagatgctcaatgaacctaaacaattcagttccaacaccaccacctctatgagtcgtacttatcacaattccaacaattctatcctctctcaccctgaattgattatgccatcaaagtcaccaccccatgtttctctctctctctggccaacatctcagggcaagcaagaggactatagaagtgctcaaaccccggtttcaatgaactatgcacattcacagtccatg

SEQ ID NO: 15714 - DNA, 419 bp, Glycine max
  Clone ID: LIB3094-013-Q1-K1-H9
cccacgcgtccgggacagagctctgcatgatgcattgtcaattgtcaagagaactcttgaatcaaatacggtggtagctggtggaggtgctgttgaggcagcattatcagtttatttagagtaccttgctacaactttaggatctcgggagcagttggctatagcagaatttgctgagtctctgttaattattccaaaggtgctttctgttaatgctgctaaggatgccactgagctggtcgcaaaattacgggcctaccaccattcagcacaaactaaagccgataagaaacatttatcaagtatgggtttggacctttctgaagggaaaatcagaaacaacttggaggctggagtcattgagcctgcaatgagcaaagtaaaaattattcagtttgcaactgaagctgccattacta

SEQ ID NO: 15715 - DNA, 477 bp, Glycine max
  Clone ID: LIB3094-014-Q1-K1-A10
atcgaaaccttaagtttcggatcaggtctgagcaatctggttggtagaacctttggtcttagagagtcaaggtttatgtctgaattagacgatcaaattcctactgccttcgatccttttgctgatgcaaatgctgatgactcgggtgctgggtcaaaggagtatgtgcatattcgcgtacagcagcgaaatggaaggaaaagcctgacaaccgttcagggattgaaaaaagaattcagctataacaagatacttaaagatgttaagaaagagttctgttgcaatggaacagttgttcaggacccagaactaggacaggttattcaacttcaaggtgatcagaggaagaatgtttctaccttcctggtccatgctggtatcgtgaagaaggagcatatcaagattcatggtttctgagcggttggagtctcaagtgtcaagtcttacgtgcctgcctatgtgttgggcatatataat

SEQ ID NO: 15716 - DNA, 109 bp, Glycine max
  Clone ID: LIB3094-014-Q1-K1-A11
ctttctcctagaacaaaaaataaaacgtgattcgctcttatcttctaataaaccacaaaaccaacgggcgggaacatgatttagagaagatggggttgtcgttcacgaa

SEQ ID NO: 15717 - DNA, 452 bp, Glycine max
  Clone ID: LIB3094-014-Q1-K1-A12
gcgatcgaaaccttaagtttcggatcaggtctgagcaatcttgttggtagaacctttggtcttagagagtcgaggtttatgtctgaattagagcgaggaattcctactgccttcgatccttttgctgatgcaaatgctgatgactcgggtgctgggtcaaatgagtatgtgcatattcgcgtacagcagcgaaatggaaggaaaagcctgacaaccgttcatggattgaaaaaagaattcagctataacacgatacttaaagatgttaagaaagagttctgttgcaatgtgaacagatgttcatgacccagaactatgacaggttattcaacttcaaggtgatcagagtaagaatgtttctaccttcctggtccattctggtatcgataataacgagcatattcaagattcatggtttctaagcggactgagtctcaagtgtcaagtcttac

SEQ ID NO: 15718 - DNA, 297 bp, Glycine max
  unsure at all n locations
  Clone ID: LIB3094-014-Q1-K1-A4
ggaaagccagggaaaacaangagcaccgaacgacgcggaagacggaggaacacacggaagggaaacaagcaaggacggaagagcgaagcgcggacgcaagcaaggacagcaagacgaaaaccagcacagcggacgaagangccaaagaaaaacagggaccagaagcaacagaagcaggagaagagagcgaccaaagccgggagcaggaaaaggcaacccagcgacgagcaaagccccgacaagaacagaagggacaaccaaccacaaagaccccaaagcaagcaggaaacacgaaca

SEQ ID NO: 15719 - DNA, 353 bp, Glycine max
  Clone ID: LIB3094-014-Q1-K1-A6
gaaattccagggaaaacaattttctctttttgatgctgaatactttgtatttcactctcctgataacaagcttgtacagaagagttttgctcggttgtttttcaatgacttcttgatgaattccagctcttgcgattaaggtggccaagaaaaaactgggaccttttgcaactttatctggtgatgagagctaccaaagtcgggatcttgaaaaggcatcccagctacttgcaaagcctctatatgatcagaaggtccaaccaactactttgattccaaagcaggttggaaacatgtccactgggtctttttatgcagcattggcctccttcattcacaacaaacatagcaca

SEQ ID NO: 15720 - DNA, 254 bp, Glycine max
  Clone ID: LIB3094-014-Q1-K1-A9
acgctttgattatctggatccgcgtttttgagatgagtgtatgaatttaccgatagtttttcacatgacgttagggttgaggcatgctttggggatagtgttaatcgggtcgttgtggaacttgcaaagggcatagggtatacgatttgtgattgacagagacgagtgtttctgccatgatgtgaactaccatggtgacactgctcatgcctctttcattggtattaaggctgattctcctctgcattactgct

SEQ ID NO: 15721 - DNA, 417 bp, Glycine max
  Clone ID: LIB3094-014-Q1-K1-B1
cccactcgtccgtacacatatgcattctttctctcactccattccatttccgggatttgcatttgcatacatacacttacctctctggtctctagctatagcacaagatatgggtagcagttattttggagaacctaactttggaaatgaaagagcaagttgttcttcttcgtcaagaaaagggaagaagagccacaactcagacaagccaaagcaaccacagagaggtcttggagttgctcaattggagaaaatcagattacatggctatcacccttctctgcacgctccttacccttctaatttttccaacgaagatccaagagtgcaaatagcatattcatcggtgccatcatctttcttttcttactcatcatcatacgcagcttcctatggattccaacccaacatcatgat

SEQ ID NO: 15722 - DNA, 293 bp, Glycine max
  Clone ID: LIB3094-014-Q1-K1-B10
gttgttttcgttcctctgaagtctgtagtggtggagcttggttcgtttgaaatggtgcctgaagagcagtgtgttgtgtaaatggtcaggacagcatttggtgaatccagtcctgtacaggcaaaggtgtttctcaaagatttttgtgcattagttaagcctttgggatacaaaatctcagtctataactattagtttctccctaaatgtggtatatgattcttgtttcacttcatactcctattaaattcaagcactaagggtgaaccatgcttatggaaattctttcaatg

SEQ ID NO: 15723 - DNA, 162 bp, Glycine max
  unsure at all n locations
  Clone ID: LIB3094-014-Q1-K1-B5
gcaaaagcacaagagangggaagcaggaaggaaggagaacccaaccacggaaaggaaagagcaagacgggcacacacggcaagaaaagggaagaagagccacaacncagacaagccaaagcaaccacagagaggacacggagacgcacaagaggagaaaaac

SEQ ID NO: 15724 - DNA, 520 bp, Glycine max
  Clone ID: LIB3094-014-Q1-K1-C10
ctcaaaacttgtcttccccctctctcctcctcggaactccattcgcatgcagttctcgcacaacacactgggcagtgatatttcaaagcgcagcggcatttcaacatttcatcatttttctcgtgtaaccatcccctcacccacgaacccatcccatgaatttcccaaaatgccctcaacccagaaccccctcttctccttcctcctacattccaccccaccgtacccaactgcaccctcgcatgatctccctctactcttcttcttcttcttccctaaaatatccaaatcccaacaacaaaccccacaactccaaatgcctcttgttcttcttcgccctcctcttcttcaccgtccccttcctcttctacctcttctccaccgccctccaactctactccttccccaaattcgccgactcccgcccctactcctttgccctcgccctccgcgccggcccctacgcccttcgtctcttcgtctttcacttccttggccccttccctaacccccttacttt

SEQ ID NO: 15725 - DNA, 330 bp, Glycine max
  Clone ID: LIB3094-014-Q1-K1-C5
cgcgtcgctgctccgtaccagtttcactgcataaatttgagagataactctgcaaacatcgtggtttatcatgacctgctggatgtgataagcttctttcgtacttctttcgttacaatgttatttttaatttaatgctgttactttgtttatttttattcaattttatttttatttttttttttattcattcttttattttcttttattatttttttttttttttttttttatttatatttttttttatttatttattattttttcttttatttttattctttttttttttatattttattcttttctatttttatatttttttatttt

SEQ ID NO: 15726 - DNA, 463 bp, Glycine max
  unsure at all n locations
  Clone ID: LIB3094-014-Q1-K1-C7
cttttctactttgagtcttcttgatccttctttttctccttgaactcaaacatggcagatgaggtggttctgctagatttctggccaagtccatttgggatgagggtcaggattgcacttgctgaaaagggtatcaaatatgagtacaaagaagaggacttgaggaacaagagtcctcttctcctccaaatgaacccggttcacaagaagattccggttctcatccacaatggcaaacccatttgtgaatccctcattgctgttcagtacattgaggaggtttggaatgacagaaatcccttgttgccttctgacccttaccagagagctcaggctagattctgggctgattatgtngataagaagatatatgatcttggaaggaagatttggacatcaaaaggagaaagaaaagaagctgccaagaaagagttcatagaagccccttaaatgttggaggaac

SEQ ID NO: 15727 - DNA, 410 bp, Glycine max
  Clone ID: LIB3094-014-Q1-K1-C8
cgcgtccgcttttctactttgagtcttcttgatccttctttatctccttgaactcaaacatggcatatgaggtggttctgctagagttggggccaagtccatttgggatgagggtcatgattgcacttgctgaaaagggtatcaaatatgagtacaaagaataggacttgatgaacaagagtcctcttcttctacaaatgaacccggttcacaagaagattcctgttctcatccacaatggcttacccatttgtgaattcctcattgctgttcagtacattgatgatgtttggaatgacagaaattccttgttgtcttctgacccttaccagatagctcatgcttgattctgggctgattattgttataataatatttatgattttggaatgaagatttggacattaata

SEQ ID NO: 15728 - DNA, 447 bp, Glycine max
  Clone ID: LIB3094-014-Q1-K1-D1
cccacgcgtccgggtggagtcatgacaaagttgattcccagaaacactgttatcccaaccaagaaatctcaggtgttcaccacctatcaggaccagcagactacagtctccattcaggttttcgaaggcgagaggagtctcacaaaggattgccgccttcttgggaaatttgatctgtctggaattcctccagccccaaggggtacgcctcaaattgaagtgaccttcgaagttgatgccaacggcattctaaatgtgaaggcagaagacaagggcactggtaaatcagaaaagatcaccattacaaacgaaaagggacgtcttagccaggaagaaattgagagaatggttcgcgaagcagaggagtttgcagaggaagacaagaaagtgaaggagaggatcgatgctcgcaacagtcttgaaacctatgtatacaacatgaagaac

SEQ ID NO: 15729 - DNA, 393 bp, Glycine max
  Clone ID: LIB3094-013-Q1-K1-H5
cctcgctcgtatgataagttgcgctttgatccaagtaaaccaaaatgcaggctgttagttacacatgatgactatagtataacgtccaaacttccaagggagagaacttctgttgttaccatacttagggatccagttgaccgtgtttttagtacttatgaattctcaatagaggttgcagctagatttttggtgcatccaaacttgacgtccgcaacaaagatggctttacgcctaagctctaagactaaaggagtaagcacactggatatctggccttggaagtatctggttccatggatgagggaagacctatttgctaggagagaagctaggtacagtaggggactgaatatcattgaaagcaatgattcttatgacatggaagatttt

SEQ ID NO: 15730 - DNA, 369 bp, Glycine max
  Clone ID: LIB3094-013-Q1-K1-F6
ctgtccaatatgtatcttctctgttacggtgcggtctaaaaaccatcggctggtctgatcaacagtggtggatacaccatctatgtttaaattcataataggccgtacaatgtgattaaaaactgcaattacacttaatcgattgattcaatccacactcgtgaatggaattgctcaactgccaatgttttctgttaagagtagctatatcaatcaattgccacatccacatttcccaaaataaactccttatccttcattgaagttattgttcataaagattacaccactcaagattttgcttgaatagtgctcatagatttcttcttccaatatccaaccctccaatccctcataatcttcaaaatt

SEQ ID NO: 15731 - DNA, 187 bp, Glycine max
  Clone ID: LIB3094-013-Q1-K1-F7
ccactcttacttactatccattatttttttttattctttcgttcctttcaataaacgataatctttctaatcaagaaaggtgaattcaccatctatttttatattcattataatccttcaatattattaataacttcataatacacttatttatttattcaatctacaattttaaatttaaattact

SEQ ID NO: 15732 - DNA, 451 bp, Glycine max
  Clone ID: LIB3094-013-Q1-K1-F8
gaagttgcgagagtgaagaaatggcgcaagacttggcattggatttggaggagcttcgccggctccacagcatcgccaaaagacctcgaaccctctctcttctctcctccgaaattcgtaacctcgaaaagttatcgtcagaggaagcttctgcgcagattccggcgccgatttcgaccggaactaaagtggcgccttcacctgcgctgaagtatgcggcactcgcgtcgttcagttgggaccaggatagtgacaaagttaagatatatgtgttaatggagggaatcgatgagaataaggttgaatccgagtttaagtcgatgtcattcgatgttaagttccatgatgttcaagggaagaactaccgatgtgcaatatcaaaattgcacaatgagatagtaccagagaaatgcaaggttgtggtcaagcctaaaagggcaatcatcacatt

SEQ ID NO: 15733 - DNA, 397 bp, Glycine max
  Clone ID: LIB3094-013-Q1-K1-F9
cccacgcgtccggtgatttcagtgagtgatcggtgttcacttgatctcatcataatcgtcagcgtcaattgaagaagatgccgatcagaaacatcgccgtcggaaggcctgaagaggcgactcaccccgacacgttgaaggcggctttggctgagttcatctcaaccttcatcttcgtgttcgccggctcaggctccggcatcgcctacaacaagctcaccgacaacggcgctgccacccctgccggcctcatctccgcctccatcgcccatgcattcgccctcttcgtcgccgtctccgtcggcgccaacatctccggcggccacgtcaaccccgccgtcaccttcggcgccttcgtcggcggcaacatcaccttcctccgcggcatcgtctacgt

SEQ ID NO: 15734 - DNA, 306 bp, Glycine max
  Clone ID: LIB3094-013-Q1-K1-G10
gacactccggcttctcttatgtttaattcatgcgatcaatttccatgttgtgactttatcttccaggccggttcaaatatgccagactgaaaaaactctcacttttaaaattatttcaatgtttcaagaataatgcattcctatatctttcttcaacatgattactaactcatcatttctatttctagcaatttcaatcaacttatattatattacgtattctctcctactaatatctcctgaatacattactaaatactcaaacatcacatatataatctactcaccaaccataaataaatcata

SEQ ID NO: 15735 - DNA, 446 bp, Glycine max
  unsure at all n locations
  Clone ID: LIB3094-013-Q1-K1-G11
cggacgcgtgggcggacgcgtgggttatcatccgcagctgcttttattcgcaccgcaaacagtgagccatggccgtcggaaagaacaagcgcatctccaaggggaagaagggtggcaagaagaaggcagctgatccctttgccaagaaggattggtatgacattaaggctccttctgtttttcaagtgaaaaatgttggcaaaaccctcgtctctcgtactcagggtaccaagattgcttctgaaagactcaagcatagagtgtttgaggtctccttggctgatcttcaaggggatgaggatcatgcattcaagaagattangttgagagctgaagatgtgcaagggaagaatgttctgacaaatttctggggaatggatttcacaacagacaagctgaggtcattggtacgaaaatggcaaactcttattgaagcccatgtggat

SEQ ID NO: 15736 - DNA, 446 bp, Glycine max
  Clone ID: LIB3094-013-Q1-K1-G12
cggacgcgtgggcggacgcgtgggttatcatccgcagctgcttttattcgcaccgcggacggggagccatggccggcggaaagaacaagcgcatctccaaggggaagaagggtggcaagaagaaggcagctgatccctttgccaagaaggattggtatgacattaaggctccttctgtttttcaagtgaaaaatgttggcaaaaccctcgtctctcgtactcagggtaccaagattgcttctgaaggactcaagcatagagtgtttgaggtctccttggctgatctttaaggggatgaggatcatgcattcaagaagattatgttgagagctgaacatgtgcaaaggaagaatgttctgacaaatttctggggaatggatttcacaacagacaagctgatgtcattggtacgaaaatggcacactcttattgaaacccatgtggat

SEQ ID NO: 15737 - DNA, 369 bp, Glycine max
  unsure at all n locations
  Clone ID: LIB3094-013-Q1-K1-G2
gccaaaatcaaaatgaaaagcaaaaggaggcaaactagcaggttctgaattttctggaaatggtgctgggatactatctgctgctagcacagttgccagnacttttctcttagtttttgttgctgaatggggcgacaagtcatttttcttcacaattgcccttgcagcagcttcttctccccttggagtcatagctggagcactggctggtcatggtgttgcaactttgctagctgtacttgggggttctttacttgggacgtatttgtcagagaaggttattgcctacatcggaggtgttctctttctcgtctttgccgcaataaccttatttgaaattgtgcaataggggttaaaagaaatgcaata

SEQ ID NO: 15738 - DNA, 439 bp, Glycine max
  Clone ID: LIB3094-013-Q1-K1-G3
attgctgctgtttgcctattggtgtactttggggtctctaccctgctggatgcctcatctagcgagggccaaaaatcagatgaagagcataaggaggcagaactagcagtttctgaattttctggaaatggtgctgggatactatctgctgctagcacagttgccagtacttttctcttagtttttgttgctgaatggggcgacaagtcatttttctccacaattgcccttgcagcagcttcttctccccttggagtcatagctggagcactggctggtcatggtgttgcaactttgctagctgtacttgggggttctttacttgggacgtatttgtcagagaaggttattgcctacatcggaggtgttctctttctcgtctttgccgcaataaccttatttgatattgtgcaatatggggtaaaagaaatgcattata

SEQ ID NO: 15739 - DNA, 428 bp, Glycine max
  unsure at all n locations
  Clone ID: LIB3094-013-Q1-K1-G4
ccatttcttctattttcctattatttacttttttttctctaccctgctttatacctcatctgagcgggggtcataagtcaggagaagaacacaantattcataactatcaatctctgaattttctggaaatggtactttgatactatcttctgctatcacatttgccaatacttttctcttatttttttctgctgaattattcgacaagtcatttttttccacaatttcccttacaacatctttcttcttcccttgtagtcatatctgcatcacttgctgttcattttattgcaacttttcttcctttacttgggggttctttactcgtgacatattttttataaaaagttattacctacatctcaagttttctctttctcttctattccgcaattacctcattttaaattgtccaatatgccttaaa

SEQ ID NO: 15740 - DNA, 389 bp, Glycine max
  Clone ID: LIB3094-013-Q1-K1-G8
attatttctcttttcctatctttttaccgttttatctttaccctactgtattcctcatctagcggggtcctaataagtgatgaagagcataaccttccttatctttcattttcttaattttctgaaaattattcttctatactatctgcttctatcacaatttccaattcttttctcttatctttttttactaaatttatccactagtcatttttcttcacaatttcccttgcatcttctttattctcctttataatctatacttaatcacattcttttcattttttttcaacatttctaatctttcttattatgtctttactttctacatatttttctaaaaaatttatttatctaacattaaagttttctcttttcttattttttcc

SEQ ID NO: 15741 - DNA, 478 bp, Glycine max
  unsure at all n locations
  Clone ID: LIB3094-013-Q1-K1-G9
tcccatcgcgnntccggcttttcttcaatgtttaattnnntatgcgatcagcntnntccgggtggagaacttgatanttagaaacccgttgcaaatattgccaaancttaagaagagtcacatcatgnaaaatgatttcaagggtggaagtggaatgtattctatatcagccttggacatggtttctaacttgggatttgtatttggagcaagttcaaacaactcaaatgagagtaggattgctgtgggtgaaatatctgttggagaaatgactgaattggaaagagcggttaaagaatctaagaacaatcataaaaaggtcatatctgcacaagccacagttgatggtgttaaagttgatggtattgacactaatttggctgtcatgaaggagttactttttcctctaaatgaacttgcgaagtctcttcagtccttggcatattgggatgatccacggaagtctttagtgttttgg

SEQ ID NO: 15742 - DNA, 438 bp, Glycine max
  Clone ID: LIB3094-013-Q1-K1-H10
cccacgcgtccgggacagagctctgcatgatgcattgtcaattgtcaagagaactctggaatcaaatacggtggtggctggtggaggtgctgttgaggcaacattatcagtttatttagagtaccttgctacaactttatgatctcgggagcagttggctatagcagaatttgctgagtctctgttaattattccaaaggtgctttctgttaatgctgctaaggatgccactgagctggtcgcaaaattacgggcctaccaccattcagcacaaactaaagccgataagaaacatttatcaagtatgggtttggacctttctgaaaggaaaatcagaaacaacttgtaggctggagtcattgaacctgcaatgagcaaagtaaaaattattcaatttgcaacttaagctggcattactatccttcgaattgatgacat

SEQ ID NO: 15743 - DNA, 342 bp, Glycine max
  Clone ID: LIB3094-013-Q1-K1-H11
tcgtccacgcatcccttacataactctgtatgatgcattgtcaattgtcaacacaactctgaagtcaaatacgggggtggctggtagatgtgctgttgacgcatcattatcagtttatttaaagtaccttgctacaactttatgatctcgggagcagtcggctatagcagaatttgctgattctctgttaattattccaaaagtactctctgttaatgctgctaaggatgccactgatctggtcgcaaaattacaggcctaccaccattcagcacaaactaaagcccgttagaaacatttatcaaatatgggttgggacctttttgaatggaaaatcacaaa

SEQ ID NO: 15744 - DNA, 433 bp, Glycine max
  unsure at all n locations
  Clone ID: LIB3094-013-Q1-K1-H12
gttcttctaccttattttctttccctagtcaaggagattcatctctgcagcaggttgttttagaaaagacaaaatgctgaagatttgctgcattggggctggatatgtggggggtccaacaatggcagtcattgcactgaaatgcccctcaattgaagtggctgttgttgacatctctaaatccaggattgcagcatggaacagtgaccagctccctatctatgagccaggccttgatgatgtggtgaagcaatgtcgtggcaagaaccttttcttcagcactgatgttgagaaacatgtctatgaggccgacatagtgttcgtctncgtcaacaccccgacaaaaactcgtggtcttggagccggaaaggctgcagatttgacttactgggagagtgcaacacgcatgattgctgatgtcttcaagagtgac

SEQ ID NO: 15745 - DNA, 454 bp, Glycine max
  Clone ID: LIB3094-013-Q1-K1-F5
cccacgcgtccggactggcccaaaattattcgccattgttccggtgcggccaaaaaaccataatctttctgatcaaaaatggtggatacaccatcgaggtggaaattcatgatgggccgtacaatgtgattaagaactggaattacactgggttgattgatgcaatccacaatggtgaagggaaatgctggactgccaaggtgttctgtgaagaggagctagttgaagcaattgccacagccacaggacccaagaaagactccttatgcttcattgaagtgattgttcataaggatgacaccagtaaagaattgcttgaatggggctcaagggtttctgctgccaatagccgtcctcccaatcctcagtaatcttcagaatttatcctatgactaaattgctgcagttgccctttagctctatgaaagtgagaatcatttgagatgatgccctt

SEQ ID NO: 15746 - DNA, 378 bp, Glycine max
  Clone ID: LIB3094-013-Q1-K1-C6
tcaaatagggatcactttatttatattttctttttctttctcaaataaaaataattttttaaattcctaatattcaattaaataatttatcccattttaactttttccatatttcaaatgattaatctaattccattttccctttttattctcttaataaaatttttaaataattttttttctctttacttatatacctctaacttattccactttaattttattccatctttccatatatattcattttctacatttaatctcttatatttttcatattttttagccatatttttttattccattaaattttcccaatacatttttttcctcttttatcaaattttttaattcctaccaatcatttttattttttaa

SEQ ID NO: 15747 - DNA, 443 bp, Glycine max
  Clone ID: LIB3094-013-Q1-K1-D10
cccacgcgtccgtcaagcattgcatccctcttgatttgtagtttgttttgtgctttagataaaagttctgccaaatcaagaggggttttaagatcatagtgtgtgttttgcaacaatggctaagttctttgctgctatgatcttggcactctttgccatttccatacttcaaacagtggtaatggctgctaatgaacaaggaggccacttgtatgacaacaagagcaaatatggaagtggaagtgtcaagagttaccaatgcccatcacaatgctcgaggagatgtagccagacccaataccacaagccctgcatgtttttctgtcaaaagtgctgcaagacatgcctgtgtgtgcccccggggtattatggtaataaagctgtgtgcccttgcttcaacaactggaagaccaaggaggaggacccaagtgcccttgagcttc

SEQ ID NO: 15748 - DNA, 423 bp, Glycine max
  Clone ID: LIB3094-013-Q1-K1-D11
cccacgcgtccgcccacgcgtccgcccacgcgtccgcccacgcgtccgtctccctctttctcgtcactagctctgtgcattcttctctcgctctctgccttccatcacactcggcatttcctttcccaagatagtagaagatggcagacactgaggatattcaacctcttgtttgtgacaatggaacaggaatggttaaggctggatttgctggagatgatgccccacgtgctgtgtttcccagcattgtaggtcgtcctcgtcacactggtgtgatggttggcatgggccaaaaagatgcatatgttggtgatgaggcacaatctaagaggggtattttgactctcaagtaccccattgaacatggaattgtgagcaattgggatgatatggaaaagatttggcatcataccttctataatg

SEQ ID NO: 15749 - DNA, 363 bp, Glycine max
  Clone ID: LIB3094-013-Q1-K1-D12
cccacgcgtccgccacgcgtccggtttctggtggaggatccaacttcagagcaattcatgaggcctccaaaaggggatcacttcatggagatgttcttgtgttggtcacaaataaaagtgattgtggaggtgcggagtatgcaagaaataatggtatcccagttatactgtaccatatatcaaaggatgaatctaatccaagtgaccttgttgatacactaaggaaatttgaggttgattttattcttttagctggatacctcaaacttataccagtggaattgatccgagcttacaaaagatctatattcaacattcatccatcacttcttccagcttttggaggcaagggattctatggca

SEQ ID NO: 15750 - DNA, 417 bp, Glycine max
  Clone ID: LIB3094-013-Q1-K1-D3
ctttctactttgagtcttctggatccttctttttctccttgaactcaaacatggcagatgaggtggttctgctagatttctggccaagtccatttgggatgagggtcaggattgcacttgctgaaaagggtatcaaatatgagtacaaagaagaggacttgaggaacaagagtcctcttctcctccaaatgaacccggttcacaagaagattccggttctcatccacaatggcaaacccatttgtgaatccctcattgctgttcagtacattgaggaggtttggaatgacagaaatcccttgttgccttctgacccttaccagagagctcaggctagattctgggctgattatgttgataagaagatatatgatcttggaaggaagatttggacatcaaaaggaagagaaaaagaag

SEQ ID NO: 15751 - DNA, 394 bp, Glycine max
  Clone ID: LIB3094-013-Q1-K1-D4
tcgaccggcgcgtccgctttttactttgagtctactcgatccgtctttttctccttgtactcatacattgcatatgaggtggttctgctagatggctggccaattccatttttgatgatggtcacgattgcacttgctgaaaagggtatcaaatatgtacacaatgaagaggacttgatgaacatgattcctcttctcctccaaattaacccttttcacatgaaaattcctattctcatccacaattgcaaacccatttttgaatccctcattgcatgcccactacattatactagtttttggattgacataaacttccttgttgccttgtgacccttaccagagatctcattctttattctggtctgattatttttatattaatatatattat

SEQ ID NO: 15752 - DNA, 349 bp, Glycine max
  unsure at all n locations
  Clone ID: LIB3094-013-Q1-K1-E12
cttcttctaccttattttctttccctagtctattagattcatctctccaccaanttggtggggaatataaaaaaggctgaacattttctgcattcatgctaaatatttatgttgtccaacaatttcaatcattccacttaaattcccctcaatttaaatatcatcttttttacatctctaaattcattattgcaacattgaacaattaccaacttccctatctattatccacacccttattaattttttaaacaatttcttgtccagaaccttttcttcaacacttattttaaaaaacatttcttttatgcccacataattttcttattcctcaacatccctacaaaaa

SEQ ID NO: 15753 - DNA, 114 bp, Glycine max; identical to SEQ ID NO: 13348
  Clone ID: LIB3094-013-Q1-K1-E3

SEQ ID NO: 15754 - DNA, 421 bp, Glycine max
  unsure at all n locations
  Clone ID: LIB3094-013-Q1-K1-E5
cccacgcgtccgcccacgcgtccgcccacccgtccggggtaactttaactaaaaccattttccgaatggggttcttcaaaccgctttttttctcgaaccggccggcggcggcccttgcggcggcactcgattgagttgtagaatgcgagtgatcggattccgaaatggcttcgaacccttcgcttctccctgagatcggacccgatggtctcgctaaagaagctcccgtcatcggctacaccgagaagatcatcgaagcaaaacagcttcaattgcagaaatacattcaagaaaactattctaaaaatcgtgatgtggagcgtgagccttgcaaatcttcactggagatgaaactaacagctgggccgaaaaaagcagctctngaacatttgaggaagaaaatagaggaatcaacagaaag

SEQ ID NO: 15755 - DNA, 444 bp, Glycine max
  unsure at all n locations
  Clone ID: LIB3094-013-Q1-K1-E6
atttatctcaaggtggaaacacatcagtaatggctcaattgggttaaatccatacagcctctatgcatatgattctgtttggatgattgctgangcactcaaattgttttttgatcggaatggtaccattttattctctaacaatacaaatttaagtggtacgagatttcaaggacacagggtgggaatgggacttcaagtggcagagaccattatttgacagtgagatagatatggcggtctcatttatacaagaagttgaggggtacaaaatccagtctcatattggtgatcagtgggtgtgggcggcagatcctagtggccagtattcgattaggagtgcctatagtgtgcttagagaggacatatcagaggaggcccaggatggagagttcaaggaattatggaagcttaaggtcccacctaaagtggctgtgtttgcat

SEQ ID NO: 15756 - DNA, 418 bp, Glycine max
  Clone ID: LIB3094-013-Q1-K1-E9
cccacgcgtccgcccacgcgtccgcccacgcgtccgaggaaatcttcgtgtacttgcatatgagtttgctactatgggctctcttcatgacatattgcacggtagaaagggagttcaaggtgctcaaccaggaccaactcttgattggatacagcgagttagaattgcagttgatgctgctcggggattggaatatttacatgagaaagttcaaccaccgattatacacagggatatcagatcaagtaatgtgctaatctttgaagattacaaggccaagatagccgactttaacctttctaatcaggcccctgacatggctgcacgccttcattcaactcgtgtattgggaacttttgggtatcatgctccaaaatatgcaatgactgggcagttgactcaaaaaagtgatgtctat

SEQ ID NO: 15757 - DNA, 433 bp, Glycine max
  Clone ID: LIB3094-013-Q1-K1-F1
cccacgcgtccgccaaaaccgaaaggaaaaaaaccgctgaattccccaaaatcgaaaagaaaaaaaccaaaagccgctgaaatccctctaaccgatggcaaaacgaagagggatagagaaatcgccaaagaggagaacaagaagaagactaagaaacccaagctcagcaatggcacttcaaaacagcgagacgagggatccaaaaagggagtagcagaaggaaaaggagaagaggggaaaatgaacgtgtttccgatgaatcgcatcagaacgatgattaagggcgaagatcccgatatgcgtgtttctcaggaagcattgttggccatcaacaacgctgtggagaagttccttgagcaattctcgcaggaagcttatgctttttgtgttcgggaccgcaagaaatgcctcagctacgatcacctagcacatg

SEQ ID NO: 15758 - DNA, 208 bp, Glycine max
  Clone ID: LIB3094-013-Q1-K1-F10
attccctgttcgaccgactcttcctcccactcttccttttattacatttattgatttttattcacttgatctcatcataatcgttggcttctatagaagaagatgccactcacacccatctccttcttatctccttacttaccaactcacccatacacatctaatactcctttttcttatttcatctcatccctctatcttcatattc

SEQ ID NO: 15759 - DNA, 445 bp, Glycine max; identical to SEQ ID NO: 15386
  Clone ID: LIB3094-013-Q1-K1-F11

SEQ ID NO: 15760 - DNA, 337 bp, Glycine max
  unsure at all n locations
  Clone ID: LIB3094-013-Q1-K1-F12
cccacgcgtccggtgaagctggatcattcctccgcggaatcgatgtgaaccgtttaccttctgtggttgattgcgaagaggaagcangtgtttcatctccaaacagcacggtttctagcgtcagtggaaagcgcatcgagagggaaaccaatggagaagaaaacgacccagacagagcttgttccagaggcatcatcagcgacgaagaagatgctgaaacctctagaaaggaacttaaactctccaaagatcagtcaattgtcctggaagagagcttcaaagaacacaacactcttaaccccgtaaggtaacctacacatgccaattaatttttttt

SEQ ID NO: 15761 - DNA, 254 bp, Glycine max
  Clone ID: LIB3094-013-Q1-K1-F2
tggggtgcctctaaccgatggctaaacgaagagggatagagaaatcgccaaagaggagaacaagaagaagactaagaaacccaagctcatcaatggcacttcaaaacagcgagacgagggatccaaaaagggagtctcataatgaaaaggagaagaggggtaaatgaacgtgcttccgatgaatcgcatcaaaacaattattaaaggcgaagatccccatatgcatttttctcaagaagcatttgatgccatca

SEQ ID NO: 15762 - DNA, 417 bp, Glycine max
  Clone ID: LIB3094-013-Q1-K1-A1
cccacgcgtccgcttaaatagttcaacacctgcaggcaattgataccctcgttccagccacaatgagcagcagtcctgcaccttgcagccgatcctggtcaataagtgaggactccctaagaaggtatgtgcagtttgcgagtgaaagctgcgtacaagagttattggcagcttcggacacaaacaaaggaaatggcaatgatggatggaagatgctcactcttgacaatggagtggagatatcaaaacgcaggtcaggctcactccacacgtttcgcagccgttgggttcttagagctgtctctccccaacagttcataacagtggccaatgccattgatgctgcaaagcaatgggactctgatctggtggaagccaggtacataaaagatcttcaagacaacctcagcataattc

SEQ ID NO: 15763 - DNA, 448 bp, Glycine max
  Clone ID: LIB3094-013-Q1-K1-A10
gaaatgtgaaagccttatcatacagtgtttgcaagatgccaaggtagaagttgaagaggtgggtgatgtgataattgtaggcggatgttcttacatcccgagggtgaaaaatcttgttactaacgtatgtaaaggcaaggaactttataaaggcatgaatcctttagaagctgctgtttgcggtgcagcagtggaaggagctattgcttcaggcgtcaatgatccctttgggaacttggacttgttaactatccaagctacacctcttgccattgggattcgagctgatgggaacaagtttgtccctgtaattccgagggatactacaatgccagcacggaaggagctagttttcacaactactcatgacaatcaaactgaggcgttgatccttgtctatgaaggagagggtgaaaaggcagaataaaaccacctattgggatatttt

SEQ ID NO: 15764 - DNA, 177 bp, Glycine max
  Clone ID: LIB3094-013-Q1-K1-A11
tatatgttacatccttatcatacacttattctttgaagaccaccaacttcaaaatgcaggtgctgatactataatggcactcgttcttccctacataccatggattaaaaatcataaaactaacatatataaattcaaggaaccataccttctcttaaatattcaaattctaacatc

SEQ ID NO: 15765 - DNA, 379 bp, Glycine max
  unsure at all n locations
  Clone ID: LIB3094-013-Q1-K1-A12
tgtaagttacatgatgtgaagttgcaaatgctttggagatcaccaacttcaaaatgcagctactgctacttgtgtggcacttgttcttcgcaatttaggatggagtatttctgataaatctattaggtatggtttagaggatacataccttcttggaaggagtcaatttctaacatctgaagaagctgaggtattaggacttactggatcaacagtactgcttgatggagcccacaccaaagaatctgccaaagctctgatgaataccataaggatggcatttcccaaggctcaattggtttttgttgttgcaatggcaagtgacaaagatcatgtgggatttgctcgagagattctctcangtgtacatgtggagact

SEQ ID NO: 15766 - DNA, 369 bp, Glycine max
  Clone ID: LIB3094-013-Q1-K1-A2
tcaacaccttttattcaattgataccctctttccaaccacgatgagcttcaatcctgcaccttgcatcctatccttttcaataattgaatactccctaaaaatatatgttcatttttctaattaaatcttcctacaataattattgtcaacttcttacacaaacaaatgaaatagcaattattgatggaaaattctcactctttacaatgtattttatatatcaaaacccatttctatctcacttcacacattttacattcttttttttcttagaactttctctccccaacagtttcataacaatttccaattcccattattcttcaaaactatttcacatctatcttttttataccaatttcataaaa

SEQ ID NO: 15767 - DNA, 435 bp, Glycine max
  Clone ID: LIB3094-013-Q1-K1-A4
caaccatggccgactcatctcaagaccttgaccaacttctcgatagtgctttggatgattttcagtccttcaacctcaatcctccccctccaagtggggaagcaactgcgaatagcaagaaggagagtccttctttgccgtcgggggttcaaggattgggcatgggtttacccgatttgagaacgaagaaaaaggggaaacagaaggcttccaaagacagccacgtgtcggaggcgctcaacaagctcagggagcagaccaaagaggctgtgaaggggctggagtctatatccccacccactgccgatgatttaggtaaggatgccttgatggaagattgggtcaaacaatttgagcagcttgctggctctcaagacatggaatctattgtggagaccatgatgcatcaacttctgtccaaggagattcttcatg

SEQ ID NO: 15768 - DNA, 452 bp, Glycine max
  Clone ID: LIB3094-013-Q1-K1-A5
gcaaccatggccgactcatctcaagaccttgaccaacttctcgatagtgctttggatgattgtgaggccttcaacctcagtcctccccctccaagtggggaagcaactgcgaatagcaagaaggagagtccttctttgccgtcgggggttcaaggattgggcatgggtttacccgatttgagaacgaagaaaaaggggaaacagaaggcttccaaagacagccacgtgtcggaggcgctcaacaagctcatggagcagaccaaagaggctgtgaaggggctggagtctatatccccacccactgccgatgatttaggtaaggatgccttgatggaagattgggtcaaacaatttgagcagcttgctggctctcaggacatggaatctattgtggagaccatgatgcatcaacttctgtccaaggagaatcttcatgaaccaatgaaggaaat

SEQ ID NO: 15769 - DNA, 443 bp, Glycine max
  Clone ID: LIB3094-013-Q1-K1-A7
gaagttgcgagagtgaagaaatggcgcaagacttggcattggatttggaggagcttggccgcctccacagcatcgccaaaagacctcgaaccctctctcttctctcctccgaaattcgtaacctcgaaaagttatcgtcagaggaagcttctgcgcagattccggcgccgatttcgaccggaactaaagtggcgccttcacctgcgctgaagtatgcggcactcgcgtcgttcagttgggaccaggatagtgacaaagttaagatatatgtgttaatggagggaatcgatgagaataaggttgaatccgagtttaagtcgatgtcattcgatgttaagttccatgatgttcaagggaagaactaccgatgtgcaatatcaaaattgcacaatgagataataccagagaaatgcaaggttgtggtcaagccctaaaaggcaatc

SEQ ID NO: 15770 - DNA, 399 bp, Glycine max
  Clone ID: LIB3094-013-Q1-K1-A9
gaaatgtgaaagccttatcatacagtgtttgcaagatgccaaggtagaagttgaagaagtaaatgatgtgataattgtaggcggatgttcttacatcccgagggtgaaaaatcttgttactaacgtatgtaaaggcaaggaactttataaaggcatgaatcctttagaagctgctgtttgcggtgcagcagtggaaggagctattgcttcaggcgtcaatgatccctttgggaacttggacttgttaactatccaagctacacctcttgccattgggattcgagctgatgggaacaagtttgtccctgtaattccgagggatactacaatgccagcacggaaggagctagttttcacaactactcatgacaatcaaactgaggcgttgatccttgtcta

SEQ ID NO: 15771 - DNA, 326 bp, Glycine max
  Clone ID: LIB3094-013-Q1-K1-B10
cgacccctccgtcacccccttccttcatgatctccaggccaggatcctccaccaccagggggagactctggcgcgaggccaaccccaaccctgactactccatcaatattctccccttcgagttcgcatccctcgaggcctgtctgtaggccgcttgtagcgtcttggaaaacgaggctaatactttggagcatgaggctcatccagccttgaacaagctcacctccaagatcagtactctcaatttgaaacgctttcgacaaattaatagccgattagtcgccatcactggccgtgtttacaatgtcagggtcgaattgtagcac

SEQ ID NO: 15772 - DNA, 296 bp, Glycine max
  Clone ID: LIB3094-013-Q1-K1-B12
tgtacgctacatgatctcaacctgcttattcttttgagatcaccaacttcaaaatgcgggtgctgctacttgtgtggcacttgttcttcccaatttatgattgattatttctcataaatctattaagtatgtcttaaatgatacataccttctttaaaggagtcaatttctaacatctgaaaaagcatacgtattatgacttactgcatcaacattacttcttgatggatcccacaccaaagaattttcccatgctcttatgaataccataaggattgcatttcccaacgctcaat

SEQ ID NO: 15773 - DNA, 450 bp, Glycine max
  Clone ID: LIB3094-013-Q1-K1-B6
cggacgcgtgggagaacctattttcactgttttttgaagaaattgtatcccagctatctggagtgtcctcgctcgtatgataagttgcgctttgatccaagtaaaccaaaatgcaggctgttagttacacatgatgactatagtataacgtccaaacttccaagggagagaacttctgttgttaccatacttagggatccagttgaccgtgtttttagtacttatgaattctcaatagaggttgcagctagatttttggtgcatccaaacttgacgtccgcaacaaagatggctttacgcctaagctctaagactaaaggagtaagcacactggatatctggccttggaagtatctggttccatggatgagggaagacctatttgctaggagagaagctaggtacagtaggggactgaatatcattgaaagcaatgattcttatgacatg

SEQ ID NO: 15774 - DNA, 453 bp, Glycine max
  Clone ID: LIB3094-013-Q1-K1-B7
aaacacccttgtcgaccacaccaaaattaaaaacataaaaaagcataaaagcacaaaaagacataaaaaagggaaaataaaacattttgaagtcatatttgcacacttgattaaaggctgtcgtcccttgtgacggatgcgtggggtgctaataccttccctgtgcgtaaaaacaactcccgaactattcacacttaaagttcgtagaccacaccttttcaattttcccgacgctttcctcaaataaaagttggtggcgactccgcgcattttcctttcatggaagacgcacttgtgagtcccgcatcgccctcccgtcaaagggtaggttgcgacagtacttgccctcccgccgaagggtaagttccttaattgaattaactaataacaaaagtgaaactaaggctaaaataaactcacaaatcaagctttgtccataaaaatcacttaaaa

SEQ ID NO: 15775 - DNA, 452 bp, Glycine max
  Clone ID: LIB3094-013-Q1-K1-B8
aaacacccttgtctaccacaccaaaattaataacataaaaaagcataaaagcacaaagggaggtaaaaaagggagggtaaaacattttgaattcatatttgcacacttgattaaaggctgtcgtcccttgtgacggatgcgtggggtgctaataccttccctgtgcgtaaaaacaactcccgaactattcacacttaaagttcgtataccacaccttttcaattttcccgacgctttcctcaaataaaagttggtggcgactccgcgcattttcctttcatggaagacgcacttgtgagtcccacatcgccctcccgtcaaaagttaggttgcgacattacttgccctcccaccgaaaggtaggttccttaattgaattaactaattacaaaagtgaaacttaagcttaaatatactcacaaatcaagctttgtccataaaaatcacttaaa

SEQ ID NO: 15776 - DNA, 317 bp, Glycine max
  Clone ID: LIB3094-013-Q1-K1-B9
cgacccctccgtcacccccttccttcaggagctccaggccaggatcctccgccaccaccacgagactctggccgatgccaaccccaaccctgacgacgccatcaagattctccccttcgagttcgtagcccttgaggcctgtctggaggccgcttgtagcgtcttggaaaacgaggctaagactttggagcaggaggctcatccggccttggacaagctaacctccaaaatcagtactctcaattgggaacgcgtccgtaaaattaaaagccgattagccgccttaactggccgggttcaaaaggccagggacaaat

SEQ ID NO: 15777 - DNA, 430 bp, Glycine max
  Clone ID: LIB3094-013-Q1-K1-C12
cccacgcgtccgccacgcgtccggtttctggtggaggatccaacttcagagcaattcatgaggcctccaaaaggggatcacttcatggagatgttcttgtgttggtcacaaataaaagtgattgtggaggtgcggagtatgcaagaaataatggtatcccagttatactgtaccatatatcaaaggatgaatctaatccaagtgaccttgttgatacactaaggaaatttgaggttgattttattcttttagctggatacctcaaacttataccagtggaattgatccgagcttacaaaagatctatattcaacattcatccatcacttcttccagcttttggaggcaagggattctatggcatgaaagtgcacaaagcagtaattgcttctggagcaaggttttcaggtcctaccattcattttgttga

SEQ ID NO: 15778 - DNA, 431 bp, Glycine max
  unsure at all n locations
  Clone ID: LIB3094-012-Q1-K1-H9
gaccgacgcgtccacccacgcgtacggtnaaataggncaacacctgcaggcaattgataccctcgttccagccacaatgagcggcagtcctgcaccttgcagccgatcctggtcaataagtgaggactccctaagaaggtatgtgcagtttgcgagtgaaagctgcgtacaagagttattggcagcttcggacacaaacaaaggaaatggcaatgatggatggaagatgctcactcttgacaatggagtggagatatcaaaacgcaggtcaagctcactccacacgtttcgcaaccgttgggttcttagagctggctcttcccaacagttcataacagtggccaatgccattgatgctgcaaagcaatgggactctgatctggtggaagccaggtacataaaagatcttcaagacaacctcagcataattc

SEQ ID NO: 15779 - DNA, 341 bp, Glycine max
  unsure at all n locations
  Clone ID: LIB3094-012-Q1-K1-D1
nccacgcgtccgctttctttctttcttcttttttctgccgaggaaaagaaagaaatagaaagagaggagaaaaacacagcgtcctagatttnctcttctctgcttcggaagaaagagaaaacagacaaaacaatggcgttcgcttctttcctcggcagagtcctcttcgcttctggcttcatactctctgcttaccaacaatttaatgaatatggagttgatgggggacctgctacaaaagcactcagacctaagattgatgcctttacacatcggggtgcattctcaaaggggctttcaaattccagagattaatctgaaatttttaaatgctggggcta

SEQ ID NO: 15780 - DNA, 360 bp, Glycine max
  Clone ID: LIB3094-012-Q1-K1-D11
cccacgcgttcgtcaagcattgcatccctcttgatttgtagtttgttttgtgctttagatgaaaatggtgccaaatcaagaggggttttaagatcatagtgtgtgttttgcaacaatggctaagttctttgctgctatgatcttggcactctttgccatttccatacttcaaacagtggtaatggctgctaatgaacaaggaagccacttgtatgacaacaagagcaaatatggaaatggaaagtgtcaagagttaccaatgcccatcacaatgctcgaagagatgtagccagacccaataccacaagccctgcatgtttttctgtcagaagtgcttcaggacatgcctgtgtgtgcccc

SEQ ID NO: 15781 - DNA, 208 bp, Glycine max
  Clone ID: LIB3094-012-Q1-K1-D2
cggacgcgtgggacgtgagatacaggtttgttgtggatgtcaaaggcagcaaactggtcgatcagtaaaagaaagaaggtttactactagcacgacacacgcaacatccatccttccatcatgaagagtctggaaaagttattaattaattgagaactaaagctgtatttgttgttcactctaaaaaagaagctgtgttttgtttatt

SEQ ID NO: 15782 - DNA, 303 bp, Glycine max
  unsure at all n locations
  Clone ID: LIB3094-012-Q1-K1-D6
cttttctactttgagtcttcttgatccttctttttctccttgaactcaaacatggcagatgaggtggttctgctagatttctggccaagtccatttgggatgagggtcaggattgcacttgctgaaaagggtatcaaatatgagtacaaagaagaggacttgaggaacaagagtcctcttctncttcaaatgaacccggttcacaagaagattccggttctcatccacaatggcaaacccatttgtgaatccctcattgctgttcagtacattgaggaggtttggaatgacagaaaatccttg

SEQ ID NO: 15783 - DNA, 364 bp, Glycine max
  unsure at all n locations
  Clone ID: LIB3094-012-Q1-K1-E1
cccacgcgtccgtcaagcattgcatccctcttgatttgtagtttgttttgtgctttagatgaaaggtcttgccaaatcaaaaggggttttaagaccatagtgggggtttggcaccaatggctaagttctttgctgctatgatcttggcactctttgccatttccatacttcaaacagtggtaatggctgctaatgaacaaggaggccacttgtatgacaacaagagcanatatggaagtggaagtgtcaagagttaccaatgcccatcacaatgctcgaggagatgtagccagacccaataccacaagccctgcatgtttttctgtcagaagtgctgcaagacatgcctgtgtgtgcccccggg

SEQ ID NO: 15784 - DNA, 402 bp, Glycine max
  unsure at all n locations
  Clone ID: LIB3094-012-Q1-K1-E11
gtttggtgtaactgcatgctctttgccattgttgatggagtttgcctttagaattttgagttgcccagatagttatacaattcaatttaggtcttgttgactagtgttctagactatgggtaaggaactaaaaggagaagtttttaatatgtaaatcattaggaaagtataaaaaaaaatcatgaagaacgcaattttatgccttncaaataaaaaaccttagtttccttaacccgtgtcctcgggacacttgttagcatttgccttcattntatatgtatcattagattattataattgaaaaaaataaggcctactttttgacgtcattttattcattttattaggggtcatcaaatactttcacttggtggcagtgtttgtcaaaattgtacacaattt

SEQ ID NO: 15785 - DNA, 339 bp, Glycine max
  unsure at all n locations
  Clone ID: LIB3094-012-Q1-K1-E2
gggaaacctgctgttcttacacgtgttgtgtatagcatgactgacaacttgagaccaactcgtgctgaagcaacagatgtcgccaatgctgttttagatggaagtgatgccattcttctgggtgctgagactntacgtgggttgtaccctattgagactatatctactgttggcagaatttgttcagaggctgagaaagttttcaatcaagacctttattttaaaaggacagtcaagtatgttggagaacccatgactcacttggaatctattgcatcctctgcggtacgagctgcaattaaggtgaaagcatctattataatttggtttacttcatct

SEQ ID NO: 15786 - DNA, 314 bp, Glycine max
  Clone ID: LIB3094-012-Q1-K1-E3
cccacgcgtccgagaaggcctgggcttagtttataagcataactgggtgaggaagaaagagagagagtgaagaagatggcgtcgagcggagcggtaccgttttggagggcggcggagatgacgtacataacatactcaaacatatgcgcgaatctgctcatgaattgcctcaaggaaccctacaaggccgaatccctctctcgtgagaagctccattttgttctctccaaatgggtcgacgccaagcctgaaaaacctactattcgatcagacaccccagagcagtgatctggaatagttggaagctataaatg

SEQ ID NO: 15787 - DNA, 394 bp, Glycine max
  Clone ID: LIB3094-012-Q1-K1-E4
gaggagatatatgtacctaaacgaagagatcttgaaagagaatccaaacatgtgtgcttacatggcaccttctttggatgctaggcaagacatggtggtggtagaggtaccaaagctagggaaagaggctgcagtaaaggccataaaggagtggggccagccaaagtcaaagattacccacttgatcttctgcaccaccagtggtgttgacatgcctggtgctgattaccaactgaccaaacaattgggccttcgcccctatgtgaagaggtatatgatgtaccaacaaggttgctttgcaagtggcacggttcttcgtttggcaaggatttggctgagaacaacaagggtgcacgtgtgcttggtgtctgttctgagatcactgcagtcacat

SEQ ID NO: 15788 - DNA, 327 bp, Glycine max
  Clone ID: LIB3094-012-Q1-K1-E5
cccacgcgtccgagaaggcctgggcttagttgataagcataactgggtgaggaagaaagagagagagtgaagaagatggcgtcgagcggagcggtaccgttttggagggcggcggggatgacgtacataacatactcaaacatatgcgcgaatctgctcaggaattgcctcaaggaaccctacaaggccgaatccctctctcgtgagaagctccattttgttctctccaaatgggtcgacgccaagcctgaaaaacctactattcggtcagacaccccagagcagtgatctggaatagttggaagctataaatgcataaaatctttg

SEQ ID NO: 15789 - DNA, 355 bp, Glycine max
  Clone ID: LIB3094-012-Q1-K1-F4
gaaaaacaagagcaaattgggatcgaagaatttgaagaacaccacaagcaagatgcatgttgttgtggtgctcaacacgcaatcctactgcagaggcctagaacctccttcatcttctccttccgtcgtttccaacaagggaacaaggactttgagtttcaggaggctgctgctgcgtccttctcttgggattcatttatcgcgtagctttgctttaaagtgtgttgttactccgaacccagctgtggaattgccattaactgctgaaaatgtagaaagtgtattggatgaaattcgaccctatctcattgcagacggtgggaatgtggctttacatcaaattgatggcaatgtt

SEQ ID NO: 15790 - DNA, 372 bp, Glycine max
  Clone ID: LIB3094-012-Q1-K1-G1
gttaatctttccggccttgacctctctaaactggatttatcttatgttgatttcagctatgcttgtcttaaaaacgtgtttttttcccgagcaaaccttcaatgtgcaaagtttcgagatgttgatgccgagggctccatctttcacaatgcaactttgcgtgaatgtgaatttactgcggcaaatcttcgtggtgctttattggctggtgcatgccttcagagtgcaaatctacaagatgcttgcttagtagactctagcttctgtggagcagatctgcgtactgcacatctacagaatgcagatcttaccaatgccaatctagagggagccgtcctagaaagagctaatttgaaaggtgcaaaactgaac

SEQ ID NO: 15791 - DNA, 402 bp, Glycine max
  Clone ID: LIB3094-012-Q1-K1-G8
cccacgcgtccgcccacgcgtccgcccacgcgtccgcccacgcgtccgtctccctgtttcgcgtcactagctctgtgcattcttctctcgctctctgccttccatcacactcggcatttcctttcccaagatagtagaagatggcagacactgaggatattcaacctcttgtttgtgacaatggaacaggaatggttaaggctggatttgctggagatgatgccccacgtgctgtgtttcccagcattgtaggtcgtcctcgtcacactggtgtgatggttggcatgggccataaagatgcatatgttggtgatgaggcacaatctaagaggggtattttgactctcaagtaccccattgaacatgggaatgtgagcaattgggatgatatggaaaagattt

SEQ ID NO: 15792 - DNA, 432 bp, Glycine max
  unsure at all n locations
  Clone ID: LIB3094-012-Q1-K1-G9
cccacgcgtccgcccacgcgtccgcaaaaattacaacaccaatctcacccatttcaaaaagaggccgtgagtgttactattcgtaaaatggccactcttgttctntaccaattctttctcaaactcttgctcctaatttcagtctttcagctttcctttgctgctaggagactcaaccagctggttcaggaccagtcacagttactccattaccacaacggtcctcttctatacggcaaaatcgccgtgaacctaatctggtatggtcacttcaaaccattccaaaaggccatcatcaccgatttcgttacctcactgtcatccccatcgtctcagagcaaccagccatctgttgccacgtggtggaaaaccacggagaagtactaccacctgaagtccaagaacaagaaggctgcttcttctctttctcta

SEQ ID NO: 15793 - DNA, 380 bp, Glycine max
  unsure at all n locations
  Clone ID: LIB3094-012-Q1-K1-H10
cgcacgcgtccgttcaagaacaatttattgcacaaatattgacaagaagcttactcaagccgatgtcaaacagttctttgaatctatttgtggagaggttcaacggttgaggcttcttggagattaccatcattcaactcgaattgcttttgttgagttcacagtggctgagagtgcaattgcagctctaagctgtagtggggtgattctgggttcactgcccataagggtaagtccatcgaagacaccagttcgatcacgtgctcctcgccctactatgcactgaatcaactntccatgtttctggggttgattgctgctgagatatatttacatatatatatatacatagaaacagctgtgttctaggaacatgtggc

SEQ ID NO: 15794 - DNA, 303 bp, Glycine max
  Clone ID: LIB3094-012-Q1-K1-H4
tcgcacacacacacaaaacagaacacaacacatacacatacacatgttgttgatgagtggaggcggcagaaaacacagatccatcacacacatgaacaattgatctttgtcctttgtatataatttgattctaatttttggcactaagagagccactcaaggctctgggatgtactatacgccattcggggttctgattttcggcggagagaaggttcaagagacccagtgggagaaggagcgataagtaattcatattccattatctccatttctagatccttccattaactctcataggat

SEQ ID NO: 15795 - DNA, 340 bp, Glycine max
  Clone ID: LIB3094-012-Q1-K1-H6
aaacacccttgtcgaccacaccaaaattaaaaacataaaaaagcataaaagcacagaaagacataaaaaagggaaaataaaacattttgaagtcatatttgcacacttgattaaaggctgtcgtcccttgtgacggatgcgtggggtgctaataccttccctgtgcgtaaaaacaactcccgaactattcacacttaaagttcgtagaccacaccttttcaattttcccgacgctttcctcaaataaaagttggtggcgactccgcgcattttcctttcatggaagacgcacttgtgagtcccgcatcgcccttccgtcaaagggtaagttgcgacagta

SEQ ID NO: 15796 - DNA, 421 bp, Glycine max
  Clone ID: LIB3094-012-Q1-K1-C9
cccacgcgtccggagaattatcataccctttaagatgaaaccgtacctacgtccaatatgcctattggtccttatccttctcgaccaatccatttcggcgagtgctgctataaatattaatggtctgagaaacaaaattagagaagttctaaacaagcacccgagcatcaatcttccggcagataaactgaagaaggtgaagagaccactgaaggcactggattatctgcttggcgaatgtaaggacaggccgcctcaagaatttcaagaattttgcccgaaatttaagaacgattatcaacaaaattgcccgaatgccgcgtatgaagcagtttgcccgttactgaagcaagcgattcaaatatgttgccagaaacacgcataactcttgaagccaacggtggcgtttggatgtgctttt

SEQ ID NO: 15797 - DNA, 373 bp, Glycine max
  Clone ID: LIB3094-011-Q1-K1-H5
cccgcgcgtccgatcattggttcttatttttaccggggaaagcatgaccaacttgtagcgtctattctatgaggagactactgtattggcaatgtgtatgtcggattaagtggattcgagtgaaatgtgtgatcacgggagtcatttccacatattttctggaatataacttttggattattagccgttaaatgcactttggatttgcaaactaattcgttggctaaattactccgattgtgaaactgtttaaataacagggcctgctgtaatatggatccaggcttacaggcaccagcgtacgacacaggatcgcttctatggcgtcacctagtgactacatactgactggctttttgcaacagggacattg

SEQ ID NO: 15798 - DNA, 360 bp, Glycine max
  Clone ID: LIB3094-011-Q1-K1-H6
cgacgccacgcgtccgattggaaggatggtgagtgcttatagatttaagtgctgccaaatcaagaggagtttggagatcatagtgtgagtgtgtgtgttcaacaatggctaagttctctgctgatatgatcttggcactcattgccatttccatgcttcaaacagtgtgctatggctgctaatgagcattgaggccactagtatgacaacaagagcaaatatgcgaaagtatagtgtcaagagataccaatgcccatgacaatgctcgaggagatgtagccagacctaataccacaagcggtgcatgtgagaatgtcagaagtgctgcatgaaatgccagtgtgtgccaccggaatatta

SEQ ID NO: 15799 - DNA, 413 bp, Glycine max
  Clone ID: LIB3094-012-Q1-K1-A1
cccacgcgtccggctctgcatctgcgcgtggacatgcctgggctcggcaaggaagacgtgaagatctccgtggagcagaacactctcattatcaaaggtgaaggtgctaaagaaggcgatgaagaagagagcgctcgtcgctacactagcaggattgacttgccggacaagctctacaagattgaccagatcagagctgagatgaagaacggtgtgctcaaggtcgttgtgccgaaaatgaaggaggaagagaggaaagacgtgatcagtgttaaagttgagtagaacaacccaagctgatttggccattttgcatcgacactactctgtagttttcttttattaggtggtgatgaatctagttagtagatataacagcttaataagattgttgctgtgtttggttttgaaac

SEQ ID NO: 15800 - DNA, 345 bp, Glycine max
  unsure at all n locations
  Clone ID: LIB3094-012-Q1-K1-A10
agacagcagagcagagatctagcgtattctctcgctctttctttcactgtcacagagccgcgtccatgggctttccaagccaagggggcttttgcggcccagcccctaaatttcctaatctacggccgcacgggctggatgggcggcctcctcggctccctctgccgggcccagggcatctccttccattacggctcgggccgnctcgagaacccggcctnnctcgaaaccgacatagcccttctcaagccctcccacgtcttcaacgccggcggcgtcacgggccgncccaacgtcgactggtgcgagtcccacnaagtcgagaccatccgaaccaacgtcgtc

SEQ ID NO: 15801 - DNA, 217 bp, Glycine max
  unsure at all n locations
  Clone ID: LIB3094-012-Q1-K1-A12
caagtggcgagtgaggaatgcagagaaatgttaattcgtcattggctgagtccttctgaggcangtggccctgccaaacgcataaactccggcagaaattgccaccgaaaacatttcgaaaacgggtagtaatagcactcgctttcattctcccacattcccaattctgagcgttaagatgagtgagaaagagaaaggcaataatattgagggacat

SEQ ID NO: 15802 - DNA, 297 bp, Glycine max
  Clone ID: LIB3094-012-Q1-K1-A2
cttgatgatcccaacactttcggtaacaggattcacaggatgctgaagcttggactgagcattgatgaagatgctggtgaagcagatgctgacatgcctactcttgaggacgctggtgcagatgcttgagggtagcaagatggaagaagttgattaaatctgacttaattgcctgttacgtttttagaaacaatgattggagaaacagtctttgtactatgttttatgttttttgaattttcgaaattttggaacgttggctagttaggtgccggatggtataagtttctttatggg

SEQ ID NO: 15803 - DNA, 459 bp, Glycine max
  Clone ID: LIB3094-012-Q1-K1-A3
tgaagtggaacgacgtcgcagggttggagagcgccaaacaggccttgcaggaggctgtgattttgcctgtaaagttccctcagttctttactgggaaaagacgaccctggagagctttcttgttgtatggacctcctggaacgggaaaatcatatttagccaaggcagttgcaacggaagccgagtccacgtttttcagtgtttcttcatcagaccttgtttcaaagtggatgggtgaaagtgaaaagctggtttcaaaccttttcgaaatggctcgagaaagtgccccttctatcatatttattgacgaaattgattccctgtgtggtcagcgtggagaaggcaacgagagtgaagcttcaagacggattaaaacagagcttctggtgcagatgcagggtgtaggacacaatgatcagaaagttcttggtcttgcagcaacaaatacgccctatgcct

SEQ ID NO: 15804 - DNA, 249 bp, Glycine max
  Clone ID: LIB3094-012-Q1-K1-A4
cccacgcgtccgactgggtaaaaaagcaagagaactaaaaaaagcagctgaggcactacatgaggaagaaagaagtggttcaaagggtagaaagtttcgtaaaaatgtgaaggaagttgagaaggagttgtttcaattagaagaagatgtaaagcttcttgaagagatgtatccacaaggggaaaaggctgagacaacatgggctctaacagttcttggttacctggcaaaatttggtttgggaaattt

SEQ ID NO: 15805 - DNA, 366 bp, Glycine max; identical to SEQ ID NO: 12658
  Clone ID: LIB3094-012-Q1-K1-A7

SEQ ID NO: 15806 - DNA, 321 bp, Glycine max
  Clone ID: LIB3094-012-Q1-K1-A8
ctgagttgcaagattcacttcaaattatgcgtttcgctgatcggttcctcatcacatcaaacgacgtcgcagatcatcgcaattccttgattatttccttttgttgatacgcggaatcgcgcacacggtgctggtgtgtgcactgaggtagaaagaagaagattgaattgtaaacagcatgaattaccttcttggagctttcaagcctgcatgtaatgtcttgatcacgtttaatgatgggaagaaccggaagcaggttccgtttaaaaaagaaaatggtcaaatggtcacagtcccacttttccaaagtcaagaaaacat

SEQ ID NO: 15807 - DNA, 445 bp, Glycine max
  Clone ID: LIB3094-012-Q1-K1-B11
gtcagtcttcagagctaaaaatgttctcactcttccatctcagtatgtgttgacatgctggacaaggaatgctaaaaccggtacattgttagatgaacatgcatctgaattgccaagtacttctcgtgaatctgtaccagtttgttataacaatttacgacaagaagcaatcaaatatgttgaagaaggtgcaaaatcaatccaaatctatcatgttgccatgagagctctgaaagaagctgctaagaaggtttgcaccataaaaaatcagagttctggaacagcagagggagctacagcaaccaatggaagcaggggtgaattgcttgtagcagatgaagatgttccaagcaatcaatctgtggcggagaagcaaaagaaaataggagagttgactgctgagttagaagccacaaaataacgatgtgaagtttatagagcaaac

SEQ ID NO: 15808 - DNA, 454 bp, Glycine max
  unsure at all n locations
  Clone ID: LIB3094-012-Q1-K1-B3
acgctcggttaacttatggaactattggtgggaggtttaagaaaggagaaaacccgtttgttgaggaggcgtatcagcgagtggcattggaccaactccttaagatagctggtattacagatgatgacttgttgattatgtcagatgttgacgagattccgagtgctcacactattaacctcttgaggtggtgtgacgacgtgccttcagtccttcatcttcagctgaagaactatctatactcctttgagtttctcatggatgatggcagctggagagcttctgttcacagatatcagagtggtaagactaggtatgcacattaccgncagtccgataacttattggcggatgctggttggcattgcagcttttgcttccgccatatcagcgatttcatctttaagatgaaagcgtacagtcataacgacagagtcagattctccattattta

SEQ ID NO: 15809 - DNA, 398 bp, Glycine max
  Clone ID: LIB3094-012-Q1-K1-B5
agcacacacttgaaagcgagaacacccttgtttgttttagctcctaagttggaagcttgtagattgattttcactgccaagcaaaagaaagtgagggaatctaacccttaattgaacacaatgagttcattttacatgtctctgaacccttcaatttctcaatcgtgttacaaacccaagcaatttttcaatttggagagagagagtactttggtgggaagaagtcctgttattcagattagatgccggagggttgtgagtgcgtgtcttaacgtggatgttgatgcacctgatagtgggaagacagcattggagaaaaccaaggatgtgatcgagatggaagggaagttcttggtggggacatatgcaagaaacaccgtggtgcttgaaagggggga

SEQ ID NO: 15810 - DNA, 347 bp, Glycine max
  unsure at all n locations
  Clone ID: LIB3094-012-Q1-K1-C11
cacacacacacaaaacagaacacaacacattcacatacacatgttgttgatgagtggaggcgacanaggacacagatccatcacacacatgaacaattgatcttttgtcctttgtatataatttgattctaattttgggcactaagagagccactcagggctctgggatgtactatacgccattcggggttctgattttcggcggagagaaagttcaagagacccagtgggagaaagagcgataagtaattcatattccattatctccatttctagatccttccattaactcttataggatccttcaattttcaattcaatccctttcgatatttcggagagagcat

SEQ ID NO: 15811 - DNA, 310 bp, Glycine max
  Clone ID: LIB3094-012-Q1-K1-C12
gtcttcttctctaaaataaaaaaccctaacttctgaacctttcaccgcatcgccaccgaggccctatgtccactaatcaaagaaaagaaaatgagtagacgctcgagcagaactgtctacgttgggaatctacccggtgatatccgtgaaagagaagttgaagatttgtttctgaagtacggacacataacacacatcgacctaaaggttcccccaagaccacctggttatgcatttgtagagtttgaagatgctcaagatgctgaggatgcaattcgtggtcgtgatggctatgattttgatggccacc

SEQ ID NO: 15812 - DNA, 176 bp, Glycine max
  Clone ID: LIB3094-012-Q1-K1-C3
aagaatcaaagaaaggggtggtggctgcttctaaagcttaataatttgtttatttccagagcatcatagttttcgcagcagcaaactaacaaattactcatatcatataataagatggcccgttctctctcgcaagccaaacgtattggtgtccttgttgctcaatctatctccct

SEQ ID NO: 15813 - DNA, 430 bp, Glycine max
  Clone ID: LIB3094-012-Q1-K1-C7
cctaaacaactctttctcttcttccttcgctcgttgttctccctcgcgtagatcgacaatggcggagacagagacgtttgctttccaggctgagatcaaccagctcctcagtctcatcatcaacaccttctactccaacaaggagattttccttcgtgaactcatcagcaacgcctccgatgctttggacaagattcgatttgagagtttgacagataagagcaagctcgatgctcagccagagttgttcattcatattattccagacaagactaacaatacactgaccattgttgacagtggtattggcatgaccaaagctgatttggtgaacaacttgggtacaattgctagatctggtaccaaggaattcatggaagccttggctgctggtgctgatgttagtatgattggacagtttggtgtgggg

SEQ ID NO: 15814 - DNA, 55 bp, Glycine max
  unsure at all n locations
  Clone ID: LIB3094-012-Q1-K1-C8
cctgaacaactctatctcttcttccttcgttcgaggannctccctctcgtagatc

SEQ ID NO: 15815 - DNA, 390 bp, Glycine max
  unsure at all n locations
  Clone ID: LIB3094-011-Q1-K1-H4
cccacgcgtccgtcaagccttgcgtccattttgacgcggactcgggtgggtgcattaggtgagacctctgccaactcgagaggtgttgtaacatcatcctgcgtgtggtgcatcaatggctaccgtctgagctgatctgatcttgccactctgtgccgtttccatacttagtacagtgatcatggctgctaatgaacaaggatgccgatagtatgacgtccctagcaatgatcgtactggaagcggacagagctaccaatgcccatcgccatgctcgaggtgatgtagccagacccaataccacaagccctgcatgtttttctgtcagaagtgctgcaggacatgcctgtgtgtgcccncggngtattatggtaataaagctgtgtgccc

SEQ ID NO: 15816 - DNA, 406 bp, Glycine max
  Clone ID: LIB3094-011-Q1-K1-F6
cccgcgcgtccgattgaatatccatggttttcttagttcttttatccattaaaaaagtgtagattaatatttctaagaagaactatagtagttgaaagatatcttttgcaaatatgcatatttaactgaggttgttataacttgttccttccctcaaaaaaaaaaaaaagagaaagaaaaggaacctattagcctccttcattggatatattacatctataaggagtaaattctaccggttcagagaatagaaaaataatcaacataaaagtcagcagtctcacatctctaattttggtgacagattcaaggggttaaatttgatccagaaggtgaatatgtgagacaatggctacctgagttggcaagaatgccaactgagtggatccatcattcttgggatgca

SEQ ID NO: 15817 - DNA, 327 bp, Glycine max
  Clone ID: LIB3094-011-Q1-K1-F7
ccggggcggactgcaccagactcagcgtcttcttaccgcggcaatacactactaaagtcgatcgtaataatgctgtcaacagctaccataggctacctaatgacattctacatagggctctactagtgctgatcagatgagatggacagtggctcttgatgacattgcatattaacgatgaaaaacgttgattgatataacttgatcacattgaatagtatggcgacagatgtatcgatcaatgtctgatgctatatagcgatgggatctgcagatagttctacttctaactgttgtcaaaagtagcgggcgaaaacaaggatccaa

SEQ ID NO: 15818 - DNA, 405 bp, Glycine max
  Clone ID: LIB3094-011-Q1-K1-F8
atccaatgcaccaaatcgactgagaggctattttccaaagctaaaccacctatctgaagttgaaccattcactcctactatatacaattgatcttccgttaaaatggaccggaaatgcccgaagccgctaccgacatatacttccacaacctccgcggcgacgatcgcatcaaccagactctatcgagacgatggctggggaaatatctgaggatgcttgtacgacccatatcatgcaaacaaatgagcacgctacttgcccactgaggcagatggggggatgcatctatgttttacatgaggatcagtaatgcctacattgacattgagatcagcaacaacgccaatgtcgaaagaactatcaattttgacgttgatgcttatgtatagacccgatcatgactt

SEQ ID NO: 15819 - DNA, 396 bp, Glycine max
  Clone ID: LIB3094-011-Q1-K1-F9
ccggccggacgcacgcgtccggccgcgcgttcgcgcgtcgctgctccttattagattcactgcataaatttgagagggaacgtctgcttacatgttggtttatcaggacctccttacaggtgatgagcttctctcggactccttccgttacaatgaaattgagaatggaatgctgtgggaagctgacgggaagtgggttgttaaaggagctgttgatgttgacattggtgcatacccttctgctgatggtggagaacatgacggagtcgatgactcagctgttaatgatgctgacattgctgatacatgcagacttcatgatcaacccgcttttgataacaaacagcatgttaccttcatgaagaggtttatcaagaatttgactcccaagctcga

SEQ ID NO: 15820 - DNA, 424 bp, Glycine max
  unsure at all n locations
  Clone ID: LIB3094-011-Q1-K1-G1
cgcgtcgctgctccgtaccagtttcactgcttaaatttgagagaaaactctgcaaacatgggggtttatcaggacctccttacaggtgatgagcttctctcggactccttccgttacaatgaaattgagaatggaatgctgtgggaagttgaggggaagtgggttgttaagggagcagttgatgttgacattggtgcaaacccttctgctgagggtggagaagatgagggagtcgatgacgcagctgttaaggttgttgacattgttgatacattcagacttcaggagcaacccgcttttgataagaaacagtttgttaccttcatgaagaggtttatcaagaatttgactcccaagctcgatgcanagaaacaagagttgtttaagaagcacattgagggagcaactaaatacctgctctcta

SEQ ID NO: 15821 - DNA, 408 bp, Glycine max
  Clone ID: LIB3094-011-Q1-K1-G11
ttcatatgcaccgttatttcttacaggtgcattaaagagattggaagctgtgaaatttgggaagctcaacaagcctattcaatttcctgaaatacttaacttggcacctttcatgagcgggactagtgataaatcacccatatacagattgtatggtgtagttgttcacttagatatcatgaatgctgccttttcgggtcactatgtgagctatgtgaagaatatccaaatcaagtggttcaaagttgatgacagtgtggcgacagctgtagaattggatagagtcttgacaaggggagcttatatgcttttctatgcaaggtgctcgccaacggccctaagattaactatgaacagaatactgatcccagattcaaactttaagtcaatggaaagacttttacaacg

SEQ ID NO: 15822 - DNA, 346 bp, Glycine max
  Clone ID: LIB3094-011-Q1-K1-G12
cactatcgagaacacgagggaacgtcgcgagaccgtttgcaagcccgatgacgaagagttatttgctggaaatgatgctgatgaatttggtccaattttgaatcagcaacaaactcccaagatattaatcaccacttgccgcttccattctactaggggacctgcttttatatcagagttgctttcagttataccaaatgcacattacttcaagagaggaacatatgatctgaaaaagattgtagaatatgcaaagaagaaggacttcacttctattatagttgttcacaccaatcgtagggaaccagatgctcttttaatcataggtgtacctgatgggcctact

SEQ ID NO: 15823 - DNA, 436 bp, Glycine max
  Clone ID: LIB3094-011-Q1-K1-G2
aacgtcacccgctacctattcccgtgtgcgatcgaatccaatgcaccaaatcggctgagggggctacgatctgtctctaaaccacagatctgcggtggaaccgtcgactccgactatatacgattgatcttccggtaaagtggaccggagatgccggatgccagcttacgccatttacttcctcaacctgcgcagcgacgttctcatcaaccgcctctatcgcgacgatgtctggggaaatatcgaggatgcttttaggacgcatattatgcaaacgaaggagcttggtacttgcccagtgaggcacattggtggatgctctgtgttttacatgaggatcagtgatgtctacattgacattgttgtcagctacaacgtcaatgtcgcttgagctttcaagtgtgacgttgaggctgatgcattgttccgatcatac

SEQ ID NO: 15824 - DNA, 402 bp, Glycine max
  Clone ID: LIB3094-011-Q1-K1-G3
gctgcctcctgttacgagcctttcctttcttttcattgattcggtgggtgcgggtgcatcgacaccgatctagaccctgatcggcgtcggcacaccgacggagaacaagatgattgtctgcgttgccgtcgtcggtcaccagaacaatccgttgtacatacagagcttcacggaggccgatgatgctctcaagctccaccacatagtacattgctcgctcgatgtggtcgacgagcgagtgaacaatcctcaaaagtctgggccgatgcttaatgagacgttcttgggactgctttatcctattgaaaactacaaagtatatggatatctgactaatacgaaggtgaaatctatcttggtgaccacggatctggatgttaaagatgcggatgtaaggaattt

SEQ ID NO: 15825 - DNA, 410 bp, Glycine max
  Clone ID: LIB3094-011-Q1-K1-G4
acgccacgcgtccgcccacgcgtgcggagattgcagtgagtgatcggtgtgcacttgatctgatcataatcgtggaggtcaattgaagaagatgccgatcagaaacatcgccgtcggaaggcctgaagaggcgactcaccccgacacgttgaaggcggcttaggctgagttcatctcaaccttcatctacgtgttcgccggctcacgctccggcatcggctacaacaagctcaccgacaacggcgctgccacccatgccggcctcatctgcgactacatcggccatgcatacgccctctacgtcgccgtctccgtcggcgccaacatctccggcggccacgtcaaccccgacgacaccttcggcgccttcgtcggcggcaacatcaccttactccgcggcatcgtctacg

SEQ ID NO: 15826 - DNA, 171 bp, Glycine max
  Clone ID: LIB3094-011-Q1-K1-G6
caatccaccaaacattcaaaaacggacattttctaaaaataaaccacccatcaacacaacaaccatccactcctactatatacaaataaacatccataaaaatctacctcaaatgccaaaagccacttacatcattcactacaacaaacttataatatacaatctcatcaa

SEQ ID NO: 15827 - DNA, 469 bp, Glycine max
  unsure at all n locations
  Clone ID: LIB3094-011-Q1-K1-G9
ccgggccgacgcacgcgtccgtttgaatacattccttgtagtttatactgatagatgggtttgaagatggcgttactgatgctaggcctttccctcatgctccttttggtctcctctgaggtggcatccacgaatacaaaagaggaggcaaatggagtggatgatgccaaatatcccggtggaagctatggagggggttacccaggtcatggcggtggcggttatcctggccatggcggtggcggttatcctggccatggcggtggtggtggctatcctggtcatggtggtggccaccctggtcatggtggcggctaccctggccgtggtggtggatactgtangcatggctgttgcngtggccggacatacaacggaggttgcaaaatgtgctgctataacgctggcgaagctgttgcttgacaaactcaagaatagactcacgaataagacgatgcagttctactta

SEQ ID NO: 15828 - DNA, 409 bp, Glycine max
  Clone ID: LIB3094-011-Q1-K1-H1
atcagttcttctttcctcaaccttctttcttcttatatatcgaacatggctaagtatcatgcgagtgggaaaagctcttccatgactgctatagccttcctgtttatccttctaatcacttatacaggcacaacagatgcacaatccggggtatgttatggaagacttggcaacaacttaccaacccctcaagaagttgtggccctgtacaatcaagccaacattcgcaggatgcgaatctacggtccaagcccagaagtactcgaagcactaagaggttccaacattgagcttttgctagacattccaaatgacaacctcagaaacctagcatctagccaagacaatgcaaacaaatgggtgcaagacaacatcaaaaactatgccaacaatgtcagattcagatacg

SEQ ID NO: 15829 - DNA, 406 bp, Glycine max
  Clone ID: LIB3094-011-Q1-K1-H11
atcgaaacctgaaggctcggatcaggtctttgcaatctggtcggtagaaccttgggtcggagagagtcaagtcatatgtctgaattagacgatcaaattcctactgccttcgatccttttgctgatgcaaatgctgatgactcgaatgctgggtcaaaggagtatgtgcatattcgcgtacatgcagcgaaatggaaggaaaagcctgacaaccgttcatggattgaaaaaagaattcagctataacaagatacttaaagatgttacgaaagagttctgttgcaatggaacagttgttcaggacccagaactaggacaggttattcaacttcaaggtgatcagaggaagaatgtttctaccttcctggtccaggctggtatcgtgaagaaggagcatatcaagatt

SEQ ID NO: 15830 - DNA, 216 bp, Glycine max
  Clone ID: LIB3094-011-Q1-K1-H2
gtgtgaggacaacaatggctaacttgtctgttcttatgatcactgaaccaatcgccgatttccatgctataaacagtgtgctaaagctgctaatgaccactgctgacacatctatgacaacgagagcccatatggaagaggaagtgacaatagataccaatgcccatcacaatgatcgacgaaatgtcaccagacctaataccacatcccctttat

SEQ ID NO: 15831 - DNA, 330 bp, Glycine max
  Clone ID: LIB3094-011-Q1-K1-H3
tagggatacattcctggtcgagaatgctgttagatgggagggatgatggcgatactgatgcaagggcttttcctcatgctcttcatggttttctgtgaggcgtcatccaccaatacaaaagacgccgcacatgtactgtatgatgccatatattccggctgaagctattgatgcggcaacctacttcatggctgagtctgctattctatccataggcttggctgcaatacttgacattgaggagttgatggctatcctggacacagatgcggtcacccaggccatagaggaggttaccctgatcgttggaaatgatactgtatggatcgc

SEQ ID NO: 15832 - DNA, 437 bp, Glycine max
  unsure at all n locations
  Clone ID: LIB3094-011-Q1-K1-F4
gacgccacgcgtccgcccgcgcgtccgattgcattgacctggaatctataccttgcatcaataggagataaagagggtcttataaatgccaggaaattatatgaatctgcactcgcaacttatgaccaaaatgtcagcttgtggcaagattactatcgcatggagaccaagatgggaacatcagaaaaggctaatgctatctattggcgtgcaaggaaagtactcaaagatgctagtgaatttgtcactgccacagatatgtgataatatttctaaattacgaccatggctattggagttcaattttgaccacttcatttatttggtttttctacagaaatttcttttcgaccagtctagtctagactcaaatatgtttttccttcccaagaggtgaggaatagagcttnctccttttccccaaaagctaattaact

SEQ ID NO: 15833 - DNA, 434 bp, Glycine max
  unsure at all n locations
  Clone ID: LIB3094-011-Q1-K1-D10
ctagagaattatcatacccttcaagatgattccgtacctacgtccaatattcctattatgccttatccttctcgaccaatccatttcggcgagtgctgctataaatattaatggtctgagaaacaaaattagagaagttctaaacaagcacccgagcatcaatcttccggcagataaactgaagaaggtgaagagaccactgaaggcactggattatctgcttggcgaatgtaaggacaggccgnctcaagaatttcaagaattttgcccgaaatttaagaacgattatcaacaaaattgcccgaatgccgcgtatgaagcagtttgcccgttactgaagcaagcgattcaaatatgttgccagaaacacgcataactctgcaagccacggtgggcgtttggatgtgctttaagtaccactttctctcttggat

SEQ ID NO: 15834 - DNA, 437 bp, Glycine max
  Clone ID: LIB3094-011-Q1-K1-D11
cccacgcgtccgattgaatatccatggttttcttagttcttttatccattaaaaaactcgagattaatatttctaagaagaactatagtagttgaaagatatcttttgcaaatatgcatatttaactgaggttgttataacttgttccttccctcaaaaaacaacacttgagaatgataaagaacctattagcctacttcattggatatattacatctataaggagtaaattctaccggttcatagaatagaaaaataatcaaaataaaagtcagcagtctcacatctctaattttggtgacagattcaaggggttaaatttgatccagaaggtgaatatgtgagacaatggctacctgagttggcaagaatgccaactgagtggatccatcatccttgggatgcaccgcttactgttcttagagcatcaagagttg

SEQ ID NO: 15835 - DNA, 319 bp, Glycine max
  Clone ID: LIB3094-011-Q1-K1-D12
tttggactttctggatccgtgtgtgtttgtcgagagtatgaatataccagattgttggtcagatgatgttatagttgaggcatgctacgctgttagcgttaatcggagcgttgaggaacttgcaaaggacaaagggtatccgatttgtgatagacagagacgagtgttactcccatgatgtgaagcacgaggttgacactgttcatgtatctttcgtctgtatgaatgctgatactccctggcattacggagacaaatgtagcgacctcgtggtaaagggaccttctggcgatcaaattcaagaatttcggcacaagac

SEQ ID NO: 15836 - DNA, 429 bp, Glycine max
  unsure at all n locations
  Clone ID: LIB3094-011-Q1-K1-D2
aaacacccttgttgaccgcaccaaagtttatttcatagaaaagcataaaagcacaaaaggggataccatagggaaattcaaacattttgaagtcatatttgcacacttgattaaaggctgacggcccttgtgacggatgcgtggagtgctaataccttccctgtgcgtaaaaacaactcccgaactattcacacttaaagttcgtagaccacaccttatcaattttgccgacgctttcctgaaataaaagctggtggcgacttcgggcattatactatcatggtagacgcacttgtgagtcccgcatcgccctcccgtcaaagggtacgttgcgacagtacttgcactaccgccgaacggtaggttccttaattgaattaactaatatcaaaagtgacactaaggctaanataaactcacaaatcatgc

SEQ ID NO: 15837 - DNA, 309 bp, Glycine max
  Clone ID: LIB3094-011-Q1-K1-D3
cccgggcgttcgggtggagacatgacaaattctattcccagagacactgtcatcccaacggagatatcttaggagttcaccacctttcaagacctgcagactaccttcttcattcgagttttcgattgctaacggatgctcacaatgcatagccggcttctgtgcaaattggctcctcctgaactttttacacttcaagggcgtacgcctcatattgtagggaccttcgaagctgatctcaactgcattctggatgcgactgcagacgacatggtctctgggaaatcacactagatcaccattacatac

SEQ ID NO: 15838 - DNA, 87 bp, Glycine max
  Clone ID: LIB3094-011-Q1-K1-D4
cccactcttcctacccacccttctcgaccacaccaaaaccaattacataaaaaaacctaaaatcacaaaaccgcataattataaaaa

SEQ ID NO: 15839 - DNA, 289 bp, Glycine max
  Clone ID: LIB3094-011-Q1-K1-D5
cccacgcgttcgcccacgcgtccgccctctcgtccgcggacgcgtggggttctataggggcgtacctctgtgtccttgagttctaaggagacaggaacctacgtctggtggatgaatcatgaccgtgtgatcagagcgtgattaacggcccgggtgagtttctctttggagtagtctcatctttggctgtagaggatcgttcttaggacacttccatgtgcctgggaatggtcatacggttgtctgacagaccaagatagataagaagacaaattagtaataaataaga

SEQ ID NO: 15840 - DNA, 429 bp, Glycine max
  Clone ID: LIB3094-011-Q1-K1-D6
cggaaccaccgtttctctctctctcacgcttacatggtgctgccactgtcactcttggtgtctcctttctgcttcgccgattctctatttttgcgcgcaatcgattgtatgctttgggccagtcgttaatgataacttgaggtctggatgatgctttctgattggttgtttacatattgtaattcagaatgtggaactttgcatcgaattgcattgctggaactgtgggactgaaaaatgattcaaagcctactcattctgcttcggaatgttctgatgatgaaaactctgttataggcagagaggaagggctggaatgcccaatatgctgggaatctttcaatattgttgaaaatgtgccctatgttttatggtgtggccacaccctttgtaaaaattgtatcctcggactgcagtgggctgttgtga

SEQ ID NO: 15841 - DNA, 264 bp, Glycine max
  Clone ID: LIB3094-011-Q1-K1-D7
tctctctatcacgcttacatgcagctgccactgtcactaaaaacgtaaattttaaacatctacgagcctctatttttgctctcaatctattgtatgcttagggccaatcgttaatgataacttgatgtctagatgatgcttcctgattggttgtatacatattgaaattcagaatgtaaaacttttacatctaaatgcattgctagaactgtagcactgaaaaaagattcatagcctactcattctgctaactaatgttcagat

SEQ ID NO: 15842 - DNA, 152 bp, Glycine max
  Clone ID: LIB3094-011-Q1-K1-D8
aaaatcaaaaaaaataaaaaaaacaaataaaaacaaaaaaaacacacacaaaaaaaaaaaaaaaaaaaacacaaaaaaaaaacaaaaaaataaacaaaaacaaaaaaaaaaaaacaataataaacaaaaaaaacaacaaaaaacaacatacc

SEQ ID NO: 15843 - DNA, 394 bp, Glycine max
  Clone ID: LIB3094-011-Q1-K1-E11
cgcgtccggcgggcgtccgcccacgcgtccgctggtcagcagggaaaaagaaaaataaaatgggttgcgattttaccaacttggagttcttgaaagatatcggtttgggctcctccaacattggttcttacattaatggccaatggaaagccactggttcttctgtcacttctgttaatccttctaacaatcagagcatagctcaagtgactgaagcgactttgcaagattatgaggagggattgcaagcttgcagtgaaccagccatgacatggatgactattcctgcaccgaatagaggtgagattgtgagacagattgctgaagcattgaaggccatgttggatccttttgggagactggtgtctctttagatgggataaattctcccata

SEQ ID NO: 15844 - DNA, 383 bp, Glycine max
  Clone ID: LIB3094-011-Q1-K1-E12
gcgtccgcgcgccggtttcaccgtacgaatatctagactagatttgggtaaacactgccagcacctacgttgctatcagctcgattgtctgcctttcacctgcgacggttgccaacagatcttttgtttggaacacagatcctacaagtcccacgcgtgcctgaaatccgaccacaacagcagaaaggttgttgtttgcgaagcatgttccatgtccatcgagaccaccggccatgtgggacaagacgaggaggcaatcttgcagaagcacctcaagtctggtaattgtgaccctaccaagaagaagaaaccaagtggtgccgtcaagcgttgcaaggaggttttgacgtttttcaacaccagcacatgtaaaacttgccaca

SEQ ID NO: 15845 - DNA, 426 bp, Glycine max
  Clone ID: LIB3094-011-Q1-K1-E3
cgcgtccgcccgggcgtccgcttctctctctctctctcttctttacttgcttgaagcaatggccaaatgcttggcatcagtgctgctgtttctcctcgtagctgtgagtaatgtgtttgctgtagagcttgaacttgaaactcttccaccctcttaccctcaccctcaccctgttcactcccccacaccagcacctcttcacccaccagcaaatgctcctcacccacaccaccaccaccaccaccaccaccctccagcaccagcacctgttccttcaccttctcaccacaattaccctcctacccctgcccctgctaagcctcctactcaccaccattaccatcaccctcctgctcctgttaatccacctcctgttccggttcattctccagttaaaccttctgttccggttcacccttccagtta

SEQ ID NO: 15846 - DNA, 436 bp, Glycine max
  Clone ID: LIB3094-011-Q1-K1-E7
cccgggcgtccgcccacgcgtccgcaatattacaacaccaatctcacccatttcaaaagaaggccgttagtgttactattcgtaaaatggccactcttgttctttaccaattctttctcaaactcttgctcctaatttcagtctttcagctttcctttgctgctaggagactcaaccagctggttcaggaccagtcacagttactccattaccacaacggtcctcttctatacggcaaaatcgccgtgaacctaatctggtatggtcacttcaaaccatcccaaaaggccatcatcaccgatttcgttacctcactgtcatccccatcgtctcagagcagccagccatctgttgccacgtggtggaaaaccacggagaagtactaccacctgattcccatgaacaagaatggctgtttcttctctttctctatcac

SEQ ID NO: 15847 - DNA, 385 bp, Glycine max
  unsure at all n locations
  Clone ID: LIB3094-011-Q1-K1-F10
tccctncatctccgattgaaaatattatcctcctctgtatctctgttcgaaacaagtccaacaccagcaacacactgcttcaatctcaatcgggcacattgagaaatggttttgagtaatgggaaaactgaggcaccattgccaagtagtaatgggggaggtgctgagattgataacaatgagaagaagcccttcaagatcttcgtagggtatgaccctcgcgaagatcttgcctatgaggtatgtcgccactccatcttgaaaaggtcttcaatccctgttgagatcataccaattaagcagtcagatctgaggaaaagtggtttgtattggcgtgagaggggccagtttgagagcactgagttctccttttcaagattcttga

SEQ ID NO: 15848 - DNA, 200 bp, Glycine max
  Clone ID: LIB3094-011-Q1-K1-F12
caccaaacccttgtcattcactcccacctatctgcaactctaaacccaatatacccacgggccacggtcggtgacgctataatccaaattacggtgtcgttttcatttcgtttatacatcacccttcccaatagtattcactactaccagtatcttaatctaattcccatccacacctaaaccaaaccatcatcttaatt

SEQ ID NO: 15849 - DNA, 298 bp, Glycine max
  Clone ID: LIB3094-011-Q1-K1-F2
ggctagttttgattgcttgatgaaaacctatgtattcctgacaccagaattctggaaggagagtcgcttctccaaatctccattccaagagtacacagatctactggcaaaaccaacaggaaagactctaatcttggaggaggaaagggtggatgcttgatttgctagttttgctttatggatgttttaggaactttattactttacatactttgttggttctgtgctttacttttggttttgatagacggtatgtctctgtatgcattttgattgtttccaagttttaattgactgc

SEQ ID NO: 15850 - DNA, 286 bp, Glycine max
  Clone ID: LIB3094-011-Q1-K1-F3
cgcgtccgggcgacttttcattgcttgatgaaaacctatgattcctgacaccaaaattctaaaagtggagtcttttatacaaatctccatcccatgattacacatatctactgtcaaaaccaacatgaaatactctaatcttatatgatgaaacgttcaatgcttgactcgctagttttgctttatggatgttttaggaactttattactttacatactttgctggttctgtgctttacttatggttttgatagacggtatgtctctgtatgcatcttgattgttt

SEQ ID NO: 15851 - DNA, 408 bp, Glycine max
  Clone ID: LIB3094-011-Q1-K1-D1
gacgtctcctctcctcacgctgctcccctattcgagtgctgctctgctctctgcgcgctggtgcgttcgttcgaagactaatgatttatagcatagacttgaattacagaaggaacacaagagatcaacatccatggattcacagggctcagacaactatactgcggagacttcagaatgtatgaagagagaattgtgaacgttatggagcttgcatgacgagtcatggatgagcttgcaagccctgttggtcctaggaaggatgtggtccataaccactgccttgagttcatgcatttaatcaatgacatacacgttgcatagcgtgatgaagacaaaagtgcttgtgaatatcgtccatgtgagaaatgtgattattgttcaagattcgccaatgagatttgtcac

SEQ ID NO: 15852 - DNA, 351 bp, Glycine max
  Clone ID: LIB3094-011-Q1-K1-B12
cgcgtccgagagacccttgtcgaccacaccaaaatataatcataaaaaagcataaaagcacaaaaagacatttataagggaaaataaaacattttgaagtcatatttgcacacttgattaaaggctgccgtcccttgtgacggatgcgtggggtgctaataccttccctgtgcgtaaaaacaacttccgaactattcacacttaaagttcgtagaccacaccttttcaattttccctacgctttcctcaaataaaagttggtggcgactccgcgcattttactttcatggaagacgcacttgtgagttccgcatagccctcccgtctaagggtaggttgcgacagtacttg

SEQ ID NO: 15853 - DNA, 255 bp, Glycine max
  Clone ID: LIB3094-011-Q1-K1-B2
cccgggctttatttcactgattagaccatgtttatataaatcgatacacctttatattatcggtcatgatataatctatgaggggcatagacatacgatgtgaatctattagtcaagtggactatcgacatcaatatgagtgaagcatatcacatgacctcttgacgaataaaaatgctaccctcgatccatgcctcataaggcatgataattaccaaaatcatcacgaattcacgataaaccctcatgacatgg

SEQ ID NO: 15854 - DNA, 426 bp, Glycine max
  Clone ID: LIB3094-011-Q1-K1-B3
cccgcgcgtccgggtcaattgaccgaggcttttcggcgtcgtccttacactgttgtactctgggatgagattgagaaagcccatcctgatgtgttcaacatgatgcttcagatcctggaagatggaagactaacagacagtaagggcagaacagtggatttcaagaacacacttcttataatgacatcaaatgttggaagcagtgtgattgagaaaggaggccgcaaaattggatttgatctggattacgatgagaaggatagcagttataacagaatcaagagcctggtaactgaggagctaaaacaatacttcaggccagaatttttgaatagattggatgaaatgattgtcttcaggcagctcacataactggaggtgaaagagattgctgacataatgctcaaagaggtgtttgatagactg

SEQ ID NO: 15855 - DNA, 413 bp, Glycine max
  Clone ID: LIB3094-011-Q1-K1-B4
cccacgcgtccggtgatttcagtgagtgatcggtgttcacttgatctcatcataatcgtgagcgtcaattgaagaagatgccgatcagaaacatcgccgtcggaaggcctgaagaggcgactcaccccgacacgttgaaggcggctttggctgagttcatctcaaccttcatcttcgtgttcgccggctcaggctccggcatcgcctacaacaagctcaccgacaacggcgctgccacccctgccggcctcatctccgcctccatcgcccatgcattcgccctcttcgtcgccgtctccgtcggcgccaacatctccggcggccacgtcaaccccgccgtcaccttcggcgccttcgtcggcggcaacatcaccttactccgcggcatcgtctacgtcatcgcccagctcctc

SEQ ID NO: 15856 - DNA, 436 bp, Glycine max
  unsure at all n locations
  Clone ID: LIB3094-011-Q1-K1-B5
cctgaacaactctttctcttcttccttcgttcgttgttctccctcgcgtagatcgacgagggcggagacagagacgtttgctttccaggctgagatcaaccagctcctcagtctcatcatcaacaccttctactccaacaaggagattttccttcgtgaactcatcagcaacgcctccgatgctttggacaagattcgatttgagagtttgacagataagagcaagctcgatgctcagccagagttgttcattcatattattccagacaagactaacaatacactgaccattgttgacagtggtattggcatgaccaaagctgatttggtgaacaacttgggtacaattgctagatctggtaccaaggaattcatggaagccttggctgctggtgctgatgttagtatgattggacangttggtgtggggttctac

SEQ ID NO: 15857 - DNA, 322 bp, Glycine max
  Clone ID: LIB3094-011-Q1-K1-B8
gaagttgcgagagtgaagaaatggcgcatgacttggcattggatttggaggagcttcgggggctccacagcatcgccaaaagacctcgaaccctctctcttctctcctccgaaattcgtaacctcgaaaagttatcgtcagaggaagcttctgcgcagattccggcgccgatttcgaccggaactaaagtggcgccttcacctgcgctgaagtatgcggcactcgcgtcgttcagttgggaccaggatagtgacaaagttaagatatatgtgttaaatggaggaatcgatgagaataagggtgatccgagtttaagtcgatg

SEQ ID NO: 15858 - DNA, 343 bp, Glycine max
  Clone ID: LIB3094-011-Q1-K1-B9
acgcgtccgggcgactttagagtgcttgatgaaaacctatggattcctgacaccagaattctggagggggactcgcttctccaaatctccattccaagagtacacagatctactggcaaaaccaacaggaaagactctaatcttggaggaggaaagggtggatgctagatttgctagttatgctttatggatgtattatgaactctattactgtacatacttatgctggtactgtgcttgacttttggttacgatagacggtatgactctgtatgcatgttgatagtttccaagatctaattgactgcagaaaatacaaatttaagtcgatgtcattcgagtg

SEQ ID NO: 15859 - DNA, 238 bp, Glycine max
  unsure at all n locations
  Clone ID: LIB3094-011-Q1-K1-C1
gcgtccgctgggggatctcaacacttacngtaacaggatacacaggatgctgaagcttggactgagcagtgatgtttatgctggtgaagcagatgctgacatgcctactcttgaggacgctgatgcagatgctgagggtagcaagatggaagaagttgattaaatctgacttaattgcctgttacgtttttagaaacaatgattggagaaacagtctttttactatgttttatgtttt

SEQ ID NO: 15860 - DNA, 390 bp, Glycine max
  Clone ID: LIB3094-011-Q1-K1-C10
cgcgtccggtcggtcttcagagctaaaaatgttcttattcttccatctcagtatgtgttgacatgctggacaaggaatgctaaaaccggtacattgttagatgaacatgcatctgaattgccaagtacttctcgtgaatctgtaccagtttgttataacaatttacgacaagaagcaatcaaatatgttgaagaaggtgcaaaatcaatccaaatctatcatgttgccatgagagctctgaaagaagctgctaagaaggtttgcaccataaaaaatcagagttctggaacagcagagggagctacagcaaccaatggaagcaggggtgaattgcttgtagcagatgaagatgttccaagcaatcaatctgtggcggagaagcaaaagaaa

SEQ ID NO: 15861 - DNA, 463 bp, Glycine max
  Clone ID: LIB3094-011-Q1-K1-C11
cgcgtccggaggttgcgagagtgaagaaatggcgcaatacttggcattggatttggaggagctgggcgacctccacagcatcgccaaaagacctcgaaccctctctcttctctcctccgaaattcgtaacctcgaaaagttatcgtcagaggaagcttctgcgcagattccggcgccgatttcgaccggaactaaagtggcgccttcacctgcgctgaagtatgcggcactcgcgtcgttcagttgggaccaggatagtgacaaagttaagatatatgtgttaatggagggaatcgatgagaataaggttgaatccgagtttaagtcgatgtcattcgatgttaagttccatgatgttcaatggaagaactaccgatgtgcaatatcaaaattgcacaatgagatagtaccagagaaatgcaaggttgtggtcaagcctaaaagggcaatcatcacattggtg

SEQ ID NO: 15862 - DNA, 382 bp, Glycine max
  Clone ID: LIB3094-011-Q1-K1-C12
acgcgtccggcggctcgccgcccacgccttcgcccttattatatcatatatcgaatcatccttaagatggtctttatttagagtcaatattgcactgtttaatttatacatatatcaacgatgccgcttactatgttagcataaccatatttcatattggaaccaaattttacttacacaagatatgtaacatcacacttcacaagacccaaaagaacacaagggaacatatgaccttgaaagtaccattcttgacatatacaacggaagcaaaaatgtcttatatgatcatcacccttaaaagacatatgaacgactatatcaacctttcttatcatgtgactacgaaagtgacactgtgataaaggacaaacacttgttt

SEQ ID NO: 15863 - DNA, 268 bp, Glycine max
  Clone ID: LIB3094-011-Q1-K1-C2
gctgttctcatgtttaatttatgcgatcagtttccgggtggagacttgatattagaaacgcgggcaaatatgccaaacttaagagagtcacatcatgaaaatgatttcaagggtggaagtggaatgtattctatatcagccttggacatggtttctaacttgggatttgtatttggagcaagttcaaacaactcaaatgagagtaggattgctgtgggtgaaatatctgttggagaaatgactgaattggaaagagccgtttaagaat

SEQ ID NO: 15864 - DNA, 437 bp, Glycine max
  unsure at all n locations
  Clone ID: LIB3094-011-Q1-K1-C3
gctaggctcatgattaagttatgcgatcagtttccggatcgagacttgctattagaaacgggggcaaatatgccaaacttaacagagtcacatcatgaaaatgatttcaagggtggaagtggaatgtattctatatcagccttggacatggattctaacttgacatttgtattttgagcaagatcaaacgactcaaatgagagtcggattgctgtgtgtgaaatatctgttcgagaaatgactgaattggaaagagcacttaaagaatctaagaacaatcataaaaaggtcatatctgcacaagccacagttgatggtgataaagctcatggtattgacactaatttggctgtcatgaangacttactttttactctaactgaacttgcgaagtctcttcagtccttggcatattgtgatgatccactgaagtcttt

SEQ ID NO: 15865 - DNA, 253 bp, Glycine max
  Clone ID: LIB3094-011-Q1-K1-C4
actacgcgtgcgtaaagcattggatacatattgaggtgaagttagtcaagtgctttaaggggagacacatgccacatcatgaggggttttaagatcataacgtgtgatgcgcaacatggggtaagagctgaggtgctatgaacttgcaactatgtggcattcacatactttgaacggtgtaaatggctgctaatgaacacggaggccgcttgtgtgactacgagagcatatgttgaaggtgaagtgtcaagag

SEQ ID NO: 15866 - DNA, 427 bp, Glycine max
  unsure at all n locations
  Clone ID: LIB3094-011-Q1-K1-C5
ctcggttaacttatggaactattggtgggaggtttaagaaaggagaaaacccgtttggggaggaggcgtatcagcgagtggcattggaccaactccttaagatagctggtattacagatgatgacttgttgattatgtcagatgttgacgagattccgagtgctcacactattaacctcttgaggtggtgtgacgacgtgccttcagtccttcatcttcagctgaagaactatctatactcctttgagtttctcatggatgatggcagctggagagcttctgttcacagatatcagagtggtaagactaggtatgcacattaccgncagtccgataacttattggcggatgctggttggcattgcagcttttgcttccgccatatcagcgatttcatctttaagatgaaagcgtacagtcataacga

SEQ ID NO: 15867 - DNA, 434 bp, Glycine max
  Clone ID: LIB3094-011-Q1-K1-C6
tgtgcttgtgttacaattcattcttcggtttttctctatttgcgttttctcattttgtggctttcgttctcttccgtggaacgagtagtagaaacttgaaatcaaaaggcagcgggggaaaaagaaaagagagaagtagggttcgaaaatggcagcagaatcatcagagggcgaagaagaaaccaagttaagcggaggtaaccaattgctcatagttgacgatgacttaacggaaatgggaaagaaagccgcttggagcgtgagttcctgcaaacccggtaacggcgtttcctctctacgtgacgacaatctcgaaacttattggcaatccgacggagggcaaccccatttagttaacattcagtttcagaagaaagttagacttcaattaattgtgctgtacgtggatttcaagcttgacgagagttacacgc

SEQ ID NO: 15868 - DNA, 128 bp, Glycine max
  Clone ID: LIB3094-011-Q1-K1-C7
acgcgtccgggagtgtaggtgttccaagcttcaaggtagtgaataatgttaggtccaagtagatatctgattgagttgtaatacaatgattctaatatcctatctccaccattcatattaatatttgc

SEQ ID NO: 15869 - DNA, 419 bp, Glycine max
  Clone ID: LIB3094-011-Q1-K1-C8
cacgcgtccgatcgcccagcaagaaaaaagaaaatcgaattgtaagagcacggacacaacacaaaggaccgaatagattacaaggcgttgcagccgctgattctcacttacgtggtcgcagctgacgctgccgtggccatactgctaacccttcccacgcccaaactcctaagggaccgttccgcctctctcgtttccctcattcttcaacccgcgctttacattgtcccctttgcggggttccaactccttgatatatactggaaaaatgagcatatgttgatgtgtacctctgaagtttgtactgctgcggagagagatcgatatgagaaatctatatacaaagctcagaggaatgaaatactgtgtgttacagcatgtcttctctactggtctatcagccgcatttggaagtatca

SEQ ID NO: 15870 - DNA, 123 bp, Glycine max
  Clone ID: LIB3094-011-Q1-K1-B10
attcctaacaccataatcatctagagggcactcttcatctccaaatctccatcctaaaacaacacatatctactgacaaaactcaacacaaccatcactctaatcatattacagaagaaagct

SEQ ID NO: 15871 - DNA, 413 bp, Glycine max
  Clone ID: LIB3094-010-Q1-K1-H3
gaagttgcgagagtgaagaaatggcgcaagacttggcattggatttggaggagcttcgccggcgccacagcatcgccaaaagacctcgaaccctctctcttctctcctccgaaattcgtaacctcgaaaagttatcgtcagaggaagcttctgcgcagattccggcgccgatttcgaccggaactaaagtggcgccttcacctgcgctgaagtatgcggcactcgcgtcgttcagttgggaccaggatagtgacaaagttaagatatatgtgttaatggagggaatcgatgagaataaggttgaatccgagtttaagtcgatgtcattcgatgttaagttccatgatgttcaagggaagaactaccgatgtgcaatatcaaaaatgcacaatgagatagtaccagagaaatgc

SEQ ID NO: 15872 - DNA, 128 bp, Glycine max
  Clone ID: LIB3094-010-Q1-K1-H4
aaccggggccgactcaatctcaagacctggttcaacttctcgatagtgctttggatgatttggagtccttcaacctcaatcctccccctccaagtggggaagcaactgcgaatagcaagaacgagagt

SEQ ID NO: 15873 - DNA, 422 bp, Glycine max
  Clone ID: LIB3094-010-Q1-K1-H5
cggacgcgtggggtttcctagtatgcaaggttaagaatcagcaaatttcaaccccggatccagtagtaacatgttgacaaaagtctaccgagttgcattttgttcttgtaacctcctcaacccactggaggtcgtgatctgtaaattttgagtgaattatacaacaaattcttgaaaaagaaatgattttctcttctgagctgctgcttattgatcgatgaatccagctgcaattattttcgaagatggcaataaaatctcttctgcggtgttatctctttgactgaattccaaattttgtaagtataatagttggctatgaaagagactgtaccaagaagcatagtgtgagagtcagagatcagttgttaagtatgagatgtgagaacatttgttgaatgtatattgctaaatagaagtgc

SEQ ID NO: 15874 - DNA, 413 bp, Glycine max
  Clone ID: LIB3094-010-Q1-K1-H9
cgcgtccggttgaatgcttatgcaaagatttctgtccatcttctctggatgatattgccgagatgaggtgggcactatgtcaagaatcagctcccacttctcactccatgagattcactagaagtttgagtgggctttcggtcaggaggtctttagttggttcatttgaggagtctcttttatctggccggttcttatctggaaacaatagcaagaaaatcgatggttttcttgctgtgctaagcattactggtgggaacttttctcctaaatctcagaagcttccattctctgttactagcgtggatggagattgctatctactgtattatgcatcaatagatcttgctggaaattcctcttcaaacaagttaagaggccaattgctgaaacgagggtttggaaaagatgat

SEQ ID NO: 15875 - DNA, 369 bp, Glycine max
  Clone ID: LIB3094-011-Q1-K1-A1
acgcgtccgcgggggcgtgggttatcctaagtctttgggtatagtgctgcaatggcttcaagtcatgaggaggttaccattttgggagctactggaagcccatttgtgtgcagggttcatattgccctcaagttgaagggagttcaatacaaatatgtcgaagaaaatttgaggaacaagagtgaactgcttctcaaatccaacccagttcacaagaaggttccagtgtttattcacaatgagaagcccatagcatagtcctcttgtgattgttgaatacattgatgagacatggaataacaaccccatcttgtcttgggaaccttaccaaatagccttggcttctttctgggaccaattcattgatga

SEQ ID NO: 15876 - DNA, 453 bp, Glycine max
  Clone ID: LIB3094-011-Q1-K1-A10
aaacacccttgtcgaccacaccaaaattattaacataaaaaagcataaaagcacaaaagggcataaaaaagggaaaataaaacattttgaagtcatatttgcacacttgattaaaggctgtcgtcccttgtgacggatgcgtggggtgctaataccttccctgtgcgtaaaaacaactcccgaactattcacacttaaagttcgtagaccacaccttttcaattttcccgacgctttcctcaaataaaagttggtggcgactccgcgcattttcctttcatggaagacgcacttgtgagtcccgcatcgccctcccgtcaaagggtaagttgcgacagtacttgccctcccgccgaagggtaagttccttaattgaattaactaataacaaaagtgaaactaaggctaaaataaactcacaaatcaagctttgtccattaaaatcacttaaaa

SEQ ID NO: 15877 - DNA, 280 bp, Glycine max
  Clone ID: LIB3094-011-Q1-K1-A11
cccttttctactacaccaaatttatatacatacaaaaaccaaaaacacaggaagacatattataaaaaaaatcaaacattttcaattcatatttacacactttattaaatgctttcatcccttttaacatatacttatatactaataccttccctattcttaaaaacaactctctaactatttcacacttaaatttcttactaccacaccttctcaattttccctactctttccttaaataaaaattatattctaactccatcattatcctttcatttaa

SEQ ID NO: 15878 - DNA, 442 bp, Glycine max
  unsure at all n locations
  Clone ID: LIB3094-011-Q1-K1-A12
cccacgcgtccgggacagagctctgcatgttgcattgtcaattgtcaagagaactctgcgatcaaatacggtggtagctggtggaggtgctgttgaggcagcattatcagtttatttagagtaccttgctacaactttaggatctcgggagcagttggctatagcagaatttgctgagtctctgttaattattccaaaggtgctttctgttaatgctgctaangatgccactgagctggtcgcaaaattacgggcctaccaccattcagcacaaactaaagccgataagaaacatttatcaagtatgggtttggacctttctgaagggaaaatcagaaacaacttggaggctggagtcattgagcctgcaatgagcaaagtaaaaattattcagtttgcaacttgagcttgcattactatccttcgaattgatgacatgatc

SEQ ID NO: 15879 - DNA, 355 bp, Glycine max
  Clone ID: LIB3094-011-Q1-K1-A2
gttaaaggagattaatcttgactagctcatgctgattcgatctgataaagttgcagatggggagcatgaatatgaagaggcatggttgattaaatattaaccttgactggtactgttgtggtcttggctcagaaaatgtgagccgcattgtgcaatacattatagacaatggtgctctaatctctagaatatgctttggataggatatatcatgtatctggctgtcaattgatggtcaattactcaatgtggatcgatctgagactggctctactctgattaggaaccattggattgacgacccttacttgtaatctgtgtacatatggcactacgatatatatctataattctc

SEQ ID NO: 15880 - DNA, 443 bp, Glycine max
  Clone ID: LIB3094-011-Q1-K1-A4
tgcgcccaggcgtccgcccacgcgtccgcaaaaatttcaacaccaatctcacccatttcaaaaaagggccgttagtgttactattcgtaaaatggccactcttgttctttaccaattctttctcaaactcttgctcctaatttcagtctttcagctttcctttgctgctaggagactcaaccagctggttcaggaccagtcacagttactccattaccacaacggtcctcttctatacggcaaaatcgccgtgaacctaatctggtatggtcacttcaaaccatcccaaaaggccatcatcaccgatttcgttacctcactgtcatccccatcgtctcagagcagccagccatctgttgccacgtggtggaaaaccacggagaagtactaccacctgagttccaagaacaagagtgctgcttcttctctttctctatcactgg

SEQ ID NO: 15881 - DNA, 434 bp, Glycine max
  Clone ID: LIB3094-011-Q1-K1-A5
ggtgcctcctcttacgagcctttcctttcagtccattgattcggtgggtgcgggtgcggcgaaaccgagctagaccctgatcggcgtcggcacaccgccggagaacaagatgattgtctgcgtcgccgtcgtcggtcaccagaacaatccgctgtacatacagagcttcacggaggccgatgatgctctcaagctccaccacatcgtccattgctcgctcgatgtggtcgacgagcgagtgaacaatcctaaaaagtctgggccgatgcttaatgagacgtttttgggactgctttatcctattgaaaactacaaagtatatggatatctgactaatacgaaggtgaaatttatcttggtgaccacggatctggatgttaaagatgcggatgtaagggaatttttcaggaagttccatgccggatatgtagatg

SEQ ID NO: 15882 - DNA, 426 bp, Glycine max
  Clone ID: LIB3094-011-Q1-K1-A6
gcgtccgttctaatctcattctccttctgttcaaacactctctctcatggcatcggataagaagattaggatcggcatcaacggatttggaaggattggccgtttggtggccagggttgcccttcaaaggaatgatgttgaacttgttgctgtcaacgatcctttcatcaccactgattacatgacatacatgttcaagtacgacaccgttcatggccagtggaagcattttgatgtgaaggtgaaggactctaagacccttctctttggtgagaagcccgtcaccgtttttggaatcaggaaccctgaggaaattccatggggtgaggttggtgctgattatgttgatgagtcaactggtgtattcactgacaaggacaaggctgctgctcacttgaagggtggtgccaagaaggttgtcatctc

SEQ ID NO: 15883 - DNA, 444 bp, Glycine max
  Clone ID: LIB3094-011-Q1-K1-A7
cgcgtccgggagattctgatttgttctctcagatctgatcttaccgtcgccggaatccaactcaacgggggtcggattcttgggtatcatcgcatcgccattcgttttagcctctcaataagagattttagttcgcttcaaattcgaggtttgatttgaagttgaaagttggaatagcttaactgttgtgtaaaacaaccaacacacacgagcatgggaagccaagacaacaacgtagaattgtcatccaattcatttctagcttacaaatctgctaaggtgtttgttgctggtcaccggggtcttgttggctcggccattggtcgcaagctcacccaacttgggttcactaatctagtcttgcgctcccatgccgagcttgatctcactcgacaatctgatgttgaagccttctttgcttatgaaaaacctgaatttgtcatt

SEQ ID NO: 15884 - DNA, 296 bp, Glycine max
  Clone ID: LIB3094-011-Q1-K1-A8
ctggatgatcccaacactttcggtaacaggattcacaggatgctgaagcttggactgaggagttgatgaagatgctggtgaagcagatgctgacatgcctcctcttgaggacgctgatgcagatgctgagggtagcaagatggaagaagttgattaaatctgacttaattgcctgttacgtttttagaaacaatgattggagaaacagtctttttactatgttttatgttttttgaattttcgaaattttggaacgttggctagttaggtgccgtatgtagtagtttctttatggt

SEQ ID NO: 15885 - DNA, 254 bp, Glycine max
  Clone ID: LIB3094-011-Q1-K1-A9
tccaacacttttgtattggtctcacaggatgctgaagcttggacggatgattgatgaagatgctggtgaagcagatgctgacatgcctcctcttgaggacgctgatgcagatgctgagggtagcaagatggaagaagttgattaaatctgacttaattgcctgttacgtatttagaaacaatgattgtagaaacagtctttttactatgagatatgtcctttgaattatcgaaattttggaacgttggctaggt

SEQ ID NO: 15886 - DNA, 287 bp, Glycine max
  Clone ID: LIB3094-011-Q1-K1-B1
attcccggctagccacgcgtccggaacgggaacacatatacgtttaacggccgtttataccgtggtgtctatggcggtctgtgggggtgactatagacagcgactgcactgaactatatcaatccattatacatatgtatgtacttatacatgccaagggagcccactctaaagggggtatgcagacggtcacgtgcaagcgataagataggaatcaagttatgtcatgaagaaaggaacggtgtttcgtcaatttacaatgtcgggactgaatgaacaggggttag

SEQ ID NO: 15887 - DNA, 324 bp, Glycine max
  Clone ID: LIB3094-010-Q1-K1-H2
gaaacagcattctcgaattagggttcttcactgatctccgagcacacaccactactctgttggggagattcaacaccaccttgcgtggcgccaatgggaaaagccttcgacatctgagccgttccgttcaacgccgacaggtggagtccgtcggacaacgcgacctcaggcagcaacaacaacaacctgactctgaacgtccccttacgccgattcttccgatccgacatattgcgccgcatcggcgactggacccgtaacttcaacaatccgacccgcttcaagaaccccgtcgatgccgtcttcgacttcatcaacgacgac

SEQ ID NO: 15888 - DNA, 404 bp, Glycine max
  Clone ID: LIB3094-010-Q1-K1-F11
aagaaaattcatccttgtttatcttctacataatttctgagctggcggttgcaatgctgctctttcccagcagagaaagaagcgacagattcctccaactttggctcctgtcgaagctctagaggcatatacccagatatctagtcatccctttcacaaaacaaacaaacaaggcattatatctcttgatatcctttattctaaggacttaattgcaactggaggtattgatacaaatgctgttatttttgaccgcccatcaggacagatattatctacactcagtggtcactctaaaaaggtgaccagtgtaaaagttgtagcttaaggtgaatcattcctaactgcttcaacagataagacagttcgtctatggcaagggtcaaatgatggttactattact

SEQ ID NO: 15889 - DNA, 403 bp, Glycine max
  Clone ID: LIB3094-010-Q1-K1-F2
cggcccgaccaagcctccgtgttggcctcacagtgaggctggagaaggaattctcctacgatgaaattaaaaatgctatcggggaggaatcagagggcaagttgaagggaattcttggttacactgaagatgatgtggtctccaccgactttgtgggcgatagcagatcaagtatttttgatgcaaaggctggaattgcattgaataagaactttgtgaagcttgtctcttggtatgacaacgagtggggatacagctcacgtgtcattgacctgcttgtattcgttgccaagaagtctttttaaggctgtactgaaaaaaaagtagcttgtctagacattatgtgctggtgtctagctgcgatttagtgtcttcttgctcgggcagaaatgagaagcatgaa

SEQ ID NO: 15890 - DNA, 396 bp, Glycine max
  unsure at all n locations
  Clone ID: LIB3094-010-Q1-K1-F3
tctgcctgtaagagtgaaaaaaccttctcttttccttctctcaagtctcaagagatttcatcagggctccaaagaaggacaaggctccaccaccttcctccaagcccgccaaatctggcggtggcaagcagaagaagaagaagtggagcaagggaaagcaaaaggagaaggtgaataacatggtgctgtttgatcagggcacctatgataagctcctttctgaagctcccaaattcaagctcatcactccttccattctttctgatcgtttgaggattaatggatcacttgcaaagaaagctataagagaattgatggctaggggttcaatcangatggtgtctgcccatgcaagccaacaaatttacaccaaggcaactaacacctangtgtgga

SEQ ID NO: 15891 - DNA, 402 bp, Glycine max
  unsure at all n locations
  Clone ID: LIB3094-010-Q1-K1-F4
cgcgtccgaaattgttatgcctttcttttgaaaccgtggtttagaatctggctacagataaacttaatgggttagatgtttcattttctggatttgatcacagggaatatggattgaattgtgtgcctgtttgttctgcagcggtgggagagtactatttangttctggtttttattacccttgattatctcatgttcattatggactggctttccttattgtgggttttggatttattgtttttgacagtgtanggttctgtcagagttagacttgacttgatgtttctttttgggaaatgtacgaggataactggttctttataggattggccccgtatgatttggtgatgttggatttataagtgtttaattacttatttacttctcaattgattctct

SEQ ID NO: 15892 - DNA, 131 bp, Glycine max
  Clone ID: LIB3094-010-Q1-K1-F5
cccacgcgtccggtaggattaattgatgtatttaagaatcaattgctcacttatgaaaggttgatgaggagactttggcacaatccaaccaaccaaccacaaagtggatattttgactctttttttccctt

SEQ ID NO: 15893 - DNA, 267 bp, Glycine max
  Clone ID: LIB3094-010-Q1-K1-F6
tccggaatgataaggtatatgaacaatccttaacatatacttctacaagatgttctattttttcggagaaaaaaattcgctcaaaaaaaacgcgaaaatattttaatcgtaacttagaggatttgttacgtagaaaaagaaagatagattcatattcccatacatataaattatataggaacaaaaaaaatcttggattactttttgaaaaaaaagtagaaatccatttttttggagtaaaaatactattccaattataataataag

SEQ ID NO: 15894 - DNA, 155 bp, Glycine max
  Clone ID: LIB3094-010-Q1-K1-F7
cccacgctttctcccacccctacctccaatctacactgatccctacccgttccatttcatgccggtacgttaactactagctcttagctcccaacatacccaacgctctcgtccaccatctactaacactcatacaacctaccacccactcttca

SEQ ID NO: 15895 - DNA, 447 bp, Glycine max
  Clone ID: LIB3094-010-Q1-K1-F8
cacgcgtccgaccaatccttcgtaaacataccaatcctaattttatcttaatgcctttttcccatttcagtgcaaacttcaaccatggcttcaataataaccttggtgacatccaccttgctctttctttctttcactttgtcatgtgctattgacacctccaccatcaccaactacaccgacaatgaggtcatgaccatgtacgaggagtggttggtgaagcaccaaaaggtgtacaatgggttgagagagaaggacaagaggttccaagttttcaaagacaacttgtggttcatacaagagcacaacaacaaccagaacaacacttacaaacttgggttgaaccagtttgctgacatgacaaatgaggaataccgtgtcatgtattttggcaccaagagtgatgccaaacgcatgctcatgaaaaccaagagcaccggtcacccg

SEQ ID NO: 15896 - DNA, 321 bp, Glycine max
  Clone ID: LIB3094-010-Q1-K1-F9
aaggaagctagagtaaaagtctgtactcagtttttacagagtattgaaaggaactgtagggaggacagagatgagacatcacagctgaaactggatgactgctttcagacgagagatggttccactgcaagatatgatgatccagctactatgacgcaaagacgtgcatttatggagaagaagactcatgcggattcatcagatgctcatacagctgcgatagtggaagtgaagacaagccatactgaccatgctacggataggattgatatgaaggatgaaagaatcagcgatcctcatgatctggatcgacctgagaag

SEQ ID NO: 15897 - DNA, 342 bp, Glycine max
  unsure at all n locations
  Clone ID: LIB3094-010-Q1-K1-G1
ctcatggtcatcgaactacccacgttctgctccttcgcagatcatttcgcgtttagcttccgcgaaagatggcagacaatgaggatggaggggataagacatctcgtgggaatgaatgggaggttgtatctctcacagcatcaacatatgcagctgctcctggtcctgatgaagttgagatgaaggatgatgggaaagaagatgtatatgggcaggatgaaggagaaacgtcacatgctttattcatgtctagacactttgtctttccacccagtcagcatgaaaacttgcccgtggaacctgactatggtgagattcatgatgattttggagacanagatg

SEQ ID NO: 15898 - DNA, 393 bp, Glycine max
  unsure at all n locations
  Clone ID: LIB3094-010-Q1-K1-G11
gcgtccgtttgatcgttattccactgaatagaacatgttcatataaatggataccctttatattatgtatgctttatattatctataaagggtaaagatatccgatgtgaatctatttgtttagttttctatcggtatgtatataggtgaataatccaacatgcctttttgtgaagtaaaaaaactaccctcgatccatgcctcanaagggttgataataagtaaaaaaaatcaatgaattcatgataaaacccttctgcgtttttttattataaatttttttgtcaataaagggatcaaggngttgggggatcaaatggtaaagttcttttgttggtaaattggaagattagaaacatgactatngctttccaattagctgnttttgcatta

SEQ ID NO: 15899 - DNA, 415 bp, Glycine max
  unsure at all n locations
  Clone ID: LIB3094-010-Q1-K1-G12
gtccggggggaggagcctccagtttcactgtttatatttgagagaaaactctgcaaacatgttggtttatcaggacctccttacaggtgatgagcttctctcggactccttccgttacaatgaaattgagaatggaatgctgtgggaagttgaggggaagtgggttgttaagggagcagttgatgttgacattggtgcanacccttctgctgagggtggagaagatganggagtcgatgacgcagctgttaaggttgttgacattgttgatacattcagacttcaggagcaacccgcttttgataagaaacagtttgttaccttcatgaagaggtttatcaagaatttgactcccaagctcgatgcanagaaacanngagttgttaagaagcacattgagggagcaactaaatac

SEQ ID NO: 15900 - DNA, 258 bp, Glycine max
  Clone ID: LIB3094-010-Q1-K1-G3
gcgtccggcagagcatacatctagcgtattctctcgcattctctttcactgtcacagagccacatccattgactttttagccaacggctcctctgcagcccaatccctaaacttcctcatctactgccgcacggtctgaattggccgtctcctctgctccctctgcctggcccagggcatctccttccattacggctcgtgccgtctcgagaaccgatccttcctcgaaaccgacatagccctcctcaaacccttcca

SEQ ID NO: 15901 - DNA, 306 bp, Glycine max
  Clone ID: LIB3094-010-Q1-K1-G4
gcatgggttatcctaagtctctgggaatagcgctgcaatggcttcaagttaggaggaggtgacccttttgggagctactggaagcccatttgtgtgcagggttcatattgtcctcaagttgaacggagttcaatacaaatatgtcgaagaaaattcgacgaacatgagtgaactgattctcaaatccaacccagttcacaagaaggttccagtgtttattcacaatgagacgcccatagcagagtctcttgtgattgctgaatacattgatgagacatggaagaacaaccctatcttgccttctga

SEQ ID NO: 15902 - DNA, 132 bp, Glycine max
  Clone ID: LIB3094-010-Q1-K1-G6
cgtaggctactctgagtattacggatccgtctgaacctgcatggactcacacatggcacatcgtgcgcttcatgtagatatctggccaagtacattcggcatgagggtcaggatcgcactcgctgaaaaggg

SEQ ID NO: 15903 - DNA, 146 bp, Glycine max
  Clone ID: LIB3094-010-Q1-K1-G8
cgcgtgtgcggaaaaaaaaaaaagccttttacttttgaattattgtatgaattgaatcttgattggaaaagggttcttattaaggtggtttacccattaatttaattttaaaccgggccttttttaaaaaaaaaaaaatatagtat

SEQ ID NO: 15904 - DNA, 441 bp, Glycine max
  Clone ID: LIB3094-010-Q1-K1-G9
ccgggccgacgcacgcgtccgctgagttgcaagattcacttcaaattatgcttttcgctgatcggttcctcatcacatcaggcggcgtcgcagatcatcgcaattccttgattatttccttttgttgatacgcggaatcgcgcacacggtgctggtgtgtgcactgaggtagaaagaagaagattgaattgtaaacagcatgaattaccttcttggagctttcaagcctgcatgtaatgtcttgatcacgtttaatgatgggaagaaccggaagcaggttccgtttaaaaaagaaaatggtcaaatggtcacagtcccacttttccaaagtcaagaaaacattggtgggaagattacaatagaaccaatgcaagggaagaagattgatcacaatggtgtaaaagttgagctcctttgacagatagagatgtattttgacag

SEQ ID NO: 15905 - DNA, 367 bp, Glycine max
  Clone ID: LIB3094-010-Q1-K1-H1
cggacgcgtgggagaacctattgtcactggattttgaagaaattgtatcccagctatctggagggtcctttctcgtatgataagttgcgctttgatccaagtaaaccaaaatgcaggctgttagttacacatgatgactatagtataacgtccaaacttccaagggagagaacttctgttgttaccatacttagggatccagttgaccgtgtttttagtacttatgaattctcaatagaggttgcagctagatttttggtgcattcaaacttgacgtccgcaacatagatggctttacgcctaagctctaagactaaaggagtaagcacactggatatctggccttggaagtatctgggtccatgga

SEQ ID NO: 15906 - DNA, 462 bp, Glycine max
  unsure at all n locations
  Clone ID: LIB3094-010-Q1-K1-F10
acgcacgcgtccgcccgcgcgtccgcccacgcgttcgctttgtatgtagcgatccgagaaaaactctgtagacatgttgttttaccaggacctccttacaggtgatgagcttctctctgactccttccgttacaaggaaattgagaatggaatgctgtgggaagttgaggggaagtgggttgttaaaggagcagttgatgtagacattggtgcaaacccttctgctgatggtggaggagaagatgagggagttgatgatgcagctgttaaggttgttgacattgttgacacattcagacttcangagcaacccgcattcgataagaagcagtttgttaccttcatgaataggtttatcaagaatttgactcccaagctcgatgcagatcaacatgaagtgtttaagaagcacatcgagggagcaacttaatacctgctctctaagattaaagatttccaatt

SEQ ID NO: 15907 - DNA, 139 bp, Glycine max
  Clone ID: LIB3094-010-Q1-K1-H10
cacgcgtccgcacaacaggaactcactatatggacaacgttactctcggtgtctttaatgtcttcgagagggggagatgttcacatataggatgaaaattcgcagggatatgcgcgctgacacagctgaatttacggaa

SEQ ID NO: 15908 - DNA, 299 bp, Glycine max
  Clone ID: LIB3094-010-Q1-K1-D10
cttggctctgaaaaaacatgttgagggttgcagctagaaggctctattattctctctcagcggatgctccgttgcggaccaatcacgccgatttcgctatgatctctcgaaacgacgtcgacgacgaggaccgcagatctgatgctgactacaatccgattgttcactttagaggacatgctactgaatgcctgatccacacataagataacagcattacatctgagattccgccaactgttactgctgttaagaaccctacttctaagattgtctatgatgatcacaaccatgaaaga

SEQ ID NO: 15909 - DNA, 422 bp, Glycine max
  Clone ID: LIB3094-010-Q1-K1-D11
cgcgtccgcccacgcgtccgctcgagaatatgacccgttctaaaatttacgaaacataattatttatgatggatgatatataatgagaggaacataaacgaacaatcagatgctgctagtcatttggataataaacaacattaggatttatgcatatcacatgatcgctttacttataatttacggatatcagctcaataccacatgattcaagtaatattaccaaaatcaaagccttatcctacaagatgcggtcagctacatgggtcatgacgtcattcggcaagtttagaaaccaaagtgtagcatacgggaaaaaagtacacttctccttacagaggtatcccatatgacacaataactctgaaatagtatagtataccatagtctaaatcagccgaatatacattttcttacatgac

SEQ ID NO: 15910 - DNA, 354 bp, Glycine max
  Clone ID: LIB3094-010-Q1-K1-D12
tttgaatacattccttgtagtttatactgttagatgggtttgaagatggcgttactgatgcgaggcctttccctcatgctccttttggtctcctctgaggtggcatccacgaatacaaaagaggaggcaaatggagtggatgatgccaaatatcccggtggaagctatggagggggttacccaggtcatggcggtggcggttatactggccatggcggtggcggttatcctggccatggcggtggtggtggctatcctggtcatggtggtggccaccctggtcatggtggcggctaccctagccgtggtggtggatactgtatgcatggcttgtgcggtggccggacatacaac

SEQ ID NO: 15911 - DNA, 112 bp, Glycine max
  Clone ID: LIB3094-010-Q1-K1-D2
gacatcgcagactttgcaggcgcatcgcagtctatactcatgtcagaatgatgatgttgacgccagatactataccaagtgatcagacacatgaacacttgatcgatgatct

SEQ ID NO: 15912 - DNA, 298 bp, Glycine max
  Clone ID: LIB3094-010-Q1-K1-D3
ggcggcgctgtggcggacgcgccggcggtggtcgaggagaagacggagttcgacgtggtgagggaggatgtgccgagcaacgctcgaatcgcggtgattaaggcggtgagggcattgacgaacctagcgctgaaggacgcgaaggagttgatcgaagggttgccgaagaagttcaaggaagggatttcaaaggacgaagctgaagatgcgaagaagcaactcgaagaagctggtgccaaggttaccattgcttaaacactgtttagctgcagcatatatggtctgcttcttcttttgg

SEQ ID NO: 15913 - DNA, 305 bp, Glycine max
  unsure at all n locations
  Clone ID: LIB3094-010-Q1-K1-D4
gaccggcacttttccttaacggcgaagctagtgccaaagggcacaaccgtcattcccactccgaaccgtttcttctatcctccactctccccatcccaataacaaagagaggaatcgaagtctgttccgttctgatcagaaagggaataacggtaactgagatatggggcttctgactaacagagtaactagagagaagcctgaaccaggggatcacatctactcttggaggactgcttacatatacgctcaatacngcatttatggcggcgatgacaaagtcattcacttcactagacatgggc

SEQ ID NO: 15914 - DNA, 354 bp, Glycine max
  unsure at all n locations
  Clone ID: LIB3094-010-Q1-K1-D6
cccacgcgtccgtcaagcattgcatccctcttgatttgtagtttgttttgtgctttagataagagttctgccaaatcaagaggggttttaagatcatagtgtgtgttttgcaacaatggctaagttctttgctgctatgatcttggcactctttgccatttccatacttcaaacagtggtaatggctgctaatgaacaaggaggccacttgtatgacaacatgagcaaatatggaagtggaagtgtcaagagttaccaatgcccatcacaatgctcgaggagatgtagccagacccaataccacaagccctgcatgtttttctgtcagaagtgctgcangacatgcctgtgtgt

SEQ ID NO: 15915 - DNA, 434 bp, Glycine max
  unsure at all n locations
  Clone ID: LIB3094-010-Q1-K1-D8
gcttcctcctcttacgagcctttcctttcagtccattgattcggtgggtgcgggtgcagcgaggccgagctagaccctgatcggcgtcggcacaccgtcggagaacaagatgattgtctgcgtcgccgtcgtcggtcaccagaacaatccgctgtacatacagagcttcacggaggccgatgatgctctcaagctccaccacatcgtccattgctcgctcgatgtggtcgacgagcgagtgaacaatcctaaaaagtctgggccgatgcttaatgagacgtttttgggactgctntatcctattgaaaactacaaagtatatggatatctgactaatacgaaggtgaaatttatcttggtgaccacggatctggatgttaaagatgcggatgtaaaggattttttcaggagggtccatgccgcatatgtagatg

SEQ ID NO: 15916 - DNA, 291 bp, Glycine max
  Clone ID: LIB3094-010-Q1-K1-D9
cgtccgcccgctcgtacgctcgaaagcactaccacatgcttctgacgactgctcatgagtatctgggcggggtgccttatgaagctaggtacttaaacgatgagctcaattctcatgataatgcgtataatagacatcatcgtgacatcggcgtacgagatcttgagtcaattcatcttctatggatactacttgatgtccatgagctttacgcactctaaacaaactttgggagaattcctacaggatgcagtcatgtacatcggtcatgacatgattacttaggccaag

SEQ ID NO: 15917 - DNA, 229 bp, Glycine max
  Clone ID: LIB3094-010-Q1-K1-E1
acaggagtaacctatgaccctagcggagccttctttcttcagtcgaacattgcataagccagtgggaacgtgtctgacgtgaagcatgctcttggtgacaaagttatagctagctctggatctagacgacatgtgactcaggctagagtgaagtgactgtatgatcagaaccacgatatcatgatgaatgctaaaggacctaagatagaaagagacattctctacctac

SEQ ID NO: 15918 - DNA, 436 bp, Glycine max
  unsure at all n locations
  Clone ID: LIB3094-010-Q1-K1-E10
cggacgcgtgggttatcctaagtctttggttttagtgctgcaatggcttcaagtcaggaggaggtgacccttttgggagctactggaagcccatttgtgtgcagggttcatattgccctcaagttgaagggagttcaatacaaatatgtcgaagaaaatttgaggaacaagagtgaactgcttctcaaatccaacccagttcacaagaaggttccagtgtttattcacaatgagaagcccatagcagagtctcttgtgattgatgaatacattgatgagacatggaagaacaaccccatcttgccttctgatccttaccaaagagccttggctcgtttctggtccaaattcattgatgataaggtttttggtgctgcatggaaatcncgtttcacagctgatgagaaagagcgtgagaagaatgtgaggaagcaat

SEQ ID NO: 15919 - DNA, 218 bp, Glycine max
  Clone ID: LIB3094-010-Q1-K1-E11
acgcgtccgcccgcgcgtccgatacgataaatacatgtagtaatacactcaattgctcactaatcaaagttgtaggttcttactaaggcacactgcaaccaaccaagcacataatgaatatatcgactctaattttccatcagcatatctcagatattgcgaatgtcaatggagttactacagataacagatacgtcaacactctataggacccaagc

SEQ ID NO: 15920 - DNA, 400 bp, Glycine max
  unsure at all n locations
  Clone ID: LIB3094-010-Q1-K1-E2
cccaggcgtccgtccacgcgttcgaaaaaaattggttcttcttcttccatatggatccgtgtggtgattttggcatcactggcctctgcagcactctgtgccaaccctcgtagaccagtggatgtacaatttggccgaaactacgtgcccacatgggcctttgatcacatcaaatacttcaatggaggttctgacattcagcttcatcttgacaagtacactggtactggcttncagtccaaagggtcatacttgtttggtcacttcagcatgtacataaagatggttcctggagattcagctggcacagccactgctttctatttatcttcccaaaatgcggagcacgacgagatagactttgagttcttgggggaaccagacaggacaaccttacatt

SEQ ID NO: 15921 - DNA, 133 bp, Glycine max
  Clone ID: LIB3094-010-Q1-K1-E3
gagtggcagaggtttaaccatacatctcgtgtttactttacatgcgtcctggttactctcatggagttataagggaacggatcctcacgggccaaggccgtatgctacgtaagcaacagatcatcgggctgca

SEQ ID NO: 15922 - DNA, 111 bp, Glycine max
  Clone ID: LIB3094-010-Q1-K1-E4
ctcgggcatatgacgagcctttgctaacgttctatagatcaccaacttgcaaatgcagcgagtgctacctggacccagctcggtcttcgcacaccaggctgagaaacatga

SEQ ID NO: 15923 - DNA, 430 bp, Glycine max
  Clone ID: LIB3094-010-Q1-K1-E5
cgcgtccgcgacggtctcgataagcacttggaacgattttttccttccacttctcgccccatcacctcgggctccaagaattccaacctccaagtggaggaatctgaaacggagagtgaagagtctgatgttagtggctctgatggggatgacacctcttggatctcgtggttctgtaatctcagagggaatgagttcttttgtgaggtggatgatgattacatacaggatgactttaacctatgtgggttgagcagtcaagtgccctactatgattatgcccttgatttgattctcgacgtcgagtcgtcccatggtgacatgttcacggaggaacagaatgagttgattgaatcagcggcggaaatgccttatggtctgattcatgccagatatgtgttgaccaagcaaagaatggctgccattgctg

SEQ ID NO: 15924 - DNA, 422 bp, Glycine max
  Clone ID: LIB3094-010-Q1-K1-E8
gaagccgtccgcccgggcgtccggagggctcagaggaactttgatgcgagtagggaccggtcgttgccggtggtgggtgttggagttgtgtttattgatgagagtgccgtgttgccgattccttctaatgaaatggaggaagcggttgaggttgttagtgaggttgtgtcgagtttggccccaccaaggaaggagttgcatattgttcctattgagaccgtttattcctcggattctggtgatgggaaggagaggataaccaaggtagtgaacacagtgattgatccaacgggaagggaggatgtattgctctgtctgcgaatgttggcgctacaaaaagttgcttcttgaattgggtataacaggatcattctggggtcatgcatttcgaggattgcttgccatgtcatttcagccactgt

SEQ ID NO: 15925 - DNA, 305 bp, Glycine max
  Clone ID: LIB3094-010-Q1-K1-E9
cgtccggttggtgttgtcatgagttgaaacttaatttacttttcaccactaaactacataacaaggcagattttttataaaataacaccaactatacattattaaaaatatcttttccaaatattcatatttaactcattttcttataacttgttcctttcctcataaaaaatctataaatatataaaaataacctattaccctccttcattctatatattacatctataattattaaattctaccatttcatacaatataaaaataatcataatataacacatcatactcacatctctaattta

SEQ ID NO: 15926 - DNA, 354 bp, Glycine max
  unsure at all n locations
  Clone ID: LIB3094-010-Q1-K1-F1
agacagcagagcagagatctagcgtattctcttgctctttctttcactgtcacagagccacagtgcatgggcttcccagccaacggcgcctctgcggcccagcccctaaacttcctcatctacggccgcacgggctggattggcggcctnctcggctccctctgccgggcccagggcatctccttccattacggctcgggccgnctcgagaaccgggccttcctcgaaaccgacatagccctnctcaagccctnccacgtcttcaacgccgncggcgtcacgggccgncccaacgtcgactggtgcgagtcccacaaagtcgagaccatccgaaccaacgtcgtctgaaccctt

SEQ ID NO: 15927 - DNA, 344 bp, Glycine max
  Clone ID: LIB3094-010-Q1-K1-D1
cacctgtctctatctaaaaaacccatcactattttgaccagacacaaactttcctgaccttgcgtttccctctccatatcttcatctaagattacacacctctactggcagagacccttatacctatctgtctctcccactacaaaatcccttactcttgatccatatacactcgctcttgctaaccgcacgaaccactttactttactaactaattcgttggctacattacttctattgtgaactgactaaattccaagttctgcatgaatatccaaaacggcacatagttgcatgcgaagacacaggattgcttctcgtcaattcagagtgactccataccc

SEQ ID NO: 15928 - DNA, 130 bp, Glycine max
  Clone ID: LIB3094-010-Q1-K1-B2
acgctgtatgctattgcatgctatgggttgctgatgacccgttcatggagtccacttcgctcgccaatctactagtgtccaacaacaccgttcaagcagagctaatgaggagcgagcatgtgtaccgtca

SEQ ID NO: 15929 - DNA, 127 bp, Glycine max
  Clone ID: LIB3094-010-Q1-K1-B3
ataacgcagccctatcgctcgatgataacccgttcatggagtccacttcactcgccaatctactagggtccaacaacaccgttcaaccagagctaacgaggaacgaccatgtgtaccatcaacggga

SEQ ID NO: 15930 - DNA, 383 bp, Glycine max
  unsure at all n locations
  Clone ID: LIB3094-010-Q1-K1-B4
gaagtggcgagagtgaagaaatggcgcaagacttggcattggatttggaggagcttcgccgcgtccacagcatcgccaaaagacctcgaaccctctctcttctctcctccgaaattcgtaacctcgaaaagttatcgtcagaggaagcttctgcgcagattccggcgccgatttcgaccggaactaaagtggcgccttcacctgcgctgaagtatgcggcactcgcgtcgttcagttgggaccaggatagtgacanagttaagatatatgtgttaatggagggaatcgatgagattaagggtgaatccgagtttaagtcgatgtcattcgatgttaagttccatgatgttcaagggaagaactaccgatgtgcaatatcaaaa

SEQ ID NO: 15931 - DNA, 367 bp, Glycine max
  Clone ID: LIB3094-010-Q1-K1-B5
tccgcaccgcacgaatatcttgttgtttggagcgttccgagaaaaactctgtaaacatgttggttgaccaggacctccttacaggtgatgagcttctctctgactccttccgttacaaggaaattgagaatggaatgctgtgggaagttgaggggaagtgggttgttaaaggagcagttgatgtagacattggtgcaaacccttctgctgagggtggaggagaagatgagggagttgatgatgcagctgttaaggttgttgacattgttgacacattcagacttcaggagcaacccgcattcgataagaagcagtttgttaccttcatgaagaggtttatcaagaatttgactcccaagctcgatgc

SEQ ID NO: 15932 - DNA, 311 bp, Glycine max
  Clone ID: LIB3094-010-Q1-K1-B6
cgcgtccggatggacaagtgttagagtggaaagaccgttcgattaggtacttacaatacgccaattgcggccacttgatgtcagcactctacatgctgctctgtcagattccactgctgatagaatcatctcaaattctgctttgtatacacgtaaatcacttatctattagtaggattttaatggatctcaaatatgcgtataagtagaaatttctttctggcatctgggtatggttcaatgatgcacgtggtttaacattcatagctgcatgaccaccaagtcctcaaatactgccaatagctgcaaat

SEQ ID NO: 15933 - DNA, 394 bp, Glycine max
  unsure at all n locations
  Clone ID: LIB3094-010-Q1-K1-B7
gcttgctcctcttacgagcctttcctttcagtccattgattcggtgggtgcgggtgcagcggaaccgagctagaccctgatcggcgtcggcacaccgccggagaacaagatgattgtctgcgtcgccgtcgtcggtcaccagaacaatccgctgtacatacagagcttcacggaggccgatgatgctctcaagctccaccacatcgtccattgctcgctcgatgtggtcgacgagcgagtgaacaatcctaaaaagtctgggccgatgcttaatgagacgtttttgggactgctttatcctattgaaaactacaaagtatatggatatctgactaatacgaaagtgaaattatcttggtgaccacggatctggatgttaaagatgcngatgtaa

SEQ ID NO: 15934 - DNA, 393 bp, Glycine max
  Clone ID: LIB3094-010-Q1-K1-B8
cgcgtccggcttgctcctcttactagcctttccttactgtccattgattcggtgggtgcgggtgcagcaggaccgttctagaccctgatcggcgtcggcacaccgccggagaacaagatgattgtctgcgtcgccgtcgtcggtcaccagaacaatccgctgtacatacagagcttcacggaggccgatgatgctctcaagctccaccacatcgtccattgctcgctcgatgtggtcgacgagcgagtgaacaatcctaaaaagtctgggccgatgcttaatgagacgtgtttgggactgctttatcctattgaaaactacaaagtgtatggatatctgactaatacgaaggtgaaattaatcttggtgaccacggatctggatgttaaagat

SEQ ID NO: 15935 - DNA, 345 bp, Glycine max
  Clone ID: LIB3094-010-Q1-K1-B9
cggaggcgtgcgcccgcgcgtccggtgatttcagtgagtgattggtgttcacttgatctcatcataatcgtgagggtgtattgaagaagatgccgatcagaaacatctacgtcggaaggcctgaagaggcgactcaccccaacacgttgaaggcggctttgactgagttcatctgaaccttcatcttcgcgttctgcgtctcatgctcccgcatctcctacaacaagctcaccgacaacggcgctgacacccctgccggactcatctcctgcttcatcgtccatgcattacgcctcttcgtcgccgtctacgtcagcgccaacatctccggcggccacgtcaacc

SEQ ID NO: 15936 - DNA, 205 bp, Glycine max
  Clone ID: LIB3094-010-Q1-K1-C1
cgcgtccggctaggtctagctagcagtctcagtccaggatagagagaaaaaatggcagagggtctaatgcgtcggattttccatgcgcgcatagaccgacgtcgagacggcgattgccactcccatcgacaactacgacatgatcgtgacggcatcacgcgacagatccatcatactatggcacctgaccaggaagacaagacct

SEQ ID NO: 15937 - DNA, 442 bp, Glycine max
  unsure at all n locations
  Clone ID: LIB3094-010-Q1-K1-C10
cccacgcgtccgcccacgcgtccgcaaaaattacaacaccaatctcacccatttcaaaaaaaggccgttagtgttactattcgtaaaatggccactcttgttctttaccaattctttctcaaactcttgctcctaatttcagtctttcagctttcctttgctgctaggagactcaaccagctggttcaggaccagtcacagttactccattaccacaacggtcctcttctatacggcaaaatcgccgtgaacctaatctggtatggtcacttcaaaccatcccaaaaggccatcatcaccgatttcgttacctcactgtcatccccatcgtctcagagcagccagccatctgttgccacgtggtggaaaaccacggagaagtactaccacctgagtnccaagaacaagaaggctgcttcttctctttctctatcactgggcg

SEQ ID NO: 15938 - DNA, 339 bp, Glycine max
  Clone ID: LIB3094-010-Q1-K1-C11
cgtccgcccggacggactccctcacccatttacacatcatatccatggacttaaccaacgctctctgtaggtcctacatgctacgctctgccaaccgccagtctctgacccgacgagcgaaccataacgctagagttaataaccggaaaccgactaactcggctctccgcgaaagactacgccaaagagattgccatgagccagcatagccgctctgctatgcaagccggcattgacaatctcgccgacgctgctgggatcactcttgggctcagaggtaggaacgatgcgatggatgagtttggaagtactaaagtgagcaacgatggtgtcaccatt

SEQ ID NO: 15939 - DNA, 406 bp, Glycine max
  Clone ID: LIB3094-010-Q1-K1-C3
cggacgcgtgggctgagaaaccctccactcttgagtccaaactctcctcctacccaaaatggatgcaagggcatcatcttcttcagcttcctcgattcttttccttgcagcaattgtagctgcttatttctattcatcagaagcagctgtgtccaaaggatcttttgaggacaatttcagcataatgtggtctgaggaccattttactacctctaaagatggacagatctggtatctctcactagacaaagacacaggatgtggatttcaaacaaaacaacgctacagatttgggtggttcagtatgaagctgaagttggtagcaggtgactctgctggtgttgtgacagcttattatatgtgctcagaaaatggtgcgggaccagaaagagatgagcttgatttt

SEQ ID NO: 15940 - DNA, 294 bp, Glycine max
  unsure at all n locations
  Clone ID: LIB3094-010-Q1-K1-C4
cttgatgatcccaacactttcggtaacaggtatcacaggatgctgaagcttggactgagcatggatgaagatgctggtgaagcagatgctgacatgcctcctgttgaggacgctgatgcagatgctgagggtagcacgatggaagaagctgatcaaagctgacttaattgcctgttacgtttatagaaacaatgattggagaaacagtctttntactatgtcttatgtgctttgaattttcgaaattttggaacgttggctagttatgagccgtatgtagtagtttctttatgg

SEQ ID NO: 15941 - DNA, 241 bp, Glycine max
  Clone ID: LIB3094-010-Q1-K1-C5
ggagggtgtgatgagttattaaatacctgtttttaccgtggtcggatgccaacctaaacggggtcgctttcacatgcatcgtcggatttccattcgttgcatcgctggctcttgagatgcacttacgctttatattcatggccatcaacgtgattggaagttgtcatatctgagactgatggcccatacagctagactcgcatgcgctgtaagagtatacttcaacttcactaactatgac

SEQ ID NO: 15942 - DNA, 279 bp, Glycine max
  Clone ID: LIB3094-010-Q1-K1-C6
gccacgcatacgggaggtctctggaaggatattaatggaattgatgataagacggatgccagcatggtttgagaagaccaagaagagataacggtagaacttacggaacatactgactgcaataaattgcgaatgatggcatgtcgacctgcaccgagtcaggtgacttggatggggtatgccactgcatcatgatagactacaagtgattatagaatcactgattcactggcagaccctactgaatcatatcacaagcatgtagaggagttcgctaga

SEQ ID NO: 15943 - DNA, 412 bp, Glycine max
  Clone ID: LIB3094-010-Q1-K1-C7
tgagtgtgtgatgatttattaattactgttttgtgactcggtttgttgtcattctgaatgcgaatgctaatacatgcattgctggagttcaataggttgctatgctggctcttgttcagcactcagatgttatatttatttccatcaacttgatttgcagttatctctttgagtttaattcccctcaaggtttgaattgtatttgcttttagagcttaattcaaattcactaactatgatgaaaatctgatcatagactatcaattatgataagagtattgacttatatcataagtatttaacaatcgtatctaaaataactttttagaattcatactacatagtaaataatttatgcactgtaatattatcaaagctttttacacttttatttaattataaagtatcatat

SEQ ID NO: 15944 - DNA, 391 bp, Glycine max
  Clone ID: LIB3094-010-Q1-K1-B12
gcgtccggctgcctcctcttacgagcctttccttgcattttattgattcggtgggtgcgggtgcaagtaggcttttctagaccctgagcggcgtcggcacaccgccggagaacacgatgatcgtctgcgtcgtcgacgtcggtcaccagaacaatccgctgaacatacagagcttcacggaggccgatgatgctctcaagctccaccacatcgttcattgctcgctcgatgtggtcgacgagcgagtgaacaatcctaaaaagcctgggccgatgcttaatgagacgtttttgggactgctttatcctattgaaaactacaaagtatatggatatctgactaatacgaaagtgaaatttatcttggtgaccacggatctggatgttaaaga

SEQ ID NO: 15945 - DNA, 302 bp, Glycine max
  Clone ID: LIB3094-010-Q1-K1-C8
cccacgcgtccgcccacgcgtccgcccacgtctccgcggacgcgtggggttctataggctcggacctctgtgtccttgagttctaaggagacaggaacctacgtctggtggatgaatcatgaccgtgtgatcagagcgtgattaacggcccgggtgagtttctctttggagtagtctcatctttggctgtagaggatcgttcttaggacacttccatgtgcctgggaatggtcatacggttgtctgacagaccaaaaaagaaaaaaagacaaaaaagtaataaaaaagaagaacaaaacata

SEQ ID NO: 15946 - DNA, 301 bp, Glycine max
  Clone ID: LIB3094-009-Q1-K1-H11
gatggcggcgtcgcggcgtctccgggacctccaatcccaaccggcgaacaagatctgggtggactgttcccagaagaacccgcaatgggcctccgtatcgtacggcgtcttcatgtgcctagagtgctcaggcaagcaccgcggcctgggcgtgcacatctccttcgtgcgatccgtgacgatggattcgtggtccgaaatccagatcaagaaaatggaagccggaggcaacgacaaactcaacgccttcctcacgcaatacggcatccccaaggaaaccgacatcgtcggcaagtacaac

SEQ ID NO: 15947 - DNA, 279 bp, Glycine max
  Clone ID: LIB3094-009-Q1-K1-H12
aattcccgctggacgccacgcatcctgttacctcacaatgagctctataattaaactcctagatcaaaaaaagagcgttcaattaaactcagaggcccgtaaaagcaatcattactacactgaatataattcctatacacctaatttgaacaccatagcatatcaaatctcatctactcataaccatcaattaccatgaataagaactttcaaaaacatatctctcaattatacaactaatgcaaatacaaacttaactatcatacacactcattacat

SEQ ID NO: 15948 - DNA, 397 bp, Glycine max
  Clone ID: LIB3094-009-Q1-K1-H5
atttgttgctgcaggaattcacagcccggcctgatatagcagatgattgttttttgttggcctcaaggtgtattcgctactgtcctcaactgtttattccctcgtctgttaatccttcattagtggattgctctatgattgggatcacagtacagcataaggaggcttcgaattccatattgcatttcttggctgacatttttgatcttgcgaattcctctgtgggggagcaatttataccaataagagatagtgtaataattcctcgaggggccagtatcaccagaatgttaggtgcttcattaacgggagcacttgctaaatctcgagtggatgtggaatcttatacactcctggcattaactcgatcatatgggatgcaagcgctggaatgggc

SEQ ID NO: 15949 - DNA, 280 bp, Glycine max
  unsure at all n locations
  Clone ID: LIB3094-009-Q1-K1-H6
ggcggcgctgtggcggacgcgccggcggtggttgaggagaagacggagttcgacgtggggatcgaggaggtgccgagcaacgctcgaatcgcggtgattaaggcggtgatggcattgactaacctagcgctgatngaggctaaggagttgatcgaatggttgccgaagaagttcaaggaaggggatttcaaaggacgaagctgtagatgcgaagaagcaactctaagaagcttgtgccatggttaccattgcttaaacactgtttagctgcagcatatat

SEQ ID NO: 15950 - DNA, 403 bp, Glycine max
  unsure at all n locations
  Clone ID: LIB3094-009-Q1-K1-H7
acgcccacgcgtccggccacgcgtccggaagaaaggaatataccttacggatggtggaatcgggaancgattgagattgcgatagtgcgggtggtgacgaagatggaagactgagagagtgatggagagaaaaatcttcgctttatgtcaatggcacgaagcagggggttttacagaagtgagcagcgacgccagatatgagaaaagtgagtttatttggggagatatttgtaaaaagtggttttggaagtatacgctctaattcaagagtgaagaaacaagggtgggatagaaagatagatagtacaatttggggctagtgatggattgccctttggcctcatattctaaaggagaatattttttaaatatataaaagtggggtgatatgtttacttaaaaa

SEQ ID NO: 15951 - DNA, 361 bp, Glycine max
  Clone ID: LIB3094-009-Q1-K1-H9
tctcctttacgagcctttctttcagtccattgattcgtgggtgcagatgggcgggaccatctagagcctgatcggcgtcgcacaccgccggagaacaagatgattgctgcgtcgccgtcgtcggtcaccagaacaatccgctgtacatacagagcttcacggacgccgatgatgctctcaagctccaccacattgtccattgctcgctccatgtggtcgacgagcgagtgaacaatcctaaaaagtctgggccgatgcttaatgagacgtttttgggactgctttatcctattgaaaactaccaagtatatggatatctgacttatacgaatgtgaaatttatcttggtgaccaccgatct

SEQ ID NO: 15952 - DNA, 367 bp, Glycine max
  Clone ID: LIB3094-010-Q1-K1-A1
gcttttctcatgtttaatttatgcgatcagcttccgggtggagacttgatattagaaacccttgcaaatatgccaaacttaagagagtcacatcatgaaaatgatttcaagggtggaagtggaatgtattctatatcagccttggacatggtttctaacttgggatttgtatttggagcaagttcaaacaactcaaatgagagtaggattgctgtgggtgaaatatctgttggagaaatgactgaattggaaagagcggttaaagaatctaagaacaatcataaaaaggtcatatctgcacaagccacagttgatggtgttaaagttgatggtattgacactaaattggctgtcatgaaagagttac

SEQ ID NO: 15953 - DNA, 406 bp, Glycine max
  unsure at all n locations
  Clone ID: LIB3094-010-Q1-K1-A10
gcttcctcctcttacgagcctttcctttcagtccattgattcggtgggtgcgggtgcagcgaaaccgagctagaccctgatcggcgtcggcacaccgccggagaacaagatgattgtctgcgtcgccgtcgtcggtcaccagaacaatccgctgtacatacagagcttcacggaggccgatgatgctctcaagctccaccacatcgtccattgctcgctcgatgtggtcgacgagcgagtgaacaatcctaaaaagtctgggccgatgcttaatgagacgtttttgggactgctntatcctattgaaaactacaaagtatatggatatctgactaatacgaaggtgaaatttatcttggtgaccacggatctggatgttaaagatgcngatgtaagggaatttttc

SEQ ID NO: 15954 - DNA, 408 bp, Glycine max
  Clone ID: LIB3094-010-Q1-K1-A11
tgcgtctgcttgctgatacgagcctttcctgtatgctattgattcggtgggtgcgggtgcaggtagggccgagctagaccctgatcggcgtcggcacaccgccggagaacaagatgattgtctgcgtcgccgtcgtcggtcaccagaacaatccgctgtacatacagagcttcacggaggccgatgatgctctcaagctccaccacatcgttcattgctcgctcgatgtggtcgacgagcgagtgaacaatcctaaaaagtctgggccgatgcttaatgagacgtttttgggactgctttatcctattgaaaactacaaagtatatggatatctgacttatacgaaggtgaaatttatcttggtgaccacggatctggattgtaaagatgcggatgttaggaattttt

SEQ ID NO: 15955 - DNA, 277 bp, Glycine max
  unsure at all n locations
  Clone ID: LIB3094-010-Q1-K1-A3
gccatgcgtccgtcaaaaccgaaaagaagaataacgctgaaatccccaaaatcgaaaagaagaggaccaatagcgctgaaatccctctaaccgatggcaaaacgaagagggatagagaaatcgccaaagaggagaacaagaagaagactaagaaacccaagctcagcaatggcacttcanaacagcgagacgagggatccataaagggagtagcagaaggaaaaggagaagaggggaaaatgaacgtgtttccgatgaatcgcatcagaacgatgat

SEQ ID NO: 15956 - DNA, 317 bp, Glycine max
  Clone ID: LIB3094-010-Q1-K1-A4
cggacgcgtgggttatcctaagtctttgggaatagtgctgcaatggcttcaagtcaggaggaggtgacccttttgggagctactggaagcccatttgtgtgcagggttcatattgccctcaagttgaagggagttcaatacaaatatgtcgaagaaaatttgaggaacaagagtgaactgcttctcaaatccaacccagttcacaagaaggttccagtgtttattcacaatgagaagcccatagcagagtctcttgtgattgttgaatacattgatgagacatggaagaacaaactcatcttgccttctgatcctta

SEQ ID NO: 15957 - DNA, 269 bp, Glycine max
  Clone ID: LIB3094-010-Q1-K1-A5
gcgtccggtctcatacgctgaactgaaaaggaccgtcttttatgacttgcacgcagacaatggagaggagatggttccgttagatggatggagaatgccattccaatacgaggactcagattagagactgctgcccttagctgtaggagagaatggcagcacaatatgacgttgacgatatgagcggtctaatcctccaagggaacgactctgacacgatgattgcgaagctcagtatcgctgacgatgctagtcttgactctgtaact

SEQ ID NO: 15958 - DNA, 435 bp, Glycine max
  unsure at all n locations
  Clone ID: LIB3094-010-Q1-K1-A6
agaaagagaaaaatcaaaggacggtggtgagtgctgcttctgcttcatcatcatcagagaagaggggcggctactgtgtcttctgcgtggtcaaagcccggcgcgtgggctctcgattccgaggaacacgaagccgaactccttcaacagaacaacgacaagccactcgccgacttcccctccctcgccgccgccgctgccaagcccaagaagaagaaggcccagacctactccctcgccgaattcaccgccaaacccgacacctcctttgccgaccaagatcccgtcgtcctccccaccggcccccgccagcgcaccgccgaggagctcgaccgcacccgcctcggtggcggcttccgcaactacggcgtaccgcccaacaggaacaactncggcggcggcgacgagtcttccaattcccgctggggttcatct

SEQ ID NO: 15959 - DNA, 346 bp, Glycine max
  Clone ID: LIB3094-010-Q1-K1-A9
cgcaaattcaaaggaggatctctcttgcgttttctctaggttttcgctatggcgtcgaagcgaattttgaaggagcttaaggatttgcagaaggatcctccaacatcttgcagtgccggtcctgttgttgctgaagatatgttccattggcaagctacaattatgggtcctccagacagtccctatgcaggaggtgttttcctagtgaccattcatttccctccagattatccctttaagccacccaaggttgcattcaggacaaaggttttccacccaaatataaatagcaatggaagcatttgccttgatatattgaaggagcagtggagccctgctctaacca

SEQ ID NO: 15960 - DNA, 112 bp, Glycine max
  Clone ID: LIB3094-010-Q1-K1-B1
attcagtacaatagctatagctactacatattttactactacaggagttcttgccgcaaccgaggccgctgcttcatgctatcaatcactcgcttaccataatcatccacga

SEQ ID NO: 15961 - DNA, 417 bp, Glycine max
  unsure at all n locations
  Clone ID: LIB3094-010-Q1-K1-B10
cccacgcgtccgcccacgcgtccgctcgctttatcttcccttcccttcatctccgcttcagaaagaatatcctcctctctatctctgttcgaaacaagtccaacaccagcaacacactgcttcaatctcaatcgggcacattgagaaatggttttgagtaatgggaaaactgaggcaccattgccaagtagtaatgggggaggtgctgagattgataacaatgagaagaagcccttcaagatcttcgtagggtatgaccctcgcgaagatcttgcctatgaggtatgtcgccactccatcttgaaaaggtcttcaatccctgttgagatcataccaattaagcagtcagatctgaggaaaagtggtttgtattggcgtgagaggggccagtttgagagcactgagttctncttttca

SEQ ID NO: 15962 - DNA, 422 bp, Glycine max
  Clone ID: LIB3094-010-Q1-K1-B11
gcccgcgcgtccgcccacgcgtccgctcgctttattttcccttcccttcatctccgctgggaggaatatcctcctctctatctctgttcgaaacaagtccaacaccagcaacacactgcttcaatctcaatcgggcacattgagaaatggttttgagtaatgggaaaactgaggcaccattgccaagtagtaatgggggaggtgctgagattgataacaatgagaagaagcccttcaagatcttcgtagggtatgaccctcgcgaagatcttgcctatgaggtatgtcgccactccatcttgaaaaggtcttcaatccctgttgagatcataccaattaagcagtcagatctgaggaaaagtgggttgtattggcgtgagaagggccaggttgagagccctgggttctccttttcaagattc

SEQ ID NO: 15963 - DNA, 365 bp, Glycine max
  Clone ID: LIB3094-009-Q1-K1-H10
tgcaaacatcacaatgaggctctctaattaagactcttacgaacaaattagagcgccgtttaaaccgaacacagggggcatctaatcggaaattattaacaccactgaagatacaatggtctccaccacctttaaggtcgatactataccaaatgcatttacctcatacgctagaaatacccagaatattaacatgcagacacttgtctctcagtattacaacacgtggtgatacatcacaactaccaataacctgattacactcacagaccagatacataaaatactctggactgttatactataaactacattacacatgctaagctaccttgcatctgccctcaaacaaagaatgtcatact

SEQ ID NO: 15964 - DNA, 439 bp, Glycine max
  Clone ID: LIB3094-009-Q1-K1-E11
cccacgcgtccgcccacgcgtccgcccacgcgtccgcccacgcgtccgtctcgctctgtctcgtcactagctctgtgcattcttctctcgctctctgccttccatcacactcggcatttcctttcccaagatagtagaagatggcagacactgaggatattcaacctcttgtttgtgacaatggaacaggaatggttaaggctggatttgctggagatgatgccccacgtgctgtgtttcccagcattgtaggtcgtcctcgtcacactggtgtgatggttggcatgggccaaaaagatgcatatgttggtgatgaggcacaatctaagaggggtattttgactctcaagtaccccattgaacatggaattgtgagcaattgggatgatatggaaaagatttggcatcataccttctataatgagcttcgtgttgcccc

SEQ ID NO: 15965 - DNA, 439 bp, Glycine max
  Clone ID: LIB3094-009-Q1-K1-E12
cccacgcgtccgcccacgcgtccgcccacgcgtccgcccacgcgtccgtctggctctgtctcgtcactagctctgtgcattcttctctcgctctctgccttccatcacactcggcatttcctttcccaagatagtagaagatggcacacactgaggatattcaacctcttgtttgtgacaatggaacaggaatggttaacgctggatttgctggagatgatgccccacgtgctgtgtttcccagcattgtaagtcgtcctcgtcacactggtgtgatcgttggcatgggccaaaaagatgcatatgttggtgatgaggcacaatctaagacgggtattttgactctcaagtaccccattgaacatggaattgtgagcaattgacatgatatggaaaagatttggcatcataccttctataatgagcttcatgttgcccc

SEQ ID NO: 15966 - DNA, 400 bp, Glycine max
  Clone ID: LIB3094-009-Q1-K1-E3
ggaaaacgaccaaaacttcaactacaactcgcagcctcaggcttcgtacaaaggtgcaggtcttggtgctgctggagggataggtcagccactcgcgcttgtcatgaagatgtcgcctctagttgccgacctgcatctctatgatattgcgaatgtcaagggagttgctgctgatatcagtcactgcaacatcgcctcacaagtcagggattgcactggagcttctatgatggcgaattgttttgaggatgtgaatgttgttgtcataccctccggtgttccaaggaagcctggcatgactcgtgatgacctttgtaacatcaatgccggcgtagtcagggacttggtttctgctgttgcggataatagccctgatgcttttattcaaatcatcagtaac

SEQ ID NO: 15967 - DNA, 388 bp, Glycine max
  Clone ID: LIB3094-009-Q1-K1-E4
agaaaaagaaaaatcaaaggacggtggtgagtgctgcttctgcttcatcatcatgagaggggaatggcggctactgtgtcttctgcgtggtcaaagcccggcgcgtgggctctcgattccgaggaacacgaagccgaactccttcaacagaacaacgacaagccactcgcctacttcccctccctcgccgacgccgctgccaagcccaagatgaagtaggcccagactctactccctcgccgaattcaccggcaaacccgacacctcctttgccgaccaagatcctgtcgtcctccccaccggcccttggcagcgcactgtcgaggagctcgaccgcacccgcctcgttggcggctttcgcaactacggcgaccgccccaacaggaac

SEQ ID NO: 15968 - DNA, 447 bp, Glycine max
  Clone ID: LIB3094-009-Q1-K1-E6
cccacgcgtccgcccagcgtccgaattcctcaaccacacttgccatatcaaagaaaagagcatgaacatcagatcaaagatacaacatggaggcacttcaatcatgggtttcaaagcacaagctcgccagcattggggcactctgggcctctggaattggagcaacacttgtggcttattcatgcaaaaagtctccaatgaagccaagtctcaggcttatgcatgctaggatgcatgctcaggctctaactttagcagtgctatccggtgcagctgcttatcattattatgagaaacgtgatgttcaaccaaaaccagaggcagattatattattcctgctcccaatgtcacccagatggttgaatatgaacttcaatgtccctttctaaaattaaaaataaaactgtaggggtcatggtattaagattaggagatattcctatcat

SEQ ID NO: 15969 - DNA, 431 bp, Glycine max
  unsure at all n locations
  Clone ID: LIB3094-009-Q1-K1-E7
cccttatctttctctattctctctccccgcccaaaccctaactccctaccctattccgcgttctctcatccatcatgaaaggaggaaagtccaagaccgaatctaatagagccgatgccaaacttgctgcgaataagaagggcgccgccaccaagactaggaaacccgccggaaaggggaaggcagcgaaagatcctaacaagccaaagaggcctcctagtgctttcttcgatttcatgtaattataatatattgttatctctacgattcatttgacttccgattcgctctcttatctttcctccgaataattgtatcgtcaaaacttttatccttggccaattgtaagtccacgcgttctttacctgttgttgtttggttacctcgattgctttattgttaaaattatgatntttgagtatgctagatct

SEQ ID NO: 15970 - DNA, 441 bp, Glycine max
  unsure at all n locations
  Clone ID: LIB3094-009-Q1-K1-F12
cggacgcgtgggcagacttcccattccaatttccaagtttttcaaagaaggtgagtggtgagcatggagcatttgccaggagaattggtgtccaacgtgctctcaaggttaccatcgaaggtgttgcttctatgcaagtgcgtgtgcaagtcctggttcgatctcataaccgatcctcattttgtttccaattactatgttgtctacaacagtcttcaaagccaagaggagcatctcttggtaattcgaagaccctttttttctggcctcaaaacttacatttctgttctttcttggaacaccaatgaccccaaaaagcatgtttcttctgatgttctaaaccctccctatgaatacaactctgaccacaaatactggaccgaaatcttgggtccttgcaatggcatatactttntagaaggcaatcctaatgtcttgatg

SEQ ID NO: 15971 - DNA, 433 bp, Glycine max
  Clone ID: LIB3094-009-Q1-K1-F3
cccacgcgtccgcccacgcgtccgattttttgaacaaaaatcctaaaccaaccgcttcttgctacgtctccattcacagttgctgttcctcccggtcgttggttgcacaaactgagcctcaatccaatacgatctaatctgataaaatagtaaggatacttataactgtttagccttggtatggtatttcatcatatgggtgtgtttaagtttgcatctttcaccggataaacttgaagaattaaccatgctctagtcaaaacttggtttgctcaaaatatgataacttgggctgcttaaagagattggcttgatccgtcacacctgcaaaattgaatggcaccctcaatttgttttcttcttctatcccttctgttcctttcatcctccacaagtggtactgatgaagagggtttcatctttgggatcatat

SEQ ID NO: 15972 - DNA, 445 bp, Glycine max
  Clone ID: LIB3094-009-Q1-K1-F9
cggacgcgtgggctgagaaaccctccactctcgagtccaaactctcctcctagccaagatggatgcaagggcatcatcttcttcagcttcctcgattcttttccttgcagcaattgtagctgcttatttctattcatcagaagcagctgtgtccaaaggatcttttgaggacaatttcagcataatgtggtctgaggaccattttactacctctaaagatggacagatctggtatctctcactagacaaagacacaggatgtggatttcaaacaaaacaacgctacagatttgggtggttcagtatgaagctgaagttggtagcaggtgactctgctggtgttgtgacagcttattatatgtgctcagaaaatggtgcgggaccagaaagagatgagcttgattttgagtttttggggaacagaacaggagagccttatttgatt

SEQ ID NO: 15973 - DNA, 442 bp, Glycine max
  Clone ID: LIB3094-009-Q1-K1-G10
cattctcctctctgaattcctcttattcaggaatttggagagtattgatatatcaaggtaggataaaccagtagccaaggaagatatggagttttctatgattttcattgttagcaacattatgctgcttttcagttcagcatttgccaaaactgctagtcctccctctctgagcccaactccagcaccagccccggcaccagacttcgtgaacctcactgagttactcagtgttgctggtccgtttcacaccttccttggataccttgagtccactaaagtgattgacactttccaaaaccaagccaacaacactgaagaaggaattaccatctttgttcctaaggacagtgccttcaatgctataaagaaaactaccctatccaacctcacctctaaccagctaaagcaagtgatcctcttccatgccttgccacatttc

SEQ ID NO: 15974 - DNA, 377 bp, Glycine max
  Clone ID: LIB3094-009-Q1-K1-G11
gcttcctcctcttacgagcctttcctttcagtccattgattcggtgggtgcgggtgcggcggggccgagctagaggctgatcggcgtcggcacaccgccggagaacaagatgattgtctgcgtcgccgtcgtcggtcaccagaacaatccgctgtacatacagagcttcacggaggccgatgatgctctcaagctccaccacatcgtccattgctcgctcgatgtggtcgacgagcgagtgaacaatcctaaaaagtctgggccgatgcttaatgagacgtttttgggactgctttatcctattgaaaactacaaagtatatggatatctgactaatacgaatgtgaaatttatcttggtgaccacggatctggatg

SEQ ID NO: 15975 - DNA, 425 bp, Glycine max
  Clone ID: LIB3094-009-Q1-K1-G12
tttgaatacattccttgtagtttatactgaaagatgggtttgaagatggcgtgactggtcctaggcctttccctgatgctccttttggtctcctctgaggtggcatccacgaatacaaaagaggaggcaaatggagtggatgatgccaaatatcccggtggaagctatggagggggttacccaggtcatggcggtggcggttatcctggccatggcggtggcggttatcctggccatggcggtggtggtggctatcctggtcatggtggtggccaccctggtcatggtggcggctaccctggccgtggtggtggatactgtacgcatggctgttgcggtggccggacatacaacggaggttgcagaaggtgctgctataacgctggcgaagctgttgctgcacaaactcaagaatagactcacga

SEQ ID NO: 15976 - DNA, 284 bp, Glycine max
  Clone ID: LIB3094-009-Q1-K1-G4
acgcggccgctctgctgcggaggctgctgcttcacccatccacaaacgatcacacactttgagtgaggatggggcgtgttctcacaaagacagtgaagaagacctcgcgtgaagtgatggagaggtactactctcgcatgactctggacttccacacgaacaagaaggttctggaagaggttgccgtcattccctccaagaggcttcgcaacaagatcgcgggatattccacccacctgatgaatcggatccctaatgggtccgtacgtggaatctcccttaag

SEQ ID NO: 15977 - DNA, 309 bp, Glycine max
  Clone ID: LIB3094-009-Q1-K1-G6
cccacgcgtccgattgaatatccatggttctcttagttcttttatccattaaaaaactgtagaggaatatttctaagaagaactatagtagttgaaagatatcttttgcaaatatgcatatttaactgaggttgttataacttgttccttccctcaaaaaaaaataatgtagaaagaaaatgaacctattagcctccttcattggatatattacatctataatggagtaattttaccggttcagagaataaaaatataatcaaaataaaagtcagcagtcttacatctctaattttggtgacagattca

SEQ ID NO: 15978 - DNA, 441 bp, Glycine max
  unsure at all n locations
  Clone ID: LIB3094-009-Q1-K1-G9
cggacgcgtgggcagacttcccattccaatttccaagtttttcaaagaaggtgagtggtgagcatggagcatttgccaggagaattggtgtccaacgtgctctcaaggttaccatcgaaggtgttgcttctatgcaagtgcgtgtgcaagtcctggttcgatctcataaccgatcctcattttgtttccaattactatgttgtctacaacagtcttcaaagccaagaggagcatctcttggtaattcgaagaccctttttttctggcctcaaaacttacatttctgttctttcttggaacaccaatgaccccaaaaagcatgtttcttctgatgttctaaaccctccctatgaatacaactctgaccacaaatactggaccgaaatcttgngtccttgcaatggcatatactttttagaaggcaatcctaatgtcttgatg

SEQ ID NO: 15979 - DNA, 378 bp, Glycine max
  Clone ID: LIB3094-009-Q1-K1-D8
cacacacacacaaaacagaacacaacacatacacatacacatgttgttgatgagtgtaggcaacggaaaacacagatccatcacacacatgaacaattgatctttagcctttgagtataaagtgattctaatttttggcactaagagagccactcaaggctctgggatgtactatacgccattcggggttctgattttcggaggagagaaggttcatgagatccagtgggataaggtgcgataagtaattcattttccattatctccatttctagatcctttcattaactctgataggatccttcaatttcaagtcaatccgttgcgatatttcggagagagcatggctggttaaagttttgaaagaaacaaagtcgc

SEQ ID NO: 15980 - DNA, 294 bp, Glycine max
  Clone ID: LIB3094-009-Q1-K1-B11
cccacgcgtccgctctcctctctctttttctttctctttctctctctttcaggtttgtgtctctctcatgtttctctgtccggaagggcaaaccctaaagaccgtttgcacccaccaaggatcgtagtggcgttcagatcgtggggttttcgttttgcggcgattagatcgattgtcatggatgatgatgtgttgaacatgcccaattggggttattacgaacccttcagagggggacatcttggccttcagctcatgcctggtatgactgaacgggacacaaagccatttttt

SEQ ID NO: 15981 - DNA, 436 bp, Glycine max
  Clone ID: LIB3094-009-Q1-K1-B12
cccacgcgtccgctctcctctctcttcgtctttctctttctctctctttcagagttctgtctctctcatctttctctctccggaagggcaaaccctaaagaccgtttgcacccaccaaggatcgtagtggcgttcagatcgtggggttttcgttttgcggcgattagatcgattgtcatggatgatgatgtgttgaacatgcccaattggggttattacgaacccttcagagggggacatcttggccttcagctcatgcctggtatgactgaacgggacacaaagccatttttgcctggtcggatcctgctatgttaatgggtgctaatggaacttttcaccctcgagattgcgttgtttccgaggcaccaatgccattgaactatgtcagagatagtttgataaaccagagagataggttttttcatatgcagca

SEQ ID NO: 15982 - DNA, 355 bp, Glycine max
  Clone ID: LIB3094-009-Q1-K1-B3
cgcaccagtttcaccgcacgaatatcttgttgtttggagcgatccgagaaaaagtctgtgaacatgttggtttaccaggacctccttacaggtgatgagcttctctctgactccttccgttacaaggaaattgagaatggaatgctgtgggaagttgaggggaagtgggttgttaaaggagcagttgatgtagacattggtgcaaacccttctgctgagggtggatgataatatgagggagttgatgatgcagctgttaaggttggtgacattgttgacacattcagacttcaggagcaatccgcattctattagaagcagtttgttaccttcatgaataggtttatcaagaatt

SEQ ID NO: 15983 - DNA, 436 bp, Glycine max
  Clone ID: LIB3094-009-Q1-K1-B6
ctgagttgcaagattcacttcaaattatgcgtttcgctgatcggttcctcatcacatcagacgaggtcgcagatcatcgcaattccttgattatttccttttgttgatacgcggaatcgcgcacacggtgctggtgtgtgcactgaggtagaaagaagaagattgaattgtaaacagcgtgaattaccttcttggagctttcaagcctgcatgtaatgtcttgatcacgtttaatgatgggaagaaccggaagcaggttccgtttaaaaaagaaaatggtcaaatggtcacagtcccacttttccaaagtcaagaaaacattggtgggaagattacaatagaaccaatgcaagggaagaagattgatcacaatggtgtaaaagttgagctccttggacagatagagatgtattttgacagaggaaatttttatgac

SEQ ID NO: 15984 - DNA, 245 bp, Glycine max
  Clone ID: LIB3094-009-Q1-K1-B9
cacgcattcaatctcttttcctaattttttccttctatgttttaaatacctcccaaaccttctaggacgggtttatattaatagactttacaatcgtcacatcttcaccaataattaatttcccccacaccccttatatcttaaattgaaaacaacattaagttcacttttttatgaacctcataatataatttcttattttgcaccctattaaaatcatataacttaatttcttaattttttta

SEQ ID NO: 15985 - DNA, 441 bp, Glycine max
  unsure at all n locations
  Clone ID: LIB3094-009-Q1-K1-C10
cccacgcgtccgcggacgcgtgggggtttttgtggataagagtgagctataggggctgccaggagaccgggtttaattgctttgtttgatgttgacgggactcttacagctcccaggaaggtggtcacaccggaaatgttgacattcatgcaagaactacgaaaggttgtaacggttggagttgttgggggttctgaccttataaagatatcagagcaacttggcagcacagttaccaatgagtatgattacgtattttctgagaatggtcttgtggctcacaaggaaggaaagctcattggaactcagagcttgaagtcattccttggtgaagaaaagctcaaggagtttattaactttacacttcattatattgctgatttggacatccccattaagaggggaacatttatggagttccgtantgggatgctgaatgtc

SEQ ID NO: 15986 - DNA, 346 bp, Glycine max
  Clone ID: LIB3094-009-Q1-K1-C11
cccacgcgtccgctctcctctctcttcgtctttctctttctctctctttcaggtttcggtctctctcatctttctctctcccgaatggcaaaccctaaagaccgtttgcacccaccaaggatcgtagtggcgttcagatcgtggggttttcgttttgcggcgattagatcgattgtcatggatgatgatgtgttgaacatgcccaattggggttattacgaacccttcagagggggacatcttggccttcagctcatgcctggtatgactgaacgggacacatagccatttttgcctggtcgggatcctgctatgctaatgggtgctaatggaacttttcaccctc

SEQ ID NO: 15987 - DNA, 429 bp, Glycine max
  Clone ID: LIB3094-009-Q1-K1-C12
ccgacgcgtccgctctcctctctctttttctttctctttctctctctttcaggtttcgctctctctcatctttctctgtccggaatggcaaaccctaaagaccgtttgcacccaccaaggatcgtaatggcgttcagatcgtcgggtattcgttatgcagcgattagatcgattgtcatggatgatgatgtgttgaacatgcccaattggggttattacgaacccttcacagggggacatcttggccttcacctcatgcctggtatgactgaactggacacaaagccatttttgcctggtcggcatcctgctatgttaatgggtgctaatggaacttttcaccctcgagattgcatcgtttccgaggcaccaatgccattgaactatttcagagatagtaggataaaccagagagataggtttttcata

SEQ ID NO: 15988 - DNA, 376 bp, Glycine max
  Clone ID: LIB3094-009-Q1-K1-C2
ctgagttgcacgattcacttcaaattatgcgtttcgctgatcggttcctcatgggatcggacgacgtctcagatcatcgcaattccttgattatttccttttgttgatacgcggaatcgcgcacacggtgctggtgtgtgcactgaggtagaaagaagaacattgaattgtaaacagcatgaattaccttcttggagctttcaagcctgcatgtaatgtcttgatcacgtttaatgatgggaagaaccggaagcaggttccgtttaaaaaagaaaatggtcaaatggtcacagtcccactttttcgatgtcaagaaaacattggtgggaagattacaatagaacctatgcaagggaagaagattgatcacaatggt

SEQ ID NO: 15989 - DNA, 395 bp, Glycine max
  Clone ID: LIB3094-009-Q1-K1-C6
tcgggcggcgctgtggcggacgcgccggcggtggttgaggagaagacggagttcgacgtggggatcgaggaggtgccgagcaacgctcgaatcgcggtgattaaggcgtgtagggtattgactaacctagcgctgaaggaggcgaaggagttgatcgaagggttgccgaagaagttcaaggtagggatttcaaaggacgaatctgaagatgcgaagaatcaatttcgaagaagcttgttgcatgggtaccatttgttaaacactgtttagctgcagcatatatgttctgcttcttagtttgttggttgtagttgatttcaccatttcactgtaatttaatttccattttgtcaggaattcaatcttttatttgtaatgaggaaatatgagttctt

SEQ ID NO: 15990 - DNA, 282 bp, Glycine max
  unsure at all n locations
  Clone ID: LIB3094-009-Q1-K1-C7
cgcaccagnnacaccgcacgaatatcttgttgtttggagcgatccgagaaaaactctgtgaacaggttgttttaccatgacctccttacaggtgatgagcttctctctgactgctgttgttacaaggaaattgagaatggaatgctgtgttaagttgatgggaagtgggttgttaatggagcagttgatgtagacattggtgcaaacccttctgcatagggtggaggagaagaagagggagttgatgattgcactgttaaggttggtgacattgttgacaca

SEQ ID NO: 15991 - DNA, 440 bp, Glycine max
  Clone ID: LIB3094-009-Q1-K1-C8
cccacgcgtccgcgtttccaaatattcacataagagaagaacaatagttctctccctaggaactgatgatatgctagataagccatccttaggagcaatatatccgtactcttcaatttattagcagaaggtgtgttgcgtattagaccatagtctttttgtcattgttgtttcccaacaacgcagtttagcctttgagagcatcagcaatcacatggtgatcagaatatcattcagcaattgaagatcagtggcatcaggcataggctagcaagcaatgatatggctatcttcccagcaaatttcatgctacaaacacctgaccaagatgaccatcaacctgcaccttgactcaactcaattataacttcatgtgcacctcaagagtaccatggtggaagaacattctttcttgtgcagagatctatggcattttcagg

SEQ ID NO: 15992 - DNA, 264 bp, Glycine max
  Clone ID: LIB3094-009-Q1-K1-C9
cccacgccgtccgctctaccctgtctgctgtcttcttgtcgtataactactcactctataaagtgctgctatcacacatctttcaatctctttaattgataaccacaaaaatcttacacatccaacaaagatcgtcacaccgtacatatcgacattcattcaataactaccaatgatatcaactgttatagatgatgatggttctaacattatcaatatatcatatcacctacccttcacagttaccaatgagtatcattacct

SEQ ID NO: 15993 - DNA, 403 bp, Glycine max
  Clone ID: LIB3094-009-Q1-K1-D2
gcaaatacctagaatccttttataccttacgcaagcctgtggcatccactatagatacggtggcatgagcactttacaaggttttttgcgcatcacctgatccagcaatgaaggatatgcgccaagcttgcttcgattatcttagtcttggaggtctattctcggaagggccaatctctttgctttcaggattaaaccctcggcccttgagcctggttctccatttctttgctgttgcaatatatggggttggccgtttactgctaccatttccttcacctaaacggatgtggattggagttcgattgatttctagtgcatctggaatcatcttgccaataattaaggcagaaggagtccgtcagatgttcttccctgcaactgttccaacttactatagaaa

SEQ ID NO: 15994 - DNA, 428 bp, Glycine max
  unsure at all n locations
  Clone ID: LIB3094-009-Q1-K1-D4
cccacgcgtccgagaaggcctgggcttagttgataagcataactgggtgaggaagaaagaaagagagtgaagaagatggcgtcgagcggagcggtaccgttttggagggcggcgagtatgacgtacataacatactcaaacatatgcgcgaatctgctcaggaattgcctcaagtaaccctacaaggccgaatccgtctctcgtgagaagctccattttgttctcttcaaatgggtcgacgccaagcctgaaaaacctactattcgttcagacacctcatagcagtgatctggaatagttggaagctttaaatgcataaatcgttgagatctggaagttcattgtcattttgaacctttctgggatgtttaattcctttgttnttttctctccatgaaatggaacatgcacatggatttgatttgcac

SEQ ID NO: 15995 - DNA, 163 bp, Glycine max
  Clone ID: LIB3094-009-Q1-K1-D6
agcggcactgctccgtgccacgttcactgcataaactggcgagagaactctgcaaacaggatcggttatcatgacctccttacaggcgatgagctgctctcggactgcttccggcacaatgaaaattgagaatggaatgccgtgaaaagttgaggggaagtgg

SEQ ID NO: 15996 - DNA, 390 bp, Glycine max
  unsure at all n locations
  Clone ID: LIB3094-009-Q1-K1-A8
cttctccttctcaatcttgtaattctatttcctccaccataatgctgcgcaagcttgtgtgangggcacgcaagaacaagcctggcacagttcccgttcacctcaacgtctatgatctcaccccaatcaacggctatgcctattggcttggccttggagtctaccattctggggttcaagttcatggattggaatatgggtttggtgcgcacgagcacgacacaacggggattatcgaagtccaacccaaacactgccctgggttcactttcaagaaagtcaattttcatcggaacaacagatctggttcctaaggatggtcgagcattcatggagaagctggctcaagattactccggcaacacctatcatctcatttccaagaattgc

SEQ ID NO: 15997 - DNA, 469 bp, Glycine max
  Clone ID: LIB3094-008-Q1-K1-B12
cccacgcgtccggcgagcaccgcctacttcttgctctgttcatcgtctaccgcgctatattttcgaccagacctatgattaagctttttaaagtcatggaaaagcatagagaacttgcactaaatgcaagtggcggaccacctgttaagaagcatagagctggatagctgcgtcttcacatagatattagtgagctgcatctaccacaatcatgtgccatgcaattccccaatggcaaagatgatctgatgaacttcgaaggttcaattcgacctgatgatggatattacttaagtggcacattcatgctctgcttgcaagtgtgtcccatgtattcacacgaatcaccaaaggttcagtgtaagacatatggctatcatgcaaatattgacttggaaagcaatgttagtatcaacgtcttacgagaagattggaaacctgctcttaatatatacactgtcatctatgg

SEQ ID NO: 15998 - DNA, 525 bp, Glycine max
  Clone ID: LIB3094-008-Q1-K1-B9
cgcgtcgctgctccgtaccagtttcactgcataaatttgagagaaaactctgcaaacatgttgggttatcgggacctccttacaggtgatgagcttctctcggactccttccgttacaatgaaattgagaatggaatgctgtgggaagttgaggggaagtgggttgttaagggagcagttgatgttgacattggtgcaaacccttctgctgagggtggagaagatgagggagtcgatgacgcagctgttaaggttgttgacattgttgatacattcagacttcaggagcaacccgcttttgataagaaacagactgttaccttcatgaagaggtttatcaagaatttgactaccaagctcgatgcagagaaacaagagttgtttaagaagcacattgatggagcaactaaatacctgctctctaagattaaggatttccagttatctgttggggagagcatgaatgatgatgcttgcttgtactgtgcatactacaaggatggtgctgctgatcccacattctta

SEQ ID NO: 15999 - DNA, 376 bp, Glycine max
  Clone ID: LIB3094-008-Q1-K1-C10
ggcagacgcactcccttatccatttgcacactataccatggcctcaaccaacgctctctcttcagtgcatcatgctacgctctctcaaccgccagtctctgacccgaagagcgaaccatattggacgagtaaactaccgctaaccgaataaccggctcatcgtgaaagcctgcgacaaagagattgcactcgaccagcattcccgttctgatatgcatgcacggcattgacaagctcgacgacgctgctggtctcactcttgtgcccatatggaggaaagttgtgttggatgagtatggaagttctaaagcggtctacgatgacgtcaccattagtcacgcaatcgagcatgctgatcctatggagaatgctggtg

SEQ ID NO: 16000 - DNA, 354 bp, Glycine max
  Clone ID: LIB3094-008-Q1-K1-C11
atcaaacatccgatgatagacggacgcatggttcctgacagcataaaatgtggtggagggccaagacaagggacagctgcagcggttctatgaacatactgccagttacgccaacattgcgagattctctgctggaggcctcttgctgtttcagtgtcatatgctcgctatcgatacagtgattgtcttgacatagaaatcagagtcacgatatgcgctgcaggagcatcaacttattcaagacacatctttgtcactggtgcctacactgatgctacgacctgtggacctcgatataataccgaagctcttcaactcatggagactgatgccattgattagactgctgcctat

SEQ ID NO: 16001 - DNA, 480 bp, Glycine max
  Clone ID: LIB3094-008-Q1-K1-C12
cccacgcgtccggcgagaaccgcttacttcaacctgtgttcatcgtctaccgcgctatattttcaaccagagctatgattaagctttgtaaggtaatggagaagctgagagaacttgcagaaaatgcaagtggtggaccacctgttaagaatcatagtgctggagagttgcgtcttcacaaatatatagctgagctgcatctacgacaatcatgtgccatgcaattccccaatggcaaagatgatctgatgaacttcgaagtctcaattcgacctgatgatggatgttacttaagtggcacatttatgctctgcttgcaagtgtgtcccatgtattgacacgaatcaccaaatgttaagtgtaagacataggtctatcatgcaaatatcgatttggaaggaaacgtgtgtatcaacgtcttacgagacgattgcatacctgtccttaatagaaacactgtcatcgatggcttgtatcatc

SEQ ID NO: 16002 - DNA, 482 bp, Glycine max
  Clone ID: LIB3094-008-Q1-K1-C9
tccacgcgtgcgggcataaccaagattgaaggctctttacggaaagtctattagccgcttcagaattatcatgggttgttaaaagtccgacctaatgctttgtacgtatgctgccaaattcaaactcaaaaacggaaaatcgcatattttttgtaatttagtttgatttttggatttatatatatatatatatatatatatatatatatatgtgtgtcagttgagttttaaaattatgatattctctgtcattggtctcattatgactttttaatgatgtaagttgacaaatgtcgaaatttgatgccgcgttataaactgctaaatttaagataaatcaatgagaaagcatattagaaaatagcattatttcacttatgaaagtatctaattttattgagaataataaatatctatgatataaatatctatgtttagttgttattacactatgtatcttatctcacttatcgtcctatata

SEQ ID NO: 16003 - DNA, 355 bp, Glycine max
  Clone ID: LIB3094-008-Q1-K1-D11
aaaaaccgttctcgaccacaccatagttaaccacatctttaagcatacaaccacaatgtgacataggactggggatataaaccattttgaggctatatctgcacacttgattaaaggctgacgtaccttgtgactgatgcatggcgtgctaataccttacctgtgcgtcaaaacaactcccgaactattcacacttaaagatcgtagaccacacctacacaattttcccgacgcttacctcaaataaaagctggaggcgacttcgtgcattttcctatcatcgattacgcacttgtgagttcatgatagacctaccctcaaagggtattgttgcgacagttcttgcccttcagtc

SEQ ID NO: 16004 - DNA, 456 bp, Glycine max
  Clone ID: LIB3094-008-Q1-K1-D9
aaacacccttgtcgaccacaccaaaattaaaaacataaaaaagcataaaagcacaaaaagacataaaaaagggaaaataaaacattttgaagtcatatttgcacacttgattaaaggctgtcgtcccttgtgacggatgcgtggggtgctaataccttccctgtgcgtaaaaacaactcccgaactattcacacttaaagttcgtagaccacaccttttcaattttcccgacgctttcctcaaataaaagttggtggcgactccgcgcattttcctttcatggaagacgcacttgtgagtaccgcatcgccctcccgtcaaagggtaggttgcgacagtacttgccctcccgccaatggtaggttccttaattgaattaactaaatacataagtgaaactaaagctataataacttacaaatcaagctttgtcataaaatcacttaaaacattttg

SEQ ID NO: 16005 - DNA, 307 bp, Glycine max
  Clone ID: LIB3094-008-Q1-K1-E9
aaaaaccgtcggcactcacacgatagctacacacatattagagcgtacacgcacatgtagacgttgggcagggaagatttaacgtcttgaactcatattggcacacttgactcatggctggcgtcccttgtgacagatacctagtgtgcttatacccttgctgagcctaaaaacgcctctcgaactattgacacttaccgtatagagaccacaccttatcaataatggcgccgcttatctgagataaaagtcagtgcgtactacgcgcattgtcctatcatgaaagacccacttgtgagaaccgcat

SEQ ID NO: 16006 - DNA, 416 bp, Glycine max
  Clone ID: LIB3094-008-Q1-K1-F11
cccacgcgttcgaccacgcctgcgcttacgcgttcagcctcgcttgctgaggcacatagagtgagagtgaataagatggcgtcaaacatgccgagtctcgatcagaaggcttccgaaatgacctacatatccttctaagacatatgcgcgattgtgctcacgaatctgttccaggaactctacctggacgcattcatttctcgctagaagcattattacagcatgtccaactatgacgacgcacaacgtgatcaatctactattcggacttacgccacagagcatgcatctggaatacaatgcaactatttatgcctaagtatgtgagatcctgctgtctattgtcatataagacgtcattctgatgtaatagctctacagtcgaccattttctgtgacgcgtaacattcactaga

SEQ ID NO: 16007 - DNA, 114 bp, Glycine max; identical to SEQ ID NO: 13348
  Clone ID: LIB3094-008-Q1-K1-H11

SEQ ID NO: 16008 - DNA, 65 bp, Glycine max
  Clone ID: LIB3094-008-Q1-K1-H9
gacacacgatcgaacagcttcgagtagacgtcagtcttttactgcatctacatcgtaataacatg

SEQ ID NO: 16009 - DNA, 271 bp, Glycine max
  Clone ID: LIB3094-009-Q1-K1-A1
tccacacgttcgggctaagctcattctacatcagtgcaaacactctctctcatggcatgagataagaagattaggagcggcatcaacggatttgaaaggattgagcgctgggtggccactggtgcccttcaaaggaatgacgatgaacttgatgctgacaacaatcctttcatcaccactgattacatgacatacatgctcaagatcgacaccggtcatggccaggggaagcatttggatgggaatgtgaaggactctgagacccttctct

SEQ ID NO: 16010 - DNA, 344 bp, Glycine max
  Clone ID: LIB3094-009-Q1-K1-A10
agaaaacctaagcttataattagaaacaaagaacagaagaaaggaaagaattggtcggtgaaaatgcagggaggaaagaaagcgggagagtccattaaggaaacagctacaaacattggtgcttctgccaaggctggcatggtgaagaccaaggccactgtccaagagaaggcagaaagaatgacagcacgtgatccggtgcaaaaggagttggcaacccaaaagaaagaggcaaagatgaaccaggcggagctggacaagcatgcggcgcgtcagcataacacggcggtcaaacagtccgtcaccacggctgggcacatgggacatggccaccacaccaccgg

SEQ ID NO: 16011 - DNA, 264 bp, Glycine max
  unsure at all n locations
  Clone ID: LIB3094-009-Q1-K1-A11
agaaaaagaaaaatcaaaggacggtggtgagtgctgcttctgcttcatcatcggcagggaagaatggcggctactgtgtcttctgcgtggtcaaagcccggcgcgtgggctctcgattccgaggaacacgaagccgaactccttcaacagaacaacgacaagccactcgccgacttcccctccctcgccgccgccgctgccaagcccaagaagaagaaggcccagacctactccctcgccgaattcaccgncaaacccgacacc

SEQ ID NO: 16012 - DNA, 280 bp, Glycine max
  Clone ID: LIB3094-009-Q1-K1-A4
cttgctccgtcaaacccacgcccatttcattcttctcaattcccaattccaaatgaggggtagggttttcacaatctcaatgaccttctcttcttccttcactttacaatccctatttcactaccgctactactactccctttgtctttgtcgttgtcgttcgtaaggattaatcaattaacctatcgaatcgtgtcagtatcttcttcttctttttcttccatggacctctatcacccttagtctaacttgtccctcggattttcttgctcctacgctt

SEQ ID NO: 16013 - DNA, 518 bp, Glycine max
  unsure at all n locations
  Clone ID: LIB3094-008-Q1-K1-B11
cccacgcgtccgtcaagcattgcatccctcttgatttgtagtttgttttgtgctttagataaaagttctgccaaatcaagaggggttttaagatcatagtgtgtgttttgcaacaatggctaagttctttgctgctatgatcttggcactctttgccatttccatacttcaaacagtggtaatggctgctaatgaacaaggaggccacttgtatgacaacaagagcaaatatggaagtggaagtgtcaagagttaccaatgcccatcacaatgctcgaggagatgtagccagacccaataccacaagccctgcatgtttttctgtcagaagtgctgcacgacatgcctgtgtgtgcccccggagtattatggtaataaagctgtgtgcccttgctacaacaactggaagaccaaggaaggaggacccaagtgcccttgagcttcaacttgttcaacttcaattggcgctttcctacatttntatggcttcctttcttgtgccaaattaatgcactagc

SEQ ID NO: 16014 - DNA, 468 bp, Glycine max
  Clone ID: LIB3094-007-Q1-K1-G12
cccacgcgtccgaaaagagtaccaaacttttcaatctcgcacactgatatatgactgttgttggggcatatgtatatggtactgattcaacaatacagagaatggcttttgggttggaccatttccatttaagtgggtgcttggcctcagtcaccttgtcacccagccaaaatagaacacccactttttgtaccaatatgagttcctcattgaagtggggtttccgtactggtcaaaaatgttgtaacatactcgcatcttggtcctccctagcaatgcagtatcggttgtctgtatcctggaaatgctatgagaccggtttcacaagcaagatgatgaggcaagtccaatgctaacttgcatttctgtggtttatatacatgatgcagcatactcaagagtaaccttattggaattgagaattgattcaacgtttttctaactcaattaatggtgcaatgacgattt

SEQ ID NO: 16015 - DNA, 446 bp, Glycine max
  Clone ID: LIB3094-007-Q1-K1-G2
cccacgcgtccgcccacgcgtccgaaaaaaatgggttcttcttcttccatatgggccgtgtgtttgattttggcatcactggcctctgcagcactctgtgccaaccctcgtagaccagtggatgtacaatttggccgaaactacgtgcccacatgggcctttgatcacatcaaatacttcaatggaggttctgacattcagcttcatcttgacaagtacactggtactggcttccagtccaaagggtcatacttgtttggtcacttcagcatgtacataaagatggttcctggagattcagctggcacagtcactgctttctatttatcttcccaaaatgcggagcacgacgagatagactttgagttcttggggaacagaacaggacaaccttacattttgcaaacaaatgttttcacaggaggcaagggtgactgagagcaaag

SEQ ID NO: 16016 - DNA, 276 bp, Glycine max
  Clone ID: LIB3094-007-Q1-K1-G3
gtctgacatactgtgccgaaactgacagttctttatgaataccatgttgcccatggatgagagatggtgccaaccattgcatggagcatgcccatcgaatacattgactgactgatgtacacaatcttaacatgaagaaagaatgctaccctgatgcatagggctcatatgaaccagctaatcctcaatggaaacgactctgtacaaattgttgataagatggccactgtagctgctgctctgctggcacgcagaactgctttcattgatgcattc

SEQ ID NO: 16017 - DNA, 447 bp, Glycine max
  Clone ID: LIB3094-007-Q1-K1-G6
cccacgcgtccgcggacgcgtgggttgaaaacgacccgtttcctccctcgcacggatccagccgaaatctgagattccttcgaattgttaactctctttcagtttcaagttggaaactttttcgattttcgctttctggaggtgtgaattgttgtttgaaagtcacaagcaatggtgaaggacactgcgtattatgacatattaggtgtcaattatgatgcatctgctgcagagatcaagaaagcttattatgtcaaggctagaattgttcaccccgataaaaatcctgaggatcctaaggccgcagaaaactttcagaaacttggtgaggcttaccaggttttaagtgatcctgggaagcgtgcggcatatgatgagcatggaaaggagggagtaccacaagattccatgatggaccctacaactgtatttggaatgatttttgga

SEQ ID NO: 16018 - DNA, 406 bp, Glycine max
  Clone ID: LIB3094-007-Q1-K1-G7
tcggaagttgccagagtgaagaaatggcgcatgacttggcattggatctggaggagctttgtcgtatacagagaatcgcctaaagacctctggccctctctctactctgctccgaaatgtcgtaacctctgaaaagttatcgccagaggaagcttctgcgcagattccggtgccgatttcgaccggaactaaagaggcgccttcacctgcgctgaagtatgcggcactcacgtcgatcaggtgggaccacgatagcgacaaaggtacgatatatgcgttaatggagggaatctctgagaataacgatgaatccgagtgtaagtcgatgtcattcgatgctaatgtccatgatgctcaatggaagaactaccgatgtgcattatcccaattggacattgagatagtg

SEQ ID NO: 16019 - DNA, 58 bp, Glycine max
  Clone ID: LIB3094-007-Q1-K1-G8
ttcaatcgttctgcgactgcctagaacttgaacctatgaacgtagactactcgatctt

SEQ ID NO: 16020 - DNA, 382 bp, Glycine max
  Clone ID: LIB3094-007-Q1-K1-G9
catactcgtgtcgtttcctattatgcaccgtcaataatcaccggatatcaacatctgatccaactgttacatgttgacccaagtctaccgctttgcattgtgctgttgtaacctgctcatacaactgtaagtcgtgatctgtaaactgtgagtgcacaatacatcagatcgatgcgtgacaaatgattctctgttctgagctgatgattatagatcgatgaatgcaggtgccgtcatactcgacgattgcattacgctctactgtgtggtgatagatacctgactgaattccaaattctgctactatgactaatgcgtataacagacactgtaccaagaatcatagactgacagtcatagatcaatcgctcagtctgaaatg

SEQ ID NO: 16021 - DNA, 410 bp, Glycine max
  Clone ID: LIB3094-007-Q1-K1-H1
cgcaaattcaaaggaggatctctcttgcgttttctctagggtttcgctatggcgtctaagggaattttgaaggagcttaaggatttgcagaaggatcctccaacatcttgcagtgccggtcctgttgttgctgaagatatgttccattggcaagctacaattatgggtcctccagacagtccctatgcaggaggtgttttcctagtgaccattcatttccctccagattatccctttaagccacccaaggttgcattcaggacaaaggtttttcacccatatataaatagcaatggaagcatttgccttgatatattgaatgagcagtggaagccctgctctaaccatttccaaggtgttgctcttaaatttgtccctattgacggaaccaaattctgatgatcctttgg

SEQ ID NO: 16022 - DNA, 187 bp, Glycine max
  Clone ID: LIB3094-007-Q1-K1-H10
tcgctcacacgttctatctggaggtaatctgttctcatcgtgaagcctcattcagggaattgtgatctatacaatcaccaggggggggttcactacctgtccacgaaatccttgttgtggcgatcaatgtgcttcataaccagtattagccatgtgatgcttcactcaattcacacattgacacatg

SEQ ID NO: 16023 - DNA, 385 bp, Glycine max
  Clone ID: LIB3094-007-Q1-K1-H11
atccaagaggaagaagaggaagaagaagaaggggttgtggttcggaggaccagggttcggaagagcggcttggtgaagaagcttggggatgattttgacagggttgccctggaaaacgatgagtccaatacggtgtcgtcgttgaagacgactcgtggtcggaaattggttaagaatggtgaacttgggaacaaaacggtggttgaagtagctgaaaaatcaaacacctaaggaaagaatagtgcatgtgaagccgagaagagccctggggttagaacttcttccagattggctaaacgtgtgtccaatcaaacgtcttgtaattagatgtttgataaaattgtggttttccttttccttttattattggtcaattagccattct

SEQ ID NO: 16024 - DNA, 241 bp, Glycine max
  Clone ID: LIB3094-007-Q1-K1-H2
ttcgaacacatgcccagtcgtccatacagtgagactagtttgaacatgatgttggtgatcctatacactgagactcatgctcgaaatgctctcgattgtcactgctatccatcgaataccccactaggaggcactatggcattggatgatgccaaatatgtgaagcggaagctatggacccggttacccatgtacactggggcgccacatttatctgagcatgtcgtttccggccattaca

SEQ ID NO: 16025 - DNA, 397 bp, Glycine max
  unsure at all n locations
  Clone ID: LIB3094-007-Q1-K1-H6
aaaaacggctcatagttaatctctacagcggtacgatgaagtttgacgatttggcagagggatgcatggcaaatatactgggctacaccactcgtgcggatgtatgcaggctatctctggtttccaaagcctttcattccgcgattgatgccaacactgtgtggaacagctntctcccctctgagttggcctctatcatcttcccttgttcttccagcactccctttcgctctattaatgatctctatctctatatctacgatcgtaccaccatcatcgatcaaagcataaagagttttcaattgtagaagcgcacctgagacaagggctacatgctttccgcttgagaactgagcattatatggggtgacactactcattattgtgagtggacaac

SEQ ID NO: 16026 - DNA, 190 bp, Glycine max
  Clone ID: LIB3094-007-Q1-K1-H7
tgctcaagatcaagcgcgcagactgaatggccactgtgacgagcatcgtatctaatgattaaactcggcagttgtggaacatacgctcactgtgccgcatgacttggcagaggactagatccggcttctttggctgcattaccttcagaactctcaaggtttgacgtctgtgcccgacaggctttaaatc

SEQ ID NO: 16027 - DNA, 463 bp, Glycine max
  Clone ID: LIB3094-007-Q1-K1-H9
cgcacatcctctataaggagggaaactgagctcagtaagaagcctcctcgccggtctttagatggatacaagcacgtggttgatgtggaatactgtcccccagttccttctgatggccctaaatttcctgcaaaagcagtaaaagcaaaagaggcagcacaaaatgcgcccaatacacagaatactgtggaatatcatgaaattgtagaagatgagatgattcgaggattacagcagttgggatggaaaaaagttgatgtcagctttcactcagcattctggcctttctttgctcataacaacattcatgtgaaaaatgaatggtttcacaatgctggtgtaggagttattgctcatgtggccgaaagcttaagacagctagaagcatcatcatttttgtctgctagcttgtaactagtgtactagtatgtgattccactttgccgggaacatgcctaatgtt

SEQ ID NO: 16028 - DNA, 135 bp, Glycine max
  Clone ID: LIB3094-008-Q1-K1-A11
tccacacgtactccaatcatcgtattctccttgcactgtagactgtaccgtgcttcatatttggggcctgactaaacactagggggtgcaagagcatattactgcgttttgcaactcttactaaattctttgctg

SEQ ID NO: 16029 - DNA, 144 bp, Glycine max
  Clone ID: LIB3094-008-Q1-K1-A12
tccacgcgtacgtcaagcactgctttcttctttcactgtatatctgtttgtgctctatattatagtcctgggctatcactaagcgatttaagagcatattacctcaattgcaaccctcgttaaattctttgctgatctcatctg

SEQ ID NO: 16030 - DNA, 432 bp, Glycine max
  Clone ID: LIB3094-008-Q1-K1-B10
ggcagaatcactcccttatccatttacacaccacaccttggcctcaaccaacgctctctcttcagcctccattctacgctctcccaaccgccagtctctgacccgaagagcgaaccataatggaagagtaaattaccggaaaccgaataaccgtttctccgtgaaagcctccgccaaagagattgcctttgaccagcattcccgctctgctatgcatgccggcattgacaagctcgccgacgctgttgggctcactcttgggcccagagggaggaatgttgtgttggatgagtttggaagtcctaaagtggtcaacgatggtgtcaccattgctcgcgcaatcgagcttaccgatcctatggagaatgctggtgcagctcttatcagagaggttgctagcaagactaacgactctgcgggtgatgggactac

SEQ ID NO: 16031 - DNA, 439 bp, Glycine max
  Clone ID: LIB3094-007-Q1-K1-G11
gttgttttcgttcctctgaagtctggagtgtgtggagcttggttcgtttgaaatggtgcctgaagagcagggtgttgtggaaatggtcaggacagcatttggggaatccagtcctggacaggcaaaggtgtttccaaagatttttgggcatgagttaagcctgggggatacaaaatctcagtctataactattagtttctccccaaaggtggaagatgatccgggtttcacttcagactcctatgaagttcaagcactaggggtgaaccatgcttatggaaattcttccaatgggactttaggtgacggtaatgaaggaacattgtttcctcaattgaatcaaatgatggctgggaattttaatgctcaagcaagggtttcttgtctagatctcggtaatgaagactcatcatcaattcatgcagatgaacggaagccc

SEQ ID NO: 16032 - DNA, 295 bp, Glycine max
  Clone ID: LIB3094-007-Q1-K1-E3
gaatcaccgggccgatcgcacgcgttcgttcgcctatcaacaatgagtgcttgttggattagaaggatgtccgttgcttcatgaatcgggatgagtttgagcaactaagtcttccaattctggaacgtgtgaagggacctctggataaggcacttgctgaagcaggtcttaccgttgaaaatgtacacacagatgaggatgttggttcatgttcttgggtaccgtccattaacaaaatattgacagtatttttcaaaattgagcctatgcagacaatgaatgctagtgaatgtgt

SEQ ID NO: 16033 - DNA, 437 bp, Glycine max
  Clone ID: LIB3094-007-Q1-K1-E4
caaaacaatcaacaatagcttgctagctactcctgttgctgtgagaaccgttggggtagatgctttgcaagcgagatttagagactccaacaataaaagccatgcttaacacctaccatgcctccaaactctcatcaaaccagtgtggttctagccttgtgcaaacaatagatgcacctttacctctcgtatggtccctcataaggcgctttgagtatccacaagggtacaagctctttgtgaagaagtgcaaccttcttgatggggatggtggcattggaagcgtgcgtgaggtcatgatcacatctgggttacccgctggtgttagtgtggagaggttggacaagctcgatgatgacaagcatgtcttgaaagttatcatcattggtggtgatcacaggcttgtcaattatagttcaacgattactttgcatgat

SEQ ID NO: 16034 - DNA, 295 bp, Glycine max
  Clone ID: LIB3094-007-Q1-K1-E5
cggaacgaccgactcgacccacgcagtccgttcgaacacatgcacctgtcactcatactgaaagatgggttagaagatggcgtggctgatccgaggcctttaagtgatgctacttctggactactctgaggtggcatccacgaatacaaaagaggaggcatatggaatggatgatgccaaatatcccggtggaagctatggacggggttacccaggtcatggcgctggcggttatcctggccatggccgaggcggttatcctgtccatgacggagttggtggctatcctggacat

SEQ ID NO: 16035 - DNA, 261 bp, Glycine max
  Clone ID: LIB3094-007-Q1-K1-E6
cccacgctgttcggacgttctcagttcctgtgcagtcttgactggttgagctcggatcctttgaaatggtgcctgaagagcatcgtgttgtggcaatggccaggacaggatttgatagattcagtcctggacaggcgtaggtgtatccatagatttttggtcctgagttaagcctgggggattcataatctcaggctatagctattagttcatcgctaaatgtggctgatgatccggctatcacttcagactcatatgaat

SEQ ID NO: 16036 - DNA, 392 bp, Glycine max
  Clone ID: LIB3094-007-Q1-K1-E7
caaagacatccttctcctggatgtggctcctctcactctcggaattgaaactgttggtggagtcatgacaaagttgattcccagaaacactgttatcccaaccaagaaatctcaggtgttcaccacctatcacgaccagcagactacagtctccattcaggttttcgaaggccagaggagtctcacaaaggattgccgccttcttgggaaatttgatctgactggaattcctccagccccaaggggtacgccttagattgaagtgaccttcgaagttgatgccaacggcattctaaatgtgaaggcagaagacaagggcactggtaaatcagaacagatcaccattatcaacgaaaagggacgtcttatccaggaagaaattgagagaatgg

SEQ ID NO: 16037 - DNA, 295 bp, Glycine max
  Clone ID: LIB3094-007-Q1-K1-E8
ccacgcgtccgattgaatatccatggttctcttagttcttttatccattaaaaaactctagattaatatttctaaggagaactatagtagttgaaagatatcttttgcaaatatgcatatttaactgagggtgttataacttgttcctttcctcaaaaaaaaaaaaaaaagaaagaaaaagaacctattatcctccttcattggagatattacatctattatgaggagattctaccggctcatagaatagaaaaataatcaaaataaaagtcagcagtctcacatctctaatttt

SEQ ID NO: 16038 - DNA, 461 bp, Glycine max
  Clone ID: LIB3094-007-Q1-K1-F1
aaacacccttgtcgaccacaccaaaattaaaaacataaaaaagcataaaagcacaaaaagacataaaaaagggaaaataaaacattttgaagtcatatttgcacacttgattaaaggctgtcgtcccttgtgacggatgcgtggggtgctaataccttccctgtgcgtaaaaacaactcccgaactattcacacttaaagttcgtagaccacaccttttcaattttcccgacgctttcctcaaataaaagttggtggcgactccgcgcattttcctttcatggaagacgcacttgtgagtcccgcatcgccctcccgtcaaagggtaggttgcgacagtacttgccctcccgccgaagggtaagttccttaattgaattaactaataacaaaagtgaaactaaggctaaaataaactcacaaatcaagctttgtccataaaaatcacttaaaaaccatttt

SEQ ID NO: 16039 - DNA, 262 bp, Glycine max
  Clone ID: LIB3094-007-Q1-K1-F10
acccactcgtcctaaacacccttgttgaccacaccttaattaaaaacatatataagcatattagcggattaatacataaaataagggaaaataaaacattttgaattcatatttacacacttgattaaaagctttcttcccttgtgacagatgtctttatgtactaataccttccctgatcttaaaaacaactccctaactattcacacttaatactcttaaaccacacctttttaatttttccgactcttttctcaaataa

SEQ ID NO: 16040 - DNA, 463 bp, Glycine max
  Clone ID: LIB3094-007-Q1-K1-F12
aaacacccttgtcgaccacaccaaaattaaaaacataaaaaagcataaaagcacaaaaagacataaaaaagggaaaataaaacattttgaagtcatatttgcacacttgattaaaggctgtcgtcccttgtgacggatgcgtggggtgctaataccttccctgtgcgtaaaaacaactcccgaactattcacacttaaagttcgtagaccacaccttttcaattttcccgacgctttcctcaaataaaagttggtggcgactccgcgcattttcctttcatggaagacgcacttgtgagtcccgcatcgccctcccgtcaaagggtaggttgcgacagtacttgcccttccgccgaagggtaggttccttaattgaattaactaataacaaaagtgaaactaaggctaaaataaactcacaaatcaagctttgtccataaaaatcacttaaaaaccattttga

SEQ ID NO: 16041 - DNA, 327 bp, Glycine max
  Clone ID: LIB3094-007-Q1-K1-F2
taacttgctagagtgaataaatgttgcatgacttggcatatcgatttaggaagagcgttttcagactacacagggggggcaaaagacctcgaaccctctctcttctatcctacgaaattcttaacctcgaaaagttatcgtcagatgaagcttctgcgcagattccggctccgatttccaccggaactaaagtggctccttcacctgcgctgaattatgcggcactctcgtcactcaattgagaccaggatattgacaaaattaacatatatttgtctatggaggtaatccacgatgaataatgccgaatcctaatttaattccatg

SEQ ID NO: 16042 - DNA, 352 bp, Glycine max
  Clone ID: LIB3094-007-Q1-K1-F3
gttccaagaagtgttagagtggaaagaccttctgattaggtttttacaatttgccaattgggagttccttgatgtcagcactctacatgctgctctgccagattccactgctgttagaatcatctcaaattctcgtttgtatacacgtaaatcacttatctattagtaggattttaatgtatttcaaatatttgtataagtagaaatttctttctgtcatctggttttggttcaattatgtaggtggtttaacattcatagctgcatgaccaccaagttctcaaatactgtaaatagctgcaaaaaaatatatccaacaacaaaaataacacacataaattcgcattttaca

SEQ ID NO: 16043 - DNA, 461 bp, Glycine max
  Clone ID: LIB3094-007-Q1-K1-F4
cgcaccagtttcaccgcacgaatatcttgttgtttggagcgatccgagaaaaagtctgtaaacatgttggtttaccaggacctccttacaggtgatgagcttctctctgactccttccgttacaaggaaattgagaatggaatgctgtgggaagttgaggggaagtgggttgttaaaggagcagttgatgtagacattggtgcaaacccttctgctgagggtggaggagaagatgagggagttgatgatgcagctgttaaggttgttgacattgttgacacattcagacttcaggagcaacccgcattcgataagaagcagtttgttaccttcatgaagaggtttatcaagaatttgactcccaagctcgatgcagagcaacaggagttgtttaagaagcacatcgagggagcaactaaatacctgctctctaagattaaagatttccaattttttgttgg

SEQ ID NO: 16044 - DNA, 466 bp, Glycine max
  Clone ID: LIB3094-007-Q1-K1-F6
ttttatctttattccactgaatagaacatgagcatataaatggataccctttatattatggatctttatattatctataaagggtaaagatatccgatgtgaatctatttgtttagttttctatcggtatgtatataggtgaataatccaacatgcctttttgtgaagtaaaaaaactaccctcgatccatgcctcaaaagggttgataataagtaaaaaaaatcaatgaattcatgataaaacccttctgcgtttttttattataaatttttttgtcaataaagggatcaaggggttgggggatcaaatggtaaagttcttttgttggtaaattggaggattagaaacatgactattgctttccaattagctgtttttgcattaattgctatttcatttattttattgattagtgtacctgttgtatttgcttctcctgaaggttggtcgaataacataaatgtt

SEQ ID NO: 16045 - DNA, 387 bp, Glycine max
  Clone ID: LIB3094-007-Q1-K1-F7
cttatacttctcgatcttgtacttgtatgttgtccaccataatgctgagcacgcttgcgtgggggccacgcaagaacaagagctgtcacagttgccgatcaccttaacgactatgatctcacctcaatcaacggctatgcctattggcttggacatggagtctaccattctggggttcaagtgcatggattggaatatggataaggcgcgcacgagcacgactcaacggcgattttcgaattacaaccgaatcactgctctgaggtcaatttcagaaagtcaatggtcctctgtacaacagatctgggtccgaaagatgttcgagcattcatggaaaagctggctcatgattactgcggacacagctatcatctcatttccaagaat

SEQ ID NO: 16046 - DNA, 467 bp, Glycine max
  Clone ID: LIB3094-007-Q1-K1-F8
cccacgcgtccgagaaggcctgggcttagttgataagcataactgggtgaggaagaaagagagagagtgaagaagatggcgtcgagcggagcggtaccgttttggagggcggcggggatgacgtacataacatactcaaacatatgcgcgaatctgctcaggaattgcctcaaggaaccctacaaggccgaatccctctctcgtgagaagctccattttgttctctccaaatgggtcgacgccaagcctgaaaaacctactattcgttcagacaccccagagcagtgatctggaatagttggaagctataaatgcataaatctttgagatctggaagttcattgtcattttgaacctttctgtgatgtttaattcctttgtttttttctctccatgaaatggaacatgcactggattttgatttgcacggttaatcttggaataatacaagtttaaacgaatgattt

SEQ ID NO: 16047 - DNA, 455 bp, Glycine max
  Clone ID: LIB3094-007-Q1-K1-G10
ctcactcgtccggactgctcatgatgtatcgacaatgttacggtgcggtcaggaaaccatgatctgtctgatgaacaatggtggatacaccatcgaggttgaaactcatgatgtgccgtacaatgtgattaacaactgcaattactctgggttgattgatgcaatccacaatggtgaacggaaatactggactgccaaagcgcactgtgaaaaggagctagttgaagcaattgccacagtcacaggacccaagacagactgcttatgcttcattgatgtgattgttcataacgatgacaccagtaatgaagtgctagaatggggctacagggtttctgctgtcaatatccgtgcgtcaaatcctgagtgatcatgagaatatattctatgactaagttgctgcagatgcccattagctctatgaaagggagaatcatgttgaatgatgcccttgt

SEQ ID NO: 16048 - DNA, 369 bp, Glycine max
  Clone ID: LIB3094-007-Q1-K1-E2
gccacgcgtccgcccacgcgtccgtccacgcgtccggcgtcactctcactcagaccattgtgccgatggggttcttcaggccgctctttttctcgaaccgggcggcggcggcgcttgcggcggcactcgattgagttgtagaatgcgagtgatcggattccgaaatggcttctaacccttcgcttcttcctgagatcggacccgatggtctcgctaaagaagctcccgtcatcggctacaccgagaagatcatcgtagcataacagctttcaattgcataaatacatttcagaaaactattctaaaattcgcgatgtggagcgcgagcttgcaaatcttttactggagatgaaaccatcagctgggccg

SEQ ID NO: 16049 - DNA, 269 bp, Glycine max
  Clone ID: LIB3094-007-Q1-K1-C4
cacagtatgagcggacctgtatcatctaccctttaccttggatattcactactgatggccattgcattcatgtacgcaaaacgtcaccacaggctaacttatgctatcctacttcgtgcactacatggtcatatcaagtaagatacattgaggatcttgtggtcattgcatatgaactatgaaaaatgatgaaagatataacttgatcacattgcataatagggcaacagatgatcaatgaattgtctgatcttatattgcgatgggat

SEQ ID NO: 16050 - DNA, 377 bp, Glycine max
  Clone ID: LIB3094-007-Q1-K1-C5
tcccgaatcgaccgacgcatccacgcgtccgcgcaccagtttcatcgcactaatatcttgctgtttggagcgatccgagaaaaactctgcaggcatgttggtttaccaggacctccatacaggtgatgagctaatgtctgactccttccgttacaaggaaattgagaatggaatgctgtggcaagttgaggggaaacgcgcagttaaaggaacagttgctgtatacattggtgcaaacccttatgctgagggtggatgagaacatgaaggagttgatgatgcatatgttcaggttgatgacattgttgacacatttagacttcatgagcaacccggattctataagaaacagtttgttaccttcatgaagaggttta

SEQ ID NO: 16051 - DNA, 285 bp, Glycine max
  Clone ID: LIB3094-007-Q1-K1-C6
gccacgcgtacatcaaccattgcatccctgttgatttgtccgacgcaccgagctatacaggaatgctgtgacttgtcatgacgagctctatgatcatagggaacgtcttgcagcagtggctactttctccggtgcaataatctaggggctctttgccaatggcattcttgaaaccggtggaatggctgctactgagcatggaggccacttgtttgacaacaagagcatatatggtagcgatagtattgagatttaccaatgctcctcacaatgctctaggagatg

SEQ ID NO: 16052 - DNA, 431 bp, Glycine max
  Clone ID: LIB3094-007-Q1-K1-C7
cgcaccagtttcaccgcacgaatatcttgttgtttggagcgatccgagaaaaactctgtaggcatgttggtttaccaggacctccttacaggtgatgagcttctctctgactccttccgttacaaggaaattgagaatggaatgctgtgggaagttgaggggaagtgggttgttaaaggagcagttgatgtagacattggtgcaaacccttctgctgagggtggaggagaagatgagggagttgatgatgcagctgttaaggttgttgacattgttgacacattcagacttcaggagcaacccgcattcgataagaagcagtttgttaccttcatgaaaaggtttatcaagaatttgactcccaagctcgatgcatagcaacaggagttgtttaagaagcacatcgagggagcaactaaatacctgctctc

SEQ ID NO: 16053 - DNA, 262 bp, Glycine max
  Clone ID: LIB3094-007-Q1-K1-D1
cccacgcgtccgcacacgcgtacgtccacgcgtgcgcacacacagtcggatgcctctgtcgcggaagtaagatctgagcatgcaactctcgatctctggcttcaataacactcgccatatgatgctcgaagatagcagcagacggcagacactgacgatatgcgacctgaggatcgtgacagtggaccacgaatgggcactgctggatgagctgagagacaatccccacgagctgcgtggacgcagaacgaacgacgatctc

SEQ ID NO: 16054 - DNA, 198 bp, Glycine max
  Clone ID: LIB3094-007-Q1-K1-D11
ctgacgcgtggggtttcctagtatgcaaggtttagaatcagcatatttcaacgcgtgatccgcgagtaacatgttgacaaaggtctacctagttgcattttgttcttgtaacctactcaacccattgaaggtctggaccttaaaattttgattgatttatccatcaaatcttggaaaaataaataatttcttttccta

SEQ ID NO: 16055 - DNA, 118 bp, Glycine max
  Clone ID: LIB3094-007-Q1-K1-D12
tctgaaaataaaaaaaagccttttactttctttcttttgcatgatttgaatcttgatgtgaaaagcttcgaattggggtgttttacccatcaattcaattttaagccgtgccttcttc

SEQ ID NO: 16056 - DNA, 460 bp, Glycine max
  Clone ID: LIB3094-007-Q1-K1-D2
cccacgcgtccgcgaaaggtgacgttagtaagtaacaatggtggagaaggccaagggtaggaaggaggaggttgtcactcgagagtacaccatcaaccttcacaaacgcttgcatggctgcacatttaagaagaaggctcctaaagcaattaaggagataaggaagtttgctcagaaagcgatggggacgaatgatgtaagagtggatgtgaagctcaacaaggctgtgtggagccaggggatccggagcgtcccaaggaggattagggttcgcattgctcgcatgaggaacgacgatgaggatgcacaggaagagctctattcccttgttactgtcgtcgaaatccccaaggaggagctcaaaggtttggaaaccaaggttattgatgatgaagattgattatgtgttggttatatatcatgtattgtttttagttgatgtggatttgcgaatatcttt

SEQ ID NO: 16057 - DNA, 427 bp, Glycine max
  Clone ID: LIB3094-007-Q1-K1-D3
cgcaaattcaaaggaggatctctcttgcgttttctctaggttctcgctatggcgtcgaagcgaattttgaaggagcttaaggatttgcagaaggatcctccaacatcttgcagtgccggtcctgttgttgctgaagatatgttccattggcaagctacaattatgggtcctccagacagtccctatgcaagaggtgttttcctagtgaccattcatttccctgcagattatccctttaagccacccaaggttgcattcaggacataggttttccacccaggtatacatagcactggaagcattagccttgatatattgaaggagcagtggagccctgctctaaccatttccaaggtgttgctctcaatatgatccctattgacggatccaaatgctgatgatcctttggtccctgaaattgcacaca

SEQ ID NO: 16058 - DNA, 456 bp, Glycine max
  Clone ID: LIB3094-007-Q1-K1-D4
caccgtcacttttccttaacggcgaagctatcgccgaagggcacaaccgtcattggcactccaaaccgtttggtctatcctccactctccccatcccaataacaaagagaggaatcgaagtctgttccgttctgatcagaaagggaataacggtaacggagatatggggcttctgtctaacagagtaactagagagagcctgaaaccagtggatcacatctactcttggaggactgcttacatatacgctcatcacggcatttatgtcggcgatgacaaagtcattcacttcactagacatgggcaagaagtaggaaccggtactgcactagatcttctcctcatcagttcatgaccagccaagcctcgagaaagttgcccaacttgtacagcaccccaagaggaacacggtgttatctcctcatgcatgaactgctttctagctggtggcgttct

SEQ ID NO: 16059 - DNA, 429 bp, Glycine max
  Clone ID: LIB3094-007-Q1-K1-D6
acgtccacgcgtccgacaaatcttatccgccattgatctttcctcttccatttctcttactttggcatcctttttcgattgggcatttggttatttcgccctaatggctcttgctccatccaaagtttccaccttttctggtttttctcccaaacccagtgtttgtggtgctcataaaaacccaacttgctctgtttctctgatctttttgaatgataaacttgtaagcagaaaccttaaagtttgtgcctcaactgtgcctctcactggtgtgatttttgaaccgtttgatgatgttaataagagcgagcttgctgttccaactgctccccaagtcctcttgtctcctcagaactactcttattagtgtgaatctgctattaactagcttataaatgttttatacaatgcttcctactcttaccactc

SEQ ID NO: 16060 - DNA, 455 bp, Glycine max
  Clone ID: LIB3094-007-Q1-K1-D7
aaaatgaagagcaccatcttctttgctctctgtctcttttgtgccttcaccacctcatacgtaccttcagccatcgctgatttcgtgctcgataatgaaggtaaccctattgaaaatggtggcacatattatatcttgtcagacataacagcatttggcggaataagagcagccccaacgggaaatgaaagatgccctctcactgtggtgcaatctcgcaatgagctcgacaaagggattggaacaatcatctcgttcccatatcgaatccgctttatcgacgaacgccatcctttgagccttaagtgcgattcatttgcagttataatgctgtgtgctggaattcctaccgagtggtctgttgtggaagatctaccagaatgacctgctgataaaattggtgagaacaaagatgcaatggatggttggtttagacttgagagagtttctgacga

SEQ ID NO: 16061 - DNA, 322 bp, Glycine max
  Clone ID: LIB3094-007-Q1-K1-D8
cccacgcgtccgcccacgcgtccgcccacgcgtccggcgtcactctcactcagaccattttccgcattgggttcttcaaaccgctttttttctcgaaccgggcggcggcggcgcttgcggcggcactcgattgagttgtagaatgcgagtgatcggattccgaaatggcttcgaacccttcgcttctccctgagatcggacccgatggtctcgctaaagaagctcccgtcatcggctacaccgagaagatcatcgaagcagaacagcttcaattgcagaaatacattcaagaaaactattctaaaattcgtgatgtggaacg

SEQ ID NO: 16062 - DNA, 326 bp, Glycine max
  Clone ID: LIB3094-007-Q1-K1-E1
tttgaatacattccttgtagtttatactgaaagatgggttagaagatggcgcggctgatcctaggactttgcctgatgctccttttggtctactctgaggtggcatccacgaatacaaaagaggaggcatatggagtggatgatgccaaagatcccggtggaagctatggacggggttacccaggtcatggcggaggcggatatcctggccatggcggtggcggatatccttgccatggcggaggtggtggctatcctgatcatggtggtggccaccctggtcatggtggcggctaccctggccgtggtggcggatactgtacgca

SEQ ID NO: 16063 - DNA, 421 bp, Glycine max
  Clone ID: LIB3094-007-Q1-K1-E10
ttttgattttctggatccgtgtttttgagatgagtgtatgaatttaccgatggtttttcagatgaggttatcgttgaggcatgctttggtgtttgtgttaatcggggcgttgtggaacttgcaaagggcagagggtatccgatttgtgatagacagagacgagtgtttctcccatgatgtgaagtacgagggtgacactgttcatgtctctttcgttgttattaaggctgattctccctggcattactgcgactaatgtgtcgatctcgtggtaaagggaccttctggcgagcaaattcaagattttcgggactagaccagtgagaattttgactttgtggctcacatatcctgggtccataaattctgcttcaccaacaagtctccttatcatgaaactgtcgattttgatgtacatgtt

SEQ ID NO: 16064 - DNA, 460 bp, Glycine max
  Clone ID: LIB3094-007-Q1-K1-E11
tcggtttggtgtaactgcatgctctttgccattgttgatggagtttgcctttagagggttgagttgcccatatagttatacaatttcattttagggtcttgttgactagtgttcctagactattggttaaggaactaaaaggagaagtttttaatatgtaaatcataggaaagtataaaaaaaaatcatgaagaacgcaattttatgccttccaataaaaaaccttagttccttaacccgtgtcctcgggacacttgttagcatttgccttcattttatatgtatcattagattattataattgaaaaaaatagggcctactttttgacgtcattttattcattttattaggggtcatcaaatactttcacttggtggcagtgttagtcaaaattgtacacaatttgtattttgttcctccaacaaattttcttattctttgtaccaaaagagaaaagac

SEQ ID NO: 16065 - DNA, 460 bp, Glycine max
  Clone ID: LIB3094-007-Q1-K1-E12
gaggagatatatgtacctaaacgaagagatcttgaaagagaatccaaacatgtgtgcttacatggcaccttctttggatgctaggcaagacatggtggtggtagaggtaccaaagctagggaaagaggctgcagtaaaggccataaaggagtggggccagccaaagtcaaagattacccacttgatcttctgcaccaccagtggtgttgacatgcctggtgctgattaccaactgaccaaacaattgggccttcgcccctatgtgaagaggtatatgatgtaccaacaaggttgctttgcaggtggcacggttcttcgtttggccaaggatttggctgagaacaacaagggtgcacgtgtgcttgttgtctgttctgagatcactgcagtcacattccgtggaccaagtgacactcaccttgatagtcttgtgggccaaacattgtttggagatggagct

SEQ ID NO: 16066 - DNA, 458 bp, Glycine max
  Clone ID: LIB3094-007-Q1-K1-C3
cgcaccagtttcaccgcacgaatatcttgttgtttggagcgatccgagaaaaactctgtgaacatgttggtttaccaggacctccttacaggtgatgagcttctctctgactccttccgttacaaggaaattgagaatggaatgctgtgggaagttgaggggaagtgggttgttaaaggagcagttgatgtagacattggtgcaaacccttctgctgagggtggaggagaagatgagggagttgatgatgcagctgttaaggttgttgacattgttgacacattcagacttcaggagcaacccgcattcgataagaagcagtttgttaccttcatgaagaggtttatcaagaatttgactcccaagctcgatgcagagcaacaggagttgtttaagaagcacatcgagggagcaactaaatacctgctctctaagattaaagatttccaattttttgt

SEQ ID NO: 16067 - DNA, 353 bp, Glycine max
  Clone ID: LIB3094-006-Q1-K1-H8
cgtccatgaagacatatagtggaaagacctgctgattatgtttttacaatctgccaattgcaattcctatgtgtcagcactctacatgctgctctgccagattccactgctgttagaatcatctcaaattctcgtttgtatacacgtaaatcacttatctattactaggattataatgtatttcaaatatttgcataagtagaaatttctttctgtcaatctgttttggttcaattatgtacagtgttataacattcatagctgcatgatcaccaagctctcaaatactgttaatagctgcataatcatatattcaacaacaaaaattacaaaaataaattcgcattatacat

SEQ ID NO: 16068 - DNA, 440 bp, Glycine max
  Clone ID: LIB3094-007-Q1-K1-A10
cggacgcgtggggtttcctagtatgcaaggtaaagaatcagcaaatttcaaccccggatccacgagtaacatgttgacaaaagtctaccgagttgcattttgttcttgtaacctcctcaacccactggaggtcgtgatctgtaaattttgagtgaattatacaacaaattcttgaaaaagaaatgattttctcttctgagctgctgcttattgatcgatgaatccagctgcaattattttcgaagatggcaataaaatctcttctgcggtgttatctctttgactgaattccaaattttgtaagtataatagttggctatgaaagagactgtaccaagaagcatagtgtgagagtcagagatcagttgttaagtatgagatgtgagaacatttgttgaatgtatattgctaaatagaagtgcaaaagatgattatagatt

SEQ ID NO: 16069 - DNA, 461 bp, Glycine max
  Clone ID: LIB3094-007-Q1-K1-A12
cccacgcgtccgctcaatcccaaaggggtgtagcattgaattgggttgatgtgcaatgcagagatcacggaaagctcttctggaaagaagggctatacaggaggctacaagtgggaggaactatctgtataaagtttctctgtcgttggtttttgttttgtggggtctggtcttcctcttcagcttatgtataagccatggccatggttatggagatcatgaatctagagaagttccagttggtgtatcaaattggaatgaagatgaacacagacaatgtaaaaactctaattctgctgatgaatatttaactaaagagactgatgatgtctacattccttctgagactttctcctctgatggtgctaaaactgatggtttaatcagtgagtcactttccagtggagaaagcataaatcgtgtagaaccgggtgataaagaaagttccatttctcctgata

SEQ ID NO: 16070 - DNA, 52 bp, Glycine max
  Clone ID: LIB3094-007-Q1-K1-A2
cggacgcatgctgtcttctagtatacaatgtctcgaattggcatatttcatc

SEQ ID NO: 16071 - DNA, 134 bp, Glycine max
  Clone ID: LIB3094-007-Q1-K1-A3
acgctcaccagtttcaccgcacgaatatcttgttgattgaagcgatccgagaaaagctctgtggacatgttggtttacgaggatctccatacaggtgatgagctgctctctgactatcttccgttacaaggaaa

SEQ ID NO: 16072 - DNA, 359 bp, Glycine max
  Clone ID: LIB3094-007-Q1-K1-A4
acgcagaaactcacctcaccatggccgcatccattacattgtccaggctcgtctctggcaccgggaccactgcctcttgcgtccgacccataaccctgccttccaaactctcctctctccgactccctacccgccgccaccccaagccactcagattctcctcctccaccatcaccgtcaccatctccgtctgcgacaagctcccggaggccaccttctcctacctggactcgtacggcgaggtgcagacgacgactgtgtcggaactgacgatagggaagaaggcggagctgttcgcggtcctcggcgcttttacccccacgtgctcacaaaagctcgtgccgggcttcgtggagaaa

SEQ ID NO: 16073 - DNA, 249 bp, Glycine max
  Clone ID: LIB3094-007-Q1-K1-A6
gaagttgcgagagtgaagaaatggcgcaagacttggcattggatttggaggagcttcgccgactccacagcatcgccaaaagacctcgaaccctctctcttctctcctccgaaattcgtaacctcgaaaagttatcgtcagaggaagcttctgcgcagattccggcgccgatttcgaccggaactaaagtggcgccttcacctgcgctgaagtatgcggcactcgcgtcgttcagatgggaccaggata

SEQ ID NO: 16074 - DNA, 225 bp, Glycine max
  Clone ID: LIB3094-007-Q1-K1-A7
gaccaacgccaaagccgtccactatctctcttctgcatgatctgaatcctgaatgcatgagcgagatcttgcacggtcatacccgtcaatgcagttaccagccgggcctcatgcactgggaggtgatctgcgacgagcacggcatcgatcccacgggcgagcgcatctagggatgcaacattacgatcccactcgtgcggatcaatgtgtattacatcgaggcct

SEQ ID NO: 16075 - DNA, 271 bp, Glycine max
  Clone ID: LIB3094-007-Q1-K1-A8
cgcacgcgtggactgatacatcctgcgctctagactcctgacaccactattatgcaaagaggatgcactggcattatcttcgtcatgttagtgcatattactcctggcatcaacagcaggtggtgatctctattcatcagaagcatcggtggacacaagatctgttgaggacactttatggatgatgccgtctgaggaccattgtacttcctttgaagatggagcgatttgctattggtcactatacaccgactcacgatgtaggcctcaa

SEQ ID NO: 16076 - DNA, 233 bp, Glycine max
  Clone ID: LIB3094-007-Q1-K1-B1
cccacgcgtccgtccacgcgtccgcccactcgtccgcccacgcgtacgactagctctatctgcgcactagctctgagcatacttctctcgctatctgccttccatcacactcggcattacctttcccaagatagtagaagatggcagacactgaggatattcaacctcttgtttgtgacaatggaacaggaatggttaaggctggaatagctggagatgatgccccacgtgct

SEQ ID NO: 16077 - DNA, 390 bp, Glycine max
  Clone ID: LIB3094-007-Q1-K1-B12
cgcaatgctgctcctggcgctgcaaactttttgactgatatgatatttactggacaccatgataatgctgaatttgctctagcgatgttcccaactgaaccctatgttcttatcagaggataggacatatcattctagtagcgtagcattgtagaccatataacttctgctgtcacagacattaaatgttgatgatcaattatgacacttgtctctcaatctgtagaaagctgtgatcgaactgctgatgagcctactgttcgaccaccatggatttattgcacgcatgaagatacagttgcagatgcgacttattgcccatttagtgcacaggagttctagattgctgtatatgattcttgggttatattatggtatgcacgtgttggc

SEQ ID NO: 16078 - DNA, 446 bp, Glycine max
  Clone ID: LIB3094-007-Q1-K1-B2
cccacgcgtccggggttctcctctttgtccgctgtcgacggccggaaacaccacgttctggatttgcaggagatcgagacggttctcaccgacgttaaagctgacaacgttaaggttataccagttcccaagcactgcgattgggctgatttcatggtactcgccactggcaggtccacctggcacgtcaagaacatcgcccaagccctaatttacaaggctaagcagaaacagagaggagttgaacgaatgatgctaccaagtgtggaaggtcaagcaggaggaaagtggatcgtcattgactctggtaaagtgatagttcatgcacttgatgaaaaggctagagcttactacaatttggagggtctttggaccccagggacaattcataatgaacgtgaagaggatttacaaaaagcttttggtgaaggttcgtcggaaaaaca

SEQ ID NO: 16079 - DNA, 128 bp, Glycine max
  Clone ID: LIB3094-007-Q1-K1-B5
gacaaacgtctaaggattctatacatctctcttttatatgaacagcatcctgactgcaatagggtgcacttgcacgatcttagacgtcaatgcagatattaaacctggcttcagtagcaggatgttat

SEQ ID NO: 16080 - DNA, 315 bp, Glycine max
  Clone ID: LIB3094-007-Q1-K1-B6
ctcttctactttgagtcttcttgatccttcttatgctccttgaactcaaacatgtctgatgacgcgggtctactataattctggccaagatcatttgggatgacgtgtatgattgcacttgctgaaaagggtatcacatatgagttcaaagatataggacttgatgaacaagagtcctcttctcctacaaatgaacccggtacacaacaagatttacaatctcatccacaatggcaaacccattagagaatccctcattgctgctctttacatcgatgaagttctgaattgactgatatgtcttgttgccttttg

SEQ ID NO: 16081 - DNA, 138 bp, Glycine max
  Clone ID: LIB3094-007-Q1-K1-B7
gaagatgcgagtgccactgaatggaacatgaccatatatatggatacccggaacattatcgacttcactataatctataaaggcctcagaccctctatgtgaatttattcgaaatagcgtaaccatcgaaaaggtata

SEQ ID NO: 16082 - DNA, 347 bp, Glycine max
  Clone ID: LIB3094-007-Q1-K1-B8
ggcaccgaagaaatcagttataggcatattgcgagacaggaggtgcacaaacggattatctggacatgttcatgaaaaccacatggtcactaatatgcgacaggttcaagggataagacagtgaaaatctgggctcatagagagggagtctgtcaagcatcttatgtctttacctcaattgacgagtagcagtgacaccattatctccgatcggtctccatcatcggaagaataatggacttctagctgttcgaatggaaaaaggccaaatagagatgcggaatctgcctgataacacatcagatgatgggagcatatgaggaccaggtatggctgctcatcttgct

SEQ ID NO: 16083 - DNA, 293 bp, Glycine max
  Clone ID: LIB3094-007-Q1-K1-B9
aagccttccgccaagccttccgtttttcggcaattctggatccaatggaatcaccattatttccgtccaaggggcccctttccaggtcaaaggcctcccccgtaccttccaaaacctaccttaagaaggccggtccattccgtaggaccggttccttggtattaaaaggcctcccttcaagggtgttgaaatttcgactttcaaaacttgaaagcaccgttacccctaaaggtacctttgttggaatggtatttttacttgccagaaaatttgaggtaatttggccttctttt

SEQ ID NO: 16084 - DNA, 504 bp, Glycine max
  Clone ID: LIB3094-006-Q1-K1-H6
ggtctctaagtatcactatctctgcatagggcatcctcctttctctgtgactctgagtatcgtatcgccgtattatcattgctaattctctcttatcaggtccattgaatatgtctccgtcgttggatcttcctcccaagggtggcttcagttttgatctatgccgaagaaacgcagtgcttcaaaacaagggcctcaaagccccaacctttctcacaactggcaccactattgtccgtttagatttccaggatggtgtcattcttggcgctgatactagggcaactgaaggacctatactggctgatagaaactgtgagaatattcattatatggcacccaacatatattgctcgggagcaggcacagctgctgatacagaggctgtcacagacatgggtagctcacagctgcaattacatcgctaccatactggtcgagaatcaagagttgctacagcgctgacccttcttaagaaacacctgttcattatcacggcatgtc

SEQ ID NO: 16085 - DNA, 218 bp, Glycine max
  Clone ID: LIB3094-007-Q1-K1-C11
cgacccactcgtacgatttctactcaaacctacacccatttcatttttctcaattcccaatttcaaagtgaaatgggagattttcacaatcttaatgaccctctatttatacttcaccttacaatccctattccactacctctactacttactccctatgtcttctacgttgtcattcctaacgattaatctattaacctatcaaactagtctcataa

SEQ ID NO: 16086 - DNA, 298 bp, Glycine max
  Clone ID: LIB3094-007-Q1-K1-C12
acgcccacgcgtccgcccacttgttcgcccacgttctcgcggacgtcagatgttcggtgggctggtacctctgtgagggtgagtggtatggagacaggaacctactgttggtggaagaatcatgaccgtgtgatcatgagcgtgattaacggcccgggtgagtatctctttggagtagtctcatctatggctgttaggatcgttcttaggacacttacatgtgcctgggaatggtcatactcgttgtatgacagaccttatatgaatataagacataatagtattagagatattaaaa

SEQ ID NO: 16087 - DNA, 362 bp, Glycine max
  Clone ID: LIB3094-007-Q1-K1-C2
cccacgcgtccgcccacgcgtccgcccacgtgttcgtggacgcgtgggctttagcttggatgtaccaccctaactaccctgattctgatcagattccttactttgaggatggtgattctgtgacatacattaatgagaaggaggggatcattgagtgcttgaaaaggaatgtgggtggcgatttagatagtgaggattcttttctacgtgattggataccaaccaaagtgatgtgtcccacttggtttgctgatgcactttgagtatgaactgtgggtgtgatgtgatggttcctctgcttattgcatctattattctgatcattacctggtctattggcatggtgctcttttggatgaaag

SEQ ID NO: 16088 - DNA, 114 bp, Glycine max; identical to SEQ ID NO: 13348
  Clone ID: LIB3094-006-Q1-K1-F3

SEQ ID NO: 16089 - DNA, 507 bp, Glycine max
  Clone ID: LIB3094-006-Q1-K1-F4
atggctcccaaaccgcctagtacgggtctgtttgttggactgaacaagggtcacgtcgtcaccaagaaggggttgcctccacgcccctcagatcgtaaggggaaaacaagcaagagggtgcactttgtgaggaacctcataagagaggtagccggttttgcaccctatgaaaagcgtataactgagttgctgaaggttgggaaggataagagggcactgaaggttgcaaagagaaagctcggaacacacaaacgcgcaaagaagaagcgtgaggaaatgtccagtgttctcaggaagatgagggctggtggtgctggagacaagaagaaataagtcttatttactgatttccagattcactagatggacctgtgtattgattgacgagctttcatattcttgctttgggtcaattagtttacttcaagattttggttgagaaatatgttttgcttaactgagacatgatttatggaaaaagctagaattgattattttctggtttac

SEQ ID NO: 16090 - DNA, 343 bp, Glycine max
  Clone ID: LIB3094-006-Q1-K1-F5
gagaacactttcatcgactgctcagaccaccattgaaattgattctctatacgagggaattgatttctacgccactgttactcgtgccagatttgaggagctcaacatggatctcttcaggaaatgtatggagccggtggagaaatgtttgaaggatgctaagatggacaaaagaagtgttgatgatgttgtccattgtggtggttctaccagaattcccaaggttcaacaactgctgcaagacttctttaatggaaaagagctttgcaagagcattaatcccgatgaagcttgtgcatatggtgcggctggtcaggctgcaatcttaagtggtgaaggcaat

SEQ ID NO: 16091 - DNA, 177 bp, Glycine max
  Clone ID: LIB3094-006-Q1-K1-F7
tcgacctacacgtacgcgtacgcgtaatagccagctacgtccaacacattgcatgattcgaatcctgattgccacagcttcttatgggggcgtgaaacctatcaagtcaggaatatgccgatccttcattaatcataaccgtgtgatcaaaacaaaattaacgccactctaggactt

SEQ ID NO: 16092 - DNA, 340 bp, Glycine max
  Clone ID: LIB3094-006-Q1-K1-F8
acgatttgacaacatgcaaatatcctctggtagtgggtctctacctttctggatgcctcatatagcgacagcggaaaggcatattaagagcagaaggatgcagaactagcagtcactagaattttctggaaatggtagctcttatactatctgctgctagcacagttgccaatacttttgtcttactttttgttgctgaatggggctacaagtcatttttctccacaattgcccttgcaatatcttcttatacccttggagtcataactggagcactggctgttcatggtgtctcaacattgctagctgtacttgggggttctatacttgggacgaattt

SEQ ID NO: 16093 - DNA, 255 bp, Glycine max
  Clone ID: LIB3094-006-Q1-K1-G1
agcacgcgtacgtctaagcactggccaacacattcaaggactgttgttcttcaagcctcatgttattatgagtccttgagttctaaggagacaggaacctacgtctggtggatgaatcatgaccgtgtgatcagagcgtgaggcacggccctctatgagttcctatctggagtactcttatatgcgactgtataggatcgttcttaggacactaacatgagcctagtgatggtcatactagaagtctgacacagc

SEQ ID NO: 16094 - DNA, 453 bp, Glycine max
  Clone ID: LIB3094-006-Q1-K1-G10
cacctcccctctcctcgcgctgctcccctctccgcgtgctgctctcctctctgcgcgctcctccgttcgggcgaagacgaatgatttatagcatagacttgaattagagaaggaacacaagaaatcaacatccatggattcacagggccagacaacttcattgcagagacttcagaatgtagaaaagagaattgtgaaggttttggagcttgcaggaggagtcatggatgagcttgcaagccctgttggtcctaggaaggatgtggtccaaaaccactgccttgagttcatgcaattaatcaaggacattcaggttgcattgcgtgatgaaatcaaaagtgcttgtgaatatcgtccatttgagatatgtgattatggttcaagaattgccaatgagatttgcacatgaaagtggaattattatgtcccaattggatgctataaaacaaactg

SEQ ID NO: 16095 - DNA, 338 bp, Glycine max
  Clone ID: LIB3094-006-Q1-K1-G2
atttgacaacatgcaaatatcctctggtagggtgtctctaccctgctggatgcctcatctagcgatggcggaaaatcagatgaagagcagaaggaggcagaactagcagcttctgaattttctggaaatggtgctgggatactatctgctgctagcacagttgccagtacttttctcttagtttttgttgctgaatggggcgacaagtcatttttctccacaattgcccttgcagcagcttcttctccccttggagtcatagctggagcactggctggtcatggtgttgcaactttgctagctgtacttgggggttctttacttgggacgtatttgtc

SEQ ID NO: 16096 - DNA, 310 bp, Glycine max
  Clone ID: LIB3094-006-Q1-K1-G3
atttgacaacatgcaaatatcctctgctagaagatctgtacgatgatggatgcattgattctagatctttgaatcatacaccttatgcagtacgatgcagaactatccacgaatacataatatgaagctgatgcagtgatacaatctccttatagcacagtaagctatacatgggtatacatatgtgatgctgaatgcggctataagtcacattgctgcacaagttatcttgcatatggttgttctacactcgaagccatatatggagcactgcatgctcatcatggtggcactttcctagctcgacttg

SEQ ID NO: 16097 - DNA, 215 bp, Glycine max
  Clone ID: LIB3094-006-Q1-K1-G4
atattcaaaggaacaatgatcatcatgatcacatccaccatcttaatagtaacttctattacatgacatacgtgttcaagtatttaactattaaaggtcagcttaagcattttgattaactctttaacgtcttatatacccaagtctatcaagagaatcccgaactcgtctagataacttaacccttattaaatttcaacaaatgaggttcattc

SEQ ID NO: 16098 - DNA, 171 bp, Glycine max
  Clone ID: LIB3094-006-Q1-K1-G5
tccggttttccgagctacgacccacgcgtacgcgtacgtgcaagccttatccaacacatttagcgacatttcttcttcatacctcatttacttattgaggaggggatttctaagcgaggcatgcaccgtcctatggttgatgaatcatgaccctatcatcagaacatgaat

SEQ ID NO: 16099 - DNA, 325 bp, Glycine max
  Clone ID: LIB3094-006-Q1-K1-G6
acgatttgacaacatgcaaatatcctctggtagtgtgtctgtaccctgctggatgcctcatctagcgataggcgaaaatgagatgaagagcagaaggaggcagaactagcagcctctgaattttctggaaatggtgctggggtactatgtgctgctagcacagtagccagtacttttctcttagtttttgttgctgaatgtggcgacaaggcatttttctacacaattgcccttgcagcagcttcttctacccttggagtcatagctggagcactggctgtgcatggagctgcaactttgctagctgaacttgggggttctttac

SEQ ID NO: 16100 - DNA, 289 bp, Glycine max
  Clone ID: LIB3094-006-Q1-K1-G7
cccacgcgtccgctctagaatgctgccgatcgaaccctaattgtagttcacataacacaacattggcgtgtgtgacacgacttatactagctatataacagcatcggacagttgtggccctaacagtgatagtaataggaacgttgatcatcatgatgatatccactatgctaatattgccacctagcccataacatacttgttctagtatgtatctattaaagctcagttcatgcatttagatcaacatgtcaccgacttatatacccaagttgatcaagaaaatccc

SEQ ID NO: 16101 - DNA, 503 bp, Glycine max
  Clone ID: LIB3094-006-Q1-K1-G8
cgcaccagtttcaccgcacgaatatcttgatggttggagcgatccgagaaaaactctgtaaacatgttgggttaccaggacctccttacaggtgatgagcttctctctgactccttccgttacaaggaaattgagaatggaatgctgtgggaagttgaggggaagtgggttgttaaaggagcagctgatgtagacattggtgcaaacccttctgctgagggtggaggagaagatgagggagttgatgatgcatctgttaaggatgttgacattgttgacacattcagacttcaggagcaacccgcattcgataagaagcagtttgttaccttcatgaagaggtttatcaagaatttgactaccaagctcgatgcagagcaacaagagttgtttaagaagcacatcgagggagcaactaaatacctgctctctaagattaaagatttccaattttgttgtggtgagagcatgcgtgatgatgcttgctttggctttggctacta

SEQ ID NO: 16102 - DNA, 349 bp, Glycine max
  Clone ID: LIB3094-006-Q1-K1-H1
ctagagaattatcatacccttcaagatgaaaccgtacctacgtccaatattcctattattccttatccttctcgaccaatccatttcggcgagtgctgctataaatattaatggtctgagaaacaaaattagagaagttctaaacaagcacccgagcatcaatcttccggcagataaactgaagaaggtgaagagaccactgaaggcactggattatctgcttggcgaatgtaaggacaggccgtctcaagaatttcaagaattttgcccgaatattaagaacgattatcaacaaaattgcccgaatgcctcgtttgaagcagtttgcccgttatctgaagcatgcgat

SEQ ID NO: 16103 - DNA, 112 bp, Glycine max
  Clone ID: LIB3094-006-Q1-K1-H10
agctatcctaagctcattattttacacatcgtatagattaaaggaaagaattgatcgttgatagtgcatggaggaactacagcgtgagagtacattaatgtaacagttacat

SEQ ID NO: 16104 - DNA, 517 bp, Glycine max
  Clone ID: LIB3094-006-Q1-K1-H3
ggtctctaaggttcactatctctgcatagggcaacctcctttctctgtgactctgagtatcgtatcgcctgacgagcatttctaatacgctcgtatcaggtccattgaatatgtctccgtcgctggatcttcctcccaagggtggcttcagttttgatctatgccgaagaaacgcaatgcttcaaaacaagggcctcaaagccccaacctttctcaaaactggcaccactattgtccgtttagatttccaggatggaggcattcttggcgctgatactagggcaactgcaggacctatactggctgatagaaactgagagaaaattcattatatggcaccctacatatattgctgtggaacaggctcaagtgctgatacaggagctggaacagacctgggtagcttacagctgccattaccatcgctccatactggtccagaatcaagagttgctacagcgctgacccttcttaagaaacaccttttcaattatcaagggcatgtcttaactgcttt

SEQ ID NO: 16105 - DNA, 436 bp, Glycine max
  Clone ID: LIB3094-006-Q1-K1-F2
gatggcgggctctagcgtggttacaacatctgatgtgttgggatcatcgtgtatcgaggtctgcactcggggttgaatgattctgctaaaccaggtggcctcacagggtcatagcacgatagctcatatgacagctttgcccttggatggctcatcaccaatggtgcaacgtatagcatcatacccaatatacactgttagaagacgaatgacgatgacctctggtgaagctgtcaagtacaagatctgcttggatgcattcacacagatactaaagaatgatgctgccgagtccttgttcaaaggtgccggtgccaacattgtctgagcagatgccagtgctagtgtgcttgctggatatgacaagtagcaggttctcgcgttctgcaagatgacggctatggtggggcttaacttctaatgctgagtcagtact

SEQ ID NO: 16106 - DNA, 514 bp, Glycine max
  unsure at all n locations
  Clone ID: LIB3094-006-Q1-K1-H4
aaaaaacgtcagaagaaaattaatttgatttaaaagataaggggggcccagctatttatatgcttcattcatgcaacatatattgaattgtcttcagaatgcctaggacccctatgtttttgtgccactgccacatgttggataaatagagatttcgttcagtcaagtttgaacatggaaagtaacatctgttgtcgcattggctttctcaaaaacacatgcccttctctgtacgccatcgttagctcctactactaataaccgagtacacttatttaattcttactactaatttctccccctattattagtattatgtattagtttataatttgtacattattccatttttttcacaaactgtcccataatttatccaaaataaagacaattataatatgtacaggaattatattcattntcacaatcgtgcttatttgaatagggaaattaacaattgcttgatcccaaaatcaaattgtactcacactattctttatgagcttgagtatat

SEQ ID NO: 16107 - DNA, 416 bp, Glycine max
  Clone ID: LIB3094-006-Q1-K1-D2
ctcactcgtccgtacacatatgcatacgcgctctcactccatgccatttccgcgattagcattagcatacgtgcacttacctatctggtatctagctatggcacatgatatgggtagcagtgactttggagaacctaacttaggaaatgaaagagcaagttgtacttctacgcccagaatgaggaagaagagctcacagctagacaagccacagcaaccacagagaggtcttggagctgctcaatcggagaaaattagattacatggatatcacccttatgtgcaagctacttacacttctaatatttccaacgaggatccaagagtgcagatagcgtattcatcggtgccatcatgtgctgtatcttactcatcatcatacgcagcttactatggattccaacgcagcatcatga

SEQ ID NO: 16108 - DNA, 352 bp, Glycine max
  Clone ID: LIB3094-006-Q1-K1-D4
cagaacagggactcactctcttcgcagcggcactctcggtggctttcatcttctcgggttgtcaagatgtggacatcgaggaagaaaattcacaaggataaggatgctgagccaactgaatttgaggaatcagttggacaggcattgattgatctagaaaataccaacaatgagctgaaaagtgatctgaaagatttatacataaactcagctgtccaaattgatgtttctggcaaccgaaaggctgtggttatacatgtcccctacagactaaggaaaggattccggaagattcatgtcaggcttgtgagagaacttgagaaaaagtttagtggaaaagatgtaatcttga

SEQ ID NO: 16109 - DNA, 273 bp, Glycine max
  Clone ID: LIB3094-006-Q1-K1-D5
gattcgcatgctaattgaaatgagcaagcaatattgcttaaacagtccagtgcatctctacataggatgcgctatgaatctaatgatgcggacgcactcgataggatcatatgtgatctacagctattactgactatggatcaattacactgttctgcaacataatatgtctcgggtgtacgaatatgctcacatagttctactaatcgctcacaaaagctaagatttatcactcaatgatattagtatacatattgaatctatggtacatgc

SEQ ID NO: 16110 - DNA, 377 bp, Glycine max
  Clone ID: LIB3094-006-Q1-K1-D6
gctacgtcttcttacgagccttggctttcagtccattgattcgatgggtgcggatgcagcaaaacggagcgtggaccctgatcggcgtaggcacaccgccggagaacaagatgattgtctgagtagtcgtcgtcggtcaccagatcaattcgctgtacatacagatcttcacggaagccgattatgctctcaagctccaccacatcgtccattgctcgctcgatgtggtcgacgagcgagtgtacaatcctaaacagcctgggccgatgcttaatgagacgtgatcgtgactgctttatcctatcgaaaactacataggatatggatatctgactaatacgaaggttgcatctatcttggtgaccactgatctggat

SEQ ID NO: 16111 - DNA, 64 bp, Glycine max
  Clone ID: LIB3094-006-Q1-K1-D7
tctacgtgctcttactagacttatctatcaatgtcattgacacttagattgcggatgcagcgaa

SEQ ID NO: 16112 - DNA, 444 bp, Glycine max
  Clone ID: LIB3094-006-Q1-K1-D8
aaaaaacattcctaacacagaaaaactaattacatattactcgttccagcacacatagtctccgggaggggacgaatagaattgataatgataatttgcataacttcaaataatataactagtctgcatacaaacactcgattctataatccaaatccattccataacggtcaattactatctactaacaatatataatacttatagaatgattttatgtcactaacgacatcttaaaattttttaattcaaatatatctactataatatttagcttatataaatcgcaattggtacaatacccataacgtaagccgaaacattatattaaggatacatatgtattcgccactaaaagtatatttatccaaataattaacttaatttccatatatatctcttgcatctaatatctaataatatatatttcgacctatatagata

SEQ ID NO: 16113 - DNA, 392 bp, Glycine max
  Clone ID: LIB3094-006-Q1-K1-E1
ctctgctgcgtttgcttctcctccacccatccacaaacgaacacacactttgattgagaatggggcgtgttcgcacaaagacagtgaagaagtcctcgcggcaagtgatcgagaggtactactctcgcatgacgctggacttccacacgaacaagaaggttctggaagaggtggccatcattccctccaagaggctccgcaacaagatcgcgggattctccacccacctcatgaagcggatccagaagggtcccgtacgtggaatctccctcaagctgcaggaggaggagcgcgagcgccgcatggacttcgtccccgatgtctccgccatcagaaccgaccagatcgaggtcgacaaggagacgctcgacatgctcgccgccctcggaatg

SEQ ID NO: 16114 - DNA, 389 bp, Glycine max
  Clone ID: LIB3094-006-Q1-K1-E12
attgagaatgctcatactcatcaagaggaaaccgggcctacgtacactattcctatgattccttatcctgggcgaccaatccatctcggggagtgctgacataactagcaatgccctgagaaacagatgtagctatgatctaaacaagcaccctagcatccatctttctgcacagaaactgtacatggagaagagaccactgaatgcactgtattatctgcatgccgaatgatgagacaggccgcctgacgaatgacatgaatgatgactgacaatcaatagcgattataaactgcattgcccgattgccgcgtatgatgcagtttgaccgttactgaatcacgcgatgcatatatggagccatatacactcatatctctgcaagccac

SEQ ID NO: 16115 - DNA, 462 bp, Glycine max
  Clone ID: LIB3094-006-Q1-K1-E2
gaagtttgcgaaccattctcctgatccaaattgctatgcaaaggttattatggttgccggagatcatagggtaggcatttttgccaaggaacggatttgtgccggggaggagctgttctatgattatcgttatgagccagatagggctcctgcgtgggctcggaagccagaggcatctggatcaaaaaaagaggacggtgctccttcaagtggtcgtgcaaagaagcttgcttaatgggagtttgttctttaaaagtcaattctttaggttattctttcacacgtaggggaagcaatctcattggtagcggaaagaagtattgcttttagcttttgttcgtagcaaggccgtgtaattgttgctgcataggtaactaactacatttaaacagttcattttgatattaacagactgtattcatcattccaaacggaaaatataagcttaatcaaaattgcgca

SEQ ID NO: 16116 - DNA, 424 bp, Glycine max
  Clone ID: LIB3094-006-Q1-K1-E3
gaagtttgcgaaccattctcctgatccaaattgctatgcaaaggttattatggttgccggagatcataggggaggcatttttgccaaggaacggatttgtgccggggaggagctgttctatgattatcgttatgagccagatagggctcctgcgtgggctcggaagccagaggcatctggatcataaaaagaggacggtgctccttcaagtggtcgtgcaaagaagcttgcttaatgggagtttgttctttaaaagtcaattctctaggttattctttcacacgtagggcaagcaatctcattggtagcggaaagaagtattgcttttagcttttgctcgtagcaaggccgtgtaattgatgctgcatacgttactaactacatttaaacagttaattttgatttaacagactgtattcatcat

SEQ ID NO: 16117 - DNA, 501 bp, Glycine max
  Clone ID: LIB3094-006-Q1-K1-E5
ttcaagaacaatttattgctcaaatattgacaggaagcttactcaagccgatgtcacacacttctgtgaatctatctgtggagaggttcaacggttgaggcttcttggagattaccatcattcaactccaattgcttttgttgagttcacagtggctgacagtgcaattgcagctctaatctgtagtggagtgattctgggttcactgcccataagggtaagtccatcgacgacaccagttcgatcacgtgctcctcgctctactatgcactgaatcaactttccatgtttctggagttgattgctgctgagatatctttacatatatatatatacatagaatcagctgtgttctaaagaacatgtggcatttagttggtactattgtcctcatgtcttacagtatggttactttgcttccccttggaggactattgtactgtggtctagcttgtagtcggatcgaactatgaggatcttgatgacttaattatgatgcac

SEQ ID NO: 16118 - DNA, 402 bp, Glycine max
  Clone ID: LIB3094-006-Q1-K1-E6
cccacgcgtccgtcaagcattgcatccctattgatttgtaactcggttcgcgctttaaataaaaggtctgggaaatcaagatgggttttaagatcatagtgtgtgttttgcaacaatggctaagtcctttgctgctatgatctaggcactctttgccatttccatacttcaaacagtggtaatggctgctaatgaacaaggaggccacttgtatgacaacaatagctaatatgcacgtggaagtgtccatagttaccaatgcccattacaatgctcgacgagatctagcctgacccattaccacatgctctgcatgtttttctgtcagaagtgctctaagacatgcctgtgtgtgccctcggagtatgatggtaatatagctgtgtgctcttgctacaacaa

SEQ ID NO: 16119 - DNA, 391 bp, Glycine max
  Clone ID: LIB3094-006-Q1-K1-E7
cgatccgcttttccgacctagacgtacgcgtgcctatactcaatcgcttagtaattcatgggatgattggacttcaaatgttcgttcccaataactctgtgttgtgtggactaccagcatctcccgacgctgctccaagtggtggttatataccaccacaggtgctcatttctgaggagcttccctatgtaaagcaagctttcaactatggaggagttatgctgagggacatgtaccatgatgttttaaattatcacagcgatcagataaaggattatgttccaaaatatgcaatgcggtttgtgaccgcaatttccgactctatttatgagagtgtctctgcagctactcaccgcattttacagaaaaaaccatattagaaatatgggga

SEQ ID NO: 16120 - DNA, 412 bp, Glycine max
  Clone ID: LIB3094-006-Q1-K1-F1
cctggcaatactcaattgctttttaattcatgggatgattggacttcaaatgttcttcccaataactctggtttctttggactaccagcatctcccgacgctgctccaagtggtggttatataccaccacaggtgctcatttctgaggtgcttccctatgtaaagcaagcttccaactatggaggagttatgctgtgggacaggtaccatgatgttttaaattatcacagcgatcagataaaggattatgttccaaaatatgcaatgcggtttgtgaccgcagtttccgacgctatttatgagagtgtctctgcagctacgcaccgcatcttacagaagaaaccatattagaaatatggggagccgtacgtgcaaactatttatcagctatctatgcatgtgttcgtctttg

SEQ ID NO: 16121 - DNA, 532 bp, Glycine max
  Clone ID: LIB3094-006-Q1-K1-F12
gaagacccttactgggaagaccattactttggaggtagagagctcagacacaattgacaatgtgaaggcaaagatccaagacaaggagggtattcctccagaccagcaaaggttgatttttgctggaaagcagcttgaagatggacgtacactggcagactacaacatccaaaaggagtccacccttcaccttgtccttcgtctcaggcgaggtatgcagatctttgtgaagactttgacaggcaagactattaccttggaagttgaaagctcagacacaatcgataatgtcaaagcaaaaatccaggacaaggagggtatcctaccagaccagcagaggttgatatttgctgggaagcaattggaggatggaaggactctagctgactacaacattcataaagagtctactcttcaccttgtgttgcgtcttcatggtgggtattaaagtctgagaatgttctgtaggtgtcttgaagtctaagcatgtggaagttcccgaaatctttgggtttttaatttaatgttcctg

SEQ ID NO: 16122 - DNA, 472 bp, Glycine max
  Clone ID: LIB3094-006-Q1-K1-D12
actaatcgtgcttatccttattgagagaaaaaatggccaaatcaatcaaattctttgagttgaagacaggggccaagattccttctcttgggttaaggacttgacaagctgaacctgttgttgtagctgaagctctcaccacaggcattcatgttggatacatgcatattgactgtgctagtgcgtatcagaatcaagcagagattggttgtgctcttaagaagctatatgatgatggtgtggtgaagcgtgaggactcatggatcactttcaaactctggtgttcagatcatgcaccacaagatgtgcctaaagcattggatgaaacattacaggaattgcaacttgactatcatgacctatatctgatccactggccataccgcatgaatagtggcacattcggactcaatagagaatatcttgagcaaccagtcattctcaattcatgcagagcaatagatgcactcta

SEQ ID NO: 16123 - DNA, 471 bp, Glycine max
  Clone ID: LIB3094-006-Q1-K1-A7
cggacgcgtggtagaacctattttcactgttttttgaagaaattgtatcccagctatctggagtgtgctcgctcgtatgataagtggcgctttgatccaagtaaaccaaaatgcaggctgttagttacacatgatgactatagtataacgtccaaacttccaagggagagaacttctgttgttaccatacttatggatccagttgaccgtgtttttagtacttatgaattctcaatagaggttgcagctagatttttggtgcatccaaacttgacgtccgcaacaaagatggctttacgcctaagctctaagactaaaggagtaagcacactggatatctggccttggaagtatctggttccatggatgacggaagacctatttgctaggagagaagctaggtacagtatgggactgaatatcattgaaagcaatgattcttatgacatggaagattttgcaatgccatta

SEQ ID NO: 16124 - DNA, 510 bp, Glycine max
  Clone ID: LIB3094-006-Q1-K1-A8
gttggcggtagcggcagcgacaggagactggcaaggtcgagaagaaagtacatgcaatcgagaaccaaggtccgtgtgggactgcctaagaagaaccctaggcttttcaaaccctctttctccgttccacccaagctcttgcaatccctcgaccaagagcctcaatgggacgaccaaggcaccgttaacaccaactactcctcctttggcgttctctctgaccctaactccctcaccgaactctgttccgatcctcaaaccatcgattccggcagcgatctccacgaagacgacttgaaatctgccctaggaaagaagcgaagggatgggaggagcgcgccgcctcagtctctgactgcaatgcaacggattcatatcagtcgtctcgtcgctaaatacggagatgattatcagagtatgttgcgggatataaagctgaatccgatgcagcattcaattggaactctgcagaagctgtgcatgaggtatcatatgtatcaaaatatgaac

SEQ ID NO: 16125 - DNA, 342 bp, Glycine max
  Clone ID: LIB3094-006-Q1-K1-B1
ggctacttttgattgcttgatgaaaacctatggattcctgacaccagaattctggaaggagactcgcttgtgcaaatctccattccaagagtacacagatctactggcaaaaccaacaggaaagactctaatcttggaggaggaaagggtggatgcttgatttgctagttttgctttatggatgttttaggaactttattactttacatactttgttggttctgtgctttacttttggttttgatagacggtatgtctctgtatgcattttgattgtttccaagttttaattgactgcaaaaaaaaaaaaatatatatataatattaattattatattaatt

SEQ ID NO: 16126 - DNA, 356 bp, Glycine max
  Clone ID: LIB3094-006-Q1-K1-B2
gttgtccaaaccaatcttgaacccttatgtccgcgagcatacagctgctcaggctggtgtcaaggccacgcgggagcaagcctgacacagttaccgttcacctcaacatctatgatctcacccgaatcaacggctatgcctattggcttggccttggagtctaccattctggggttcaagttcatggattggaatatggttcacgagcgcacgagcacgacacaacggggattttcggagtccaacccatacactgccctgggttcactttcagaaagtcaatgttcatcgtaacaacatatctgtgtccgaaggatgttcgagcatttatggataagctggctcatgattacttc

SEQ ID NO: 16127 - DNA, 300 bp, Glycine max
  Clone ID: LIB3094-006-Q1-K1-B3
attgctgctgtttgcctataggtgtactttggggtactctaccctgctggatgcctcatgtagcgatcgcgcggaaatcagatctagagcagaacgaggcagaactagcatctatctgaattctctgaatatggtgctggcatactatctgctgctagcacaatttcctgttcttgctttatgaatatttgatgcactatgagtccactacgtcactttgtctggacatgtgctctacgtatcggctcttatcgactcgtagttgttatgtatgcatctctatacgtttctatgttttaa

SEQ ID NO: 16128 - DNA, 119 bp, Glycine max
  Clone ID: LIB3094-006-Q1-K1-B4
gtaatgtatgtgttccaagcttcaaggtaggtaataatgttaggtccaagtagatatgtgattgagttgtaatacaatgattctaatatcctatctccaccattcatattaatatttgc

SEQ ID NO: 16129 - DNA, 475 bp, Glycine max
  Clone ID: LIB3094-006-Q1-K1-B5
caaagacatccttctcctggatgtggctcccctcactctcggaattgaaactgttggtggagtcatgacggagttgattcccagaaacactggtatcccaaccaagaaatctcaggtgttcaccacctatcaggaccagcagactacagtctccattcaggttttcgaaggcgagaggagtctcacaaaggattgccgccttcttgggaaatttgatctgtctggaattcctccagccccaaggggtacgcctcaaattgaagtgaccttcgaagttgatgccaacggcattctaaatgtgaaggcagaagacaagggcactggtaaatcagaaaagatcaccattacaaacgaaaagggacgtcttagccaggaagaaattgagagaatggttcgcgaagcataggagtttgcagaggatgacatgaaggtgaatgagaggatcgatgctcgcaacagtcttgaaacctatgta

SEQ ID NO: 16130 - DNA, 354 bp, Glycine max
  Clone ID: LIB3094-006-Q1-K1-B7
gcgaccactcgtcacgaccactcattctgaagaagttagtgtaccttacggatggtggaactaagaagcgggcgggatatgcatagtccgggtgttgccgtagactgaagacctggctagtctcagagcccaaagactggtgtatatgccaacgtcgctaaccacttgaatgtacagtactgtaactcggcactactattcagaagtgtaagtcaatgaggtctcatatctgaaggatgtgctgatgccattataccctacaattactgagtgatcactcaacgctggaatggagaccattattgtgcacatagggcctataggcctgctaatcgacgagctctttcagaatca

SEQ ID NO: 16131 - DNA, 395 bp, Glycine max
  Clone ID: LIB3094-006-Q1-K1-B8
cccacgcgtccgcccacgcgtccggaagaaaggaatctaccttacgaatggtggcatcaagaagcatatgggattgtatagctcggatggtgactaatattgattaccaagagagtgtgagacagataaatctagactttatgttaacggcacgaataagctgtttgtacagacatcagcatcgactacagatattacaaatgtctgtatatccgctgtcatatcagtaaaaagtggttacgtcattatacactgtaattcatgtagtaactaccaaggatgcgatggagatatcattagctcaatctttacctagctgtgacttactcttcgcactatcatcaaatttataatgctacttggcgttataacactgggaatgtctgcatacttaa

SEQ ID NO: 16132 - DNA, 457 bp, Glycine max
  unsure at all n locations
  Clone ID: LIB3094-006-Q1-K1-C1
gttgatgaatctgaagatgatgatgattctagtgatgatggtgattctaatgatgatggtcctgtggagtgggcttcatattggaaaccaaatataacaataaacttggttgctgacttcactcagtacccaaagacaggtgtagcaccaaacattgctccttacttgaatgtcgatcctcttactgggaactactatccaattgtttatttcaatgagttctggttactcagggataagctgatacctttaaacgagacagtgactgaattatcacttaacctggaagttggtcccattagtatgacaaagtggcagttattcctgcagattgaccagtccttccagattcaccgtagttatggaagcatgcttgaaggcgaggctgatgaactcaagagggtattcttggaaaggaatccttacctnctggcaattaccattgggtgttctcttc

SEQ ID NO: 16133 - DNA, 321 bp, Glycine max
  Clone ID: LIB3094-006-Q1-K1-C2
atggcgcatgctgtaaaacggcaggatccattcattgataacccacattatacggatgacctagacctctgtgagttcagcagcttgaagcacttgagcgtatgaatttacgctctggaactctcggactccgtatgaaactgtcttaattactgatgatcctgagtatgctaagtatatactctacgaaacatgtggtacgcacaagtgatctgactaggtagcatttgaagaggcacatgagactacggttgacgaggcattaaatgatgacccagttgactatgatgctgatgtggaacaggatgatgctgatgaatc

SEQ ID NO: 16134 - DNA, 465 bp, Glycine max
  Clone ID: LIB3094-006-Q1-K1-C3
ctacgcatgcgctcgagaatatgacccgtcctaaagtttacgaagcataattatatattatttatgatagataatgagaggaacataaacgaacaatcatatgctgctagtcatttggataataaacaacattaggatttaggcatatcacatgatcgctttacttataatttagggatatcagctcaataccacatgattcaagtaatattaccaaaatcaaagccttatcctacaagatgcggtcagctacatgggtcatgacgtcattcggcaagtatagaaaccaaagtgtagcaaacggggaaaaagtacacttctacttacagaggtatcccatatgacacaataactctgaaatagtatagcataccatagtcttaatcagcggaatatacaatggcttacatgacaaaaggacagccactgatcctagacaataatggcatgtaaaataaggggaca

SEQ ID NO: 16135 - DNA, 332 bp, Glycine max
  Clone ID: LIB3094-006-Q1-K1-C4
cggacgcgtgcgagaaggcctgggcttactcgataagcataactggatgaggaagatggagagagagtgtagtatatcgcttctagcgaatcggcacagattatgacggcactagtgatatcgtacaagtggcatgcatagaggtacactaatgtaagcatattacgcgtattatatcctttctgcggcaaacccctttctcatgagacacactgtgttattttctctaacagcgtctaatctcatgcagtactagctagaatgatactatatgctcatttatctatgatatctaattagctggactgagttgatgctaaattttgcgttat

SEQ ID NO: 16136 - DNA, 351 bp, Glycine max
  Clone ID: LIB3094-006-Q1-K1-C5
gattcggatgctaattatgttgatcagccagatatgcttggagagcccattgcaactctgcgttggctgcgctatgaaggtcacgtttcggatcccttgaaaggattatatggagctggagctcatactgactatggtttaattacactgttatcaacagatgatgtctaggctcttcaaatatgcatagatagggatgctaaacctcataaatggcaggatgtaacaccattgactggagcattcatacgagatattgattacatgctgaatcgctctagcaactgcgttcataagtccaaactagacagagttctagctgacgatcgacgaagatattcaaatgcatac

SEQ ID NO: 16137 - DNA, 252 bp, Glycine max
  Clone ID: LIB3094-006-Q1-K1-C6
cctactcctactcatgagcctactctttcagttcattgactcaacgggtgcggcttcagcaaagcggaggtagaccctgatcagggtgagacactcacggaaaacaagacgaatgtctcactttgtgtgagtcgtcactagataactctgctgtacatacagatcttcacggcagctgactatgctgctaatctccaccaaatctaccattgctcgctcgatgtgctcgacgaagcgatgtgaacactcata

SEQ ID NO: 16138 - DNA, 202 bp, Glycine max
  Clone ID: LIB3094-006-Q1-K1-C8
cgcatacatgctccgaaccagcctcactgcatatatttttgagaaaactctgtatacatatacgtggatggggacctctttacaggtgatgagcttatatcggactcaataagttacaatgaaactgacaatggaatgctgtgggacgtcgaggagtagtcagttgttaaggtagcagttaatgttgaaattgttgcaaatc

SEQ ID NO: 16139 - DNA, 268 bp, Glycine max
  Clone ID: LIB3094-006-Q1-K1-D1
cacaagcgtccgataagcactatgactctgtctaatatctactactcacaataaccaagtaagagagatagctcgtgcaaggaacataatgcagcaaccaaatgctgttcgagatctggatggtgaactgcgtcaagcactacgtatatcacatgatcgcgttcctcatggtatgcggctatcagatccatctcacatggatcaaggtgtattaccacgatgactgtctctatactgcacgatgcccgcacctaccttatggatgacg

SEQ ID NO: 16140 - DNA, 339 bp, Glycine max
  Clone ID: LIB3094-006-Q1-K1-A6
cccacgcgtccgcacgaaagccgggatctttcagataatggattcctattcgaagggtgcataacggcatggataagctcacactgacgcgtcaattcgggatccaattcggttccttaggaggtatcgggaaggaatcttggaatgtaataatatcgattcatacagatacagattaatgggttctctattgattcatacgctctacctattagatagggatatagaaagaggtaaataccgtggatttaacatagaactcttgatcgtaaaatcgatctgatattttgcggactttcagttcaatgacctaatggggcagattctatcatgtccata

SEQ ID NO: 16141 - DNA, 430 bp, Glycine max
  Clone ID: LIB3094-005-Q1-K1-F6
ccacgcgtgcgcccgcgcgtcacgccacgcgtccgcccacgcgtccggcgtcactctcactgagaccatgggccgcatggggttctgcgaagagaggggtttttcaggaaccgggcggaggcggcgcttagggcgagactcgagcaagttgtagaatgcgagtgagcagagtagcgaaatggcttcagagccttcgcttgtccctgagatcggacccgatggagtcgctaaagaagcgcagagtcatcggctacaccgagaaagtcatcgaagcagaacagcttcaatagcagaaatccattgaagaaaactattctaaaaagtcgagatgtggagcgtgagcttgcaaatctttcactagagatgaaactaagagctgggccgaaaaaagcagctcttgaacacttgaggaagaaaatacgggaatcaa

SEQ ID NO: 16142 - DNA, 447 bp, Glycine max
  Clone ID: LIB3094-005-Q1-K1-F7
cctaaacaactctttctcttcttccttcgctcggtgttctccctcgcgtagagcgacaatggcggagacagagacgtttgctttccaggctgagatcaaccagctcctcagtctcatcatcaacaccttctactccaacaaggagattttcctacgtgaactcatcagcaacgcctccgatgctttggacaagattcgatttgagagtttgacagataggagcaagctcgatgctcagccagagttgttcattcatattattccagacaagactaacattacactgaccattgttgacagttgtattggcattaccaatgctgatttggtgaacgacttgggtacaattgctagatctggtaccaaggaattcatggaagccttggctgctggtgctgatgttagtattgaatgacagtttggtgtggggttctactcagcatatct

SEQ ID NO: 16143 - DNA, 254 bp, Glycine max
  Clone ID: LIB3094-005-Q1-K1-F8
gccaaaacctagtacgagccttagcttacaacccactgaaaccatggacacacgtacaggggaaaccgagctaaacccaagaaggggtcaacaaaccctcaaaaaagaagatgataagctgagagacccgacgcggcaccaaaacaaaccaaggaagaaacagaactacacaaaaaccaatgcagatctaaagctcaaccacatcgaacattgcacgctcgaagcaagcaactagcgactgaacaaaagtaaaa

SEQ ID NO: 16144 - DNA, 441 bp, Glycine max
  Clone ID: LIB3094-005-Q1-K1-G1
aaattattatgcctttcttttgaaaccgtggattagaatctggctacagataaacttagggtcttagatgtttcattttctggatttgatcacagggaatatggattgaattgtgtgcctggttgttgtgcagcggtgggagaagtactatttaggctcttgtttttattacccttgattatctcatgttcattatggactggctttccttattgtgggttttatgattattgtttttgacagtgtagggttttgatagagttagacttgacttgatgttgctttttgggaaatgtacgaggataattggctctttataggattggccccgtatgatatggtgatgttggatttataagtgtttagttacttatttacttctcaattgattctctgttgcatgaattgtggtgattagacgttgttatttgactttctaat

SEQ ID NO: 16145 - DNA, 460 bp, Glycine max
  Clone ID: LIB3094-005-Q1-K1-G10
aaacacccttgtctaccacaccaaaattaataacataaaaaagcataaaagcgcaaaaagagataaataagggaaaatgaaacattttgaagtcatatttgcacacttgattaaaggctgtcgtcccttgtgacggatgcgtggggtgctaataccttccctgtgcgtaaaaacaactcccgaactattcacacttaaagttcgtagaccacaccttttcaatttttccgacgctttcctcaaataaaagttggtggcgactccgcgcattttcctttcatggaagactcacttgtgagtcccgcatcgtcctcccgtcaaagggtaggttgcgacagtacttgcccttccgccgaaaggtaagttccttaattgaattaactaataacaaaagtgaaactaatgcttatataaactcacatatcaagctttggtcataaaaatcacttaaaaaccaatt

SEQ ID NO: 16146 - DNA, 91 bp, Glycine max
  Clone ID: LIB3094-005-Q1-K1-G2
cttatccacttcgagccttcttgacccttcttgttctcctcgaactcaaagcgagcgccgaggacgtggacccatccgagtgctggccaag

SEQ ID NO: 16147 - DNA, 421 bp, Glycine max
  Clone ID: LIB3094-005-Q1-K1-G3
ttttatctttattccactgaatagaacatgagcatattaatggataccctttatattatggatctttatattatctgtggagggtaaagatatccgatgtgaatctatttgtttagttttctatcggtatgtatataggtgaataatccagcatgccttattgtgaagtaaaaaaactaccctcgatccatgcctcaaaagggttgataataagtaaaaaaaatcaatgtattcatgataaaacccttctgcatgtttttattataaatttttttgtcaataaagggatcaaggggttgggggatcaaatggtaaagttcttatgttggtaaattggaagattataaacatgactattgctttccaattagctgtttttgcattaattgctatttcatttattttattgattaatgtacct

SEQ ID NO: 16148 - DNA, 435 bp, Glycine max
  Clone ID: LIB3094-005-Q1-K1-H1
gaagttgcgagagtgaagaaatggcgcatgacttggctttggattaggaggagcttcggggactgcacagcatcgccggatgacctcgaaccctctctctgctctcctccgaaattcgtaacctcgaaaaggtatcgtcagaggtagcttttgcgcagattccggcgccgatttcgaccggaactaaagtggcgccttcacctgcgctgaagtatgcggcactctcgtagttcagttgggaccaggatagtgacaaagttaagatatatgtgttaatggatggtatcgacgagaataaggttgaattcgagtttaagtggatagcattcgatgttaagagccatgatgctcaagggaagaactaccgatgtgcaatatcagaattgctcaatgagatattaccagagaaatcaatgttcgtgtcaagcctaaaag

SEQ ID NO: 16149 - DNA, 379 bp, Glycine max
  Clone ID: LIB3094-005-Q1-K1-H10
agagtactcaatctttttaatcatcgcacactgatataggactgttgtgggagcatatgtatatgagtactgggtcaacagtacagagaatggctagtttactggaccatgcttcatttaagtgtatgcttggtctgagtcacctagtcacacatccaatgatagaacacccactatttgtaccaatatgaaaacctcattgaaactgagtttaacgtactgggcaaaaaagttgtaacatactagcatcttgatactccataaggatgcaacatatggtgtttgtaaactgtaaatgctatgaaacgcggattggaaccaacattataaggcacgattaatgctaactggcatttcggttactcatatacatgacgca

SEQ ID NO: 16150 - DNA, 463 bp, Glycine max
  Clone ID: LIB3094-005-Q1-K1-H11
tcgaaacacccttgtcgaccacaccaaaattaaaaacataaaaaagcataaaagcacaaaaagaggtaaaaaagggaaaataaaacattttgaagtcatatttgcacacttgattaaaggctgtcgtcccttgtgacggatgcgtggggtgctaataccttccctgtgcgtaaaaacaactcccgaactattcacacttaaagttcgtagaccacaccttttcaattttcccgacgctttcctcaaataaaagttggtggcgactccgcgcattttcctttcatggaagacgcacttgtgagtcccgcatcgccctcccgtcaaagggtaggttgcgacagtacttgccctcccgccgaagggtaagttccttaattgaattaactaataacaaaagtgaaactaaggctaaaataaactcacaaatcaagctttgtccataaaaatcacttaaaaaccattt

SEQ ID NO: 16151 - DNA, 386 bp, Glycine max
  Clone ID: LIB3094-005-Q1-K1-H3
ctctgctgcgtttgcttctcctccacccatccacaaacgaacacacactgtgattgagaggggggcgtgatcgcacaatgacagtgaagaagtcctcgcgacaagtgatcgagaggtactactctcgcatgacgctggacttccacacgaacaagaatgttctggaagaggtgtgcatcattccctccaagaggctccgcaacaagatcgcgggattctccacccagatcatgaagcggatccagaagggtcccatacgtggaatctccctcaagctgcaagaggaggagcgcgagcgccgcatggacttcgtccccgattgctctgccatcagaaccggccagatcgaggtcgacaaggagacgctcgacatgcttgccgccctc

SEQ ID NO: 16152 - DNA, 317 bp, Glycine max
  Clone ID: LIB3094-006-Q1-K1-A1
aagactgaaagaatggggtggaggctgcttcgaagcttgatgtcagatatgacagacatcatagttttggaacaacatactaacgaattactcatatgatataatgggatggacccggctatctcgcacgctaaacgtattggcggccttgatgctctgtctatatccctaattaccggtcatgggccaggatactcattggcatgcgatgaatctctaagagatggagtgcgtaatactgggcgaatgaatggaatccaggtaggtgtataagagaagcctgataccagagcaggtgctgaaggcttctcaactga

SEQ ID NO: 16153 - DNA, 475 bp, Glycine max
  unsure at all n locations
  Clone ID: LIB3094-006-Q1-K1-A2
aaacacccttgtcgaccacaccaaaattaaaaacataaaaaagcataaaagcacaaaaagacataaaaaagggaaaataaaacattttgaagtcatatttgcacacttgattaaaggctgtcgtcccttgtgacggatgcgtggggtgctaataccttccctgtgcgtaaaaacaactcccgaactattcacacttaaagttcgtagaccacaccttttcaattttcccgacgctttcctcaaataaaagttggtggcgactccgcgcattttcctttcatggaagacgcacttgtgagtcccgcatcgccctcccgtcaaagggtaggttgcgacagtacttgccctgccgccgaagggtaagttccttaattgaattaactaataacaaangtgaaactaaggctaagataaactcacaaatcaagctttgtccatgaaaatcacgtaaaaaccattttgaggtccaacgcct

SEQ ID NO: 16154 - DNA, 360 bp, Glycine max
  Clone ID: LIB3094-006-Q1-K1-A3
tcatatttacacactttattaaactctatcatccattgtgacttatgcatatgatactaataccttccctgtacgtaaaaacaactcccgaactattcacacttaaagttcgtataccacaccttttcaattttccctactctttcctcaaataaaaatctatttcaactccacgcattatcctttcatgtaatacgcacttgtaagtccctcatctccctcccttcaaatgatattattgctacagtactttcctctccttctaaatgctattaccttaattgaattaactaataactaaaattcaaactaaatctaaaatacactcacaaatcaaacattttccataaaaatcactta

SEQ ID NO: 16155 - DNA, 413 bp, Glycine max
  unsure at all n locations
  Clone ID: LIB3094-006-Q1-K1-A5
ctcgcgcgtccgtcaagcattgcatccctctttattcgtagcttgntttgtgctttagataaaacgtctaccaaatcaagaggggttgtacgatcatagtgtgtgttttgcaacaatggctaagttctctgctactatgatcttgacactctttgtcattttcatacttcatacagtgataatggctgctaatgaactatgactccacttgtttgacatcaagatcaaatacttaagattaagtgtcaagactgtccaatgcccatcactatgctcgactagatgtaaccataccctttaccacaagatctgcatgtttttctgtcataagtgctacaagacttgcctgttcattcttgccgtttattatagtcataaagctctattcccttgcttcaacaacttagaatacc

SEQ ID NO: 16156 - DNA, 493 bp, Glycine max
  unsure at all n locations
  Clone ID: LIB3094-005-Q1-K1-F3
tcgnntccggctatcctccttcttacgacgcgcttgtcctttcagatccattagattacggtggtgtgcagggtgcatgggagaaccgagcttagaacccttgatacggcgttggacacatccgtcgtgagaacaatgatgatatgtctgcgttcgccgttcgtgctgtcagccagaacaatccgtgtgtacatacatgagcttcacggagtgccgatgatgcgtcttaagctgcaccacatcgtccattgctcgctcgatgtggtcgacgagcgagtgaacaatcctaaaaagtttgggccgatgcttaatgagacgttgttgggactgctttatcctattgaaaactacaaagtatttggatatctgactaatacgaaggtgaaatttattttggtgaccacggatctggatgttaaagatgctggtgtaaggaattttttcaggaagttccatgccgcatatgtagatgcaagtgtcaacccattccatg

SEQ ID NO: 16157 - DNA, 178 bp, Glycine max
  Clone ID: LIB3094-005-Q1-K1-A9
tcggcagagcagagatctagcgtattctctcgctctttctttcactgtcacagaggcacatccgaggggcttcccatccatcggcgcctctgctgcccagcccctaaactttctcatctactgccgcactgtctggattggcggccttctcggctccctatgacgggcccagtgcatc

SEQ ID NO: 16158 - DNA, 460 bp, Glycine max
  Clone ID: LIB3094-005-Q1-K1-B1
cggacgcgttggcggacgcttgggcggacgcgtgggaataatcaaaacactggtcctggggacccggctcactctcaaggtacttcctactgttcccattttatgcccatactaatctgacccttttagtggcatagattgaggtacaattacaaaagcatatatcccttatcatatcctttctgctgcaaaccccaccccccccaaacacactgtgttatttttttcaacagatttctcttctctcgtactattagctagatagatactaaatctattctatttatttaagtatttcccggcactgagttgagttaatattttggtcatagtcttaattagcaggatgtgaattgagtggttagtgtttacatgcataaacgcatgtgtttcgtgtctaattcatcctcaaacaaggttttagggacagagatctgaattttattaagttaaaaagaaa

SEQ ID NO: 16159 - DNA, 464 bp, Glycine max
  Clone ID: LIB3094-005-Q1-K1-B10
cccactcgtccgcggactcgtgggggtttttgtggataagagtgagctataatggctgccaggagaccgggtttaattgctttgtttgatgttgacgggactcttacagctcccaggaaggtggtcacaccggaaatgttgacattcatgcaagaactacgaaaggttgtaacggttggagttgttgggggttctgaccttataaagatatcagagcaacttggcagcacagttaccaatgagtatgattacgtattttctgagaatggtcttgtggctcacaaggaaggaaagctcattggaactcagagcttgaagtcattccttggtgaagaaaagctcatggagtttattaactttacacttcattatattgctgatttggacatccccattaagaggggaacatttatggagttccgtaatgtgatgctgaatgtctcacctattggtcgaaactgtat

SEQ ID NO: 16160 - DNA, 282 bp, Glycine max
  Clone ID: LIB3094-005-Q1-K1-B12
cccactcgtccgaccactcgtcccaatactgatcatagctttgcacccctttaaacatgatcaacttgtaacgggtatcctgtgatgagactactttattgggcatgtgtatgtcggattaagtggattcgagcgaaatgttgatcaggggagtcatttcgacatatattctggaatataactcttggattatcagtttttaaaaaaaacaaggatcaattatcacactaatctataaataagaacaaatcaataataaaacatgcaaaaaagggtgctctt

SEQ ID NO: 16161 - DNA, 325 bp, Glycine max
  Clone ID: LIB3094-005-Q1-K1-B7
cccacgcgtcaggactgcccaagatgtatagacagtgatacggcgcaggcggggaaccagcatatttctgatcaacagtagtggatacaccatctgggtcgaaattcatgatgggccgtacaatgtgattaagaactgagattacactgggaggattgattgaatccatagtggtgaagggaaatgctggaatgccaaggtgctctgttaagaggagctagtagaagcagttgccacagtcacaggacccaagtgtgactccttatgcttcattgatgtgatagttcataaggacgacaccagtaaagaattgctggaatggggc

SEQ ID NO: 16162 - DNA, 352 bp, Glycine max
  Clone ID: LIB3094-005-Q1-K1-C3
cgggcgcttttcagactatcctttccaatttccaagtgcttcaaagtttctctatgatggtcatggggcattttccgggattatatgtgtccaacgtgctttcaaggttaccatctaacgtgttgtctttatgcaagtgcgtgttcaagtcttcttatgaattcataaccgattctcattttgtttccaattactactgtgactacaacagtctttaaagccaataggattttctcttggtaatttcaagatcctttttttctgtcctcaaaacttacattattgttctttctttgaacaccaattgccccaaaaagcaatttccttctgattttctaaaccccttcctatg

SEQ ID NO: 16163 - DNA, 59 bp, Glycine max
  Clone ID: LIB3094-005-Q1-K1-C4
gcgacgccacagcgtaccggcaagtagagactgccaaaactcctaatgcggcgctctgc

SEQ ID NO: 16164 - DNA, 315 bp, Glycine max
  Clone ID: LIB3094-005-Q1-K1-C5
cagacgcgtgagtagtcctaagtctctggagaataaggctaaagatgactacagggcacggggagagtttcccgtaaaggagagactggaagcccaagcgagtgaagggatcatattgccatcaagtcagaagggagctcaaaacaaacactagcaggaaagtttgaggaaaaagagtgaacctgcttaacaaatccaacccagttcacaagaaggttccagcgaggattaacaaagagaagcccatagcagagtctattgtgacagttgaacacattgataggacatagaagaacaaccccatcttgcctactg

SEQ ID NO: 16165 - DNA, 281 bp, Glycine max
  Clone ID: LIB3094-005-Q1-K1-C6
cagacgcgtccgcagacgcgtccggccctagctgtcgctctctagaattcagggattcgcggtgcgagacgagagcgagcagccagagcccggcataggcacctcccaccaagggccggcggccggcggaacagtaccagcagcctcagccgcaagagcagcaaccctacagcatgatgccgacgcaggcccaggccccgcaggccatgtgggccccctagcgagccagccagcgcctcagcagcggcccgccagcgccgaccaggtccgaaccctctgga

SEQ ID NO: 16166 - DNA, 287 bp, Glycine max
  Clone ID: LIB3094-005-Q1-K1-C9
accacgcgttcgtctagcattgcattcttattgatcagtcgcatgcattgtgctatatatgggggcaactggctaatcacgaggcgatttaagatcatagcgtgtgttatgcaacaatggctaggacctttgctgcctatcatccttggcactctttgccatttccattactttaaacagtggtcatgcctgctactgaacaaggaggcctctagtatgacaacaagatcaatatttcaaattgaaattatcattatttaccaatgcccattacaatgctctaggat

SEQ ID NO: 16167 - DNA, 317 bp, Glycine max
  Clone ID: LIB3094-005-Q1-K1-D11
gtttgagtggacctgtctcagctacctttaccttggtattctctactcatgtcgtgcattcgtgtttcaaccggctccattggcttccttatgtcatactacttttgtgcacttccttggttctcattcagtaaagatagtttgaggttcttgttgtcattgcttattaactatgaaaaaggttgattgatataaactggttcacatttgcaatatatagggcatacggttgttaaattcatttgtttgattttatatttcaatggaatcttcaatttgttctccttatgcctgtttcccaatattattgtattaat

SEQ ID NO: 16168 - DNA, 453 bp, Glycine max
  Clone ID: LIB3094-005-Q1-K1-D5
atttgaaggttgttttgtgcttatagatataagttctgctctaatcaagagggggtttcagatcatagtgtgtgtgtgtgtgttaaacaatggctaagttctttgctgctatgatctttgcactcattgccatttccatgcttcaaacagttgttatggctgctaattggcaaggaggccacttttatgacaacaagagcaaatatggaagtgggagtatcaagatataccaatgcccaagacaatgctcgaggagatgtagccagacccaatacctcaagccctgcatgtttttctgtcagaagtgctgcaggatttgtctgtgtgtgcccccgatggattatggtaataaagctgtgtgcccttgctacaacaactggaagtatcaggaaggatgacccaagtgcccttgaacttcaacttcaatcaaattgtgctttttactataatttt

SEQ ID NO: 16169 - DNA, 284 bp, Glycine max
  Clone ID: LIB3094-005-Q1-K1-D7
acccacgcgtactgaatacaatcaacagtagctttctagctaatcaagatgcagagagaaccgtgtatgtaggtgaattgcgagcaaaaggtagagactccaacaaaaaaagcattgcttaacacctacaatgcaacataactctcatccaaccagtatgtatatagatatgtgcaaacaatagatgcacctttacagctcgtatggtccctcataaagcgctttgagtatacacaaaagtacaagctctttatgaagaaatgcaaccttcttgatggtgatgg

SEQ ID NO: 16170 - DNA, 114 bp, Glycine max
  Clone ID: LIB3094-005-Q1-K1-E11
gaaaaaaaaaaaagccttttactttttttcttttgcatgatttgaatcttgattggaaaagcgtcgaattggggtgttttacccatcaattcaattttaagccgtgccttcttc

SEQ ID NO: 16171 - DNA, 458 bp, Glycine max
  Clone ID: LIB3094-005-Q1-K1-E7
atcttatctttctctcttctctctccccgtccaaaccctaactccctaccctgttccgcgggtctctcatgcatcatgaaaggaggaaagtccaagaccgaagctaagagagccgattccaaacttgctgtgaataagatgggcgtggccaccaaatctaggaaacccgccggaaaggggaaggcagcgaaagatcctaacaagccaaagaggcctccaagtgctttcttcgttttcatgtaattataatatattgttatctctacgattcatttgactttcgatgcgctctcttatctttccttcgaataattttatcgtcaaaacttttatccttgtccaattgtaagtccacgcgttctttacctgttgatgcttgtttacctcgattgctttattgttaaaattatgttttttgagtaatgctagatctagcttatgcttcgtgaaacttgata

SEQ ID NO: 16172 - DNA, 442 bp, Glycine max
  Clone ID: LIB3094-005-Q1-K1-F10
acgtccacgcgtccggactgcccaagatgtatctttaatgttactgtgcgggctaaaaaccatggtctttttgatcaacaatggtggctacaccatcgaggttgaaattcatgatgggccgtacaatgtgattaagaactggaattacactgggttgattgatgcaatccacaatggtgaaggtaaatgctggactgccaaggtgttctgtgaagaggagctagttgaagcaatttccacagccacaggacccaagaaagactccttatgcttcattgatgtgattgttcataaggatgacacctgtaaagaattgcttgaatggtgctcaagggtttctgctgccaatatccgtccttccaatccttagtaatcttcaaaattttatactatgactaaattgctgcatttgccctttatctctattaaagtgagaatcatt

SEQ ID NO: 16173 - DNA, 457 bp, Glycine max
  Clone ID: LIB3094-005-Q1-K1-F12
taaacacccttgtcgaccacacctaaattaaaaacatataaaagcataaaatcagataaagacataaaaaagggaaaataaaacattttgaagtcatatttgcacacttgattaaaggctgtcgtcccttgtgacggatgcgtggggtgctaataccttccctgtgcgtaaaaacaactcccgaactattcacacttaaagttcgtagaccacaccttttcaattttcccgacgctatcctcaaataaaagttggtggcgactccgcgcattttcctttcatggaagacgcacttgtgagtcccgcatcgccctcccgtcaaagggtatgttgcgacagtacttgccctcccgtcgaatggtaagttccttaattgaattaactaataacaaaagtgaaactaaagctaaaataaactcacaaatcaagctttgtccataaaaatcacttaaaaacc

SEQ ID NO: 16174 - DNA, 442 bp, Glycine max
  unsure at all n locations
  Clone ID: LIB3094-005-Q1-K1-A6
acagagacgcgtggggagtcctagtatgcaagataaagagtcaaaaaatttcaaccccggatgcacaagtaacaaggaggcaaaagtcaaccgagttacattttagtcttgtaacctactaaaccagcaggaggtcgtgatctgtaaaatttgaaggaagaatacaagaaaatcttgaaaaagaaatgattttctcttctgagctgctgcttattgatcaataaaagcaactgcaattattttcgaagatggaaataaaatctcttctgcggtgttatctattagactgaattccaaattatgtaagaataatagctgagtatagaagagactgtaccaagaagcatagtgtgagagtcagagatcagttgttaagtatgagatgtgaagaacantttgttagtgtatattgctaagtagaagtgcaaaagatgattataga

SEQ ID NO: 16175 - DNA, 163 bp, Glycine max
  Clone ID: LIB3094-004-Q1-K1-E2
cgtacgacagcacataatggggctcaaagagattctttttgcgaaggcaatatatgatgaacacggcggattaaattttgacggcgcttcaactccctccctcgctttcagcatctaccactatgaatctcttcttatatctcatcctctagatcttctaaaa

SEQ ID NO: 16176 - DNA, 462 bp, Glycine max
  Clone ID: LIB3094-004-Q1-K1-E3
cccacgcgtccgagaaggcctgggcttttttgataagcataactgggtgaggaagaaggaaagagagtgaagaagatggcgtcgagcggagcggtaccgttttggagggcggcggggatgacgtacataacatactcaaacatatgcgcgaatctgctcaggaattgcctcaaggaaccctacaaggccgaatccctctctcgtgagaagctccattttgttctctccaaatgggtcgacgccaagcctgaaaaacctactattcgttcagacaccccagagcagtgatctggaatagttggaagctataaatgcataaatctttgagatctggaagttcattgtcattttgaacctttctgggatgtttaattaccttgtttcttcttttcatgaaatggaacatgcactggattttgatttgcaccggtaattttgtaataattcaagtttaaacaaatg

SEQ ID NO: 16177 - DNA, 446 bp, Glycine max
  Clone ID: LIB3094-004-Q1-K1-E4
acgcccacgcgtccgggtttaaatcacctctgaatttctgctatggcttcaaccagatcagtcttggttcttcttttcattcaggtgtgcttctcacttctacccttgtcattcgctcaatcccccgccaccgggtctaccgaaggttacaccatttatggtcgagtgaagatccccagtgtgggaacaaaagattatattcttcctggaaaaatttcaaatgtcaaagtcatactcaatggtggtcaaagagttacttttctgaggcctgatggatatttctcattccacaatgttcctgcagggacacatctaattgaagtggctgccataggctatttcttttcttccgtacgagttgatgtaagtgccaaacaccattgcaaaatttaagcagccctgacagaaaatatgagggggcttaatgaggtttgtcttggagccat

SEQ ID NO: 16178 - DNA, 423 bp, Glycine max
  Clone ID: LIB3094-004-Q1-K1-E6
gcaagtgtaacccaaaaccctagcggcgcctgctttcttcgttcgtcttttgcatcagccatcaggatggagtctcaggtgaagcatgctcttgttgtcaaagttatgggtcgtactggatccagaggacaggtgactcaggttagagtgaagtttttggatgatcagaaccgtcatatcatgaggaatgttaaaggaccagtgagagaaggagacattctcaccctactcgagtctgaaagggaagcaagaaggttgcgctagagggtatttttttcttgatctttatggtagttagttggtgctaaaggttatagcaccctgtcttgttgtcttggatctattttcattcaaattatgggttgaattttggatgtttggagtttaatatatgattttgaattatggcttaaattttggatt

SEQ ID NO: 16179 - DNA, 404 bp, Glycine max
  Clone ID: LIB3094-004-Q1-K1-F1
cccacgcgtccgccacgcgtccggtttctggtggaggatccaacttcagagcaattcatgaggcctccaaaaggggatcacttcatggagatgttcttgtgttggtcacaaataaaagtgattgtggaggtgcggagtatgcaagaaataatggtatcccagttatactgtaccatatatcaaaggatgaatctaatccaagtgaccttgttgatacactaaggaaatttgaggttgattttattcttttagctggatacctcaaacttataccagtggaattgatccgagcttacaaaagatctatattcaacattcatccatcacttcttccagcttttggaggcaagggattctatggcatgaaagtgcacaaagcagtaattgcttctggagcaaggttt

SEQ ID NO: 16180 - DNA, 391 bp, Glycine max
  Clone ID: LIB3094-004-Q1-K1-F11
tttcattttccctcactttctcgctcgccaaacgcccctctctctcctccaatggccgggcggctcaccgacgaccagagcgccgagttcaaggaggccttcagcctcttcgacaaggacggcgatggttgtattactactaaggaacttgggactgtgatgcggtcactagggcaaaacccaactgaggcagaactgcaggatatgattaatgaggttgatgctgatggcaatggaaccatcgactttccagagttcctcaacctgatggctcgcaagatgaaagacaccgactccgaggaggagcttaaggaggctttccgtgtgttcgacaaggatcagaatggtttcatctctgcagctgagctccgccatgtcatgacaaattttt

SEQ ID NO: 16181 - DNA, 389 bp, Glycine max
  Clone ID: LIB3094-004-Q1-K1-F4
cattctcctctctgaattcctcttattcaggaatttggagagtattgatatatcaaggtaggagaaaccagtagccaaggaagatatggagttttctatgattttcattgttagcaacattatgctgcttttcagttcagcatttgccaaaactgctagtcctccctctctgagcccaactccagcaccagccccggcaccagacttcgtgaacctcactgagttactcagtgttgctggtccgtttcacacctttcttggataccttgagtccactaaagtgattgacacttttcaaaaccaagccaacaacactgaagaaggaattaccatctttgtttctaaggacagtgccttcaatgctttaaagaaaactaccctattcaacc

SEQ ID NO: 16182 - DNA, 406 bp, Glycine max
  Clone ID: LIB3094-004-Q1-K1-F5
cccacgcgtccgatttccctggtgttgttaatcctcttgacaacgtgcattggacacaagagacaccaagtggtatgtatcagtattttattaaggttgtgcctacagtatacactgacgtgagtgggcatactatccagtcaaaccagttctctgtgacagaacacttcaggactggagacgtgggtcgtctgcagtcccttcccggggttttctttttctatgacctctctccaattaaggttacttttacagaagaaaatgtctcattcttacattttcttactaatgtttgtgccatagttggaggtattttcaccgtttctggaatactagattcattcatctatcacggtcaaagggctatcaagaagaagatggagcttggtaaatttaactgatggga

SEQ ID NO: 16183 - DNA, 346 bp, Glycine max
  Clone ID: LIB3094-004-Q1-K1-G1
tggaaattggcggaacctggaaactaatggaaagcataagttgactaagaaaactatgcaaaaagcacacatggttccatgaatcttcttccttcatcaaattcctgtgtgtttatgatctttgcccccaccaagccaagagtgagaaatggaagcaccatgggccacaacaagttcaagcatagtttttgtgatagtgatacttgctctaacatcatgggcatggaggatgttgaattggctatggataaggccaaagaggctagagaggctcctaagggaacaaggccttcaaggaaacccctacaggatattggttggggacttaaaggagattgtgaaattg

SEQ ID NO: 16184 - DNA, 420 bp, Glycine max
  Clone ID: LIB3094-004-Q1-K1-H1
cggacgcgtgggcagacttcccattccaatttccaagtttttcaaagaaggtgagtgaggagcatggagcatttgcgaggagaattggtgtccaacgtgctctcaaggttaccatcgaaggtgttgcttctatgcaagtgcgtgtgcaagtcctggttcgatctcataaccgatcctcattttgtttccaattactatgttgtctacaacagtctttaaagccaagaggagcatttcttggtaattcgaagaccctttttttctggcctcaaaacttacatttctgttctttcttggaacaccaatgaccccaaaaagcatgattcttctgatgttctaaaccctccctatgaatacaacctctgaccacaaatactggaccgaaattttgggtccttgcaatgggatatactttttaga

SEQ ID NO: 16185 - DNA, 459 bp, Glycine max
  Clone ID: LIB3094-005-Q1-K1-A10
cggacgcgtgggcggacgcgtgggttatcattcgcagctgcttttattcgcaccgcaaacagtgagccatggccgtcggaaagaacaagcgcatctccaaggggaagaagggtggcaagaagaaggcagctgatccctttgccaagaaggattggtatgacattaaggctccttctgtttttcaagagaaaaatgttggcaaaaccctcgtctctcgtactcagggtaccaagattgcttctgaaggactcaagcatagagtgtttgaagtctccttggctgatcttcaaagggatgaggatcatgcattcaagaagattatgttgagagctgaaaatgtgcaatggaagaatgttctgacaaatttctggggaatggatttcacaacagacaagctgactgtcattggtacgaaaatggcaaactcttattgaagcccatgttgatgtgaagacaact

SEQ ID NO: 16186 - DNA, 361 bp, Glycine max
  Clone ID: LIB3094-005-Q1-K1-A11
cttacacatctcgtattctagtatgtacggtagataatctgcttattgtagggggttatcggcgaatatcatgtcggctgatgtttagcgatgataccaatcgatcttgtcaacctaatcatcccactgtaggtctagaactggaatattttagtgaattatacaacgaactgtttaataggtacttatggcatcatgcgatctgatgcttatagatacatgaatacggctgatgctaattttgagtatggcaataatatcttttctgccgagtctgctctttcactgactatcgaagacagtgatgctaacattagccaatcagagatgctgtaccacgaggcatattgtgagagttata

SEQ ID NO: 16187 - DNA, 424 bp, Glycine max
  Clone ID: LIB3094-005-Q1-K1-A12
tcgaccacgcgttcgctcaattccataggggtgtagcattgaattgggttgatgtgcaatgcagggatcacggaaagctcttctggaaagaagggctatacaagaggctactagtgggaggaactatctgtattaagtttctctgacgttggttttttgttttgtggtgactggtcttcctcttcagcttatgtataagccatggccatggttatggtgatcatgaatctagagaagttccagttggtgtatcaaattggaatgaagatgaacacagtcaatgtaaaaactctaattctgctgatgaatatataactaaagagactgatgatgtctacatttccttctgagactatctactttgatggtgctaatactgatggtttaatcagtcgagcactttccattggaaaagcataaattc

SEQ ID NO: 16188 - DNA, 424 bp, Glycine max
  unsure at all n locations
  Clone ID: LIB3094-005-Q1-K1-A3
ggcggcgctgtggcgagacgcagccggcggtggttgaggatgaagacggagttcgacgtggggatcgaggaggtgccgagcaacgctagaatcgcggtgattaaagcgaggagggcattgacgaacctggcgctgagggaggcgaaagagttgatcgaaggggtgtcgaagaagttcaaggaagggatttcaaaagacgaagctgaagatgcgaagaagcaactcgaaagagctgagagccaaggttaccattgcttaaacactggttagctgcagcagtatatgttctgcttctagttttgttggttgtagttgagttcaccagtacgatngaatttcatttccattatggatggattgcaatcttttattatgaatgaggaaatatgagttctaattttatatgatttttttaacgcgtatg

SEQ ID NO: 16189 - DNA, 305 bp, Glycine max
  Clone ID: LIB3094-005-Q1-K1-A5
cccacacgtccagcaagcattgcatccctcatgaattgtagtttgtattgtgctttagagaaaaattctgccatataatgatgggttttaagatcataaggtatgttttgcaacaatgactaaattatttgctgctatgatcttgaaactctatgcaatttccatacttcaaacagtggtaatggatgctaatgaacaaggaggccacttgtatgacaaaaagagaaaacttggaagtgagagtgtaaagagtaaccaatgcccataacaatgctcgatgagatatatccagacccaataccaca

SEQ ID NO: 16190 - DNA, 448 bp, Glycine max
  Clone ID: LIB3094-004-Q1-K1-E11
cctaaacaactctttctcttcttccttcgctcgttgttctccctcgcgtagatcgacggtggcggagacagagacgtttgctttccaggctgagatcaaccagctcctcagtctcatcatcaacaccttctactccaacaaggagattttccttcgtgaactcatcagcaacgcctccgatgctttggacaagattcgatttgagagtttgacagataagagcaagctcgatgctcagccagagttgttcattcatattattccagacaagactaacaatacactgaccattgttgacagtggtattggcatgaccaaagctgatttggtgaacaacttgggtacaattgctagatctggtaccaaggaattcatggaagccttggctgctggtgctgatgttagtatgattggacagtttggtgtggggttctactctgcatatctt

SEQ ID NO: 16191 - DNA, 369 bp, Glycine max
  Clone ID: LIB3094-002-Q1-K1-H3
tgtaagttacatgatgtgaagttgcaaatgctttggagatcaccaacttcaaaatgggggtactgctacttgggtggcacttgttcttcgcaatttaagatggagtatttctgataaatctattatgtatggtttaaaggatacataccttcttggaaggagtcaatttctaacatctgaagaagctgacgtattaggacttactggatcaacagtactgcttgatggagcccacaccaaagaatctgccaaagctctgatgaataccataaggatggcatttcccaaggctcaattggtttttgttgttgcaatggcaagtgacaaagatcatgtgggatttgctcgagagattctctcaggtgtaca

SEQ ID NO: 16192 - DNA, 431 bp, Glycine max
  Clone ID: LIB3094-002-Q1-K1-H4
cccacgcgtccggactgcccaagatgtatcgacaatgttacggtgcgggcaaaaaggcatcatctttctgatcaacaatggtggatacaccatcgaggttgaaattcatgatgggccgtacaatgtgattaagaactggaattacactgggttgattgatgcaatccacaatggtgaagggaaatgctggactgccaaggtgttctgtgaagaggagctagttgaagcaattgccacagccacaggacccaagaaagactccttatgcttcattgaggtgattgttcataaggatgacaccagtaaagaattgcttgaatggggctcaagggtttctgctgccaatagccgtgctcccaatcctcagtaatcttcagaatttatcctatgactaaattgctgcagttgccctttagctctatgaaagtgag

SEQ ID NO: 16193 - DNA, 428 bp, Glycine max
  Clone ID: LIB3094-002-Q1-K1-H6
gggactcattgttcttctcccaggttatttagaaaagcaaaatggtgaagattggctgcattggtgctggatatgtggggggtcctactatggcagtcattgcacttaagtgcccatccattgaagttgctgttgttgatatctctaaatcccgcattgcagcctggaacagtgaccagcttcctatctatgaacctggccttgatggtgttgcgaagcaatgccgtggcaagaacctcttcttcagcactgatgttgaaaagcatgtctttgaggctgacatagtgtttgtctctgtcaacaccccaaccaaaactcagggtcttggagctggtaaagcagcagatttgacatattgcgagagcgcagctcgcatgaatgctgatgtttcgaagtctgacaagatcgttgtagagaaatccacagtc

SEQ ID NO: 16194 - DNA, 362 bp, Glycine max
  Clone ID: LIB3094-002-Q1-K1-H7
gggactcattgttctactcccaggttttttacaaaagcaaaatggtcaatattgtgtgcattgttgctggatatgtggggggtcctactatggcagtcattgcacttaagtgcccatccattgaagttgctgatgttgatatctctaaatcccgtattgcagcctgtaacagtgaccaccttcctatctatgaacctgtctcttgatggtgtagtgaagcaataccgaggcaagaactctatacttcagcactgatgttgaaaatcatgtcttggaggctgacataatgtttgtctctgtcaacaccccaaccaaaactcacgatcttggagctgttaaagcagcacatttgacatattggg

SEQ ID NO: 16195 - DNA, 283 bp, Glycine max
  Clone ID: LIB3094-002-Q1-K1-H9
tcgataggattccggtcctattgtgttggtcttcgggatcggagaagctgctacggcgggggcttgtgcagacccgcagagactatgtcagctgggacgggatacatgccactgaagctgcaaatagtatgatagcgtatgctgtgatcagcggctcctattcgtacccacctttcgatctttcaaagctatgtagcccttaagcatcatcagtcgtgaaagggagtacagtatcaccatacaccgcattttctctgaaacaagcaggcacatttttttcaaa

SEQ ID NO: 16196 - DNA, 409 bp, Glycine max
  Clone ID: LIB3094-004-Q1-K1-A1
ctctgctgcgtttgcttctcctccacccatctataaacgaacacacactttgattgagaatggggcgtgttcgcacaaagacagtgaagaagtcctcgcggcaagtgatcgagaggtactactctcgcatgacgctggacttccacacgaacaagaaggttctggaagaggtggccatcattccctccaagaggctccgcaacaagatcgcgggattctccacccacctcatgaagcggatccagaagggtcccgcacgtggaatctccctcaagctgcaggaggaggagcgcgagccccgcatggacttcgtccccgatgtctcccgccatagaaccgaccagatcgaggtcgacaaggagaccctcgacatgctttcccgcctcagaaagtcccaaggtttccgggg

SEQ ID NO: 16197 - DNA, 68 bp, Glycine max
  Clone ID: LIB3094-004-Q1-K1-A12
cccacgctttctataacgctagggccgactttttttctccttctgaatctacatactggggcttctat

SEQ ID NO: 16198 - DNA, 157 bp, Glycine max
  Clone ID: LIB3094-004-Q1-K1-A2
gcgtacgaaaaaaggttcatagttgatatcttctttttaacgatgaagtttgaagattttccagggggatgcatggcaaaaatactggcctacaccactctcgctgatgtattctagctttttttgtattacaaagcctttcatttcctatttaaat

SEQ ID NO: 16199 - DNA, 382 bp, Glycine max
  unsure at all n locations
  Clone ID: LIB3094-004-Q1-K1-A4
tgttgacctcacagtgaggctggagaaggaagcctcctacgatgaaattaaaaatgctgtcaaggaggaatcagagggcgagttgaagggaattcttggttacactgaagatgatgtggtctccaccgactttgtgggcgatagcagatcaagtatttttgatgcaaaggctggaattgcattgaataagaactttgtgaagcttgtctcttggtatgacaacgagtggggatacagctcacgtgtcattgacctgcttgtattcgntgccaagaagtctttttaaggctgtactgaaaaaaaagtagctttgctagacattatgggctggtgtctagctgcgatttagcgtcttcttgctcgggcagaaatgagaagtatg

SEQ ID NO: 16200 - DNA, 290 bp, Glycine max
  Clone ID: LIB3094-004-Q1-K1-A9
tcggtcagtcttcatagctaaaaatgttctttctcttccatctcagtatttgttgacatgcgggacatggtattggggggaccgggtccattgtatatatgaaacatccattctaattgtcaagtacttctcgtgaatttgtaccagtttgtcaaaccaatttacgacatgaagcaatcaaatatgtttaagaaggtgcaaaatcaatccaaatctatcatgtttccatgagagcttttaaagaagctgctaacaaggtttgcaccattaaaaatcagagttctggatac

SEQ ID NO: 16201 - DNA, 362 bp, Glycine max
  unsure at all n locations
  Clone ID: LIB3094-004-Q1-K1-B3
cccacgcgtccggataaattgtctcactccgacatgattgctgtcctctgggaaatgatattgagggggaccgacacggtggcggttttgattgagtggatactggcgaggatggtgcttcatccggaggtgcaaaggaaggtacaagaggagttggacgcggtggttaggggtggcgctttgacggaggaggtcgtggcggcgacggcgtatcttgcggcggtggtgaaagaggttctgaggctgcacccgccgggcccgcttctctcgtgggcccgcttggccatcactgatacgaccattgatgggtatcacgtgcctgcggngaccaccgctatggttaatatgtgggccataacaag

SEQ ID NO: 16202 - DNA, 354 bp, Glycine max
  Clone ID: LIB3094-004-Q1-K1-C11
tgcttcaccactttccgtatccctcatctactctacaacaatggatttcacttaccgctgacttctctcgatggggcgtctcctactacttccttctttgatctcatcacaaatctgccagataaactgtggctaataaactgtcaagtacccttttggcagtggtcctggttgtggtgaccctcgttttcaaccacatgtgacatgtatcaaccaaaagctcacattcaccactcacacaggctcctactcttgtaccttatttgactacaccaaccaagtcatatacatttcacatcccaccatttgaacatgctctttgcactgacccttactaaagctttttccttaact

SEQ ID NO: 16203 - DNA, 487 bp, Glycine max
  unsure at all n locations
  Clone ID: LIB3094-004-Q1-K1-C12
ctttctgccaaccgtcaggaattcaaaccttttcttatantcnnngttggtggaaaccctataaatgtggtggcgtggagttggatnaggaaccggagcannnaacagaactatttagtatctcaatctctcttgatnagtagaagtgnngtgctgactttcttgtgatccagtganntgctggtgaaatctctctcacttcattctcatgccttctcaagcgttgttctgttgcagttgcagtttttctgcaagtgaaattggaacaaacccaagttgggttcccttaaagtccttaaatagcctctgctgttcctccaagcctagaaatttatgcagatttttgtgtctgagcactcaaaatggtggcttcagagaaaactctggtgaaagtggacttggagatgcagtgataattgtggatcatggctcgcgtcgcaaagagtcaaatctcatgcttaatgaatttgtggagatgtttaagcat

SEQ ID NO: 16204 - DNA, 416 bp, Glycine max
  unsure at all n locations
  Clone ID: LIB3094-004-Q1-K1-C8
cccacgcgtccggaaaagggaagtaacttatgtgaataatatgaagggcggtcaagaaatctgaaaaacaccgtcctcttctaagagaacactaagtcagggttcagttgatatatatgctgctcagtgcaaaaattgcttgaaatggagagagattgatacacaggaagagtttgaagagattagaagtaaagttgctgaggaaccttttctttgcagcagaaaggctaatagttcctgtgatgaacctggtgatattaaatatgattcctctcggacatgggtgattgacaagcctaacctcccaaagactccacaaggttttaagaagagcttggtgcttagaaaagattactccaaattggacgcttactacatcacacctgcaggcanaaaactgagaacccgcaatgaga

SEQ ID NO: 16205 - DNA, 445 bp, Glycine max
  Clone ID: LIB3094-004-Q1-K1-D12
cccacgcgtccgtcaagcattgcatccctcttgatttgtagtttgttttgtgctttaggtaaaagttctgccaaatcaagaggggttttaagatcatagtgtgtgttttgcaacaatggctaagttctttgctgctatgatcttggcactctttgccatttccatactttaaacagtggtaatggctgctaatgaacaaggaggccacttgtttgacaacaagagcaaatatggaagtggaagtgtcaagagttaccaatgcccatcacaatgctcgaggagatgtagccagacccaataccacaagccctgcatgtttttctgtcagaagtgctgcatgacatgcctgtgtgtgccccccgggtattatggtaataaagctgtgtgcccttgctacaacaactggaagaccaatgaaggaggacccaagtgccccttgagcttc

SEQ ID NO: 16206 - DNA, 433 bp, Glycine max
  unsure at all n locations
  Clone ID: LIB3094-004-Q1-K1-D4
ttcaagaacaatttattgcacaaatattgacaagaagcttactcaagccgatgtcaaacactggtttgaatctatttgtggagaggttcaacggttgaggcttcttggagattaccatcattcaactcgaattgcttttgttgagttcacagtggctgagagtgcaattgcagctctaagctgtagtggggtgattctgggttcactgcccataagggtaagtccatcgaagacaccagttcgatcacgtgctcctcgccctactatgcactgaatcaactttccatgtttctggggttgattgctgctgagatatatttacatatatatatatacatagaaacagctgtgttctaaagaacatgtggcatttagttggtacttttgtcctcatgtcttacagtatggntactttgctttcccttggggatta

SEQ ID NO: 16207 - DNA, 374 bp, Glycine max
  unsure at all n locations
  Clone ID: LIB3094-004-Q1-K1-D8
ctctgctgcgtttgcttctcctccacccatccacaaacgaacacacactttgattgagaatggggcgtgttcgcacaaagacagtgaagaagtcctcgcggcaagtgatcgagaggtactactctcgcatgacgctggacttccacacgaacaagaaggttctggaagaggtggccatcattccctccaagaggctccgcaacaagatcgcgggattctccacccacctcatgaagcggatccagaagggtcccgtacgtggaatctccctcaagctgcangaagaggagcgcgagcgccgcatggacttcgttcccgatgtcttcgccatcagaaccgaccagatcgaggtcgacaaggagacgctcgacatg

SEQ ID NO: 16208 - DNA, 325 bp, Glycine max
  Clone ID: LIB3094-002-Q1-K1-H2
cggacgcgtggggtttcctagtatgctatgtaaagaatcagcaaatttcaaccccggatgcacgagtaacatgttgacaaaagtctaccgagttgcattttgttcttgtaacctcctcaacccactggaggtcgtgatctgtaaattttgagtgaattatacaacaaattcttgaaaaagaaatgattttctcttctgagctgctgcttattgatcgatgaatccaactgcaattattttcgaaaatggcaataaaatctcttctgccgtgttatctctttgactgaattccaaattttgtaagtataataattggctatgaaag

SEQ ID NO: 16209 - DNA, 429 bp, Glycine max
  Clone ID: LIB3094-002-Q1-K1-E2
atttgaaggttgttttgtgcttatagataaaagttctgccaaatcaagaggggtttgcagatcatagtgtgtgtgtgtgtgttaaacaatggctaagttctttgctgctatgatcttggcactcattgccatttccatgcttcaaacagtggttatggctgctaatgagcaaggaggccacttgtatgacaacaagagcaaatatggaagtgggagtgtcaagagataccaatgcccatcacaatgctcgaggagatgtagccagacccaataccacaagccctgcatgtttttctgtcagaagtgctgcaggaaatgcctgtgtgtgcccccggggtattatggtaataaagctgtgtgcccttgctacaacaactggaagaccaaggaaggaggacccaagtgcccttgaacttcaacttcatcaaa

SEQ ID NO: 16210 - DNA, 380 bp, Glycine max
  unsure at all n locations
  Clone ID: LIB3094-002-Q1-K1-E3
atttgaaggttgttttgtgcttatagtattaagttctgccaaatcaagaagggttttgggatcatagtgtgtgtgtgtgtgttaaacaatggctaagttctttgctgctatgatcttggcactcattgccatttccatgcttcaaacagtggttatggctgctaatgagcaaggaggccacttgtatgacaacaagagcaaatatggaagtgggagtgtcaagagataccaatgcccatcacaatgctcgaggagatgtagccagacccaataccacaagccctgcatgtttttctgtcagaagtgctgcaggaaatgcctgtgtgtgcccccggngtattatggtaataaagctgtgtgcccttgctacaacaactgga

SEQ ID NO: 16211 - DNA, 258 bp, Glycine max
  Clone ID: LIB3094-002-Q1-K1-E4
ttttgttcttatagataatagttcttccaaatcaagagcggtttgcagatcttataaaatttgtgtccctaaacaatctctaaattcttttctgctatcatcttatcactcattgccatttccattcttcaaacattatttattacttctaattatcaattattccacttttattacaacaatatcaaaatattaattttcactatcaatacataccaattcccatcacaattctctattacatatatccaaacccaa

SEQ ID NO: 16212 - DNA, 398 bp, Glycine max
  Clone ID: LIB3094-002-Q1-K1-E6
attcccgccgcgacccactcctacgtccacgcttccttttccttatcgttatctgctccctcaaatcaatatttgttttcgacatcatattatgtgtgtgtgtgttaaacaatggctaatttctttgctgctatgatcttgtcactcattgccatttccatgcttcaaacagtggttatggctgctaatgagcaatgatgccacttgtatgacaacaagagcaaatatcgaagtggcagtgtcaagagataccaatgcccatcacaatgctcgaagaaatgtaaccagacccaataccacaagcccttcatgtttttctgtcaaaagtgctgcaagaaatgcctgtgtgtgccccccttgtattatggtaataaatctgtgtgcccttgctacaacaa

SEQ ID NO: 16213 - DNA, 419 bp, Glycine max
  Clone ID: LIB3094-002-Q1-K1-F1
ggcggcgctgtggcggacgcgccggctgttgttgaggagaagacggagttcgacgtggtgatcgaggaggtgccgagcaacgctcgaatcgcggtgattaaggcggtgagggcattgacgaacctagcgctgaaggaggcgaaggagttgatcgaagggttgccgaagaagttcaaggaagggatttcaaaggacgaagctgaagatgcgaagaagcaactcgaagaagctggtgccaaggttaccattgcttaaacactgtttagctgcagcatatatgttctgcttcttcttttgttggttgtagttgagttcaccagtacactgtaatttcatttccattttgtctggatttcaatcttttatttgtaatgaggaaatatgagttcttatttttatattaatttttttaatgcgta

SEQ ID NO: 16214 - DNA, 346 bp, Glycine max
  Clone ID: LIB3094-002-Q1-K1-F10
aaaaaaggttcatagttgatatctccagcggaacgatgaagtttgaagatttggcagaaggatgcatggcaaaaatactgtcctacaccactcgtgcggatgtatgcaggctttctctggtttccaaagcctttcattccgcggctgaagccaacactgtgtgggattgctttctcccctctgatttgtcctctatcatctccccttcttcttccgttcctccctttcgctctattaaggatctctatctctatctctccgatcgtcccaccatcatcgatcaaggtataaagagttttcaattggagaagcggactgggaacaagtgttacatgctttccgttag

SEQ ID NO: 16215 - DNA, 376 bp, Glycine max
  Clone ID: LIB3094-002-Q1-K1-F2
ggcggcgctgtggctgactctccggctaggttgaggagaagactgagttcgacttgttgatttataaaggtgccgagcgagcgctcgaatcgctgtgattaaggctgtgagggcattgactaacctagctctgaaggatgctaaggattttatcgaaggttttccgaataagttcaaggaatggatttcaaaggactaatcttaagattctaataatcaactctaataatctggttccaaggttaccattgcttaaacactgtttagctgcatcatatatgttcttcttcttcttttgttggttgtatcttaattcaccagttcactgtaatttcattttcattttgtcttgatttcaatcttttattttttaata

SEQ ID NO: 16216 - DNA, 393 bp, Glycine max
  Clone ID: LIB3094-002-Q1-K1-F3
ggccgtgtcgcagcaaaaccaaaccacatattaacttgtttgctctaagtcatggcgctgatcttgcacgcaaccaaagcaaacaagaatgctttcaagactctgattgcggcagagtacagtggcgtccaagtggaattggcccctaatttcgagatgggtgtctctaatagaactcctgaattccttaaaatgaatcccataggaaaggttcctgtcttggaaacgcccgatggtccagtctttgagagcaatgccattgctcgttacgttgctcgactcaagggtgacaacgctttgttctcatcttctgccattgataatgcccacattgaccagtggattgacttttcatccttggagatcgatgctaatattatgaaattataccta

SEQ ID NO: 16217 - DNA, 419 bp, Glycine max
  unsure at all n locations
  Clone ID: LIB3094-002-Q1-K1-F4
ggccgtgtcgcagcaaaaccaaaccatatattaacttgtttgctctaagtcatggctgtnatcttgcacgcaaccaaagcaaacaagaatgctttcaagactctgattgcggcagagtacagtggcgtccaagtggaattggcccctaatttcgagatgggtgtctctaatagaactcctgaattccttaaaatgaatcccataggaaaggttcctgtcttggaaacgcccgatggtccagtctttgagagcaatgccattgctcgttacgttgctcgactcaagggtgacaacgctttgttctcatcttctgccattgataatgcccacattgaccagtggattgactgttcatccttggagatcgatgctaatattatgaaattatacctaccaagacttggatttgccccatacct

SEQ ID NO: 16218 - DNA, 308 bp, Glycine max
  Clone ID: LIB3094-002-Q1-K1-F5
cgcgtcctggcggcgctgtggcggacgcgccggcttgtggttgaggagaagactgagttcgacggtgggatttatgaagtggcgagcggggctcgaatcgcggtgattaaggcggtgagggcattgacaaacctagcgctgaaggaggcgaacgagttgatcgaagggttgtctatgatgttcatggtagggatttcaaaagacgaatcttaagatgacgagaatcatcttgaaaaacctggtgccacagttactattagtaaaacactttctagctacatcatatatgttctgggtgtcaaatcgtt

SEQ ID NO: 16219 - DNA, 268 bp, Glycine max
  Clone ID: LIB3094-002-Q1-K1-F7
ctttcacacaaccaaagcaaacaacaattctttcaagactctaatttccgcacattacaattccatccaactataattctcccctaatttccaaattattctctctaatacaactcctcaattccttaaaataaatcccataagaaacgttcctttcattgaaactcccaattttccagtcttttataccaattccattgctcgttacgattctcgactcaagatttacaactctttggtctcatcttcttccattgataattcccac

SEQ ID NO: 16220 - DNA, 414 bp, Glycine max
  Clone ID: LIB3094-002-Q1-K1-F8
gttcatttctacacatccctagctctgtcgttccgtcgttgacgatggcgtttcgggtgcgaagccctgacctccgctctctctttcttctctctctcttgtccatcgcttccgccaatgtcttcttcgaagagcgtttcgatgacgggtgggaaaatcgatgggttaaatcagattggaaaaaagatgagaacgtggctggggagtggaaccacacctctggtcaatggaatggagacgctaatgacaaaggtattcaaaccagtgaggattacagattctatgctatttcagctgagtaccctgaattcagcaacaagggtaagacactagtctttcaattttctgttaagcacgaacagaagcttgactgtggtggtggctacatgaagttgctcagtggggatgttgatc

SEQ ID NO: 16221 - DNA, 386 bp, Glycine max
  Clone ID: LIB3094-002-Q1-K1-G1
cccactcgtccgcccacgcgtcctttttctcgtgggcgcgagtgaacacaggttagatcaatttctaactgtggtggagttggtaatttattaagacagacagcaagcatgcaggttagttcataattgcgatcatccccttcgttttttcaggctatactcagtatgtcatctgctccaagcacaaagctgtttatcggaggtgtttcatattctactgacgagcaaagtttgagggaagctttttcaaaatatggtgaagttgttgatgctaggataattatggatcgtgaaactggtagatccagaggatttggctttattacatacacttcggttgatgaagcatcaagtgccattcatgccttggatggtcaagacctaca

SEQ ID NO: 16222 - DNA, 421 bp, Glycine max
  Clone ID: LIB3094-002-Q1-K1-G5
cccacgcgtccgcccacgcgtccgcgtacgcgtgggcgcgagtgaacacaggttacgagcaatggctttctttggtagaattgggaatttattaagacagacagcaagcaggcaggttagttcagaattgcgatcatccccttcgttttttcaggctatacgcagtatgtcatctgctccaagcacaaagctgtttatcggaggtgtttcatattctactgacgagcaaagtttgagggaagctttttcaaaatatggtgaagttgttgatgctaggataattatggatcgtgaaactggtagatccagaggatttggctttattacatacacttcggttgaggaggcatcaagtgccattcaggccttggatggtcaggacctacatggtcgcccgattagggtgaattatgctaatgaa

SEQ ID NO: 16223 - DNA, 348 bp, Glycine max
  Clone ID: LIB3094-002-Q1-K1-G6
cacactcctccgaccactcctcctatactcgaattcgcctaatacctcattgtagagcaataccttactatattatacttcataaataataaaatcttactcatttcattcagtttaaatcataatttataacatcctccattatcaatcatactatacatcacactttacatactacctccactcatctaaatacctcatctgtttcctataccactaataactactattagaccaacactcaatctctatcttacaaatcaatcgatcttcagataatcatctcactatccaactcgtttatacgaactacacagctttcttacatattatactcttacagaccca

SEQ ID NO: 16224 - DNA, 414 bp, Glycine max
  Clone ID: LIB3094-002-Q1-K1-H1
cggacgcgtggggtttcctagtatgcaaggtaaagaatcagcaaatttcaaccccggatgcacgagtaacatgttgacaaaagtctaccgagttgcattttgttcttgtaacctcctcaacccactggaggtcgtgatctgtaaattttgagtgaattatacaacaaattcttgaaaaagaaatgattttctcttctgagctgctgcttattgatcgatgaatccagctgcaattattttcgaagatggcaataaaatctcttctgcggtgttatctctttgactgaattccaaattttgtaagtataatagttggctatgaaagagactgtaccaagaagcatagtgtgagagtcagagatcagttgttaagtatgagatgtgagaacatttgttgaatgtatattgctaaat

SEQ ID NO: 16225 - DNA, 264 bp, Glycine max
  Clone ID: LIB3094-002-Q1-K1-H10
ggcggcgctgtggcggacgcgccggctttggttgaggagaagacggagttcgacgtgtggatcgatgaggtgcggagcggcgctcgaatcgcggtgattaaggctgtgagggcattgacaaacctagcgcttaaggaggcgaaggagttgatcgaatggttgccgaataagttcaaggaagggatttcaaaggacgaatcttaacaatcgtagtagcaacactaataatcttgtgccaagggtaccattgcttaaactctgttt

SEQ ID NO: 16226 - DNA, 233 bp, Glycine max
  Clone ID: LIB3094-002-Q1-K1-D9
tgtgatttcagtgatttatcgctgtgcacttgatctcatcatcatgcgcagctttaaacgaagaagatgccgatcctaaacatcgccgtcagaatgcctgaacaggcgactcaccccgacacgttgaaggcagctcttgcttaattcatctcaaccttcatcttcatgttcttctgctcacgcttcggcatcgcctacaacaagctcacccacaacaagtctgacacccctgc

SEQ ID NO: 16227 - DNA, 111 bp, Glycine max
  Clone ID: LIB3094-002-Q1-K1-A8
ctttgatttgattccttcgttgtttcgtcctgagagggtcaacagggacagccaggacccaaaccctctctctctctttctctcaccttccctcaaaaaccctagaaatta

SEQ ID NO: 16228 - DNA, 96 bp, Glycine max
  unsure at all n locations
  Clone ID: LIB3094-002-Q1-K1-A9
cgaacccanngttcaagaacccatgcaaattggaccaatgtgctnaaaagtgnngggcaaaccaacaagggggtcaaaaagggtgnnngtggtgtg

SEQ ID NO: 16229 - DNA, 304 bp, Glycine max
  Clone ID: LIB3094-002-Q1-K1-B1
cactcttctctacataatatttttttctaatcacaaccctaataataataaccgcagcttttaactagttacatccgccatccatatttcttatacacatcctttttaaggttatatcctcttcttcttttccctacataattacaccctctagcttactcaatatctcttcacaatatatttaataaaatatcttcatttttactaaataatattttgaccctatctcataattttttcattctttataattctcactcttatttctcatattaacaactttacattcatcaaaattcttttt

SEQ ID NO: 16230 - DNA, 428 bp, Glycine max
  Clone ID: LIB3094-002-Q1-K1-B4
atttgaaggttgttttgtgcttatagataaaagttctgccaaatcaagaggggttttgagatcatagtgtgtgtgtgtgtgttaaacaatggctaagttctttgctgctatgatcttggcactcattgccatttccatgcttcaaacagtggttatggctgctaatgagcaaggaggccacttgtatgacaacaagagcaaatatggaagtgggagtgtcaagagataccaatgcccatcacaatgctcgaggagatgtagccagacccaataccacaagccctgcatgtttttctgtcagaagtgctgcaagaaatgcctgtgtgtgcccccggggtattatggtaataaagctgtgtgcccttgctacaacaactggaagaccaaggaaagaggacccaagtgcccttgaacttcaactcatcaaa

SEQ ID NO: 16231 - DNA, 306 bp, Glycine max
  Clone ID: LIB3094-002-Q1-K1-B6
tgtgtgtgtcctaaacacaagctaagatctcttctgctattatcttggcactcattgccatttccatgcttcaaacactggttatggctgctaatgagcaatgatgccacttgtattacaacacgagcaaatatacaattgtgagtgtcaagagataccaattcccatcacaatgctctacgagatgtatccagacccaataccacaagccctgcatatttttctgtcagaagttctccatgaaatacctgtttgtgccccccatgtattatggtaataaaacattgtgcccttgctacaacaact

SEQ ID NO: 16232 - DNA, 420 bp, Glycine max
  Clone ID: LIB3094-002-Q1-K1-B8
ctgagttgcaagattcacttcaaattatgcgtttcgctgatcggttcctcatcagggcaaacgacgtcgcagatcatcgcaattccttgattatttccttttgttgatacgcggaatcgcgcacacggtgctggtgtgtgcactgaggtagaaagaagaagattgaattgtaaacagcatgaattaccttcttggagctttcaagcctgcatgtaatgtcttgatcacgtttaatgatgggaagaaccggaagcaggttccgtttaaaaaagaaaatggtcaaatggtcacagtcccacttttccaaagtcaagaaaacattggtgggaagattacaatagaaccaatgcaagggaagaagattgatcacaatggtgtaaaagttgagctccttggacagatagagatgtactttgacag

SEQ ID NO: 16233 - DNA, 359 bp, Glycine max
  Clone ID: LIB3094-002-Q1-K1-C2
cgcaccagtttcaccgcacgaatatcttgttgtttggagcgatccgagaaaaactgtgtaaacatgttggtttaccaggacctccttacaggtgatgagcttctctctgactccttccgttacaaggaaattgagaatggaatgctgtgggaagttgaggggaagtgggttgttaaaggagcagttgatgtagacattggtgcaaacccttctgctgagggtggaggagaagatgagggagttgatgatgcagctgttaaggttgttgacattgttgacacattcagacttcaggagcaacccgcattcgataagaagcactttgttaccttcatgaagaggtttatcaagaatttgac

SEQ ID NO: 16234 - DNA, 354 bp, Glycine max
  Clone ID: LIB3094-002-Q1-K1-C3
aagaatcaaagaaaggggtggtggctgcttcgaaagcttaataatttgtttatttcgagaacatcatagttttcgcagcagcaaactaacaaattactcatatcatataataagatggcccgttctctctcgcaagccaaacgtattggtgtccttgttgctcaatctatctccctaattcccgttcatcggcgaggttacgcagtggcatccgatgtatcggtaagagttggattgggtaatattgggcgaaggaatggaatcgtgggaggtgtagaagagaagcctgatacaagagatggttcaaaagcctactcaactgattgggccccagacccagtaacaagttactat

SEQ ID NO: 16235 - DNA, 125 bp, Glycine max
  Clone ID: LIB3094-002-Q1-K1-C4
cgcaccaatatcaccgcacgaatatttctttgaaagcagcgatccgagaaaaactcgataaacttataagtttaccaggacctccttaccagttaacagacttcctctgactccttccgctacaa

SEQ ID NO: 16236 - DNA, 321 bp, Glycine max
  Clone ID: LIB3094-002-Q1-K1-C5
aatatacaaaagttccaatctctatttctaaatcttatttaaagtccaattagctgtgcattttaattgtcatagaagcatactaacatactacttacaccatacatcataatatccccatctctataacaaaccaaccgtctctctatactatccactcaatctaactccttcattccacttcatagctcatgtatcgcatcacctatactcaatatcacttacagtcgcattcaacaatattactccaaaaaccctaactttacccaacttaaaagacaaacctcacacaccacattcatcaaaagccttcttaactaa

SEQ ID NO: 16237 - DNA, 403 bp, Glycine max
  Clone ID: LIB3094-002-Q1-K1-C6
cgcaccagtttcaccgcacgaatatctttttgtttggagcgatccgagaaaaactctggaaacatgttggtttaccaggacctccttacaggtgatgagcttctctctgactccttccgttacaaggaaattgagaatggaatgctgtgggaagttgaggggaagtgggttgttaaaggagcagttgatgtagacattggtgcaaacccttctgctgagggtggaggagaagatgagggagttgatgatgcagctgttaaggttgttgacattgttgacacattcagacttcaggagcaacccgcattcgataagaagcagtttgttaccttcatgaaaaggtttatcaagaatttgactcccaagctcgatgcagagcaacatgagttgtttaagaagcaca

SEQ ID NO: 16238 - DNA, 344 bp, Glycine max
  Clone ID: LIB3094-002-Q1-K1-C7
tccgggacctggtctctcttttctcttttctctcatccaatcttgaaaagggggaaaacacaatggcacgagcgctcccactccaccgaaagttcggtacatggcgaactgcggacaggccgagcgctacagagatgtggattcatggaaagtctcgctccgcgaagcgaggagctcccgggacgacgcacctcctctcagccctacagaactaatcggcctcgccgcgcctctggagcatcatctcatcatgagcacaagaggagagcccggcaacgatgaccaatcggcgtcaccggactaccggccaagatcgagccgactctacacatttgcacggaatc

SEQ ID NO: 16239 - DNA, 350 bp, Glycine max
  Clone ID: LIB3094-002-Q1-K1-C8
attccctcgtcgacccactcctccgtacactcctagaaatatctctttttttttatctctcatccatatccataaacatcaacatttcttaacttcagctagccctcccactccactacaacagtccatgtccctacctaatctcaaacatccagcaacaccactactatcatactaattatttcacacataacgtcaccttctacaccttaaagccataacctcaccttacataatctcaaactcttcttcctaacctacacaaccctaatctccactcttctctactcctttcacattatatccaacattccccataattactaaatccttaaaaactaacaccattt

SEQ ID NO: 16240 - DNA, 131 bp, Glycine max
  Clone ID: LIB3094-002-Q1-K1-C9
ctgtctacctgcccactgtcgtggggattttttcaccaggctagaggtagctaacttgctctacctccgttccccgatcgagcattcgtcatagacattgatgatattgagagcgttgtcttcaatgtaag

SEQ ID NO: 16241 - DNA, 388 bp, Glycine max
  Clone ID: LIB3094-002-Q1-K1-D1
cccacgcgtccggagggctcagaggatcttcgatgcgagtagggaccggtcgttgcctgtgtttggtgttggagttgtgtgctattgatgagagtgccgtgttgccgattccttctaatgaaatggaggaagcggttcacgttgatagtgaggttgtgtccattttggccccaccaaggaaggagttgcatattgatcctattgagaccgtttattcctcggattctggtgatgggaaggagaggataaccaaggtagtgaacacagtgattgatccaactggaagggaggatgtattgctctgtctgcgaatgttggcgctacaaaaggttgcttctgaatttgggtataacaggatcattctggggtcatgcatttcgaggattgc

SEQ ID NO: 16242 - DNA, 208 bp, Glycine max
  Clone ID: LIB3094-002-Q1-K1-D2
gtttacatcacgagaaacaacgccactcttaaatcccttttttgtgtccatgggcaggagcatgctgaggctagtgttgggcttgtctgttttgagttgtgtgcttgtgacatcctcagctcaaacgtgcagaaaccaaacattctcaaacagggtgtttgccacatgtcgtgatcttccacagttgacggcttacctgcactggaca

SEQ ID NO: 16243 - DNA, 394 bp, Glycine max
  Clone ID: LIB3094-002-Q1-K1-A7
tcctggcggcactcttgcggacacaacagttcttgctaatcgcaaccctaataagaagaaggagagcttcaagcgagtgacatccaccagccatgggtcgtatgcacagccgcggtaagggtatatcctcttctgctttgccctacaaaaggacaccccctagctggctcaagatctcttcgcaagatgtggaagaaaatatctgcaagtatgcgaagaagggtctgaccccgtctcatattggtgtcattcttcgagattctcacggtattgctcaggtcaacagcgtcactggcagcaaaatccttcgcatcctcaaagctcacgggcttgcgcctgaaattccagaggatctttaccatttgattaagaaggcagtttcaattaagaagca

SEQ ID NO: 16244 - DNA, 420 bp, Glycine max
  Clone ID: LIB3094-002-Q1-K1-D4
ggtaggtccatttatagcttctatacacgccttcaattctgaggtggtataagagagtgttacatttttcatgctggcaaatgtaagaaagcactttgatggtttgtttctaaacagttttattgaattattttcttttgacatctatgaacaatacatatactaggcacatgattcaggttcaattcatgggaatactaaaacacatcctgctaagattgctttatgagaatcattgcgatgatgtaatttctgcagtctttccatggatactactttccttatcaattttattgtattaattctagatgttccaaatagtctatcttcactttaaatagttaaattatcatattgagactctacggaggagccattcgccaagaactgtactacctcctcaaagatgagaatgatgtt

SEQ ID NO: 16245 - DNA, 416 bp, Glycine max
  Clone ID: LIB3094-002-Q1-K1-D6
gttgtgtgcaacccattggggaagtctggaggtgccctcatccagcaattaatggtggtgacttttgggtcactagctaattcaaccgcatacttgtgaggagtgcttctgctgattgattctgcctgtctagcatctgcaaaatgcttggatccccaatttactgcattgcgtaaagaggaagaactcgagaacgatatggaacgagcagtcgacgtcaagataccagtggtggctgagactgagagtgtaaatggtactcttgcatctgattcaccactgaattcatactcaggtgactcctcaagcagtccatctgaatcctcaactgcttacaattaaaatgtgccttctttctgtgtgaaattgcctcacagaatgagcacattgatctcttttgagagcagtgataggtg

SEQ ID NO: 16246 - DNA, 287 bp, Glycine max
  Clone ID: LIB3094-002-Q1-K1-D7
gttgcgtgcaacccattgacaaagtctggatgtcccctcatccatcaatcaatgagattgacttttgggtcactagctaattcaaccccatacttgtaacgattgcttctgctaatcaattctgcctatctagcatcttcaaaatccttgaatacccaatttactgcattgcgtaaagaggactaactctagaaagatattgaactagcaatcgactacaagataccaatgattgctgagacttagaagtgaaattgtactcttgcatctgattcaccactgaattc

SEQ ID NO: 16247 - DNA, 444 bp, Glycine max
  Clone ID: LIB3094-001-Q1-K1-G3
cctaaacaactctttctcttcttccttcgctcgttgttctccctcgcgtagatcgacaatggcggagacagagacgtttgctttccaggctgagatcaaccagctcctcagtctcatcatcaacaccttctactccaacaaggagattttccttcgtgaactcatcagcaacgcctccgatgctttggacaagattcgatttgagagtttgacagataagagcaagctcgatgctcagccagagttgttcattcatattattccagacaagactaacaatacactgaccattgttgacagtggtattggcatgaccaaagctgatttggtgaacaacttgggtaccattgctagaactggtaccaacgaattcatggaagccttggctgctggtgctgatgttagtatgattggacaatttggtgtgggggtctactctgcata

SEQ ID NO: 16248 - DNA, 304 bp, Glycine max
  unsure at all n locations
  Clone ID: LIB3094-001-Q1-K1-G5
ctttctcttcttcctcctctcttcgttttccctcncgtaaatctacaatagcggactgacaaacttttactttccacgcgcctatcaaccatctcctcattctcatcatcaacaccttctactccaacacagagattttccttcttgaactcatcatcaacacctcctatactctttacaacattctattttataattttacacataatatcacactctatactcatccacagctgttcattcatattatttcacacaacactaacactacacttaccataccttacaccactattttcattac

SEQ ID NO: 16249 - DNA, 456 bp, Glycine max
  Clone ID: LIB3094-001-Q1-K1-G6
cccacgcgtccgcccagcgtccgaattcctcaaccacacttgccatatcaaagaaaagagcatgaacatcagatcaaagatacaacatggaggcacttcaatcatgggtttcaaagcacaagctcgccagcattggggcactctgggcctctggaattggagcaacacttgtggcttattcatgcaaaaagtctccaatgaagccaagtctcaggcttatccatgctaggatgcatgctcaggctctaactttagcagtgctatccggtgcagctgcttatcattattatgagaaacgtgatgttcagccaaaaccagaggcagattatattattcctgctcccaatgtcacccagatggttgaatatgaacttcaatgtcctttctaaaaattaaaaataaaacttgtagggtcatgttattaagattaggagatattcctatcatcgagttttt

SEQ ID NO: 16250 - DNA, 278 bp, Glycine max
  Clone ID: LIB3094-001-Q1-K1-G7
cctaaacaactctttctcttcttccttctctcttcgttctccctcacgtagatctacaatatcgcatgcttagactataactttccacgctcatatcaaccatctcctcattctcatcatcaacaccttctactccaacaacgagattttccttcctgaactcatcatcaacacctcctatactttttacaaaattctattttaaaattttacacataataacaaactccatactcatccccaatttttcaatccatatatttccaaacaaaactatc

SEQ ID NO: 16251 - DNA, 437 bp, Glycine max
  Clone ID: LIB3094-001-Q1-K1-G8
gttgccgggctctaccgtggtttcaacatctcatgtgttggaatcatcgtgtatcgtggtctgtactttggattgtatgattctgttaaaccagttgtcctcacagggtcattgcaggatagcttttttgccagctttgcccttggatggctcatcaccaatggtgcaggtcttgcatcatacccaatagacactgttagaagaagaatgatgatgacctctggtgaagctgtcaagtacaagagctccttggatgcattcacacagatcctcaagaatgagggtgccaagtccttgttcaagggtgccggtgccaacatcctccgtgccgttgccggtgctggtgtgcttgctggttatgacaagttgcaggttcttgtgttcggcaagaagtacggctctggtggggcttaagttctaatgctgagtcagtacta

SEQ ID NO: 16252 - DNA, 274 bp, Glycine max
  Clone ID: LIB3094-001-Q1-K1-H11
tcctccttatttacaccgcacgtttttataaaaaatattgccgccctacttctatctcccacctactatatctcctccttctttacctattaaccaattaaacaacacacttcatcacaaaactttctttattccatttcctcaaacttattttatatatatattaattctatatctcttttctcatttttactatttttttcttcatttaataaacttaaaaatataattaatattttctatttctttattatcaatatattcaatacccctt

SEQ ID NO: 16253 - DNA, 200 bp, Glycine max
  Clone ID: LIB3094-001-Q1-K1-H2
tctctaccgttgtttcattatcttttttgttggaatcatccattatcgtgatctggtctaattattgtatgagtctgttaaaccaattttcctcacatggtcatttcatcataacttttttgccatctttgccctttgattgctcatcaccaattactcatgtctttcatcatacccaatatacactgttataataaaaa

SEQ ID NO: 16254 - DNA, 394 bp, Glycine max
  Clone ID: LIB3094-001-Q1-K1-H5
cccacgcgtccggactgcccaagatgtatcgacaatgttacggtgcgggcaaaaaaccatcatgtttctgatcaacaatggtggatacaccatcgaggttgaaattcatgatgggccgtacaatgtgattaagaactggaattacactgggttgattgatgcaatccacaatggtgaagggaaatgctggactgccaaggtgttctgtgaagaggagctagttgaagcaattgccacagccacaggacccaagaaagactccttatgcttcattgaggtggatggtcataaggatgacaccagtaaagaattgcttgaatggggctcaagggtttcttgctgcaatagccgtcctcccaatcctcaggtatcttcagaatttatcctatgacta

SEQ ID NO: 16255 - DNA, 469 bp, Glycine max
  unsure at all n locations
  Clone ID: LIB3094-001-Q1-K1-H7
cgcgtcgctgctccgtaccagtttcactgcataaatttgagagaaaactctgcaaacgtgttggtttatcaggacctccttacaggtgatgagcttctctcggactccttccgttacaatgaaattgagaatggaatgctgtgggaagttgaggggaagtgggttgttaagggagcagttgatgttgacattggtgcaaacccttctgctgagggtggagaagatgagggagtcgatgacgcagctgttaaggttgttgacattgttgatacattcagacttcaggagcaacccgcttttgataagaaacagtttgttaccttcatgaagaggtttatcaagaatttgactcccaagctcgatgcagagaaacaagagttgnttaagaagcacattgagggagcaactaaatacctgctctctaagattaaggatttccagttttttggtggggagagcatgaatgatg

SEQ ID NO: 16256 - DNA, 396 bp, Glycine max
  Clone ID: LIB3094-001-Q1-K1-H8
ctgctccgtaccagtttcactgcatatatttgagagaaaactctgcaaacagtgttggtttatcatgacctgcggacaggtcatgagcttctctcggactccttccgttacaatgaaattgagaatggaatgctgtgggaagttgaggggaagtgggttgttaagggagcagttgatgttgacattggtgcaaacccttctgctgagggtggagaagatgagggagtcgatgacgcagctgttaaggttgttgacattgttgatacattcatacttcaagagcaacccgcttttgataagaaacagtttgttaccttcatgaagaggtttatcaagaattttacttccaagctcgatgcatagaaacaagaattttgttaataagcacatttatgg

SEQ ID NO: 16257 - DNA, 301 bp, Glycine max
  Clone ID: LIB3094-002-Q1-K1-A10
gttaatctttccggccttgacctctctaaactggatttatcttatgttgatttcaggtatgcttgtcttaaaaacgtgtttttttcacgagcaaaccttcaatgtgcaaagtttcgagatgttgatgccgagggctccatctttcacaatgcaactttgcgtgaatgtgaatttactgcggcaaatcttcgtggtgctttattggctggtgcatgccttcagagtgcaaatctacaagatgcttgcttagtagactctagcttctgtggagcagatctgcgtactgcacatctacagaatg

SEQ ID NO: 16258 - DNA, 443 bp, Glycine max
  Clone ID: LIB3094-002-Q1-K1-A11
cccacgcgtccgcccacgcgtccgcatggaagttgtggaagttgttgggcgttctcgacggtggccacagtggaagcaataaacaagatagtgacagggaagtttgtgtccttatctgaacaagaacttgtggactgtgacagagcctacaatgaaggatgcaatggtggccttatggactatgcattcgaattcatcattcaaaatggaggcattgacacagacaaagattacccataccgtggctttgatggcatctgtgatccaactaagaaaaatgcaaaggttgtgaacattgatgggttcgaagatgttccaccgtatgatgagaatgccttgaagaaagctgtcggtcatcaacccgtaagcattgctattgaagcctctggcagagatttgcaactttatcaatcgggtgtatttactggtaaatgtgggacaag

SEQ ID NO: 16259 - DNA, 428 bp, Glycine max
  Clone ID: LIB3094-002-Q1-K1-A2
ctcttctctctctctcggatttcttgcgcggtttatcatgggggatagtcagtatgcgttttctctcaccacatttagcccttctggaaagcttgttcagattgagcatgctttgacggctgtcgggtctggacaaacgtctttgggaattaaagctgcaaatggagttgtcattgctaccgagaagaaattgccatctatattggttgatgaagcatcagtccagaaaattcagttattaacaccaaatataggtgtcgtatatagtggcatgggtcctgattttcgagttttggttcggaaaagcaggaaacaagccgagcagtatcaccgtttatataaagaaccaattcctgtcactcaacttgtcagggaagttgccgccgtaatgcaagaatttactcaatctggtggtgttaggccttttg

SEQ ID NO: 16260 - DNA, 359 bp, Glycine max
  unsure at all n locations
  Clone ID: LIB3094-002-Q1-K1-A3
ggcggcgctgtggcggacgcgccggcggtggttgatgagaagactgagttcgacgtggtgatcgatgaggtgccgagcaacgctcgaatcgcggggattaaggcggcgagggcattgacgaacctagcgctgaaggaggcgaaggagttgatcgaagggttgccgaagaagttcaaggaagggatttcaaaggacgaagctgaagatgcgaagaagcaactcgaagaagctggtgccaaagttaccattgcttaaacactngttagctgcagcatatatgtgctgcttcttcttttgttggttgtagctgagttcaccagtacacttgaatttcatttccattatgtctggatttcaat

SEQ ID NO: 16261 - DNA, 268 bp, Glycine max
  Clone ID: LIB3094-002-Q1-K1-A5
aatccggataagcggtagcattacaacctacctaagagcaagagttatcaagttgccaaaattaggaaggattcaaagacaactgaaatcgaaaacactcaagaactgtccaagttaccatgcttaacctgttactgcactatatatctcttttctttgtggtgtagttagtcaccatcacttatttatttcatttggctgaattaatctttattgtatgagaaatataattcttatttatatatttttttatgcctttagtgttttt

SEQ ID NO: 16262 - DNA, 441 bp, Glycine max
  Clone ID: LIB3094-001-Q1-K1-G2
cctaagcaactgtttctcttcatccttcgctttttgctttccctctcgtatatcaacaatagcgtcatgttaaacatatcctttacacgctcatatcaaccatcttctcagtctcatcatcaccaccttctactccaacaagcacactttccctcttgaactcatcaaccactccttccatactcttgccaaaattctccaataaagcctaacatataacatctacctgctattatcacatcctaatgctcttacattttcattcatatacgactcacattactatcaccattattaaaaaccttattttcatccccaaccactaactcattatattattccttccaccaatctcacccacataccttaatattaacctcaatcttctttttaaaaactaaaaataatactatttgactcattttttaaaattataatata

SEQ ID NO: 16263 - DNA, 394 bp, Glycine max
  Clone ID: LIB3094-001-Q1-K1-D9
ggagattctgatttgttctctcagatctgagcttaccgtcgccggaatccaactcaacctgggtcggattcttgggtatcatcgcatcgccattcgttttagcctctcaataagagattttagttcgcttcaaattcgaggtttgatttgaagttgaaagttggaatagcttaactgttgtgtaaaacaaccaacacacacgagcatgggaagccaagacaacaacgtagaattgtcatccaattcatttctagcttacaaatctgctaaggtgtttgttgctggtcaccggggtcttgttggctcggccattggtcgcaagctcacccaacttgggttcactaatctagtcttgcgcttccatgccgagcttgatctcactcgacaatctgat

SEQ ID NO: 16264 - DNA, 315 bp, Glycine max
  Clone ID: LIB3094-001-Q1-K1-E1
cccacgcttccttcaagcattgcatccctctttatttttactctgttttgtgctttacataacgcttcgtttcaaatcaaaaggtgttctaatatcataatttgttttttccaacaatgtctaatttctttactgctataatcttcacactctttgccatttccatacttcaaacattactaatctctactaatgaacaattattccacttgtatcacaacaataccaaatattcaatttcaactatcaatatttaccaattcccatcacaatactctaagatatatatccctacccaattccacaatcccttca

SEQ ID NO: 16265 - DNA, 114 bp, Glycine max
  Clone ID: LIB3094-001-Q1-K1-E10
gaaaaaaaaaaaagccttttactttttttcttttgcatgatttgaatcttgattggaaaagcttcgagttggggtgttttacccatcaattcaattttaagccgtgccttcttc

SEQ ID NO: 16266 - DNA, 289 bp, Glycine max
  unsure at all n locations
  Clone ID: LIB3094-001-Q1-K1-E12
tcttgcttcaccactttccgtatccctcagcttcacgacaacaatggatttcacttacccttgactgctctccattntccttctgctactacttccttctctgatctcatcacaaatctgccagaaaaactgtgggcaagaaactgtcaagtacccttttggcagtggtcctggttgtggagaccctcgtttccaaccacatgtgacatgtagcaaccaaaagctcacattcaccactcacacaagctcctaccctgttacctcaattgactacaccaaccaagtcata

SEQ ID NO: 16267 - DNA, 425 bp, Glycine max
  Clone ID: LIB3094-001-Q1-K1-E2
ctccacccacgcgtccgcccacgcgtccgcccacgctttcctcacgcgtccgtctccctctttctagcactgtctctatgcattgttgtctcgctctctgccttccatcacactcggcatttcctttcccaagatactataatatggcagacactgaggatattcaacctcttgtttgtgacaatggaacatgaatggttaaggctggatttgctggaaatgatgccccacgtgctgtgtttcccagcattgtaagtcgtcctcgtcacactggtgtgatggttggcatgggccaaaaagatgcatatgttggtgattaagcacaatctaaaaggtgtattttgactcttaaataccccattgaacattgaattgtgagcaatttgcgatgatatggaaaagaattggcatcataccttctataa

SEQ ID NO: 16268 - DNA, 345 bp, Glycine max
  Clone ID: LIB3094-001-Q1-K1-E3
cccacgcgtccgcccacgcgtccgcccacgcgtccgcccacgcgtccgtctccctctttctcgtcactagctctgtgcattcttctctcgctctctgccttccatcacactcggcatttcctttcccaagatagtagaagatggcagacactgaggatattcaacctcttgtttgtgacaatggaacaggaatggttaaggctggatttgctggagatgatgccccacgtgctgtgtttcccagcattgtaggtcgtcctcgtcacactggtgtgatggttggcatgggccaaaaagatgcatatgttggtgatgaagcacaatctaagaaggggtatttgactc

SEQ ID NO: 16269 - DNA, 334 bp, Glycine max
  Clone ID: LIB3094-001-Q1-K1-E6
gggaagaatcactcccttatccatttccacacttcaccatggcctcaaccaacgctctcgcttgtcctccattctacgctgtcccaaccgccagtctctgacccgaagagcgaaccataatggaagagtaaattaccggaaaccgaataaccgtttctccgtgaaagcctccgccaaagagattgcctttgaccagcattcccgctctgctatgcaggccggcattgacaagctcgccgacgctgttgggctcactcttgggcccagagggaggaatgttgtgttggatgagtttggaagtcctaaagtggtcaacgatggtgtcaccattgct

SEQ ID NO: 16270 - DNA, 296 bp, Glycine max
  Clone ID: LIB3094-001-Q1-K1-E7
ggaagaatcactcccttatccatttccacaccacaccatggcctcaaccaacgctctcgcttgagcctccattctacgctctcccaaccgccagtctctgacccgaagagcgaaccataatggaagagtaaattaccggaaaccgaataaccgtttctccgtgaaagcctccgccaaagagattgcctttgaccagcattcccgctctgctatgcaggccggcattgacaagctcgccgacgctgttgggctcactcttgggcccagagggaggaatgttgtgttggatgagtttt

SEQ ID NO: 16271 - DNA, 291 bp, Glycine max
  Clone ID: LIB3094-001-Q1-K1-E8
ccacacttacgcccacgcttactccaaaacccaaaatattaatttcccttaaattcccaaaatccaaaaggatagatccaatatcacatgaatcccgctaacccataccaaaaccaatagagataaacaaatcgccaaacacgataacaagaataatactaacaaacccaatctcatcaatctcacttcaaaacatccatactaaccatccaaaaacgtattatcacaatcaaaactataacaagctaaaatcaacttttttcctatcaatcgcatcaaaactatgattaa

SEQ ID NO: 16272 - DNA, 401 bp, Glycine max
  Clone ID: LIB3094-001-Q1-K1-F1
tcaaaacctgtagccctctacctattcaaaccaatagggatatacaaatcccaaagatgaaacaagaatacactaagaaacccaagctagcaatggcacttcaaaacaacgagacgatggatccaaaaagggagtagcataatgaaaaggataataggggaaaatgaacgtgtttccgatcaatcgcatcagaactatcattaatggcgaagatcccgatatgcgtgtttctcatgaagcattgttgtccatcaacaactctgtgcagaagttccttgagcaattctctcatgaagcttatgctttttgtgttctttaccgcacgatatgcctcagctactatcacctaccacatgttgtttgtaagcaaatgagatatgactttctctctgattttgttc

SEQ ID NO: 16273 - DNA, 311 bp, Glycine max
  Clone ID: LIB3094-001-Q1-K1-F10
cccacgcgtccggcgaaaacccccaactccaacctctgttcatcgtctaccgcgctttctttggaacgagaactatgattaagctttttaaagtaaaggaaaagcagagagaacttgcagaaaatgcaagtggcggaccacctgttaagaagcaaagtgctggagagttgcgtcttcacaaagatataagtgagctgaatctaccaaaatcatgtaccatgcaattccccaatggcaaagatgatctgatgaactttgaagtttcaattcgacctgatgatggatattacttaggtggcacatttttggtt

SEQ ID NO: 16274 - DNA, 397 bp, Glycine max
  Clone ID: LIB3094-001-Q1-K1-F12
acgcccacgcgtccgcccacgcgtccggaagaaaggaatataccttacggatggtggaatcaagaagcatttgggattgcatagtgcgggtggtgacgaagatggaagacaaagagagtgagagagagaaaaatcttcgctttatgtcaatggcacgaagcaggggtttttacagaagtgagcaacgacgccagatatgagaaaagtgagtttatttggggtcatatttgtaaaaagtggttttgtaattataccctctaattcaagagtgaagaaacaagggtgggatggaaatataaatagtacaatttggtcctagtgggtgcttaccctttggcctctttttctaattcagaattttttttaaatatattaaagtggggtgatatggttacct

SEQ ID NO: 16275 - DNA, 344 bp, Glycine max
  unsure at all n locations
  Clone ID: LIB3094-001-Q1-K1-F3
cttttgtactctcattcttcttgatccttcttttacttcttctactctaacatcacacataagganatgttcataaactcctggccacctccaatctatatcaaactcataattacacttacttaacccaatatcaaatcttaatacaaactataaaactcaaactaacaacattccttttatactacaaatgaccccgattcacaaaaagattcccattctcatacacaataactaacccatttaacaatccctcattgaatctcattacatcgatgatttttgccattacacccattacttgtttccttctgacccttatcatacacctcaacctacattct

SEQ ID NO: 16276 - DNA, 468 bp, Glycine max
  unsure at all n locations
  Clone ID: LIB3094-001-Q1-K1-F5
cccacgcgtccgccaaaaccgaaaagaagaaaaacgctgaaatccccaaaatcgaaaagaagaggaccaaaagcgctgaaatccctctaaccgatggcaaaacgaagagggatagagaaatcgccaaagaggagaacaagaagaagactaagaaacccaagctcagcaatggcacttcaaaacagcgagacgagggatccaaaaagggagtagcagaaggaaaaggagaagaggggaaaatgaacgtgtttccgatgaatcgcatcagaacgatgattaagggcgaagatcccgatatgcgtgtttctcaggaagcattgttggccatcaacaacgctgtggagaagttccttgagcaattctcgcaggaagcttatgctttttgtgttcgggaccgcaagaaatgcctcagctacgatcacctagcacatgttgtaagtaagcaaaggagatatgactntctctctg

SEQ ID NO: 16277 - DNA, 114 bp, Glycine max
  Clone ID: LIB3094-001-Q1-K1-F7
gaaaaaaaaaaaagccttttactttttttcttttgcatgatttgaatcttgattggaaaagctgcgaattggggtgttttacccatcaattcaattttaagccgtgccttcttc

SEQ ID NO: 16278 - DNA, 309 bp, Glycine max
  Clone ID: LIB3094-001-Q1-K1-D3
taccactttcctatccctcagctttactttttcaatacatttcacttacacatcgcttcgtttcattttaacgctggtcctacttacttctctaatctcatcacaaatcttccataacaactcatacaaataaactctcaattacccttttctcatctctcctatttatatataccctcactttcaaccacatcttacatctatcaaccaaaatctcacattcaccactcacacatgcttctaccctaatacctcaatttactacaccaaccaactcatatacatttcaaatcccaccatcttaacatt

SEQ ID NO: 16279 - DNA, 290 bp, Glycine max
  Clone ID: LIB3094-001-Q1-K1-F9
cttttctactttgagtcttcttgatccttctttttctccttgaactcaaacatggcagatgaggtggttctgctagatttctggccaagtccatttgggatgagggtcaggattgcacttgctgaaaagggtatcaaatatgagtacaaagaagaggacttgaggaacaagagtcctcttctcctccaaatgaacccggttcacaagaagattccggttctcatccacaatggcaaacccatttgtgaatccctcattgctgttcagtacattgaggaggtttggaatga

SEQ ID NO: 16280 - DNA, 284 bp, Glycine max
  unsure at all n locations
  Clone ID: LIB3094-001-Q1-K1-G1
tctaaacaactctttctcttcttccttctctctttgttctccctcacgtanatcgacaatagcgganagctaaactttaactttccaccctcatatcaaccatctcctcattctcatcatcaacaccttctactccaacaactatattttccttctttaactcatcatcaactcctcctatactttttacaacattctattttatagttttacacataatatcaatctctattctcatccacattatttcattcatattatttcacacaatactatcaatacac

SEQ ID NO: 16281 - DNA, 316 bp, Glycine max
  Clone ID: LIB3094-001-Q1-K1-G10
acggccacgcgtccgtttcgataagacaatactacttaatggtacttcttctataatactagacaggtttacaacttaaacagttaataaacattagtttgaataacaacatgttatttctaaaggtatatttgtttcttcttttccttttattggttacaacttcacgcatttaactgatcttcttcaaaagttatcaatcatcaatttatgattattattaatattcaaaaccattctaatatctcttcattttcacactctcaattccttcttaattcaacttttaaaattttaaacttaaatcattccactt

SEQ ID NO: 16282 - DNA, 298 bp, Glycine max
  Clone ID: LIB3094-001-Q1-K1-A4
ggctacttttgattgcttgatgaaaacctatggattcctgacaccagaattctggaaggagaggcgcttctccaaatctccattccaagagtacacagatctactggcaaaaccaacaggaaagactctaatcttggaggaggaaagggtggatgcttgatttgctagttttgctttatggatgttttaggaactttattactttacatactttgttggttctgtgctttacttttggttttgatagacggtatgtctctgtatgcattttgattgtttccaagttttaattgactgc

SEQ ID NO: 16283 - DNA, 335 bp, Glycine max
  Clone ID: LIB3094-001-Q1-K1-A5
gcgtacggtcagggttcagagctaaaaatgttctcactcttccatctcagtatgtgttgacatgctggacgaggaatgctaaaaccggtacatggttagatgaacatgcatctgaattgccaagtacttctcgtgaatctgtaccagtttggtataacaatttacgacaagaagcaatcaaatatgttgaagaaggtgcaaaatcaatccaaatctatcatgttgccatgagagctctgaaagaagctgctaataaagtttgcaccattaaaaatcagagttctggaacagcagaaggagcttcagcaaccaatggaagcaagggtgaattgctt

SEQ ID NO: 16284 - DNA, 433 bp, Glycine max
  Clone ID: LIB3094-001-Q1-K1-A6
ggcggcgctgtggcggacgcgccggcggtggttgaggagaagacggagttcgacgtggggatggaggaggtgccgagcaacgctcgaatcgcggtgattaaggcggtgagggcattgacgaacctagcgctgaaggaggcgaaggagttgatcgaagggttgccgaagaagttcaaggaagggatttcaaaggacgaagctgaagatgcgaagaagcaactcgaagaagctggtgccaaggttaccattgcttaaacactgtttagctgcagcatatatgttctgcttcttctttggtggttgtagttgagttcaccagtacacttgtatttcatttccattttgtctggatttcaatcctttatttgtaatgaggaaatatgagttcctaattttataataatttttttaatggcgattaagtgtttggttg

SEQ ID NO: 16285 - DNA, 420 bp, Glycine max
  Clone ID: LIB3094-001-Q1-K1-A8
ctcacgcgtcctcacgagccgagtcacaatgttattccaacttagcactgtctttttcgcattgtactattttacaagaacacatgattttggtcggacaattcttcatggtcgtgcaaggtatcaagcaactggccgcggatttgttgttcgccatatcaaattttcagagaactacagactctactctcgtagtcattttgttaaagggttggacgttgcgcttttgttgatagtatatcttgcttatggctataatgaaagtggtgcactctcatatattcttttgaatataagcagttggtttatggctctatcctgcttgtttgctccatatttattcaacccatctggatttgattggcaaaaggttgtggaagatttcaaagattggacaaattggctactttaccgatgttg

SEQ ID NO: 16286 - DNA, 235 bp, Glycine max
  Clone ID: LIB3094-001-Q1-K1-A9
cccacgcgtccgcacatccaatgcatcgtaatcaggtgtcaaacaagattggaataaccatagagctgcctaagtactagtactaccctagataatcccaatcttgaagaaaacttttttaaaaagcatagattctatattttgtgttttgttattttgtatcttttgtctcagttgacactaagcagaccttgtgtttcaattttgactagagagttgtttaaattgaagattt

SEQ ID NO: 16287 - DNA, 463 bp, Glycine max
  Clone ID: LIB3094-001-Q1-K1-B5
cttgaaggccattgtcagttttgtcacaatgcaattccagctttgcactgtctttttgacattttccttgggtacaagaacacattattttggtcggacaattcttcatggtggtgcaaggtatcaagcaactggccgcgggtttggtgttcgccatatcaaattttcagagaactacagactctactctcgtagtcattttgttaaagggttggaggttgcgcttttggtgatagtatatcttgcttatggctataatgaaggtggtgcactctcatatattcttttgagtataagcaggtggtttatggctctaatcctggtgttgctccatatttattcaacccatctggaattgagtggcaaaaaggtggtgaagaattcagagattggacaaattggctactctaccgaggtggaattggtgttaagggagaagaaagctgggaagcttggtgggaag

SEQ ID NO: 16288 - DNA, 463 bp, Glycine max
  unsure at all n locations
  Clone ID: LIB3094-001-Q1-K1-B6
aaacaaaacaacaacaacaatgggagcacgaaagagactctcttcttccgagcctcatgcttcgtctcctgcaacaaaggaaaacaccacaaccaccaaacccgaacaaaaaccaaccacaacagaccctccaattgcgcctcctaaatggggtcttcttctgaagctctctctcttcttcttgctcccttactcgtatctcctcttccgctactatcccatcgagccggagctccgaagatcgatcctcatcaacgctggaatgagcctcgcgggtctcttcgtcacggtcaagatgaaccccgtcgcgtcccgctacgtccagaagcggaacctctttgggtatgacatcaacaagaagggcacccctcagggaactgtcaaagtgcctgaatcattaggtatagnntgtggtattgtgttcttggttgtggcaatcttgtttcagtattttaacttcaca

SEQ ID NO: 16289 - DNA, 479 bp, Glycine max
  Clone ID: LIB3094-001-Q1-K1-B8
cccacgcgtccggactgcccaagatgtatcgacaatgttacggtgcgggcaaaaaaccgtcatgtttctgatcaacaatggtggatacaccatcgaggttgaaattcatgatgggccgtacaatgtgattaagaactggaattacactgggttgattgatgcaatccacaatggtgaagggaaatgctggactgccaaggtgttctgtgaagaggagctagttgaagcaattgccacagccacaggacccaagaaagactccttatgcttcattgaggtgattgttcataaggatgacaccagtaaagaattgcttgaatggggctcaagggtttctgctgccaatagccgtcctcccaatcctcagtaatcttcagaatttatcctatgactaaattgctgcagttgccctttagctctatgaaagtgagaatcatttgagatgatgcccttgtagggaatttacctttgttaatggc

SEQ ID NO: 16290 - DNA, 132 bp, Glycine max
  Clone ID: LIB3094-001-Q1-K1-C1
ctctcacagtctctaattcgaatgtgacatctctcatctactacaacattatacacattgtgccctcttcttacacccaccatgacccttacactaatcatactcattaccacctcatctatatctctctat

SEQ ID NO: 16291 - DNA, 364 bp, Glycine max
  unsure at all n locations
  Clone ID: LIB3094-001-Q1-K1-C12
cttttctactttgagtcttcttgatccttctttttctccttgaactcaaacatggcagatgaggtgggttctgctagatttctggccaagtccatttgggatgagggtcaggattgcacttgctgaaaagggtatcaaatatgagtacaaagaagaggacttgaggaacaagagtcctcttctcctccaaatgaacccggttcacaagaagattccggttctcatccacaatggcaaacccatttgtgaatccctcattgctgttcagtacattgaggaggtttggaatgacagaaatcccttgttgccttctgacccttaccagagagctcangctagattcntggctgattatgttgataag

SEQ ID NO: 16292 - DNA, 360 bp, Glycine max
  Clone ID: LIB3094-001-Q1-K1-C3
ccacgcgtccgcccacgcgtcctgaataattttatattccttaccgatggtgtaatcaataggcattggtgatttcataatgcggctggtgactaatatggaatacaaagatacttatacatataaaaatcttctctttatatcaatggcactaaacaagagtttttacataagtgatcatcgactccagatatgataaaagtgagtttatttatcgtcatatttgtaaaaagtgtttttgtaattataccctctaattcaagatttaagaaacaatgttcccatttaaatataaatattacaattatgtttctaatggttgcttacccttttgctctttttttctaattcattattttt

SEQ ID NO: 16293 - DNA, 231 bp, Glycine max
  Clone ID: LIB3094-001-Q1-K1-C4
cccacgcgtccgcccacgcgtccgcaaaaattacaacaccaatctcacccatttcaaaaaaagggcgttagtgttactattcgtaaaatggccactcttgttctttaccaattctttctcaaactcttgctcctaatttcagtctttcagctttcctttgctgctatgagactcaaccagctggttcacgaccactcacaggtactccattaccacaacggtgctcttcta

SEQ ID NO: 16294 - DNA, 423 bp, Glycine max
  unsure at all n locations
  Clone ID: LIB3094-001-Q1-K1-C5
cccacgcgtccgcttctccgccacttctgaatctattgaatcaacaatcatgtcggacgaagagcaccatttcgagtccaaggccgacgccggagcctccaaaacctaccctcagcaagccggtaccatccgcaagaacggctacatcgtcatcaaaggccgcccctgcaaggttgtggaagtttcgacttccaaaactggaaagcacggtcacgctaagtgtcactttgttggaattgatattttcactgccaagaaacttgaggatattgtgccctcttctcacaactgcgatgttcctcatgtgaatcgtactgattaccagctcattgatattgctgaggatggatttttgagtctgcttactgaaaatggtaacactaaggatgacctcaagcttnccactgatgagagtctgctcac

SEQ ID NO: 16295 - DNA, 205 bp, Glycine max
  Clone ID: LIB3094-001-Q1-K1-C8
ccacactttcactaaaattttaattttaatctcacccatattaaaaaaaagggcctgtttattttaaacggaaaattggcactctctttctttaccaatactttctcaaactctttctcctaatttcaaactttcatctttccttttctgctatgatactctaccacctttttcaataccactcacacttactccattaccacaa

SEQ ID NO: 16296 - DNA, 291 bp, Glycine max
  Clone ID: LIB3094-001-Q1-K1-D10
ttctgatttgttctctcatatctgagtttaccgtcgccggaatccaactcaacctgggtctgattcttttgtatcatcggatcgccattcgttttagcctctcaataagagattttagttcgcttcaaattcgatgtttgatttgaagttgaaagttggaatatcttaactgttgtgtaaaacaaccaacacacactagcatgtgaagccaatacaacaacgtataattgtcatccaattcatttctagcttacaaatctgctaaggtgtttgttgctggtcacctgtgtc

SEQ ID NO: 16297 - DNA, 301 bp, Glycine max
  Clone ID: LIB3094-001-Q1-K1-D11
ttctgatttgttctctcatatctgattttaccgtcaccggaatccaactcaaccttggtcggattcttcagtatcatcgcatctccattcgttttatcctctcaataatagattttacttcacttcaaattcaaggtttgatttgaagtttaaagtcctaatatcttaactgttgcgtaaaacaaccaacacacaccatcatctgaagccaatacaacaacctataactatcatccaattcatttttatcttacaaatctactaatgtatttgttgctactcaccaatgtcttgtttcctc

SEQ ID NO: 16298 - DNA, 382 bp, Glycine max
  Clone ID: LIB3094-001-Q1-K1-A3
gtcagtcttcagagctaaaaatgttctcactcttccatctcagtatgtgttgacatgctggacaaggaatgctaaaaccggtacattgttagatgaacatgcatctgaattgccaagtacttctcgtgaatctgtaccagtttgttataacaatttacgacaagaagcaatcaaatatgttgaagaaggtgcaaaatcaatccaaatctatcatgttgccatgagagctctgaaagaagctgctaagaaggtttgcaccataaaaaatcagagttctggaacagcagagggagctacagcaaccaatggaaagcagggtgaattgcttgtagcagatgaagatgttccaagcaatcaatctgtggcggagaagcaaaagaaa

SEQ ID NO: 16299 - DNA, 370 bp, Glycine max
  unsure at all n locations
  Clone ID: LIB3094-001-Q1-K1-D2
cccacgcgtccgtcaagcattgcatccctcttgatttgtagtttgttttgtgctttagataaagagttctgccaaatcaagaggggttttaagatcatagtgtgtgttttgcaacaatggctaagttctttgctgctatgatcttggcactctttgccatttccatacttcaaacagtggtaatggctgctaatgaacaaggaggccacttgtatgacaacaagagcaaatatggaagtggaagtgtcaagagttaccaatgcccatcacaatgctcgaggagatgtagccagacccaataccacaagccctgcatgtttttctgtcagaagtgctgcangacatgcctgtgtgtgcccccggggtatta

SEQ ID NO: 16300 - DNA, 327 bp, Glycine max
  Clone ID: LIB3094-001-Q1-K1-A1
tcggtcagtctttagagctaaaaatggtctcactctttcatcttagtatgtgttgacatgctggacggggaatgctaaaaccggtacattgttagatgaacatgcatctgaattgccaagtacttctcgtgaatctgtaccagtttgttataacaatttacgacaagaagcaatcaaatatgttgaaaaaagtgcaaaatcaatccaaatctatcatgttgccatgagagctttgaaagaagctgcttagaaagtttgcaccattaaaaattagagttctggaacagccgagggagctacagcaaccaatggaagcaggggtgaatt

SEQ ID NO: 16301 - DNA, 235 bp, Glycine max
  unsure at all n locations
  Clone ID: LIB3094-001-Q1-K1-A10
cccacgcgtgcgcacatccaatgcatcgtaattaggtgtcaaacaagattggaataaccatagagctgcctaagtactagtactagcctagataatcccaatcttgaagaaaacttttttaaaaagcatagattctatattttgtgttctgctattttgtatcttttgtctcagttgacactaagcagaccttgtgtttcaattntgactagagagttgtttaaattgaagattt

SEQ ID NO: 16302 - DNA, 399 bp, Glycine max
  Clone ID: LIB3094-001-Q1-K1-A11
gagttccagaggttcaaccatacttctcttcttccctttacatccgcactgtttcctctcctacagggataatggttcgcattctgacggaaaatggcggagtggaacgcatggaggagatcatcagggaccatttggaccccatttcaaagcaagtgttggggatctggttggatcattgtgcttgtgccaagcgacaagttggagaggcagaaagagcttatcttaagaaaagggatggtctcattagaaacaagaccattgagattgatcttggttcaagctttcccagattggttggtccagaagtagcaaaccgggtactggatgctatcaaggagtattttacagtctgagatgcaaatttatttggaaattgtggatattctatggattaca

SEQ ID NO: 16303 - DNA, 72 bp, Glycine max
  Clone ID: LIB3094-001-Q1-K1-A12
aaaaaaaaaaagaacaacaataaaaaaaaaatttaaataaaaaacaaaaaaagaaaaaaaaaagggaaggat

SEQ ID NO: 16304 - DNA, 349 bp, Glycine max
  Clone ID: LIB3094-001-Q1-K1-A2
ttgccgagcggcgctcgaatccgttgattaagcggtaggcattgacaacctacgctgaagaagcaaagatttaacaaaggttgcccaaaaagttcaaggaaaggatttcaaaagaccaaacttaaaattccaacaaaccacttcaagaaacttgtgcccaagttaccattgcttaaacactggttaacttcagcatatatgttctgcttcttcttttgctggttgtaattgagttcaccagtacacttgaatttcaattccattttggctggatttcaatcttttatttgtaatgaggaaatatgagttcttatatttatattattttttttaatgcctatgaagtgtt

SEQ ID NO: 16305 - DNA, 422 bp, Glycine max
  Clone ID: LIB3094-002-Q1-K1-A4
ggctgctctgtgtctgacgcgccggctttggttgatgagaagacatagttcgacgtggtgatctatgaggtgcctagcaactcttgaatcgctgtgattaatgcagcaagctcattcacgaacctagcgctgaaagacgccaacgagtatatctaatggttgccgaagaagttcaagtaacggatttcaaaggacgaatctgtagatgcgaaaaagcatctctaagaaactggagccaatgtcaccattgcttaaacactgtatatctgcaacatatatctgctgcttctgcttttgttcgttgtagctgagttcaccactacactgatatctcattatcattatgtctggattccaatcctctatttgtcatgaagaaatatgacttcttatatgaatattatcattcttaatgcgtatga

SEQ ID NO: 16306 - DNA, 376 bp, Glycine max
  Clone ID: LIB3094-002-Q1-K1-D3
cctttcaccattctcacaacaatttgctagcatgttaagtccagatcatatgtgaggtaatttgtgggtggtaggtgacagactggatatttctaaccattatcacttttagacaatttgagaaatgtttgctatttcgattgattgaaactatagggcatcgtgtatgttgtgacggactagctattgttcactgttgacattttaattacatagattacatttatgaatagttagctatttacaatgctatatatcacttactataatgtaatacgaatataacatcttatgcattttgatcaactaattatttttctttagaatggcctaataaattagtcttttccattttcatcaattgtattattccttt

SEQ ID NO: 16307 - DNA, 427 bp, Glycine max
  Clone ID: LIB3094-002-Q1-K1-D5
gtgccttttaccattttcacaacaatttgctagcatcttaaatttagatcatatgggagggaatttgtgaatggtacgtgacagactggctatttctaaccattagcagtttaagacaatttgtgaaatgtttgctatttcgattgattgaaactatagggcagcgtgtttgttgtgacggactagctatttttcactgttgacattttaataaaataaataacatttctgaattgtttgctattttgattgctatatatttctcactatcagggaatacgtttataacagctcaaacatattgatcaaccaattatatatgttggatggcctaataaataagcattttttattttgtcattgtattatttttttttagcttttcatttataattttgagtccttgtcatgatattcctattaaata

SEQ ID NO: 16308 - DNA, 376 bp, Glycine max
  unsure at all n locations
  Clone ID: LIB3094-002-Q1-K1-G12
gtgccttttaccattttcacaacaatttgctagcatcttaaatttagatcatatgtgagggaatttgtgaatggtacgtgacagactggctatttctaaccattagcagtttaagacaatttgtgaaatgtttgctatttcgattgattgaaactatagggcagcgtgtttgttgtgacggactagctatttttcactgttgacattttaataaaataaataacatttctgaattgtttgctattttgattgctatatatttctcactatcagggaatacgtttataacagctcanacatattgatcaaccaattatatatgttggatggcctaaataataagcattttttatttgtcaattgnataatttttttt

SEQ ID NO: 16309 - DNA, 468 bp, Glycine max
  Clone ID: LIB3094-005-Q1-K1-G12
tcacgcgtgcgaaaagagtaccaaactttttaatctcgcacactgatatatggctgttgggggcgcatatgtatatggtactgattcaacaatacagataatggcttttgggttggaccatttccatttaagtgggtgcttggcctcagtcaccttgtcacccagccaaaatagaacacccactttttgtaccaatatgagttcctcattgaagtggggtttccgtactggtcaaaaatgttgtaacatactcgcatcttggtcctccctagcaatgcagtatcggttgtctgtatcctgtaaatgctatgagaccggtttcacaagcaagatgatgaggcaagtccaatgctaacttgcatttctgtggtttatatacatgatgcagcatactcaagagtaaccttattggaattgataattgattcaacgttttttctaactcaattaatggtgcaatgacgaatt

SEQ ID NO: 16310 - DNA, 81 bp, Glycine max
  Clone ID: LIB3094-006-Q1-K1-B6
tacatacattcatctcttgaatatgacctatctcactctgacacttgaatcctgtaaggctactgggcagacaaatttcca

SEQ ID NO: 16311 - DNA, 271 bp, Glycine max
  Clone ID: LIB3094-006-Q1-K1-E10
tacaagcgttcgcgtacacgccatagcacgccacatttttcagcatacgaacacaatgggacataggtctgggaacataaaccgtctcgacactatatcctaacacttgactaacagctgacttaccttgtgacagatccgcattgtgctaataccttacctgtcttatgaacaatctccatatctattcacacttaaagcttgataacaatactttctcaatattagcgacagccatacttaaatgtaagctacacgccactacgctcat

SEQ ID NO: 16312 - DNA, 449 bp, Glycine max
  Clone ID: LIB3094-008-Q1-K1-A9
aacgactgttgtcgaccgcacgaagattaaaagcatataaaagcatatgagcacactgagacataggatagggaaaatttaacatcatgaagtcatatgtgcacacttgattaaaggctgtcgtaccttgtgacggatgcgtgtggtgctaatacctctcctgtgcgtaaaaacaactccacaactattcacacttaaagatcgtagaccacaccttttcaatcttccacacgctttactcagataaaagttggtggcgactacacgcattttcctttcatggaagacgcacttgtgagtcccgcattgacattccatccaaaggtgatacgcgacagtgcttgccttcccggcgaacgtgaagttccttaattgaattaactactaacaaatgtgatactaaggctataatatactcacgaatcaagctttgtccataaaaatcactt

SEQ ID NO: 16313 - DNA, 80 bp, Glycine max
  Clone ID: LIB3094-008-Q1-K1-G11
taaatacaaaaaagcctttcacttcttatctttagcatgatattgtatcttgattgcataagcttggaatagggatgttt

SEQ ID NO: 16314 - DNA, 448 bp, Glycine max
  unsure at all n locations
  Clone ID: LIB3094-010-Q1-K1-C12
gaagttgcgagagtgaagaaatggcgcatgtcttggcattggatttggaggagcttcgcggggtccacagcatcgccaaaagacctcgaaccctctctcttctctcctccgaaattcgtaacctcgaaaagttatcgtcagaggaagcttctgcgcagattccggcgccgatttcgaccggaactaaagtggcgccttcacctgcgctgaagtatgcggcactcgcgtcgttcagttgggaccaggatagtgacaaagttaagatatatgtgttaatggagggaatcgatgagaataaggttgaatccgagtttaagtcgatgtcattcgatgttaagttccatgatgttcaagggaagaactaccgatgtgcaatatcaaaattgcacaatgagatagtaccagagaaatgcanggttgtggtcaagcctaaaaaggcaatcatcac

SEQ ID NO: 16315 - DNA, 366 bp, Glycine max
  unsure at all n locations
  Clone ID: LIB3094-010-Q1-K1-C2
taaactcaaggatggccctctgtattggattgacacggcggataaacaaccatgcgttgggactggtggtatgataccttggaaacttcacgtcaccgggaggctctttcatagtggattagctcataaagctataaatgcgctagagctagccatggatgctctaaaggaaatccagttgcgattntactcagacttcccacctcatcctcaggaacaggtttatgggtttgcaaccccttcaaccctgaagccaacccaatggagttatccaggaggtggaatcaatcaaattccaggggaatgtacaatttcaggagatgtcagattaacttcattctacaatgtaaaggatgttatgaaaaa

SEQ ID NO: 16316 - DNA, 413 bp, Glycine max
  Clone ID: LIB3094-011-Q1-K1-A3
ggtgtctctggatccgtgtttttgagttttttgtatgaatttaccgattgtttttagatgaggttatcgttgaggcatgctttggtgtttgtgttaatcggggcgttgtggaacttgcaaagggcagagggtatccgatttgtgatagacagagacgagtgtttctcccatgatgtgaagtacgagggtgacactgttcatgtctctatcgttgttattaaggctgattctccctggcattacggcgacgaaggtgtcgatctcgtggtaaagggaccttctggcgagcaaattcaagaatttcgggacaagaccagtgagaagtttgactttgtggctcacaaatacggggtccataaattctgcttcaccacaagtctccttatcatgaaactgtcgattttgatgtacat

SEQ ID NO: 16317 - DNA, 398 bp, Glycine max
  Clone ID: LIB3094-014-Q1-K1-E5
taaactcaaggatggccctctgtattggattgacacggcggataaacaaccatgcgttgggactggtggtatgataccttggaaacttcacgtcaccgggaggctctttcatagtggattagctcataaagctataaatgcgctagagctagccatggatgctctaaaggaaatccagttgcgattttactcagacttcccacctcatcctcaggaacaggtttatgggtttgcaaccccttcaaccctgaagccaacccaatggagttatccaggaggtggaatcaatcaaattccaggggaatgtacaatttcaggagatgtcagattaactccattctacaatgtaaaggatgttatgaaaaagctgcaagaatacgtggacgatattaatgaga

SEQ ID NO: 16318 - DNA, 423 bp, Glycine max
  Clone ID: LIB3094-014-Q1-K1-H1
ctcttttcgcactccaagcagctacactttttactaccataatggcggctgctatgacggggtgtggttacgcaatcgccggcgcgggcgaaaccatagccaaacctgcttccaccagaaccttctccgccaccaacctcgctcttgaatcgtcgtcttccaagctcggtttcaaatccctaagacttcgccgatgcgccgccgcctccggctccgccctcggcgcgcgcatggtgtcagtgccggcggtcaaggcccccgcgctactcgatttcgacacgaaggttttcaagaaggagaagattaacctagccggacacgacgagtacatcgtaaaaggatgcagggatatgtttcacttgttgcccgatgctttcaaggtgatcaagcagattggtgttatcggttgaggaacttagggac

SEQ ID NO: 16319 - DNA, 387 bp, Glycine max
  Clone ID: LIB3094-015-Q1-K1-G3
taggagacaatcatgtgaaggacgaggcattataggaagtgttgtgggaggaaagaggcagagctgcaatcaccagagtggaagcgcgaaacggtcctccccggctttccatttttttctcttctgatgaaattttagttcatcccagttgctgattgagattgaatttaaattcgaaaaagcgtacttgtgccactgtacttttacagatctgcggctacgggctagcctatcgtatttttgcgtagatctagtgtccgtgaagcggttaccatttcaccactcaccactattcatctctttcttctatattgatcttgaattggagaatggaagcgaaaagaaatcgtcagcaatatctgatgtgggaagcctttttttgggggg

SEQ ID NO: 16320 - DNA, 315 bp, Glycine max
  Clone ID: LIB3094-022-Q1-K1-F2
ctcggcgctgctccgtaccattttcactgcttaaatttaagagaaaactcggcaacatgcggaattatcaaaacctccttacaaacgatcagcttctctcacactccttccgttacaatgaaatctataatgtaatcctgtactaaatcgatctcaaatccgttcctaattaagcatccaattactatcattgctacaacactcttcataaccttgataaacatcatttagtaaatcacacaccctttaattctttccacaaaacttacacatttacacttcattatcacaccaattactcctaaaaaacatatt

SEQ ID NO: 16321 - DNA, 305 bp, Glycine max
  unsure at all n locations
  Clone ID: LIB3094-023-Q1-K1-G10
ggctacttttgattgcttgatgaaaaccctatggtttcctgacaccagaattctggaaggagacgcgcttctccaaatctccattccaagagtacacagatctactggcataaccaacaggaaagactctaatcttggaggaggaaagggtggatgcttgatttgctagttttgctttatggatgttttaagaactntattactttacatactttgttggttctgtgctttacttttggttttgatagacggtatgtctctgtatgcattttgattgtttccaagttttaattgactgcananna

SEQ ID NO: 16322 - DNA, 445 bp, Glycine max
  Clone ID: LIB3094-023-Q1-K1-G4
gtgccttttaccattttcacaacaatttgctagcatcttaaatttagatcatatgtgagggaatttgtgaatggtacgtgacagactggctatttctaaccattagcagtttaagacaatttgtgaaatgtttgctatttcgattgattgaaactatagggcagcgtgtttgttgtgacggactagctatttttcactgttgacattttaataaaataaataacatttctgaattgtttgctattttgattgctatatatttctcactatcagggaatacgtttataacagctcaaacatattgatcaaccaattatatatgttggatggcctaataaataagcattttttattttgtcattgtattatttttttttagcttttcatttataattttgagtccttgtcatgatattcctataaaatatttataggaattttagtc

SEQ ID NO: 16323 - DNA, 433 bp, Glycine max
  Clone ID: LIB3094-023-Q1-K1-G5
cccacgcgtccgcggacgcgtgggggtttttgtggataagagtgagctataatggctgcgcgggagaccgggtttaattgctttgtttgatgttgacgggactcttacagctcccaggaaggtggtcacaccggaaatgttgacattcatgcaagaactacgaaaggttgtaacggttggagttgttgggggttctgaccttataaagatatcagagcaacttggcagcacagttaccaatgagtatgattacgtattttctgagaatggtcttgtggctcacaaggaaggaaagctcattggaactcagagcttgaagtcattccttggtgaagaaaagctcaaggagtttattaactttacacttcattatattgctgatttggacatccccattaagaggggaacatttatggagttccgtagtgggatg

SEQ ID NO: 16324 - DNA, 281 bp, Glycine max
  Clone ID: LIB3094-025-Q1-K1-F8
gtgccttttaccattttcacaacaatttgctagcatcttaaatttagatcatatgtgagggggtttgtgaatggtacgtgacagactggctatttctaaccattagcagtttaagacaatttgtgaaatgtttgctatttcgattgattgaaactatagggcagcgtgtttgttgtgacggactagctatttttcactgttgacattttaataaaataaataacatttctgaattgtttgctattttgattgctatatatttctcactatcagggaatacg

SEQ ID NO: 16325 - DNA, 467 bp, Glycine max
  unsure at all n locations
  Clone ID: LIB3094-025-Q1-K1-F9
aaaaaccgggccggccgacgcggacggngcgtnnnaccattttcacaacaatttgttttcatcttaaatttaaatcatatgtggccggttttattaaaggggcgggacagactgactatttctaaccattagcagtttaagacaatttgtgaaatgtttgctatttcgattgattgaaactatacggcagcgtgtttgttgtgacggactaactatttttcactgttgacattttaataaaataaataacatttctgaattgtttgctattttgattgctatatatttctcactatcagggaatacgtttataacagctcaaacatattgatcaaccaattatatatgttggatggcctaataaataagcattttttattttgtcattgtattatttttttttagctgttcatttataattttgagtccttgtcatgatattcctataaaataattataggaatttt

SEQ ID NO: 16326 - DNA, 338 bp, Glycine max
  Clone ID: LIB3094-029-Q1-K1-H2
agacggcagagcggacatctaccgtatactttcactctttcttccactgccacacagccagatccatgggcttcccaaccaaccacacctctacggaccatcccctaaacttcctcatctaccgtcgatcagactgtataggcgacctactacactccctctgccaatcccacagcatttccttccattactgctcaggccgcctagagaaccggacctacctcaaaaccaacatacccctcctcatgccctcaacacatcttaaacgccctctgcatcacatgcctacccaacgccgactggttccagtcccacaaattcttgaccatccgaaccaa

SEQ ID NO: 16327 - DNA, 359 bp, Glycine max
  Clone ID: LIB3094-030-Q1-K1-C11
cttccggacaatttttagttctgtttatataaaacaagcactaggtagaatcagaagatatctacgaccacattcgtgaaaatatacaataggtgcaaaacaacacacaaagtacaccatatctatcacataaatattgacaattctgatcatagtcatatccattgatctacacaccaacactagccacattcttccattctaaatggacgaaaataattgatcacttcaacatgatccctattataacatcttcaaaaacaaatatcacaaaaactcctccctattaatatatccaaacttacgaacacgatcatacaaactcatagctcttctataacataacctaactacaattc

SEQ ID NO: 16328 - DNA, 211 bp, Glycine max
  Clone ID: LIB3094-031-Q1-K1-C6
aaaccctaatacctaaaagacatcagcaaccatggagataatcaaagatgcctgtgagaactcgggtttctttgagttggtgaaccatgggatatccatatagttcatggacaccgtgtacaggatgacaaaagatcactatacaaaacttattgagcacaagttcaaagaaatttgttcacgcaaatgtttttagtctgctcaatcttaa

SEQ ID NO: 16329 - DNA, 292 bp, Glycine max
  unsure at all n locations
  Clone ID: LIB3094-033-Q1-K1-B5
aaacacccttntcaaccacaccaaaattaaaaacataaaaaagcataaaaacacacccgcccgtatattttttaaaataaaacatccccaccccatatttncacacttnattaaacactatcgtcccttctcacgaatgcgttacattctaataccttccctgtacgtaaaaacaactcccaaactattcacacttaaacttcataaaccacaccttttcaattttccccacactttcctcaaataaaaattacttactactccacacattttcctttcatcaagacacact

SEQ ID NO: 16330 - DNA, 331 bp, Glycine max
  unsure at all n locations
  Clone ID: LIB3094-033-Q1-K1-F6
cccacgcctncncaagcttcaacaatggtgtacgttaaggctcagaaatcaaaagcctactgcacgagatattaagtcaagttcaagacaaaaacaaagggaaaaaccgattaccgtgccaggattcggttgattaatcaggacaagaacaaatataacactccgaaataccgatttgtggttcgctttagcaacaaggacattgttgcacaaataatatctgctagcattgccggcgatttagttcttgctacaacatattcacatgagctgccacgatatggtcttgaaataagacttacaaattatgcagcaacttattgcacttgtc

SEQ ID NO: 16331 - DNA, 119 bp, Glycine max
  unsure at all n locations
  Clone ID: LIB3094-036-Q1-K1-G6
ataacccttataaaattcttcaataatatnttaaaaaagaaaaatattaatattcaacatttccctatcccccttaatcccttttttacaacatttaaccctccttttttttctcaccc

SEQ ID NO: 16332 - DNA, 63 bp, Glycine max
  Clone ID: LIB3094-041-Q1-K1-A7
cggacgcgtgggtttcttgcagccaacggttacattttaacttaaaattatttcgtggggtgc

SEQ ID NO: 16333 - DNA, 210 bp, Glycine max
  Clone ID: LIB3094-041-Q1-K1-E6
ctagagaattatcatacccttcaagatgattttgtacctacgtccaatattcctattaggggtaatccttctcgcccaatccatttcggcgagggctgctttaaattttaatggcctgggaaaaaaaattggggaagttctaaccaagcccccggccatcaatcttccggcaaataaactgaaaaaggtgaagagccccctgaaggccct

SEQ ID NO: 16334 - DNA, 339 bp, Glycine max
  Clone ID: LIB3094-043-Q1-K1-F1
atgggtcccaaaccgcctagtacgggtctttttgctggttttaacaagggtcacgtcgtcgccaatatggaattgccttcacgcccctcagatcgtaaggggaaaacaagcaagagggtgcactttgtgaggaacctcataagagaggtagccggttttgcaccctatgaaaagcgtataactgagttgctgaaggttgggaaagataagagggcactgacagttgcaaagagaaagctcggaacacacaaactcgcaaagaacaatcgtgaggaaatgtccactgttctcacgaagatgatggctggtggtgcttgacacaagaagaaataagtctta

SEQ ID NO: 16335 - DNA, 386 bp, Glycine max
  Clone ID: LIB3094-046-Q1-K1-F10
cccgggccgaccgcacgcgtacgtattatctttattccactgaatatttcattttcatcccactggacaccctcaatgttatgtatctttatattatctataaatgttaacgatacccaacttgcaactactagactagttttctatcggaatgtatatacgtgaataatccaacatgcctttttcttaagtaaaaaaactaccctcaatccatgcctcaaaagggttgataataagtaaaaaaaatcaatgaattcatgataaaacccttctgcgttgttctattataaaatcttttgtcaataaaggaatcaacgggttgggggatcaaatggtcaagttcttttgttggtaaattggaagattagaaacatgactattgcttt

SEQ ID NO: 16336 - DNA, 448 bp, Glycine max
  unsure at all n locations
  Clone ID: LIB3094-047-Q1-K1-B12
aaaaaaaaaaaaaatttananttttanaaaaaaaaaaaaaaaaaaatttgtaatgtcttatttnaaaagggcaacccgaaaaaaaaaaaaanaaaaaaaaaaaaaaaaaaaaaaaaaaaaaaaaaaaaaaaaaaaaaaaaaaaaaaaaaaaataannaaaaaaataaaaaaaaaaaaaaaaatttaataattatttttttttttaataatatttttttttttttttttaataaaaaaactaaaatttaaataaaatataaaaaaaattatttaatttattttttattatttttgggggggggtatttttatttttaaataaaattattttataaattttttatttatttttatatttttcataataatttatatttttatttatactaattttttttttttttatttataaaataataattttttaaatatattttttttatttatat

SEQ ID NO: 16337 - DNA, 450 bp, Glycine max
  unsure at all n locations
  Clone ID: LIB3094-047-Q1-K1-D5
cgctgttcaggccgagatcaaccatttccttagtctaataatcaacaccttctacgcagcgaggagatctttcttcgtgagctcatcancaatgcctctgacgctttggacaagattcgatttgagagtcttacagacaagagcaagcttgatgctcagccagagttgttcattcacattattcctgacaagaccaacaacacattgtctatcattgacagtggtattggcatgactaaggctgatttggtgaataacctcggtactattgcaaggtctgggaccaaggaattcatggaagccctggctgctggtgctgacgtgagcatgattgggcagatcggtgttggtttctactcggcttatcttgtagctgataaggttattggtaccacaaagcacaatgatgatgaacagtatgtctgggagtcccatgccggaggctcattt

SEQ ID NO: 16338 - DNA, 441 bp, Glycine max
  Clone ID: LIB3094-049-Q1-K1-H5
taggagacaatcatgtgaaggacgaggcaagaaggaagtgttgtgggaggaaagaggcagaggtgcaatcaccagagtggaagcgcgaaacggtcctccccggctttccatttttttctcttctgatgaaattttagttcatcccagttgctgattgagattgaatttaaattcgaaaaagcgtacttgtgccactgtacttttacagatctgcggctacgggctagcctatcgtatttttgcgtagatctagtgtccgtgaagcggttaccatttcaccactcaccactattcatctctttcttctatattgatctgaaattgaaaatggaaagcgaaaagaaaatcgcagcaatatctgatgtgggaacatgggccatgaacgttgtcagctccgtcggaattattatggccaacaaacagcttatgtccaacaatggc

SEQ ID NO: 16339 - DNA, 317 bp, Glycine max
  unsure at all n locations
  Clone ID: LIB3094-051-Q1-K1-G12
aatcaattgctcacttattaaaagtgtatgatttttaaatttacacaatccaaccaaccaaccacatattttatattnttactctttttttcccttaaaaaaaaaaataaaataaaaaaaaaatataatattaatttatttaaaaaaatgttcttctctctatattatccaaactttcttactcgttcattccacttcatatctcttctattatttcacctaaattcaatttcactttcctattttttacaacatctttacttttaaaacccttttattacccaatttaatcccctttcattaaaatcccctttttt

SEQ ID NO: 16340 - DNA, 459 bp, Glycine max
  Clone ID: LIB3094-055-Q1-K1-E2
taaactcaaggatggccctctgtattggattgacacgtcggataaacaaccatgcgttgggactggtggtatgataccttggaaacttcacgtcaccgggaggctctttcatagtggattagctcataaagctataaatgcgctagagctagccatggatgctctaaaggaaatccagttgcgattttactcagacttcccacctcatcctcaggaacaggtttatgggtttgcaaccccttcaaccctgaagccaacccaatggagttatccaggaggtggaatcaatcaaattccaggggaatgtacaatttcaggagatgtcagattaactccattctacaatgtaaaggatgttatgaaaaagctgcaagaatacgtggacgatattaatgagagtgcacagaagctagaatctaggggtccagtttcaaaatatgtcctacctgatgaaaacat

SEQ ID NO: 16341 - DNA, 363 bp, Glycine max
  Clone ID: LIB3094-056-Q1-K1-F5
aactaatcgtttctccaccaatttttatcgaaaacccatttaaatggcctattccaaccttggaacctgcttccaaggccattcttgggattcgtaaggctgcttgcaccaagagaaatgctaagaatatcacctcctgtcccaacaaaattcttaatattttccttatacaacgagataccaaagggagattatgtgctagaagagctcgcggatagcctcaaaaagggcaataatggacagtcatgtagtgcaagttctatccttaggagtatgaacatttccaaaagtgtagattctgatataataatagatgaggcaagtcaagcagatggaagtgttaaatgtgtagacgatagtccc

SEQ ID NO: 16342 - DNA, 336 bp, Glycine max
  Clone ID: LIB3094-058-Q1-K1-D3
taacagccttccttaccacaccactattatttatttattaacgcatctaagctcttaaagacgcgggatttttaaaatcatgcactttcaagtcatatttccacactctattaacatctgtcttacctacataccattccctaacatactcatacctctcctcaacaattaaacaactgtaccctttttcacactataagtctctcgaccaaacctccataatgttctctccacattcctctaatccaagcttgtaacacatactattcattcacacaccccagagcactcacctggaatccctcatgctctttatgcttaaatctttgatatctc

SEQ ID NO: 16343 - DNA, 443 bp, Glycine max
  Clone ID: LIB3094-058-Q1-K1-F7
taggagacaatcatgtgaaggacgaggcaagaaggaagtgttgtgggaggaaagaggcagagctgcaatcaccagagtggaagcgcgaaacggtcctccccggctttccatttttttctcttctgatgaaattttagttcatcccagttgctgattgagattgaatttaaattcgaaaaagcgtacttgtgccactgtacttttacagatctgcggctacgggctagcctatcgtatttttgcgtagatctagtgtccgtgaagcggttaccatttcaccactcaccactattcatctctttcttctatattgatctgaaattgaagatggaaagcgaaaagaaatcgtcagcaatatctgatgtgggagcatgggccatgaacgttgtcagctccgtcggaattattatggccaacaaacagcttatgtccaacaatggcta

SEQ ID NO: 16344 - DNA, 137 bp, Glycine max
  Clone ID: LIB3094-059-Q1-K1-E11
atttcccaaccctaattgccaattggaccccccctttaaccgggcatttaaccccgccggtgttgtgggttcccgcaacgtgaccggttcactttgcaacgccctatcgcccgcttctttcgctttctttcctttct

SEQ ID NO: 16345 - DNA, 410 bp, Glycine max
  Clone ID: LIB3094-060-Q1-K1-A6
cccacgcgtccgcttctctctctctctttcttctttacttgcttgaagcaatggccaaggcgttggcatcagtgctgctgtttctcctcgtagctgctagtaatgtgtttgctgtacagcttgaacttgagactcttccaccctcttaccctcaccctcaccctgttcactcccccacaccagcacctcttcacccaccagcaaatgctcctcacccacaccaccaccaccaccaccaccaccctccagcaccagcacctgttccttcaccttctcaccacaattaccctcctacccctgcccctgctaagccttctactcaccaccatcaccatcaccctcctgctcctgttaatccacctcctgttcccgttcattctccagttaaacctcctgttccggttcaccct

SEQ ID NO: 16346 - DNA, 383 bp, Glycine max
  Clone ID: LIB3094-060-Q1-K1-C5
gccacgcgtcgccacgcgtcggaagttggaatatacctacggatggtggaatagggggatttggattgcatagtgcggtggtgacgaagatggaagacaaagagtgtgagagagagaaaaaagttgctttatgcaatggcacgaagcaggggtttttacagaagtgagcaacgacgccagatatgagaaaagtgagtttatttggggtcatatttgtaaaaagtggttttgtaattataccctctaattcaagagtgaagaaacaagggtgggatggaaatataaatagtacaatttggtcctagtggtggcttaccctttggcctctttttctaattcagaattttttttaaatatataaaagtggggtgaaatgttaactt

SEQ ID NO: 16347 - DNA, 403 bp, Glycine max
  Clone ID: LIB3094-060-Q1-K1-C7
gccacgcgtcgagttcctcatttttatcctatggtccgcctccgcatgttgctgggctggttatgctttcccacttggtccaggaccttttccaggtgcagaaaaccctttagtgaagcctgtttctcaggcacccggacaagcttttgctccacctgctcatgctgttgatggcaaaaatgttcagcctctggtgcggggagatccaaatgcctatgttggcaatttttctaatggaagaacaaatatccaagaacaaggtgaccatctaaatcatgcttggcatcatcaaagaccttttccttccagagtaaacattcctatgcaacagggtttgggcccaaggccatttatacgacccccattttatggtccaccttcagggtacatggttggtccaagc

SEQ ID NO: 16348 - DNA, 427 bp, Glycine max
  Clone ID: LIB3094-060-Q1-K1-D5
gtcagaacaatttattgcacaaatattttctatgaagcttactcaagccgatgtcaaacggtctttgaatctatttgtggagaggttcaacggtttaggcttcttggagattaccatcattcaactcgaattgcttttgttgagttcacagtggctgagagtgcaattgcagctctaagctgtagtggggtgattctgggttcactgcccataagggtaagtccatcgaagacaccagttcgatcacgtgctcctcgccctactatgcactgaatcaactttccatgtttctggggttgattgctgctgagatatatttacatatatatatatacatagaaacagctgtgttctaaggaacatgtggcatttagttggtacttttgtcctcatgtcttacagtatggttactttgctttcccttggg

SEQ ID NO: 16349 - DNA, 384 bp, Glycine max
  unsure at all n locations
  Clone ID: LIB3094-060-Q1-K1-F9
tatgaatacattccttgcagattatactgaaagatgggtttgaagacggcgttactgatgggaggcctttccctcatgctacttgtggtctcctctgaagtggcatccacgaatacaaaaaaggaggcaaatggagtggatgatgccaaatatcccgatggaagctatggagggggttacccatgtcatggcggtggcggctatcctggacatggcggatgcggttatcctggccatggacaaacgtggcgatatcctggacatgatggtggtcacactggtcatggtggccactacactgtccgctgtggtggatactgtangcatggctgcatctgtggacgaacatacaacggatgtatgcagaggtgctgctataacact

SEQ ID NO: 16350 - DNA, 355 bp, Glycine max
  Clone ID: LIB3094-060-Q1-K1-G7
gacgctcctacagcgaagacccggcgcttgactcggcgttgaatgtggaggagcctcgccggctaccagcaccaggcaaagacctcgtaccgtctcgcgagcggcgggccgaatttgcaaaccacgcaaggggatcgccagcggaagcgactgcgcatactgcggagccgagtccgaccggagctaaagtggcgccgacaccacgcgaagaatgatccaggactcgcgtcaatcacatgggaccactagagagccatggagaagatatatgacctgatggtgggaatcgctgaggatgcagatgaatgcgagcctaagacgaggccaccagatgttcacacgcatgaccatcagg

SEQ ID NO: 16351 - DNA, 406 bp, Glycine max
  Clone ID: LIB3094-060-Q1-K1-H6
gtcatatgctccaagtgcactggtaagggttctaagtctggtgcttcgatgaagtgtgctggttgtcaaggaactggtatgaaggtttctataagacatcttggcccgtccatgattcagcagatgcagcatgcttgcaatgaatgcaagggtactggagaaaccatcaacgacagagatcgctgcccacagtgcaagggagaaaaggttgtgcaggagaaaaaagtccttgaagttattgtggaaaagggaatgcagaacgggcagaagattacattccctggcgaagctgatgaagcgccagacacaattactggcgatattgtctttgtccttcagcagaaagaacattccaaattcaaaagaaaggctgaagatctttttgtagagcacattttggtcctta

SEQ ID NO: 16352 - DNA, 364 bp, Glycine max
  Clone ID: LIB3094-062-Q1-K1-F6
cgcgtccgcccacgcgtccgctactctgttcctcagattcaacaccaccttgcgtggcgccaaggggagaagccttcgacatcggagccgttccgttcaacgccgacgggtggggtccgccggacaacgcgacctcaggcagcaacaacaacaaccttcctctgaacgtccccttcgcccccttctcccgctccgacaaattgggccgcatcgccgactggacccgcaacttcaacaatccgacccgctccaagaaccccggcgatgccggcttcgacttcggcaacgaccaactctttcccggcttcggcgacgacgacgccttctttcggctcggcgaccgaaaggccccggcggggcccaa

SEQ ID NO: 16353 - DNA, 459 bp, Glycine max
  Clone ID: LIB3094-063-Q1-K1-A4
taaactcaaggatggccctctgtattggattgacacggcggataaacaaccatgcgttgggactggtggtatgataccttggaaacttcacgtcaccgggaggctctttcatagtggattagctcataaagctataaatgcgctagagctagccatggatgctctaaaggaaatccagttgcgattttactcagacttcccacctcatcctcaggaacaggtttatgggtttgcaaccccttcaaccctgaagccaacccaatggagttatccaggaggtggaatcaatcaaattccaggggaatgtacaatttcaggagatgtcagattaactccattctacaatgtaaaggatgttatgaaaaagctgcaagaatacgtggacgatattaatgagagtgcacagaagctagaatctaagggtccagtttcaaaatatgtcctacctgatgaaaacat

SEQ ID NO: 16354 - DNA, 411 bp, Glycine max
  Clone ID: LIB3094-063-Q1-K1-A8
taaactcaaggatggccctctgtattggattgacacggcggataaacaactcgtgcgttaggagtggtggtatgataccttggaaacttcacgtcaccgggaggctctttcatagtggattagctcataaagctataaatgcgctagagctagccatggatgctctaaaggaaatccaggtgcgattgtactcagactttccacctcattctcaggaacaggtttatggggttgcaaccccttcaacccttaagccaacccaatggagttagccatgaagtggaatcaatcaaagttcaggggaatgtacaatttcaggagatgtgagattaactccattgtacaatggaaaggatgttatgaaaaagctgtaagaatacgtggacgatattaatgagagtgcacagaagc

SEQ ID NO: 16355 - DNA, 310 bp, Glycine max
  Clone ID: LIB3094-063-Q1-K1-B5
taaactcaaggatggccctctgtattgtattgacacggcggataaacagttatgcagtgggactggtggtatgataccttggaaacttcacgtcaccgggaggctctttcatagtggattagctcataaagctataaatgcgctagagctagccatggatgctctaaaggaaatccaattgcgattttactcagacttgcgaccttatcctcaggaacaggtttatgggtttgcaacccctgtgacatgttatgtaacccaatggagttatccaggaagtggaatcaatcacatttcaggggaatgtaca

SEQ ID NO: 16356 - DNA, 410 bp, Glycine max
  Clone ID: LIB3094-063-Q1-K1-E5
taggagacaatcatgtgaaggacgaggcaagaaggaagtgttgtgggaggaaagaggcagagctgcaatcaccagagtggaagcgcgaaacggtcctccccggctttccatttttttctcttctgatgaaattttagttcatcccagttgctgattgagattgaatttaaattcgaaaaagcgtacttgtgccactgtacttttacagatctgcggctacaggctagcctatcgtatttttgcgtatatctagtgtccgtgaagcggttaccattttaccactcaccactattcatctctttcttctatattgatctgaaattgaagatggaaagcgaaaaggaatcgtcagcaatatctgatgtgggagcatgggccatgaacgttgtcagctccgtcggaattattat

SEQ ID NO: 16357 - DNA, 58 bp, Glycine max
  unsure at all n locations
  Clone ID: LIB3094-066-Q1-K1-B1
aaaaagaaaaaaaaaacaaaaaaaagangaattttttttttcttacaaaataaactat

SEQ ID NO: 16358 - DNA, 169 bp, Glycine max
  unsure at all n locations
  Clone ID: LIB3094-068-Q1-K1-E8
catatctcttctatantntcaggtagggttttttcacttggcgtggggccacaacctcnttacttttaaaaccctttctttacccaacttaatcncctttcaacacatcccccttttcccaactttcttaatatctaaaaaaccctcacctatctcccttcccaacaat

SEQ ID NO: 16359 - DNA, 398 bp, Glycine max
  Clone ID: LIB3094-069-Q1-K1-B6
gagcggtttaccattttcacaacaattggttttcattttaaatttacatcatatgtcagggggtgggtgaatggtacatgacagactgcctatttctaaccattagcagtttaagacaatttgtgaaatgtatgctatttcgattgattgaaactatagggcagcgtgtttgctgtgacggactatctatttttcactgttgacattttaataaaataaataacatctctgaattgtttgctatctggattgctatatatttctcactatcatggaatacgtttataacagctcaaacatattgatcaacccattatatatggtggatgggcctaataataaacaatttttaatttggcaatggaataattatttttaacctttcatttaataatttg

SEQ ID NO: 16360 - DNA, 359 bp, Glycine max
  unsure at all n locations
  Clone ID: LIB3094-069-Q1-K1-E2
ctctgctacntttgcttctcctccacccattcacattttaacacacactttgattgagaagggggcgtgttcacacaaagacagtgaataaatcctcgcggcaagtgatcgacaggtactactctcgcatgacgctggacttccacacaaacaagaaggttctggaagaggtggccatcattccctccaagaggctccgcaacaagatcgcgggattctccacccacctcatgaagcgcatccagaagggtcccgtacatggaatctccctcaagcttcacgaggaggagcgcgagcgccncatggacttcgtccccgatgtctccgccatcagaaccgaccaaatcgatgtcgacaag

SEQ ID NO: 16361 - DNA, 397 bp, Glycine max
  Clone ID: LIB3094-071-Q1-K1-A11
cccacgcgtccgcccacgcgtccggaagaaaggaatataccttacggatggtggaatcaagaagcatttgggattgcatagtgcgggtggtgacgaagatggaagacaaagagagtgagagagagaaaaatcttcgctttatgtcaatggcacgaagcaggggtttttacagaagtgagcaacgacgccagatatgagaaaagtgagtttatttggggtcatatttgtaaaaagtggttttgtaattataccctctaattcaagagtgaagaaacaagggtgggatggaaatataaatagtacaatttggtcctagtggtggcttaccctttggcctctttttctaattcagaattttttttaaatatataaaagtggggtgatatgtttacttaag

SEQ ID NO: 16362 - DNA, 369 bp, Glycine max
  unsure at all n locations
  Clone ID: LIB3094-074-Q1-K1-A1
tacatatccaatcaactaccacatcgcaactgccatcgcctattcgcctggttgttgcttagagtgtgtccttgatctcatctccagcatcgtcctgaatattaaaggcaattcgagtaaaaaaattaataactaattattctcaaatcaatgtgcagctgagacagaaaagaatggaaaacattccactccaaaatactccatgtctaaaagctgtcaacagcaacataaagcatatgcagggtaatgcattagaaacagcttcagtaagtatgaggataaaactaaattagcanatgaagaaaagctcataagcctaactcctacactactacagcgcaccaacacaaacaagagagatgttaatta

SEQ ID NO: 16363 - DNA, 323 bp, Glycine max
  Clone ID: LIB3094-074-Q1-K1-D8
taggagacaatcatgtgaaggacgaggcatgaaggaagtgttgtgggaggaaagaggcagagctgcaatcaccagagtggaagcgcgaaacggtcctccccggctttccatttttttctcttctgatgaaattttagttcatcccagttgctgattgagattgaatttaaattcgaaaaagcgtacttgtgccactgtacttttacagatctgcggctacgggctagcctatcggatttttgcgtagatctagtgtccgtgaagcggttaccatttcaccactcaccactattcatctctttcttctatattgatctgaaatt

SEQ ID NO: 16364 - DNA, 290 bp, Glycine max
  Clone ID: LIB3094-078-Q1-K1-F3
aagcgattcaaatatgttgccagaaacacgcataactctgcaagccacggtgggcgtttggatgggcttggagttaccactttctctcttggatttgcttacgtattgctccttttgtattagtggctcctgtcccaccttgcttttggacttgagctttttatatttctgattgttcaatgtctgttgtgtgtgctctccaacctgtggtgactttccggtttattcctgtggctgtttcttgtaggcctttcgacctccagtattaaataaaagatcatcttgtagct

SEQ ID NO: 16365 - DNA, 407 bp, Glycine max
  unsure at all n locations
  Clone ID: LIB3094-079-Q1-K1-B3
ggcaaagatggggatgtggcactcttctttggactctcaggtaccggaaagaccactctttcgagcgatcgcaatangtatctaatcggagatgatgaacactgttggggtgacaatggtgtctccaacattgaaggtggttgctatgccaaatgcattgacctctcacggagaaagagccagatatttggatgcaatcaggtttggcacagtgttggaaaacgtggggtttgatgagcacgaccgaaaagttgattactctgacaaatcagttccagaaaatcctcgtgctgctaatcctatagagtccattccaaatgcaaagttaccttgcgttggccctcatccaaagaatgtcatacttttggcatgtgacgcatttggggtactcccacccgttagcaagc

SEQ ID NO: 16366 - DNA, 255 bp, Glycine max
  unsure at all n locations
  Clone ID: LIB3094-079-Q1-K1-H4
taggagacaatcatgtgaaggacgaggcaagaaggaagtgttgtgggaggaaagaggcagagcggcaatcggcagagtggaagcgcgaaacggtcctccccggctttccatttttttctcttctgatgaaattttagttcatcccagttgctgattgagattgaatttaaattcgaaaaagcgtacttgtgccactgtacttttacagatctgcggctacgggctagcctatcgtatntttgcgtaaatctagtg

SEQ ID NO: 16367 - DNA, 342 bp, Glycine max
  Clone ID: LIB3094-081-Q1-K1-A6
tattccttctagacgcttccattgatcggcgatttctgatacatggcggagcatcacgaacgacgaggaagtgaagggtgagtccttgttggagaagatttctgggaagatccacgaccacgattcctcgtcttcgtcggattccgacaacgacaaaaccagcgccactgattccttcaagtctaatgttttcaggcttttcggcagagaaaagcccattcatcatgttcttggcggtggaaaaccggctgatgtttttctatggagaaacaagaagatatccgcatcgacactcggagttgcgaccgctatatgggttctgtttgaattgcttgagtacca

SEQ ID NO: 16368 - DNA, 314 bp, Glycine max
  Clone ID: LIB3094-082-Q1-K1-G10
aattcccggcccgacccgagcgacgcgtccggccacgcgtccgatagaatatccacttttcttttagatcttttatccatcagaaaggggtggatcaacttttctaaggcgtactatagtacatgaaagacatgtagcgccctcatgccactcgagctgaggatctgctaacttgaagcgtactttacaacagatgcttgttgacagagatgataaccgtattggatctagcagcgtattgatccatgcaatcagctgcaagtattgccgatgatgggaatataaaatcttctgctgtgtcagatgtttgactg

SEQ ID NO: 16369 - DNA, 450 bp, Glycine max
  Clone ID: LIB3094-085-Q1-K1-D12
taaactcaaggatggccctctgtattggattgacacggcggataaacaaccatgcgttgggggtggtggtatgataccttggaaacttcacgtcaccgggaggctctttcatagtggattagctcataaagctataaatgcgctagagctagccatggatgctctaaaggaaatccagttgcgattttactcagacttcccacctcatcctcaggaacaggtttatgggtttgcaaccccttcaaccctgaagccaacccaatggagttatccaggaggtggaatcaatcaaattccaggggaatgtacaatttcaggagatgtcagattaactccattctacaatgtaaaggatgttatgaaaaagctgcaagaatacgtggacgatattaatgagagtgcacagaagctagaatctaggggtccagtttcaaaatatgtcctacctga

SEQ ID NO: 16370 - DNA, 82 bp, Glycine max
  Clone ID: LIB3094-085-Q1-K1-F10
tagatactaaatcagcccaaaaaggcagtatctaagaattcaagattttttctaaattaaaagcttgaatcatacgtgtcat

SEQ ID NO: 16371 - DNA, 295 bp, Glycine max
  Clone ID: LIB3094-087-Q1-K1-C7
gtccggcaaaattgcttgacaggatcagttgggattaatctcccacatagtttgtggttacaatgggttgatcaagtgatcttctctgtgcttgatgacctgcttgaaatttctcagacacactctcaaaaagacttccgcaacatagaaggaacccttgttcttgctttgaagctcttgtgtaaagttttcctccagttaatccaagacctatcacaattgccaggcttcaacaaattatggttggctgtcctaagtcggttagaaatttatatgaaggtgaaagttaggggaa

SEQ ID NO: 16372 - DNA, 373 bp, Glycine max
  Clone ID: LIB3094-088-Q1-K1-A9
taggagacaatcatgtgaaggacgaggcaagaaggaagtgttgtgggaggaaagaggcagggctgcaatcaccagagtggaagcgcgaaacggtcctccccggctttccatttttttctcttctgatgaaattttagttcatcccagttgctgattgagattgaatttaaattcgaaaaagcgtacttgtgccactgtacttttacagatctgcggctacgggctagcctatcgtatttttgcgtagatctagtgtccgtgaagcggttaccatttcaccactcaccactattcatctctttcttctatattgatctgaaattgaagatggaaagcgaaaagaaatcgtcagcaatatctgatgtgggaacat

SEQ ID NO: 16373 - DNA, 332 bp, Glycine max
  Clone ID: LIB3094-088-Q1-K1-C10
tattttttttcgtccacattccaatggctgtaaaggagaacgtccacccccaagtcatcggttcctgcccgactccgtcgaaggctttgaaattgtccgaaaagtcttcgttgaaggacgttcagacagacaacgcagccgttccactggtggtggacgagacctcttatcccgaaccgacctgtgagttttatggcggccttcttggcccacagctgccagaagctgaacggtttgttctggatccaactcttgttgaggagtacaggcacaaaaagcctccattccggttcaatggtctcggagaagttgtgtaccttcgcacatatgcc

SEQ ID NO: 16374 - DNA, 89 bp, Glycine max
  Clone ID: LIB3094-088-Q1-K1-D7
gacggtgctatagcggacacgccggccgtgtttgaggataagaccgagttcaacgtggtgatctacaaagtaccgaccaacgctctaat

SEQ ID NO: 16375 - DNA, 449 bp, Glycine max
  Clone ID: LIB3094-090-Q1-K1-E12
taaactcaaggatggccctctgtattggattgacacggcggataaacaaccatgcggtgggactggtggtatgataccttggaaacttcacgtcaccgggaggctctttcatagtggattagctcataaagctataaatgcgctagagctagccatggatgctctaaaggaaatccagttgcgattttactcagactttccacctcatcctcaggaacaggtttatgggtttgcaaccccttcaaccctgaagccaacccaatggagttatccaggaagtggaatcaatcaaattccaggggaatgtacaatttcaggagatgtcagattaactccattctacaatgtaaaggatgttatgaaaaagctgcaagaatacgtggacgatattaatgagagtgcacagaagctagaatctaggggtccagtttcaaaatatgtcctacctg

SEQ ID NO: 16376 - DNA, 53 bp, Glycine max
  Clone ID: LIB3094-093-Q1-K1-F6
cgcaccattttcaccgcacgaatattttagctcaacggagcgatccaattaaa

SEQ ID NO: 16377 - DNA, 340 bp, Glycine max
  Clone ID: LIB3094-094-Q1-K1-D10
tatacattatccaacctgttttactctttcatactactacataactatacgataggttcaattaaattcaagtcactccccatcattttacaacatcattactactaaaaccctcactttacccaacttaatcacctttcatcacatccacctttttccatctatcttaataactaataatccctcaccaatctaccttcccaacaattactcatcctcaattactaataatactcaccctttatcttctcattaatctcatcattaattatttttacacacaacatcacctctactctttccatcaccctatctacctctcctttctcttacttccctt

SEQ ID NO: 16378 - DNA, 99 bp, Glycine max
  unsure at all n locations
  Clone ID: LIB3094-096-Q1-K1-F6
aacggaagaaggtgaagagaccattgaagttactggattatctgcttggcgaaggtaagggcaggccgnctcaagaatttcaagaattttgcccgaaat

SEQ ID NO: 16379 - DNA, 121 bp, Glycine max
  Clone ID: LIB3094-096-Q1-K1-G5
ctcggattcttatccaaacatctatttccaatatctctgcatgatattgcccagaggacccgaccactatcacaagaatcaggtcccacttctcactacatgacattcactaaaactctaa

SEQ ID NO: 16380 - DNA, 104 bp, Glycine max
  Clone ID: LIB3094-099-Q1-K1-G11
gatggctactattgaagattcaaaacgattctacccactgttcggactctaggccaatttagcccttatttaatttgcccggacactcaaatacttttctaatc

SEQ ID NO: 16381 - DNA, 400 bp, Glycine max
  Clone ID: LIB3094-100-Q1-K1-G2
taggagacaatcatgtgaaggacgaggcatgaaggaagtgttgtgggaggaaagaggcggagctgcaatcaccagagtggaagcgcgaaacggtcctccccggctttccatttttttctcttctgatgaaattttagttcatcccagttgctgattgagattgaatttaaattcgaaaaagcgtacttgtgccactgtacttttacagatctgcggctacgggctagcctatcgtatttttgcgtagatctagtgtccgtgaagcggttaccatttcaccactcaccactattcatctctttcttctatattgatctgaaattgaagatggaaagcgaaaagaaatcgtcagcaatatctgatgtgggagcatgggccatgaacgttgtcagctccgtcg

SEQ ID NO: 16382 - DNA, 185 bp, Glycine max
  unsure at all n locations
  Clone ID: LIB3094-102-Q1-K1-H7
tattccttctagacgcttccattgatcggttatntctgatacatggcggagcatcacgagacacgaggaagtgaagggtgagaccttgttggagaagatttctgggaagatccacgaccacgatacctcgtcatcagcggattccgacaacgacaaaaccagcgccactgattccttcaaggcta

SEQ ID NO: 16383 - DNA, 309 bp, Glycine max
  Clone ID: LIB3094-104-Q1-K1-H10
aaaaatatatttaaaaaaaaaacaaaaatattaaaaaaaatttaaccctaaaattttttaaaatttacttctaacttttttttgtttaactttttatttttttaaaacctaattttttccaaatttaaaatttttaaaccttaattactcttttttaaaaaaaattattatataaattttaattttttctaattatatattatattttttaataatattatttaattaatatatatattattttaataattatattttattatctaaaaataattttttatatattttttattatattttatactattt

SEQ ID NO: 16384 - DNA, 385 bp, Glycine max
  unsure at all n locations
  Clone ID: LIB3094-005-Q1-K1-A2
ctgggattcatgaccacttcatcttatgcgcactgcagatcgtgtccttatcacatctggggacctcggctatcctcgtatttcctaagttatctccttgtgttgataggcggaatcccgcactcggatgttgtgtgtgcactgctgtagctagaagaacattgnatagtgactatcatgcactaccttcttggagctttcaagcctgcatgtaatgtcttcttctcattttttgatgggcagaaccggacgcatgttccgttttaacacgaacttggtcaatagttcccagtgccacttttgcacagttgagaacacattggcgagaagattaccctttaatcaaagcacgggaagaagactgatcacaatggtgttaaacttg

SEQ ID NO: 16385 - DNA, 136 bp, Glycine max
  Clone ID: LIB3094-010-Q1-K1-G2
ctcacgcaccttgaccacacccagcctaattacatctccatgcctttgcccattagacgggaatcgtcactgacctatttggaatccatctatactcactggtttaaaggctaacgagcctcgagaccctagcttg

SEQ ID NO: 16386 - DNA, 212 bp, Glycine max
  Clone ID: LIB3094-018-Q1-K1-H10
tcgcccacgcgtccgtacagtccaagatatatggacaatggtaccgtactggcacaacgccatgatctatctgatcatcggagggttgatacaccatcgatgttgacatttatgatcgaccctacaatgtattactaactgaacttacactgagttgatttatgcactccacattggcgattggaaatgctgtaccgccattgtgttaaatg

SEQ ID NO: 16387 - DNA, 468 bp, Glycine max
  Clone ID: LIB3094-022-Q1-K1-A6
cgaccgacgcgtacgtttgaatacattccttgtagtttatactgaatgatgggtttgaagatggcgttactgatcctaggcctttccctcatgctccttttggtctcctctgaggtggcatccacgaatacaaaagaggaggcaaatggagtggatgatgccaaatatcccggtggaagctatggagggggttacccaggtcatggcggtggcggttatcctggccatggcggtggcggttatcctggccatggcggtggtggcggctatcctggtcatggtggtggccaccctggtcatggtggcggctaccctggccgtagaggtggatactgtatgcatggctgttgcggcggccggacatacaacggaagttgcataaggtgctgctataacgctggcgaagctgctgctgcacaaactcacgatcagactcacgattaagacgatgcagttctacttaattag

SEQ ID NO: 16388 - DNA, 134 bp, Glycine max
  Clone ID: LIB3094-022-Q1-K1-E7
cacggctctgctccttaccactttcactgcttaaatttcacagaaaactctgggaacatgtgtcatttatcacaaacgctccttacagcctgatgcagcttctactcgcacctccttcctatacaatagaaatt

SEQ ID NO: 16389 - DNA, 164 bp, Glycine max
  Clone ID: LIB3094-022-Q1-K1-F11
cctacgcatcctcaaagctcacataaacttttatgcgactacatacctctcctatcctgtcgcctatattgaatttactttcattcattatacaaccttgtaaccgataactcctaatcaaatccaaaaatcatctcatttcatcacatacccttttctccatc

SEQ ID NO: 16390 - DNA, 412 bp, Glycine max
  unsure at all n locations
  Clone ID: LIB3094-025-Q1-K1-E3
aaaggaaaaaaaanaaaaaaaaaaaaaatttaattaaaaaaaaaaaaaaaaaaaaaaacccgtccgcgttaataaaaaaaaagccccccccaaaaaaaaaaaaaaaanttttttttggtttggaaaaaaaaaaaaaaaaaaaaaaaaaaaaaaaaaaaaaaaaggccccccctttaaaaaaaccaaaattaaccaccccctccttccaaaaaaaaaactttttaatagggcccccaaaaaaaaaaaccccccccccgtttaaaaaccccggaactggaaaaaaccccgggttcccccaaataaaaccccttacaaaaaacccccttttcccccagtgggaaaaaaaaaaaaaacccccccccaaacccctttccaaaaaatttccccccctaaatggcaaatggcccccccc

SEQ ID NO: 16391 - DNA, 474 bp, Glycine max
  unsure at all n locations
  Clone ID: LIB3094-030-Q1-K1-F10
ccggcccgacccacgcgtccgcacggcacgaatatcttgttgtttggagctatccgagaaaaactctgtaagcatgttgggttaccaggacctgcttacaggtgatgagcttctctctgactccttccgttacaaggaaattgagaatggaatgctgtgggaagttgaggggaagtgggttgttaaaggagcagttgatgtagacattggtgcaaacccttctgctgagggtggaggagaagatgagggagttgatgatgcagctgttaaggttgttgacattgttgacacattcagacttcaggagcaacccgcattcgataagaagcagtttgttaccttcatgaagaggtttatcaagaatttgactcccaagctcgatgccnacaacaggagttgtttaagaagcacatcgagggagcaactaaatacctgctctctaagattaaagatttccaattttttgttggtgag

SEQ ID NO: 16392 - DNA, 185 bp, Glycine max
  Clone ID: LIB3094-030-Q1-K1-H5
cggacgcttggcctcattgctgctaggaggcctggccgttttaggggccaagctgttgccacggttgctagagcggttatgactccttgagaggatttttagggtgttatttgttctcaaattttgttcctttcatagtttatgttgaactctttgggttctattttgaacagcatttccgccat

SEQ ID NO: 16393 - DNA, 411 bp, Glycine max
  Clone ID: LIB3094-040-Q1-K1-D8
acgcttgaaggccattgtcagttttgtcacaatttaattccagctttgcactgtcttttggacagtttcctttggtacaagaacagagttattctggtcggacaattcttcatggtggtgcaaggtatcaagcaactggccgcgggtttgttgttcgccatatcaaattttcagagaactacagactctactctcgtagtcattttgttaaagggttggaggttgcgcttttgttgatagtatatcttgcttatggctataatgaatgtggtgcactctcatatattcttttgagtataagcagttggtttatggctctatcctggttgattgctccatatttattcaacccatctggatttgaatggcaaaaggtggtggaagatttcagagattggacaaaatggctac

SEQ ID NO: 16394 - DNA, 368 bp, Glycine max
  Clone ID: LIB3094-048-Q1-K1-F9
agtggattttgctttgtttcttcgaaacttagcataatacagcgtaacagtatccatccgtggcttgacctgcaagccaacccaccaaacccttgtcattcactcccacctatctgcaactctaaacccaatatacccacgggccacggtcggtgacgctataatccaaattacggtgtcgttttcagttcgtttaagcatcacccttcccaattgtattcactactaccagtatcttaatctaatccccaaccacacctaaaccaaaccatcagcataatggggaactgtttggggaagtcggagaaattaacggcggagattgttccacgcgacggggccaaagtgtatcccaccgtccgcttgca

SEQ ID NO: 16395 - DNA, 459 bp, Glycine max
  Clone ID: LIB3094-049-Q1-K1-F2
gcgatccaagaggaagaagaggaagaagaagaaggtgttgtggttcggaggaccagtgttcggaatggcgtgtgggtgaagaagcttggggatgattttgacagggttgccctggaaaacgatgagtccaatacggtgtcgtcgttgaagacgactcgtggtcggaaattggttaagaatggtgaacttgggaacaaaacggtggttgaagtagctgaaaaatcaaacaccaaaggaaagaagagtgcaagtgaagccgagaagagccctggggttagaacttcttccagattggctaaacgtgtgtccaatcaaacgtcttgtaattagatgtttgataaaattgtggttttccttttccttttattattgtccaattagccattctgtgtatgtttcaagatttaaggtttgttcaacaattggtattttgcagtaagtcatacatgaatgaatgaa

SEQ ID NO: 16396 - DNA, 241 bp, Glycine max
  unsure at all n locations
  Clone ID: LIB3094-049-Q1-K1-F5
gcgcaaaacagtcaagcaatagcttgctagctactcctgttgctgtgagaaccgttgatgtagatgcgttncagtcaagatttagagactccaacaataaaagccatgcttaacacctaccatgcctccaaactctcatcaaaccagtgtggttctagccttgtgcaaacaatagatgcacctttacctctcgtatggtccctcataaggcgctttgagtatccacaagggtacaagctct

SEQ ID NO: 16397 - DNA, 433 bp, Glycine max
  Clone ID: LIB3094-050-Q1-K1-C4
atggagagcattggaacttcatattccactactaccttaggccttggtaacttcatcaaagccttgcttctctcaacagtgtcaaatatcaccaagaaaaatggtcacaaggggttgattttgaacaatctgaatgagtctcatcttgactactactatgcattttttgcaatattaaacttcctcaacctcatcttcttcgcgtatgttactatgtactatgtatatagggttgaagtttcagattccatagacaagcttgcaaaagaactgaaggaaaagaccgtgtccaacgttgtgaatccaaaagactagttgattggggtatctaaggtgagaaagaggattaagaccgtgaaaagtttcaaaactactttatgtacaaatttggatggccaaagaactagatatgtgtgtgtctgtagagggtgtg

SEQ ID NO: 16398 - DNA, 279 bp, Glycine max
  unsure at all n locations
  Clone ID: LIB3094-054-Q1-K1-H5
gcgagcccagcgccgtccgtgttgagatacccattccttnnngtagtttaatacctgtaatagtatgggtntnntgaagatgnnngcgttacgtgagtccgtggaggcctnnttcccttcaatgccctccttntnntggtctccnnntctgaggtgnnngcatccaaacgaataccannaaagaaaggaggcannnaatggangnntggatgaaatgccaananntatcccgnnngtggaagccttatgngaggnnngggttaccnnncaggtcaatgg

SEQ ID NO: 16399 - DNA, 432 bp, Glycine max
  unsure at all n locations
  Clone ID: LIB3094-060-Q1-K1-B3
ngttcccggggaaaacccacgcgtcgatgaagagcatgaacttatattccacatttccttagcctggtaacttatcagtgctttcttctctcaacagtgtcaattcaccaagaaaaatggtcacaaggggtggattttgaacaatctgaatgagtctcatcttgactactactatgcattttttgcaatattaaacttcctaacctatcttcttcgcgtatgttactaggtactatgtatatagggttgaagtttcagattccatagacaagcttgcaaaagaactgaaggaaaagaccgtgtccaacgttgtgaatccaaaagactagttgattggggtatctaaggggagaaagaggattaagaccgtgaaaagtttcaaaactactttatgtacaaatttggatggccaaagaactagatatgtgtgtg

SEQ ID NO: 16400 - DNA, 183 bp, Glycine max
  Clone ID: LIB3094-060-Q1-K1-B4
gaaagacgtagcacgcgaccaacgcttcacggcacacacactaaccaaaaggagaggatcgacaaaccgataaccacgcattgcaacgcgcgctgatcggactacggagtgcaaacgctaatgatatctggatagtctggtaaccttacacctcccgacacgcaaccgacgaccctaaaaacc

SEQ ID NO: 16401 - DNA, 441 bp, Glycine max
  Clone ID: LIB3094-063-Q1-K1-E4
ctgggtggaccgacgcgtccgcaaccctaacgcgtgcagagcagagagagacgcagccatggggcgaagacccgcgaggtgttataggcaaattaagaacaaaccataccccaagtcacggttttgccgtggtgttcctgatcccaagatcaggatttacgatgttggtatgaagaagaagggtgttgatgaatttcctttctgtgtccatctggttagttgggagaaggaaaacgtttctagtgaggccctggaagctgctcgtattgcttgcaacaagtacatggccaaatttgctggaaaggatgctttccacttgagagtcagggtgcacccattccatgttcttaggatcaacaagatgctttcgtgtgccggagctgataagctccaaactggaatgagaggtgctttttgaaaaccacagggtacttgtgctaa

SEQ ID NO: 16402 - DNA, 309 bp, Glycine max
  unsure at all n locations
  Clone ID: LIB3094-069-Q1-K1-C7
gcgcccacgccctccgcaccgttccgagtttttctgttacttctcatagnnagagttcgaccgcggcnggttgctagatatatagatatgcaagaaatgaactctcaacaatcnnncgagtcccaaccactttggatgcttcagaagaaagctttcgagaaatcgacgaccgatctagaaaccttactgagcccattttgtggaccaagaaggatcttcacagnnngaggtcagnncggagaatgcacctttggtgaaggaaaatttaagggcctattgtcttttcaaaattaccctggaggttgtgac

SEQ ID NO: 16403 - DNA, 373 bp, Glycine max
  Clone ID: LIB3094-078-Q1-K1-E12
gccgacttttacgcccattcttccgctcgagaatatgacccgttttaaaatttacgaaacataattatggattagttatgttatataatgagaggaacataaacgaacaatcatatgctgctagtcatttggataataaacaacattatgatttaagcatatcacatgatcgctttacttataatttatggatatcaactcaataccacatgattcaagtaatattaccaaaatcaaagccttatcctacaaaatgcggtcaactacattggtcatgacctcattcgtcaagtttagaaaccaaaatgtaacaaactggaaaaaaattcactttttcttacaaaagtattccatattacacaaatactcttaa

SEQ ID NO: 16404 - DNA, 342 bp, Glycine max
  Clone ID: LIB3094-079-Q1-K1-E2
cccacgcgtccgcgagcttcagcaattgtgtacttcaatgttcataaatcaaaagcctacttcagtatatagcaagttttgttcaagacaataagagagggaaaaaccgattaccgtgccaggattcggttgattaatcatgacatgaacaaatataacactccgaaataccgatttgtggttcgctttaacaacaatgacattgttgcacaaataatatctgctatcattgccagctatttacttcttgctacatcatattcacatgagctgtcacgatatggtcttgaattatgacttacaaattatgcatcatcttattgcacttgtctcctgatggcc

SEQ ID NO: 16405 - DNA, 372 bp, Glycine max
  Clone ID: LIB3094-079-Q1-K1-F10
taggagacaatcatgtgaaggacgaggcaagattgaagtgttgtgggaggaaagaggcagagctgcaatcaccagagtggaagcgcgaaacggtcctgcccggctttccatttttctctcttctgatgaaattttagttcatcccagttgctgattgagattgaatttaaattcgaaaaagcgtacttgtgccactgtacttttacagatctgcggctacgggctagcctatcgtatttttgcgtagatctagtgtccgtgaagcggttaccatttcaccactcaccactattcatctctgtcttctatattgatctgcaattgaagatggaaagcgaaaagaaatcgttagcaatatctgatgtgggagca

SEQ ID NO: 16406 - DNA, 305 bp, Glycine max
  Clone ID: LIB3094-082-Q1-K1-B6
gcggttgagtgcaacgccattgatgaagtctggattttccctttatccagcaatttatgatattgacgtctttgtcactttctaattcaaccccatacttgggaggagtgcttctgctgattgtttctgcctggctagcatctgcaaaatccttgtatacccaatttacttcattgcgtaaagagtaagaactctataaagagattgaacgagcatcctccgtcaagataccaattatttcttatactgatagtgtaaactgtttctttgcaactgtttcaccactgaatccattctcatgttac

SEQ ID NO: 16407 - DNA, 339 bp, Glycine max
  unsure at all n locations
  Clone ID: LIB3094-082-Q1-K1-D1
gcgcggacgcgtgggtttcagaggcaccgaatgttcttacatttgcattaaagagatttcagtcgggnaaggttgttaagctcaacaagcctattcaatttcctgaaatacttaacttggcacctttcatgagcgggactagtgataaatcacccatatacagattgtatggggtagttgttcacttagatatcatgaatgctgccttttcgggtcactatgtgtgctatgtgaagaatatccaaaacaagtggttcaaggttgatgacagtgtggtgacagctgttgaattggatagagtctngacaaaaggaacatatatgcttttctatgcaaggt

SEQ ID NO: 16408 - DNA, 259 bp, Glycine max
  Clone ID: LIB3094-082-Q1-K1-D3
ctcacgcttttgtttcacactcacctaatgttcttacatttgcattaaacatatttcaatcggttaagtttattatgctcatcaagctctattcaatttttcttaaatacttaactttacacctttcatgatcttcactagttataaatcacccatatacatattgtatcatttattttttcacttacatatcattaattcttcctttttctttcactatatttgctatataaataatatccaaaacaacttctttcaa

SEQ ID NO: 16409 - DNA, 406 bp, Glycine max
  Clone ID: LIB3094-089-Q1-K1-H12
cccacgcttccaaaaaggcctggcctaatttgataaccttaactggttaaggaaaaaggagggagggttaaaaaaatggggtcaaccgaaccgatcccgttttgaagggcgtcggggatgacgtacataacatactcaaacatatgcgcgaatctgctcacgaattgcctcaaggaaccctacaaggccgaatacctctctcgtgagaagctccattttgttctctccaaatgggtcgacgccaagcctgaaaaacctactattcgttcagacaccccagagcactgatctggaatagttggaagctataaatgcataaatctttgagatctggaagttcattgtcattttgaacctttctgtgatgtttaattccttggtttttttctctccatgaaatggaaca

SEQ ID NO: 16410 - DNA, 317 bp, Glycine max
  Clone ID: LIB3094-095-Q1-K1-C12
gccgcctgctcaaaattcaaaacccacatcctccctcctttttttttactaaacttctaatttaccttctgcccttttaatctctaactccaccttcaaaattctacattatccctcaatttattcatctgcatttcatatattcagttctcatcgaaaaatgtactttcaccaaagacccattccttcttcctgctaacacccacaaacccagaatcttaagaccaccaccaccaccaccacctattcgaaatcacaatctcatgctcttctccctctctacctcaccaacaccctattcttctgaatactcttct

SEQ ID NO: 16411 - DNA, 313 bp, Glycine max
  unsure at all n locations
  Clone ID: LIB3094-099-Q1-K1-A7
gattttctggcgtaaccaaccctgacactccttcttcttcgcttcctcttcgatcatcgcttganaaggccgccgaagttcgacccctcccagatcgtcgacgtcttcgtacgcgtcaccggcggtgaggtcggcgcggcgagttccctcgccccgaagatcggtcccctcggtctctcccccaagaagatcggagaagatatcgccaaggaaaccgccaaggactggaagggcctccgcgtcaccgtcaagctcaccgtgcagaaccgtcaggccaaggtcacggtggtcccatccgncgncgcgctcgtca

SEQ ID NO: 16412 - DNA, 207 bp, Glycine max
  Clone ID: LIB3094-059-Q1-K1-C1.R1
gccccccccgcgccccccccccccccccccactccccccccatcccccccgtaacccccccccccccccccccccccccccctgcccccgccctcccccccatgaccccccccccccgcgccgcgccgccccgcccccccccgcccccccccccccccacccccccccctcccccccccgcccccccccccccctcccccccccccc

SEQ ID NO: 16413 - DNA, 272 bp, Glycine max
  Clone ID: 01-LIB3094-027-Q1-K1-A9
tgtacttgtgtttcaattcattcttcggttgttctctatttgcgttttctcattttctttcttgccgtctcttacatggaacgagtagtagaaacttgaaatcaaaaggcagcggtggaaaaagaaaagatagaagtaggcttcgaaaatggcagcagaatcatcatagggcgaacaacagaccatgttaagcggacgtaaccaattgctcatacttgacaatacctaaccgaaaatgggaaaaaaagccatttgaaccttaatttcttcaa

SEQ ID NO: 16414 - DNA, 141 bp, Glycine max
  Clone ID: 03-LIB3094-027-Q1-K1-A11
taaacaactctttctcttcttccttctctctttaatctcactcacttatatccacaatagcggatacaaaaacaatttggtatccattctaatatcaaccaacttctcactctcatcattaacaccttttactccaacaaa

SEQ ID NO: 16415 - DNA, 312 bp, Glycine max
  Clone ID: 05-LIB3094-027-Q1-K1-B9
cccacgcgtccgttctaatctcattctcctttttttcaaacactctctctcatggcatcagataagaagattaggatcggcatcaacggatttggaaggattggccgttttgtggccagggttgcccttcaaaggaatgatgttgaacttgttgctgtcaacgatcctttcatcaccactgattacatgacatacatgttcaagtacgacaccgctcatggccagtggaagcattctgatgtgaaggtgaaggactctaataccctactctttggtgagaatcccgtcaccatttttggaatcaggaaccct

SEQ ID NO: 16416 - DNA, 143 bp, Glycine max
  Clone ID: 17-LIB3094-027-Q1-K1-E9
tcatatctttattaacatctccatttaactttctctttctactaatctcatctttttctttatattatctttcttatgacacttccattttcctttcaattaccatacaattctcttacataccaaattataatataatactt

SEQ ID NO: 16417 - DNA, 416 bp, Glycine max
  Clone ID: 21-LIB3094-027-Q1-K1-F9
cggaacgatgaccggcggcggatccacggggaggttgccgacgtggaaggagagagagaacagcaggaggagagagagaagacgaagagcgattgcagctaagatctacactggccttcgagcccaggggaactacaagcttccaaagcactgcgacaacaacgaggtcctgaaagctctctgcgccgaagctggctggatcgtggaagaagatggcacaacttatcgaaagggatgtaagagacccacgagtgagattggaggaacaccactgaacttaagcgcgtgttcttccattcaggcaagtccacaatcctcgtcatacccgagtcctgtaccatcctaccatgctagcccaacctcttcctcgttcccaagccccacgcgcattgacggataccacccttcttctttct

SEQ ID NO: 16418 - DNA, 282 bp, Glycine max
  Clone ID: 29-LIB3094-027-Q1-K1-H9
tttcctattattcaaggttaataatcatcaaatttcaaccccttatccagtggtaacatattaacaaatgtctacctatttacattttattcttataacctcctcaacccactttatatcattatctttaaattttcatttaattatacaacaaattctttaaaaataaatcattttctcttcttaacttctacttatttatctattaatccatctacaattattttctaatatttcaataaaatctcttctactatattatctctttcacttaattccaaa

SEQ ID NO: 16419 - DNA, 440 bp, Glycine max
  Clone ID: 31-LIB3094-027-Q1-K1-H11
acggcataattgcttgacaggatcagttggaattaatctcccacatagtttgtggttacaatgtttgtatcaagtgatcttctctgtgcttgatgacctgcttgaaatttctcagacacactcttaaaaagacttccgcaacatagaaggaacccttgttcttgctttgaagctcttgtgtaaagttttcctccagttaatccaagacctatcacaattgccaggcttcaacaaattatggttggctgtactaagtcggttagaaatttatatgaaggtgaaagttaggggaaggagaagtgagaagcttcatgagcttgtgcctgagcttcttaagaacactttgcttgttatgaaagcatgccttgtactagtccagagcaatactgtagattgaagtagtttatgggaactgacttggctgcatataaataattttc

SEQ ID NO: 16420 - DNA, 306 bp, Glycine max
  Clone ID: 37-LIB3094-027-Q1-K1-B10
aaacacccttgtcgaccacaccaaaattaaaaacataaaaaagcataaaagcacaaaaagacagaagaaagggaaaataaaacattttgaagtcatatttgcacacttgattaaaggctgtcgtcccttgtgacggatgcgtggggtgctaataccttccctgtgcgtaaaaacaactcccgaactattcacacttaaagttcgtagaccacaccttttcaatttttccgacgctttcctcaaataaaagttggtggcgactccgcgcattttcctttcatggaagactcacttgtgagtcccgca

SEQ ID NO: 16421 - DNA, 271 bp, Glycine max
  Clone ID: 41-LIB3094-027-Q1-K1-C10
atctcgtatctttctctgtactattcctactatggagtttttttgttcctagatgaaggttttttaaactgttaaggtacatccatcctaattctatgcatgcatacacctttctcatgcttctcttgtatatgcaaataaagacactatcaaattaaccactttttctctactttaaagtttttcaacacaaaatttttatgtgaaccctttccattgataaaattccttaaatacctctttaatttattttttaaaatgaattttatct

SEQ ID NO: 16422 - DNA, 206 bp, Glycine max
  Clone ID: 43-LIB3094-027-Q1-K1-C12
cccactcatacctctccacatctcttatcatactcatttctatttctactatataatttattatttcctactagaaaatttttaattctaataaatcttatccatcctaattctattcattcatacacctttctcattctattctttataactcatataaataccttatcaaataaaccattttttctcaactaaaaatattatca

SEQ ID NO: 16423 - DNA, 402 bp, Glycine max
  Clone ID: 49-LIB3094-027-Q1-K1-E10
cttgaaggccattgtcagttttgtcacaatgcaattccagctttgcactgtctttttcacagggtccttgggtacaagaacacattattttggtcggacaattcttcatggtggtgcaaggtatcaagcaactggccgcgggtttgttgttcgccatatcaaattttcagagaactacagactctactctcgtagtcattttgttaaagggttggaggttgcgcttttgttgatagtatatcttgcttatggctataatgaaggtggtgcactctcatatattcttttgagtataagcagttggtttatggctctatcctggttgtttgctccatatttattcaacccatctggatttgagtggcaaaaggtggtggaagatttcagaggatggacaaattg

SEQ ID NO: 16424 - DNA, 436 bp, Glycine max
  Clone ID: 53-LIB3094-027-Q1-K1-F10
tccgacacgtcgtgctttcctactatgcaccacacatactcacacgctttcaacctcctatcaggtcactatctctacaaaagtctaccgagttgcattttgttcttgtaacctcctcaacccactggaggtcgtgatctgtaaattttgagtgaattatacaacaaattcttgaaaaagaaatgattttctcttctgagctgctgcttattgatcgatgaatccagctgcaattattttcgaagatggcaataaaatctcttctgctgtgttatctctttgactgaattccaaattttgtaagtataatagttggctatgaaagagactgtaccaagaatcatagtgtgagagtcatatatcaattggtaagtatgaaatgtgagaacattttgttgaatggatattgctaaatagaagtgccaaagatgattat

SEQ ID NO: 16425 - DNA, 306 bp, Glycine max
  Clone ID: 55-LIB3094-027-Q1-K1-F12
ttccaaatattcactttttataataacaatacttctctccctaagagctcattatatactatataatccatccttattaacaatatatccttcctcttcaatttattatcacaatgtatatttcatattataccatagtctttttttcatttttttttcccaacaactctacttaaccttttatatcatcatcaatcacatatttatcataatatcattcaacaatttaatatcactttcatcattcataatctatcaatcaattatatttctttcttcccaacaaatttcattctacaaacacct

SEQ ID NO: 16426 - DNA, 442 bp, Glycine max
  unsure at all n locations
  Clone ID: 57-LIB3094-027-Q1-K1-G10
attccctctacgccgacncatactctctatctttctttcctaacataatcaattaataatcttctattnttattcnaaatcagagatgttctaatatatatcaaatcacttactccaatctccaaatttgtatctcatattcattttaatttctttaaatacttctctctccaaacctactcctatgttacactctctccaactatatagtacaaacctcaccttcccattgttaacctatataaaattttttattctaaaccctgttctctttcctttcccctttactcacccctcataatttaaaaaccttattatcacttcatcaatcctttaattcttaaactcattctgttttatattaagcatatcaattcaaattctttttcctaatttttataccaaaaaatcatttctcaactttataaaccttccatttatt

SEQ ID NO: 16427 - DNA, 245 bp, Glycine max
  Clone ID: 59-LIB3094-027-Q1-K1-G12
aacaaaacaaaaaaatttaaaacaaaaatatttacttaaaaagaagtaaacaaaaaaataacaaaacaaatactaaaacctcccattttaatcatccaaccttcttacccttcatacaacatataccctccttacttaacctaaattcaatccactactcacacaaacatcactcacttgaaaaccttacataacccaacttaatcaccttcatcacatccctttttccccacttaccctttaac

SEQ ID NO: 16428 - DNA, 240 bp, Glycine max
  Clone ID: 61-LIB3094-027-Q1-K1-H10
actcccactccttccccacaccttccccatttttctcttacactttttcttcaactttaagtgccaccctaactaccctgattctgatcatattccttacttttattattattattcttttacatacaataattataacgaattcatcatttagttctttaaaattaatttttattctcatttaaataataaaatttcttctctcccttatttcataccaaccaaatttatttccaccac

SEQ ID NO: 16429 - DNA, 398 bp, Glycine max
  Clone ID: LIB3094-001-Q1-K1-C9
cccacgcgtccgcccacgcgtccggaagaaaggaatataccttacggatggtggaatcaagaagcatgtgggattgcatagtgcgggtggtgacgaagatggaagacaaagagagtgagagagagaaaaatcttcgctttatgtcaatggcacgaagcaggggtttttacagaagtgagcaacgacgccagatatgagaaaagtgagtttatttggggtcatatttgtaaaaagtggttttgtaattataccctctaattcaagagtgaagaaacaagggtgggatggaaatataaatagtacaatttggtcctagtggtggcttaccctttggcctctttttctaattcagaattttttttaaatatataaaaagtgggtgatatgtttacttaaaa

SEQ ID NO: 16430 - DNA, 400 bp, Glycine max
  Clone ID: LIB3094-005-Q1-K1-D12
tcgcccacgcgtccgtccacgcgttcggaagaaaggaatataccttacggatggtggaatcaaggagcatttgggattgcatagtgcgggtggtgacgaagatggaagacaaagagagtgagagagagaaaaatcttcgctttatgtcaatggcacgaagcatgggtttttacagaagtgagcaacgacgccagatatgagaaaagtgagtttatttggggtcatatttgtaaaaagtggttttgtaattataccctctaattcaagagtgaagaaacaagggtgggatggaaatataaatagtacaatttggtcctagtggtggcttaccctttggcctctttttctaattcagaattttttttaaatatataaaagtggggtgatatgtttacttaaa

SEQ ID NO: 16431 - DNA, 131 bp, Glycine max
  Clone ID: LIB3094-005-Q1-K1-E5
tataatgtatgtgttccaagcttcaaggtaatgtataatgtaaggtccaagtggatatggggtatagttggaatacaatgattctaatatcctatctccacagttcatattaatattatcaaataataaaa

SEQ ID NO: 16432 - DNA, 254 bp, Glycine max
  Clone ID: LIB3094-007-Q1-K1-C1
cccacgcgtccgcacatccaatgcatcgtaatcaggtgtcaaacaagattggaataaccatagagctgcctaagtactagtactaccctagataatcccaatcttgaagaaaacttttttaaaaagcatagattctatattttgtgttttgttattttgtatcttttgtctcagttgacactaagcagaccttgtgtttcaattttgactagagagttgtttaaattgaagatttaaatgatcaaaagagaata

SEQ ID NO: 16433 - DNA, 175 bp, Glycine max
  Clone ID: LIB3094-008-Q1-K1-E11
cgagcggtgccctttctttttattattcaatgatcttttgattcattgctttgttgtctctccaggtcggctgtatgttgtatcagtctatgattctgtttgaccttaagccatgtgttctaaattattgccattaatttattttatgaatatttatttttgtttaaaaacaaca

SEQ ID NO: 16434 - DNA, 133 bp, Glycine max
  Clone ID: LIB3094-009-Q1-K1-B8
gccacgcatgcgttcacaccttcaaggaacggactaccgttaggtccaagtatatctgggaaagggtcgtattacaatgattctaataccctatctgcaccattcatattaatatgagcataaaataaaaact

SEQ ID NO: 16435 - DNA, 397 bp, Glycine max
  Clone ID: LIB3094-009-Q1-K1-C4
cccacgcgtccgcccacgcgttcggaagaaaggaatataccttacggatggtgggatcgagaagcatttgggattgcatagtgcgggtggtgacgaagatggtagacatagagagtgagagagagaaaaatcttcgctttatgtcaatggcacgaagcaggggtttttacagaagtgagcaacgacgccagatattagaaaagtgagtttatttggggtcatatttgtaaaaagtggttttgtaattataccctctaattcaagagtgaagaaacaagggtgggatggaaatataaatagtacaatttggtcctagtggtggcttaccctttggcctctttttctaattcagaattttttttaaatatataaaagtggggtgatatgtttacttaaa

SEQ ID NO: 16436 - DNA, 397 bp, Glycine max
  Clone ID: LIB3094-010-Q1-K1-A8
cccaggcgtccgcccacgcgtccggaagaaatgaatataccttacggatggtggaatcaagagtcatttgtgattgcatagtgcgggtggtgacgaagatggaagacaaagagagtgagagagagaaaaatcttcgctttatgtcaatggcacgaagcaggggtttttacagaagtgagcaacgacgccagatatgagaaaagtgagtttatttggggtcatatttgtaaaaagtggttttgtaattataccctctaattcaagagtgaagaaacaagggtgggatggaaatataaatagtacaatttggtcctagtggtggcttaccctttggcctctctttctaattcagaattttttttaaatatataaaagtggggtgatatgtttacttaaa

SEQ ID NO: 16437 - DNA, 148 bp, Glycine max
  Clone ID: LIB3094-011-Q1-K1-G5
cgcgaccgggcggaaaataaatgcctccaacttcagtgttatgcatgatataaatcttgatagacaagccatttttataaagatgttttacccatcaatgcaattctaagccactccttctttaacaaaaaaaaaaaaaataatattc

SEQ ID NO: 16438 - DNA, 61 bp, Glycine max
  Clone ID: LIB3094-013-Q1-K1-C3
aaaaaaaaaaaaaaaaaaaaaaaaaaaaaaaaaaaaaaaaaaaaaaaaaaaaaaaaaaaaa

SEQ ID NO: 16439 - DNA, 422 bp, Glycine max
  Clone ID: LIB3094-013-Q1-K1-D9
agaaaacctaagcttagaattagaaacaaagaaaagaagaaaggaaagaattgatcgttgaaaatgcagggaggaaagaaagcgggagagtccattaaggaaacagctacaaacattggtgcttctgccaaggctggcatggagaagaccaaggccactgtccaagagaaggcagaaagaatgacagcacgtgatccggtgcaaaaggagttggcaacccaaaagaaagaggcaaagatgaaccaggcggagctggacaagcaggcggcgcgtcagcataacacggcggccaaacagtccgccaccacggctgggcacatgggacatggccaccacaccaccggaaccgggactggaaccgccacgtattccaccaccggggaatatggtcagcccatgggggcccaccagacgtcggcaat

SEQ ID NO: 16440 - DNA, 91 bp, Glycine max
  Clone ID: LIB3094-015-Q1-K1-A7
aaaaaaaaaaaaaaaaaaaaaaaaaaaaaattaaaaaaaaaaaaaaaaaaagaaaaaaaaagaaaaaaaaaaaaaaaaaaaaaaaaaaaaa

SEQ ID NO: 16441 - DNA, 91 bp, Glycine max
  Clone ID: LIB3094-015-Q1-K1-D11
aaaagaaaaaaaaaaaaaaaaaaaaaaaaatttaaaaaaaaaaaaaaaaaaaaaaaaaaaaaagaaaaaagaaaaaaaaaaaaaaaaaaaa

SEQ ID NO: 16442 - DNA, 225 bp, Glycine max
  unsure at all n locations
  Clone ID: LIB3094-017-Q1-K1-G2
ncgacgcgtgggacgtgagatacaggtttgttgtggatgtgaaaggcagcaaacttgtcgatcagatgctgaaagagcgtgtactactagcacgacacacgcaacatccattcttccatcatgaagagtctggacaagtaattaattaattgagaactaaagctgtatttgctgttcactctaaaaaagaatctgtgttgtgcttattaaagcgctttgaataat

SEQ ID NO: 16443 - DNA, 308 bp, Glycine max
  Clone ID: LIB3094-019-Q1-K1-A12
attgatcattccaacactttagggaacaggatgcacaggatgctgattcttggacggagcattgatgaagatgctggtgaagcagatgcttacatgcctcctcttgaggacgctgatgcagatgctgagggtagaatgatggaataagtggactaaatatgacttaattgcctgttacgtttttagaaacaatgattggagaaacagtctgtatactatgatgcatgttacatgaatattcgaaattatggaacggtggctagttatgtagccgatgtagtagtatctttatggtaaaaaaagaaaac

SEQ ID NO: 16444 - DNA, 397 bp, Glycine max
  Clone ID: LIB3094-019-Q1-K1-D12
cccacgcgtccgcccacgcgtccggaagaaaggaatataccttacggatggtggaatcaagaagcatttgggattgcatagtgcgggtggtgacgaagatggaagacaaagagagtgagagagagaaaaatcttcgctttatgtcaatggcacgaagcaggggtttttacagaagtgagcaacgacgccagatatgagaaaagtgagtttatttggggtcatatttgtaaaaagtggttttgtaattataccctctaattcaagagtgaagaaacaagggtgggatggaaatataaatagtacaatttggtcctagtggtggcttaccctttggcctctttttctaattcagaattttttttaaatatataaaagtggggtgatatgtttacttaaa

SEQ ID NO: 16445 - DNA, 109 bp, Glycine max
  Clone ID: LIB3094-019-Q1-K1-H10
cgcttaacgcgaacatctgaagagggcctactcgagggcctgcgcgcggatcccctatacgaggactgtgataactacgttgatatatagctgcggtcatcttacgatg

SEQ ID NO: 16446 - DNA, 276 bp, Glycine max
  Clone ID: LIB3094-021-Q1-K1-A10
ggaatgataaggtatatgaacaatttttaacttatacttctacaagatgttctatgttttcatgtaaattttatacactcaaaaggaacgctaaaatattttaatcgtaacttatatgatttgttacgtataaaaagaaatatagattcatattcccatacatataaattatatattaacaaaaaaaatcttggattactttttgaaaaaaaagtagaaatccatttttttgtagtaaaaatactattccaattataataataagaaaaaataata

SEQ ID NO: 16447 - DNA, 62 bp, Glycine max
  Clone ID: LIB3094-023-Q1-K1-B11
tttttactataaatataaataaaggtttccctatttgtatcatttggaataaaaaaaaaaga

SEQ ID NO: 16448 - DNA, 424 bp, Glycine max
  Clone ID: LIB3094-029-Q1-K1-H9
agaaaacctaagcttagaattagaaacaaagattatgtaagaaaggaaagaattgatcgttgaaaatgcgggtaggaaagaaagcgggagagtccattaaggaaacagctacaaacattggtgcttctgccaaggctggcatggagaagaccaaggccactgtccaagataaggcagaaagaatgacagcacgtgatccggtgcaaaaggagttggcaacccaaaagaaagaggcatagatcaaccactctgagctggacaagcacgcggcgcgtcagcataacacggccgccaaacagtccgccatcacggctgggcacatgggacatggccaccacaccatcggtacctggactggaaccgtcacgtatttcaccaccggggaatatggtcagcccattggtgcccaccagacgtctgcaat

SEQ ID NO: 16449 - DNA, 234 bp, Glycine max
  Clone ID: LIB3094-031-Q1-K1-C11
aatatccgggccgacgcacgcgtccgcggacgcgtgggacgttagatacaggtttgttgtggatgtcaaaggcagcaaacttgtcgatcaggttaagaaagaaagtatactactagcacgacacacgcaacatccatccttccatcatgaagagtctggaaaagttattaattaattgagaactaaagctgtatttgttgttcactctaaaaaagaagctgtgttttgtttatt

SEQ ID NO: 16450 - DNA, 397 bp, Glycine max
  Clone ID: LIB3094-034-Q1-K1-B9
cccacgcgtccgcccacgcgtccggaagtaaggaatataccttacggatggtggaatcgggaagcatttgggattgcatagtgcgggtggtgacgaagatggaagacaaagagagtgagagagagaaaaatcttcgctttatgtcaatggcacgaagcaggggtttttacagaagtgagcaacgacgccagatatgagaaaagtgagtttatttggggtcatatttgtaaaaagtggttttgtaattataccctctaattcaagagtgaagaaacaagggtgggatggaaatataaatagtacaatttggtcctagtggtggcttaccctttggcctctttttctaattcagaattttttttaaatatataaaagtggggtgatatgtttacttaaa

SEQ ID NO: 16451 - DNA, 397 bp, Glycine max
  Clone ID: LIB3094-036-Q1-K1-C10
cccacgcgtcctcccacccgtccggaagattggaatataccttacggatggtggaatcaggaagcatttgggattgcatagtgcgggcggtgacgaagatggaagacaaagagagtgagagagagaaaaatcttcgctttatgtcaatggcacgaagcaggggtttttacagaagtgagcaacgacgccagatatgagaaaagtgagtttatttggggtcatatttgtaaaaagtggttttgtaattataccctctaattcaagagtgaagaaacaagggtgggatggaaatataaatagtacaatttggtcctagtggtggcttaccctttggcctctttttctaattcagaattttttttaaatatataaaagtggggtgatatgtttacttaaa

SEQ ID NO: 16452 - DNA, 101 bp, Glycine max
  Clone ID: LIB3094-038-Q1-K1-C9
aaaaaaattaaaaaaaaaaatttaaaaaaataaaaaaaaaaaaaaaaaaaaaaaaaaaattggaaaaattaaaaaaaccaaggccaccccccctaaagaac

SEQ ID NO: 16453 - DNA, 341 bp, Glycine max
  Clone ID: LIB3094-041-Q1-K1-G8
tcgcggacgcgtggggttctatagggtcgtacttctgtgtccttgagttctaaggaaacaggaacctacgtctggtggatgaatcatgaccgtgtgatcagagcgtgattaacggcccgggtgagtttctctttggagtagtctcatctttggctgtagaggatcgttcttaggacacttccatgtgcctgggaatggtcatacggttgtctgacagaccaaaaaagaaaaaaagacaaaaaagtaataaaaatgatgaaaacaaccaaagggggggggaaagtgattattttggacaacaatatttataaaaatataaaccggaataaataaaaaaataa

SEQ ID NO: 16454 - DNA, 397 bp, Glycine max
  Clone ID: LIB3094-043-Q1-K1-B10
cccaggcgtccgcccacgcgtccggaagatttgaatatatcttacggatggtggaatcaagaagcatttgggattgcatagtgcgggtggtgacgaagatggaagacaaagagagtgagagagagaaaaatcttcgctttatgtcaatggcacgaagcaggggtttttacagaagtgagcaacgacgccagatatgagaaaagtgagtttatttggggtcatatttgtaaaaagtggttttgtaattataccctctaattcaagagtgaagaaacaagggtgggatggaaatataaatagtacaatttggtcctagtggtggcttaccctttggcctctttttctaattcagaattttttttaaatatataaaagtggggtgatatgtttacttaaa

SEQ ID NO: 16455 - DNA, 397 bp, Glycine max
  Clone ID: LIB3094-043-Q1-K1-C4
cccaggcgtccgcgcacgcgtccggaagattggaatataccttacggatggtggaatcaagaagcatttgggattgcatagtgcgggtggtgacgaagatggaagacaaagagagtgagagagagaaaaatcttcgctttatgtcaatggcacgaagcaggggtttttacagaagtgagcaacgacgccagatatgagaaaagtgagtttatttggggtcatatttgtaaaaagtggttttgtaattataccctctaattcaagagtgaagaaacaagggtgggatggaaatataaatagtacaatttggtcctagtggtggcttaccctttggcctctttttctaattcagaattttttttaaatatataaaagtggggtgatatgtttacttaaa

SEQ ID NO: 16456 - DNA, 180 bp, Glycine max
  unsure at all n locations
  Clone ID: LIB3094-044-Q1-K1-G10
gccacgcgtncgggangattaattgatgtatttaagaatttattgctcacttataaaaggtgtatgaggagactttttcacaatccaaccaaccaaccacaaagtggatattttggactctttttttcccttaaaaaaaaaaaaaaaaaaaaaaaaaaaaaaaaaaaaaaaaaaaaataa

SEQ ID NO: 16457 - DNA, 302 bp, Glycine max
  Clone ID: LIB3094-046-Q1-K1-D11
ggaccgcatgactggactgatgatttatgttatcatttcaataacaagtgtcacgggttagtaaattgtataactttaagtagtgatctcatttcatatgattaggttagttactcaattggcctcgtgtgctagagatttctgttagacagtcaattttcaattatctatgtaacatgagagaatcatggcatgcacataaacaaggatttttgctgcaatgtggagctgacattatatattagtggctctaatcaaaaaacaataatgattatattttaaatttattaaaaaaaaaacaa

SEQ ID NO: 16458 - DNA, 118 bp, Glycine max
  unsure at all n locations
  Clone ID: LIB3094-050-Q1-K1-C5
actcaagaaaaaaaataccttttactttttatctgattataatttgaatcttgattgcaacaagctcgtttnaaagtattttacccatcaattcaattttaaaccgtgccttcttcat

SEQ ID NO: 16459 - DNA, 91 bp, Glycine max
  Clone ID: LIB3094-051-Q1-K1-A8
aaaaaaaaaaaaaaaaaaaaaaaaaaaaaaatttaaaaaaaataaaaaaaaaaaaaaaaaaaagaaaaaaaaaggaaaaaaaaaaaaaaaa

SEQ ID NO: 16460 - DNA, 337 bp, Glycine max
  Clone ID: LIB3094-052-Q1-K1-E6
tcggtctcggaatatcccgggctcgacgcgcacgcgtctcgctccgacgcgtctcgatccatttgtgtgtattatgttgtatactcggggaataacaatgtatcgagacttgtataggggtctattcttatgatggagtactacggtttatttggtaatgttgtattgtcgtgattatagtggattcgagtgtaaatgtgtgatcatggggatgtcaatttcgacattatttgtctggaatataatctcttggattataaagtttttaaaaataaaaaaaaaaatataaaaaaaaataaaataaaataaataaaaataaaaaaaaaataaaattaaa

SEQ ID NO: 16461 - DNA, 397 bp, Glycine max
  Clone ID: LIB3094-052-Q1-K1-H1
cccacgcgtccgcccacgcgtccggaagaaaggaatataccttacggatggtggaatcaaggagcatttgggattgcatagtgcgggtggtgacgaagatggaagacaaagagagtgagagagagaaaaatcttcgctttatgtcaatggcacgaagcaggggtttttacagaagtgagcaacgacgccagatatgagaaaagtgagtttatttggggtcatatttgtaaaaagtggttttgtaattataccctctaattcaagagtgaagaaacaagggtgggatggaaatataaatagtacaatttggtcctagtggtggcttaccctttggcctctttttctaattcagaattttttttaaatatataaaagtggggtgatatgtttacttaaa

SEQ ID NO: 16462 - DNA, 52 bp, Glycine max
  Clone ID: LIB3094-053-Q1-K1-H4
cttacctcacatatatttcaaatttactgtaaatcttttctctttgcatagc

SEQ ID NO: 16463 - DNA, 255 bp, Glycine max
  unsure at all n locations
  Clone ID: LIB3094-056-Q1-K1-E12
cccacgcgtccgatcattggttattatttgaaccggggaaaacatgatcaacttgtaacagctattctatgaggagactactttattggtaatgtgtatgtcggattaagtggattcgagtgaaatgttgatcaggggagtcatttcgacatattttctggaatataactcttggattataagtttttaaaaaaaaaaaaaaaaaaaaaaaaaaaaaaaaaaaaaaaaaaaaaaaaaaaaaaaaaannnnnnnnn

SEQ ID NO: 16464 - DNA, 397 bp, Glycine max
  Clone ID: LIB3094-060-Q1-K1-H12
cccacgcgtccgcccacgcgtccggattaaaggaatataccttacggatggtggaatgaagaagcatttgggattgcatagtgcgggtggtgacgaagatggaagacaaagagagtgagagagagaaaaatcttcgctttatgtcaatggcacgaagcaggggtttttacagaagtgagcaacgacgccagatatgagaaaagtgagtttatttggggtcatatttgtaaaaagtggttttgtaattataccctctaattcaagagtgaagaaacaagggtgggatggaaatataaatagtacaatttggtcctagtggtggcttaccctttggcctctttttctaattcagaattttttttaaatatataaaagtggggtgatatgtttacttaaa

SEQ ID NO: 16465 - DNA, 397 bp, Glycine max; identical to SEQ ID NO: 16444
  Clone ID: LIB3094-061-Q1-K1-F11

SEQ ID NO: 16466 - DNA, 302 bp, Glycine max
  Clone ID: LIB3094-063-Q1-K1-G3
ggaccgcatgactggactgatgaactatgtgatcatttcaataacaagtgtcactgtttatgaaattgtataactttaagtagtgatctcatttcatatgattaggttagttactcaattggcctcgtgtgctagagatttctgttagacagtcaattttcaattatctttgtaacatgagagaatcatggcatgcacataaacaaggatttttgctgcaatgtggagctgacattatatattaagggctcaaaaaaaaaaataataaaaaataattatgaatattgatttgttaataaaaa

SEQ ID NO: 16467 - DNA, 103 bp, Glycine max
  Clone ID: LIB3094-066-Q1-K1-D7
acaaaacgtaatatccatcactggccattaaatttaaggattggaattctttatgccggaagggattattacatcatatatctcaaacaaacatcaaaacgtt

SEQ ID NO: 16468 - DNA, 147 bp, Glycine max
  Clone ID: LIB3094-068-Q1-K1-D2
gttctagatcgcgatctataactagccaattcactctttttgttctcgccctctgccgtgggaggagtttgtaacatggctgctctaccaacggcggagcttagtgacgcaaatgcaacacagtacagttggatgtgaggggtgctc

SEQ ID NO: 16469 - DNA, 202 bp, Glycine max
  Clone ID: LIB3094-069-Q1-K1-F12
atttgtctatatcacaacttagagattaattatcttttttcatttagcatatagtgtgctgttttttgtactaaaagatggagttcattttttaccttaaggccttttaaacttgtagtacttctggagaaccaaattatgcctgtttgaataactatattcaaaattttgcctaaaaaaaaataaccacaaaacaaagaaa

SEQ ID NO: 16470 - DNA, 397 bp, Glycine max
  unsure at all n locations
  Clone ID: LIB3094-073-Q1-K1-B4
cccacgcgtccgcccacgcgtccggaagaaaggaatataccttacggatggtggaatggagaatcatttgggattgcatagtgcgggtggtgacgaagatggaagacaaagagagtgagagagagaaaaatcttcgctttatgtcaatggcacgaagcangggtttttacagaagtgagcaacgacgccagatatgagaaaagtgagtttatttggggtcatatttgtaaaaagtggttttgtaattataccctctaattcaagagtgaagaaacaagggtgggatggaaatataaatagtacaatttggtcctagtggtggcttaccctttggcctctttttctaattcagaattttttttaaatatataaaagtggggtgatatgtttacttaaa

SEQ ID NO: 16471 - DNA, 397 bp, Glycine max
  unsure at all n locations
  Clone ID: LIB3094-075-Q1-K1-B3
nccacgcgtccgcccacgcgtccggaagaaaggaatataccttacggatggtggaatcaagaagcatttgggattgcatagtgcgggtggtgacgaagatggaagacaaagagagtgagagagagaaaaatcttcgctttatgtcaatggcacgaagcaggggtttttacagaagtgagcaacgacgccagatatgagaaaagtgagtttatttggggtcatatttgtaaaaagtggttttgtaattataccctctaattcaagagtgaagaaacaagggtgggatggaaatataaatagtacaatttggtcctagtggtggcttaccctttggcctctntttctaattcagaattttttttaaatatataaaagtggggtgatatgtttacttaaa

SEQ ID NO: 16472 - DNA, 119 bp, Glycine max
  Clone ID: LIB3094-077-Q1-K1-A1
gttatgtaggagttccaagcttcaacgcatgtaatcatcttaggtccaagtctatatgtgagtgaattggaatacaactattctaatatcctatctccaccattcatattaatatttgc

SEQ ID NO: 16473 - DNA, 51 bp, Glycine max
  Clone ID: LIB3094-077-Q1-K1-A6
gtgttttcaacttcataactcttctataatttcacctaaattgaaaccact

SEQ ID NO: 16474 - DNA, 375 bp, Glycine max
  Clone ID: LIB3094-077-Q1-K1-D6
cccacgcgtccgcccacgcgtccgcccacgcgtccgcggacgcgtggggttctataggctcgtacctctgtgtccttgagttctaaggagacaggaacctacgtctggtggatgaatcatgaccgtgtgatcagagcgtgattaacggcccgggtgagtttctctttggagtagtctcatctttggctgtagaggatcgttcttaggacacttccatgtgcctgggaatggtcatacggttgtctgacagaccaaaaaagaaaaaaagacaaaaaagtaataaaaaagaagaaaaaaaaaaaaaaaaaaaaaaaaaaaaaaaaaaaaggaaaaaaaaaaaaaaataaaaaaaaaaaggaatatattaaataaaaa

SEQ ID NO: 16475 - DNA, 108 bp, Glycine max
  Clone ID: LIB3094-077-Q1-K1-H12
acggtacgcgtgcgggatgttgaaaacatctgataaaataaaaattggttgcatgctaactcaaaggagtcccatatactgtgagattcataacatataaaagaaact

SEQ ID NO: 16476 - DNA, 92 bp, Glycine max
  Clone ID: LIB3094-078-Q1-K1-D5
aaaaaaaaaaaaaaaaaaaaaaaaaaaaaaaaaaaaaaaaaaaaaaaaaaaaaaaaaaagaaaaaagaaaaaaaaaaaaaaaaaaaaaaaaa

SEQ ID NO: 16477 - DNA, 295 bp, Glycine max
  unsure at all n locations
  Clone ID: LIB3094-089-Q1-K1-D10
cttgatgatcccaacactttcggtaacaggtttcacaggatgctgaagcttggactgagcgttgattaagatgctggtgaagcagatgctgacatgcctnctcttgacgactctgatgcatatgctgagggtagcaagatggaatacgttgattaaatctgacttaattgcctgttacgtttttaaaaacaatgatttgagaaacagtctttttactatgttttatgttttttgaattttcgaaattttggaaccttggctaattaagtgccctatgtaatactttctttatggt

SEQ ID NO: 16478 - DNA, 310 bp, Glycine max
  Clone ID: LIB3094-089-Q1-K1-D9
cttgatgatccgaacactttcggtaacaggtttcacaggatgctgaagctgggactgagcatggatgaagatgctggtgaagcagatgctgacatgcctgctcttgaggactctgatgcagatgctgagggtagcaagatggaagaagttgattaaatctgacttaattgcctgttacgtgtttagaaacaatgattggagaaacagtctttttactatgttatatgatttttgaattttcgaaatttttggaacgttggctagttaagtgccgtatgtagtagtttctatatggtgaaagaacagaaat

SEQ ID NO: 16479 - DNA, 348 bp, Glycine max
  unsure at all n locations
  Clone ID: LIB3094-089-Q1-K1-E6
tacttttgattgcttgatgaaaacttattgattcctgacaccagaattctgnagggagactcncttctccgaatgtccattccaagagtacacagatctactggcaaaaccaacaggaaagactctaatcttggaggatgaaagggtggatgcttgatttgctagttttgctttatggatgttttaggaactttattactttacatactttgttggttctgtgctttacttttggttttgatagacggtatgtctctgtatgcattttgattgtttccaagttttaattgactgcaaaaaactataaatacataaatatttaatatctaaaaattaattaaaataaaa

SEQ ID NO: 16480 - DNA, 397 bp, Glycine max; identical to SEQ ID NO: 16444
  Clone ID: LIB3094-092-Q1-K1-B3

SEQ ID NO: 16481 - DNA, 92 bp, Glycine max
  Clone ID: LIB3094-092-Q1-K1-G4
aaggagatatatgtacctaaaacgattagattttgaaagagaatacaaacatataagcttacgtggaattttaaatggatgctaagcaaaac

SEQ ID NO: 16482 - DNA, 91 bp, Glycine max
  Clone ID: LIB3094-092-Q1-K1-G6
aaaaaaaaaaaaaaaaaaaaaaaaaaaaaaataaaaaaaaaaaaaaaaaaaaaaaaaaaaagggaaaaattaaaaaaaaaaaaaaaaaaaa

SEQ ID NO: 16483 - DNA, 91 bp, Glycine max
  Clone ID: LIB3094-096-Q1-K1-E9
aaaaaaaaaaaaaaaaaaaaaaaaaaaaaaattaaaaaaaaaaaaaaaaaaaaaaaaaaaaaagaaaaaataaaaaaaaaaaaaaaaaaaa

SEQ ID NO: 16484 - DNA, 104 bp, Glycine max
  Clone ID: LIB3094-097-Q1-K1-A11
tcgttcatgattaatttcgccttttttcttttatttatctatagctttaaattctatattgttaaaccaacattgggattttaacaattaaagcattatgtttt

SEQ ID NO: 16485 - DNA, 213 bp, Glycine max
  Clone ID: LIB3094-097-Q1-K1-D5
acgcccacgcgtccgtttttaaatatcataacatttatggaatattatactatgcataagctggggttttaattgatgtgaggggaaattcacgaaaatcacatatactactacatggaaaataaaagctcgattttttacattttctagaagaaaaaataacccctcttaaaatacacaaagacaaccctaaacataacatagaacttaaaa

SEQ ID NO: 16486 - DNA, 123 bp, Glycine max
  Clone ID: LIB3094-097-Q1-K1-F12
acttctcattctgaatttctatatagacacaccctgtatcatatcattaagctcaattctttttgcatttactctcatgctcacctttacacttaccaaatccctatctccctcttctttctc

SEQ ID NO: 16487 - DNA, 151 bp, Glycine max
  Clone ID: LIB3094-098-Q1-K1-A7
gaaaaaaaaaaaagccttttactttttttcttttgcatgatttgaatcttgattggaaaagcttcgaattggggtgttttacccatcaattcaattttaagccgtgccttcttcaaaaaaaaaaaaaaaaaaaaaaaaaaaaaaaaataaa

SEQ ID NO: 16488 - DNA, 403 bp, Glycine max
  Clone ID: LIB3094-100-Q1-K1-A11
cttccgccaacgcgtccgcccacgcgtccggaagaaaggattataccttacggatggtggaatcaagaggcatttgggattgcatagtgcgggtggtgacaaaaatggaagacaaagagagtgagagagagaaaaatcttcgctttatgtcaatggcacgaagcaggggtttttacagaagtgagcaacgacgccagatatgagaaaagtgagtttatttggggtcatatttgtaaaaagtggttttgtaattataccctctaattcaagagtgaagaaacaagggtgggatggaaatataaatagtacaatttggtcctagtggtggcttaccctttggcctctttttctaattcagaattttttttaaatatataaaagtggggtgatatgtttacttaaa

SEQ ID NO: 16489 - DNA, 255 bp, Glycine max
  Clone ID: LIB3094-102-Q1-K1-F4
cgcggccgcgggcgcgtgggcaaccaattttatttccaatacgtactgtgtattaattcaggtcttttttattgatgtaaataagatttagcttctatttggccaaaggattctccacacctgagaatgaggatcatggtatggtatagatcgtgttactgttcccaccattcttgccgatgattgtattcaaagcgagatacattattgaataaattattgccattttttttttaataacctacaggatgcaat

SEQ ID NO: 16490 - DNA, 275 bp, Glycine max
  Clone ID: LIB3094-102-Q1-K1-F5
gaatgataaggtatatgaacaatccttaacagatacttctacaagatgttctatgggtttgatagaaaaaaattcgctcaaaaaaaacgcgaaaatattttaatcgtaacttagaggatttgttacgtagaaaaagaaagatagattcatattcccatacatataaattatataggaacaaaaaaaatcttggattactttttgaaaaaaaagtagaaatccatttttttggagtaaaaatactattccaattataataataagaaaaaaaaata

SEQ ID NO: 16491 - DNA, 151 bp, Glycine max
  Clone ID: LIB3094-104-Q1-K1-F1
gaaaaaaaaaaaagccttttactttgtttcttttgcatgatttgaatcttgattggaaaagcttcgaattggggtgttatacccatcaattcaattttaagccgtgccttatgtaaaaaaaaaaaaatattgtaaataaataaaaaaagaa

SEQ ID NO: 16492 - DNA, 397 bp, Glycine max
  Clone ID: LIB3094-104-Q1-K1-F11
cccacgcgtccgcccacgcgtccggaagaaaggaatataccttacggatggtggaatcaagaggcatttgggattgcatagtgcgggtggtgacgaagatggaagacaaagagagtgagagagagaaaaatcttcgctttatgtcaatggcacgaagcaggggtttttacagaagtgagcaacgacgccagatatgagaaaagtgagtttatttggggtcatatttgtaaaaagtggttttgtaattataccctctaattcaagagtgaagaaacaagggtgggatggaaatataaatagtacaatttggtcctagtggtggcttaccctttggcctctttttctaattcagaattttttttaaatatataaaagtggggtgatatgtttacttaaa

SEQ ID NO: 16493 - DNA, 212 bp, Glycine max
  Clone ID: LIB3106-049-Q1-K1-H12.F6
acgggagcaccggtaccgacacgctgggcgtaccttcctttcttcaaataacggccaattcttccgacggggaattggagaccggccttgacggaccttgaaaccggcttcttcttagggccgccgccctttcttcctccggcgcccttcttgatctttccgccagcgtccatttgggaaccctagaatgggaagaggaataatcagaagcg

SEQ ID NO: 16494 - DNA, 454 bp, Glycine max
  unsure at all n locations
  Clone ID: LIB3106-116-Q1-K1-H1
gttcgtcgtcttgtcttccagaatctgacaactttcctcatccgaacctaaattctctcatgaaaccctcacttatccaatccccacccaaattccccgcatcgacctcactcccctaaattcccccatcgccggctctctcacggccgaattcatcgcatcgccggttccgctacggtggctatcgcatgggtaagattctccgagaaaacgcgaagccgtcggcaaattcctcatcggcgtacccctctgcggcgcccgccaccacttcgtcgacatcggtgacggagacggtgagggggtcacaccagttcaagatcacggggtactcgctctcgaaggggatcgggattgggaagtacatggcctncgacgtgttttctgtcggagggtacaattgggcgatttatttctaccccgatgggaagagcgtggaggacaatgcaacctacgt

SEQ ID NO: 16495 - DNA, 296 bp, Glycine max
  Clone ID: LIB3106-116-Q1-K1-H10
tgagaaaattattccctcgctcatggaagagttctcctacaccaactaacaccaggtgcctagaattgagaagattgcggtgaactgtggtatcggagatgctgcacaaaatgcaaagggtttggacgcggcaattagtgatctagcactgatcacagggcagagacctattaagactcgggccagggcttctcttgccacctttaagatcagggaaggttaaccacttgggatttctgtgacactaagaggacatatgacgtactcattcctagaccgagttgccaacttgggac

SEQ ID NO: 16496 - DNA, 438 bp, Glycine max
  unsure at all n locations
  Clone ID: LIB3106-116-Q1-K1-H11
cccacgcgtccgcccacgcgtccgcccacgcgtccgcccacgcgtccgctcgctgactgaaactcgcaaaaattagggttttgcagtgatggcactgtccaaccgcgtccgatcgggaatctctctcttcaccaaatccacgttcctcacttccgagcgatccactctccaacgattcctcgttgccccttccatttccttcgcctccagaaattacgccaacgtgccggggcaaaaggaaaacaaagttaaggtccctctggctttgtttggaggttcaggaaactatgcctctgctttgtatattgcatctgtgaaagctaatgcagtggcaaaggttgagtctgagcttctgcaatttgttgaggctgtaaagaatagtcccatattttcacagtttataagggacttgtctngtggctaagatgttagagtaaa

SEQ ID NO: 16497 - DNA, 206 bp, Glycine max
  Clone ID: LIB3106-116-Q1-K1-H12
tttcttgaatctcacatagctattgactccattactaaaccaagtaataccctgaaatcatcaccgaattccattgttactctttccctctctagagactactattgcatacaactcaaccttcgtatagttaattcctaactaggacacttgaaaagtccacttccttatttataaaataattcattaattattctaacccttct

SEQ ID NO: 16498 - DNA, 446 bp, Glycine max
  Clone ID: LIB3106-116-Q1-K1-H2
atgatgtgggaacacagtacagatctggaatatactactacacgccggaacaagagaaggcggccaaggagtcgttggaacaacagcagaagcagttgaacaggaagattgtcactgagatccttcctgccaaaaagttctacagggcagaggagtaccatcaacagtaccttgagaagggtggccgatttggtttcaagcaatctgcttctaaaggctgcaatgatccaatccggtgctacggttaattgtcataagtgaattgccatcaaagatcaatgtgaccggttctttagacgttgaaattccatagttttgttagtaagtatttgttaatatatcaacaaagcttgtgcacattgtatttgaggttgaagatggacatagccatatattcagttgtagagttgtatattggctttgatatataatatgactttgctttg

SEQ ID NO: 16499 - DNA, 368 bp, Glycine max
  Clone ID: LIB3106-116-Q1-K1-H3
ataaattctcacaaatttaacacattacataggtacagggctgtaacaagtgcatactacagaggtgcattaggggcaatgcttgtctacgacataacgaagaggcaatcgtttgatcatgtagcgagatgggtggaggagctgcgtgcgcacgcagatagctccattgtgatcatgttggttgggaacaaagctgatcttgtggaccagagaatggtaccaactgaggatgcagtggagtttgctgaggaccaaggcctcttcttctccgagacttcagctctcagtggtgacaatgtggagagtgcatttctcaaattgctagaagagatcaataaggtagtgtccaaaaaggctttggaatgtgg

SEQ ID NO: 16500 - DNA, 320 bp, Glycine max
  Clone ID: LIB3106-116-Q1-K1-H4
ttctagtattttccaagtaacttaaggtttcaaacctaggaagtcggaagtcatggcagcaacattgatggcagcaacaacttctggcactcttaaagcaactcctttcctaggccaaggcaagggtgccaatgccaatgctcttagggatgttgtttccatgggaactgggaagtacaccatgggcaatgatttgaggtatggaccagacagagtgaaatacttgggacccttttcagctcagaccccttcatacttgaaaggagaattcccaggggattatggatgggacactgctggcttatctgctgacccggaag

SEQ ID NO: 16501 - DNA, 437 bp, Glycine max
  unsure at all n locations
  Clone ID: LIB3106-116-Q1-K1-H5
atcgaaaccctctcttcagacatcattaaaacaacctcactctcctgctaggaatccccggagaaactacgagcgccaccgcagcatcggttcctccacccaccgcgatggcgcaggtgccggcgagcgaagcgacggcgttctggacggacgagaagcacgtgcacttcctcaactccatggaagcctccttcgtccgcacaatgctccaaaaccaaggcaactccgtctccaccacgcgccactctctgccactcgaccgttaccttcccgactcttccgaatccaccttggatttgaaaccaaaccctcgccgncgcaccataaaacaccatgcaccctcagattcaatgggtccaacaaccagaagaacaaggaggagatcatctcagccctacaattcgtcacaggaccaggcggtcccacaagtagaaaac

SEQ ID NO: 16502 - DNA, 352 bp, Glycine max
  Clone ID: LIB3106-116-Q1-K1-H6
gatctctgtccccgctgcgtctctcgtaatcatgcctaagcaaatccacgagattaaggatttccttctcactgccagaaggaaggatgcgaggtcagtgaagatcaagaggagcagagatgtggttaagttcaaggtcagatgctccaagtacctctacacactttgtgtgtttgacccagagaaagctgataaattgaagcaatctcttccttcaggtttgagtgttcaagacctgtaaaggtactgggcgagagatcaagaagaagcaattcattgattcttctgaagtttgattctctgtagttgaagcttgagatttttgtcagttggtcttttattatagattatt

SEQ ID NO: 16503 - DNA, 352 bp, Glycine max
  unsure at all n locations
  Clone ID: LIB3106-116-Q1-K1-H7
cccacgcgtccggatacccaaatgcttggagtatcttccaaggttaagctttcaagggaattgcctccagggtcaggagttaaagcagcggtcttctatacagtgtgcgggtgcctcacctgccagtgccaagagccagccagtggtgaatccaaatcaccaacctgctgaatatgtgtccaagcatcacagagcatcgaagcctgtttggcttttggctctagaaatagtaactggaactatggtgggctctctctttctggttgctgntcttgctgcttttcagagatgtaacataaaatcatctatcattattccttggaaaaaatcttggagccaaaaagatcattca

SEQ ID NO: 16504 - DNA, 436 bp, Glycine max
  unsure at all n locations
  Clone ID: LIB3106-116-Q1-K1-H8
gctggatcaattacagcggtcgtgatccccatctttggaagaaaagtctcaatgaatattgtagtcttactgtaacaatccgtagtggtcacaagatgtccaccagctggaaccagtgccataaataggactacgctagcacacattccagatgccattatcacagttgattcagccccctccaatatacttatcttctcctccagaaccacagtcgttgggtttccatagcgcccgtattcataactcacttgacgattctcctgccaaatgatggaaaaatttagccacaccaataactgacatttatccactcattatgtcatgaggcgaataaatcttttaacaatccaaccttgaaatcaatgacatcagcggttntcttaagaaagtatgcagaagtgttcagcacaggggtggtaattccatcagtctc

SEQ ID NO: 16505 - DNA, 428 bp, Glycine max
  Clone ID: LIB3106-116-Q1-K1-G9
cccacgcgtccgcccacgcgtccggaaagaatgtgcattagactgttgggagctacaccaaagtcagttcttgagctcatggatgtgaaggatctcacattagctcatgtgaaaagccatttgcagatgtatcgaactgttaagaccactgacaagcctgctgcttcttcaggcctttcagatggatcaggagaagatgacatgtctccaatgggaagcagtggtggaatgcgtcaattttcagaccaaagaagcctttcggatcgaccagtgcaacaagatatggactactcttcagccaacaacacactatggagtaactcttcaagtagagaaccatggcaacaaaataactctaacgacatagatggtttcagacccccaatcttccagtcgcagcatatatcaggagggcatcaaattcaaga

SEQ ID NO: 16506 - DNA, 413 bp, Glycine max
  Clone ID: LIB3106-116-Q1-K1-F4
gtacaagcctccagtgtacaagcctccagtgtacaagccaccagtgtacaaaccaccgcttcataagcccaagccaccgctttacaagccgaagccaccgttttacaagccaccatataagaagccaccatacgggaagccaccttatggaaaggaccctacagatgaggacagcacgcatgcctgacgcttgccttgtggactattatctagttcagatatgagaggaactgctttgtgatttatagcatcgtgatttagaacttcctagcactgcgtatgcacgactatcgcatgcactttaaacgatcggagcattaatgatgtagcctagtcatcatgagcatgatactgattaccatgtgaatgtgaatcaaaatgatgctatagaaactggtgcttctgtacttcag

SEQ ID NO: 16507 - DNA, 89 bp, Glycine max
  Clone ID: LIB3106-116-Q1-K1-F5
cccacgcgtccgcccacgcgtccgatcaagggggtcatattagaaccgcaagaatttgacatggaaagagatttggtgactgcaacact

SEQ ID NO: 16508 - DNA, 350 bp, Glycine max
  Clone ID: LIB3106-116-Q1-K1-F7
ccagaagtgactagtggtggaattgcattgaagatctttgcgtcggtgttgctagaaggtcgggctgcaggtaagataacgtctgctaaaggagatgaagaaattggccttaaagttcggttaagagtccaaaagatcatgggttcaaggccatacaaaatagctgaatttgaaattatatttggagagggtatcagtaaggtcggatgcattttagattgtgccgaaatgacggatattgtctcaaagaaaggctcttggtacagctatggagatcatcggatgggacaatgaacggacaaagcaatacaggacttaaaagagaatacacatcttttagaagaaattga

SEQ ID NO: 16509 - DNA, 434 bp, Glycine max
  Clone ID: LIB3106-116-Q1-K1-F8
ctggacttccctaccactgcttgtctactgtactttaccagccatatgccttctgactggaaaatttattgtacctgagattagcaactatgccagtattgtgttcatggccctcttcatatccattgcagcaactggcatccttgagatgcaatggggcggtgttagcatagacgactggtggaggaacgaacagttttgggtgatcggaggtgtatcttctcatctttttgccctatttcagggtttactgaaggtcttggctggtgtgaacacaaacttcactgtgacgtcaaaagcagcagatgatggagaattctcagaactctacatctttaagtggacatcactcttgatccctgcaatgaccctactaatcatgaatattgctggggtggttgttgtggtctcagatgccataacaatggttatga

SEQ ID NO: 16510 - DNA, 401 bp, Glycine max
  Clone ID: LIB3106-116-Q1-K1-F9
cccacgcgtccgattttattccctccattggccgtagtagcagcgttgtgtggcggtgacaacgatggccgactcatctcaagaccttgaccaactcctcgatagtgctttggatgattttcagtccttcaacctcaatcctccccctccaagtggggaagcaagtgcgaacaagaagaaggagagtccttctttggcgtcgggggtgcaaggattgggcatgggtttacccgatttgagaacgaagaaaaaggggaaacagaaggctgcttccaaagacagccacgtgtcggaggcgctcaacaagctcagggagcagaccaaagaggctgttaaagggctggaatctatttccacacccactgccgatgatttgggaaaggatgccttgttggagattg

SEQ ID NO: 16511 - DNA, 431 bp, Glycine max
  Clone ID: LIB3106-116-Q1-K1-G1
gtgcttctctcctctgtctttttctctctcttgctatccttttggctagtggcactgctgcgagtgcaactccaagaagcgcagtgccaagccaccatgtttcaacattcaacagaagcctttttccttccacttttctctttggaattggttcttctgcttaccaggcagaaggagcagcaagtgtagatgggagaggaccaagcatatgggacacctacactagacagcatactgaaaagatttgggatcatagcaccggtgacatgggagctgatttttatcatcgatacaagggtgacataaaaatagcgaaagaaattgggctggactctttcagattctctatctcatggtcaagaatattcccaaagggcaaggggagcagttaacccccttggggttaaaatctacaacaatgtcatcgatga

SEQ ID NO: 16512 - DNA, 343 bp, Glycine max
  Clone ID: LIB3106-116-Q1-K1-G10
acagaatgtcctccacctctttgcgcaagaaatctagccgaactcttgtctcaaaggttccatgtgccactctcagaaactttctttcaaatttgcaagaggttattcttggcaccaagctttccattctcatccctgctattccagctgccatcgttgctgagtgctttggctttggaagaccttggatttttatattaagcttacttggacttacaccacttgctgaacgtgtgagcttcattacagaacaagttgccttttacactggtcccacagttggaggacttctgaatgctacatgtgggaatgttacggagctcataatagcagtatttgccct

SEQ ID NO: 16513 - DNA, 401 bp, Glycine max
  Clone ID: LIB3106-116-Q1-K1-G11
cccacgcgtccgcccacgcgtccgcccacgcgtccgaaattggttccgatgtcttcatttcaggcaatgctttccaatccaatatggattttattagtaacccacaagcgtacggttttatcacatcaaaagttgcatgctgtggtcaaggaccttacaatgggattggactgtgtactccggcgtctaacttgtgcccaaacagagatgtgtatgcgttttgggaccccttccatccaagtgagagagcaaacagattgattgtggacacattcatgatcggagactccaaatacatgcacccaatgaatctcagtaccatgttgcttttggattcaacttcaaggacctagctaattattatcttcttcctgttagggtcgtggcatacattctgcact

SEQ ID NO: 16514 - DNA, 344 bp, Glycine max
  Clone ID: LIB3106-116-Q1-K1-G12
gtaataaggccagccactcatgtctcaacccctatccgacgatggatttgttggtcttttcaacagtcccttaaaggacaagtctctccaaaccgtggcgattgagttcgatactttctcgaacaaaaaatgggatcctgcaaaccgacacatcggcattgacgtgaactcgatcaagtccgtcaaaacggcatcgtgggggttgtccaatggacaagtggcggagattctcgttacctataatgccgccacgagcctcttggttgcttctctgatccacccttcaaagaaaacaagttacatcctctctgacacagtgaacttgaagagtaatctttccgaat

SEQ ID NO: 16515 - DNA, 463 bp, Glycine max
  Clone ID: LIB3106-116-Q1-K1-G2
aaccacctacggcacacggaaagaatttcgttgtagtgttcattacacccaacaaccaagtgcagcaatcaccaaaaaagaagaaggcaaatcaaagttttgaaccttggttcaatatctagagtccctgcaagctcaacacatcagagataatcaaaatgcatcctgcgcagatcgttttgtatggatcaactttatgtgtcatgataacagtgcacttctccatgaagctactcgctgaacatgttttgaactggaagaaaccaaaggagcaaaaggccatagtaattataatccttatggccccattgtacgctgtggactcctatgttggtttgataaatttcttttgaagtgaagcatttttcacattcttggactcaattaaagagtgctatgaagctcttgtgattgctaaagttttgggcttgatgtacaattatctaaacatcttcttaagtaa

SEQ ID NO: 16516 - DNA, 214 bp, Glycine max
  Clone ID: LIB3106-116-Q1-K1-G3
attcattcaacaaattcctgcagcacccagacaaatagtgcccaattacaattaacaagatggatattatgttggaccgattatgtattcataactatagtcatattaaggagatgattcatttgtagtacaaaaaaagaactatgtctattaagtaatgtacaattgttataacttgaattgattcatattcttaatcatgaaattatgatgt

SEQ ID NO: 16517 - DNA, 458 bp, Glycine max
  Clone ID: LIB3106-116-Q1-K1-G4
cccacgcgtccgatgaacagtttatcaatggcacttctccacccaaatcttcttcccacttgcaattccaacactcttacctttccttccatcaaactcaaaccctcactctcgcacgtgccttctccaacccccacacgcttcagtctctctgtttccgcggcggaaaccaccgcttttgccgcccctcccactccccaacctgagaagcttggagttgtagttaagccaacggagaagccgagacttgtgttgaagttcatatggatggagaagaacattggaattgcgcttgaccagatggtaccgggccatggcaccattcctctgagcccatattacttttggccccgaaaagatgcctgggaagagctcaaggagttgcttgagaacaagccttggatctctcaaaagcagatgattattcttctcaatcaggccactgatatcatcaattt

SEQ ID NO: 16518 - DNA, 344 bp, Glycine max
  unsure at all n locations
  Clone ID: LIB3106-116-Q1-K1-G5
gtggtttcagtgagtgatcggtgttcacttgatccttcataagtcgtcatcatcatcatcatcatcaccgttgattgaagaagatgccgatcagaaacatcgccatcggaaggcctgaagaggctactcaccccgacacgttgaaggcggggttggctgagttcatctccaccttgatcttcgtgttcgccggttcaggttccggcatcgcctacaacaagctcaccgacaacggcgccgtcactcccgncggcctcatcttcgcttccatcgcccatgctttcgccctcttcgtcggcgtctccgtcggcgccaacatcttcggcgggcacgtcaaccccgcc

SEQ ID NO: 16519 - DNA, 410 bp, Glycine max
  Clone ID: LIB3106-116-Q1-K1-G6
acggaaagcttcgaaccagaatgtgggttaagtcgatggtgcttgccatggcggttgccacctgcggcgatgggtgtgaactttgacgaccacatttagatccgctccacggcgatggcgctgatcgactgaggcatatagagtcaacgagatagtcgaacattgttcgagggctaaatcgactacgccggtggtacgagcctccgaggtctacagctcctgagtttggacaacagagggctaactcgatgatgtgtactccaatatctatgatatatagtcctgagaaatggagggttcttacttatcaaaaatcccaatattgtaagttttatttcgagaatatcatggttcacagaagattcttatattcaagagcaaaacaggcacttatcttcaaataattgtag

SEQ ID NO: 16520 - DNA, 437 bp, Glycine max
  Clone ID: LIB3106-116-Q1-K1-G7
ggagaggaatcagaatcgcgttagggagaagaagagaaaatcgcaggtgaaaatgagcggagcggtgaagaaagtaaccgatgtagcattcaaggtgggaaggaacatcgattgggatggaatggcgaagcttctcgtctccgatgaggctcgcagggagttctccaatctccgtcgcgctttcgacgaggttaactcccaactcgaaaccaagttcagccaggaacctgaacccatagactgggattactatagaaaaggaattggcactcgcttggtggatatgtacaaggagcattatgagagcattgaggtccccaagtttgttgacacagtaactcctcaatacaagactaaatttgatgccctattgattgagcttaaagaagcagaggagaaatctctgaaggagtctgagcgtttggaaaaggaaattg

SEQ ID NO: 16521 - DNA, 443 bp, Glycine max
  Clone ID: LIB3106-116-Q1-K1-G8
gtgagctataagctagtttatcgtgaggagaatatgaagttgtttgttttctttgatgctgccgtagttttgagtagcatgggcatgccatggcgcaggctaccaaaggttccctcttcgaatgaaaactggctatggtgagcgttcttctgaggtaaaatgctcaagttttaggcttgctgtggaagcacacaacatccgagcctttaaaaccattcctgaagagcgcgttgaaccaacataggactacattaatggcgaacaatttacatcatactctaaaacagttaaccaacaagctttcttttatgctagtgaacgcgaagtccatcacaacgacatatttatattcagcatagataacaccgtactctctaatatcccatactatgaaagacatggatattagggtgagtgatctaatgaaaccttatatgatgaat

SEQ ID NO: 16522 - DNA, 417 bp, Glycine max
  Clone ID: LIB3106-116-Q1-K1-F3
acttcctcgcgccatgggtgctaccatcatcacatgcaagctctcactgcttttaagccttctctcagtttcactattgctgggtgtgagttcatcagatacccttcagaatgtaggggcaattcccccaacatgcaagcgcatagagtgtcccagctatgatgtcattcactttggcaacggctacgaaatccgtcgctataattcacccgtttggatttcgaacagccccattctagacatttctctggttgaagccacaagaaccggcttcaggaggctatttgattatattcaaggtaagaataactacaagcagaaaattgagatgacagcgcctgtgatcagtgaagtataacccagtgatggaccctttctgtgagtcctcatttgttgtgagcttctatgtgccaaaag

SEQ ID NO: 16523 - DNA, 455 bp, Glycine max
  Clone ID: LIB3106-116-Q1-K1-D9
gttgcagactgggcctgatgctgctcctaaagcagcggctgaaagtggtgccggaactccggtggagaatttgttggtgaagaaaactgagatgaggggtcctgagatgtatatctcggaggagattagtgccgagtttagagaatcgttgcttaccagggtgggattgatgggtgttgtttacctcagaactttgccacccaaaactgctgtgataaggaaactgaattttcgttccgaattgagggaacagaagctgttaaaagatttgttatacaaagttcgcgtgttagtagccttggtaatgggatgtttcatgtgaggactgcagcctctgaggagccgatacccattatgaagtatagtttgggtcctagtctgacgcccttgcctttgagggttcgacttacaaaacgacatactgggagtttgctttctgtgatgatacaatatgc

SEQ ID NO: 16524 - DNA, 447 bp, Glycine max
  Clone ID: LIB3106-116-Q1-K1-E1
cccacgcgtccgtgctttcttttctgctcaacatggctgaagattatctccaagaagagaagaagcgagttcggaacccttttgtccccattggtgcacttgttactgctggtgtgctaacggctggcttaatcagttttagacaaggtaattctcagttaggccagaagttaatgagggctcgtgtggttgtccaaggtgctacagtggcgctcatggttggcactgccttttattatggagaaaatccttggcgatcgagttaaaatttgaatggcctgaaacaaaagttgaagtttgtaattgcttggttccttgttggttttagttttatttttgtgataaagaatttggtcatttgaggaccaaatccaaacccttccaacatttaaatttttctcacaacgcataacgattgagttcatcttgatgtacttttatatatag

SEQ ID NO: 16525 - DNA, 217 bp, Glycine max
  Clone ID: LIB3106-116-Q1-K1-E10
atgagtgggggggcttctgggagggtgaagtggttcaatgatcagaatgggtttggattcataagccctgacgatggcagcgaccatctcttcgttcaccaatctcacgatcaaatctgacggcttccgaagcctcgccgaaggagagtccgttgagttcgccattgaatctgaatctgacggacgcgcgaaggctgttgatgtcactggccccgac

SEQ ID NO: 16526 - DNA, 159 bp, Glycine max
  unsure at all n locations
  Clone ID: LIB3106-116-Q1-K1-E12
acgcttttctccacgcgttcgcccacgcgtttccatcatgccttttcatttctaggcaaatgtgcaatgaagacattgatcgcgtttcattggcttctatnctcntaaattaacttttgcgtctgaattaagctgcgtgttgttcccgattgtttgttt

SEQ ID NO: 16527 - DNA, 435 bp, Glycine max
  unsure at all n locations
  Clone ID: LIB3106-116-Q1-K1-E3
ctctgacctcttcttcacatcttcctccattaatacccttccctctctctcccatggagttgatctacctactctatctggttccaacgttgtacgcgtgtttcctcatatggaagatgttggacgagagaagggacagggagtgttacatcttaaactaccaatgctacaagccccccaacgacagaatgctcggcaccgagttctgtggcaagcttatcagacgcaccgaaaacctgngccccagcgagtaccgcttcctcctcaaagccatcgtcagctccggcatcggcgaacaaacgtacgccccaagaaacatcttcgagggccgcgaggccactcccacgttgcgcgacagcatcngagaaatggaggagttctttcacgacagcattggaaactcctcgcgaaatctaaacgtctccccttcgagat

SEQ ID NO: 16528 - DNA, 409 bp, Glycine max
  Clone ID: LIB3106-116-Q1-K1-E4
cgagataactagaaacagtgtgatgaaaatgaaggtccttgttttcttcgttgctacaattttggtagcatggcaatgccatgcgtacgatatgttccctctccgaatgaacactggctatggtgcccgtactccggaggtgaaatgcgcaagttggaggcttgctgtggaagcacacaacatctttggctttgagaccattcctgaagagtgcgttgaagcaacaaaggaatacatccatggcgaacaatatagatcagactccaaaacagttaaccaacaagcttacttttatgccagagacctcgaagtccatcccaaggacacatttgtgttcagtatagatggcaccgtactctctaatattccatactacaaaaaacatggattatgggtggaagaaatttac

SEQ ID NO: 16529 - DNA, 438 bp, Glycine max
  Clone ID: LIB3106-116-Q1-K1-E5
ggtttgtgcaatctcgtcatcaccgttctcaactctctcgtttcggcgtctcgtcgtacgcaatgcgacgccgtctccgtgcaagccgcgtgccgttaaacccttaacggcacttccgagcgcggggcggaggcagttgctgttttttctgacggcgacgacggcgttgacggcgagggaagcggcgtccgtggcgcaggacattcccttgttcgggatacggaagagtctgaagaaggtggaggaggaagcggaggagattgtgagagagggatttgaggctgcggataagggattggtggcggcggagaaggggctggagacggcggagaaggggttggtggcggcggagaaggggatagaggaagcggagagggagatagaggagacggtgagttttggggggttggcgcaggcgggagcggtggcgggagcgga

SEQ ID NO: 16530 - DNA, 285 bp, Glycine max
  Clone ID: LIB3106-116-Q1-K1-E6
cccacgcgttcgaaaaaaaaaaaaaaaaaattaaaaaaaaaaaaaggaaaaaaaaaataagggatactaaaaaaaaaaaacgggtattctattatataatatctactataatgtactaataatcttcattctgtaggcttttgttttcttctttgtcgttgactacataaattttttgtctcattttaaatcgccttttttccatacatttattttctgttgatatgtttgagattaggcattgtagttgttgatgttcttgcatattgtgaaagctggatttca

SEQ ID NO: 16531 - DNA, 434 bp, Glycine max
  Clone ID: LIB3106-116-Q1-K1-E7
gccagacctcgatgatgcccaattggcaaaggaagtcgaatacctgctaaggaaaggatggattccttgcttggaattcgagttggagcacggtttcgtgtaccgtgagcacaacaggtcacctggatactatgatggacgctactggaccatgtggaagctgcctatgtttggctgcactgatgcttctcaggtgttgaaggagcttcaagaggctaagactgcataccccaatggcttcatccgtatcattggatttgacaacgttcgtcaagtgcagtgcatcagcttcatcgcctacaagcccccaggcttctaagtcattgaaaaatttgcaaagcatttttagccaccctactttgtttgttgtacttaaactacattcccatttgtttttgcttaatgagatttcatcattcctttatttttggttt

SEQ ID NO: 16532 - DNA, 330 bp, Glycine max
  Clone ID: LIB3106-116-Q1-K1-E8
cccacgcgtccgataaacaattccacagcttcatatccaccacacgatggccacaaccaccatgttctcatcaccatcggcaattctctcctcagccgccacaaccaccaccccaaaaccatcctctgcagcaccacactccccatcatgcaagcatcctcttctactacccttcaaacagcccttaacaaccttaactggcgccggcgccatcggcactattttaacctccgctccaacacccttcttagcacaagagtccctctcatataaagtctactatggcaccggcgtcagcgccgcgaactacggcgggtatgggggcaactt

SEQ ID NO: 16533 - DNA, 472 bp, Glycine max
  unsure at all n locations
  Clone ID: LIB3106-116-Q1-K1-E9
cccacgcgtccgcccacgcgtccgcacagagttagaggagaaatcatcatggcatcagcagcatctgggtttgtgttgtcacttaatgttgcagctgccaccacaaactcaagggtggtcatgttcaacacaaagaacaacgcttctaggcttgttgtaagggcttcagatgagcctgcagcggcggcacccgccaccgccacacccccagctgaagctgaagctaaaccaaagccaccacctattggccccaagagaggtgctaaggtgaagattcttaggaaggaatcttactggtacaaaggcactggttcagtggttgctgttgatcaggaccccaacactcgctaccctgttgtggttcgattcaacaaagtcaactatgccaatgtatcaacaaacaactatgctntggatgagattgtggaagtggaatgagtctaatttattgtacatttgattctggtcatgc

SEQ ID NO: 16534 - DNA, 394 bp, Glycine max
  Clone ID: LIB3106-116-Q1-K1-F1
atcgagatagctcgaagcagcgtgacgaaaatgaacgtccttgaattattcgatgctacagtcttgggagcatggcaatgccatgcgtacgatatgatccctgtacgaatgaacactggctatggcgcccgtactccggaggtgaaatgcgcatgttggaggctagctgtggaagcacacaacatctctggctctgagaccattcctgaagagtgcgctgaagcaacagaggaatacatccatggcgaacactatagagcagactccatagcagatcaccaacacgcttacttttatggccaaagacctcgaaggccataccatggacacatctgagttcatgatagacaggaccgtactctctaatatttcatactacaaactacatggatat

SEQ ID NO: 16535 - DNA, 405 bp, Glycine max
  unsure at all n locations
  Clone ID: LIB3106-116-Q1-K1-F10
atgacctnccatgtccgcgttcctaagctggcaattcctacctccccattcctgacatttttttacgcccaggttttatgacccttccgacgggggcgctcttaaggagcttgtgactacattgcaaattggatgtcagccgttgaaatcgttgatgatgacatatacctaggtgcagaaaacagttttaatctgatcactgttcggaaaaatagtgcaggtgctactgatgaagagcgacgtcgtcttgaagtggttggtgagtatcacctaggagaatttgtcaatcggttccggcatggctcccttgttatgcgcttgccagattctgatgtgggccatattccaactgttatctttggcaccattaatggtgttattggagtaattgcgtctctttcacat

SEQ ID NO: 16536 - DNA, 387 bp, Glycine max
  Clone ID: LIB3106-116-Q1-K1-F11
tgcgacgccatcgcgtacgctcacgcgtccgctcacgcgttcgatggaaaccaaaataataaatgcaagtacattcagccactgcaaatacataacttaaacatacacaactgatgaacgagacaaggttacaattgacggatatgaaactataataatgtcagatgagagtacagaatgagagacagagcatgcgttcttaagcgccatccttgagcaaccaattagtgtctgcattgatgcaaaagattttcatttatacaccgaaggaatttatgatggagataactgtacaagtccgtatgggattaatcactttggtttacttgggggttatggttcagcggatggcgtatattactggatagggaaaaattcatgggaaga

SEQ ID NO: 16537 - DNA, 412 bp, Glycine max
  Clone ID: LIB3106-116-Q1-K1-F12
taaaaatggcatcatccatcgccggctccctaactacatcaatcagtcgcacaggtcatgtgctcaaacgacctgttggggcctcatcctctaccgttcttggattgccagcaatggccaaggcggggagagtgaggtgctccatggaggaaaagccttcaagcagctcaaacctagggatgggggcatccttgttagcagctgcagctgccgcaaccatgtcaagcccagcagccatggctttggttgatgagagactcagcactgaaggaactgggcttccctttgggcttagcaacaaccttcttggttggatcctgtttggtgtctttggtctcatatgggctctcttctttgtctacacttccacccttgaagaggatgaagagtctggattgtccctctaaacccc

SEQ ID NO: 16538 - DNA, 113 bp, Glycine max
  Clone ID: LIB3106-116-Q1-K1-F2
cccacgcgtccgtgaattctctgaaaaaaaatacaaaaacaaaaaaatatcaaaaaaaacagggaaaaaacaaaaaagggaaacgagcaaacaaaaagatccttaaacaaaca

SEQ ID NO: 16539 - DNA, 423 bp, Glycine max
  Clone ID: LIB3106-116-Q1-K1-D8
cccacgcgtccgatgtctgtcctgactgcagaggatctggtgaggtcattaacgagagagataaatgtcctcagtgcaaaggaaacaaaatttcccaggaaaagaaggtgctggaagtgcatgttgagaagggtatgcagcagggtcagaagattgtttttgaaggacaagctgatgaagctcctgacacaatcacaggagatattgtttttgtattgcaagtaaaggatcacccaaggttcagaagggaacaagatgacctctttattgatcaaaatctcagcttaactgaggcactctgtggctttcagtttgccgtcaaacatcttgatggtaggcaactattgatcaaatcaaatcctggggaagtcatcaagccaggtcaatataaagcattaaatgatgagggaatgccacaacaca

SEQ ID NO: 16540 - DNA, 429 bp, Glycine max
  Clone ID: LIB3106-116-Q1-K1-C3
gtatagagtgaaagaatgggtgagaaaagcaagattttgatcataggaggcaccggctacatcggcaaacatatagtggaagcaagcgcaaaggctggaaatcccacttttgctttggtgagggaatccacactctctgacccctccaaggcacaactcatccacaattttgaggctttgggcgttaatttggtccgcggggatctgtacgatcatgagaagttggtgaaagctatcaagcaagtagatgtcgtcatatccacgctgggtcacctgcagcttgccgatcagctcaagatcatcgctgccattaaggaagccggtaatgttaagaggtttttcccttcggaattcggtaacgacgtggatcgtgtccatgccgtggaaccagcaaaatctgcattagctatcaaagcccaaattcgacgc

SEQ ID NO: 16541 - DNA, 236 bp, Glycine max
  Clone ID: LIB3106-116-Q1-K1-C4
gttttgattgtggaacatatcgcattacattacattagattggtggcaaagcaatggcatcggcactacaagcagcaggtactttcatgcaacccaccaagtttttgcagctaaagtctactcaagccatatttaaggcttttggtttggaacctgctagagataataatgtcacattcttccttcatgctgatcttaaggaacttgctcacaagtgtgttgatgctaccaaatat

SEQ ID NO: 16542 - DNA, 372 bp, Glycine max
  unsure at all n locations
  Clone ID: LIB3106-116-Q1-K1-C5
gtgtctcagagggtctgtgacacacagactcacttccaagttccaagctttggccatttattcccactgtttattgaacatggcacagattttggctccctctacgcaatggcagatgagaatctcaaaatcctctcccaatgcaagtcccattacatcaaacatgtggagttctttattgtggaaacaaaataagaaagtttcacccacaagttctgctaaatttagagtgatggcaattaagtctgacaatagcatcatcaacaggctagagggtctacttaatttggatatcactccattcacggacaagataattgctgagtacattttggattgggggacaggaattgatgtgcgcagtanatcaag

SEQ ID NO: 16543 - DNA, 170 bp, Glycine max
  Clone ID: LIB3106-116-Q1-K1-C6
tcggtgtctctgacggtctgtgacacacacactttcttacaaactcaaggctctggccatttagggttaccgtatattgaacatggtgcacatattggcttcctctactcaatgacagattataatcgcaaaatcctcttccaatgcaagtacccattacatcatacatg

SEQ ID NO: 16544 - DNA, 438 bp, Glycine max
  Clone ID: LIB3106-116-Q1-K1-C7
cccacgcgtccgggaagatgagtttgagggcatcagagatagcgaagaagttgaatctgcagcctcacccagaaggtgggttttacgtggagacattccgagaccattccgtccagctttcgacctctcagctcccccccgaatacaaagtggatcgccctgtatcgacctccatctattttctcgttccttctgggagtgtgtctcgcctccatcgcataccctgcgccgaaacctggcatcattacatcggcgaccctctcaccgtatgtatatcttcatctctctctttcttttttaacctaatctgatatgaattgtattgcaggtagtggaattgaatgagaaagatgggagcgtaaaattcacttgccttggatcagatctgactcagaatcaggtgccgcagtacacggtgccttccaacgtctggtttgg

SEQ ID NO: 16545 - DNA, 251 bp, Glycine max
  Clone ID: LIB3106-116-Q1-K1-C8
cccacgcgtccgtccacgcgtccggtaggtgacacaacaccaacaagtggatggagctctgtttgcttgggaagttgaaaactttgaacacagtacaagaaccgcttaccagggaaacaacccaataccacttccaccattaacaatacacagataacccatttattgctaacatcattatctttccgtccattaaataaaacacacaaactgggccttactctcaaggtactttcctactgttcctattt

SEQ ID NO: 16546 - DNA, 468 bp, Glycine max
  Clone ID: LIB3106-116-Q1-K1-C9
cccacgcgtccggaaaaacaaactcctctcactcttccttccatctcttcttcaacattccaatccaatccaaaacgctgcgttttattttgtattcaattctatcaatcccaaaattcctcgccggagatagagaatcttaacaattccaccactttccggcgagacatggccgtcgccgtctccgtccccgcccgccagaagccgagctccgacgcgagcctctttacactctgccccttctggagttcgcgcaacgccaatcaaagctcctccaaaacggtgtcttccgtcgccaggtcgctgctccctccccgccgcagactccgcctcgatccttccaattacctctattttccatatgaaccggggaagcaggtaaggagcgcggttcggttgaaaaacactagcaagtctcacgtggctttcaagtttcaaacgacggcaccaaagagttgttacatgcgg

SEQ ID NO: 16547 - DNA, 303 bp, Glycine max
  Clone ID: LIB3106-116-Q1-K1-D1
agaaaggtggactgaaaatcaaccccaacttctttgtggactttggaactgagcctgatgggccttctcttgcccatgagatgagatatcctggtggtgactgtacttcagatatatggatttaaacatacgtgtcattatttccctttaataaacggatctgtcatatggttgtaatgagctactatgctataaataatgctcttgtgaatcttcaactttttgaagacagtttgcaattgcataaatatattaagctcatcttagaaaaaaaaaaatgaattgcgctataatttgtagaat

SEQ ID NO: 16548 - DNA, 424 bp, Glycine max
  Clone ID: LIB3106-116-Q1-K1-D10
tcgcccactcgtccgcccacgcgtccgatctctcttttgaaatttatactatttcatggcttttagagcgtgtcaaacaaatcatacttctattattcattatatcctattgttccaactggctcatgtttacgtatgctatcttcatcttcaagtaatgagtaactttttcttaagatgcttaaatataatgaacaacagtgtgatcagggaacagccataaaaaaattgcatcatagaaaagaaaaagaaaatgtttgtcatttgatatgtacttcaactttgtattccacattaacggaaatgtcacaacgtttattctgtgagatgaatgaaacttggtttcatcctaacatcacctttgattttaatatttgtgctgccaaaattttgattattgaacccattttcaccttacttttga

SEQ ID NO: 16549 - DNA, 422 bp, Glycine max
  Clone ID: LIB3106-116-Q1-K1-D11
gatcgtccggatgcgacgcgaagcgtaacgcccacacgtccgatcgcgagcggtgaaaacaacgcccaattacggatcccggagcagacgtggggtgcgcgtcttcagccgacaggctcactagatacggggcgctagacggatagggtggggaggatcactgctgcgatgaacacggtcactgaggtgatgaccacggacacggcgaaggaacaagacactaccactccgatgatgatggcaatggagctgataggaaaactggaggggggagccataaactactctgttgagggtcaggagaggatgcacaggtgcatgagagagtcatcggtgaagatcgtaaagaatttgaaagatgtcgctctgctgactcatgttattccgacaattgcgacgatgacgacagtctacatgatggt

SEQ ID NO: 16550 - DNA, 363 bp, Glycine max
  Clone ID: LIB3106-116-Q1-K1-D2
cggacgcgtgcgactacacgtccattcactcaagcgcagacttgcatcttgaaagagaagatggttggaggaatggtagcatacaagaacaagttcatagaggattggggcactgccagagagaatctggagttcaattttcgttggactcgtcgcaaccttgctcttgttggcatcttcagcatcgctattcccgtcctcgtctacaagggcatcgtacgtgaattccatatgcaagatgaagataatggtctgccgtacaggaagttcatgtgagagagtatggagagtcttttgtaataattcgtcaagttagacctttgatattatgaggctacaaaccatgttttttttttcccttaa

SEQ ID NO: 16551 - DNA, 409 bp, Glycine max
  Clone ID: LIB3106-116-Q1-K1-D3
gggtaatgggtttgcgatcgtggtggctgattcatcggcggtgcacagcatcctcgtccacaagtccaacgaggacaagatcatgctcctcgattcccacaaactcattgccgctagcggcgagcccggagacagggttcagttcacagagtacattcagaagaacgtcgccttgtatcagttccgtaacggcatccctcttaccaccgccgccgccgccaatttcacgcgtggcgaactcgccactgctctccgcaagaacccatactctgtgaacatccttcttgctggttatgacaaagagacgggccctgaactatactatattgactacattgcaacgctttacaagctttgaaagggggcttttggttatggctcctaattttcactgtcaatgatggacaga

SEQ ID NO: 16552 - DNA, 415 bp, Glycine max
  Clone ID: LIB3106-116-Q1-K1-D4
aaaaaaaggaaatagaatacgaggaggatgattaataaaaaagagaaaaaaatactaaaaaaggggaaacaacgaaggaggggaacatgctaacaagaatcccacaaactcattgcacgatagcggctagcccggagacagggttcagttcacagagtacattcagaagaacgttgccttgtatcagatccgtaacggcatccctcttaccaccggcgtcgccgactatttcacgcgtggcgaactcgccactgttctacgcaagaacccatactctgtggacattcttcttgctggttatgacacagagaccgtccctgaactatactatattgactacattgcaacgctttacaagcttgaaaagcggacttttggttatggcttctatttttcactggccatggatggacag

SEQ ID NO: 16553 - DNA, 387 bp, Glycine max
  Clone ID: LIB3106-116-Q1-K1-D5
cccacgcgtccggcttatgaagaagacggcgatggcgatggcgatggctcctttttcacttgcaatgaaaatcaaaagcaaaaggggtggtattaggtgcgaggtggctattaatgcggtggatgaggagtcgaggacgtcaccggaggagacgaagatcggagcgcgtgtgaaggtgaaggaagcgggtttgaaggtgtaccacgttcccaaagttggggagcttgacctaacgggtctggaaggcgagatcaagcagtacgttggcctctggaacggtaagcgaatcttcgccaatcttccttacaaggttcagtttcttaccgacattcccggtcgtggtcctgtcaagttctttgcccacctcaaggaagatgaattcgacta

SEQ ID NO: 16554 - DNA, 353 bp, Glycine max
  Clone ID: LIB3106-116-Q1-K1-D6
gcaaaaatgaagacgattctttccaccgagaccatgaacatcccggacggcgtgagcatcaaagttcatgccaaggtcatcgaagttgagggcccccgcggaaaattggtgcgagacttcaagcatttgaatctcgattttcagctcattactgacgaaaacggtaaaagaaagctgaaaatcgacgcgtggtttggttctcggaaaacattcggcggcattcgcaccggcttgagccacgtggagaatcttatcaccggcgtcaccaagggctaccgctacaaaatgaggttcggttatgcccattttcccatcaacgcaagcattggcaacagcaacaagtctattgagat

SEQ ID NO: 16555 - DNA, 415 bp, Glycine max
  Clone ID: LIB3106-116-Q1-K1-D7
ggaaaaaatggcgtgcaggagcatgcttcgttcatcgattctggtggaacccttccaattgcaacctcttcattttagtaacagacccgttagcgcttatccgtttcgccgtggcaaaggactaaccctccgttgctccagcaacgagacgccgtcgtttcaggacgatcagggtccacctcaagaggccgtgttgaaggccatttccgaggtgtctaaggcagaagggagggttgggcaaacaacaaacatggttattggaggcaccgtgtcggatgattcttctaatgaatggcttactttggaccagagggtgaactcatacccaactgttcggggattcactgcaataggaactggaggggaggacttcgttcaagccatggttgttgctgtggaatccgtaatccagcag

SEQ ID NO: 16556 - DNA, 450 bp, Glycine max
  Clone ID: LIB3106-116-Q1-K1-C2
gccaagccaaccaggctagcgccactagcgaggaatgcactgtggcttggggagtttgtaaccatgcttttcacttccattgcatcagtcgatggctcaagactcgtcaagtttgtcctctagataacagtgagtgggagtttcagaaatatggccactagaattatgatgtggttgagctcctcggacatttggaccatctatcctagattttgaatatttactgttctatctgttattttcgtttgcttgtgtactgaatttattatgttcaagaaatcagcttgtctgatggaatttgatatacgccgtggtaacatgtaaagttttactttaatgttttatgtatttcatatgcttcctttcagctgtttgtgtttgtggtgcttacaagctgtgtgacgtggttaatttttctcccttcccgtgtattgctttgtagttgatgat

SEQ ID NO: 16557 - DNA, 379 bp, Glycine max
  unsure at all n locations
  Clone ID: LIB3106-116-Q1-K1-B1
cccacgcgtccgttcttcttctagtagtgcaccagcaacaactacagtgaagagtgaggaggggatgcaaggcatagggatagggtgctgctcaaacgacgtcgtagggcagctggagctaagtcccactatgagcaactcctcttcctcgctatcgatggagctggacgagtcccccgagagccgaatccaacggctgatatcggagcaccccgtcatcatcttcacccgatcctnctgctgcatgtgccacgtcatgaagaagctcctcgccaccatcggcgttcacccaccgtcatcgaatttgacgaccacgagatcgccttccttccccttcccgacaccaccgnnccccgccgcttcatcggcggcacctgca

SEQ ID NO: 16558 - DNA, 340 bp, Glycine max
  Clone ID: LIB3106-116-Q1-K1-B10
gaaaaacatggatatggggtggaggaatttaatgaaaccttatatgatgaatgggttaacaagggcgacgcaccggcattgccagagactcttaaaaattacaacaagctgttgtctcttggcttcaagattgtattcttgtcaggaagatatcttgacaaaatggccgtaacagaagcaaacctaaagaaggctggcttccacacatgggagcagttaattctcaaggatccacatcttatcactccaaatgcactttcatacaaatcagcaatgagagagaatctgttgaggcagggatacagaattgttggaatcattggagaccaatggagcgatc

SEQ ID NO: 16559 - DNA, 366 bp, Glycine max
  unsure at all n locations
  Clone ID: LIB3106-116-Q1-K1-B12
cccacgcgttcgcagttaaccaacaagcttacttttatgccagagacctcgaagtccatcccaaggacacatttgtgttcagtatagatggcaccgtactctctaatattccatactacaaaaaacatggatatggggtggagaaatttaactcgaccttgtatgatgaatgggttaacaagggcaatgcaccggcactgcccgagactcttaagaattacaacaagctggtgtctcttggcttcaagattatattcttgtcaggaagaacactggacaaacaggccgtaacagaagcaaacttaaaagaaggctggctaccacacatgggaaaaaataattctcaaggatccacangatccttcc

SEQ ID NO: 16560 - DNA, 429 bp, Glycine max
  unsure at all n locations
  Clone ID: LIB3106-116-Q1-K1-B2
aagaaatttaagtgaggagctagagaatgatgatgaagtctgctatgtgtgcagtggtggttgtagcacttcttcttctggcggaggtggggcccatggctgaggctgtgacatgcaccccaacagagttgagtccgtgtcttccagcaatcacttccggtgctaaaccttccaatgcttgttgcacgaagctgaagcagcaaaaaccatgcttatgtggctacctcaaaaacgctagcttgaagcagtatgttaactctcctaatgcccgaaaaaccgttgcttcttgtgggattccctttccaacttgttaattaattaagccttcttataattaaagtgtgggatatatatatatatatatatatatatatatatatataaacagtttaatntatacacactttgatcctacaaagcatcttgaca

SEQ ID NO: 16561 - DNA, 449 bp, Glycine max
  unsure at all n locations
  Clone ID: LIB3106-116-Q1-K1-B3
gatcgagataactagaaacagtgtgatgaaaatgaaggtccttgctttcttcgttgctacaattttggtagcatggcaatgccatgcgtacgatatgttccctctccgaatgaacactggctatggtgcccgtactccggaggtgaaatgcgcaagttggaggcttgctgtggaagcacacaatctttggctttgagaccattcctgaagagtgcgttgaagcaacaaaggaatacatccatggcgaacaatatagatcagactccaaaacagttaaccaacaagcttacttttatgccagagacctcgaagtccatcccaaggacacatttgtgttcagtatagatggcaccgtactctctaatattccatactacaaaaaacatggatatggngtggagaaatttaactcgaccttgtatgatgaatgggttaacaagggcaatgca

SEQ ID NO: 16562 - DNA, 352 bp, Glycine max
  Clone ID: LIB3106-116-Q1-K1-B4
ctttctccagatgcttatcttccgtcttggatggacttaagtacgctgattcacatgaatgggtcaagcacgaaggctcagtcgccaccattggtatcactgaccatgcccaggaccatcttggagaggttgtgtatgtggagctgccagaaccaggtggcacagtttccaagaagtctggcttcggagccgttgaaagtgttaaagcaacaagtgatataaactctccaatctcgggggagatcgttgaggttaacaaaaagctcacagaaacgcctggcctggtcaactcaagcccatacgaagatggatggatgatcaaaagtaagccaagcgatccatctgaattaga

SEQ ID NO: 16563 - DNA, 440 bp, Glycine max
  Clone ID: LIB3106-116-Q1-K1-B5
cccacgcgtccggagtttgttgtgagctataagctagtttatcgtgaggagaatatgaagttgtttgttttctttgttgctgcagtagttttggtagcatggccatgccatggcgcaggctaccaaaggttccctctccgaatgaaaactggctatggtgagcgttcttcggaggtaaaatgcgcaagttttaggcttgctgtggaagcacacaacatccgagcctttaaaaccattcctgaagagtgcgttgaaccaacaaaggactacattaatggcgaacaatttagatcagactctaaaacagttaaccaacaagctttcttttatgctagtgaacgcgaagtccatcacaacgacatatttatattcggcatagataacaccgtactctctaatatcccatactatgaaaaacatggataatgggtggaggaatt

SEQ ID NO: 16564 - DNA, 403 bp, Glycine max
  Clone ID: LIB3106-116-Q1-K1-B6
cagaaaaacaagtagttcagaactaagaagacggaaatggctatctcaatgatctcctcccgagctgataccaccgtcaaccgtgccggtgccggcatggttgctacattcaccggcctcaaattcatggctggcttgcccacgaggaagaccaacaatgacattacctccattgctagcaacggtggaagagtacaatgcatgcaagtgtggccaccaattgtcaagaataagttcgagactctatcctacttgccagaccttgatgattcccaattggcaaaggaagtcgaataccttataatgaaacgatggattccttgcttggaattcgagttggagcacggattcgagtaccgtgagcacaacaggtcacctggatactatgattgacgctactgga

SEQ ID NO: 16565 - DNA, 347 bp, Glycine max
  Clone ID: LIB3106-116-Q1-K1-B7
cgatcctaacaaacttatgcaagttacaactttggatagatatgtgaagtaccatgtgcaggagtttgagaaagcttttgcaatcaagtttcctgcttgctctattgctgccaagaggcacattgattccagcaccacaatcttagatgttcacggagtgggccttaagaactttacaaagtctgcccgggaacttattacccgattgcagaagattgatggtgataattaccctgagactctttgccaaatgtttattataaatgctgggcctggatttaggctgttgtggaacactgtcaagtcttttctcgatcccaaaacaacttctaagattcatgttcttg

SEQ ID NO: 16566 - DNA, 442 bp, Glycine max
  Clone ID: LIB3106-116-Q1-K1-B8
tgaagagaagagtctagaaacaacacaacacaacgcgaatggctacggcgctggagaagaaagcgaaggaggcattcttcgacgacgaattcggtctggccgtcgatctctactctgaagccatacgattggatccgaacgacgccaatctcttcgcggacagagcccaagcccatatcaaactcaacgctttcactgaagccgtttccgatgccaacaaatccatccaattaaacccttccttgcccaaggcctatcttcgtaaagccaccgcttgtatcaaactccaagaataccacaccgtcaaggtagcgcttcaaaacggtgccgcttttgcccaagacgattcaagattcgccaacttgattcaacaatgtgatcgctgcattgcagaggaatcaagtggccttactagcaccttgtcttcccatttgagcaataa

SEQ ID NO: 16567 - DNA, 390 bp, Glycine max
  Clone ID: LIB3106-116-Q1-K1-B9
gccagacgtcggatagcttgccttgatgcattcattgccacccacgcgggtgtagcttctacggggatccggaataacaccaaggtccaatacaaagctggacactctttcccaacccactgcgcctcatagagactgatggagacaaaattctctggactaagatccacttcatgtgtgacatatgctcacgatgctaaagaatctttgcttcgtgatcttgtatctctccaactcactcccattaccattgagatcatcaacccctgcgaacttatagacaatggacatcatgaaggtggcaatcaatggtatcacactcattgttagacacttgcttcgctgcttgcacatacgaaataactcaccccttgacgtcgttgatatcaa

SEQ ID NO: 16568 - DNA, 432 bp, Glycine max
  unsure at all n locations
  Clone ID: LIB3106-116-Q1-K1-C1
cccacgcgtccgcccacgcgtccgcccacgcgtccgcccacgcgtccgcactgctgttctggtctccatcacaatctgcctcctctatatgcattcaatcactttcttgtaattgttcctgtcgcggttcttgtttttactgtttagatgcgaagtctttgattatgtttatggtgttgtagccaatgatgaaagtcttcaatttggctgaaatgcaaaataatttattgcatttctctgttgaatatcttgatctaggacggtctgaggctacattttgtttttcatactgaatttgttagtgttgtatttatatgtctgcacagtgctgtgggtgatgagaataattactttacagttatccctggctgatgtagcagctgctgaaaatttgtaatctgacatgcactgntaagctgaatacaacccttt

SEQ ID NO: 16569 - DNA, 390 bp, Glycine max
  Clone ID: LIB3106-116-Q1-K1-C10
cccacgcgtccgctgcattcaagttccataatggcagcaaccatagcaacaacaatggctatgatcaactcaaagtgcatcaacacaacagggtcatcacacaagttgcacaaccccaagctcccaccctcaaaacccaccctctcccttttctcccttcagaacctcccaaagggcctaacctcccacgtctcaacttccacagcaggcactgccatcgcaggcgcaatattctcctcactcgcaaactgcgacgcagccttagctgcatcgcaaattgctgaattagccgaaggtgataaccgcgggctggcattgttgttgccgttgattccagccatagcgtgggtgctgttcaacattctgcagccagcactgaaccaactgaac

SEQ ID NO: 16570 - DNA, 468 bp, Glycine max
  Clone ID: LIB3106-116-Q1-K1-C11
cccacgcgtccgcttgatttgtagtttgttttgtgctttagataaaagttctgccaaatcaagaggggttttaagatcatagtgtgtgttttgcaacaatggctaagttctttgctgctatgatcttggcactctttgccatttccatacttcaaacagtggtaatggctgctaatgaacaaggaggccacttgtatgacaataagagcaaatatggaagtggaagtgtcaagagttaccaatgcccatcacaatgctcgaggagatgtagccagacccaataccacaagccctgcatgtttttctgtcagaagtgctgcaggaaatgcctgtgtgtgcccccggggtattatggtaataaagctgtgtgcccttgctacaacaactggaagaccaaggaaggaggacccaagtgcccttgagcttcaacttgttcaacttcaattgtcgctttcctacatttttatt

SEQ ID NO: 16571 - DNA, 354 bp, Glycine max
  Clone ID: LIB3106-116-Q1-K1-C12
cccacgcgtccggtctttgcactcttccatgtgacatctctaacacaagttcctttactactaagactcaaactactttcttggtggcttcactgagaacttcgaattctcattcttttctatcgacatctcatctcacatccactttattctacaaactcgggtcctctccccccattgtcctaccacacctactcagtactgaaattctttattctcataactgccatcaaaaaatctttctttgcaatcattatgccatgacaaatagctgcttcgtttaaaagcttttctctgcaaattattagattctgtacaactggtggtcatcccaaaggaaaaatgaaaggttct

SEQ ID NO: 16572 - DNA, 418 bp, Glycine max
  Clone ID: LIB3106-116-Q1-K1-A9
atgcgtacgtcacgcgtccgctcacgcgttctgccaagcgttcgctgtgaggcaaacataatgttgatgtaggaaatcctagatgatcaattttgagaccttctaacggataaaacgaaagttcgtgcttgatgtatagaagccttaagtgtccttaaagctgttctcaaattaaagagttcaagcagggtgattgaccactttgcacatctctacattatttttaaaccaaagcaatgcatcgtgtttgggtctttattcaaccgacatgagatttgctatcatgtcttggggttgatccatggaatctgtacccccatcactggatctgtgaaggattatatgagcatcccctatacgaattggcttccatagtattcagacgaacgtgattccatttgtgtatgacagcatgttt

SEQ ID NO: 16573 - DNA, 418 bp, Glycine max
  Clone ID: LIB3106-115-Q1-K1-H3
ctagttctagtcgcgactccgccctttgctggtcctccccaaaaaagtagattttgatcattttttgaccccatttttaaggacctaaaagaagaaaccgaaccattttcaatttttcactttgcgagtcctaaaagttttacgtgaaaagttgaactggttcctaactatcttagtggaaaaagcaaaatggattagcaaaagtattatcgaaggaattcttagaagtatcttcaaaaggattctaagcctaacgaaagtaaaacaattttgaaaatggctctttattaaattgaaattcataaggatcgatgaattgagcgactataaagaggattgaacatttattaggattaatccaatgatttctgaaacaaccatttcaattcaatcgttaaattcagtaaatggttcattg

SEQ ID NO: 16574 - DNA, 138 bp, Glycine max
  Clone ID: LIB3106-115-Q1-K1-H4
cccacgcgtccgcccacgcgtccggctttgtgcatcattttctcagacactttgttgactgatatttgaagaaaatcaaatgatgagggaaaattttctataaataagatcaatatatctagacgacttctctcctgc

SEQ ID NO: 16575 - DNA, 446 bp, Glycine max
  Clone ID: LIB3106-115-Q1-K1-H6
gagaaatgagaagatgggcaccaccttgatgagatgctcccacgcaaacgctctcttcagagctctcaaacccaaaccccgcaattcttcactgccactttcttcaatggccatcaacaaaggtaatagtaataaggcatatgatgcattgctgttggatgctgggggcaccctattgcaattggcaaagccagttgaggagatttatgccactattggatccaaatatggtgtgactgtggatccagctatgataaagcagggatttaagagagcatttgctgctccgtggcctgaaaagctgcgctaccagggagatgggaggccattttggaaacttgtagtttctgaagccactggttgtggagatgaagattatcttgaggaagtttatgagtactatgcaaaaggtgatgcgtggcatcttccagatggagcttttgaaa

SEQ ID NO: 16576 - DNA, 462 bp, Glycine max
  unsure at all n locations
  Clone ID: LIB3106-115-Q1-K1-H7
cccacgcgtccgggactttaggttgggatttgggaattagggttgttcgcgtggcgaagatgattgaggtggttttgaacgatcgattggggaagaaggtgcgcgtgaagtgcaacgacgatgataccatcggcgacctgaagaagcttgtggcggctcagactggcacaagagccgacaagatccgcatccagaagtggtacaccatctacaaggatcacatcactctcaaggattacgagatccatgacggcatgggtctcgaactctactacaactaaacacaacaaggtgtgttttatgcgtaatatactatgtgctgggaatgggataagcgctaaatgtaattctgacttgcgaaagttcccatgatttgaaataatgtacatctccaaatgatattgggtattatataccgttgacagcttaagtntgctttgtatataacctatatctgatgac

SEQ ID NO: 16577 - DNA, 493 bp, Glycine max
  unsure at all n locations
  Clone ID: LIB3106-115-Q1-K1-H8
cccacgcgtccgtgtggtgtttctgagctgggtagggtttactccttctcgcgccaacccagttgcgagcttggaggagaagatccttgccgtggccaacgagtataaggccgtgaaggcctttctggtcgcttacagcaccgttgctgaggattgggctaatttttcgccacctatcttcnttatcactcntcatggccttctggtaactctgcggttaagggaagccgccattaaagtcattagtgacggccaccgcttctttcccgccaagtggatccctgaaattttattgttggctgcctctaaatgaatgaggtatgacatgaagggtgaacacgtatctcacaagtgttatgtgatatgtatgatgtgtgaatcttgaaataatatcttaagggcaagacgttattagttaaaattattagaggtagttttatgaatgggtcataataataaatgctagctatatgtaccactatggaataagatg

SEQ ID NO: 16578 - DNA, 461 bp, Glycine max
  unsure at all n locations
  Clone ID: LIB3106-115-Q1-K1-H9
caaaaaatgaagagcactaccttgttcgctctctttctactttgtgccctcacttcatcatacctaccttcagccaccgctgatgtggtgctggacatggatggtaatcctcttggaaacggttggcaaaatgaatatttcatgttgccagttacaagaggaagcggtggtggaatagcactagctgcaactggaaatgaaagatgccctgtaactgtcgtgcaatctcacattgagcgcgataaggggtatgcggcaacttttagagctccattccacctcccttttatcgcagaaggccttcctttgacgatttcattcgataactntgaagtgttaccgcggtgtgtccccactcctctttggtgggctattgtggatggtctagctgaaggacccgctgttaaaattgagtatagagatatagtaaaaggttggtttaaaattcagaaagcttaccc

SEQ ID NO: 16579 - DNA, 445 bp, Glycine max
  Clone ID: LIB3106-116-Q1-K1-A1
caacactgcagttgctgaggtgttctctcgcattgaccacaaatttgatctgatgtatgccaagagggcctttgttcactggtatgttggtgagggtatggaagaaggagagttctctgaagctcgtgaggatcttgctgctcttgagaaggactatgaggaggttggggctgaaggagcggaagatgatgaggaaggagaggactattcataaatgaaggttttattatcaatgtaattgtttcgagtaaaaagggtatatgcttcgttacattaccctgaaccagtattgttcgttcctttttgtttttactcctgtgtgatatagttctccattattcaaactgtgaagtgatatcatcattatgcttctattttggtggtttaggacctgttgtttgcgacctctggcatgttttcagaattggtcatgtcaaaagttgat

SEQ ID NO: 16580 - DNA, 398 bp, Glycine max
  Clone ID: LIB3106-116-Q1-K1-A10
gtgagcatgattgggcagttcggtgttgctttatactcggcttatcttgtgagctgataacgtgttgttaccacaaagcacaatgatgatgaacagtatgtctgggagtcccatgccggtggctcatttactgtgacaagagatacatctggtgagaaccttggtaggggaacaaagataactattgcttcttaaggaacatcgacttgagtatcttgaggaacgccgtctgaaggatttgataaagaagcattctgaattcattagctatccacatttctctctggattgagaagactactgaaaaggagatttctgatgatgaggatgaggaagagaagaaggatgaggagggtaaagttgaagatgtggatgaagattacgagaaggaggagaag

SEQ ID NO: 16581 - DNA, 476 bp, Glycine max
  Clone ID: LIB3106-116-Q1-K1-A12
gcgagttgttgtaaagctagccttgttgcagccatggccacccacgcggctctagcttctacaaggatccccactaacaccaagttcccatccaaggcttcacactctttcccaacccaatgcgcctcaaagagacttgaggtgacagaattctctgggctaagatccacttcatgtgtgacatatgctaacgatgctagagaatcttccttttttgatcttgtagcttcccaactcactcccaagaccaatggatcatcaactcctgtgaggggagagacagtggccaagttgaaggtggcaatcaatggtttcggacgcattggtagaaacttccttcgctgctggcacggccgaaaagactcaccccttgaggtcgttgttgtcaacgacagtggtggtgtcaagaatgcttcgcacctgcttaaatatgattccatgctgggaacctttaaagcagatgtgaaaatactgga

SEQ ID NO: 16582 - DNA, 387 bp, Glycine max
  unsure at all n locations
  Clone ID: LIB3106-116-Q1-K1-A2
ctcttacacacccaagcactactactactactttctttctagatatgggttctggtgctgtgcaactgtttctgatcttggggctcttggctagctcatgcttagcccaagccccaggtgctgcaccgtcgcaaccacccactacaaccccatcaccaccaccacccagatcagcacctgcaccagcacccaccacaccagcaaccccaccatcaaggaccgcaccaccagcagcaactgcaccaccagcagcaacttcaccaccagcagcaacacccacaccagcaccagcaccaccaacggctgcacctacacctgctcctttactgcaggctctnctccttcacctttttctacagtgacaccaagctccacctcntctaacac

SEQ ID NO: 16583 - DNA, 501 bp, Glycine max
  Clone ID: LIB3106-116-Q1-K1-A3
gtacgcctgcatgtaacgctggtacgcactgcacgtaccgatccaggcttcccgggccgacagacacgaacgctcactcaatgggctacatctttgaaagcccctcacacagaggaagccattcggggtactgagtccacagcaaactctttcataagtgaagctaggaaattcacaaacacacctgatgctcaaaaagtgcgagataatctcatctacaattacaaacctacttttggtggaacggctgggaaaggatatgatcaagtgtatctctttgaataattctatctgtaggaggtgtccttgaatttgattttatgcacaataaattatgaactggggatgtagtttgaagaaataaaaatttgtgcacagtgatgtttgtaagatgcttaatttcagggcaatgctctgcttatcaatgtgctatatcttgatattgccccaaccttggtgtattcttcattttgctataattctattaattgcacggataat

SEQ ID NO: 16584 - DNA, 423 bp, Glycine max
  Clone ID: LIB3106-116-Q1-K1-A4
cccacgcgtccgaccaaatacttctcttggcattttgtgtcccttctctctttctcttgctccatattttccaaccaaaataattattaaaaccaaacgtagctaggcaccacttctaggaatggcaagtgagatatttcttgcccttctgatcacaacctttgtggttgcagcctctgctggtaacttcaaccaagactttgagataacatggggtgatggtcgtgccaaaatcctcaatagtggggaacttctcaccttgtccctagacaagacctctggctctggatttcgttctaggaatgagtacttgtttggaaaaattgacatgcaactaaaactcgtgcctggtaactctgcaggcacagtcacagcttaataatctatcttctctttggggaatactcatgatgaattggattt

SEQ ID NO: 16585 - DNA, 442 bp, Glycine max
  Clone ID: LIB3106-116-Q1-K1-A5
acgcccacgcgttcggcggacccatggctgggtttgatatcctgagcgagccatagaaagagttgaattaatagagatacagattacgtgaaactgaaaggaaaatggcactctcagtctcctcaccctcatgcgtacgcgttccttcatgtttttggaaaccaaatggcaagagttgcaaagagcgtactaaggtttcatgtgcagctcacaatgataataagaatccgttggttggaatcggtattggggttgtaacgtcttgtgtgatgggtttaactgcattggatgcggacgccacgagaatcgaatactacgcaacagtggcagagcctttgtgtgagtacaactatgttaagtctggcctcggctactgcgatattgctgagggcttcggtgacgaagctccactgggtgagcttatcaatgttcactatactgc

SEQ ID NO: 16586 - DNA, 200 bp, Glycine max
  Clone ID: LIB3106-116-Q1-K1-A6
ctcgtcgtttgaggaacccaattctgcgtttttgctctcagcactagtgttctctctgttatctcatctctctaacccacactacaccaccgcgccgtcgtttgagtgtttgacggtgacatccctgttaaatttctctcgcggactcgccgtcactgtctcacggaggctactggagctgcttggaacagcgtccaatg

SEQ ID NO: 16587 - DNA, 285 bp, Glycine max
  Clone ID: LIB3106-116-Q1-K1-A8
cccacgcgttcgcccacgcgttcgatgatcttgaactttgtgttcgggggagtagacgactaggtgaactgctttaaggaacattatgctgaaggacgtcgagacacaacgctctgatagaatgtgacagtgggacataagtttttatattagtggcatgatgttagtctattttattttatttcactgatttaataaaatatctctgtaaattttgatggccttaattttgagccaaatatgttttaataagttttaattgataatagtgaagtgaatgtgaac

SEQ ID NO: 16588 - DNA, 496 bp, Glycine max
  Clone ID: LIB3106-115-Q1-K1-G10
cccacgcgtccgcggaactcttcagagaatttagggagaaaatgatgatcacagaagatgaaacagctcttacaacaggcaaagaacagcaaagtgaagtgatgaacggagacaaggacaatcatggaagcgaagatggcaaccccaaagagtggttgaacctgagcataggtggaacttcttcactatcaacatctggagacactgattcacaagcaagaccaccagccactgccaaagttttttcatgcaacttctgcatgaggaagttctttagctcacaagcactaggaggccatcagaacgcgcacaagagggaaaggggagctgccagaagataccaatctcagagatcgatggcaataatgggattctccatgaacacaccaactatgtttcgatcacttggtgttcagccccattcacttgtgcacaagccacgcagaggtggtggtaccatggtgacaccgggctttcatgatgcaaatgcacatgc

SEQ ID NO: 16589 - DNA, 365 bp, Glycine max
  Clone ID: LIB3106-115-Q1-K1-G11
actaccacttctgattccgaaactgtgaatcattagacattctgaaccccgaaccctatgagcagagcgagactgacaaccacgttcacgacgcgttcatgactcgcaggcgcattgctgtcatgcacctcgtctcgtctcacctgacggtttgtgaaatcctcagcgatagctaggaatcccacgaggcatgctggggcaaagggaaatggaaggatgacatgctttgagaggaattgcctgcgtacagattacagagtgattgcatttgcgtagatcgcttggctagcaccctcaagcataccggctatcaacggtaaaagtctgactggcatctactttgatagcattgctgctgagcttgc

SEQ ID NO: 16590 - DNA, 296 bp, Glycine max
  Clone ID: LIB3106-115-Q1-K1-G12
ctgacgcgtgggaaaaaatataagttacaaggaaattatcatgaatccaattattaatagctgctgctgatattgcatgctgagaaggccgaaaggcatagcttctattggacctgagagtagatcaaagcactgatggggggcaagctgtttaaaggattgcacgacaaccggatgcacagggaaaaatacgaggtactttattgcttagtatggcttttaaggaagctctaacactccatggactggttgtagcattagcacttatatccgctaatccttttgggaatcctaaa

SEQ ID NO: 16591 - DNA, 422 bp, Glycine max
  unsure at all n locations
  Clone ID: LIB3106-115-Q1-K1-G2
tcttcattttacaacgtcgtcaacgcttaggagttaggacagtgaatttctcaaacctcagctgtcgttataaaatccagcacttcccttctcagtttcgttcggttctgttctattctctgaacaatggcgtctctctctcacctcaacaaactcctctgcatgcccccgctcaactcttcaccctctatttcgccaccacgcagcagcgtcggaatttggaccaaaccctctctctcccccaactctccacactctcctccgccaccttccgccgncgaacgcaccctctcctccgcccgacgatggacccgcaaccgccggaaccttccgcgcccgccgcctcggcggaggacttcgtccacgtcacggatctgaagatggagagcctctccgagagcatggttcgaatcgacgagcct

SEQ ID NO: 16592 - DNA, 500 bp, Glycine max
  Clone ID: LIB3106-115-Q1-K1-G3
cccacgcgtccggggttagatatatagaaaaacaaaggagaaaagatagaaatggagaactttccagtggttgacatgggaaacctgaataatgaagagagatcagcaaccatggagataatcaaagatgcctgtgagaactggggtttctttgagttggtgaaccatgggatatccatagagttgatgatggacaccgtggagaggatgacaaaagagcactacaaaaagtgtatggagcaaaggttccaagaaatggtagcaagcaaaggcttggagtctgctcaatctgaaatcaatgatttggactgggaaagcactttctttttgcgccatcttcctgtctctaacatctcagagatccctgatcttgatgaagattacaggaaggtaatgaaggattttgccgtggaactggagaaactggcggagctagttcttgagttgctgtgtgagaatcttgggctagagaaagggtatctgaagaaggttgtctgtgg

SEQ ID NO: 16593 - DNA, 330 bp, Glycine max
  Clone ID: LIB3106-115-Q1-K1-G4
ctcttcaaattttgttcgttcaggtcaaagaaagtgtcactgttgttaccatggccgaggaagttccaaagacaagcacaactccagaggaggtggtggtctctgacgtggcacctgctgacgagaaaccagacaccaccaccgacgttgttgttcccgtagagaaagacgcacaacatgaacaagaaacctcgccagagaaggagaaagagaacgttcccgaaacagctgaaaccgagtccgaggttgtttcaaaaccaagcggtgacgacaacgttcctgaatccggttctttcaaggaggaaagcaccattgtttccgacctacctg

SEQ ID NO: 16594 - DNA, 460 bp, Glycine max
  Clone ID: LIB3106-115-Q1-K1-G6
ttcatctctgcagctgagctccgccatgtcatgacaaatcttggggagaagctgacggacgaggaggtggatgagatgatccgtgaggccgatgttgacggtgatggacagatcaactatgaggagtttgtcaaagtcatgatggccaagtgaggaccattccaaccataacctaaatttgaaaagcatataaagagaagagggacagggcagataagttttgatgagaattctattcccattaggtccatcttgatttggggttattaggttttgttagttgagtgtctatttttcttgtttgctttaattgctactacttctctgctccctagttatcctacttgtttgctctgtcccttgtttttagtagcttcggtagctgtgtctcaccatgctttgttactctccgttttcatcttcttttggttattattattattattatgaacctagaaca

SEQ ID NO: 16595 - DNA, 341 bp, Glycine max
  Clone ID: LIB3106-115-Q1-K1-G7
cccacgcgtccggtctttcttggaactttgttactctcacacatgtctcgctccgtgcctttggtttcaaccatttttgtcttgcttctgcttctggtggccactgagatgatggggccaacaatggtggcagaagcaagaacttgtgagtctcagagccaccgtttcaaggggccatgtttgagtgacaccaactgtggctctgtttgccgaaccgaacgtttcactggaggacactgccgtggcttccgtcgcagatgcttctgcaccaaacattgttaattttaaaaaattaattaagagtgctttgatagaagatgatagatctatcatctttctac

SEQ ID NO: 16596 - DNA, 492 bp, Glycine max
  unsure at all n locations
  Clone ID: LIB3106-115-Q1-K1-G8
tgatgctcttgtgcgagggctagagaaatttggtggaagaatttctcttcaaagtcatgtggaaaacattgttgttgaaaatgacagagccattggagtcaagctgggaagtggtcaattcatacgtgctaaaaaggctgttgtcagcaatgcatcgatgtgggacactttaaaattgctacccaaagaagttgttccaaagtcctactcagatagggttaacacgactcctcaatgtgattcattcatgcatctccatttgggatttgatgctgagggtatacgcagtgatctgggaattcatcatatagttgtaaatgactggaaaagaggagttgatgccgaccagaatgttgtgttgatatcaatacctagtgtacttagtcctaatctggcaccgcacgggaaacacgtgttacatgcttatatgccaggaactganaccattgagttgtgggaaggacttgatcgtaggagtgctgaatacagaaa

SEQ ID NO: 16597 - DNA, 488 bp, Glycine max
  Clone ID: LIB3106-115-Q1-K1-G9
actagttctagatctcgtgcatgtgtggatctctatcataaaggaactattattgaaatttacagaatgagtcgcaacaaaatgcagagaccttggcgtgtggatgattttgatgcctttaaacaaagaatgttaggaactggggacaagaaaccacccccacatagaagagctttactttttgtggacaatgcaggtgctgacattgttcttgggatgcttcccctggcacgagagctcctccgccgtggaactgaagtggtcctggttgcaaactcccttcctgctttgaatgatgtgaccgcaatggagctccctgacattgttgctgaggctgccaagcactgtgacattcttaggcgagctgctgaatctggtggcttgctggtggatgcaatgactaataccttggacagtcctagagaaaattcttcttctgttcccttgatggttgttgagaatgggtgtggtagtccatgtatagactt

SEQ ID NO: 16598 - DNA, 116 bp, Glycine max
  unsure at all n locations
  Clone ID: LIB3106-115-Q1-K1-H1
tcggctgtgtgtcaacaagtcatgtaagagacttcactatgttgatttctctntcgtggctataataaattatgcgccctttgtccataaaacaggaagaccttaatgatgcaaaa

SEQ ID NO: 16599 - DNA, 188 bp, Glycine max
  Clone ID: LIB3106-115-Q1-K1-H11
gataaaccgaacagcactaacgcggatgatgtctttaaccttcgggttcaatatcaatgagaccctgcgtgcacctgtacgagaccttcggggcgaaatggatggtaaccaactacacaaaccggcaatgtccttgaaggttactcatgcaagagcccaccatgagtcacggtggacatactactaga

SEQ ID NO: 16600 - DNA, 496 bp, Glycine max
  Clone ID: LIB3106-115-Q1-K1-H12
cccacgcgtccggagagagagaatggcagcacttggtggcaatcgtgatgtggcaggaagccagaacagccttgagatcgatggtttagctcgctttgctgttgaagaacacaacaaaaaacagaatgcccttttggagtttgaaaaggtagtaagtgcaaaacagcaagtggtttctggtaccttgtacaccatcactttggaggcaaaagatggtgggcaaaagaaggtttatgaagccaaagtttgggagaaggcatggttgaacttcaaggaagtgcaagagttcaagcttgttggagatgcacctgcatagtctagtgcttaattaggttgcagaagagtgaagagtgagacagcctggctcgaaggggaaagcctaaggatatatcaaagcatgctatatgtataaaataaatgtagcttttctaccttcggtattgatatttgaaatcgtgatttggcatcttatatatgatctctgtgtttgtctaaa

SEQ ID NO: 16601 - DNA, 414 bp, Glycine max
  Clone ID: LIB3106-115-Q1-K1-G1
tcttctttctgtatccgtaacacttgcaacacacatggctacaatcaccaacactttcatattcaaacgccccatctctcatcacccaaagcagcttctttattcccaccgctcttctctacgctttctcaccaaatttaaaaccccctccggagcgaattctcggcggctggttccgaaagccacggcggctcccggggccaagaagacagaaaagccgcacgagagagtccagcgagtccacagcgtggaggagttcgagtcggcgctcgaatccgccaaagacaggcttgtggtggtggaatacgctgccagcgacagcgaggagagcagccagatatcccctttcatggtggagctgagccgcagctgcaacgacgtggagttcatcctggtgatgggcgacgagtcgga

SEQ ID NO: 16602 - DNA, 497 bp, Glycine max
  Clone ID: LIB3106-115-Q1-K1-E8
ttctggttgcaaccctcaaaaaccctcttggaacgaggctttcacttcttcggatcgaaactccgacgcatgcagaggcgaaacgcgatcgttcctgcgcggaatcgacgtgaaccggttaccttccgccgtggacaccgaggaggaaacgggagtttcgtctccgaacagcaccgtctctagcgtgagtggaaaacgtagcgagagagaagaaccgaacggcgaagaacacgacatggacagagcctgttcccgcggaatcagcgacgaggaagacgctgaaaccgcaaggaaaaaacttagactctccaaagaccaatccgctatactcgaagaaagcttcaaagaacacaacaccctcaaccccaagcaaaaattggcactggcgaaacagctaggacttcgacctagacaagtggaggtgtggttccagaacagaagagcaaggactaagctgaagcaaaccgaggtggactgcgaagtattgaaaaggtgct

SEQ ID NO: 16603 - DNA, 445 bp, Glycine max
  Clone ID: LIB3106-115-Q1-K1-E9
aaacactaaattataaccatcatgggtgatgttctaagccccttcaccatctcatcccctcctccagcctcctctccatcaaccaagagcaacagcatgcccatgttgtactacggtctcgtggtggtcggaaccgccgccatagtactagccatatacaacctcgtcctcctaagacggagccacacgcgccatgcgctgccgtcgcaaagtactgggcaaaatagagatattgtacgagtgcccgagatgagaacgaggagcttcgaggacagccaacaaaggaacttgttgtcgagcttcaagtacaagaaagaagttgtggccaaagaagaagaacaagaagaagaagagcaagatgatgatgaatttgagtgctccgtttgcttatcggtttatgaagaaggtgaagaggtgaggaagcttccacagtgcaagcactatt

SEQ ID NO: 16604 - DNA, 431 bp, Glycine max
  Clone ID: LIB3106-115-Q1-K1-F10
acagatatacaacatggctatatctacattagaaagaatggccttagtctcgaaaaggattaccctgaccgtggcgacaagggtaaacgggactcacataagaaaaatgctatcgttactattgatggccacagatgggttcctacccaacttgaggaagcctttaaacagggcattgcaaatcatccagtggccgttcctatttcagcatactactatgaatttcaatattatacatcacgtgtattcaaagggatatgctgttcaaaattaaatcatgctctcctgcttgaggcgtatggttcaaaaaaagatttagattatttgatagccaagaatttatatcatgacaaatggggtgagaatgtgtatatcagaatacaaagaaaactgatcactttgtaaattggaaactggggttactatcccat

SEQ ID NO: 16605 - DNA, 471 bp, Glycine max
  Clone ID: LIB3106-115-Q1-K1-F11
acgacatatggttactagaacttgcagcagcagcggttctactacgaatgcttcttgctcgcttcactgcttagatggatgagagctgtcatcgacacaggtggagatcgtgggggtaggacctttaacagtggtgccatgtcctgaggaaagttctctagggctgtcgacacactcgatcacaatctttgcgctgagtctcacagcgtgtctgtcgggaacagagctggatttgatatcttcatgactccaagaggatccgaagagtataagcatatgtcatgtcacatcatacttgccaagggacagaactacttcatcagcaattatgttggtctctgctagtctaggatgaaaattgtcattaacgctgcctgagtttaataatatggttaacttgccatacatattgcattgtaatgcagatttgacccattattgcgaagttaagctcccttaaatagtgcctat

SEQ ID NO: 16606 - DNA, 493 bp, Glycine max
  Clone ID: LIB3106-115-Q1-K1-F12
gcagtatatcgtacataacggggtcgcagcttctctctctcagacgccatccaagcatcgccgtcgtcgatgtaagggacgatgagaggagctacgacggacacatatcggggtctcttcattacgcaagcgacactttctccgataacatctcaaatctcattcaggcagttaaaggcaaagacactctcgtcttccactgcgctctaagtcaggttcgtggcccaacttgtgctaggaggcttgtcaattatcttgaggagaacaaggaagatactgggataaagaacattatggtcttggaacgtggcttcaatgggtgggaagcttctggtagacccgtttgccgctgcaccaatattccttgcaaaggagagttgtctccttaatcaaagacgtatttgtggttggatggaattatggaagcatatcatctttcgtgtgatatgtgcacgcatttgtatacaaaatgtcaaaaacagtaggatgacca

SEQ ID NO: 16607 - DNA, 489 bp, Glycine max
  unsure at all n locations
  Clone ID: LIB3106-115-Q1-K1-F2
ccgtgaactctgaagatctctattctctttccctcacctttccactcaaattcccctttccactttcccgagaaaattaactttttccgtcaattttccctccacctcttccttcttcctcacaatggctctgagcttcaacaatcgaagaatccctctcgctcttcgcattttccttctgttctccttattcttcagcctctcaccgaccttcgctcaggattctctcgttcagaacgcgaaggaagattccggcggatctgtggatctcggtcgccgcgccaaaattgcattgaatgacatagagaatgattcgatcctttctcttggcttggactccaccggtcctggactcttcgacgcatttttcgcgagtttttcgatgatccttgtcagtgagattggngatgagacgtttataatagcagctcttatggctatgcgtcaccctaagtcaactngcttgtctggtgctctcagtgctctgat

SEQ ID NO: 16608 - DNA, 311 bp, Glycine max
  Clone ID: LIB3106-115-Q1-K1-F3
atgatcacagcatcggatcctcaaataatcagcataaaaatatatgctaccctttttacagcttgtgcatcaatctgttactttttcttttctacttttgaatcaatttaagcattttcttattcaatcctgaacggaaaatggagaatataaactcatatttggttaataagtaccattcgagtttgatccttgacgaaaaaaaaagacctaaactaaaggcactcttaatcaaaactcgaacgaacactttacgctgtcatagggaactctattgaacaatcaaaaattctattgaattgcattggaca

SEQ ID NO: 16609 - DNA, 505 bp, Glycine max
  Clone ID: LIB3106-115-Q1-K1-F4
atctctctgtatattcaaatacacagtatactatcacattcgcttcggtacttctctcttcattgtcgcagacacaaagcagcactaaaggaagcccttcactacgccgattaagcatgtcaggcagaaaagaaacggttttggaccttgcaaagtttgtagacaaaggcgttcaagttaagcttactggtggaagacaagtgacagggactctgaaagggtatgatcaattgcttaaccttgtcctagatgaagctgtagagtttttaagagatcctgatgatcctctcaaaactactgaccagaccagaaatcttggcttaattgtttgtagaggaactgctgtgatgcttgtgtcctcaactgatggtacagatgacatcgccaacccctttatgcagccagatgggtcctaagtgtgaagtacttggatcttaaagtctgaatgctagctgatcaatacgtcatccgttagctactgagacattaatgcggggatactgat

SEQ ID NO: 16610 - DNA, 501 bp, Glycine max
  Clone ID: LIB3106-115-Q1-K1-F5
aacaaatcaaagccatggccacctccaacttctctattgttctctccgtctccctagccttctttttggtgctacttaccaaggcacactcgaccgataccgtttctttcaccttcaacaagttcaacccagtccaaccaaacattatgctccaaaaagatgctagtatttcatcctctggggtgttacaactcaccaaagttggcagcaacggcgtgcccacctcgggatctctcggtcgtgccctttacgctgccccaatccagatttgggacagcgaaaccggcaaggtagccagctgggctacatcctttaaattcaacattttcgcacccaacaaatcaaactcagctgacgggcttgccttcttcttggcacccgtcgggtctcagccccaatccgacgatggatttcttggtcttttcaacagtcccttaaaggacacgtctcttcaaaccgtggcgaatgagttcgatactttctcgaacaaaaatgggatcc

SEQ ID NO: 16611 - DNA, 502 bp, Glycine max
  Clone ID: LIB3106-115-Q1-K1-F6
cttggcagtacacaaatctgtcatatcttgctgctcgatcgttacgatgatggcgctcaattcattgtcaccactttcaattaattctcttcacgtatcttcaagctcaacttcaaagatttcgcattctcattccaagtcctttcccgtcgttgtgtgccaaattaactcaaacagagatcatcgtcaagaatccacaaaatggggaaaagtggtttcggccacgttggcggctgctgttattgccttcagctctgacatgtctgcccttgctgatctcaacaaatttgaggctgaaatgaggggtgaatttggaataggatcggctgcgcagtttggctctgctgacctcaggaaagcggtgcatgtcaatgaaaatttcagaagagccaatttcacagctgctgatatgagagaatctgattttagtggttcaactttcaatggtgcataccttgagaaagctgttgcatacaaggcaaacttttcaggtgctgattta

SEQ ID NO: 16612 - DNA, 422 bp, Glycine max
  Clone ID: LIB3106-115-Q1-K1-F7
agaatccttaacagaacatgttgcatggatggcctccactctctctatatcctctttatccacccttggtgatgccaagcctccaactccaagacaatgcgtcacccttcccactctgacccctccaccttttcactctcagactcgtgcttggaagaccactgctttctgtcataggcttgctcgcaattttatggcaatggccaccacaagagaggcagccgcagcagaagttgccgccacaactgacctctctattgccgagacgccagagattgtgaagactattcaagaagcttgggacaaagttgaagataaatatgcagtgagttcactggccgttgctggtgtggttgcattcgtgggctcagctgggatgatctcagcaattgataggctaactttaattcctgggcttcttg

SEQ ID NO: 16613 - DNA, 458 bp, Glycine max
  Clone ID: LIB3106-115-Q1-K1-F8
atcttatagcttccatttcttctctcctattccctcctagttccaattcttcaccctagtctaaaaataatgtcattcacttccaaggtcattgctctgtggtgcaagaaacatgggaatgatgatggtgtcgatgtgtatgatgctcctgctgccactgcttgcattgaaggaaatgtttgcaattggcatggagattttgtaagttttgtcccagttgcattggtggagggtgacgatgacgacgatgacggaggttatgactacgctcccgcagcatatactataaatgtttggttaccttgtatactatccaacttgtagtgaccgacatattagaatgtctgcttctattcttaatttttagtttggcgccaattgaaagcgattaagctacaaaattatgtgcgaggtgactttatgttgatgtgtatgcatgcactatcaattatttagca

SEQ ID NO: 16614 - DNA, 468 bp, Glycine max
  Clone ID: LIB3106-115-Q1-K1-F9
acgtaaagttgagaagggccactcgcttggtagaatttcttgcattttattattttgaaatttgaagctgaaggcaccattttgagacagacacaacacagatctgtcttgaacttctctgtgttctgaaacagcatcaatgacaaaaaccatgactatgtggcttctgttggtctctctttccttcatttatgctgttgccactgctaatactcaaatcaaaattactaacaaccctgcggacaagttggtagctgcaatcaacgaaaacagaactgctcacaaggtatcagccttaaccgacaacccggagcttgcgtgtattgctctacaatacattaaggcataccagggtgaatgtgatgctgtgggaggatctgatggcaagaaacctcctgagtctcactttgctgaagtttttgccccaaactgtggtgttgaggcatcaactcttgctcctataactgg

SEQ ID NO: 16615 - DNA, 478 bp, Glycine max
  Clone ID: LIB3106-115-Q1-K1-E7
cacacgttcttgtatatgtatgcctaactgttcctttggggatgatgtccttcttcaaataccgctcggccttcaagaatccaccacttccaccaggtcctagaggccttcccataatagggaatcttcatcaactagatagtccttctcttcatgagcagctatggcatctctcacagaaatatggtcctttattttaccttcaatttggattaaggccagccatagttgcttcctgtgcaaacattggccatagaggtcatgaaagacaatgaccttgactgctgtggacgacctaaattactaggccaacagaaactaacctataatgggttagacatgggattttcctcatacgatagttattggagagaaatcagataaatttgtgttgtccatgtccttagctccaaacgtgtccaaagctttgacctaataagacattttgaggtcaagcagatgattaaaaaaatatcta

SEQ ID NO: 16616 - DNA, 467 bp, Glycine max
  Clone ID: LIB3106-115-Q1-K1-D3
cccacgcgtgcgcccacgcgtccgctggattccagctagcaaccttgaaagtgcaactgcaaaagagaatcctgatgcttttaaggcatcatggacgttattaaagggtgcacatggtgttcttgttcctggaggctttggagatagacgagtgcaaggaaaaattattgcagccaaatatgcccctgaaaacaggattccattccttggcatttgtcttggaatgcagattgctgtcatagagtttgcacgatctgctcttggtgtacaagatgctaacagcactgaatttgagccccataccaaaagtccatacatgatatttatgcctgagggatcaaagacacatatgggaggcaccatgcgccttgcatctaggacgacatatttgcagaccaaggaatgcacatctgcataattatatggctgcaaaagcttcattgatgagagacatcggcatagatatg

SEQ ID NO: 16617 - DNA, 474 bp, Glycine max
  Clone ID: LIB3106-115-Q1-K1-D4
gctctgtatgcctcactcagtttgaacccgaatcagagataaaccgcttatcgtgcggtcatctcttccacaaagtgtgcttggagaagtggctggactactggaacattacatgcccactttgccggactcccttgatgcccgaagatgacacaccttgctttcagtaagcaaaacaagtgagcatgccaataagagagagtttcatgtacagtgtagtgtacatattcttgagggtttttgatgttcatgcatctgagttctgccacctttttaagttttaacctttttgccttgtatggtctagagtttgtggagggttttgctttcccttcttctgtctgtgctctttagcacaaatgaggcgtatactttttgcttgcatgttatgattgcttacaatgcccacctttgttggactctagagtcctaattctatatttgggcattttgatcctaatttggaagcatgga

SEQ ID NO: 16618 - DNA, 272 bp, Glycine max
  Clone ID: LIB3106-115-Q1-K1-D5
acgccacgcgtccgtccacgcgtccgctggattccagctagcaaccttgaaagtgcaactgcaaaagagagggcagatgcttttaaggcagcatgggaacgttattaagagggttgcagaatcggtgttcattgtccctggagggcttcgcagataaatgactgcaagaaaaatttttggccgccaattatgcccgtaaaaacagtattccatcccttggaattaatcttggcatgcatattgctgcatagaatttgcaccatcctgtcttg

SEQ ID NO: 16619 - DNA, 483 bp, Glycine max
  unsure at all n locations
  Clone ID: LIB3106-115-Q1-K1-D6
ctcgtagcacacactcacacactcagatctctcttctctttctgcaattccattgttgttctcttcactctcacaatgcgaatcctcgttgtgctctctctcgccaccctcctcctcttctcctccctctttctcaccctctgcgacgacctcaccgacgacgaggacctcggcttcctcgacgagccctccgccgcgccggagcacggccactaccacgacgatgacgccaatttcggcgacttcgaggaggacccggaggcgtacaagcagcccgaggtggacgagaaggacgtcgtcattttgaaggagaagaacttcaccgacaccgtcaagagcaaccgcttcgtaatggtcgagttctacgcgccctggtgcggccactgccaggccctcgcccncgaatacgccgncgtcgcaacggagctcaagggcgaagacgtaattttggcgaaagtggatgccacggaagagaatgaattg

SEQ ID NO: 16620 - DNA, 255 bp, Glycine max
  Clone ID: LIB3106-115-Q1-K1-D7
ctcgtagcacacactcacacactcagatctctcttctctttctgcaattccattgttgttctgggcactctcacaatgcgaatcctggctgtgctctctctcgccaccctcctcctctgctcctgcctctttctcaccctctgcgacgacctcaccgactactaggacctcggcttcctcgacgagccctacgccgtgcctgagcacgggcactaccacgacgatgacgccaatttcggcgacttcaaggaggac

SEQ ID NO: 16621 - DNA, 448 bp, Glycine max
  unsure at all n locations
  Clone ID: LIB3106-115-Q1-K1-D8
agaagggctacacaaacacaatctctaatggcactcaggatgtgggcttcttccactgccaatgcactgaaactctcttctgtctccagacctcatctcttgcctcctttttctttctccagatgcttatcttccgtcttggatggacttaagtacgctgattcacatgaatgggtcaagcacgaaggctcagtcgccaccattggtatcactgaccatgcccaggaccatcttggagaggttgtgtatgtggagctgccagaaccaggtggcacagtttccaagaagtctggcttcggagccgttgaaagtgttaaagcaacaagtgatataaactctccaatctcggnggagatcgttgaggttaacaaaaagctcacagaaacgcctggcctggtgatcaattctaacccttaccctatatctctgtactatatatatatatttg

SEQ ID NO: 16622 - DNA, 471 bp, Glycine max
  Clone ID: LIB3106-115-Q1-K1-D9
gcattggcagctaatgctactccctctctggccttcgcttcttcctccttactgaaccacaatccccaatttggtgctgctcccaaacgattcgtttcttcttcttcttcttctttgtgccttgccgcggggctcagctccaaggctagggccttcagtttctctgcctcggctgcggcccttgacggagaagaactcgcggtggaagaaacgtgtaatctagcgagaccaaccgaagtgtacgtctgcaaccttccacgaagctgtgacactgagcaactacttcatatgttcaacccttacggaaccgttctctctgcccaggtttgccggagtgcggaaactggtgaaagtagagggagtgcttatgtcacaatggcttctattaactcggcaagaaaagcaattgctgcattggatgcatcggagtttggtgggcgtgaagtgcgggttagattttcagctgagatg

SEQ ID NO: 16623 - DNA, 464 bp, Glycine max
  unsure at all n locations
  Clone ID: LIB3106-115-Q1-K1-E10
cccacgcgtccggttcctccgctcaacaactataataacatctttctctctccgaacagatcacactatggccacctcaagcgccaaatcagtccatgatttcaccgttaaagatgccaagggaaatgatattaatcttggtgactacaaaggaaaggtccttatcattgtcaatgttgcctcacaatgtggcttgactaattcaaattacactgagctcagtcagttgtatgagaaatacaaacagaaaggtctggaaattctggcatttccatgcaatcagtttggggcacaggagcctggatctaatgaacagatacaagagttngtttgtactcgcttcaaggcttgattttcccgttttggacaagttgatggtaattgggaacaaagttgttcactgtacaagtatctaaaatcaagccaaagtggactctttggggatggtatcaaatggaacttct

SEQ ID NO: 16624 - DNA, 105 bp, Glycine max
  Clone ID: LIB3106-115-Q1-K1-E11
agatatttggccgtcctctatttttccacgtggttctcgtatacttgtccatgttaagacagattccagtaatgacgtttcggtggtttatcgaaactaatggtt

SEQ ID NO: 16625 - DNA, 302 bp, Glycine max
  Clone ID: LIB3106-115-Q1-K1-E12
gtttattagaccactacttaatggtacaatgagatagtatagccagtgaatatagttagcagcttgtgatgtatatatatgcgttactgatgcccaacaaggttctatatatgctatatcaagctatacatgcacacacatgtatacataatgcaacactttactgcacatgctacttcataatgttaacccgctgtatgcttgatcccattcaatataatttctttactattaggcctgatttgctgtagtacgttgatgcttctagttataatatcttccacagaaaattgttgtaaaac

SEQ ID NO: 16626 - DNA, 410 bp, Glycine max
  unsure at all n locations
  Clone ID: LIB3106-115-Q1-K1-E2
ctccgcctttctcttctcaaatcaaatcaatgagcatggcttctctccccaattcccccgctctttcatgctgctcatctctctgcaccaccggcaatctcctcccatgtcgccgcttcaccgcattcccccgccggcgcgcctcttcattctccgtgcaagctaagatccgcgaaatcttcatgcccgcactcagcttcaccatgaccgacggcaaaatcgtctcctggatcaaatccgagggcgacatgctctccaagggcgacagcgttgtcgtcgtcgaatccgacaaggccgacatggacgtcgagaccttctacgatggcatcctcgctgccatcgtcgtcgccgacggcgaaactgcccncgtcggagcccccatcggtttgctcgccgattctaccgaagaa

SEQ ID NO: 16627 - DNA, 402 bp, Glycine max
  Clone ID: LIB3106-115-Q1-K1-E3
aaaagactatctcttatgaaatcaaactcaaatgagcatggcttctctaccaattcccccgctctatcaggctgcgtatctctctgcaccaccgccaatctcctcccatgtcgccgcttcaccgcattcccccgccggcgcgcctgttcattctccgtgcaagctaagatccgcgaaatcttcatgcccgcactcagctacaccatgaccgacggcaacatcgtctcctgcatcaaatccgagggcgacatgctctacaagggcgacagcgttgtcgtcgtcgaatccgacaaggccgacatggacgtacagaccttctacgatggcatcctcgctgccatcgacgtcgccgacggcgaaactgcccccgtcggagcccacatcggttagctcgccgattct

SEQ ID NO: 16628 - DNA, 478 bp, Glycine max
  Clone ID: LIB3106-115-Q1-K1-E4
cccacgcgtccgcccacgcgtccgcccacgcgtccgcccacgcgttcgcccacgcgtccgcatcaaccgactctgacccttggattggagtgtcgcttcgtttgggcgccaaaggcgtttctagtcacacagaagaaaaagacttactcaagaagcttcgagaaaatgtctggaaaagcgaagaggagagatgacgacggtgcttccgacgccgactctgaaggccacgcgccagccaagaagtccctcaagaaggattccgatgacgatcccgactctattaccgtttgcgagatttcgaagaacaggagggttgccgtgaggaactggaaaggcagcattatggttgacattcgcgagttttacgtcaaagatggcaagcaattgcctggcagaaaaggtatctctttgaccatggatcagtggaatgtgcttcgtaatcatgttgaagacattgacaaggcaattaatgagaatt

SEQ ID NO: 16629 - DNA, 308 bp, Glycine max
  Clone ID: LIB3106-115-Q1-K1-E5
cggacgcgtgggttcaggaagcggttcaatcaagggcagctcttgtgcaatttcatgccctggcattgctgcaccagatacggcagaatgaccgactagctgttagcaagctggttaccagcttaaccaggggaaatgttcgctctcctttggcccaatgccttttgatccgttatacaagtcaggtaacttcgggaagtcagggaattattccacaatcaggggaccgtcccttctatgattatcttgagagtggctttggtaacaggtaaaagatggtaatttttgaagctgcaagggcaattccg

SEQ ID NO: 16630 - DNA, 469 bp, Glycine max
  Clone ID: LIB3106-115-Q1-K1-E6
cccacgcgtccgtccacgcgtccgcccacgcgtccggagggatcaggttcaccatcaatggtcactcgtacttcaacttggttctcatcacaaatgttggtggagctggagatgttcattctgtgtccatcaaagggtctagaactgggtggcaaaccatgtctagaaactgggggcagaattggcaaagcaactcctacctgaatggccaaagcctatcttttcaggtcactacaagtgatggcaggactctcactagcaacaacattgtgcctgctaactggcaatttggacaaacatttgaaggggcacagttctaggaaccttaatgatttttaagtacacattaatttgcgtgtaatatatgatggcattgttcactagtttttgatatagttggaaagggtcgcgaaagagaagaaacgaatgtagattaagaagagtttctggccaacatggcccctaatgc

SEQ ID NO: 16631 - DNA, 423 bp, Glycine max
  Clone ID: LIB3106-115-Q1-K1-D2
gttaggcttgctgtggctacttgaaaatctcgaatcgcttaattatgatttagtggtccaccgaagcgcggaacctgtgtctcgaactgggtaactctcacgcaagaggctcggacgctgattgcagcaacacgcggctggtggttgcactgtatgacgccctaaactccggcgactccaacgccgacgtcgagatcgtcgccgtctacctcgaatggtggcttcatggtccggcctgtcaccagtgcatgatgcgcatgctgaccggcgactgcggcgtcgacaactgcttacgattcgttccgtagtgcataggcggcttgggctacaccaggatcgacgagggctgcgactacggccgaaacataggctgggtgcacgactggatcgtcactgatgggatgatcactcacatcagagagt

SEQ ID NO: 16632 - DNA, 181 bp, Glycine max
  Clone ID: LIB3106-115-Q1-K1-C1
atcgcgagcgggcgcccttttttttttttcttctttctgcatatttatgatattatccttttattatgttattgggttctattttatattccctaaaatattagatgttacacacgtgtatgattatcatctaatgtaaggcttgcacctattgaggtatcactgaaaaaaaaataattca

SEQ ID NO: 16633 - DNA, 489 bp, Glycine max
  Clone ID: LIB3106-115-Q1-K1-C10
cggacgcgtgggtgcggggcaaggaagatccatgtagtcacatggttattcgaggcaaagccatggctggacatattgaagacctttatgacttggttaattctgttcttcaagatgtccaatttacagatcaacagcgtttcaaacaatttgtttcccagagtagagcaagaatggagaaccggttaagaggaagtggtcacggaattgcagctgcaaggatggatgcaaaactaaatgcagcaggttggatgtcagaaaagatgggaggtctcagttaccttgaattcctccgaacacttgaagagagagttgatcaagattgggccgatatctcatcatctcttgaggagatccgcaaatctatattttccaagcaaggctgcttgataaatgtcactgctgataggaaaaaccttgcaaagacagaaaaagttctgagcaaactttgtgatctgcttcctactagctctcccattgcaacaacta

SEQ ID NO: 16634 - DNA, 205 bp, Glycine max
  Clone ID: LIB3106-115-Q1-K1-C11
aatacacgtcgcatgcggtcgagctatgtgtacgttcatagctgaaacctcaactcgtcgacataggggcatagattgaacaacttttggatgaacgtcaacatcatcagctacatgagcactagtgaccttttcagctgtggaaaggcttggcatgccaaagtacttagccaatggagacccatcttgcacgtagtggatgcgt

SEQ ID NO: 16635 - DNA, 327 bp, Glycine max
  Clone ID: LIB3106-115-Q1-K1-C12
gttcaagccgggccaactaaaatgattatagaaaatagtaggctttctggtgggagcagcactcctgaagccttagttactcatggaaaatatcctagtttgtgggatggtcaacttgggtagttatggtcccaaactctcaattttccaagttgtggcataaattctattgcaccttttaacaagctttgcttgttccagtgtgttttattatgatttgtgatttatacgaccttgcgtttgagtgccattttagtcgtcttatcccttactagttgaatttgtaactgtttgtgttatcagacaaaaaatggggtttcttcactt

SEQ ID NO: 16636 - DNA, 472 bp, Glycine max
  unsure at all n locations
  Clone ID: LIB3106-115-Q1-K1-C2
gacttaacaacagcacaaagcgggttactgtctgttcaagctaccatctctctctctctttcttagtgcctccttgccagaagttaaaatggcccaagaaactttcctattcacatctgaatcagtgaacgaggggcaccctgacaagctctgtgaccagatctccgatgctgtgctcgatgcatgcttggagcaggaccctgacagcaaggttgcctgtgaaacctgcaccaagaccaacatggtgatggttttcggagagatcacaaccaaggccaacgtggactatgagaagattgtgcgtgacacatgcaggaacattggttttgtctctgatgatgttggtcttgatgctgacaactgcaaggtcctcgtcaacattgagcaacagagtcctgatattgctcaaggtgtgcacggncaccttacaaagaggcctgangagattggtgctggtgaccaaggtcatatg

SEQ ID NO: 16637 - DNA, 309 bp, Glycine max
  Clone ID: LIB3106-115-Q1-K1-C3
ctctgagatagagctacagcaccattatcattcatctccattactttcctattcgatcctcgatccctgtcccacatagaagattcatcaccccaaaacccaattttttttaataatacaactgcaattatttttattttctcagtaaaaaaaaaaaaaaaaagagaaatgagttcgattcatttgttaaacactcttgctgttccgcttcgttctttttctcctccgtcgctctttccgcaatgccattctcctttccgttcttcttccgctgttccaaaacggcgtcgtttctctaactcctctggg

SEQ ID NO: 16638 - DNA, 507 bp, Glycine max
  unsure at all n locations
  Clone ID: LIB3106-115-Q1-K1-C4
acgcccacgcgtacgagcacgcgcacttcctttggagtctctgcctgaagatggcaagccttcagttaacaacaacacccttcactcttttgagacaacaaaggcagcaccccacaaagaagaagtccactgcttctcagctgaaccctcctcggccacgtcccctcagagtgagtgtgaggtcctataaagtggtgattgagcacgatggagagtccactgacgtggaggttgaacctgacgagaccattctgtcaaaggcattggactctggcttgtctgtgcctcatgattgcaagcttggagtctgcatgacatgccctgctcgcctcattagtggatctgttgatcagagtgatggaatgctaagtgatgatgttgtggagcgtggctatgcactctngtgtgcagcctaccctcaatccgattgtcatattaagattatccccgaggatgagctattgnctttgcagttagccacagccaatgactagtcagcttttgagt

SEQ ID NO: 16639 - DNA, 211 bp, Glycine max
  Clone ID: LIB3106-115-Q1-K1-C5
aattccagccacgacgtcacgcgtccgatcacgcgtccgttcactctatcaatcatctccttttccactctattgactcctctatcccggtactggctataagcattatcaccccaaaacccaattttttttactaatacaactgctcttattttgatcttctccatgaagccacgtcagcagcgcgatacgaataccgttcatttgttca

SEQ ID NO: 16640 - DNA, 462 bp, Glycine max
  Clone ID: LIB3106-115-Q1-K1-C6
cccacgcgtccgcttgtcctcagctcctccttgttcgaggtgtcaatggctggttctgctttctgttgctccaagtgctcgaagaggtgttctagagctgggatgaaggacaggtgcatgaagttctgcgggatttgctgcagcaagtgcaactgtgtgccatctgggacttatgggaacaagcatgagtgcccttgctacagagacatgaagaactccaagggcaaggccaaatgcccttgattatttttgtttttcaccatccacacatcaacttcaagcctttgattcagtcactaccgtgcatgtatatctgcaccttagagatattccaccatggacccttgctagctgattatgtttactacctttattgttgtgtttgtgtattacataaagagaaaaatttgggcactttagttggatcggatatgcatgatacatgagagtgagaataaattg

SEQ ID NO: 16641 - DNA, 434 bp, Glycine max
  unsure at all n locations
  Clone ID: LIB3106-115-Q1-K1-C7
agcatgcgtggcagcgacggtaacccttcaacaacaacacttccgctgcgaaaaatgtctctggtggcgaacgaggatttccagcacattctgcgtgtgctgaacaccaacgtggatgggaagcagaagataatgttcgcaatgacctccatcaagggtattggaaggagattcgccaacatcgcttgcaagaaggctgatgttgacatgaacaaaagggctggtgagttgactgctgctgagttggataatgtgatgactgtggtggcgaaccctaggcggttaaggacccaaaactgctttttgaccaaaaggaaggattacaaggatggcaaatactctcaagttgagtctactgctcttgatatgaagctcanggatgatcttgagagactcaagagaatcagaaaccaccgtggtttgaggcattactg

SEQ ID NO: 16642 - DNA, 492 bp, Glycine max
  Clone ID: LIB3106-115-Q1-K1-C8
cttgaaataatgccaagtatactaaatgtcttagtcttaagagggggggaaaactggaattccaatgattcttaatttcttacaatccaatctgcaaactgagtgagatatataacttgttttttatttcttcctcatcattttgcatatacaaagattaaaatggaagggttttttggaaattgcttcaatatgattttgctgatgttgtgcttcaccaacttgagcatagcttttgctcaaagtcatatgaatggatttggagagcagccactggccaagattgccattcacaagaccgttttggcgctacacagttctgcttccattatagcagtcccttttgtgctaggaactaagggtgaggatacccaattggtgactgtagagctagagtccccaataccatcttgtgatgactgcgtcggagttttttctccagcaaactttaattcagcaacatgtcctgacactgacggcattggctgggta

SEQ ID NO: 16643 - DNA, 402 bp, Glycine max
  Clone ID: LIB3106-115-Q1-K1-C9
aaacctccactcattccataaatctctgtttactctcctcgattttaccgcaacatgacacaagaaggaaatggcaacaccaacttctgtatgagtgttaacaacaacggctacattagcgctaatgacccgttgaactggggcgcggcggcggaggcgatggccgggagccacctcgacgaggtcaagcgcatggtggaggagtaccggaggccggtcgtgaagctcggcggcgagaccctgacgatctcgcaggtggcggcgatcgcggcgcacgaccagggggtgaaggtggagctggcggagtccttcagggccggggttaaggccagcagcgactgtgtgatggagagcatggacaagggcactgacagctacggcgtcaccaaccggttcggtgct

SEQ ID NO: 16644 - DNA, 504 bp, Glycine max
  unsure at all n locations
  Clone ID: LIB3106-115-Q1-K1-D1
cccacgcgtccggaagcattagcaaaagcaagaagaactagtctaagcagaaatggcctcttcagtgatggcatctgtggccctcaaacctgcccctttcactgttgagaagtcctcagttagaggccttccctccctctcaaggaactcctcttcattcagagttgtggccagtggtggcaagaagatcaagactgacaagccttatggaattaatggtggcatggctttgagggaaggagttgatgcatctggcaggaaaggaaagggaaagggcgtttaccagtttgtagacaaatacggtgctaatgtcgatggttacagtcctatctacgacaccaaggactggtctccaaccggtgatgtctacgctggcggtacgactggcttggctatctgggctgtgactctacttggtcttcttgctggtggtgcacttcttgtctacaacacangtgctttggcgcaataaactttgcanatcgatgttttaagctcaaactt

SEQ ID NO: 16645 - DNA, 404 bp, Glycine max
  Clone ID: LIB3106-115-Q1-K1-D10
ctattctcctcatcttcctctttttctcaacaaaaaggggttcaattctagctagttctattacgtcgtccgcgaccatgaacatggcgatcgcgcttctgttcatggttttcgcagtttcatcagctttagacatgtcaataatatcacacgacaacgctcatgcggatagggccacgaggcgcaccgacgaggaggtgatgtcaatgttcgaggagtggctggtgaaacacgacaaggtgtacaacgcgctcggtgagaaggagaagaggtttcaaatcttcaagcacaatctgcgcattatcgatgaacgaaactctctgaaccgaacctacaagttgggactcaacgtgttcgctgatctcaccaatgcggagtacagagccatgtacctgcgaaccttg

SEQ ID NO: 16646 - DNA, 304 bp, Glycine max
  Clone ID: LIB3106-115-Q1-K1-D11
aaaaaacgttgttgatagcaggaagatgcacttcgcaattgcacaaggaaaacaacggaagccaagtttccgcgcattttgtcacataagaaaaacgaagtgtcaatccctttcttcttcgcttgtattgtttatgaattattaattactttggttttagacagttgtatggcactgcttttgtctctgtcgttgaatgatatcacatgaatgcattttggtttgcaacctgctgcgcttgcaaggggttgtgaagccaattttataataaataaaatcaaatatatgctttgtatatttattg

SEQ ID NO: 16647 - DNA, 338 bp, Glycine max
  Clone ID: LIB3106-115-Q1-K1-D12
tgagaaacatggctttcttaagctccttagtgctgctccttgccgctgtaattctatcccgtcaaggtcttgcacactatgagaatccgacagagtacatgcctaccactgagaaaccaccaggttataggcccgcagttgagaagcctcctgtttacaaacctccagttgaaaaccctccagtttataagcctgcaggagagaagccaccagcgtacaagcccgcagttgagaaacctccagttgataagcccccagttgagaaaccaccagtgtacaagcccctaggcgaaaaaccaccagtgtacaagcccccagttgaaaaacccccagtgtac

SEQ ID NO: 16648 - DNA, 352 bp, Glycine max
  Clone ID: LIB3106-115-Q1-K1-B9
atctttttcagattcctgttctgaagatgacagcaaagaggtatctcattgtgtgtgttgctgcgatctgtgccgttgatctgggttcatcatcacaccatgcccgtgccccagcaccagcaccgtcagtggagtgttcaaacctggtattgaccttataggattgccttaccttcgttagcaacggcagcaccgtcaccaagccacagggaacatgctgatcttccttgaaaactgtgctcaacacaacccctaagtgcctctgcgaagcttttaacagcagcgctcagttaggtttagccatcaatgtcaccaaagctgttacgctttccgctgcttgcaaactctatac

SEQ ID NO: 16649 - DNA, 245 bp, Glycine max
  Clone ID: LIB3106-115-Q1-K1-A5
acgcgttcgcgcgacactagctttgtgctctcgttactcacgaagggcgtcaacgatgtcaacgctgtccatgagcaacgccacatgcgtcaacccagtgttccaacacaagtagcgctcttgaacaatctattcatgacctggagatcaacctactaaagggcctcatagcctcacggcgatgcacttaactttaagagcggacagctgtcgcaggaacattccatacaactctaggtacctgc

SEQ ID NO: 16650 - DNA, 203 bp, Glycine max
  Clone ID: LIB3106-115-Q1-K1-A6
cggtacgcgattcggaattcgagggtacgacgtcacgcgtgactgtcatagagcctatcgctttggatgacactcaatagcgcatctgggatattaaatgttacaggtctggttaatattttggccatcgttcccaaggattctgaacgattgagcttgaaataaaatttactgttgttcataaaactgaaaactgtaatggc

SEQ ID NO: 16651 - DNA, 405 bp, Glycine max
  Clone ID: LIB3106-115-Q1-K1-A8
gttattttctgcactggctttgatacagatttcaggttgagtttgtttcgttatctcttaatgacaaccttgtttcttaaggtttatattttggagtttacgtagtgatgaaaaaaaaaaaaaaaaaaaaaaaaaaaaaaaaaaaaaacaaaaaaaaaaaataaaaaaaaaaaaaattaaataaaaaaataaaacggtctcacatatctaatgatctaacctttactaccatttacatctcattcaaaatctactatataggtgaacttaatttcaattacttgcccttcatttactaatacatcttctagaaaaacccttatcacaccaaactaaattagttgactgtaattacactttttacaagctctttatacaccaataaggacaattacttttacaatt

SEQ ID NO: 16652 - DNA, 393 bp, Glycine max
  Clone ID: LIB3106-115-Q1-K1-A9
aaaccctaacacttctcttcctcttcgatcatcacctctccacaatgccgccgaagttcgacccctgccagatagtcgacgtcttcgtccgcgttaccggcggcgaagtcggcgcggcgagttccctggccccgaagatcggtcccctcggtctctcccccaagaagatcggagaagacatcggctaagaaaccgccatggactggaagggcctgcgcgtcaccgtcaagctcaccgttcagaatcgtctggcgaaggtcacggtggtcccctccgccggcgtcctcgatatcaaggccctcaaggagcccgagcgcgaccgcatgaagaccaagaacatcaagcacatcggcaacatctagctcgatgacgtcatcgacatcgctagggtta

SEQ ID NO: 16653 - DNA, 427 bp, Glycine max
  Clone ID: LIB3106-115-Q1-K1-B1
cttttctcttaatccaaatacgatggcagccatggcaaccacaaccctctcttcaaaccccaaactctcattcttcaacggaaagcccgtcacatattcttcccgcgtcgcgcccaccaccaaattatcctcatccaaacaaggcacaatttccatgtccctaaccccacccccctacgacctccagtccttcaaattccagcccatcaaagaatccatcgtgtcacgggaaatgacgcgccgctacatgaccgacatgataacctacgccgacaccgacgtcgtaatcgtcggagccggttcggccgggctctcctgcgcgtacgagctcagcaagaaccccgtcgtgagcgtggccatagtcgagcagtcagtgagccccggccgcggcgcgtggctcggcaggcagctcttctccgcgatggtg

SEQ ID NO: 16654 - DNA, 431 bp, Glycine max
  Clone ID: LIB3106-115-Q1-K1-B10
gaaaatgctgtctgggccaactgggttacaccatgaagatcaaaagctgttatacaaagacaaggagagggattcaaaggcttttcttgacatggttggggtgaaggacaaatccaagatagtgctaatggaagaccctattagtcaagagaagaggttgttagagagaagaaagaatgctaagatggagaaagctgcaaagtcgatctcagaaatcagcttggaaatagatagacttgcagggagggtatcagcctttgagtcaattattagcaaaggtgggaaagttgtggaaacagatgtgcataatctgattgagttattgatgaatcagttgctcaaattggatggtataatggctgatggggatgtgaaactacaaaggaagatgcaggtaaaaagagttcaaaagtatgttgaaactcttgatg

SEQ ID NO: 16655 - DNA, 462 bp, Glycine max
  Clone ID: LIB3106-115-Q1-K1-B11
acgcgcacgcgtgcgatcatcttttgcagaagcttatgcataggcagagcctagtcctacctataaatcggatgaacaaattacagggtttgacttaaacacgggactatttgctatataagtcgggttggatttgtaggatcgaagttagaaaacacagcacgaatttgattgcatagtgttatttcgagcatcaacatcaatggctccaattgcagtgggaaacgtgattccagaccgcattttggctcacttggatgaagaatacaaactccaaactgtcttcattcactctctcgccagcggctagaaagtcatcatctttgtggttcccggcgacttcacttctacttgcaacttgaagcacgttcctggcttcattgagagagcagatgagctgaaagggaatggtgtggacgaaataatctgtatcaccgtgaatgatacatatgtgatgaactc

SEQ ID NO: 16656 - DNA, 478 bp, Glycine max
  Clone ID: LIB3106-115-Q1-K1-B12
gagaatcataagaaagcaagaaagaaaatgggagtggagaagcagttgttgaggcctggcaccggtcccaagccaattcccggtcagaacgtcaccgttcactgcactggtttcgggaagaacggtgacctttctcagaaattctggagcaccaaggatcctggccaggaccctttcactttcaaaatcggccaaggttctgctatcaaaggatgggatgaaggtgtgcttggcatgcaaattggtgaagttgctcgtctccggtgctctccggattatgctcatggtgctggtggctttccttcttgggggatacagcccaactctgtcttggaatttgaaatcgaagtcttgagtgcacaatgaaaaccttggtagtctgtctctgtcctaagaataaaatcatcatccatttccatggactcgtattatggtatccccactttgtgactcgtgagggatatctacagtggttgag

SEQ ID NO: 16657 - DNA, 460 bp, Glycine max
  unsure at all n locations
  Clone ID: LIB3106-115-Q1-K1-B2
ctcctctttccactctctctctctttcttccccgctctttattttattcttcttttttcccttgcaaagattttataaaattgatatgtgttgaaggcatatttgcttaagagctgaaccacatcatcgtcttgaacgtttgaatctatggaacagcttgtcaacttcatcatccggccaccaagagctgaatatgaccccaaaagtgatttattggatcaggagttcatgctgaaaggaaaatggtatcaacggaaggatgtagagataaaaaacagtcggggtgatgttcttcaatgcagccattacttgcctatagtcagccctgaaggaaagcctctgccgtgtgtaatatattgtcatggaaatagcggatgtagggctgatgctagtgaagctgctataattntaacttcctcaaacattacacgttttactctggatctttctggctctggaa

SEQ ID NO: 16658 - DNA, 420 bp, Glycine max
  Clone ID: LIB3106-115-Q1-K1-B3
aaacatattatactcattctcatcttcttttgagtatcaacaaatggcaaccactgtgatgaccactcttccccaattcagtggtcttagaccccagttctcagctgcccctgtgaagaacttggttgctgtgcaacccatgagtcgctaggggaagggtgcatcgggagctcgatgtgactacattggttcattcactaatctgattatggaggcttctacaaccctgatgctgcttgctggaaggtttggattggctacatcagcatacaggacagccactgcaaggctaaagctggaggtgagggactcacgcttgcagactgtggaccctgctggcttcacccttgctgacaccttggcctgaggatctgttggccacatcattggcgttggggtttggtcttggactcaagaaca

SEQ ID NO: 16659 - DNA, 458 bp, Glycine max
  unsure at all n locations
  Clone ID: LIB3106-115-Q1-K1-B4
ccctctcaaggaactcctcttcattcagagttgtggccagtggtggcaagaagatcaagactgacaagccttatggaattaatggtggcatggctttgagggaaggagttgatgcatctggcaggaaaggaaagggaaagggcgtttaccagtttgtagacaaatacggtgctaatgtcgatggttacagtcctatctacgacaccaaggactggtctccaaccggtgatgtctacgctggcggtacgactggcttggctatctgggctgtgactctacttggtcttcttgctggtggtgcacttcttgtctacaacacaagtgctttggcgcaataaactttgcaaatcgatgttttaagctcaaacttagtccatgtaactatctaaaaatgaagaattattcatgaagtactntgtggatacgtgttccttctgttctataaatgtgtggatgtg

SEQ ID NO: 16660 - DNA, 474 bp, Glycine max
  Clone ID: LIB3106-115-Q1-K1-B5
cccacgcgtccggagaaacaatggccaatgtttcaattccactcccacgaaacggtttctccaaacccaattactcgacaaaacgcccatgtttcaccccttcagcttcaacactcagaatttcttgctctggagtggctgagtttgatggatctcatcagaaaaaaggaggtttgtttaatttcaatggaatcaagggcgtggcttgtggtattcttgcagcttgtgctgttacttctgctgcatttcctgttactgctgctactcagaggcttcccccattgtcaactgagcccaatcgctgtgagcgtgcatttgttggcaacacaattggtcaggcaaatggtgtatatgataaaccattacatctccggcaatgtgatttcacaaatgagaaaaccaaccttaaggggaagtccctgtctgctgcactcatgtcagatgctaagtttgatggagctgatatgacagaag

SEQ ID NO: 16661 - DNA, 271 bp, Glycine max
  Clone ID: LIB3106-115-Q1-K1-B6
aaaaaacatacgagagaacaatgacacaatgaaacaatatcactaacacaaaaacagtaactacggaccggaatactagacaaagcagggcatggtacaccccttcaacattcacaactaagaattccttgctctaaagtgcctgaacttgacggatctcataacaccatatgatgtttgttaaaactcacttaaatcaaagaccttgctcgtggcaatcatgcagcttgtcctgaaactcctgctgaataccctggttatgctgctactc

SEQ ID NO: 16662 - DNA, 455 bp, Glycine max
  Clone ID: LIB3106-115-Q1-K1-B7
tccacgcgtccgattacagccaactgggatgacattgatattccaccaaaaagtgctgatgaagcaagagacctttgggaggtattgtatttggattcattcaatcttttgtttcgtaattgcttgcatgctttgtaactttgttttcatcacaattttgttggatacttgtgctataacttaaggtgtctgctaatgcatgtagcacaagacattgatgagacccttcgtggataaattgactgccacagtacatccacatgggtgtaaaatgtacgtgctgaagccagtggcttgagcacgtacattttacacccttcgtggataaattgactgccacagtagatccacatgggtgtaaaatgtacgtgctgaatccagtggcttgagttttctgaaacaaatttttggattgcagcttttggagtcactgatgtcaatatttgtttttcttg

SEQ ID NO: 16663 - DNA, 478 bp, Glycine max
  Clone ID: LIB3106-115-Q1-K1-A4
cccacgcgttcgctccaagttaatgccagagacagccaattcttcagcaaagtcacccctctcaacagcaacatcaaagagactgagactgccaaaaatgaaggccaagtaaacaagccagaacaacaaccaacattcattcctgaaactgaaaacagttatggcctatatggtcatgagactggtctgcaccctcccaccactacaacaactaatgctgcaccctacaccaccacttacaagccatacaaaactaccagctgaagaggacactgccaagtactccaacaacaacaacttctacagcttcaagaaggatggctacaacaccaaccaaaatgagttgagtgaaacaacaagactcacaggcacttcttacaccaacaacaacaactacttttacagcggtaaggatgcttttgctaagcagaatgaattgagtgatacaaagtacactgaaggtggatacaacacggaa

SEQ ID NO: 16664 - DNA, 438 bp, Glycine max
  Clone ID: LIB3106-114-Q1-K1-G11
gcgggcgctgcatattcctaatacattcatcaagtgcattatttctccgatgccccctacatggaggagggcggttgaatattatgagggtgggcctcacaagatccaccatagttcagcgttctatacaaggaatctttgttttgcctgtgcaacttgcgtcctgctgggacaggtcatgtgcttgtctgttcaaagcgtgaagtgaagcgggttgctgaactcacagatgatgagactatagatttatgggcatagaaaagaaacttgggtggcaggtagagagctaccataaggcatcatcacttagctttgggatccaagatggaccgtaagcaagggcaaacagcgcctcatggtcatatccatatcctttcctggaaaagaggggaatatgagaacaatgatgacatgtattgatgacattgaatgaaaaag

SEQ ID NO: 16665 - DNA, 345 bp, Glycine max
  Clone ID: LIB3106-114-Q1-K1-G12
actgcttctacacttcacaaacagccgttttacatggtcaccgatggcgtccttgcgctgggagggtttttaaacgaacacggggctgttcttataaagttacgagtgcaacgtgtggagattcgaaagccggagaaatttaacacaagaagttccgtcataatcactgttggagaaagccccactttggctaagcgcaaaacgaatcacaactagttaccggctttattatactttgttccaaagggaaagcctctttggacaacctctacagggcttatatacttggcaaataaatctatgggacagaagaatggaggacaatatttggcttgaggactccat

SEQ ID NO: 16666 - DNA, 439 bp, Glycine max
  unsure at all n locations
  Clone ID: LIB3106-114-Q1-K1-G2
cccacgcgtncgactttttctacttaccttttctcttaatccaaatacgatggcagccatggcaaccacaaccctctcttcaaaccccaaactctcattcttcaacggaaagcccgtcacatattcttcccgcgtcgcgcccaccaccaaattatcctcatccaaacaaggcacaatttccatgtccctaaccccacccccctacgacctccagtccttcaaattccagcccatcaaagaatccatcgtgtcacgggaaatgacgcgccgctacatgaccgacatgataacctacgccgacaccgacgtcgtaatcgtcggagccggttcggccgggctctcctgcgcgtacgagctcagcaagaaccccgccgtgagcgtggccatagtcgagcaagcagtgagccccggcggcggcgcgtggctcggcgggcaactc

SEQ ID NO: 16667 - DNA, 160 bp, Glycine max
  Clone ID: LIB3106-114-Q1-K1-G3
atcaagggggccacgaccaccactcacttgtacacttgagaccaaaggcttcttgacgcgagccaccgggacctgaggcgttcaaggggagtactgcttatcatatggtggacttcaacatgagtacaaaaggttgtggccctcgtgcttctaaccctca

SEQ ID NO: 16668 - DNA, 466 bp, Glycine max
  Clone ID: LIB3106-114-Q1-K1-G7
gcatcaacaacaaattgaaaggatgtcgatcttcgtttaccacggatttccaacgcatttgcaagattcacgacaagctcttcatcgctctctctggcctcgccaccgatgctcaaacattgtattagcgtcttgttttccggcacaaactgcatcaacttcgtgaagagagggatatgaaaccagaaacctttgccagcttagtctctgctctgctttatgagaaaaggtttggtccatacttttgtcagcctgtaattgctggattaggggatgaagacaaaccattcatctgcacaatggattgtcttggggcaaaggagcttgcaaaagattttgttggttctgggactgcatctgaatctttgtattgtgcttgtgaggcgactgttaagcctgacatggaaccagaagaattgtttgagaccatctcccaagcactgctatcatctgtagatcgtgattg

SEQ ID NO: 16669 - DNA, 374 bp, Glycine max
  Clone ID: LIB3106-114-Q1-K1-H1
ctgattcattagtgaagaaaaatggcaaccatcatcgccggcatcccaactacatcgatcactcgcgcaggtcttgtgctcaaacgacctgttggagcctcgtcctctaccgttcttggattgccagcaatggctaaggcagggaaagtgaggtgctccatggaggaaaagccttcaagcagctcaaatatagggatgggggcatccttgttagcagctgcagttgccgcaaccatgtcaagcccagccatggctttggtggatgagagactcagcactgaaggaaccgggcttccctttgggcttagcaacaacctccttggttggatcctgtttggtgtcttcggtcttatatgggctctctactttgtcta

SEQ ID NO: 16670 - DNA, 392 bp, Glycine max
  unsure at all n locations
  Clone ID: LIB3106-114-Q1-K1-H10
catatgcatacatgccatatttgtggtggtgcttaagctgattgtctattttctgttggacttctgtgattataaatgtaatcctctgttgtctaccattnaaaaaaaaaaaaaaaaaaaaaaaaaaaaaaaaaaaaaaaaaaaaaaaaaaaaaaaaaaaaacaaaaaaaataacaaaaaataaaaaaaaaaataaaaaaaaaaaaaaaaaaataaaaaataagggggggcctttttaaagaattaaagataaaaaaacccgcctacaaacgaaaaatcttttttaaaaaccccccaaattcaatttcacgggccaccgattaaaaaccgctaaaatgaaaaaacctggccctttccaaattaaatttttttaaaaaaaatccccttttccc

SEQ ID NO: 16671 - DNA, 439 bp, Glycine max
  Clone ID: LIB3106-114-Q1-K1-H11
gttgctgcatatttctaatacattcatcaagtgcattttttctccgttgccccctacattaagatggctgttgaatattatgattttgggcctcacaagatccaccatagttcagtgttctatacaagtaatctttcttttgcctttgtcaacttgcgtcctgctgtgacaggtcatgtgcttgtctgttcaaagcgtgaagtgaagcgtgttgctgatctcacagatgatgagactatagatttatggcgcatagcaaagaaacttggtaggcagctagagagctaccataaggcatcatcacttagctttggtatccaagatggacctcaagcagggcaaacagtgcctcatgttcatatccatatccttcccttgaaaagtggtgattatgagaacaatgatgacatttatgatgacatgaatgaaaagagaaaga

SEQ ID NO: 16672 - DNA, 181 bp, Glycine max
  Clone ID: LIB3106-114-Q1-K1-H2
aaaaaaaaaaaaaaaaataaaaaaaaaaagcaggaatatctgaatggatacatacatacatacacaaaggcggcaaacggggctcctactaaatgggggcacccttaatgtactccactattccagattatttacatttggcttaactacgaaaagcctggtgctaccgggctgaaacgcc

SEQ ID NO: 16673 - DNA, 399 bp, Glycine max
  unsure at all n locations
  Clone ID: LIB3106-114-Q1-K1-H3
ctcaagcctatggtgatcatacctgtataatagcaaaagaacatttggagcctaacttangtgggctcactgttgagcaggctatccaaaacaagaagttgttcatcttagatcaccatgactatctcattccttatttgaggaaaataaatgcaaataccacaaagacttatgctacaagaaccatatttttcttgaaagatgatggaactttgacaccattggccattgagttaagtaagccacatcctcagggtgaagaatatggtcctgttagcgaagtctacgtgcctgccagcgaaagaagggaagcttatatttggttactggcaaaagcttatggttgtgtgaatgatgcatgctaccatcaaatcattaaccattggcttaacactcatg

SEQ ID NO: 16674 - DNA, 120 bp, Glycine max
  Clone ID: LIB3106-114-Q1-K1-H5
cccacgcgtccgcggacgcgtgggaaaaaaaaaaattttaaaaaaaaaaaaaaaaaaaaagggaaaatggggaaaaaataaaaaggtgaaaagggaaaaatgggggggcgttttaaaaga

SEQ ID NO: 16675 - DNA, 423 bp, Glycine max
  unsure at all n locations
  Clone ID: LIB3106-114-Q1-K1-H6
tcggagaagagaaggtgtacacaaacacaatctctaatggcactcangatgtgggcttcttgcactgccaatgcactcaaagtctcttctacctccagacctcatctcttgcatcctttttctttctccagatgcttgtcttccgtcttggatggacttaagtatgcagattcacacgaatgggtcaagcacgaaggctcagtcgccaccattggtatcactgaccatgcccaggaccatcttggagaggttgtgtatgtggagctgccagaatcaggtggcacagttacccaaaagtctggcttctgagccgttgaaagtgttaaagcaacaaagtgacataaactcttcaatctcgggggagattgttgaggttaacaaaaagcttacagagacacctggcctggtcaactcaagcccata

SEQ ID NO: 16676 - DNA, 105 bp, Glycine max
  Clone ID: LIB3106-114-Q1-K1-H8
agcactctttggtgttctctctgatactctaaattatactgaaaactctatagtgggccccgcatatggccaacagtatcgtccacagaaaactcattaaggaaa

SEQ ID NO: 16677 - DNA, 134 bp, Glycine max
  Clone ID: LIB3106-114-Q1-K1-H9
ttggaattcgagttggagcacggtttcgtgtaccgtgaggcccaacaggtcaccaggatactacgatggacgctactggaccatgtggaagctgcctatgtttttttgcactgatgcttctaagtgttgaaaga

SEQ ID NO: 16678 - DNA, 376 bp, Glycine max
  Clone ID: LIB3106-115-Q1-K1-A1
ggattcttctttgtgggtcttacgttgttgttggtcggcgtggcaaatgctatggctagctcttccaacaaatttgatcaactcttccaaccaagttgggcttttgaccactttattcatgaaagggatcttctcaaactcaaacttgacaaattttccggggctggttttacttccaagagcaagtatatgtttgggaaagttaccatccagcttaagctcgtggaaacgtgactctgctggaacagtcactgctttctatatgtcatcgggccggcccaagccacaacgagtttgattttgagtttctagggcaacatcacaggggaaccttacttcggtccaaaccaacgtgtatgtgaacgggtgtggccac

SEQ ID NO: 16679 - DNA, 63 bp, Glycine max
  Clone ID: LIB3106-115-Q1-K1-A10
aaaaaagaacactgatgattacaaaacgatcaaaatttataaacaatacacaagaggatattt

SEQ ID NO: 16680 - DNA, 362 bp, Glycine max
  Clone ID: LIB3106-115-Q1-K1-A11
tcgagagagcggagcggcgatcctagcactctgtcatggagctttcgccgacagcttaattgatcatggctgatcgacccagaaggcttttctgaaacagccaatagtgtttttcagatcgaataatactgagaagggaaagagacccggaaagggtgggaaccgctttcggaaatccattgggcttggatttaagactccaatggaagccatcgaaggaacctacattgacaagaagtgccccttcactggcaatggttacatccgtggccgaatcttggctggaacatgtgacagtgctaagatgaacaggactattattgttaagaggaattatcttcattgtatcaagaagtaccaga

SEQ ID NO: 16681 - DNA, 259 bp, Glycine max
  Clone ID: LIB3106-115-Q1-K1-A12
gtcaggcgtacgctacgcgtacggcattgcttgaatccgtagatcatagttttggaaacacacatgggactctcttcaggtttgatctcatagagacatgctgagattaccaagccaattgaataccttgcgaccaaatatgagcttggccaacacaaaaacctcccttactgccatcatggtgtactggcatcactgacagatcagaaggacacagttccaccgctgcaaataccacatcaagctgtaccagctgatg

SEQ ID NO: 16682 - DNA, 162 bp, Glycine max
  Clone ID: LIB3106-115-Q1-K1-A2
acggctgaatgtacataggctataaggctatggatctcacttaatagcgctactgagatattaaatgttatgcgtatggttaatatttttgccatctttcccaaggattctgaacgattgagcttgaaataaaatttactgttgtgcaaaaaaaaaaacata

SEQ ID NO: 16683 - DNA, 118 bp, Glycine max
  Clone ID: LIB3106-115-Q1-K1-A3
acgcacagacatgcagcgtgtatcacttgctcttcgattcggatcaatgtaatcaagtcatcgttgatatcaaatgaataatggcatgccagagaatggaataaattatcttttcaac

SEQ ID NO: 16684 - DNA, 386 bp, Glycine max
  Clone ID: LIB3106-114-Q1-K1-G10
gcaattactttcgctaagcttggcttgtctaaaactaagtagttctgtgatgtttgttgccttctataatctgaccattttgtgcttaactagtcacaacaaatcgtgctagttgacgtcaatgtttggtgaataatataaaagtggcgtaagcattcacaacatttgaagagaaagctgaaaacagaaaaaggctatcatggcaccttgtattagttatttcgtatataataaatgccacgatgttatgcataataaaaaaaaaaaaaaaaaaagggtgttaataaaaaaaaaaaaaaaatgctgggaaatgggaaaaaaacttaaagaaatttttaaattcggaaaattcccattaattataagggggggggccgttttaaaga

SEQ ID NO: 16685 - DNA, 317 bp, Glycine max
  Clone ID: LIB3106-114-Q1-K1-E2
cccacgcgttcgcccacgcgttcgaaaaaaaaaaattaaaaaaaaaaaaaaataaaaaaaaaaaaaaagggaaaaaaaaaaaaaaaaaaaaaggaaaaaaaaaaaaaaaaaaaaaaaggggggggagattaaaaagatttataaattaaaaatatttgtataaaaaaagggggggggccgtttttagggatcaaaatttatttcccggggcttgcaaagaaaaagttttttttttggggaacttaatttaatttcatgggcgggggttttaaaacggggggtttgggaaaaccttggggttccccaatttatttgct

SEQ ID NO: 16686 - DNA, 396 bp, Glycine max
  Clone ID: LIB3106-114-Q1-K1-E3
ccaaaatgtatttggtttcaagtatacgacacaagtgacggttttcataattctttcctgccttatctccatctctgtcaatttcagtacgttccttgttattggaaagacatctccagtcacctatcaggttcttggacacctgaagacatgccttgtattggcatttggttatatacttctccgagacccatttagctggagaaacatactgggtattttgatagccatgattgggatgattctatattcttactattgcactctcgagaatcagcaaaaaactgttgaagctgcatcacaatcatcccagtgtttccaggcaagagaagatgaatctgatcctctgatgaatgtggaaaatggaagtgcacgtgtgagttctaatgtcggaca

SEQ ID NO: 16687 - DNA, 406 bp, Glycine max
  Clone ID: LIB3106-114-Q1-K1-E4
tccacttctgattcagaaactcttaggcattccacattctcaaccccgaaccctaagagcagagcgaaaatgacaaccaccttcgcgaccgtcgcaggactcggtggcgcattactgtcatccacctcatctcgtctcacctcagggtttgtgaaatccccagtgattgctaggaatcccttgaggcaagctgtggcaatgggaaatgggaggattacatgctttgagaggaattggctgcgggcagattacagcgtgattgggtttgggttgattggttggctagcaccctcaagcataccggctatcaacggtaaaagtctgactggcctcttctttgagagcattggtgctgagcttgctcactttcccagccctcctgcccttacttcgtccttttggttat

SEQ ID NO: 16688 - DNA, 471 bp, Glycine max
  Clone ID: LIB3106-114-Q1-K1-E6
ccggaatgacccacgcgacccacgcatccgatggacataaccatcatttttaaattatacaaaacctctataatatttacagatggtatatgaggaaaatcttggaggcttcgctgtacgtggcggctaactaaacatttcagcaatagcaagcttgaatccgagattaatactggtgacttgcagatacggcgcatacaaagcgggatgtgcatcgtatatgtctggacgggaattcaactatgttgctaaggcttactctcatttagaaaaagaacatgattaggacatgctcttgctcttggatagaccacaggggaaatacatttggaatttatcaaaaatttcccaataaatctacacacataatatgatatggatctaaatcactaatcattattagattaaaatcttcatattaatttggacgactctcctctgttttaccttaaataaaaaaaaaatgggggg

SEQ ID NO: 16689 - DNA, 482 bp, Glycine max
  unsure at all n locations
  Clone ID: LIB3106-114-Q1-K1-E7
cccacgcgtccggccaagtgaaagtgagaaaaaataaaaatcaaagagcataatgtcagggatcattcacaagattggggagacccttcatgtgggagggcacaagaaggaggaggagcataagggtgagcaccatgctggagaatacaaaggggagcaccatggtgaacacagtagtgagtacaaaggagagcatcatggtgaacacaaagctggagagtaccatggtgagcacaagccagagcacaaagaggggttcctagacaaagtcaaggacaagatccatggtgaaggcggcgccgccgatggcgagaagaanaagaaggagaagaagaagaatgagcatggccatgagcatggccatgacagcagcagcagcagtgacagtgattaaactgctgcatcacctatatatttaaaacggttatgggaccatagtagcgagggctgngccttatttctctctctcttctctctcttct

SEQ ID NO: 16690 - DNA, 199 bp, Glycine max
  Clone ID: LIB3106-114-Q1-K1-E8
tccacgcgtccggccacgcgtccgttcttatgaatttaacgacaccacctgcaaaattgggaggatcgacaacgaactccgacgcttacatgatggccgaagcacaactgacaataaccatattggatcttgcgcgacaaggtgtcaaatacacgcagatcaaaaaggaatgctcttgaagcgaccaaggctctgttca

SEQ ID NO: 16691 - DNA, 345 bp, Glycine max
  Clone ID: LIB3106-114-Q1-K1-E9
tccgcatgcgcgccatgcgtaacgcttgaagcgtgactgcttgtacattcaatatcctgtcttgactgtcttaccagaactataatgccagaccgctgactgttacacaccgtagcatggtattatcaaggatgcacattttattactcgcgacgcactttaagccatgatttaatgagatagacaatgtcgcggggcgaggatacatgcttgttgggctcttttgcgatcaatggatcaatgacgttttgagactcacacaggcgaatcaggacacctaatcatcttactcaatggactacattgagttatacacataactatgtataactctagatagaacat

SEQ ID NO: 16692 - DNA, 176 bp, Glycine max
  Clone ID: LIB3106-114-Q1-K1-F1
ctttcatatgtttcaacatatcttcctccaaataaacttatgacagaataatacatccatatgtttcaacatatcttcctccaaataaacttatgacaagcaaaatctgtaaagacgagagatgatgaaacatatggatgtattattctttcataaatataaaattttgcattttt

SEQ ID NO: 16693 - DNA, 458 bp, Glycine max
  Clone ID: LIB3106-114-Q1-K1-F11
cttgctgcatatttctaatacattcatcaagtgcattttttctccgttgccccctacattaagatgggtgttgaatattatgattttgggcctcacaagatccaccatggatcactgttctatacaagtaatctttcttttgcctttgtcaacttgcgtcctgctgtgacaggtcatgtgcttgtctgttcaaagcgtgaagtgaagcgtgttgctgatctcacagatgatgagactatagatttatggcgcataagcaaagaaacttggtaggcagctagagagctaccataaagcattatcacttagctttggtatccaagatggaccttatgcagggcaaacagtgccttatgttcatatccatatccttccctggaaaagtggtgattattgagaacaatgatgacatttatgatgacatgaatgaaaaagagaaagagttgtatctagcgctt

SEQ ID NO: 16694 - DNA, 442 bp, Glycine max
  unsure at all n locations
  Clone ID: LIB3106-114-Q1-K1-F2
cccacgcgtgcgcccacgcgtncgcccacgcgtncgcaaaaactgtaagcattaattttcgaaatgggaaaaaacgaaaaataacttttccaaattcatgacaaccgaatcacacaaaaactattttatatgctgtttttctgtttgaaggatcacacaaactagtaaccagaaaaatggcagaaacaaagttgagctccttcaaagacaaaagatggtcactccatggcatgacagctctagtgacaggaggcacacgaggcatatggtacgcaatagctgaagagttagcagaatttggggcagctgtgcatatttgtgcacgtaaacaacaaagatattgataaatgtttagaagaatgggataagaaaagacttcccataacangggtcggcatgtgatgtactatctcgtgaccaacgtgaaaaattaatgaaaaat

SEQ ID NO: 16695 - DNA, 458 bp, Glycine max
  Clone ID: LIB3106-114-Q1-K1-F3
cccacgcgtccgaaaaaccatggcaataacactcaacaatggcttcaagatgcctatcattggattgggcgtgtggcgcatggaaggaaacgaaatcagggacctaattctcaattccatcaaaattggttatcgccattttgattgtgctgctgactacaaaaacgaagcagaagttggagatgcgcttaaggaggcttttgatagtggccttgtgaagagagaggatctcttcattaccaccaagctttggaattctgatcaaggccacgttcttgaggcgtgtaaagacagtctcaagaagcttcagttaacgtatctagatttatatcttggtcactttcctgttgcccgaaagcatactggggttgggaatacttctagtcctttgggtgatgatggggtcctggacatagataccaccatatccctggaaacgaccttgcatgcaatggaag

SEQ ID NO: 16696 - DNA, 346 bp, Glycine max
  Clone ID: LIB3106-114-Q1-K1-F4
cacattgcaaagaaaatacacattacattactaagtctttgttcatttgagtagtagtgatggctagcctcaaggttgcatgtgtggttgctgtgatgtgcatggttgtggtggccatgagtgctgcacccatggcacaggccgcaatcacgtgcgggcaggtcgccggcgacatgtctccgtgcttcagttatcttcgaagcggcggaaaaccgtcgcaagcctgctgcaacggagtgaagtccctcagcagcgcggcgaagaccaccgcggaccgccagggggcgtgcacgtgcctgaaaaaccttgccaataatatgggacagagtttgaatgccggcaacgc

SEQ ID NO: 16697 - DNA, 266 bp, Glycine max
  Clone ID: LIB3106-114-Q1-K1-F5
acggggaaagcgagaaaaaacaaaaaacaaagagcatgatggcagggatcatccacaagattggggagacccggcatgggggagggcgcatgaaggaggaagagcataagggtgagcaccatgcgggagaatacaaaggggagcaccatggggaacacagaagggggtgcaaaggagagcatcatgggggacacaaagctgggaaagaccatggggagcacaagccacatcacaaagaggggggcctagacaaagtcaaggacaag

SEQ ID NO: 16698 - DNA, 394 bp, Glycine max
  Clone ID: LIB3106-114-Q1-K1-G1
gaacgacggcgttccttgcacgcaaaggcgtcgttttaaattatgccgccggcgaagaggggaaaagcaaaggcggagcctaaggtaacaacgccgtcggaaaaacctaatgattttccgtcttgtattcggagcgtgcctccttcctccgtcgctataaccatccacgccaaacctggttccaaatccgcatccgtaactgatataagcgatgaagcggtgggagtgcaaattgacgcacctgcgagggatggcgaagcaaatgcggctcttctcgattacatcagttctgttttacgtgtgaaacgaagacaagtttctttatgcactggttctaagtcacgagataagacagtgatcgtggaagatgtacccacaatatgttttgacgctt

SEQ ID NO: 16699 - DNA, 418 bp, Glycine max
  Clone ID: LIB3106-114-Q1-K1-E11
gttgctgcatatttctaatacattcatcaagtgctttttttctccggtgccccctacattaagatgggtggtgaatattatgattttgggcctcacaagatccaccatagttcagtgttctatacaagtaatctttcttttgcctttgtcaacttgcgtcctgctgtgacaggtcatgtgctcgtctgttcaaagcgtgaagtgaagcgtgttgctgatctcacagacgatgagactatttatttatggcgcatatcaaataaacttggtaggcagctagagagctaccataaggcatcatcacttagctttggatccaagatggaccctaagccaggcaaaccgcgcctaatgttcatatccatatccttccctggaaaagtggtgattatgagaacaatggtgacatttatgatga

SEQ ID NO: 16700 - DNA, 276 bp, Glycine max
  Clone ID: LIB3106-114-Q1-K1-C6
tcggtcgaacagaacagaaccaccacataactgtgcttttcaaaggcgggaagagcaatggcgggcataaataaaaggggaaatctggtcaagacttctgctgccatgcacatgaatcaaaaattgtcggcgcttacaccgatcacttttgcaagcaataaaaaccatgtcatatgcaaagctatccctccgatgtatttcctaccgcactgaagatatgagtttgccagagactttcgcttcttatggcaaaataattgatgtcaaagatattat

SEQ ID NO: 16701 - DNA, 449 bp, Glycine max
  Clone ID: LIB3106-114-Q1-K1-C7
tccacgcgtgcgactagttctagatcatagggcactttgaagggaattcttggatacactggagatgatgtggtctccaccgactttgtgggctatagcagatcaagtatttttgatgcaaaggctggaattgcattgaataagaactttgcgaagcttgtctcttggtatgacaacgagtggggatacagctcacgtgtcattgacctgctcgtattcgttgccaaaaagtttttttaaggttgtactgaaaaaaaagtagcttggctagacattatgggctggtgtctagctgcaatttaaggtcttcttgcttcggcctaaatgataaatatgaataatatgggttccggaaccggtgatgttaccctgttaagagcattaaacattttcttgatggctcttcatacgaggggacggagtttttggattattatatacttgctcat

SEQ ID NO: 16702 - DNA, 326 bp, Glycine max
  unsure at all n locations
  Clone ID: LIB3106-114-Q1-K1-C8
cccacgcgtccgaacattttacactcttttcttcttctcgttgttgcttcggtgttgaatcatggatcagaaagtcgatttcagtgctccgcattccatgggaaccactatcatcggcgttacttacaacggcggtgtcgttctcggagccgactctcgaaccagcactggagtgtatgttgccaaccgagcatcggacaaaatcacacagctcactgataatgtttacgtgtgtcgctctggatcggctgctgattctcagattgtctctgactatgtgncgctacttcttaccaacacacgatacaacttggacaacctgcgac

SEQ ID NO: 16703 - DNA, 275 bp, Glycine max
  Clone ID: LIB3106-114-Q1-K1-C9
ccgcatgcgcgccacgcgtaacgctattaattaaagataggagcatggaacaacacaaatcgacaacccaagctatcaatcccaatccatacctaaccatgatactccctcgaacagcaaacttacaaggacaggcttatcgagctacacgcggacaataaaacatattaaacggacattgctgatctaaagcaccaacgacaggcgagtgatacatcaacatcctatgaatggagctgaaaagctcaagaaagagtatcttgagaagctgaact

SEQ ID NO: 16704 - DNA, 464 bp, Glycine max
  Clone ID: LIB3106-114-Q1-K1-D1
gtgatgtgtcataggctaaatttcagaactgcagtattttactgccatgaagtccgtgaaacaacacctttcatggttccattggtggctggtgatggaaccaaaactcaggcacttgctatttgccactcaaatacttctggaatgaatcatcaaatgcttcatcaacttatgggagttgatcctggaactaaccctgtttgccatttccttggaagcaaggccattttatgggtacccaatttatctgtggacactgcctatcagaccaacattgttgcttaattagtccatgcatcttgagcaccatgagaatgagattgtgtataaaataaattatcatgtgctgtgtgttgtgcaagtactaccttctctagctagattgctagagctagaatttcaacctacctatgtgtactgataagatctgcttccctacttaaagagagcatcatcctgtgatc

SEQ ID NO: 16705 - DNA, 308 bp, Glycine max
  Clone ID: LIB3106-114-Q1-K1-D10
gtaattgagggtttgacgtatgacgaaacttaagttatgagaaaaagtgggttgaattcaggggctgtgctgaaactcactagggggggggtctatgtgaatgtggtggcgagggttagggacgcttttaagacttaggagtgcgagaaactggactgtgtgcatatggaaactatctgtctgcaaacagataggagtgaagctaaaggatttagcgccatgcgtccctatcttgcttaaggattatcatctaatactctggagaggaaattgctatgaagagcaaccttcataatcatattgttttc

SEQ ID NO: 16706 - DNA, 447 bp, Glycine max
  Clone ID: LIB3106-114-Q1-K1-D11
cccacgcgtccgctctcttctgttaccaatggctttctcatcaaactacatttctttccttgtcctgactacgcttttgtttgctcttcaaatcactgctagagacagccagttcttcagcaaagtcacccatttcgacaaagacaatgccaaagtgacagaacttcccaacaaagaagcaccagaagtaaacaagccagagcaacaaccacctttcattcccgagactgaaaacagctatggcctatatggtcatcatgatgagtctaaccaagtcccctccaccaccccgacttcttaccacccctacaagaccaagtttgagaactccaacaacaagtactacaacaatgatgcctataacacaaggttcttcgaaaccagttacaacaacaacaacaacaagtcttacaacacggattcttatgagggtaaccaatatgagtt

SEQ ID NO: 16707 - DNA, 335 bp, Glycine max
  Clone ID: LIB3106-114-Q1-K1-D12
acgcccacgcgtacggtaaggaccaccttgcaaggcttattactcctgggagaccaacaactgggggtagcaagggcttttggtgacaggagcctcaacatgcatcttagttcaaaacctgatgtgcttgtcgaggaagtagatccacatacattgtttcttattctggctcgcgatggaatatggcaggttatgtcaaacgaagaaccattggaatgtattcgacaaataaaggatgctcaagctgcagcatagcacttgataaaagaggcaaatttcatgaaaagcaaggatgatatatattgcatatgtgtaaggttctaatgacacgtttt

SEQ ID NO: 16708 - DNA, 213 bp, Glycine max
  Clone ID: LIB3106-114-Q1-K1-D2
gaagatgttttggttgttcctgattcaaatgcagtttattaaaccccactttttggtgattaatagtgtgaatcacaaatagttactgcatctataggatgtgctggacttgtcaccctgtcatgtgattgtataatttcatgcatgcttgtatttgtactatttaacttgagattcagattgtatgtaaatttactgttgcttttaattgat

SEQ ID NO: 16709 - DNA, 360 bp, Glycine max
  Clone ID: LIB3106-114-Q1-K1-D3
cccacgcgttcgattcataggcccaagagcaaagaaactaagaagattttgagcacaatggcatccacacaatgcttcttgcaccaccatgccctcaccactccaaccagagcttcatcacagcgcttagttgtgagcaccaaaccaaaccacattgtttgcaaggcacaaaagcaggttgtccaagagggtgaggacactactaacattgtgtctcgcaggttggccctcactgttctcattggtgctgctgctgttggctctaaagttgcacctgctgatgctgcctatggagaagctgccaatgtgtttggaaagccaaagacaaacactgacttccttgcatacaatggggatgga

SEQ ID NO: 16710 - DNA, 304 bp, Glycine max
  Clone ID: LIB3106-114-Q1-K1-D4
cccacgcgtacggtgctttctcgaagcgtgttgatgcggcagcagtcccctaccgtaccgcacccacaagcttggcggtggtcgacatcaacaccatcgaggagccatggctgaagcaccttaacaacaccacccctcttccccaagacaataatgaaccctcccttcccgcccctattcttcacaaactcaacttgctcgacgccaccgatgccccccaatcctgggatgagattagcaaaacactccaagacctgaaacccccctgcacctgaccccaacaacaacctgaaccttcacaaaa

SEQ ID NO: 16711 - DNA, 474 bp, Glycine max
  unsure at all n locations
  Clone ID: LIB3106-114-Q1-K1-D5
atcgaacccgtcgtagcagaaaaacttgtcaccatggtttcttccgacaaggatccacgagaggatgtccttcaagcctggtacatggatgatagtgatgaagatcaaagactcccccaccacaaagaacccaaggagtttgtctcgttggaccaacttgctgaacttggagtccttagctggaaactagatgctgataaccatgaaaatgatccagagctgaagaagattcgtgaagagcgtggttacacctacatggatgtttgtgaggtctgcccanaaaaagtgccaaattatgaacagaaaatcaaaagcttctttgaagagcatcttcacactgatgaagagatccgcttttgtgctgctggaagtggctattttgatgttagggatcgcaatgaagcttggattcgtgtgtgggtcaagaaaggaggaatgatcatcttacctgccggaatttatcatcgctttacg

SEQ ID NO: 16712 - DNA, 482 bp, Glycine max
  Clone ID: LIB3106-114-Q1-K1-D6
attatcttcatcttcttcttcatcgaactgcggaggcacttagcagcagtagcagaaatggctaccacttctgcttcattcgctcgcttctccgtcatatcgcgaccttcttcgtcaaatccccaattcatcctcttcaacgccgctccccgaaccggaacccctcattcccgaaccggttcggcccggttcaggtgcttggccggccagaccgggttcttcacgaaactagggcggttgataaaggagaaggcgaagagcgacgtggagaagctcttctcgggattctccaagacccgcagcaacctcgccgtcatcgacgagcttctcctctattggaacctcgccgacaccgaccgcgtcctcgacgaactcgaagaggctcttttagtgtccgattttggaccaagaatcactattaaaatacgggagaatttgcgtgaggatatattttcagggaagcttaaatcacggaatgagat

SEQ ID NO: 16713 - DNA, 465 bp, Glycine max
  Clone ID: LIB3106-114-Q1-K1-D7
accacgcgtacgatttttctcctaacaacagcttcattcaccaccaccacccaaactactacttcaacagtgggaaaagaccaagttccacgcataatgtgcaatgagtgcgagcttccacctccacccccacaaccaaaagagtgttcaccgccaccgtcacctacggttattattaaatgtgcgacggcgccaaaaccactaccaccaccaccacccgtggttattgaatgtccaccaccggcaaaaccaccgcgtggaggaggtgctgactgcttgctccccactttgccggagacaccagaagaaccgcaatacctacaaccgccgtcgcatctttcgtcggcgccgggaacgatagatcttgacgatattatcagcggggctaacatgattaatccactgctacgctacttcacattgaactacttcacttttctccctcctctttggcttccctattac

SEQ ID NO: 16714 - DNA, 436 bp, Glycine max
  unsure at all n locations
  Clone ID: LIB3106-114-Q1-K1-D8
atccaggcaaaacaatgaaagtacaattcagcaagcctccctttcaacaaccatggggtgttggtacatggttaaaggaaattaaagacactactaaagaaggatatagttttgaagagctatgcatcaagaaagaagccattgagggagaagagaagttttgtgcaaaatccttgggaacagtaattggttttgccatttcaaagctgggaaagaacattcaagtactttcaagttcctttgtcaataagcaagaccaatacactgtggaaggagtgcagaatcttggagacaaagcaaggatgtgtcataggctaaatttcagaactgcagtattttactgccatgaagtccgtgaaacaacagctttcatggttccattggtggctggtgatggaaccaaaactcangcacttgctatttgccactcaaatac

SEQ ID NO: 16715 - DNA, 359 bp, Glycine max
  Clone ID: LIB3106-114-Q1-K1-E10
ctccattagattaccaagctctgtaactttgcttctcaacatggagtatcgtctgggaccgatttttactttactcaatattgcactggtggcaacccatgctgctttaccccctgaagtttactggaagtcggagcttcctactacgccaatgccaaaagccatcactgatatcctttactctgattgagtggaagagaaaagcagctcattgcatgttggatgtggaggcgtgaacgtgcatacacgataaggaggtggtagaggcaccactgccaacgtttgtggaaaaggacgcggtggcgtaaacgtgcatgcccgccacaagggaaaaccattgtatgtttcaggtagctcaa

SEQ ID NO: 16716 - DNA, 460 bp, Glycine max
  Clone ID: LIB3106-114-Q1-K1-C5
atcattagagagtgaagtgttcttccctcacttgcttaagatgttggaaggaaaagctgtggtgagagagacagacatgccagagggaatgcagagctatgttatggaattagcacaccaagctctcgatgcacatgaagtttctgattgtcagtccattgctcatttcatcaaacagaaacttgatgaagcatatggacctgcttggaattccgtggttggaaaagactttggatcttgcatcacacatttatgtggaagtttcatattctttcgtgtggagatgatggaatttctgatcttcaaagatgggaagaatttcacagaaagcagggaagaagctattggagtgctgcagaaggctagaaattgtgattagtaaattccaaaattgttagttgttatagaacaacctaaactctttaatattcctaatgaatctaagctaaacatgttcaaa

SEQ ID NO: 16717 - DNA, 389 bp, Glycine max
  unsure at all n locations
  Clone ID: LIB3106-114-Q1-K1-B1
ctctgtccaaggtagacctcatcagaaggacaatccaaattggactgatgacacaaaggcaattcaagcctttaagaagtttggaaacaagctgaaggaaattgaggacaaaatctcagggaggaacaagaattcaagccttaggaaccgtaatggaccggcgcagatgccctacactgtgcttcttcctaccagtggggaaggccttactttcagaggaattcccaacagcatctctatctaatgagagtgtgtggtgtgtggtgtgtggttttctttccttccaacgtacctctcattgacaaataaacgtgcaaacttatgtgtgcataattttcttatgtatgcttaangtttgtaattggatgctatctacttnttcatatcta

SEQ ID NO: 16718 - DNA, 278 bp, Glycine max
  unsure at all n locations
  Clone ID: LIB3106-114-Q1-K1-B12
cacgcgcacgctcactcactagcgtcttntgtgtggtcaccacaggcatcttcaatatcagcaatggccatgatcaaggggcgatgcgttaaaccaaaggggcccaatatcaccaagctggcaccataaaaaccctctctttagataaacctttcaaagggcctcatagcctcacccgaaagcactaaacttttccccgcgacagcaatcgcaggagcaatatttacaacccttggaacctgcgacgccgcatttgctgttcaacaaatagccgacat

SEQ ID NO: 16719 - DNA, 410 bp, Glycine max
  unsure at all n locations
  Clone ID: LIB3106-114-Q1-K1-B2
cttctatatttttcagtattttgttatggatgattttggtggtcctccccaccttcagggtccttcccgcaccctcaggttattcctctattggtttggggaattggattgaagcactatggttttattaatgatgtgaaaagaattaggattttcttctgactcgcataattatttaattagcacctttctttcatctatcaacaccttacattgaacctttgttactaactatttcctgcgtccttgtttgttaacttttggcctctaatagggtgaacgtaacgcttgggcctcangtggacagaatgatgatatctggactgcaccaccgtgaagacatattttgttgcagctgtggacaacctcttggatggaaatatgttctgacacatgaaaagaatgaaata

SEQ ID NO: 16720 - DNA, 359 bp, Glycine max
  Clone ID: LIB3106-114-Q1-K1-B3
ggccactgttttcagaacccccactttccggcctccgcctccgcctccgccgcgcgctgccaagtcgccgaagccctcgcgcttcaccgtcgcgtctttcggacagagcaccacctgcaggagaaaacccccctcgctcctctcctccctgcggttccctactgttccctctccacggttcgtcaggttcgttcccttcgctttcgatggcgacaccgaggccccgcaagttcaggaaccggaggttcacgttctggacccttcagatggtgctgttggtgtaaatgatagtgcaagtgataatgaggttagcgatgctgatgaaacatttgcttcacctttcttagtgatacttcaat

SEQ ID NO: 16721 - DNA, 342 bp, Glycine max
  Clone ID: LIB3106-114-Q1-K1-B4
atgttgttaaggcaaatgtctttctggattcatctggcaagcacaacaagttctccatcacaaaagctgataccggcagaaaagtggaagagccagagttgttagaggcaattcgtttgacaattataaataatcttattcagtaccacccggaatcaagttcccggttagcattgggagcagcttttgggcttctgcctccaaaagagcaggttgacgtagacatagcaacccacataaacatttctgatgattgcccagatagaagcttgctgtatgtggagacagctgatcggcctggattactggttgatcttgtaaagattattactgacattaaca

SEQ ID NO: 16722 - DNA, 423 bp, Glycine max
  Clone ID: LIB3106-114-Q1-K1-B5
gaactaggtgttacctgggatgtggacttgtacggggaattgctgaaaattggaggcggaaaagaaaggatgacagcatactttaacaaggtgggttggcctgcgaatgccccaacaggtgaacaagaaagaaaagaattcatagcttcactccacaaacaaaagacagaactatttatggcccttatagagaaaaaactgttgcctcttcgtccaggtgttgcaaagattatcgatcaggcttttgctcaaggagtccaagttgcagtttgcagcacttccaacgagaaggcggtctctgcaatagtatcattcttgctgggacctgagagagcagaaaaaatcaagatatttgcaggagacgtggttccccgtaaaaagcctgatcctgccatctacctattagcagccagcactctgaat

SEQ ID NO: 16723 - DNA, 384 bp, Glycine max
  Clone ID: LIB3106-114-Q1-K1-B6
gaaacaatgctggaccgccttttccctgtgaatgatcctgctccagtttccagtgagacaactccccaagctgaaggttttgatccttcaacttcaaccactaccaagagtgatggtttgctgattcccaaggaattagctgagattgagtacatggagagcctttatatgaagagtactgtatcagctttgcatgttttgcaggaaattagaagtggaagctcaacagttagcatgttttcattgccaccgctgaaaataagtggttcagaagaaacatggaagaaaatcccggttctggaacaaacagccaagtaacctgctgggttacgttgaaagcaatgtagtgggatgtggttattttcccatctatttttttcattt

SEQ ID NO: 16724 - DNA, 309 bp, Glycine max
  Clone ID: LIB3106-114-Q1-K1-B9
cgaccggaattccgggtcgccacgcgtacgctaattaaatactatggctgtcatggcaacctcaaccctctattgaaacccctaactctggttctgcaacggaaagcccggcacatattcttaccgcgtcgcgcccaccaccaaattatcctcatccaaacaaggcacaattaccatgtccttaaccccaccctcctacgacctgcagtgcttcaaatttcagcccatcaaagaatacatcgtgtcacgggaaatgacgcagccgcttcatgaccgacatgataacctacgccgacaccgacattgtta

SEQ ID NO: 16725 - DNA, 430 bp, Glycine max
  Clone ID: LIB3106-114-Q1-K1-C1
cggacgcgtgggaaaaaagatcactctgaagaagaaaccaagaataccacgtttcttcatcatttttcattcctttcttgatcatcatattcatcactgttaataaataaataaataaaaactttctcatagattctgtaaccaacatcaacatcactgttaactatggcaacactcgctcccgggattttgttgaagctcctcaacggattgaacaccggcgtgaaacccacgaacgagcaccgcagctcgctcctgcaagtgaccgacatcgtccccgccgatctcgacgaaaaaaacctaatcccaaaacaagggtttttcataaaagtctccgattcctctcactctatctacgcgagtcttccctcggaccaagacgacgtcgttctcagcaacaagatgcaactcgggcagttcatctacgtcg

SEQ ID NO: 16726 - DNA, 428 bp, Glycine max
  Clone ID: LIB3106-114-Q1-K1-C10
ctgcaactccaaaatgtcttccataggggcaaaaaatctagcactctcctcagcctttttggtccttttggtcggttttgcaacctcagacatcaaccaagacaaagcagaatgtaccgacaaacttcttggtctagctggttgtcttacctatgttggtggtgaagccaaagtccccgccatggattgttgctctggtatcagagaggctattgacaagagcaagaggtgcctctgcatcctcatgaaggatcgcgatgaccctaatcttggcctcaagatcaacgtcacccttgctctaagtttaccagatgcttgtcaaacacccaccaatataactcaccgtggtgatcttttgcatgtggcacctaactccacggaagctaacgtgtttgaggggtttaaaaatgccttgaccaacaaaacta

SEQ ID NO: 16727 - DNA, 441 bp, Glycine max
  Clone ID: LIB3106-114-Q1-K1-C11
cccagatactgctttgggatctggcggtatcttgcaagagtcctctgctggtcgctcagttgctgatttgaatggtggtttggtggacaatccattggcatttggtggagatgatccctcatttcagatttttctccccacaagaccagcagattcatccatgcacaatgaattgagagatcaagcaaatgtggctaatggtgtctgcactgaggaggattggatatcccttagacttggaggtggtgctggtggtaacaatggtgatgctcccactcaaaatgggttgaattctagacatcaaatcccaaccagagaaggcgccaagaatactttggatgatactgcttctttactccttgggatgaatgatgttagatctgacagggcaagaaggcaaagatcagatagccctttctcctttcctcggcaaaagcgttc

SEQ ID NO: 16728 - DNA, 437 bp, Glycine max
  Clone ID: LIB3106-114-Q1-K1-C12
cccacgcgttcgctttttttcttccaacgctccttttccttctcatagccttcgccacctcggtctcgggccgccgtgacctcgggggagactttctccggctgccctccgaaactgataacgacgacaacttcaagggcacccggtgggccgtcctcctcgccggttccaatggttactggaattacagacatcaggctgatgtttgtcacgcctatcaaatattgaggaaaggtggtctgaaagaagaaaatattattgcttttatgtatgatgacattgcattcaatggggaaaacccaaggcctggagtcatcattaacaaaccagatggaggtgatgtttataaaggagttccaaaggattacaccggcgaaaaagatactggtgataacttctttgctgctttacttggaaataaatcagcactgactggt

SEQ ID NO: 16729 - DNA, 351 bp, Glycine max
  Clone ID: LIB3106-114-Q1-K1-C2
ttctctttctctttctctgtctgcttcttcactttctctcgtttcaatcgaaaaaaatcatgggcagaaaattcttcgtcggtggcaactggaaatgcaatgggaccactgaggaggtgaagaagattgttactactttaaatgaagctaaagtccctggagaagatgttgtagaagttgttgtgagccctccttttgtgttccttccttttgtaaaaagattgctgcgccctgatttccatgtctcggcccaaaattgttgggttcgcaaaagtggtgcttatactggagaggttagtgctgaaatgcttgttaatttgggaattccttgggttattattggtcactctg

SEQ ID NO: 16730 - DNA, 371 bp, Glycine max
  unsure at all n locations
  Clone ID: LIB3106-114-Q1-K1-C3
cccacgcgtncgcccacgcgtncgnccaggttcgatggtgcggctttcctgaacagttggaggggtaagaagataatgtttgtgggtgactcactgagtctcaacatgtgggaatcactgtcctgtatgattcacgcgtcggtgccaaatgccaagaccggctttttgagaaaagaatcactgtccactgtgaccttccaggactatggagtaactatacagctataccgcacaccgtatttggtagacataattcgtgaaaatgtggggcgagtgcttacattggactccattgttgctggaaatgcgtggaaaggcatggacatgctgattttcaactcgtggcattggtggacccacactggaaaatc

SEQ ID NO: 16731 - DNA, 396 bp, Glycine max
  Clone ID: LIB3106-114-Q1-K1-C4
cccacgcgtccgtgatcaacgaaatcttgaatcatctatctcaaaccaagaaaaagatattgaaaacgattatgtaggatcagacagtgaaaagaatagtaagggtgtgaagaaaaagaaagacaagaacaagatggaggcggaacttaatttcttactaagaaattttttgattttacatttaaattggaataatttcttaggtcaaagaatatttaacaatgtcaaaagatattgtctgctgattagattaaaaaatttaagagaaattacaatagcctctattcaaagaggagaactaggtctagatattatgatgattcaaaatcagaagaatttaattcttctaggcttaaggaaaaagaaaaataacaaatttatgaaaaaagaaatatt

SEQ ID NO: 16732 - DNA, 202 bp, Glycine max
  Clone ID: LIB3106-114-Q1-K1-A8
cccacgcgttcgatttatgaaaaaaaaattaaaaatttaaaaaaaaaaaaaaaaaaaaaaaaggaacacggaaaaaaaaaatctgggggggcttgaaaaaaaaattctttcacacttttttttctcttatttcccaccaccaatttagacttttttattaaatacacaatttctttagtttataacccctcttcttttaatt

SEQ ID NO: 16733 - DNA, 473 bp, Glycine max
  Clone ID: LIB3106-113-Q1-K1-H1
gcataacttgcatagactattgattaagaaagctattgtcattgatttgctagctccaacaatgggttctagcagattatcattcattttagtacttgtgcttgtaaccttttcatccatgatcattgactcaagggttgcagaggcacgtaccctgccaaaatcagccttattgccttccaaagttgatatacctactgttgttcctcttccactggtggcaccactgccaaatttgcctgttactctccctccagtgcctgaactacctgcagtacctaaagtaccaattcctgaagtaatagttaataacgccaaaataatcccttgagtacctatgatctatccagtcactactacttattttgtcacttgctaaattaacttgttgttgccatcccagggtggttctggttctgttggggtttaatttctgtcattcaattacatgctatgttcagtttatatgttgc

SEQ ID NO: 16734 - DNA, 421 bp, Glycine max
  unsure at all n locations
  Clone ID: LIB3106-113-Q1-K1-H10
cccacgcgtccgccgaaagcgaagaaagagctttcgatccctgtaaccgcgttcgacgatttagggttttttttcggagacaatggcggatgaatcggagcacacggcggcgccggcgagcggtgaatcgctgcttgacaagattgccgagaagattcacggccaccacgactcttcctcttcctccgattccgattcggagaaaaaggaaacttcgtcaattaaggaaaaggttttccgcctctttggaagggagaagccagttcactccgtcctcggcggtggaaaacctgctgatgtgctcttgtggaggaacaagaagatatctgctagtgtacttggtgtagccactgctgtttggatcttttttgagttgcttgaatatcacctgcttactctagttngtcacatttcgattctg

SEQ ID NO: 16735 - DNA, 408 bp, Glycine max
  unsure at all n locations
  Clone ID: LIB3106-113-Q1-K1-H11
ttggaattcgagttggagcacggtttcgtgtaccgtgagcacaacaggtcaccaggatactacgatggacgctactggaccatgtggaagctgcctatgtttttttgcactgatgcttctcaggtgttgaaggagcttcaagaggctaagactgcataccccaacggcttcatccgtatcatcggattcgacaacgttcgccaagtgcagtgcatcagcttcatcgcctacaagcccccaggcttctaagtgtgaaaaatttgcaaagcatttgtagccgccaccccactntgtttgtttgtacttaaactacattcccatttgcttttgctttttgagatttcatcatcctgtatttttggtttcttgtntcggacttcaatggaaattaatggatgagaactaatg

SEQ ID NO: 16736 - DNA, 358 bp, Glycine max
  unsure at all n locations
  Clone ID: LIB3106-113-Q1-K1-H12
ttggaattcgagttggagcacggtttcgtgtaccgtgagcacaacaggtcaccaggatactacgatggacgctactggaccatgtggaagctgcctatgtttttttgcactgatgcttctcaggtgttgaaggagcttcaagaggctaagactgcataccccaacggcttcatccgtatcatcggattcgacaacgttcgccaagagcagtgcatcagcttcatcgcctacaagcccccaggcttttaagagtgaaaaatttgcaaagcatttgtagccgccaccccactttgtttgtttgtacttaaactacattcccatttgnttttgctttttgagatttcatcatcctgtattt

SEQ ID NO: 16737 - DNA, 344 bp, Glycine max
  Clone ID: LIB3106-113-Q1-K1-H4
caggaactggaatagcagaactaatagctcttgagatgtcaaagcagacaaagacacctatagaggagactcgcaagaagatatggcttgtagactcaaagggtttgattgttggctcaagaaaggcttcacttcaacacttcaagcagtcttgggctcatgagcatgagcctgtaggcagtctcttagaagctgtaaggtaatcaagcctacaggcttgattgcgtcatcatgagtgggaaaaacatttacaaatgaagtaattgacgctgtgacttctataaatgaaaaacctcttgtcctggctctctccaatccaacttcacagtctgagtgtacagctg

SEQ ID NO: 16738 - DNA, 474 bp, Glycine max
  Clone ID: LIB3106-113-Q1-K1-H5
gcagctgtctaggcatcgaactctgatggacatatttgataaggctcctgttgttgatgaggatgtatttgttgcgcctagtgcctccgtcattggagacgttcaacttggaagaggatcatccatttggtatggagttgtcttgaggggtgatgttaacagcatcagagttggaactggaactaacatacaggacaactctctggtgcatgttgcaaagtcaaatttaagtgggaaggtgttgcctacaattattgggaataatgttactgtcggccacagtgctgttatccatggttgtactgttgaggatgaggcttttgttggtatgggtgcaatactacttgatggcgtagttgttgagaaaaatgccatggttgctgctggagcccttgtcagacagaatacaaggattccttctggggaggtatgggcaggcaatcccgcaaagttcctgagaaagctcactgatga

SEQ ID NO: 16739 - DNA, 100 bp, Glycine max
  Clone ID: LIB3106-113-Q1-K1-H7
cccacgcgtccggtggatctctatctagggtctgtatgaatctgatacgacaagatgtcgcaatgcacgacctacagccgacgccacagttatactgcca

SEQ ID NO: 16740 - DNA, 146 bp, Glycine max
  Clone ID: LIB3106-113-Q1-K1-H8
tcggacaaacccatatgtagagagagaaactggcagtcgcatacatgacttacttcgatgccttcgcggacgacttgaacatcgactcttcgttcactcgccatcacgacgatgacgaggacaacttctctggctacggcagctac

SEQ ID NO: 16741 - DNA, 392 bp, Glycine max
  Clone ID: LIB3106-113-Q1-K1-H9
cgtgagttcaaggctaacaagatctccgaggaagagtatgttaagtcaattaaggaggaaattcgcaaagttgttgaacttcaagaagagcttgatattgatgttcttgttcatggagaaccagagagaaatgatatggttgagtacttcggtgagcaattgtcaggctttgccttcactgttaatgggtgggtgcaatcctatggttcccgttgtgtgaagccaccaatcatctatggtgatgtgagccgcccaaagccaatgactgtcttctggtcatctctggctcagagctttaccaagcgcccaatgaagggaatgcttaccggtcctgttaccattctcaactggtcctttgttagaaatgaccaacctagatctgagaccaccta

SEQ ID NO: 16742 - DNA, 404 bp, Glycine max
  Clone ID: LIB3106-114-Q1-K1-A1
gaccatctctgaacaaccagtataataataggccacatcaacaacttgtgggacatcaaagagtttcccagcaaaataaagaatggaagcctaaatcaagccagaagccaaacagtaattcctggagtaataggaaccccgaaaaaggctgctgttgctgctgcttcgcctccagcagaaaattctggagatatagaatcaaataccacagagcttcaagataaactttcccaagtaaatatatatgagaaccaaaatgtgattatagcacagcatattcgagttccagagactgatcgctgtcagctgacctttggtaccattgggactgaacttgattcttcaaagcttcaatctaagtatcacattataggagcttctgaaaaatcaaacgaggaattgac

SEQ ID NO: 16743 - DNA, 73 bp, Glycine max
  Clone ID: LIB3106-114-Q1-K1-A10
gcttcttgtacgaaatgagatgtataccttgaccatgtgctagagttgcaaactatgaattagacttgttagt

SEQ ID NO: 16744 - DNA, 354 bp, Glycine max
  Clone ID: LIB3106-114-Q1-K1-A2
atagcagcagaacagagagagcaaaaccctagagcatccatcacaagcagaggaagaagatggtgaagttcctgaagcctaacaaggcagtgatcgtcctgcagggccgctacgccgggcgcaaggcggtgatcgtgaggaccttcgacgagggaaccagggagcgcccctacggccactgcctcgtcgccggaataaagaagtacccaagcaaggtcatcaagaaggactccgcgaagaagaccgcgaagaaatctatggttaaggccttcgtgaagctcgtgaactaccagcacctcatgcccacgcgctacacgctcgacgtggatctaaaagacgcttgtacccccgatg

SEQ ID NO: 16745 - DNA, 447 bp, Glycine max
  Clone ID: LIB3106-114-Q1-K1-A3
gctagtttatcgtgaggagaatatgaagttgtttgttttctttgttgctgcagtagttttggtagcatggccatgccatggcgcaggctaccaaaggttccctctccgaatgaaaactggctatggtgagcgttcttcggaggtaaaatgcgcaagttttaggcttgctgtggaagcacacaacatccgagcctttaaaaccattcctgaagagtgcgttgaaccaacaaaggactacattaatggcgaacaatttagatcagactctaaaacagttaaccaacaagctttcttttatgctagtgaacgcgaagtccatcacaacgacatatttatattcggcatagataacaccgtactctctaatatcccatactatgaaaaacatggatatggggtggaggacattaatgaaaccttatatgatgaatgggttaacaagggcga

SEQ ID NO: 16746 - DNA, 353 bp, Glycine max
  Clone ID: LIB3106-114-Q1-K1-A4
tttcgcgttgcgttttcttggtctccccgtcgatttttcttctgaattttaatacttcggaacttttagtttcctctcctggcttctggttggagtttccggcgaccttgtcggagattttgttgtttatttttcgcaccccttgtgaaacttctcaaaaaaaaaaaagaatgtttcttgttgattggttctatggaattttggcgacccttggtctgtggcaaaaggaggcgaagattttgttcctagggttagataatgctgggaagaccactttgcttcacatgctcaaagacgagagactggttcagcatcaacctactcaatatcccacttcggaggagttgagtatt

SEQ ID NO: 16747 - DNA, 62 bp, Glycine max
  unsure at all n locations
  Clone ID: LIB3106-114-Q1-K1-A5
cccacgcgtccgcccacgcgtccgcccacgcgtccgcccacgcgtncggttctagatcgcga

SEQ ID NO: 16748 - DNA, 254 bp, Glycine max
  Clone ID: LIB3106-114-Q1-K1-A6
cccacgcgtccgcccatgttggagtgttggctctaatttcgaccaatacggaaacaggcgtttggtggtggctcagtttgcgcggcgccaagacatagagtttcagaaactttcatacgcatcaagatcaactcattcttctgcatgaagaagtaccacttaattgccctcaagaatcatgtactttctcctagtgagtgatcttgtgtaaggctaaataaatgcttcattttgtaataaattattctatggct

SEQ ID NO: 16749 - DNA, 405 bp, Glycine max
  Clone ID: LIB3106-113-Q1-K1-G8
tcgccacgcgttcgtccacgcgtccgccaattcccaattcccaattcccaattcgaaacccttattcctttcaaagaaccaaattgagtgatcgtgatggcaccaaaggcagagaagaaagccagcggagaagaagcccgcggaggagaagaagtccacggtgggagacaaggctccggcggagaagaagccaaaggccggaaagaagcttccgaaggagggaggcgccggcggagaagggaagaagaagaagagaaacaagaagagcgtggagacatacaagatctacatcttcaaggttctgaagcaggtccaccctgacattggtatctcaagcaaggccatgggaatcatgaacagcttcatcaacgacatcttcgagaagcttgcccaggaatcttctag

SEQ ID NO: 16750 - DNA, 415 bp, Glycine max
  Clone ID: LIB3106-114-Q1-K1-A7
aactttttctacttaccttttctcttaatccaaatacgatggcagccatggcaaccacaaccctctcttcaaaccccaaactctcattcttcaacggaaagcccgtcacatattcttcccgcgtcgcgcccaccaccaaattatcctcatccaaacaaggcacaatttccatgtccctaaccccacccccctacgacctgcagtccttcaaattccagcccatcaaagaatccatcgtgtcacgggaaatgacgcgccgctacatgaccgacatgataacctacgccgacaccgacgtcgtaatcgtcggagccggttcggccgggctctcctgcgcgtacgagctcagcaagaaccccgccgtgagcgtggccatagtcgagcaagcagtgagccccggcggcggcgcgtggct

SEQ ID NO: 16751 - DNA, 474 bp, Glycine max
  Clone ID: LIB3106-113-Q1-K1-F4
cccacgcgtccgctttgattgaaaggttgcgaggtccattgatcaataggagttctagctgttggacagtcacctcagttgttgagtacttacatgtgcttccttattctgaaatactctcagagtggatttctagagaaacattctcaaatagtttgcaaggttcaaggctgtcagagaaaaacacgatgatgggctgccctgaagtgaaaaaatcatatataagtagtgagggcatgtctattggcctcgatattaagccaagcattgatgctattgaagcacttaatcagaacgagaacaatggaagctgtgcagttacatgttctgcttctatcaaggattcccagaatgtgtatgtggacaacactttagcttgtccatctaaaaagtaagaagaatgccagcatattgccaatactttacaagttaatgaagatcaagaaatagaaaatccatttgtacaacattact

SEQ ID NO: 16752 - DNA, 469 bp, Glycine max
  Clone ID: LIB3106-113-Q1-K1-F5
ccaccaccactaaaccctcgcaaagccctaaaactgagtttctcatctctcagattagattccgatagacacagaaatggcttttcgttcaggttctctgtctcgctccttaatgtctacagctagggcatcactccgaccggcggcgccgtcgtcaacccttccccgccttcgtccgccaccactcgccgcccctcgcgtccagtcccgccgcttttccatgcctgcttccaggaatttggggcaattagggtgcacacactcgcttttacctctgggcataacctgcatgacgtcacacattgctgtcagtgcgcgtgcttgctgcgagctgtcccatggtgatcctgattcctgaggtacgtgaggaagctgttggatttgcatagtgttgcctttgatggtactggtgaccaataatttattaatagtggtatctgcgaagtaacggttgtaggattcttgaatg

SEQ ID NO: 16753 - DNA, 445 bp, Glycine max
  Clone ID: LIB3106-113-Q1-K1-F6
gaaccattcatcaccacctttcttcattcattcacggttttccttttcgactcgatttgttgtttgttttgttttgtttccttgacgatgttgacgatgagcaagcagaagaagaaccagaacgcgaagaggctgttgataagcatcaatgtgctggggagcgcggggcccattaggttcgtggtgaacgaggaggagcttgtggcggcggtcatcgacaccgcacttaagtcctacgcgcgtgagggcaggctttccgtcctgggaaacaacaccaccggtttcgtgctttattgcccccatcttggatctgatgctttgagtccttgggagagaattggatcacatggggtgaggaatttcgtgctgtttaagaagccagagggtgtggcggatgtagatggaagtacagcactttctcgcagcagcagggggagtgggagct

SEQ ID NO: 16754 - DNA, 289 bp, Glycine max
  Clone ID: LIB3106-113-Q1-K1-F7
acgcgtccggcatgcgttcgccactcgaactggcaagatcacatgtgccattatgataatctcaggccacgtcgccaaaggctcaaactcggacgggaaattcttacatgtcatcctaccggggataaattatacacacgatgagtgaacacttatcatatcatgatcaaggttcgagctcttgaaacgggagtgaagtatcagacatgtggactggttgcttgctaggttccgttcatgatagaacgtgggatctgaacgactcacccgatcagaggattaacatgga

SEQ ID NO: 16755 - DNA, 474 bp, Glycine max
  Clone ID: LIB3106-113-Q1-K1-F8
tcggctgcctggagtgctactgagaggaagaatgcgtttcatagtacggactattctggtggtgatgccatcactggatatgtgagggcttgtgatgttcacctcattgcggaggctgctgatgacgcccatgattggaacggtgattgtgcgctctactctcaccactccgggcagctgattgttcttcctcacaatgtggcgctgccggtgtcccttaaggtgttggagcacgaggtgtatgctgttgcgcctattaagaaggttttgggtggtggctacagctttgcgcctcttggacttgtgaacatgttcaatgctggtgctgctgttgaagggctggtcttcgaggaggatgggttggttcgtttggagatcaaagggtgtggtaagtttggggcttattcttctgccagaccaacaaagtgtttgctgggaaaccatgagctgctggatttcgattacgatgctgat

SEQ ID NO: 16756 - DNA, 476 bp, Glycine max
  Clone ID: LIB3106-113-Q1-K1-G1
cagactccaaaacagttaaccaacaagcttacttttatgccagagacctcgaagtccatcccaaggacacatttgtgttcagtatagatggcaccgtactctctaatattccatactacaaaaaacatggatatggggtggagaaatttaactcgaccttgtatgatgaatgggttaacaagggcaatgcaccggcactgcccgagactcttaagaattacaacaagctggtgtctcttggcttcaagattatattcttgtcaggaagaacactggacaaacaggccgtaacagaagcaaacttaaagaaggctggctaccacacatgggaaaaattaattctcaaggatccacaagatccttccactccaaatgcagtttcatacaaaacagcagcgagagagaaactgataaggcagggatacaacattgttgggatcattggagaccaatggagcgatctcctcggaggccac

SEQ ID NO: 16757 - DNA, 403 bp, Glycine max
  Clone ID: LIB3106-113-Q1-K1-G10
ggactttaggttgggatttgggaattagggttattcgcgtggcgaagatgattgaggtggttttgaacgatcgattggggaagaaggtgcgcgtgaagtgcaacgacgatgataccatcggcgacctgaagaagcttgtggcggctcagactggcacaagagccgacaagatccgcatccagaagtggtacaccatctacaaggatcacatcactctcaaggattacgagatccatgacggcatgggtctcgaactctactacaactaaacacaacaaggtgtgttttatgcgtaatatactatgtgctgggaatgggataagcgctaaatgtaattctgacttgcgaaagttcccatgatttgaaataatgtacatctccaaatgatattgggtattatata

SEQ ID NO: 16758 - DNA, 413 bp, Glycine max
  Clone ID: LIB3106-113-Q1-K1-G11
ggactataggatgggatttgggaattagggttattttcgtgtgaaagatgattgaggtggttttgaaggatcgattggagaataaggtgcgcgtgaagtgcaactacgatgataccatcggcgaccttaagaagcttgtggcggtttagactggcacaagagcctataagatccgcattcataagtggtacaccatctacaaggatcacatcactctttatgattactagattcatgacagtatgtgtctttaactctattacaactaaacacaataaggggttgttctattgcgcaatatactattttgctgtgtaaatgggagtaaacgcttaaattctaatttatgaacttgcgaaaagtatcgcattgattttgaaaaaaattattcatttttccaaaattaatatttg

SEQ ID NO: 16759 - DNA, 385 bp, Glycine max
  Clone ID: LIB3106-113-Q1-K1-G12
atctaaaacggtctctgagatattttgcatttagtgaatgaactcttccccagctgttaccactgtcaaccgtgccggtgccggcatgggtgctccattcactggcctcaagtccatggctggcttccccaccaggaagaccaacaatgacattacctccattgctagcaacggtggaagagtgcaatgcatgcaggtgtggccaccagttggcaagaagaagtttgagactctttcctacctgccagaccttgatgatgcacaattggcaaaggaagtagaataccttcttaggaagggatggattccttgcttggaattcgagttggagcacggtttcgtgtaccgtgagcacaacaggtcaccaggatactacgatggacgc

SEQ ID NO: 16760 - DNA, 481 bp, Glycine max
  Clone ID: LIB3106-113-Q1-K1-G2
ctcaagctccctcgcgacttcaacatcgttgcagaactcgttgccgcgcttctgaatcttgcacggcggcggcgattccctggctccatggcggcgcgagtccactcctccgcggcagcggctccgccttcgtgcctcagcgaacgtctgaatcaaatccctcttaataataaacaaattcgcatggcgcatcataagcataagagcgcgcacgcacaggatgagggtatcgaacgtaacgagtttggagcttccattgtgattttgacttgcgctcaatcaggcacgatttggcatattatgcacaagcatgctctatggaactcggtgacaggcttaagcactggagtacagtaaacgagccagtgctatataactacggaggttatgagatgctccaagcgttctgctgactgcactgctggcgatactactaccgaaccctatgtcgttacacaccacctcattcttgctcatgttg

SEQ ID NO: 16761 - DNA, 357 bp, Glycine max
  Clone ID: LIB3106-113-Q1-K1-G3
gtttcctttcattttccctcactttctcgctccccaaacgcccctctctctcctccaatggccgaccagctcaccgacgaccagatcgccgagttcaaggaggccttcagcctcttcgacaaggacggcgatggttgcattactaccaaggaacttgggactgttatgaggtcacttggtcaaaacccaactgaggcagaactgcaggatatgataaacgaggttgatgctgatggcaacggaaccatcgacttcccagagttcctcaacctgatggctcgcaagatgaaagacaccgactcagaggaggagcttaaggaggcttttcgcgtgtttgacaaggatcataatggtttc

SEQ ID NO: 16762 - DNA, 258 bp, Glycine max
  Clone ID: LIB3106-113-Q1-K1-G4
tcgcttctatctcgttcctatattcgctacgtcgtcgctagggtcgtcttcggatcggtggagctcgactgcgccggcgtgaatgccgacgctgcgagtgtgaccgaattgcgatagccgggacgaatatgaagggtttcgttaagactctcaaaggcactcacttcgaaatcgaagtgacgccgcatgacacgggttctgaagtgaagaaacgtatagaaactgttcagggtgcacatgtctatcctgctgcacagc

SEQ ID NO: 16763 - DNA, 306 bp, Glycine max
  Clone ID: LIB3106-113-Q1-K1-G5
gagactgcatatccgtttaccaacaggcttactgttatgccatacacctgcaaaaggagcatgctattccagttcgtcactttgctaaagagtctgcccctcctgcccttaagggagatcagatgctgaagaacatttttgtggaggtgaagaacaaatttgagactgccataggaatattaaagaaggagaagatcaccattgacccagaagatccagctgctgcttctcattatgcaaaggtcatgaaaacagttagagagaaggcaagcttgttgtcggagtcccaagacatactatccacca

SEQ ID NO: 16764 - DNA, 390 bp, Glycine max
  unsure at all n locations
  Clone ID: LIB3106-113-Q1-K1-G6
cccacgcgtccgcacattttagaagaataccccctcttttgctgcatcagaggagttgtaaattaagagcatggctgcacaagctcttgtatcatcatcttctcttaccttctcagcggaggctgcaagacaaagtcttggaccaagatcactccaatctccatttggcttctccagaaaagcctcctttctcgttaaggcagctgctaccccccctgtcaagcaaggatcagacaggccctttgtggtttgcatcanagcanagtctttcttacttggatggcagcctttcgggtgactatgggattgaccctctgggactntcagacccctgangaacangagnggtcattgagccggaatgctagcatatggtgagataatcaatgg

SEQ ID NO: 16765 - DNA, 304 bp, Glycine max
  Clone ID: LIB3106-113-Q1-K1-G7
gcgtccgtgataacttgcatagactattgattaagaaagctattgtcattgatttgctagctccaacaatgggttctagcagattatcattcattttagtacttgtgcttgtaaccttttcatccatgatcattgactcaagggttgcagaggcacgtaccctgccaaaatcagccttattgccttccaaagttgatatacctactgttgttcctcttccactggtggcaccactgccaaatttgcctgttactctccctacagtgcctgaactacctgcagtacctaaagttccaattactga

SEQ ID NO: 16766 - DNA, 467 bp, Glycine max
  unsure at all n locations
  Clone ID: LIB3106-113-Q1-K1-F3
tccacgcgttcgcccacgcgtccgggaaagaacagctgagctggtcagaaaatcaatggcatcatgcttgggttttgagttcctgacgaagaagccttacagtcctccatcctgggcatcccatctccaccctttaccttcccacttcttctctcttgcccatcttcccactccaattcacagatggaaccttcccaatctgcccaccaataccgagctgtggatcaagcgagacgacctttccggaatgcagctgagtggtaacaaagtgaggaaattggagttcctgatggccgatgccattgcgcaaggcgccgactctatcatcacaatcggaggcattcagagcaaccactgtcgcgccacctgccgtgtcgccaagtatntaaaccttgactggtttctcatccttcgcacttctgacctcctcgtcgatcaagatccaggacttactggcaatcttctcg

SEQ ID NO: 16767 - DNA, 482 bp, Glycine max
  unsure at all n locations
  Clone ID: LIB3106-113-Q1-K1-D6
cccacgcgtccgcccacgcgttcgccgactccgattccgattccgactcagaaccctttccatgctgctttgaactaacgaagttttgttcacgcgccttgttttctctgcattgtatccaattccatggaggagtcttcttacaccggtcttcccactagccatttgctcggttcagttcctgctgtcgtaactgaagaaaataatgcctcgaaacatgtggccaccagtgcgaatatgcaaatattccctcccaacaatggaagagacagaggaccgggatataatactcttggcagtcctactgaagcctttgaacaacagccagcatacaactggaggggagtctttagcatctcatcttattcagagtatttcaatgtagacacggatgttgtcctaatcagattgataagttccttgaatccagttgctggagactntttcagcatgatagatgctaaccctgatttatatgggct

SEQ ID NO: 16768 - DNA, 247 bp, Glycine max
  Clone ID: LIB3106-113-Q1-K1-D7
acgcccacgcgttcggttctagatcgcgagccggccgccctttaaccatttcttgcaccaacgaacacgacacttccaagttccagcaaggaatcactgccacctttgtttccttttcttctcatcatttcgttttacaaaaaaataaagaaccatggatgggagaatgggactcttgtgtcttcttggattgggtggtgcatgggcttgtgatggaagagaactcgcaaactgcaatcaattgagc

SEQ ID NO: 16769 - DNA, 478 bp, Glycine max
  Clone ID: LIB3106-113-Q1-K1-D8
catactttggttgttctggtcctaatccgaaacagaaagaggggatttgcaattgtggagtacatctgaattgtgagcaatatagattcttcaaatttgtaggcaatgggtggcttcaccgctgaagatctatcgaccattggcggaatcgccaccgtctcgcttctccattccttcattcccactcactggcttcctttctccattgtcggtcgcgctcagaaatggactctctccaccactctcatcgtcactgcacttggagcaattttgcacgtaatatccacttcactgcttggtataacagcaattaccatggcaaacaccattgctggtgaagaaacagtgcataaggttgcttcacttttgcttgtatttctgggtggtagttatataatgttgcttctgatgggaaagggtggccatagtcattcacacaaccaacccatggagaaaatggctgtagctggacttattc

SEQ ID NO: 16770 - DNA, 467 bp, Glycine max
  Clone ID: LIB3106-113-Q1-K1-E1
cccacgcgtccgcccacgcgtccgctttcttatcctgtgcattctactttacagagcgatgaagcagaatctgtcttgctagataatctttctgaatttgctgctagcctcttggctgcctatgatagtggtgatctggtagcagcacttgaagaaggccataccggctggcaaaagtgggtgaaaggctttggaaaatcgctaaagcgcaagggaaaatcgcttttcatgccgctccgacttctgttgaccggcaaactccatggacctgacatgggggcaagtgttgcattgctctatagagctgggactagcaatgtagtagctcctgaatctggctttgtgacactggatgaaagatttaaaatgcttaggcaaattgactgggaagcattgtccaaggaccaacctgtcaaagagactgctgctcctgtctaacttagaattcactttcaaggtctatcaaa

SEQ ID NO: 16771 - DNA, 250 bp, Glycine max
  unsure at all n locations
  Clone ID: LIB3106-113-Q1-K1-E11
cggaaacccgggncgacccacgcggccggccacgcgaacgaccacgcgaccgagaaaaaggcggtgcctctacacacgaagaagaacgcgaagaagagggggaagaagggcaagaggcggcagagcgacaggaaaacggcggacaagacaaaccggcgcaaaccaaagggaagagaaacccgccggaggagaaagagcaagggaggcaccgagaagccaaacaggggatacgggacaaacaagaagaccc

SEQ ID NO: 16772 - DNA, 283 bp, Glycine max
  Clone ID: LIB3106-113-Q1-K1-E12
ggtgttttgcattacgttgattttcatcgttctatatactgtgtattactgatagaaagcttagccgcataagtgcttttttttttcggtgaaggccaaaaaaaaaaaaaaaaaaaaaaaaaaaaaaaaaaaaaaaaaaaaaaaaaaaaaaaaaaaaaaaaaaaaaaaaaaaaaaaaaaaaaaacaaaaaaaaaaaaaaaggtaaaggctccaaaaatattaacattaaaaccctcttaagtgggcgccgaaaaacattttaacaattgaaaaaatccaaaaa

SEQ ID NO: 16773 - DNA, 477 bp, Glycine max
  Clone ID: LIB3106-113-Q1-K1-E2
cccacgcgttcgggcagctgcttctcctatggcaagccaactcaagtccaccttcactaaaactcttgtagctcccaagggcctctctgcctcttcaccactccacctcctgccttctaagaggcaatttagcttcactgttagggccatccaatcagaaaagccaacctatcaagtgattcaaccaatcaacggtgatcccttcattggaagccttgaaaccccagttacatccagccccttgattgcatggtacttatcgaaccttcccgcatacaggaccgcagtgagcccactactaagagggatcgaggtgggcctggcccatggctaccttctggtgggcccattcgtgaaggccgggcctctgaggaacaccgagatcgccgggcaagcgggctctctcgccgctggtgggcttgtggtgatcctcagcctttgcctgacaatctatgggatttcatctcttaacgaagg

SEQ ID NO: 16774 - DNA, 473 bp, Glycine max
  Clone ID: LIB3106-113-Q1-K1-E3
ctttctttcactcccacaattcttcttcgtctggagctgcgatcctctgcttcgatggccaccgtgcaactccaatccctaacccttggtcgctcctccgcactcccttccgccaccttctcccctccgatcgccctctccggccgccggaactccgccgcgctgccgcgctacgcctgcctccgactccgacccgccgccgagacctgttttccgactcgcgccgccttgagaaccgctcctcgcggcggaggcgtcaagtgcgaggcaggagacaccgccgttgaagtggctcctattactgatgcaaattggcaatcacttgtgcttgaatctgagtctccagtattggttgaattctgggctccatggtgtggtccctgccgtatgatacatccgataattgatgagctggcaaaggaatatgttggtaggcttaagtgctacaaactcaatactgatgaaagcccttc

SEQ ID NO: 16775 - DNA, 428 bp, Glycine max
  Clone ID: LIB3106-113-Q1-K1-E4
tcggtggtgttagatctgtacctgcctagccattgatttggaaaagtccaagcttcaaagatgagtaagcttcagagtgatgctcttagagaagctatctcaggaatcatgactgattccatggataagaacaggaaatttgtggagaccattgaactccaaattgggctgaaaaactatgatccccagaaggacaagcgttatagtggctctgttaagttgcctcacattcctcgcccgatgatgaacatttgtatgcttggagatgcccaacacgttgaagaggctgagaagataggattggactacatggatgtcgaggccttgaagaagctcaacatatacaagatattggcgaaaaaactagccatataatatcatgcctttttggcctctgaagcagtcatcaagcagattcctcgtctctt

SEQ ID NO: 16776 - DNA, 470 bp, Glycine max
  Clone ID: LIB3106-113-Q1-K1-E5
cgacccgccccgttgccatgcctagttttcccctcccctttcttctccccctcccctgcactagaaaggcatttgattaacccgtcaacccattcgaacccacccgttttggacatcttcttgaccggttggaaaaaactgcacaccgcgcatcccctttcttcacttcttcatgcttcgactcttctgcgccttacctacgtcgtcgtctgagtcgcgccgccgtgacgccgattggcttcgccggatttctcctatgttcgcctgacgagacagagtgaatcctgaatcgcacttcgaacgtgttctcttcgacatcttcacttaagccttcgattcgtcagataagatgcttccgagggcattattggccaaattcgttctcaaaccctgcactgttgtttctccattccagttcaatcagcagagagcattgcatagtaggaacatgaaagccttggagttcattg

SEQ ID NO: 16777 - DNA, 382 bp, Glycine max
  Clone ID: LIB3106-113-Q1-K1-E6
ctccaaggctcaaatcaatgcatctttgaaggagaaggcagttgcaggactcacagcagcttctgtgacagcatctatggtggttccggaggtggctcatgctgctggatatgagttctccccttccctcaagaactttctgctaagcatctttgctggtgggtttgttctagtagccatatttggagccgttattggggtttccaactttgatccggttaagagaacttaaagcccgcatgctccaatgctttttaatttcatatgtctttttcactactcttctatcttcttctttcatgtatgttatatgcaactggtatatgttatatgcatactatctatatcccagctgcactttattttatggtatattctccct

SEQ ID NO: 16778 - DNA, 470 bp, Glycine max
  Clone ID: LIB3106-113-Q1-K1-E7
tccacgcgtccgagaaaatccatacaatcttcaccaccaaaaagaaaataatggcaatggccagtgcaacaactctagccacaatcactgttgtggcggctagccccagtgttggcagcagaaggagtgggaagaggaatgtgaacttcatcagagggttgaattcttttggagggttgaaggctcagaacaatgtgacattactaggccttcctgtgtgcactgagcagagctttgcaaatgtggtgagctcattgaaatatccatcatcatcatcacgtaaggggagaggtggacgtgctgccttttcaacatgcaatgctgctgatgagattttccagattgcagccatcatgaatggccttgtgcttgttggggtggcaataggcgttgtccttcttcgagtcgaagcgtttgtggaagagtctgagtgagaattgcatcaactattaatgcagttttcatatatg

SEQ ID NO: 16779 - DNA, 452 bp, Glycine max
  Clone ID: LIB3106-113-Q1-K1-E8
cccacgcgttcgcccacgcgtccgcccacgcgtccgctcaactcaccaacacagttgcattattttctttccagatccaactcaaaattgcaatgggagtagaagatacagatatttgtatcatcaaggagccagatcatgttgtagtctattcagatggcatttcccatgattcaggtcatgaagctggaagtgatcatcacaatattacagagtcttatgaacaaatcaatgagactactgaacatcatagttcagaggagagtgcaaaggaatatgaggtgaaggaatgtacaacagaaatttctgttaaggtctctgatgtctctaatgttaaaaaatgtgaggataagttaacctcagattctgagggtgtcctcagtgagaaaagttttaaatctcacaaaacaaggggtaaacataagccacgagataccgggaagaatggatca

SEQ ID NO: 16780 - DNA, 333 bp, Glycine max
  Clone ID: LIB3106-113-Q1-K1-E9
ggccagtctcaaacagtatttgtaaggggtttcgatacatcccttggagaagatgagatacgagggagtttgcaagaacattttggatcttgtggggacattaccagggtgtcgattcctaaagattatgagtctggtgctgtcaaggggtttgcttacgtagacttcagtgacgttgatagcatgggcaaagctctagaactccatgaaactgaacttggaggttataccttaacagtggatgaagccaaacctagagataatcagggttctggtggtagacgtgccggtggaaggagtggtggcggtcgatttggtggtaggagtggtggt

SEQ ID NO: 16781 - DNA, 459 bp, Glycine max
  Clone ID: LIB3106-113-Q1-K1-F1
aataactccattttccctctgtcttccccccctcctctacacaaaaatatattattagcatggagaaggtgaattttgtgaagaatggagagcttagattgcctccggggttccgtttccacccgactgatgaggagctggttctgcaatacttgaagcgcaaggtcttctcctgccctttgccagcctctatcattcctgagcttcatgtttgcaagtctgatccttgggatttgccacgtgatttggagcaagagagatacttctttagcaccaaagtgggcaaatatcccaacggaaatcgctccaacagagccacaaattccggttattggaaggcaactggcttggacaaacaaattgttacttcaaaaggcaacaaccaagttgtcggaatgaagaagacactttgtttctacagaggcaagcctcctaatggatccagaactgattggatca

SEQ ID NO: 16782 - DNA, 82 bp, Glycine max
  Clone ID: LIB3106-113-Q1-K1-F12
cttaatctcggtcttatattttaacaaaccgtattttactttctccaaacaatacatatatctatcggactagattttcccc

SEQ ID NO: 16783 - DNA, 479 bp, Glycine max
  Clone ID: LIB3106-113-Q1-K1-D5
acgccagccttttttgctgattcttattttctcaacaaattctcttctaatgtcattgcagaaagagctcaagtgcctgccactgcaagggtcatatgtgaaaggcatgcaatctcagttgtgccagtaactcgtgtcaccatggctcatcgtcgacaatccttcagtttctacattatagaatatggcagagaggtctatttgaaggattattaccctgctagatattgctggggcctgtgtccttgtttggagtggttgaagttgtaatgttgaaactgttcttcctggcagcattgtgcacttgtaaaggtttcatctacacatttgcgagttctgagcatgttcagcttgataataacacaatcagatttcacggtttgagggctgagcagatgaactttatgatatgaggaaatacgttatgcatcgataatataaaataattttacactgtcatacaattactaatcaccatg

SEQ ID NO: 16784 - DNA, 360 bp, Glycine max
  Clone ID: LIB3106-113-Q1-K1-C10
ctcactcactagcttcttctctgttctcaccaatggcatcaacaatatcagcaatggccatgatcaacgccaaatgcgtcaacccaaagttccccaatcccaccaagctcgcaccatcaaaaccctcccttcagatcaaccttccaaagggcctcatagcctcacccgaaagcactaaactttcccccgcgacagcaatcgcaggagcaatattcacaaccctcggaacctgcgacgccgcattcgctgttcaacaaatagccgacatagcagaaggcgacaaccgcggactggcactgttgctgcccataatcccagcaatagggtgggttctgttcaacattctgcagccggcgctga

SEQ ID NO: 16785 - DNA, 387 bp, Glycine max
  Clone ID: LIB3106-113-Q1-K1-C2
gcgttcggtgatggactcgtgaaatccatatttctttgctttacgtggtgcagatgactctgcacgggtacatgaccagcgataatggcggtgggatttagcatgactttcacatcaccctgttaacacatatatgcctagacactgaattgcgccatatcatgtacatattactggatgggcttactcaagctttggcgaactacatgcgccttatcaagatgagctcacatatgcgtcttgaaagaatctgcactcttattcttcatctccatctgctacatatgaggatttgaagaatattcatgaggcacaggtttactcatgccacatgaatgcacagacaatgtccggagtgaataggtctggccgccatgatgaatatgt

SEQ ID NO: 16786 - DNA, 423 bp, Glycine max
  Clone ID: LIB3106-113-Q1-K1-C3
caagctccttatcgtgtttgcattgcagagagagagagaatggcgaccacacccggtttgtgtggcagtgtgttgttgagcacctcgttcctgaggaagcaggcaatggcatcagtgaacatgagaatgctgaaggctaatgctggtgtttttggcttaaagggagggcgtggagggcgtgtgagtgcgatggcaagttacaatgtgaagctgataaccccagaaggagaacaagaatttgaatgcccagatgatgttttcattcttgaaaaggctgaggaatttggcattgaccttccctactcatgcaaagctggtgcttgctcttcctgtgccggcaaagttgtttctggcaaagtcgaccaatctgatggtagttaccttgatgatacccaaatcggtaacggatttgttctcacctgt

SEQ ID NO: 16787 - DNA, 348 bp, Glycine max
  Clone ID: LIB3106-113-Q1-K1-C4
ggttttagcgctattctctttacagttacatgttttctacgagagaggcattgtatgatgaattatgtcctcttcataatgggggatcctcagtctcaagattccggggacaaagtttgtggcataagcccaagcattgttgttcactgggtcagcaaggtgatcagcaaggttttctaaaggtccctttcctgtcacaattgcctgaacaaagaatccaaacatggagaacatggcccaactaccattcttgaactccttcaccttcagctcatcaaaagcctctgggtcatcatcaagaaccaatgggtcaaagctggcaccttgatagattggatcagtcacctt

SEQ ID NO: 16788 - DNA, 478 bp, Glycine max
  Clone ID: LIB3106-113-Q1-K1-C5
cccacgcgtccggcgagacgagccgtttctaattaatgataggtgtcaagtggaagtgcagtgatgtatgcagctgaggcatcctaacagaccagtagaacttccaaatatgttcgtttggatcccaacttagaagataatgatcttgatgacagatttcggggtctgcaacgtcctaatgtgagaaaagataagtggttagagattgagatgggagagttcttcaactcaggcttggaagaagatgaaatctatatgaatgtcagggaaactagtgatatgtggaagcacggcttcattcttgaaggaatagaagttaggcctaaacatgtttgatccgtcaaatgattgtacttaggcctaacctgaatggatggtggtgtttgctacagtggatggagacccggaataatacagactggttatctcgataaattctttttctgatttagcttctttgagataaaaaatcaactta

SEQ ID NO: 16789 - DNA, 464 bp, Glycine max
  unsure at all n locations
  Clone ID: LIB3106-113-Q1-K1-C6
aaggcacacatccaatatatatttcattaaataacaacatgaaattcacactcaagtcatagtttctcatcgtttcagggtttttttttttccctcactttccggggacaaagtttgtggcataggcccaagcattgttgttcactgggtcagcaaggtgatcagcaaggttttctaagggtccctttcctgtcacaattgcctgaacaaagaatccaaacatggagaacatggccaacctaccattcttgagctccttcaccttcagctcagcaaaagcctctgggtcatcagcaagacccaatgggtcaaagctgccacctggatagattggatcagtcacctcaccaagaggcccaccagcaatacggtaaccctcaactgcacccatcaagataacttgngtggcccagatggcaagaatgctttgtgcatggatcangcttgggtttgccaagtagtca

SEQ ID NO: 16790 - DNA, 472 bp, Glycine max
  unsure at all n locations
  Clone ID: LIB3106-113-Q1-K1-C7
gagcacaaaacaaaacagaaaaaaggcagtgcgagtggagtgaagtgaagtgagtgagagaagcgcaaacaagtagaagagaaaatcatggcagcttctgtaaccattttagttctcatcatcgctctgcatctcatagccttcgtctttgccattggggccgaacgacgtcgtagcgaggtaaccctaccccgtctctttctctctcctctcgctttggtttccgcaattgacctctgaaatctgattccctttcaggccaaagtggtccccgacgagtacgacgaccgaaccttctgcgtttacaccaccgacgcttcctccgtctacggcctcgccgtcgtcgccctcctgctcctcagccacaccgtccttaacggcgtcacccgatgcctttgctgcggtaaaggcctcgtctncggttgctccgtcacttgcgccgtcttctccttcatcctctcatgttttttgg

SEQ ID NO: 16791 - DNA, 467 bp, Glycine max
  Clone ID: LIB3106-113-Q1-K1-C8
cccacgcgtccggaggagagcattcctgctttccagagagctggaaccattattgcaaggaaagaccggtttcggcgaagttccactcagatggcaaatgatccctacactctggttgtagctctgaatagttcccaagcagctgagggtgaactctacatagatgatggcagcagctttaattttctgcaagggggctatatccatagacgatttattttctcgaatgggaaacttacttctatagacctggcacctgcttccagtagcaaggggcgttatccatcagatgctttcattgagaggattatcctgctgggacatgctcctagctcaaaaaatgcactcattgagccatcaaatcaaaaggttgatattgaacttggccccctttgggttctaagggctcgtgcaccagctgttacaaccatacgtagacctaatgttcgtgttgcagaagattggac

SEQ ID NO: 16792 - DNA, 441 bp, Glycine max
  Clone ID: LIB3106-113-Q1-K1-C9
cagctgtgtacaaaaattgtggaaactgacatgggtgtgtccaggacgtttgaggggaattactctgagtatgtaatttcaaaagcagcatggattgaagcacagtatgctgcatgggagaagcagcagaaagaaattgagcagacaagagacttgataagtagattaggtgctggagcaaattctggccgtgcttcttctgccgagaagaagctggagagacttcaggaagaggaactagtggagaaaccttttgaacggaaacaaatgaaaatcaggttccctgagcgtggaaggagtggaagatctgttgtagcaattaataacttggaatttggctttgaggataagacacttttcaaaaaggcaaatcttacaattgaaaggggagaaaaaattgccattattggtccaaatggatgtggcaagagtcctttactg

SEQ ID NO: 16793 - DNA, 460 bp, Glycine max
  Clone ID: LIB3106-113-Q1-K1-D1
cccacgcgttcgagtactttcaagttcctttgtcaataagcaagaccaatacactgtggaaggagtgcagaatcttggagacaaagcagtgatgtgtcataggctaaatttcagaactgcagtattttactgccatgaagtccgtgaaacaacagctttcatggttccattggtggctggtgatggaaccaatactcaggcacttgctatttgccactcaaatacttctggaatgaatcatcaaatgcttcatcaacttatgggagttgatcctggaactaaccctgtttgacatttccttggaagcaaggccattttatgggtacccaatttatctggggacactgtctatcataccaacattggtgcttaattagtccatgcatcttgagcaccatgagaatgagattgtgtataaaataaattatcatgtgctgcgtgttgtgcaagtactatcttc

SEQ ID NO: 16794 - DNA, 366 bp, Glycine max
  Clone ID: LIB3106-113-Q1-K1-D10
cccacgcgtccgatcaggacacatccatggtggcatgctctttcaattcccaattgaaattcccccggggccagcttttttttattcaagaaatcaacacccaattttcaaaattccaacttgtaaattggaatcaactttctttccatttgtcaaaccataccaatcaaccaacctcgttgcttcttgagatcactctttgaaccaccctcatggatattgatgagtgggagcttctctctgatgatggctaccttgatttcaatgaagagggtgggaagcaaaagcaaaagcaaagttcctttggaaaattggactcaaagggtgtctttgacaaggactacttttgctcatcaccaccaccaa

SEQ ID NO: 16795 - DNA, 349 bp, Glycine max
  unsure at all n locations
  Clone ID: LIB3106-113-Q1-K1-D12
cccacgcgtccgcccacgcgtncgcccacgcgtccgcccacgcgtccgatagagtgaaagaatgggtgagaaaagcaagattttgatcataggaggcaccggctacatcggcaaacatatagtggaagcaagcgcaaaggctggaaatcccacttttgctttggtgagggaatccacactctctgacccctccaaggcacaactcatccacaattttgaggctttgggcgttaatttggtccgcggggatctgtacgatcatgagaagttggtgaaagctatcaagcaagtagatgtcgtcatatccacgctgggtcacctgcagcttgccgatcagctcaagatcatc

SEQ ID NO: 16796 - DNA, 440 bp, Glycine max
  Clone ID: LIB3106-113-Q1-K1-D2
gttcgctccatagctgcagcattagggtttttcatctgcttcaatggggaagggaacagggagttttggtaagagaaggaacaggactgacactctctgtgtgaggtgtggccgtcgcagcttccatctccagaagagtcgttgcgccgctcgtgctatccccgccgcacgcactacgaaatataactggagcgtcaatgcaatccgcagaaagaccaccggaactggcaggatgaggtacttgcgtaacgtgccttgccgattcaagagtggcttcagagaaagtaccgaaactgctcctaggacgaagggagcacctaccactgcataaacctgtcaaagatcgttgcttgctgggtacggacttacaagaatagattgctcccctgtgcttatggcaagtattttggaacacttatctgtagagtctgatagctact

SEQ ID NO: 16797 - DNA, 435 bp, Glycine max
  Clone ID: LIB3106-113-Q1-K1-D3
cttgatttgtttatcaaacaaagctagacccaccctccttgattctgaaccattccttgcaccaaccaacacgacactcccaagttccagcaaggaatcactgccaccttgtttcctttcttctcatcatttcgtttcacaaaaaaataaagaaccatggaggggagaatgggactcttgtttcttcttgtattgggtggtgcatgggcttgtgatggaagagaactcgcaaactgcaatcaattgagcaaactaagcagaaaaccagatgtgtgtgcactttgtgaggaatatactaccaatgcacttgattatttaaatgaaaacaagacccagctagagatcattgatatcctgcacaatacttgctaccagcttcactcttttaagcagaagtgcattacttttgtggactattatgctcctcttttcttc

SEQ ID NO: 16798 - DNA, 401 bp, Glycine max
  Clone ID: LIB3106-113-Q1-K1-D4
attttccatctcatggtccagaatattccccaagggcaagggagcagttaacaccttgggggtcaagttctacaacgatctgattaatgagattatagcaaatggcttaaagccatttgtcacgctgtttcattgtgacctaccacaagctcttgaagatgaatatgggggatttctcaaacctgaaatagtggaggacttgcgtaactatgctgacttttgcttcaagacatttggtgatcgggtgaagcactgggtaaccctaaatgaaccatatggctacagcgtgaatggctaccgtggtggaaattttgcaccacgtagatgttctaactacgatggaaaatgccctgctggtgattctttcaccgagccctacattgttaaccaccacttaatac

SEQ ID NO: 16799 - DNA, 407 bp, Glycine max
  Clone ID: LIB3106-113-Q1-K1-C1
ctgatctgcgtttccagagccatgctgtgcttgcattgcaagaggctgctgaggcataccttgttgggctctttgaggacactaacttgtgtgccattcacgccaagcgtgtgactattatgcccaaggatattcagctggcaagaaggattcgtggtgagcgtgcttgagttggtgcgttctgtgtttgtgaagatggattgttggtggctgcggatggtgttttgttactaagttttctttttgttgaagcctataggttattagggaaaaataggtgtttacttggtagtcatattaattgtcattggcaaatactgcctaagacactgtgaaggtctggttgttagaaatttggcatgtatttgatttttttggatcctttatttctcggtttatttctgggt

SEQ ID NO: 16800 - DNA, 407 bp, Glycine max
  Clone ID: LIB3106-113-Q1-K1-A10
attagtctcatcgaaatgggagaacagaatgacattacgctgacatgggagaatttggaagctactgtgacaaatggaaagaaccgaaaactaattcttcatgggcttacaggttatgcccagccagggagacttttggctataattggtccttctggcagtggcaaatccacacttcttgatgctttagcaggaagattgacatcaaacataaagcaaacagggaagattctaatcaatggccacaaacaagaactggcttatggaacatcaggctatgtaacacaagatgatgctatgctgtcatgtttaaccgctggggaaactgtatactactcagctatgctccaattttcaaacaccatgtctgtagaagagaagaaggaacgagcagatatgacactgag

SEQ ID NO: 16801 - DNA, 361 bp, Glycine max
  Clone ID: LIB3106-113-Q1-K1-A11
atttcatcacaatcttcctcaatcatgtcttcagaaacaaaagcagaaacacaaactttgaccaccccctcttactcctcagatgttgacaatggtatagtgaaggatgtagtcctatggagaagaaagaaaataaatataagcgttcttgttgcggcaacagcggcatgggtgttgatggaagtgtttgaattcaacttcctcactctcatatcatgggtggccatactcggtcttgcttcaatattcctctatgccaatatgcttagacttttgggcaaggaaccaccgaacttgttggggttggaagtgagtgaaaaaacaacaacgagaatagcacacacagttcgagcatggattg

SEQ ID NO: 16802 - DNA, 329 bp, Glycine max
  Clone ID: LIB3106-113-Q1-K1-A12
cccacgcgtccgcatttatagtttactattgaaagatgggtttgaaaatggcaatactgatcctaggcctgctggccatgttccttttggtctcctcagaggtggcatccgcgaattcaaaagaggtgacaaatggagttgaagatgccaaatatcctggtggaggctatggtgggggttacccaggcaatggcggtggtggctatcctggccgtggtggtggctaccctggtcgtggtggtggctatccacgtcgcggtggtggttaccctggtcgtggtggcggctatccaggccgtggaggagggtattgtcgctatggctgttgc

SEQ ID NO: 16803 - DNA, 474 bp, Glycine max
  Clone ID: LIB3106-113-Q1-K1-A2
atcaaaattacacacatttagctacccttactttctatggcttccaacaaactcctggccaccatgttggtgctttctctcctctcttactcaacattcactcatgccaattgcccaccacccactccatctgcaaagcccacaccaccaactgcaataccaacaccacccacaccaaagcccacaccacccactccaaagcccacaccaccaactgctaagcccacaccacccacaccaaatcccacaccacctactccaaagcctacttgtcctcctccttctcctccttcaccaccatcaaacaaagcctcatgccccaaggacacattaaagctacgtgcttgtgctgatctcttacgacttgttaacattattgttggaactcctacttcgagccagtgttgtgcattgatcaagggttcggcggatctggaagctgcactttgcctatgcaccgcaattaagagcaat

SEQ ID NO: 16804 - DNA, 406 bp, Glycine max
  Clone ID: LIB3106-113-Q1-K1-A3
cgaatcaggaggagcaggacaccatctgtttcacgcagtccacgatatcgagctcgacgatatagccgacgtacgagcccagttcgtagtaggagtccagttcgcagtcgttccccagttgatcgatcccgacccactcgtgtggagaggcgtgcatcttcttctcggagcaggagtccatgcaaattccggtctacgtctaggtccaggtcattcgtggaatctgtaccaagagcacgtagagacagcacgtccaggtcatcgtgcagaagcccagatggaaagaaaggcttggtctcatatggcgatggttcttcatactaatgtgaaaggtgaaatatgtggtgctgagggctttgggtcacactgtaacctttaatgagttgcagggctcaatttttgaact

SEQ ID NO: 16805 - DNA, 218 bp, Glycine max
  Clone ID: LIB3106-113-Q1-K1-A4
gcagagtgcagtgacttgagaatggccttgccagtggtcgtcgacgcagagtacctcaaagaggtcgacaaggctcgccgcgatctccgcgcactcatcgctaacaggaactgcgctcctctcatgcttcgattggcctggcacgatgccggaacttacgatgctaagaccaagactggtggacctaacggttcgatccgtaacgaggaacagtattc

SEQ ID NO: 16806 - DNA, 421 bp, Glycine max
  Clone ID: LIB3106-113-Q1-K1-A6
gtgaggagaatatgaagttgtttgttttctttgttgctgcagtagttttggtagcatggccatgccatggcgcatgctaccaaaggttccctctccgaatgaaaactggctatggtgagcgttcttcggaggtaaaatgcgcaagttttaagcttgctgtggaagcacacaacatccgagcctttaaaaccattcctgaagagtgcgttgaaccaacaaaggactacattaatggcgaacaatttagatcagactctaaaacagtttaccaacatgctgtcttttatgctagtgaacgcgaagtccatcacaacgacatatatatattcggcatagattacaccgtactctctaatatcccatactatgaaaaacatggatatggggtggaagaatttaatgaaaccttatatgatgaatg

SEQ ID NO: 16807 - DNA, 307 bp, Glycine max
  unsure at all n locations
  Clone ID: LIB3106-113-Q1-K1-A7
tcgggtaaaaccaagggtgaacgaggaattacagtgtgcgcggttctggtcagttgaaagaccaacacacttggcatagatgtgtatatttatttataattttataataaggaacataagaatggaaattcttggttccttcggtttatgcagactagtccagtagatgttaatattgattttatgttggttacaatatgatttaatttaatcctgtangcttgatatggaatttatccatgttgactcgnttatagaaaggtttggtgatatgatcaaatgggtaagtcatgttcctcttcgttgg

SEQ ID NO: 16808 - DNA, 282 bp, Glycine max
  Clone ID: LIB3106-113-Q1-K1-A8
cccacgcgtccgaatctttatataataatataaataagactaaaaaattaaaaaaaaaaaacgaagcgttttgggtttaaaattaattgtttaaggccaaattgtaaatcgaggcacccattttatgataaactctccttacattttgtgtcctctagtaggccaaatatttccggcaattgcaatggcttctatatttctatatgttcaaaaacacaagtttttttagattcagaaaacaatataaaaatctggggttttttattccccaaattatatact

SEQ ID NO: 16809 - DNA, 364 bp, Glycine max
  Clone ID: LIB3106-113-Q1-K1-A9
gaaaatgtggcttgtgcagctctcaaccccatttctgaacggacatggtcattccaccacccttctgtccaagcacagttcggcggtgactcagacccactgggccccaccgagtttcctgcctcaaatcaatgcgatgaagacaatgcaggggagagtggtgtgctccaccagcgacaagacggtggcagtggaggtggtgcggctggcccctcacccaaagtacaagaggcgcgtgaggaagaagaagaagtaccaggcccacgaccccgataaccaattcaaagtcggcgacatcgtccagctccagaagaccaggcccatcagcaagaccaaggcctttctcgcactccccgttcccaaa

SEQ ID NO: 16810 - DNA, 268 bp, Glycine max
  Clone ID: LIB3106-113-Q1-K1-B1
tcgcccacgcgttcgccctgctaatgttgtgactgtggaacctaaagttgccactcaacaagaaactgcacaagctaaaccagtggcaaaacaaccactttctccttatatcgtttatgatgatttgaagccaccatcatctccttctccatctcagcctggtggtgggaaaccaacaaagatcagtgagacagtgccaaaaccaagtgcttcagatactccaagtagtgtgccaggagtagatggcatctctcaaacaacatcgtca

SEQ ID NO: 16811 - DNA, 232 bp, Glycine max
  Clone ID: LIB3106-113-Q1-K1-B10
acgggcgacattgttgctatttctctcttaaacttgaaaccttcgctaaagttatctccttctacaggctctgggtgtatcaccaaacgagctacccatggggccgcgttacatggatctcccacctcggtctcagggggtgccacattctcatcctctttcgggtctcgttttgaagacaccatcacgaagaccgtaaatgagaactcactggacacgcattccataacct

SEQ ID NO: 16812 - DNA, 366 bp, Glycine max
  Clone ID: LIB3106-113-Q1-K1-B12
gaagattccacaacagtgggagggagatccaaaaagagagagtggaaaagatggcgcggttgatcacagtggtgtggtgcgcggtggcggtgctattatgcgccgcggccggtgcgtcgtgggtggaggaggcggcgaacccgatacgaatggtgtctggcgtggaggcggacgtggttcgggtgatcggggagtgccggcgtgcgttgaagtttgctacgttcgtgagcaggttcgggaagagttaccaaagcgaggaagagatgaaggagaggtacgagatattctcgcagaatcttaggttcattcgctcccacaacaagaagcggttgccctatactctctcttgtaatcattttgctgatt

SEQ ID NO: 16813 - DNA, 386 bp, Glycine max
  Clone ID: LIB3106-113-Q1-K1-B3
aaagcaagctcatcctagagttttaaaaatggcagcagcctcctccatggctctctcttccccatgcttggctggcaaggccgtgaagctgggcccatcagcccccgaagtcgggagggtcagcatgaggaagaccgtcaccaagcaggcctcctacggaagcccatggtacggcccagaccgcgtcaagtacttgggcccattctctggcgagcccccgtcctacctcactggcgagttcccaggtgactacggctgggacactgctgggctttcggccgacccagaaaccttcgccagaaaccgtgagctcgaagtgatccactccaggtgggccatgcctcgggccttgggctgcgtcttccccgaactattgtcccgcaacg

SEQ ID NO: 16814 - DNA, 169 bp, Glycine max
  Clone ID: LIB3106-113-Q1-K1-B5
tcgcccacgcgtccgtagacatggaatttatggaaaatttatgttgcgttattcgtggagtatgatgtgtttatttattcatctgtcacaaattacattaataaacacatcatactccacatcaaatcgttgactgtctaaaaaaaaaaaattcataaaaaattaaaaa

SEQ ID NO: 16815 - DNA, 474 bp, Glycine max
  unsure at all n locations
  Clone ID: LIB3106-113-Q1-K1-B6
cccacgcgttcggaagcatcaggccactcctgcccagttggcattagcatgggtacttcagcaaggcgaggatgttgtacctatccctggaacaactaagattaagaacctggatcaaaacataggtgccttagcagtgaaactgtcagaaaaagacctgagagaaatttctgaggcggttcccattggtgatgtagcaggtggtagatactacaatggattggatcacttttcatggaagtatgctaacacaccttcaaaagattcaaaaatctcaacctgacgcacccaaccaaccctttggttagggaatctaccaagtcatcatgaattgagggtagcaaggctggcaaaggctaatatcaggatgctatttaaatatcaataatgtagcccttcttgatgttggacttnctagatatttggttggttaaaatttttaatttagactgtaatacttttttatatgcaaca

SEQ ID NO: 16816 - DNA, 339 bp, Glycine max
  Clone ID: LIB3106-113-Q1-K1-A1
cccacgcgtccgaacgctttgagttcagcgaggaagtaggttgtggatattgatagaaacaaatgagatccgacgccttccaaacagctaacatttatcgccttcttctcaaggcagtcaagaaacatattgggaaggaagagaacaagagacattttatagaatttgtaacctcagagttccgtaacaaccgaaatttgtctgactgtgtggctatccaacagaaaataaagcttgctcgtgattatacttttcttcttaacagtgtacaccatcacaaggatttacttttttcatacaatattgccgtggataggtcagatgaagtaaaaaggactc

SEQ ID NO: 16817 - DNA, 167 bp, Glycine max
  Clone ID: LIB3106-113-Q1-K1-B7
cccacgcgttcgacagtacctggatgccactggtgatgaaggtgactatcttgcggacgaggacgtgcaagagcatggccgacatgacatgtcacctagaacctggtaacgtatcgccgcggctcaaagacgtgtctcatgccacaacttcctgtcgcaacttaatt

SEQ ID NO: 16818 - DNA, 289 bp, Glycine max
  Clone ID: LIB3106-113-Q1-K1-B8
caccctttctctctcttctctctctctctctctctctctctctttttctctctgttacttcacaataccaacagcacaacctggttccgggtcgcactacttgccccggatcaggacccttctcatgcaaccaccgattcaagtgtttttcgcctttcctaaacaacaactataggcaactaaagtcgaccctttggctagataatcacaccaacatcaaaaaaatccgtttttgctttgtgggtattggtgctttaattttagttgtgacaaaaaaaaaaataaacat

SEQ ID NO: 16819 - DNA, 183 bp, Glycine max
  Clone ID: LIB3106-113-Q1-K1-B9
ggttggtggtggaactcggtcttcttcttttggtggtctggggttggggttggtttttctctcacctgaaaatgtcttgctgcggtggtaactgtggttgcggaagctcctgcaagtgcggcaacggctgcggaggctgcaagatgtacccagacttgagctacactgagtcaaccaccaccg

SEQ ID NO: 16820 - DNA, 260 bp, Glycine max
  Clone ID: LIB3106-112-Q1-K1-G4
agtagatctgatatcacagattctttaatgcaaacggtgagtactggtctgtaaatcatggttggtgctgaacagttctatcacggtactagcagcaggctacacactgttgaagacagattatcagaaaatattcagatagtgcaagttaatacaatgcaatcggggatcaatggagaagcttattcctggaactatttacatcgcttgaacagttcgagtatggacgctcgtggttagtggcgtacgcagggaaaata

SEQ ID NO: 16821 - DNA, 317 bp, Glycine max
  Clone ID: LIB3106-112-Q1-K1-G5
caaagatgagtttgctgagattactttagactttttgctagcacaggagaagaaagagtcattgtggcaaataaatggggaatcgggactaagctcaagctagtgacactactagctcggctgactgtaacctcctgagatagcttagtatgtacattcaatacctgtggacgagtattgtcacaggaatgctccattaggttccttgactgggccaattttggtcgctaatggaatatagatgatacaacttttagtttattttagaaatttatgaatgggatccacttaaactgaaaaaaatatttaagtttaat

SEQ ID NO: 16822 - DNA, 189 bp, Glycine max
  Clone ID: LIB3106-112-Q1-K1-G6
aagaaacgagcgctctgagattacatggcaataatggactgcttaaccgcaggatgtatcattggcaacgattattcgggactggggactaatcctatgctgatcactacagctattttggcagactgcaacggccaccgttacttcattgtgaccattagctcgtgacgttctttaacgttactagaa

SEQ ID NO: 16823 - DNA, 456 bp, Glycine max
  Clone ID: LIB3106-112-Q1-K1-G7
ctgatgcgcccttgtcagagcagacactaactcaagcttgggctacagccagagagcatttggcaagaacccttttcagtgtatgcaagcatcattttctcaatcctcttccttttttcaattcaagctgtgtgaacatgaaattgaaacttggacaagaaaaattcaattaaaattccccccaaattaccgtgcatgtgtcgtcgcctggacccaaatcactctgtctctctctgagcataatattaaggtttaacaaggagtcttcttcactctggcaataacactcacaacacagcgatgtcattttcgttgatcgccactccgcagcaacagcgaccgcatcagcagtctccttttcagccacagtaaactagtttggtcctttcgcagcagcagcaacaatttcaacagcagctacatcatcaacaacagcaacaacaacaacaacagctt

SEQ ID NO: 16824 - DNA, 348 bp, Glycine max
  Clone ID: LIB3106-112-Q1-K1-G8
accacgcgtccgcccacgcgtccgattaaaatagtgagagtactagaaggtcgtgagatcgcatagggaataatggaaacagaagcggttgaagatattgtgattgtgggagctggaattgctggccttacaacatccttaggacttcacacgttgggtatcagaagtttggtgctagaatcttcagacactttgagggtcactgggttagctttgtcaatatgggaaaatgcttggaaggcattggatactgttggtgttggagacttcatccgtcactaacatctccagctcaatgggattgtcactacttcattggttacagggcaacatacatcagatatgcct

SEQ ID NO: 16825 - DNA, 428 bp, Glycine max
  Clone ID: LIB3106-112-Q1-K1-G9
ataacataacctcttgtgttgtcatctaagaaaacctagtgagagtgagcacacattgatcagggacaatggcagcctactcaagccatgctttgaaaaccatccctttttcttcctttgtgaagcctgtcagtaccaaaccaacatcattcttcacaccttcacctaccaaacctttcttaccctttacctcaccaaaccactctctcaccaaaaatctcaagctgaactccactttgccacacttttgcttgtcttcagttcccaagaaatctttcacttgtagaagccaggcttatcctgttgactcagaaaaagtgcaagaactgagtgtgtattagatcaacgagcgtgaccgttgaagccccgtgtatcttcgattgatctataaaagtgtcaatttccttggtgaggtagttccttttagc

SEQ ID NO: 16826 - DNA, 452 bp, Glycine max
  Clone ID: LIB3106-112-Q1-K1-H1
cagaaaacgaagatgggggcggaatccgcgtcaccggcatgcaattctcctacgacgtgcagcggccgccgctcttcctcgacttgaacctcaacgtctctcccggatcccgctgcctccttttcggtgccaatggatccggaaagacgactttgctgaagattctggcggggaagcacatggttggaggaagagacgttgtgcgcgtcttgagtggttccgcttttcacgacactcagctcgtttgtagcggagatctcgcttatttgggcggatcttggagcaaaaacgttggctccgctggagaaattccgctccaaggagacttctctgctgaacatatgatctttggagttgagggtgctgatccagaaaggagagataagttaattgagctgcttgatattgatctacagtggcgaatgcataaggtatctgatgggcagcggcgt

SEQ ID NO: 16827 - DNA, 369 bp, Glycine max
  Clone ID: LIB3106-112-Q1-K1-H11
cagacacgcacgctgcttgattcaaaagtagtacatacaagattcttcgctcatagggtttatactccaacatcatatgtttttccatggcgacctaacccaaagcagtcactgatgacgtcaagatcgatctcttctaagacgatcatgagtttgaagagtttgaaatcaattaagagtggtatgacaaataggaaggaaaagaagtgactcagcactggtaggatgattgggatgatgatgatgttagtgatgatctctgtctacacttgagaagggagttggagagcaacactcataagaattaaatcacctgctagttattattgcttgatataacatgttatatgacttgcgtgtttaaactct

SEQ ID NO: 16828 - DNA, 447 bp, Glycine max
  Clone ID: LIB3106-112-Q1-K1-H12
cccacgcgtccgaagaccaagtggaccgactccgtcaccggcaccatgccactcggaaaaaagatcgaggccgggctcatcgccggcggcatcggcgccgccgtgggaaaccccgccgacgtggcgatggtccgaatgcaggccgacggccgccttcctccggcgcagcggcgcaactacaagtccgttgtggacgccatcacgcgaatggcgaagcaagagggcgtcactagcctgtggagaggctcatcgcttacggtgaaccgcgccatgctcgtgacggcgtcgcagctggcttcctacgaccagttcaaagaaatgattctcgagaacggcgtgatgcgcgacggcctcgggacccacgtcacggcgagcttcgcggcggggttcgtggcggcggtggcgtccaacctcatcgacgtgatcaagaccagggtgattaacatg

SEQ ID NO: 16829 - DNA, 275 bp, Glycine max
  Clone ID: LIB3106-112-Q1-K1-H2
cccacgcgtccggagcacaacaggtcaccaggatactacgaaaccgtgctccaactcgaattccaagcaaggaatccatcccttgctaagaaggtattctacttcctttgccaattgtgcatcatcaaggtctggcaggtaggaaagagtctcaaacttcttcttgccaactggtggccacacctgcatgcattgcactcttccaccgttgctagcaatggaggtaatgtcattgttggtcttcctggtggggaagccagcgttctatatcgcga

SEQ ID NO: 16830 - DNA, 456 bp, Glycine max
  Clone ID: LIB3106-112-Q1-K1-H3
agcacgcgtccgatcacgcgttcgcacacgcgtacggtctgaaacgatcgctgccacggcgaccacgaccctctcttcaaacccggaactcgcatcttgccacggacagcccgctacatattcttagcgcgtcgtacccaccaccaagttattctcattcaaacaaggcacaatctgcatgtccctaacccaacaccccatacgacctgcaatccttcaaattccaacccatcgtagaatccatcgtctcacgcgaaatgacgcgccggtacatgaccgacatgataacctacgcccacaccgacttcgtaatcgtcggagccagctcggcggtgctctcctgtgcgtacgagatcagcaagaaccccgccgtgagcgtcggcataatcgagcagaccgtgagcgcccgcagaagcgcgtggatcggcggacaactcttatccgacatggtggttc

SEQ ID NO: 16831 - DNA, 219 bp, Glycine max
  Clone ID: LIB3106-112-Q1-K1-H4
gccacgcttaagatcactcatgagagaacgcaagacacacgaaacaacacacagagagagattgaggaagggctcatcaaggctgcagactcgtactgggccagtgatagctcttaacgtagcagcttcgactataaacttaaaggtagtcatgatcatcacaacgaagcacacttttaaggttcatgagagggcttcagaacagcctgcaatggttca

SEQ ID NO: 16832 - DNA, 453 bp, Glycine max
  Clone ID: LIB3106-112-Q1-K1-H5
cattgctgcgtttcttatctttctctctctctctctctttgtgtgcaaaaaagaactatgcttgatattaatgaataatgttgattcttatctgccagtctgctactacttagtttttttttgaagtgtaaaactggctccccatagcttcttcttcttttgcacaccccagattccgcgaaacccacctttccttggttctcagtggaaggttttgttcttttgtcttttcttctgtttgggtgaattgggtaatctgaattttcaacaacaaacaattattaagttccatggttcagtcttggattccttgcctgctggctccttgaggtgttttgtccgattgcgtggtgttcgaggttttggagaaattaatgaaacactgcacacaacacaactgtaacttcatccaaagcaataacttctctttcacgtccatcttatgctctcact

SEQ ID NO: 16833 - DNA, 448 bp, Glycine max
  Clone ID: LIB3106-112-Q1-K1-H7
cccacgcgtccgcccacgcgtccgcccacgcgtccggtttgtttttttgttgagaagagagaggggctgtggcgtcgtcatcatggcttatcacgttgaaggtgaaaccttgcattttcgggtctcctcggagatccgcggtggttcggaattgtgcgaagtcaacggcggggacaatatcgacgagttggagcctggacagctggagggcgaagaaggcgcttcagcttccggagtacccagatgcgaatgaattggacctagtcctccaaaccctctcttcttttcccccaatcgtcttcgccggcgaggcgaggaatctggaggagaagctcgctcaggctgccatggggaacgcttttctccttcagggcggtgattgcgccgagagcttcaaggaattcactggcaacaacattcgtgacaccttccgtgtcatccttcaaat

SEQ ID NO: 16834 - DNA, 427 bp, Glycine max
  Clone ID: LIB3106-112-Q1-K1-H8
cccacgcgtccgcccacgcgtccggataactagaaacagtgtgatgaaaatgaaggtccttgggttcttcgttgctacaattttggtagcatggcaatgccatgcgtacgatatgttccctctccgaatgaacactggctatggtgcccgtactccggaggtgaaatgcgcaagttggaggcttgctgtggaagcacacaacatctttggctttgagaccattcctgaagagtgcgttgaagcaacaaaggaatacatccatggcgaacaatatagatcagactccaaaacagttaaccaacaagcttacttttatgccagagacctcgaagtccattccaaggacacatttgtgttcaatatagatggcaccgtactctctaatattccatactacagaaaacatggatattgggtggagaaattt

SEQ ID NO: 16835 - DNA, 457 bp, Glycine max
  unsure at all n locations
  Clone ID: LIB3106-112-Q1-K1-G3
agtgaagcaaatatggcatactctcaacttcaaaaggtggaaactagcctgcagatcaaggcttgtgctgaacagttctatgatggtttttgcaacaagccacacactattgccaacatttcaccagaaaatattcagtcagttgaagttcataaaggtgaatggggcaaagagggatcaatcgtctcctggaactatttacatgagggaacagtttgtgtagccaagcaagtgcttgaaggcatagacaaggaaaataacaaaatgacaatgaaggtcatagagggtgacgtgctgggactctacaagagcttcaagtctaatttgcaagttactccaaaaggaaagggcagcgtaatgctttgggcaatggaatacgagaaacaagaggaccacattcctgacgctcataccttgttgcaactggctgttgtggttagcanaaaaattgatgctt

SEQ ID NO: 16836 - DNA, 366 bp, Glycine max
  Clone ID: LIB3106-112-Q1-K1-F10
tccacgcgtccgggcgagtgagaaatgccagaaggagaagagaaagacaatcaatggagacgagttgctatgggccatggccactttaggatttgaagactacatagatccgcttaaggtgtacctggctaggtacagagaggctgagggtgacactaaatgatctgctagaagtggtgatggatctgctacaccagatcaagttggccttgcaggtcaaaattctcagcttggtcatcagggttcggtgaactatattggattgcaggtgcaaccatagtatttggttatgccttcaatgcaaagccatgaatagtttagatgcttctacgcatcttatttatgtgtctttaatgcttgtacgca

SEQ ID NO: 16837 - DNA, 469 bp, Glycine max
  Clone ID: LIB3106-112-Q1-K1-F11
cccacgcgtccgcccacgcgtccgttctattcattcaagattcagcaagtgcgttttggaagcagagaccgaaatacggcgagatggcccgtacaaagcaaactgctcgtaagtcaactggaggaaaagctcccaggaagcagcttgcaaccaaggctgcacgtaagtctgcaccaacaactggtggtgtgaagaagcctcatcgttatcgccctggaactgttgctcttcgtgagattaggaaataccagaagagcactgagctcctaatgaggaagcttcctttccagaggttggttcgtgaaattgcccaggatttcaagactgatctgcgtttccagagccatgctgtgcttgcattgcaagaggctgctgaggcataccttgttgggctctttgaggacactaacttgtgtgccattcacgccaagcgggtgactattatgcccaaggatattcagctggcaag

SEQ ID NO: 16838 - DNA, 389 bp, Glycine max
  Clone ID: LIB3106-112-Q1-K1-F12
tctacgcgagcttcttcttgctctcgtacttcatatggcgtgtgatcaagtcatcacacaagggctctctgcattggctctagctgaaacttacccttcaacatgtcaagtggcgcatggaaaagtctactgcgatgactgcactcacaactatgacttatctgatatcaaagcttctattaagggtgatggtaaaaaaactggctatggctactacagaaaatgatagctacttcaagggtgatcttaccgtagaccacacaataccttcttcttctgggaatgattgcctaacaaaacttctaggagggccagttcatctttatgtctaaaggtataaccaggtgtaccacattatcaagggcaatgatcagaacagttacaccatc

SEQ ID NO: 16839 - DNA, 449 bp, Glycine max
  Clone ID: LIB3106-112-Q1-K1-F2
cgcagtcataacacactatcaccaccacttcatcaactctacttgacaacaatattgtcaaacgcaaaatctagttacatactcggtttcttcttcttgaaatggctctccaggctgcttctcttggtcctgctactttatcggctcttaaagagggacagagtggacgtgtctctcaaggactccagctcgatcggtctttcattctcagaacctatcaaagctaactctagatcttctgcattgaggtgcacgagggaattcgaacaaaagctctgtgctgagacggccgtaacagtggctacagcctctgcagcagttaccaagtctacaccacaaggcaagaaaacattgatgaacggcagtgttgtgataactggggcttcatttggactaggcctggacactgatgaagctttggctgacaccggaaaatggcatgtaataat

SEQ ID NO: 16840 - DNA, 317 bp, Glycine max
  Clone ID: LIB3106-112-Q1-K1-F3
cccacacattacaccactgcacaatttcttgaatcagtgttcattgcacattatcacagaaatgggtgatgagaacacggacgcaggacggtcatcagggaccacacatgcaaagaatgaataagagtaaaaggatgaagagcccctcataatcatactcaacgtggatatgcactgcaaagctcgtgcatggaacgttgcacaagcattaaaaggatttgaaggagtctatgaggcgactgcatatagcaaggctagcaaagtcgtactgaaaggaaaggcatcagaccccataaacgtgtgttagagactactca

SEQ ID NO: 16841 - DNA, 452 bp, Glycine max
  Clone ID: LIB3106-112-Q1-K1-F5
cccacgcgtccgctcgtttcttacaaggctctactctactgcttcaccttctgctggagaaaaggcagtggtgatacagggcttcggctactctctctgcagccaaaccagcccttcaggcaaatgggaaaggcttctctgaattctctggcctccgcagctcatcaggcttccttcccttctctagaaaatcttcagaggattcccattctgtcattgccttccagacctatgcagatggaagcagcggacgatacaagaagggtgtgacagaagcaaaactgatcgttgccataaacggatttggaaggattggaaggaacttcttgaggtgctggcacggtctcaaagactcccctcttgatgtcattgccatcaacgacacctgtggcgtgaaacaagccttttaccttctcaagtacgaattgatcctcggaacctttgatgctgat

SEQ ID NO: 16842 - DNA, 456 bp, Glycine max
  Clone ID: LIB3106-112-Q1-K1-F6
gtgctttcagctctggttgaaaccatgaagaaaggaactagctttggtgcaccctgtctgctggaaaacactttggcagagctggttatcaatgcggtccccagcattgaaatggttcgctttgtcaattcaggcaccgaagcttgcatgggtgcactacgtctcgcccgagcttataccggaagagagaagatcatcaagtttgagggctgttaccatggccatgctgatccttttcttgttaaggcaggtagtggagttgccaccttgggacttcctgattctcccggtgtccccaaagctgccacttttgaaacccttacagccccctacaatgacactgccgccgttgagaagctctttgaggctaacaaaggagaaatcgctgctgttttcctcgaacctgttgttggaaacgctggtttcattgttcctaaacccgattttcataatttc

SEQ ID NO: 16843 - DNA, 429 bp, Glycine max
  Clone ID: LIB3106-112-Q1-K1-F7
aaaaaaagacaacccagagagcgcgtcttaataaacgctcttctctgaaaacccccgagttcttggcttctttcttcttcgctttcgcttcttcgatcttcgatcttcgtcgctgaaaatgagagagtgcatttcaatccacatcggccaggccgggattcaggttggaaacgcctgctgggagctttactgcctcgaacacggcattcagcctgatgggcagatgccaagtgacaagaccgttggtggaggtgatgatgctttcaacaccttcttcagtgaaactggggcaggaaagcacgtgccccgcgcgatttttgtagaccttgagcccactgtgattgatgaggttaggactgggacataccgtcaactattccatcctgagcagctcattagtggaaaggaggatgcatcaaacaacttttg

SEQ ID NO: 16844 - DNA, 414 bp, Glycine max
  Clone ID: LIB3106-112-Q1-K1-F8
cacatttggaaagtgatgtagcgctttttatcattcgcattgcaaagcaaacaccttgcaaattgcaacggcttccaacaaggttgttgccaccatcttggatctttctctccttgcctactcaacatcattcaccaatgcatgtggcacatgccacccaaaacctactccttctgcccctactccatacatggaagtgccccaaggacacatctaatctaggggtgtgtgctgatgttctaggacttggtaatgatgatgctggttccactgtctctagcaagtcttgtgcattgcttgaaggtttggctgattctgaggctgcactttgcctatgcactgctattaacgccaatgctcttggaatcaacttgcatgtgcctatcacactcagtgtgctactcagtgcttggc

SEQ ID NO: 16845 - DNA, 417 bp, Glycine max
  Clone ID: LIB3106-112-Q1-K1-F9
cccacgcgtccggtgaatcaagaaccgctcttctatggctgctctgcaatacttggaatcgctgcgcaattcgcacgctgagctctccgattggtacaattcgctggcggatctgtaccagaagaagctctggcaccagctcactctcaagctcgagcagtttgtggctctcgccgtcttccaggctggtgatgctttaatacaattatatcacaatttcatcacagactttgagacgaaaatcaaccttctcaagcttgcacattttgctgttatagtttctcggcagtattctgaaaaagaagctgctgttggttatcttggaggggtcattcagaaaacttcaagacactagagagcagcgcatagaagaacctattctttacattaatgatcaaatagcaatattcaagcttg

SEQ ID NO: 16846 - DNA, 440 bp, Glycine max
  Clone ID: LIB3106-112-Q1-K1-G1
cccacgcgtccgctcttaccctgctgttccaggtgggaatagcaactcttcatcttcaggtgcgagtaaaagttccagtggtcagattgaaggaccacctggtgccaatctatttatttatcacatacctcaagaatatggagaccaagagctcacaactgcatttcaaccgtttggtagagttttgagtgctaaaattttcgtagataaagtaacaggagtaagcacatgttttgggtttgttagttatgatactccagaagctgctcaagctgccattagtacgatgaatggttgtcaattacgtggcaagaaattaaaggttcagcttaagagggataacagacagagtcagatttactgatgaatgtggatacttctcaattctcctgacccatcagatgtcaatacaatttgtaattttcatgttacagaaaatt

SEQ ID NO: 16847 - DNA, 227 bp, Glycine max
  Clone ID: LIB3106-112-Q1-K1-G10
acattccaaaccgacgtcaatggcagcctgattctccttcttgaccctcttctccgtcctccgtgggtacaaagccacggcctactggcatgatcactcgcttaccactccataagctacatgccaagcatcagtaccaggaccaccactcgtcggcagagctgtccgacgaggctgacccgtcccacgcgcatgctaacacgctcttataccagtcgtcgtacaac

SEQ ID NO: 16848 - DNA, 440 bp, Glycine max
  Clone ID: LIB3106-112-Q1-K1-G11
agaagaacaagtagttgagaactaagaaggagaagcaaatggcttcctcaatgatgtcttccccagctgttaccactgtgaaccgtgccggtgccggcatggttgctccattcactggcctcaagtccatggctggcttccccaccagaaagaccaacaatgacattacctccattgctagcaacggtggaagagtgcaatgcatgcaggtgtggccaccagttggcaagaagaagtttgagactctttcctacctgccagaccttgatgatgcacaattggcaaaggaagtagaataccttcttaggaagggatggattccttgcttggaattcgagttggagcacggtttcgtgtaccgtgagcacaacaggtcaccaggatactacgatggacgctactggaccatgtggaagctgcctatgtttggttgcactgat

SEQ ID NO: 16849 - DNA, 279 bp, Glycine max
  Clone ID: LIB3106-112-Q1-K1-G12
tccacgcgtccgcgagataactagaaacagtgtgatgaaaatgaaggtccttgtggtcttcgttgctacaattttggtagcatggcaatgccatgcgtacgatatgttccctctacgaatgaacactggctatggtgcccgtactccggacgtgaaatgcgcaagttggacgcttgctgtggaagcacacaacatctttggctttgagaccattcctgaagagtgcgttgaagcaacataggagtacatccatggcgaacaatatagatcagacttcaa

SEQ ID NO: 16850 - DNA, 320 bp, Glycine max
  Clone ID: LIB3106-112-Q1-K1-G2
cgcacgcgtgagacattatcaacatcacttgattaactctacatggcaactttattgtaaaacggataatgtgattacagacttggtttcttgatcttgaaacggatttgcaggctgctactattagtcctgcttctatagcggctcttaaatagggtcagagtggataatctctgcacgactctagcttgaacgatgtatcagcatcagaacgtattgaagctaactgtatcgtttctgcatttagctacctgacgaaattcgtactaaagctctgtgctgagacggccttaacagttgttatagactatgcagcaaat

SEQ ID NO: 16851 - DNA, 424 bp, Glycine max
  Clone ID: LIB3106-112-Q1-K1-F1
cccacgcgtccgtgtacatgcaggggttcgtcgtttacccttccgtaaagtatatggtgtgctgtgttcggtaataacgaaaaaggatcggagctgaaactgaatcatcacaggaaaagccagcacaagagacgccaaaggctgctctctcacaggaacagttcctatcatggaaacgccacaaggacgctgcagtatcagccagaaaagctgaagtatccaggaagcgtgctgaatatattgcagcaggaactgtccaaatgaatggccgagaactgtttttacatgagccatgggtgtgtgataattcacgttattgaggtttcttttcattggctcataattcataaaaactctttatggtcatgctgtgaaaacttatatttcgggtcaaaaacttctctggagcaagatatttttgaaa

SEQ ID NO: 16852 - DNA, 54 bp, Glycine max
  Clone ID: LIB3106-112-Q1-K1-D11
tccacacatacagccaatcttccttaaaataatccagactgatatgaaattcac

SEQ ID NO: 16853 - DNA, 466 bp, Glycine max
  Clone ID: LIB3106-112-Q1-K1-D12
cccacgcgtccggacacaatacagagtgagttgttgctccttcgccacaactctctgccaacatgggtatctccagagattctatgcacaagaggcgtgccactggtggcaagaagaaggcctggaggaaaaagagaaagtatgagcttggtcgccagcctgctaacactaagctgtcaagcaacaagacagtcaggaggatccgtgttagaggtggaaatgtgaaatggagggcattgagattggatactggaaattactcctggggaagtgaagctgtaactcgcaagactcgtgtactagatgtggtttacaatgcctcaaacaatgagcttgtgcgtactcagactcttgtcaaaagtgctatcgttcatgttgatgctgctccattcaaacagtggtgtcttcagcactatggtgttgagattggtaggaaaaagaagacagctgccaagaaggaaactgc

SEQ ID NO: 16854 - DNA, 416 bp, Glycine max
  Clone ID: LIB3106-112-Q1-K1-D2
ctatctatagtaacagaatatttgcctaggggcagtttatttcgcctaatacataagccagcggctggtgagattctagatccaaggagaagattacggatggctttagatgtggctaaagggatcaattatctccactgtctaaagcctccaattgtgcactgggatctcaaaaccccaaatctgttagtggacagaaattggaccgtgaaggtctgtgattttggattgtccagatttaaggcaaatactttcttatcatcaaaatccgttgctggaacacctgagtggatggctccagaatttcttcgaggagaaccttcaaatgagaagtctgatgtttacagttttggggttatcctgtgggaacttgtgactctgcaacaaccatggaatggacttagtcatgcccaggt

SEQ ID NO: 16855 - DNA, 455 bp, Glycine max
  Clone ID: LIB3106-112-Q1-K1-D3
cttaccttattccaatccaatagcaaggaggtaccaaaatagtgtgattcatggctgcaacgagtgcgtcaatctttgcatcttccacgcaaccatgcttgcctgtgcctcctaccattccaaacacgcttgctactccttttctcaatgtttcgtcaccaagaagttaccttgtgaagaaaaagcatgtgaaatttagcaaaaaaatcagtgctgctgctgttgcaacaacaacaacaactgaggaaattcaagagtacaagcttccatcatgggctaagtttgaaattgggagggctgctgtctattggaaaaccatgaatggcctccctcctacttcaggagaaaagctaaaacttttctataatccagctgcaactcaacttgtccctaatgaagaatttggaattgcttttaatggaggttttaatcagccaattatgtgcggtggtgag

SEQ ID NO: 16856 - DNA, 209 bp, Glycine max
  Clone ID: LIB3106-112-Q1-K1-D4
cacactcgagcgccctcatatttggcggaggtttctaagttccgtactttattgatactacgggggcttaacttttggcaattgaggcccaagccttcttccttcactatcctatcatcatctactttcttgctactctctagttctattgtactgttgactatcacttatcatcttaacatttaatagcttctgtgtacattattatt

SEQ ID NO: 16857 - DNA, 53 bp, Glycine max
  Clone ID: LIB3106-112-Q1-K1-D6
cacactcgaacattctctcatccgctttctctatacactactcatactttact

SEQ ID NO: 16858 - DNA, 155 bp, Glycine max
  Clone ID: LIB3106-112-Q1-K1-D7
cacacgcgagcgttcactcgatcgatctaattttttgctctatacggcttcctaggggtcttagaatctctcctttgggaagctcacttttccgattactcatatttcaccttcaaaaaggtaaacttattctaaccaaacaatttactcatcaa

SEQ ID NO: 16859 - DNA, 160 bp, Glycine max
  Clone ID: LIB3106-112-Q1-K1-D8
cccacgcgtccgtgctgatatgcactattcatttaggagcattagctatgtttgtgaatgtcactttatgttatgtgggtaagtcacctaatacacttcacgtacctacgttgctgactcttaccggctttaataaatcttctgcccttgttccatattt

SEQ ID NO: 16860 - DNA, 246 bp, Glycine max
  Clone ID: LIB3106-112-Q1-K1-D9
gaaaaaggagcatgttggctatatataaagtttagggcaacaatcatatttgtttaccatggggaatgacaccatcggtgacataataacctatataagagatgctgtacatgtataaaaaatgaatggttcaaataccatttactaacataacataaaacattgtaaaaatacttttacgcgagggttttgttgaaaacgtcagaaaacatagagaaaacgacaaatattttttagttttaactc

SEQ ID NO: 16861 - DNA, 59 bp, Glycine max
  Clone ID: LIB3106-112-Q1-K1-E1
atcactcgtccgaccacacatctgacaacgcgtagcaaattgcttccactatcacctcc

SEQ ID NO: 16862 - DNA, 420 bp, Glycine max
  Clone ID: LIB3106-112-Q1-K1-E10
cccacgcgtccgcccacgcgtccgagatcagatcccgtctgagaagaagaactccgtacacacatcattgctgtgcaatgctacctgggagattctcgtttttcggaggcggcggggattccggcgcggtggtggacaacgccaattcgtcaccatcaaagggtggtggagacgaactcgctgttgttcaacccacactgaagctcgagacggataggcaggtttaccggcccggcgatcctgtgattgtgaccatccagatctcaaatcccgcatatgggtactcgtttctcatggaaagactcggttttgagatcaggggcatcgagaaattggacactcaagggttcgtcacgcagaagctgatgcccgggtctgaacaacggagtagtgagaatgcttttctggagtgcttaacac

SEQ ID NO: 16863 - DNA, 363 bp, Glycine max
  Clone ID: LIB3106-112-Q1-K1-E12
ctcacgcgttcgaaaactttctaaaacccttttgcaaacttgttcatagacttaagcactcttgtgccactgatgggcgtataccgccaggtacttgattggagtctgacggacgcatgccttctactatacacgctgctcaagagcttggactacgtaaccttatcttgtggcctgctagtgcctgggcttacttgcctatcatgaactttcccactctgggtgataaaggtcttacaccactcaaagatgatagttatctgacaaatgggtatttggacttcaaagctgactggattcttggaatgaagaacttccggctgaaggacatacctgactgtatcttgacaacggatctaaatg

SEQ ID NO: 16864 - DNA, 457 bp, Glycine max
  Clone ID: LIB3106-112-Q1-K1-E2
cccacgcgtgcgcaaacatatctgttcctcttctgtccctcaatggaaggatcaggatccggggtggttacagtctacggcaacggggccatcaccgagaccaagaagtcccccttctccgtcaaagtcggcctagcccagatgctccgcggcggcgtcatcatggacgtcgtcgacgccgagcaggcccgcatcgcggatgaggccggtgcctgcgcggagatggccctggagcgtgtccccgccgacatccgggcccaaggcggcgtggcccgcatgagcgatccgcagctcatcaaggatatcaagcgggccgtcacgatccccgggatggccaaaggccgcatcggccacttcgttgaagcccagatcctcgaagccatcggcatcgactacgtcgactagagcgaggtcctcaccctcgacgacgacgccaaccacatcagcgaacacaact

SEQ ID NO: 16865 - DNA, 331 bp, Glycine max
  Clone ID: LIB3106-112-Q1-K1-E3
gtcgtcccactcatacgcccacgcgtacgtgtctatgtcgtttaggagtatcatccttgaaaggaatgcatttgatgtgaggtttgtatatagcgggacatgcacgtcacagtcacacagtgattctattgcccatgatagtttggtggtgcttgatggattgaatcatatttgttgggctaacatgccccctgagctttttagggatgtgctcatgagaattgacgcctcttatgatttctggcctgtccagaaacatgtcttctcctgcgccggagtttgccgcaatttcagataaatcatgattgaaattttcaaagtcccttaacta

SEQ ID NO: 16866 - DNA, 378 bp, Glycine max
  Clone ID: LIB3106-112-Q1-K1-E4
cacacgcgtgcgagctttagtttcgttcaagatgctatatgcaggacataagaagaaagagatggaaaatgtcattaccaatgcaggtcgattccttgaagatacacaaacagctgatggttcatggtatggaaattggggagtttgcttcacttatggctcttggtttgcacttggacgtctaacagctgctggttagacttacaccaattgagctgtcattcgcaaagtcggtaaatttctacttacaacacaaagagaggactgtggatggtgagagagttatctttcatgcccaaaaaagatatatgtacctctagaaggaagccgatcaaatgtttgacatacagcatgggctcttatgggactaattcatgc

SEQ ID NO: 16867 - DNA, 187 bp, Glycine max
  Clone ID: LIB3106-112-Q1-K1-E5
cagaatccaactcattacagttccctctaattttggaatagcttgagcgtacaatcgtgaagtggccgaattcattgggcatgtaggataatgattaagatatacgcgtacatgaggtggtatgagatagatgttcattacgatattactgatcgtatgaggttcgatgtgcacattaacgactaat

SEQ ID NO: 16868 - DNA, 405 bp, Glycine max
  Clone ID: LIB3106-112-Q1-K1-E6
tcgcaacattcaagacattacagctccttctccttttggaatccattgagcgtacaagggtgaagaggcctaagccgcgaggcatgaacgagaatgacgaagaagaaggcgtataagaggtgttagagattgatgttgagtacgatagcactgatggtgttaggcttgatgtgttcatcaacgaccaaggtgataatgagattggaccccaggattcagagtttgctggaagctttgtgactttgtcttacttgccgcatgtcaatcataacatcatcaccatagctttttttaaatggccattaacgtatcagttgaatgacttgggagtaacaaatgacgattatagtatttctgtcacactggctcccatattttgatacaagtctgttataatttatgact

SEQ ID NO: 16869 - DNA, 450 bp, Glycine max
  Clone ID: LIB3106-112-Q1-K1-E7
cccacgcgtccgtgacgatgtcgtttaggagtatcatccttgaaaggaagggatttgaggtgaagtttggatatagcatgagatccaggtcacagtcacacagtgatgctattgcccaggatagtttggtggtgcttgatggattgaagcagagttgttgggctaacatgccccctgagcttttgagggatgtgctcatgagaattgaggcctctgaggattcctggcctgcccagaaacatgtcgtcgcctgcgccggagtttgccgcagttggagagaaatcatgaaggaaattgtcaagtcccctcaactatccggcaagctgacattcccaatttccttgaagcagcctggtccaagggactctcttcttcaatgctatattaaacgaaatcgcagtaatcaaacatattatctgcttcttggtttaaaccaagcctcaactgatg

SEQ ID NO: 16870 - DNA, 340 bp, Glycine max
  Clone ID: LIB3106-112-Q1-K1-E8
cccacgcgtccgggatcgcgagcgtccgtccttttttgcttctattgaatacttgggatcttggggcattttttatcgtgtgctaggaaaatggggtcacttggatagaggagctggacattttgaattataaacacaaggaaatatgaaattgaggcagttatgggatccaacatacctatatggttaattaaggacccatcatttatgtccaaaggaggttagcagctttgaaactgttgatcttactcctaaagctggaacatcctggtgtcatagcttataatgccttgtctttttaagaaaccaatgtttgatatttagcatgggtcttttataa

SEQ ID NO: 16871 - DNA, 232 bp, Glycine max
  Clone ID: LIB3106-112-Q1-K1-E9
ccagagccaacgtaggtgtaacactcttctttttcgtcgtcgcaatgggacgtgtgatccgtgcgcatcgtaagggggcaggctcggtcttcaagtcccacacgcaccaccgcaagggccctgcacgctttctgagcctggatttcggagagctcatcggctacctgaagggtgtcgtaactgacgtcattcaccatcctggccgtggcgcgcctctcgctaaagtctgcct

SEQ ID NO: 16872 - DNA, 366 bp, Glycine max
  Clone ID: LIB3106-112-Q1-K1-D10
gccaattcatcattttctctcttctctgcttcttcttgttcaaatcttaggagctgaggagagtcaatcgagagaaagatgtctggtatcgctcgtggacgccttgctgaggaacgaaagtcatggcgcataaaccatccacacggtttcgttgccaagcccgagactctacctgatggcaccgtaaatttgatggtctggcattgcactattcctggcaagaccgggactgattgggagggtggatatttcccactgacaatgcactttagtgattattaccctagcaagcctcccaagtgcaaattccctcaaggtttcttttaccctaatgtgtatccatttggaactgtttgcttgtctata

SEQ ID NO: 16873 - DNA, 437 bp, Glycine max
  Clone ID: LIB3106-112-Q1-K1-B4
cccacgcgtccggtttctgcagggagttagtgttggtaccatcaaaaccaaggcaaatgtttgctgcgttcagttccccctggattctgctcgtttccttgcttttggttcagcagatcaccgaatatattactatgatcttcgcaaccttaaaatgccactttgtactttagttggacataacaagactgtgagctacatcaagtttgtagacactgtgaaccttgtctctgcttccacagataacactatgaagctctgggatttgtctacatgtgcatctcgagttatagactcaccgattcaatcattcactggtcacgcgaatgttaagaactttgtggggttatcagtatccgatggttacattgccactggttcagagacaaatgaggtgttcatataccacaaggcctttcccatgccagcattgtcat

SEQ ID NO: 16874 - DNA, 115 bp, Glycine max
  Clone ID: LIB3106-112-Q1-K1-B6
cccacgcgtccgcccacgcgtgcgctcagacgatcggccccacattggtagccgtaggaatagcttgcgaatctcagaggctccggttcaaggggccatatatgagtgacaccaa

SEQ ID NO: 16875 - DNA, 442 bp, Glycine max
  Clone ID: LIB3106-112-Q1-K1-B7
accattccaaagctcgaaggtgaacagtgagtgagtgagttattcagaacccaggggttggcgaaagtgaagcgatgagcagtgataggaatattggggttgccttggacttttccaaaggaagcaaaatcgctctcaaatgggctattgacaatcttctccgtaacggtgacatactctacatcgtccacattaagccttccggaggaagtgaattccgaaatcttctctggtccaccactggttcacctctgattccgttgtcggagtttcgtgagaaggaggtgatgcatcactatgaggtggatactgatgctgaggtgatggacttgcttgacaccgcttctagggagaaacaggtgactgtggtggcaaagctatacttgggggatgcatgagagaaaattgtggaagctgttggggagttaaagcttgactcttt

SEQ ID NO: 16876 - DNA, 410 bp, Glycine max
  Clone ID: LIB3106-112-Q1-K1-B8
cacgcgttcgaccacgcgtacgaccacgcgtacgctagaaatattgtgatgaaaatgaacgtactgggtttcttggctgctacaattggggtagcgtggcaatgccatgcgtacgatatgttccctatccgaatgaacactggctatggtgcccgtactttcgaggtgaaatgcgcacgttggaggcttgctatggaagcacacaacatctttggctttgagaccattcttgaagagtgccttgaagcaactcaggaatacattcatggcgaacaatatacatcagacttcaaaacacttaaccaacaagcttactcttatgccagagacctctaagtccattctaaggacacattctgtgttcaatatacatggcacctgcatttcataatattcatactgcatataac

SEQ ID NO: 16877 - DNA, 359 bp, Glycine max
  Clone ID: LIB3106-112-Q1-K1-B9
gtaaaagttctcaaagctattctaagaactttttaagtggtttctggcttaaaaagtaattaggctaatagttcttggggtgctgttcgtaatgatcatcagtgcatgcaaatggcagctaactatctcaattgtagtcagctagctcttccttttgtttaccttggcgtacccataggggccaacccgaggcgagctcatgtttgggaacctattatccaaaaatatgagaggagattagctagggttccacaattggtgatcaacaatattatcaaaatccagcgaagctttctttggtgtggattgcatgataccaaaaagattgcatggatattatgggatacagtttgcttacc

SEQ ID NO: 16878 - DNA, 412 bp, Glycine max
  Clone ID: LIB3106-112-Q1-K1-C1
cattgacatgtcttcatccgtctacaagaattgggtattcactgaccaagcattaccagctgggctcgtgaagagaggattggcaggtgaagatccctctgcaccccatggccttcgtcttgtgatagaggactactcttatgctgttgatggacttgaaatatgggatgctattaagacatgttttcatgaatatggctccgtgtattacccatcagatgcagcagattagcaagatactgagctacgagcatggtggaaggaagctgcggagaagggtcatggtgacttataagaatagcactggtggcctaacatgcatacaactgaacatctcattcaatcatgcgctatcatcgcttggacagcttcggctattcatgctgctgataatttaggacaatatccttat

SEQ ID NO: 16879 - DNA, 423 bp, Glycine max
  Clone ID: LIB3106-112-Q1-K1-C10
cccacgcgttcgaccacgcgttcggagataactagaaacagtgtgatgaaaatgaaggtccttgttttcttcggtgctacaatttgggtagcatggcaatgccatgcgtacgatatgttccctctgcgaatgaacactggctatggtgcccgtactccggaggtgaaatgcgcaagttggaggcttgctgtggaagcacacaacatctttggctttgataccattcctgaagagtgcgttgaagcaacaaacgaatacatccatggctaacaatatagatcagactccaaaacagctaaccaacaagcttacttttatgccagagacctagaagtccatgctagggacacatttgtgttcagtatagatggcacctgactctctaagattgcatactacaaaaaacatgggtattgggtggag

SEQ ID NO: 16880 - DNA, 245 bp, Glycine max
  Clone ID: LIB3106-112-Q1-K1-C11
actatgcttacgatcaagattccctagaatgcttataacccatatctaatgcacagttctgcggagatatgctcaaagcgtaatcttgtgctccagcgaaatactttatcgtactgcgtatagaatgcagactctactaggaaggtctgtatagttgagatcttggctgaccctcttgatagagatctgccgttcacctgcaaaatccttgataatacttctgaaccaattctaagcatggactc

SEQ ID NO: 16881 - DNA, 383 bp, Glycine max
  Clone ID: LIB3106-112-Q1-K1-C12
cttattctttctctagaaattgtctattatctctatctctcccatctctcggaaaatttttcagagctgcctaaagcgtttagaaggctatggaaccttcttgatcgtccgacgaggatcgcacttcctccaaatcgtcgtcactcgtcgcttagtgcggttctaactgcatgaactgattcgggaagctggattcatcatgcacgaacttgaacttcaatcacttcgttactatgtctcgcgatttgtatcctacatttttctacttaatcgctctctttcaccttcgatagtaacactgatcttgaatttaattccgaatatggagtctagaactaagatgaatcctcaattaacaagagctctttgctatgctgactatg

SEQ ID NO: 16882 - DNA, 389 bp, Glycine max
  Clone ID: LIB3106-112-Q1-K1-C2
ctttaccagctaacatttctagcgttcccatgtctactgtccactgaaggccaacccctaatgggttatcaagttcttcttcaacaggcactgtttgtccccaagctaagtgtaccttcttcttatcgtaacgtcgcgtcaatatctacggttccttacaccccaacttcatggcgttgcactcctctcattgctaagcctagtttcgctgtgagagctgactccaacgtccaacgctctggtgaaaccaccgatgatgatccttcgtatcatgatgatgaacactctgaaggcgaacgagaacacgtttccgattatcaagctccaaaatcttccagaaaaccccgagtcaaactctgatacgtcatggggatactgaatcacagggc

SEQ ID NO: 16883 - DNA, 419 bp, Glycine max
  unsure at all n locations
  Clone ID: LIB3106-112-Q1-K1-C3
gatggatgtctcttcctcggaggagcattcttcgctctcatcctcgtctggggtttctcctcggtcaccaccaccatccctaacgacacccccaacttcgaatctctttcaaaaaacgacgccgcttcgcaccacatcgctcccgatttcaacttcgacccacccgacagaacattctacgacgacccgcaaatgggttacaccatggacaagaaagttcgcaactgggacgagaagcgcgaggagtggctgaaactccacccttccttcgccgccggagcgagagaaagggttttcatggtgaccggttctcagccgaagccgtgccggaaccctacaggcgaccaccttctcctgcggttctttaaaaacanagtggactactgtcgggctcacgggtgcgacatttttacaacaac

SEQ ID NO: 16884 - DNA, 404 bp, Glycine max
  Clone ID: LIB3106-112-Q1-K1-C4
gccactacaggtagcacatattttgggtgtgcaaatatggatcttacctagatggatctgggggatgagaattattggtgaacggtaccaaggttggatgcatttgacattcagaaacagctggcatggctggtatgcattgagcctgatactggcaccttccacttgaggacttaacaggtcaaagcttttggaaaacatcttggtgaagggctatccaaagaaaaacttttggaaaacatcttggtgaagggctatccaaagaaatgcatgctgcttgcttctcaacgtgtttctttaaattgaattatagatgccatgaaatcattttctttgttgaagactttaagcaggtacggattactcatttctccccatttctatctttacattttttacgcgga

SEQ ID NO: 16885 - DNA, 191 bp, Glycine max
  Clone ID: LIB3106-112-Q1-K1-C5
gcaaagcatcttccctcagccaaaacctgcaaaacctctacctgacatcatcagggagagtgggcaccagcatgccagagagtatgtggagggagataagtattatggagccaatgcaaccataaacgtttgggacccaataattcaacaacccaatgaatttagcctttcttaaatgtggattatgggtg

SEQ ID NO: 16886 - DNA, 112 bp, Glycine max
  Clone ID: LIB3106-112-Q1-K1-C6
cccactcgtacattctcacttcccatatctcgatctaccccctaaatcatatactgggttaagggtctcaatattccgggagattgactcctgcatcactcattcattactc

SEQ ID NO: 16887 - DNA, 453 bp, Glycine max
  Clone ID: LIB3106-112-Q1-K1-C7
ggaagaggcagagaagttctagtggttcagcaagtaaaaagacaaaaaaaatagttaatggtgagaaatctccaagcagccatgtagaacatggacaaaaaggtgcctcaaaaactaattcccatcatgaggatgccaaagagagttctgagttatcaaaccctgaagatatatctaaagctgagattaactcaggtggttctgaagcagaacaggctgaagggtctgatgtaattgtaactaagcagaagaaatctaacaagaaaccaaaatcagtttcacgaggaaagaaacttaaaaaagagaagagcttgaggtataagaaagagtcagatgaagagaagcgggaatcagaccaagagaagcaggatcatggtgagaggcttgctgaagagaatatcccacaaggagatcaaaatgatgatgcagaaagtagttcataagagacagatg

SEQ ID NO: 16888 - DNA, 453 bp, Glycine max
  Clone ID: LIB3106-112-Q1-K1-C8
cccacgcgtccgcccacgcgtccggtggatcgagatcctctcttgtttctctgtttgaatttggattcgaatttgaatttcagttaatctcgttttcactgccagggttgtgttttatttttatttttttgatttgatatttctgcagagttgggtttttttttatataactgataatgggtgatagcagtgttcaatctgggtctccaaatgcaaaaccagatcttgttgacggagactcggcggtttccaataacgcgacattggaaaccattgttcaaagtttccaagattcaatgtctcttggtaagagacacaagttctgggaaactcagcctgtggggcaatacaaggatgttggggactccagtttgcccgagggcccgattgagccctcaactcctttatctgaggtcaagcaggagccttacaaccttcctaatgcttatgagt

SEQ ID NO: 16889 - DNA, 369 bp, Glycine max
  Clone ID: LIB3106-112-Q1-K1-D1
aatgctaaggcacttgtgactgctctaacccgccgtcagaaaggaacttgcgttccatcaagtgttttaatgggcataccagatgggagtctatcatcaaaggaaacaggttcattgactccttttggtgatcctcgctcaagaagagatctgactgcaatacaaaattttggaaaacgtatgctacaaagatgatgaacgtgttgcatatgagctgtcctttcaaatgttgacaagatacatacatgtaactctagattctacaaagctaggcgattctgcattccatgctagagacttatccacggccattgactgctctacacaattcatcgatggtggaaccatggtatcacctactgtgtatgc

SEQ ID NO: 16890 - DNA, 455 bp, Glycine max
  Clone ID: LIB3106-112-Q1-K1-B3
ctgacaggaagtgacggccaaaatactacaagccagaatacttctctacttgttttagcaagggaatttgttactgctatgcttataatggacgcatggcaatactttatgcacagatacatgcatcacaacaaattcctttacaaacatatccactctctacatcacagactcattgtaccctattcgtatggagctctttacaatcaccctatcgaggggcttctgaatgacactgttggtggggcattatctttcctactctctgggatgagtcctcgagcctccatcttcttcttctcctttgccaccattaaaacagtggatgatcactgcgggatattgctccccgggaaccttttccacatgtttttcaaaaacaactcagcctaccatgatgtacatcaccagctctatggcaacaagtacaacttctcgcaagcattcttcgttat

SEQ ID NO: 16891 - DNA, 314 bp, Glycine max
  Clone ID: LIB3106-111-Q1-K1-H9
cccacgcgttcgcccacgcgtgcgctttttcaataatgtttagtaatattatattacctcaagagtataaattaaagaaccaagcggtatatagttgagtattgtagatggattagtgttgtgggctagatagaagatgatttagcccccttttaattatatttgatttgatttatatgtagcaagcatttgcagatgatgctggcttattttatatgctatgcctctgcaaatggaatatttgctctgttgagaaagataaatggtaaaaatgattgttgaatgcaagctcttgtacttttagttattgtctt

SEQ ID NO: 16892 - DNA, 322 bp, Glycine max
  Clone ID: LIB3106-112-Q1-K1-A1
cccacgcgtccgctgcttgccagcttcagttttgctccttctgttttggccaaagctgaaatggcagggaatgaagtgaacacacatgggaaggttgtaagtaaagattataagatagtgatgaagaggaagttcatttcggtggttgttttgggagtatgtttggtgctgggaatatcccaatatgttgatgcaagaaacttggaggaaaaatcaaaggaagaggtcaagaagccagaaaattgcttagatggagggtccattggtggtgttggaggaattggagatgtgggtggaggtggtggtggtttatgaggtggct

SEQ ID NO: 16893 - DNA, 84 bp, Glycine max
  Clone ID: LIB3106-112-Q1-K1-A10
tccaagcttccagccgatcgcacatgcgaatgtaccgtgtcactaaaacaaaagcgggctctttctttatctctatcgggtttt

SEQ ID NO: 16894 - DNA, 250 bp, Glycine max
  Clone ID: LIB3106-112-Q1-K1-A11
atctgcagtacgattagaccttggtcctggtgttgttatcccactccaaactcacgctgttgcgcttgaactactcggtgttctgcatggtcgcattcttgttggattcatatctttaggtaacatatgtttatcagatggtgctaaaaaagggagagctcatggttttcccacaaaggttggtgcactttcaaatagctgttggtaagagaaaggctcttgcttgtactgtcttcaggattacttttgc

SEQ ID NO: 16895 - DNA, 264 bp, Glycine max
  Clone ID: LIB3106-112-Q1-K1-A12
ctttaccagctaacatttctagtgttcccatgtctcctgcccactgaagtcgaacccctaatggcttctcaagttctggttcaacatgcactgtttgccctcaagctaagtttgccttcttcttctcgtaacgtggcgttaatttctagggttccttccaccccaatttcatggcgttgcactcctctcattgctaagcctagtttcgctgtgagagctgactccaacgtctaaggcgctggtgaagccaccgaggatgttcct

SEQ ID NO: 16896 - DNA, 379 bp, Glycine max
  Clone ID: LIB3106-112-Q1-K1-A2
gacaagggtcgcattctcagcgaggaggaacaggccaaagagaatgtctacatccagaaatgggagagggagaggttggagaaacagaagcaactgtctgagaaggccaaggctctcacggacaaagatgcttctgctgctgctcataagaaacctgaaggtgctcaaaaggactgagtttatctttcacacaacccgtcaaggtcactttgtgggaaataagcatggagaataaaacacattgaccctgagtgaactttggtctttgtatagattgtgtttcttgtttatttgtagtttcgtgacggatgaaaccatgccattgcattcaccaaacttggtacgtttgttatgaacttgtgatgtaatcctttccagt

SEQ ID NO: 16897 - DNA, 252 bp, Glycine max
  Clone ID: LIB3106-112-Q1-K1-A3
gacagtggatattttgaaactatataccaaaatatatcagcctatatgtatatgtttaaaagggggaaggagactgataagatacagaagcaaacctaataaataggccatgcctataaccgacacaatatgccacagatgatgctcataaaaaaccacgaaagtgctcaaaaggatctgcggatatctattacacaagggcgtccggttattactgttcgaaatgagcatggggattaaaccacattgacc

SEQ ID NO: 16898 - DNA, 256 bp, Glycine max
  Clone ID: LIB3106-112-Q1-K1-A4
gccacgcgtccggaaatatatataaactcatgtcatgagaggcatgtatatgcatggaaaccggggttttcttccgacctttcttagcactagagatatttcaaaatttgaataataagtcatattgtgcctgcagtgtgataagttctatagaaaactgatatatccaatatgtactgtacaaatagcttgtcatatatcgagggttttactcgcattgatacaatacattatcatcatcatatatatcaaagaa

SEQ ID NO: 16899 - DNA, 456 bp, Glycine max
  Clone ID: LIB3106-112-Q1-K1-A5
catttgctcccagtacagagcttaaccgagcttcacaaagatgaatcgggaaaaggggatgaggatggccggttcgggtagaactgggggaaagggtaccatgagaagaaagaagaaggctgtccacaagacaacaaccacagatgacaaaaggcttcagagcaccctgaagagaataggggtgaatgccatcccggctattgaggaggtcaatatctttaaggatgacgtagttatccagtttctaaatcccaaagttcaagcatccattgctgctaatacttgggttgtcagtggttctccacaaacaaagaagttgcaagatatactccctagcattatccaccaattaggaccagataacttagaaaacctgaagaagctagccgagcaatttcagaagcaggctcctgaaggagccggcggttcaaccacaggtctagaggagaatgatga

SEQ ID NO: 16900 - DNA, 387 bp, Glycine max
  Clone ID: LIB3106-112-Q1-K1-A6
cccacgcgttcgcgaagaagaagctcataggcttcatcgctgagaagagatgcgcgggtctagggctccgtttggcatggcactctgctggaacttacgacgtgagctcgaagaccggaggtcccttcggaaccataaagcacccctccgaactcgctcactgcgctaacaacggtcttgacatcggtgttaggcttttgtagccactcaaagcggagtgtgctattttgagctacgccgatttctaccacttggctggcgttgttgccgttgaggtcaccggtggacctgaagttcccttacatcctggaagagaggacaaacctgagccaccaccagagggtcgcttgcccgatgccactaatggttctgaccatttgatagatg

SEQ ID NO: 16901 - DNA, 394 bp, Glycine max
  Clone ID: LIB3106-112-Q1-K1-A7
cccacgcgtccgctgcttgccagcttcagttttgctccttctgttttggccaaagcgtgaaatgtgagggaatgaagtgaacacacatgggaaggttgtaagtaaagattataagatagtgatgaagaggaagttcatttcggtggttgttttgggagtatgtttggtgctgggaatatcccaatatgttgatgcatgaaacttggaggaaaaatcaaaggaagaggtcaagaatccagaaaattgcttagatggagggtccattggtggtgttggaggaattggagatgtgggtggaggtggtgttctgtaagattggacataccttagccaccatcatagggtcgcttgcccgatgccactaatgggtcttaccatttgagatatgtgtttg

SEQ ID NO: 16902 - DNA, 345 bp, Glycine max
  Clone ID: LIB3106-112-Q1-K1-A8
atctgagcccaatgagaaccacctgattctgttgatgacatgcactgtgaattgatgaatcggaatgcatagcaatttgaaaatttggtggatgggattcgtatgaaagagcaagatggaacttcttccctgtttgacgctgcgagatcaaatccatttttgtcgttggttagttttaatgttaacccgtgaccaccaaagtcatgaaatcacacacacatttgatatcatttcttgattatagatagattagtacacagcgaagtccttttcatttgattgcaaacttgtatatgtatgtaattatgtacttgagtgatgcctcttcagttttattattctacc

SEQ ID NO: 16903 - DNA, 296 bp, Glycine max
  Clone ID: LIB3106-112-Q1-K1-A9
aacgatccaaactctcttttcatttgcagcatcaaaatgagtggtagcaactatggtagcggcagctggagctctaggtttttgaaggtggctagtgcaagtgccggtacagccgccgttgccggctgattatatgccattctttcatcctcaacctctgctagctctgagatggaagtgccgtttggcagcgcacggcgtgagagcaaagaacgtgacgatggtggctccgggtctcatcctcgcgagggttccaccacggttagtcactgatagaaacctgagattggatgggt

SEQ ID NO: 16904 - DNA, 454 bp, Glycine max
  Clone ID: LIB3106-112-Q1-K1-B1
ctcgctcttctccgccacttctgaatctattgaatcaacaatcatgtcggacgaagagcaccaggtcgagtccaaggccgacgccggagcctccaaaacctaccctcagcaagccggtaccatccgcaagaacggctacatcgtcatcaaaggccgcccctgcaaggttgtggaagtttcgacttccaaaactggaaagcacggtcacgctaagtgtcactttgttggaattgatattttcactgccaagaaacttgaggatattgtgccctcttctcacaactgcgatgttcctcatgtgaatcgtactgattaccagctcattgatattgctgaagatggatttttgagtctgcttactgaaaatggtaacactaaggatgacctcaagcttcccactgatgagagtctgctcactcagataaaggatggatttgctgagggcaaggatctt

SEQ ID NO: 16905 - DNA, 363 bp, Glycine max
  Clone ID: LIB3106-112-Q1-K1-B10
tccacgcgtccgcccgctctctctctcgatcgttatatcctctctttcacccacaggagaagagggattgaatcatagggaatttggagcgtgaattgtcatgcaataaaattcgatcgattttgatattctaagtcgtagtatccagattattactcgaaatgatgaatactttatggagggcttgattgaaccaacaaaagttagtacccaggctctgtttacaaaaaaccaattggtaatatatctaccaacaccactgatgtcatatactgatgtttgacagaaaatatttattaagaaattcagaaatggaacaagttgtaacaaatttacgtattagtgtaatatttgtcctatatt

SEQ ID NO: 16906 - DNA, 59 bp, Glycine max
  Clone ID: LIB3106-112-Q1-K1-B11
cccactcgtccgcccactcttttcttcgatccttatatccaatatttaaccctcggaaa

SEQ ID NO: 16907 - DNA, 434 bp, Glycine max
  Clone ID: LIB3106-112-Q1-K1-B12
gtttatcgtgaggagaatatgaagttgtttgttttctttgttgctgcagtagttttggtagcatggccatgccatggcgcatgctaccaaaggttccctctccgaatgaaaactggctatggtgagcgttcttcggaggtaaaatgcgcaagttttaggcttgctgtggaagcacacaacatccgagcctttaaaaccattcctgaagagtgcgttgaaccaacaaaggactacattaatggcgaacaatttagatcagactctaaaacaggtaaccaacaagctttcttttatgctagtgaacgcgaagtccatcacaacgacatatttatattcggcatagataacaccgtactctctaatatcccatactatgaaaaacatggatatggcgtggaggaatttaatgaaaccttatatgatgaatgggtaac

SEQ ID NO: 16908 - DNA, 450 bp, Glycine max
  Clone ID: LIB3106-111-Q1-K1-H7
cccacgcgtccgccatactatgaaaaacatggatatggagtggaggaatttaatgaaaccttatatgatgaatgggttaacacgggcgactcaccggcattgccagagactctcaaaaattacaacaagctgttgactcttggcttcaagattgtattcttgtcaggaagatatcttgacaaaatggccgtaacagaagcaaacctaaagaaggctggcttccacacatgggagcagttaattctcaaggatccacatcttatcactccaaatgcactttcatacaaatcagcaatgagagagaatctgttgaggcagggatacagaattgttggaatcattggagaccaatggagcgatctgcttggagaccacagaggcgaaagcaggacctttaagcttcctaatcccatgtactacattgagtagtaccttgacctctctcaacaa

SEQ ID NO: 16909 - DNA, 425 bp, Glycine max
  Clone ID: LIB3106-112-Q1-K1-B2
ctcacgcgtccggtgattatagactatctttatataataatataaataagaataaaaaaataaaggaaagaaaaagaatctatataaatataaaaataatatatataaggtacaaatagtaaatcgaggtacccattttatgataaactttccttccatttttgatcctctagtaagcctagtatttccggcaattgcaatggcttctttatttctttatgttcaaaaaaacaagattttttagatacagaaaacaaagtaaaattctggggttttttattccccaattataatactaaattcaaaaaaaggagagtaatgagtataatctttcgctcagacgatgtactgatatattctatggcggaggttcgaagaacaagcaatttattttgggcacgtttcactttgttaggttcattggg

SEQ ID NO: 16910 - DNA, 398 bp, Glycine max
  Clone ID: LIB3106-111-Q1-K1-G2
agcacacttgcgaccgcgtgaaggcaatgcaggtccttgctttcttcgcagcgccagctatggcagcatgagcattgcatgcgataggatatgcaaatacatctgaatgaacactggctaacgcgcccggactttacccttctaatgcacgtggtggatgttggcttgggaatcacacaacatatattaactacacaccgttcatgaaaagtgcgttgtagcaccagaacattacatgcatgtagcacaatataggttagactaccaatgacttaaccaaagagctgacatgtatgcctgagacctgactacccatgcgagagacacatttgtgggcaagatcaatggtgacgtacttagctaaatgtgcatactacagaatacatgcctatagagca

SEQ ID NO: 16911 - DNA, 267 bp, Glycine max
  Clone ID: LIB3106-111-Q1-K1-G3
aaaaaacgtacgtgccatgtgctagcaatgcaggcagatgcaaatcaagagcagagcaagctatgggagtatgagcaatagcaagctatgcgcgtgcaaatacagctgaaatgaacattgttctaacgcgccaggacgttaccctcctaatgcacgtggtggctgttgtcctggtgatcggcggccatagaataactacacacggtacatgagaagtgcaccataacaccagatcatggcatggtttcaacacaatttaggatggac

SEQ ID NO: 16912 - DNA, 461 bp, Glycine max
  Clone ID: LIB3106-111-Q1-K1-G4
gcgcatcgctcttccatggaaaaccatttcttgctggaaagcagcctgagctaggtggagggaccgtagagcttggtcctcatactgctgtccaccgttggaccggtgatccaagacaacctaacaaagaggacatggggaggttctattctgctggaagagaccccgctttctattctcaccatgccaacgtggatcgtatgtggaatatatggaaaacaataccaagtggaaaaagaagggatttcaaaaaccgtgattggttggaaacctcctttttcttctacgatgagaacaagacccttgtccgtgtgaaggtgaaagacagccttgacacgaataagatgggttatgtttaccaagatgtcgccattccatggctcgagaaaaagcctaaacccaaaagaactagaaaggctaataaggtggcgttcgcacaacaatttggcggcattggtgca

SEQ ID NO: 16913 - DNA, 427 bp, Glycine max
  Clone ID: LIB3106-111-Q1-K1-G5
gcctctgatatctgacactgctgcgtctatcgtaaccatgcctaagcgaatccacgaggctaatgactaccttctcactgctagaaggacagacgcaaggtcggtgaagatcaagaggagcagatatgtggttaagttcaaggtcagatgctcgaagtacctttacacactttgtgtgtttgacccagagaaagctgataaattgaagcaatctctgactccaggtttgagtgttcaagacctgtaaaggtacaaggcgagagaccaagaagaagcaatacattgattcttcagaacttcgcttctctgtagttgaaacttgagattcttttcaggatctattattactagatcattgctaggacatggttgtattcatctgacttggaaaatgatactagaatatatgtctaatggattattctag

SEQ ID NO: 16914 - DNA, 356 bp, Glycine max
  Clone ID: LIB3106-111-Q1-K1-G6
cctacaggtagcttgaaaacatggaagtcgttgagctccttgcgaagaccatttttggcgggtgatgcaagcctagctgctgggttgccagctgcgctgattggccttgattgaagggccctgtctggacctcggctaatgctcatgtcctctagcagcactggcttactcttcttccctaggcaacgtgcagcggttgcgaagtatattgacaagaatgcgtactgtgatatgaaggacttgcacaagcctacgttgcatgggaacttgcttggtctatatgcatgtgaacaatactcttctccttatagcaggtaatgacagacctttgctgatctattcagattaaggggact

SEQ ID NO: 16915 - DNA, 124 bp, Glycine max
  Clone ID: LIB3106-111-Q1-K1-G7
gtgacgattacgcaggcacgaatggatcgcactcagcacactcttacacagtgcactggatgagaggttatcatgtaagtcagcttgcatccaaggctgcacggaagcctgtagcaacatactg

SEQ ID NO: 16916 - DNA, 432 bp, Glycine max
  Clone ID: LIB3106-111-Q1-K1-G8
cccacgcgtccggcgggaaccaaaagcacaacaacgcaacatcatcatcagcttcagcaatgtccactgtgagagttcaagtttcggcgtgtgtgttttctgccaccgtcaacaacctttgcctccgccaaaacgccgtcgtttccttcagaaagaagaagcttctcagattggtctcaatgtcttccgttcctccttcccaacccttcgaaatcgccgttaaagcttccgtcaccacacccaacaggctcggcgactgccctttttgccaaagggtgttgctgacactggaggaaaaacatctaccttatgaccccaagttggtggatttgaccaacaagccagaatggttccttaaagtcaatcctgatggtaaagttcctgtcataaagtttgatgagaagtgggttcctgattcagatattattactc

SEQ ID NO: 16917 - DNA, 425 bp, Glycine max
  Clone ID: LIB3106-111-Q1-K1-H1
cccacgcgtccgcccacgcgtccgcgaaaaccctaactaaactcgcgtggtagctccaatggggggaaagaggaagaagagcgatgatgatgatgacgtggaagcagaagcagaagcttcaggttggaagaagaaaacgagaacgacgacggagagagagaaggagaagaaggagccattgcgtcctttgatgataaagaacaaggagaagcgatcggagctgcacgcgaaactgaagcaccagaagaagcttgagaagcgcgccaagggccaaggttgggacgcttgttttaagaaaggttttgagcttggtgaggagccttcagagaagaaagtgcctttgactattgagaacacgagggaacttgacgagaccgtttgcaagcccgatgaccaatagttatttgctggaaatgatgcttatg

SEQ ID NO: 16918 - DNA, 325 bp, Glycine max
  Clone ID: LIB3106-111-Q1-K1-H10
ctgctctcttttcttttaggtttccactctcacacactctccctcttctctttctctgcaatggtctctcttctcttcttcactgtctcaactcctgccaaacccccatttccgcagttcttaaatttggagtctgatgtctccgccattgctggttaccgaagatgaagggcagtgccatgcctcgatggtagcatctgcatcttcaccatccctgaactgtttctccctaaatgaggccggatttaaagaatgcaattacctgggattgtcagattgctcttcggtggacagttctactgtcccgaatttgtctgatgagaaa

SEQ ID NO: 16919 - DNA, 472 bp, Glycine max
  Clone ID: LIB3106-111-Q1-K1-H11
gtgaaaatggcggtacccttgctctccaagaggatcgtgaagaagcgcgtcaagaagtttatacgcccccagagtgatcgcaagagctccgtcaagccaagctggcgcagacccaagggtattgattctcgtgtcaggagaaagttcaaaggatgcactttgatgcccaacattggttatggctcatacaagaaaacccgccattatctaccaaatggtttcaagaaatttgtcgtgcacaatgtgaaagacctggaacttctcatgatgcataacaggacatactgtgctgagattgctcacaatgtattcacaaggaagaggaaagacatagttgagagagctgctcagcttgatgttgtcttgacgaacaagacggtcagactacgtagccaggatgatgagtagatccaatatatgggagagttattgatggtttgtagtgagcttctgttgacacccttgatggtag

SEQ ID NO: 16920 - DNA, 371 bp, Glycine max
  Clone ID: LIB3106-111-Q1-K1-H12
ggttaatatgaccgaaaaagattaccaaagaataaaaaacaagtttctgcccaaaattcatgcatgggtccaggagcacgggggtgagactattattcctttcagctgtgccttggaaaggaatcttgcagatatgccaccagatgaagcggctaagtattgtgaggagaacaaaactcaaagtgctcttaccaaaataataaagactggattttcagctattaatctcatttactttttcacagcaggacctgatgaggttaagtgttggcaaattagacgccaaacagaggctgctcaagctgcatgggctatgcatactgattttgaaagaggatttatttgtgctgacgtgatgaaagttgaggatc

SEQ ID NO: 16921 - DNA, 460 bp, Glycine max
  Clone ID: LIB3106-111-Q1-K1-H2
ggacaattggtcagacttagaattatcagctctgcaagttctgatttgcgcaccacaacacaggtctgcgtttggttggcatcaatcacatccggcatgggtgcaggtcaagctatgaaaagaatccctcgcatcaagttccctcagagacatcccaaaccttcttctggttctacacctgagactcaagcttcgtcttcaacaactgatgtcagtctagcgttcttttcaagttcaaatgcctcaacctcagttggagggaaggcctctcttcaacccaaaagaactccagtgtccaaagaggagattgaggcaattttgttgggtggctgcttctaatcgagcgtgttcaagggcagactatattgtgcactcattttttgtggctttaattcatcattttccaaagtttatggttcttttttggtgccaaatgttggcataaacaatacaacgagtt

SEQ ID NO: 16922 - DNA, 458 bp, Glycine max
  Clone ID: LIB3106-111-Q1-K1-H4
cccacgcgtccgctcatttctcgattcatctctctcattgagctgcattgcaacactcactcaccaatggcactcagacccatcgacaacgctcttccaacaaccccagagagacctaaaaaacaacccaaagtcgctcttgcaacccaaaagcaacaagaccgtgctggcgtcaatggcgaaaacatagttccattgccctcatctggggatgccactgttgactatgtctcctccgacaaccttaagcccttgtcggaccctgaagttaagattcagagcttggttgaagatttggattcgaaaaattggacgaaggtttgtgagtcgctgaatgatgttagacgcttcgcgatgtaccactcctctcttctgttccccattttgggaaaaattgtgttggtggtggcgaagacaatgaggaaccctcgtagtgctctctgcaaaactgctattat

SEQ ID NO: 16923 - DNA, 284 bp, Glycine max
  Clone ID: LIB3106-111-Q1-K1-H5
gtttgatctaaaaaaaaattctgaatattattaattatggatctgagaacaaagtcatttcatgcataattctagttattccataccattcttgttatttaggagtctgaaactacttcacgcaaacaagttcaatacaaagaaaacggacgcgtgggttattattcatgaactagtaatttgagcacattctttttcataaaaaacaaacaaaacttgacgcaaaactgaagcaccaaaaaaaaattgaaaaaacgcacccaggccaaagctaaaggggctgc

SEQ ID NO: 16924 - DNA, 438 bp, Glycine max
  Clone ID: LIB3106-111-Q1-K1-H6
caattcatcatcagcttgtggccatagtctcattatttatccttttgcttccaaatatccatgggtggggagacgatgggcatgtcattgtttgcaagattgcacaggctcgcctcagtgaagcagctgcagaggctgtgaagaaactgctgccaatatccgcaggaaatgatttgtccacaaagtgttcttgggcagatcatgttcatcatatctatccttgggcctctgctttgcactacgcaaataccccagaggccctctgcagttacaaaaacagcagggattgtgtagattacaaaaaaggaattaaggggcgatgtgttgtggctgcgattaacaattacacaacgcagctccttgaatatggcagtgacactaaatctagatataacctcacgcaatctctattcttgctttcacattttatgggggaca

SEQ ID NO: 16925 - DNA, 340 bp, Glycine max
  Clone ID: LIB3106-111-Q1-K1-G11
cccacgcgttcgatcaagaaccgcaagctggatcttctgaatggcactgggtcccaccacgacgacctcttataccgcttcatggggaataaagactcctactctgaagagtttctccaacacgtggcactcaacttaattctggcagggcgcgacacgtgatctgtcgctctaaaatgcttcttctggctctgcattaataacccgcatgtggacgaaaagatcctgcacgagctctgcagtgtcctcaagtttacacgtggagatgatatctccacgtggcttgaggagcctctggtgatcgaggatgtagaccgcctggtctatctcaaggcaactt

SEQ ID NO: 16926 - DNA, 451 bp, Glycine max
  unsure at all n locations
  Clone ID: LIB3106-111-Q1-K1-E6
gtttgttgtgagctataagctagtttatcgtgaggagaatatgaagttgtttgttttcgttgttgctgcagtagttttggtagcatggccatgccatggcgcaggctaccaaaggttccctctccgaatgaaaactggctatggtgagcgttcttcggaggtaaaatgcgcaagttttaggcttgctgtggaagcacacaacatccgagcctttaaaaccattcctgaagagtgcgttgaaccaacaaaggactacattaatggcgaacaatttagatcagactctaaaacagttaaccaacaagctttcttttatgctagtgaacgcgaagtccatcacaacgacatatttatattcggcatagataacaccgtactctctaatatcccatactatgaaaaacatggatatggggtggaggaatntaatgaaaccttatatgatgaatgg

SEQ ID NO: 16927 - DNA, 454 bp, Glycine max
  Clone ID: LIB3106-111-Q1-K1-E7
cccacgcgtccgcggacgcgtgggtaaagatggaaggtgctagtagagtcttatgcttgtttctggcggcatttttgtggtttaatgctcaacatgcttttgtaagttgtgctttgacatttgagttgcaaagcaaaattgctaaagccaaccaagagggaccttacctaggtttaatcataccaaattcttttgaactagaccctcttcttcagaatcctggctacacagctagtgacaccatcatagacttcgctggaaggagatttcgctttggagccattggtgacaagcctgttatactggtcatgacaggattgagcgtgataaatgcagctataacgactcagcttctgttgagtttattcacggtagaaggagtggtgcattacggcattgctggaaatgcaaacccgtccttgcatattggagatgtagctattccccaatactg

SEQ ID NO: 16928 - DNA, 452 bp, Glycine max
  Clone ID: LIB3106-111-Q1-K1-E8
tcgcccacgcgtccgcaagtagttgagaactaacatggagaatcagatggctccctcaatgatcgactgcccagctgttaccactgtcaaccgtgccggtgccgtcatggctgcttcattcactggccttaagtccatggcatggcttccgcaccagagagaccaacagtgacattacctacattgctagcaacggtggaagagtgcaatgcatgcaggtgtggccaccagttggcacgaagaagtcagagactctttcctacctgccagaccttgatgatgcacaattggcataggaagtagaataccttcttaggaagggatggattccttgcttggaattcgagttggagcacggtttcgtgtaccgagagcacaacacgtcaccaggatactacgatggacgctactggaccatgtggaagctgcctatgcttggttgcactgatgct

SEQ ID NO: 16929 - DNA, 386 bp, Glycine max
  Clone ID: LIB3106-111-Q1-K1-E9
cccacgcgtccgattttgctttagatattttgtgtaacatggcatccctcaaggctgacaaacccgttggcactcaactttttgggcagggtaaaaaggaagctgctcccaaagctagtgatggtgcatcatccaaatccaagggttcagcttccaaatctgctaccaagaaagttccagtacagaagccccaagaattcaagaaaaagggaaaaggaggcaaatcatctacaaagcactagccagaaagccttattaatttactgaaggaaagtgtagtttaattgtaagaataaaaagccacacacatattggatacaatcaaaattgtaccttgttttcctattcagtcaaggtatcttggctgtctatgtgatcagcttgct

SEQ ID NO: 16930 - DNA, 283 bp, Glycine max
  Clone ID: LIB3106-111-Q1-K1-F1
aaaaaacctgctatcgcctaaacacaatgcagctccttgatatgatggcagcttcaatcatgggagcatgaacatatcaagcgtaggatatgtttggtgatctactggtcgcagattatagtacccgtacttataaattctaatgcacctgacggatgttcgctatgtaattacacaacatgttttgatttcacaccattcttgacaagctctgtcaagaaacatagcaataccttcttgtacttcaacataccttcgactatatagtagataattaaagtgc

SEQ ID NO: 16931 - DNA, 86 bp, Glycine max
  Clone ID: LIB3106-111-Q1-K1-F10
gccacgcgtacgattacgcttaagcttcatttgactcacagacatatcgcgaggtagacagagacagtgcgtgcacaatcacacac

SEQ ID NO: 16932 - DNA, 430 bp, Glycine max
  Clone ID: LIB3106-111-Q1-K1-F11
cccacgcgttcgcccacgcgtccggcttaccttacctgaagatggcttcggtgtcctttgccgggggacttttaccttacgcttgagttcgatttcccgtattgagcaacgccaactcactgaaactcagttcctcagctagcatctctactccaattcttcagcaaaagctctgctctcttctttcccccctgcctctaagccctcgccctcgccctctcaccattgtatccgctaagggctacaaaatgaaaacccacaaggcatctgctaagcggtttaaggtgaccggacgaggcaaaatagtgcgtatgagagctgtcaagcagcatttgctcgtcaagaagaataccaagcgcaaatccctacgttttcaaatgcacgcggtcagcatgagcgacttttacaacgtaattggagccttgccata

SEQ ID NO: 16933 - DNA, 77 bp, Glycine max
  Clone ID: LIB3106-111-Q1-K1-F12
atcacgcttccgcagacgctgcctgattggccttactaaacaaagcttctgcgctgcttacagagacactgggacct

SEQ ID NO: 16934 - DNA, 445 bp, Glycine max
  Clone ID: LIB3106-111-Q1-K1-F2
agataactagaaacagtgtgatgaatatgaacgtccttgttttcttcgcagctacaatactgggagcatggcaatgccatgcgtacgatatggtccctcttctaatgaacactggctatggtgcccgtactcctgaagtgaaatgcgccagttggaggcttgctgtggaagcacacaacatctttggctttgagaccattactgaagagtgcgttgaagcaacaaaggaatacatacatggcgaacaatatagctccgactgcatagcagataaccaacatgcttacttttatgccagagaccttgaaatccataccaaggacacattcgtgttcagtatatatggcaaccgtactctctaatatgggatactacaaaaaacatggatatggggaggagaaaattaactagaccttgtatgatgaatgggttaacaagggcaatg

SEQ ID NO: 16935 - DNA, 363 bp, Glycine max
  Clone ID: LIB3106-111-Q1-K1-F3
accacgcgtgcgaccctctctactccttctttttccattttaccatcgtactatgccgaatcggctcatgcactcattaccattatggtgatatgcgccgctcttcttagcgtacgctccttccgcagcaagttcgagcgcatgaagccccacgtgaacatcgtcaccatcgtgcacttggaccacgggatgactaccctgaccgtcagcacaatttgtttgtttgaacttaaccttcattcccttttgttcatgatatttgagatttcatcatcctttatgcttgggatctgttttctgacttcaatggtaattaatgtatgagaacttatgcgtgtgaaaattctatgctgccgttccttc

SEQ ID NO: 16936 - DNA, 447 bp, Glycine max
  Clone ID: LIB3106-111-Q1-K1-F4
cccacgcgtccgcaacaaagcaaagcgaagcatgggtttactgtggtggcgaaaggggaataaaccccaaccccaactccaagctaagtcatcgtcaattccgaagtcgaacggcacagacgcaacgaaacccgtgaccgaggccccagggatgaacggcgccgtggaggttccccgtcccccgaacaccaccgtctcgatttttgagttcggctctgtcaccgccttcaacgaccaggtcacgctcgccggctattgccccgtctccgaagacctcgagccctgccgctgggagattctccccgccgttcagtctaacgccccccagtttcgcgtagtcttttgatacccaactttttatctcatcgccgcttatggaatgtactttttgctataaaacattcgagtttaagggaaattcgcatttttcttattgttaatgttatg

SEQ ID NO: 16937 - DNA, 406 bp, Glycine max
  Clone ID: LIB3106-111-Q1-K1-F5
gccacacgtacgaaacaaaccaaagcgcagcttgggtatactgaggaggccaaagggggctaaacctgaaccccaacttgatgctaagtcatcggcacttactgagcctagcggaacatacgcatctaaacctataaccgatgcccaagggatgaacggcgcctgggaggttcaagagctctacgaacaccagccgttggatcaaagagtgcggatatgagagcgtattcaacgaccaagtaacgctcgaccgctattgccccgtgtgacaagacctgtagccatgccgctgggagattctacccgccgttcagtataacgctcgagacatttgctgattcatttgatacccaacgattgatattatcgccgcttatggaatgatctgtttgctatatagcatact

SEQ ID NO: 16938 - DNA, 450 bp, Glycine max
  Clone ID: LIB3106-111-Q1-K1-F6
ggaacagctagcagagaaacaaagttacaagtaaagtaaattaagaagatcattaatggcttctcttgcaaccttagctgctgttcaaccagctgcgctcaatggccttgctggaagttccctctctggaactaagctctctttcaagccctctcgccacactgtcaaatccaagaacttcaggagtggtgccgtggtagcaaagtatggtgacaagagtgtgtactttgatttggaggatctgggcaacactacggggcagtgggacttgtatggctcagatgcaccttcaccctacaaccctcttcagagcaagttcttcgagacatttgctgctccattcacaaagaggggattgttactcaagtttctgatattgggaggtggttccacccttgcatacttcagtgcaacagcctcaggtgacattctaccaatcaagaagggacc

SEQ ID NO: 16939 - DNA, 416 bp, Glycine max
  Clone ID: LIB3106-111-Q1-K1-F7
tgcacacgtgcaaagactcgtgggtatagatttcatgtgcatggcaaagcatatacctggcacattccaatggcttgcagcatggtgctcgacacgctcttggatcttgctctccgacactactcaacatcagtcaccaatgcatgtggcacatgcaaggaccaacactactgcttaatcataccatacatcatggaaactgcaccacggacacatagaatcctggctacgcatgctagatgacactatgactagactaatgttggaaggagatcccgcgtctctaccatgggttacacatctcttatactgttcactacatcatagaccgcactatacgcatgtactgctactcaggtcaaggtgcgtggaatcaacgtggatggacctatgccactcagcgttctactcaatgc

SEQ ID NO: 16940 - DNA, 453 bp, Glycine max
  Clone ID: LIB3106-111-Q1-K1-F8
cccacgcgtccggtttgttgttgtaactcgttcttcttcttttgttgttctgtgtttgtgtttgttttttctctcacctgaaaatgtcttgctgcggtggtaactgtggttgcggaagctcctgcaagtgcggcaacggctgcggaggctgcaagatgtacccagacttgagctacactgagtcaaccaccaccgagaccttggtcatgggagtggcacctgttaaggctcaatttgagggtgctgaaatgggtgtgcccgctgagaacgatggctgcaaatgtggaccaaactgctcctgcaacccctgcacttgcaagtgaggtgttgggagagcaagcttcaagcagagatagcccttaattaggaataatgataaactattaatgtgtagctaaaaacttatgtattatgtctgtgatggttttcgtgcactctggtgtttcgtgttaa

SEQ ID NO: 16941 - DNA, 255 bp, Glycine max
  Clone ID: LIB3106-111-Q1-K1-F9
cccacgcgtccgaatcggccttagaaataatgtgcgacctttcatgcttctctgctgtacttggaattggggctcaactcgtacgggcagcgttcctataggtacacttcggttgctcgtctttaccataagaagctctggcaccagctcactctcaagcttgatgccaatagaggtcttgtcatctttcacgcatggtgacgctttaatacaattatatcacaaattacatcacatactttgagacggaaatca

SEQ ID NO: 16942 - DNA, 409 bp, Glycine max
  Clone ID: LIB3106-111-Q1-K1-E4
gtgatcctggcatcactgcctgatggtaaactggccgcaggagttggaaaggagtcgttggagtacgttgatcttgatggtgctacaaaatcccgtgctggattaaatgggcagaaaatttgatggaaatcaagttattgctgctttatatccatagtgcaaatttgctcagggagattatgaaggctaattgaatgatatttggattctatcttgattagtaaggataatctttagtattatgatcataaacttgtaagctagagttgtggtcatagtgcataaacttagatgcgagtagtaagaaagtcatgatcgacaacttattaaaaatagatttattggtctacatggatcctgtctggtgccttgataaattatcgtgttatcttgattgaggttttgattt

SEQ ID NO: 16943 - DNA, 375 bp, Glycine max
  Clone ID: LIB3106-111-Q1-K1-G10
gtaagtcgtttcagcgaaccagaaggaggggctcctcaactttaaaaagtgaagttagaattgaatgaatgaaaaagggtccgtggcaatggagacagagccaaaagggctagaagcttccctagaacatttgattgaccttcaccaccacaaatctcttgtccttgcccaccacacagacaaagccaagaaggacgcaataaggaaagccgagcacgtttctgatttgttggttgaagcggtgaatggtggggtccaagattccttcatcaaccagaagcgaattgagctcgaaattcgaactctggctaccaccatcacgaggttcatgaagcatactgatcaatggctcgctgtcacttatgcccttaacac

SEQ ID NO: 16944 - DNA, 452 bp, Glycine max
  unsure at all n locations
  Clone ID: LIB3106-111-Q1-K1-C4
cattttcaggcccacattcaccgtgtcacactgttcccttatctcaaattcaactactagtaattgcttacacataataaacctgtgaattgtaacctgtaggctcaatttcattggcaagaggcatatagaattatcctcaaagaatagccaagaggggtcttaatttggcacaacttggaagtgctaccaattgagtttgagacaccactgtgtctgtgattttgaggtttagaatgtctgctgctgtgtctgcaaccaaggatgttcccttcattgctcatctggaggaagatatcaaaaacaaaggaagcaacaaggttgttggggaagcagaccggcttccttacaatgatgatgccgaaggaactgattcagagacagaggaagaccccaagttggaattggatcttggtcctcagntttccctcagggaacagcttgagaaagat

SEQ ID NO: 16945 - DNA, 213 bp, Glycine max
  Clone ID: LIB3106-111-Q1-K1-C5
ctttgacaggcccacatcgaccggcgcacacttcaacctgatctgaaagtcacccaccagtagttgcttacacatcatcaacctgtgtatcgcaaccggttggctcacttccattaccacgaggcatacgtaatattcctcaacgaataccccacaagcgtctcaactggtcacaacgaggaagtcctaccaattgactttgagacactacag

SEQ ID NO: 16946 - DNA, 423 bp, Glycine max
  Clone ID: LIB3106-111-Q1-K1-C6
atccactggttcttcatctgcatgcacacagttgcatagttttggaaaccaacaattcctgaagaagggtagcatcaacaagcaggtctgaaaatggagatcaccaatgtcagtgagtatgaggctattgcaaagcagaagttgccaaagatggcgtttgactactacgcatctggtgcagaggaccagtggactctgcaagagaacagaaatgccttttccagaattttgtttcggccacgtattcttattgatgtgagcaagatagacttgacaactactgtcctaggcttcaaaatatccatgccaatcatgattgccccaacagcctttcagaaaatggctcatcctgagggagaatatgcaacagcaagagctgcatctgctgctggaacaatcatgactttgtcctcatgggctact

SEQ ID NO: 16947 - DNA, 449 bp, Glycine max
  Clone ID: LIB3106-111-Q1-K1-C7
aaagaagcgtagctaaagtcagcattcgaaaaagatgagtagcatcggtacaggttacgatctatcggtcaccactttctgccgggatggccgcgttttccagatcgagtatgccgctaaagccgtcgacaacagcgtgactgttattgggatcaagtgcaaagatggggttgtgttgggcgtcgagaagcttattccgtacgaaaatgatgctttcgggttccaatagaagaatacactatcgatcatcgacactctgggatggcatgttgcaggattagcagctgatggcagacaaattgctgccagggctaagtgtgaagctactaactatgacagcgtatatggcgaaccaattgctgttaaggaacttgctgaccgtgtggctcgttatgagcaccttgtgacgctatattggaggctcatacactttggatgtagcgtcatac

SEQ ID NO: 16948 - DNA, 365 bp, Glycine max
  Clone ID: LIB3106-111-Q1-K1-C8
gttaggaataggatggagggggttgagcgcatacaaagagaagtgatggcggcaaagccaggtgcagtgggtgtcagtgatttgcttctgaggctgttggccttcacagtcactcttgtcgctgctatagtcatcgcggtctataagcagaccatggttgatcccatccagctttcagatcccctaccacctttggatgttcctctcactgctaagtggcatcaaatgtctgccattgagtactgtctggtgaccaatgcgatagcatgcacgtatacattcctgtctatactccttgccctcgtgactagaggtataagcaatggcctgtggacattgatcgctgtactcgacgcattcatggt

SEQ ID NO: 16949 - DNA, 412 bp, Glycine max
  Clone ID: LIB3106-111-Q1-K1-C9
gggagaattaggtttttagggtttacaccgagcagccacaccttccgcagcagccatggttctgaaaactgaactatgccgattgagtggtgccaagatctacccaggaaagggcatcagatttgttcgtggtgattctcaggttttcctgtttgcaaactcaaaatgtaagaggtatttccacaatcgcctgaagccttcaaagctcacctggactgcaatgtacagaaagcaacacaaaaaggacattgctcaagaagctgtgaggaagaggagacgtgctgtcaaaaagccttactctaggtccattgttggtgcgaccttggaagtaatccagaaaaagagagctgagaagccagaagttcgagatgcagctagggaagctgctctttgtgaaattaaggagaggatc

SEQ ID NO: 16950 - DNA, 131 bp, Glycine max
  Clone ID: LIB3106-111-Q1-K1-D1
cgtagacacctaagcacccagagactatgaacgagctttatctatgtacatatacaacaatgggcacggttaaatatgtagtttaggacggatttcatcatcgtctcacagttaagcatctttttcgacat

SEQ ID NO: 16951 - DNA, 375 bp, Glycine max
  Clone ID: LIB3106-111-Q1-K1-D11
ctaagtataaatatatagaaattctagtgattatagactatctttatataataatataaataggaataaaaaaatataaaaaaagaaagaatctatataaatataaaaataatatatataaggtacaaatagtaaatcgaggtacccattttatgataaactttccttccatttttgttcctctagtaagcctagtatttccggcaattgcaatggcttctttatatctttatgttcaaaaaaacaagattttttagatacagaaaacatagtgaaattctggggttttttattccccaattataatacttaattcaaaaaaaggagagtaatgagtataatcatatcgctcagacgatgtactgatatattcta

SEQ ID NO: 16952 - DNA, 439 bp, Glycine max
  Clone ID: LIB3106-111-Q1-K1-D12
agctaagcctgcaagcttcgccgtttgaaacagtgcctcaaccatggcagaacaaacagagaaggcttttctgaagcaaccaaaagtgtttctatgctctaagaaaggtgggaagggaaagaggcctgggaaaggtgggaatcgcttttggaagtcaattgggcttggattcaagactcccagagatgccattgaaggaacctatattgacaagaagtgccccttcactggcaatgtttccattcggggtcgtatcctagccggtacttgtcacagtgctaagatgacaaggaccattattgtgaggaggaattatcttcattttattaagaaataccagagatatgaaaagcggcattcaaatattccttcacacatattaccttgtttccgtggtaaggaaggagatcatgttattattggccaatgcaggccaatc

SEQ ID NO: 16953 - DNA, 390 bp, Glycine max
  Clone ID: LIB3106-111-Q1-K1-D3
gtgagtgtgagtgagtgtatcaatcggccacacagaattgggcagtgctactatgattccagggtcctggttgccttggcggccgcgttatcctttcaagggatcggtgcaaaccttggtcgcaaaaccatggctgaagaagattcatcatgcatgacccttcatttccgtggttaacaaggctgcctatctatcttccgtcgtgacatgcacccagcgtcagcgctaggtttctgctggacactttggggccgcaacctgtttctaggaattgggctaagagaaagggtcgaggaatattcgcatggcaaggggctcgttgtcgttttgggatgagaggtcagaaatctcgatcttgacctggcgttattaaaggtatcgaaggttgtc

SEQ ID NO: 16954 - DNA, 426 bp, Glycine max
  Clone ID: LIB3106-111-Q1-K1-D4
catatacaggcccacattcaccgtgacacactggcccctgatcgcagattcaactactagtagtagctgacacataataaacctgtgaattgtaacctgtatgctcaatttcattggcaagaggcatatagaattatcctcaaagaatagccaagaggggtcttaatttggcacaacttggaagtgctaccaattgagtttgagacaccactgtgtctgtgattttgaggtttagaatgtctgctgctgtgtctgcaaccaaggatgttcccttcattgctcatctggaggaagatatcaaaaacaaaggaagcaacaaggttgttggggaagcagaccggctttcttacaatgatgatgcctaatgaactgattcagagacagaggaagaccccaagttggaattggatcttggtccttagtttt

SEQ ID NO: 16955 - DNA, 263 bp, Glycine max
  Clone ID: LIB3106-111-Q1-K1-D5
cccatcatgcaacggcgtatcgcaactatagtgctaactaatatcagttcgatgcccgtcgaattacaacgtcgggactggcaaaacgcgggtgaaaccgaacctactcggaaggcctaacattcgactttgagacgctagcgtaattgcgaataggcccgttacgatcgctcttgctaacagtggcaccaacggaatggcgtatggtgctcaccctgaagcagatcattaagcgcgacggatgaactaggtacgcgcagtat

SEQ ID NO: 16956 - DNA, 182 bp, Glycine max
  Clone ID: LIB3106-111-Q1-K1-D6
aaaaaatgggtgttaatgtgtatgcacgcaatcgcatagtgtgggtggccaaccttgcctggggaagggtagcaacatcgctccggggtgaagacggagatacttaatgtctagaagcatggatgtatggtaaagctgaagttgtctaagaaggtagatgactactactcatgtcgagcaca

SEQ ID NO: 16957 - DNA, 413 bp, Glycine max
  Clone ID: LIB3106-111-Q1-K1-D7
caggtaccggtaccgaatctcgcagatgtcgagcctacggcgtacgcgtgcgctcacgcgctcgatcagccgagatgacaagtattcataatgtgctcaaaaaatgcttggagcgatgatagtgcacgtacaggaacttgttccacagcaagctacctcaagtgcatgggcgacttcagcactaggtagacccacactgacgcatgaactattgttatctacataggaagcttgaaatggatgcttatgctggacgaattgtcaagaagaagatcgagactattttctacttgactgacctagctgatgcccaatcggcaatggacgtcgaatcccttctgaggaaaggatggattccttgcttggaattatagttggagcatggttttgtataccgcgagcacaaatgttca

SEQ ID NO: 16958 - DNA, 66 bp, Glycine max
  Clone ID: LIB3106-111-Q1-K1-D8
ccaacgcggacgttggcgggtgcaattggcatattatcgtagattcaactactactaggagctgac

SEQ ID NO: 16959 - DNA, 82 bp, Glycine max
  Clone ID: LIB3106-111-Q1-K1-D9
gccacgcgtacgctagaagcaagtgatctcagtatcgacgtttatgatgtccaacactttggtgaagagtgcatgattcctg

SEQ ID NO: 16960 - DNA, 368 bp, Glycine max
  Clone ID: LIB3106-111-Q1-K1-E11
ctttctctctctcattctcttctccatcgcgcgtaagaaacacattttagttgctactaatgggaactgttgaagctgcaaacagggatgcacatggaagtctcctagagaaaaatccttcagttgtttttgtgttaggtggcccatgaagtggaaagggtacccaatgtgcaaatattgtccaaaattttgggtatactcatctcagcgctggtgatcttctgcgagcagaaatcaaatctggttctgaaaatggtacaatgattcagaatatgattatagaaggagaaattgttccctctgaggtaacaattaagctcttacaaaaagcaatgcatgaaagtggcaatgacaaatttcttattgat

SEQ ID NO: 16961 - DNA, 197 bp, Glycine max
  Clone ID: LIB3106-111-Q1-K1-C12
tcgcccacgcgtccgatacattatacatctctgacaatgcttcaaagccgatgattttgtatgttcattcttatgtacaaaaggaaagaattgatcaagaatccaacaaacacctgagtctaatgtgcttttaatgacgcgatgttgggcttctcatgactcccaaggtctccaaccatagtgaccaacaagaaggt

SEQ ID NO: 16962 - DNA, 411 bp, Glycine max
  Clone ID: LIB3106-111-Q1-K1-E2
gggagccccgctggcttttctatcctaaatcctaccattttcccttttcataattctcactgggcgcattattattttccttcagggtcattgttgttgttattgttgttgaatctgccggaccatacaccgattcattcgaccaaaacataagcatgtcggcatctgacatggcaagcagggagcaattcacggttggtatgcacaaaccccaacctgaaccccaacaacaacaacctcatcttcatcaaaacaacatgcgtatggactatgctgctgctgacggcaccgatgatttcgcccttgctaccgttaccgttgacattaacggcggaaaatcctctccggccgtgccttcaggcctgggcctggcccagtcccaggcccatccccagcccatgatggttaact

SEQ ID NO: 16963 - DNA, 410 bp, Glycine max
  Clone ID: LIB3106-111-Q1-K1-E3
ggacgcgtacggagttaatatcctaagtcctaccattttcccttttcataatatcttactcggcgcaggattattttacttccgcgtcattgttggtgtgattgttgacgaatctgcctcaccagacactggttcattacgccacatcatacgcatgtcgggatctgacatggcaagcacgggagcaattcacggttgggatgcacaaaccctaacttcaaccctaacaactacaacgtcatcttcatgaaaacaacatgcttatggactatgctgctgctgacggcaccgatgcttttgcccctgctaccgttaccgttaacatttacggctgagaatcctcttcggcggtgccttctgtcctgggcctagcccatccccaggcttagtcccagcccatgatggttaac

SEQ ID NO: 16964 - DNA, 62 bp, Glycine max
  Clone ID: LIB3106-111-Q1-K1-A5
cccacgcgtccggcgacgcgtccgtccacgcgtccggccacgcgtccggttctagatcgcga

SEQ ID NO: 16965 - DNA, 438 bp, Glycine max
  Clone ID: LIB3106-111-Q1-K1-A6
cccacgcgtccggcacatatgaacttggggattgtattgagttattttaatgctcatttctttcgaaactcactggatataagggaccagtttgtgccacagatgattttccttaacagtctatttgggtatctttcccttctcattgttatcaagtggtgtactggctctcaagcagacctttatcatgtaatgatatacatgtttttaagccccacagacaatcttggcgagaatcagttgttctggggccaaagacctcttcaaattgtgttattgcttttggctgtaattgcagttccatggatgctctttccaaaaccttttatactaaagaagcttcatactgagaggtttcaaggtcgtagttatggctttttaatttaaagtactaatgctattgtatgaataagtgatcagctcctgtatttatcagtg

SEQ ID NO: 16966 - DNA, 456 bp, Glycine max
  unsure at all n locations
  Clone ID: LIB3106-111-Q1-K1-A7
gcacaaagcgggttactgtctgttcaagctaccatctctctctctctttcttagtgcctccttgccagaagttaaaatggcccaagaaactttcctattcacatctgaatcagtgaacgaggggcaccctgacaagctctgtgaccagatctccgatgctgtgctcgatgcatgcttggaacaagaccctgaccggaagggtgcctgtgaaaccttgaccaagaccaacattgtgaatggtttcggagagaatacaaccaagggcaacggggactattaaaagaatgggggacacatgcaagaacattggttttggctctgatgatgttggtcttgatgctgacaactgcaaggtcctcgtcaacattgagcaacagagtcctgatattgctcaaggtgtgcacggccacctcacaaagaggcctgangagattggtgctggtgaccaaagtcata

SEQ ID NO: 16967 - DNA, 454 bp, Glycine max
  Clone ID: LIB3106-111-Q1-K1-A8
ctttgctattccaatggccactgttgaggttgtgtcagccaaggttgccctcccagaggacacgagaagaggcatcattgaaggttgacgaggagaagaacacagaagaagttgttgagactccaacaccagaaactgtagtcactgagcaaaccaaggaggaaagtactgaggccccacgacctgcagcttcagaagacaagccctcggttgaagttcagactaaagaggtggcagaggaagttgtgtctgagaccgtcacacaagagccaacagttgagaaacaagaagctgctgagggaacaaaagaaaatgccgatcctgctgagattaagacaccagaagctgcagaagatgttaatgttaaggaagagaaagaagctgaggctgaagctaaggaggaagaggccccggcagagaaaagtgaggagaaggttgagacagaagggtcagc

SEQ ID NO: 16968 - DNA, 316 bp, Glycine max
  Clone ID: LIB3106-111-Q1-K1-B1
cccacgcgtactatgcttcagagctgatgctacacaaaagaaatggcttacactcaagcagagggaatggacatactcagttcagcatgcgtggccataaaaagcataaagcagtaactcggatgcgatgtattggccactcacataccatgcattcgcattagaagcggctgtctaactcattgctggatcatcatgtgatctcctccatgacttagacctgtatctcggacctgtatgatgctagattatcacattgcaccatatttcctgatgtctatattcctagcttttcaagctctgtttagagcttatc

SEQ ID NO: 16969 - DNA, 335 bp, Glycine max
  Clone ID: LIB3106-111-Q1-K1-B10
tcggccacgcgtgcgatcacgcgtccaatcgagatatctagaaacagcgtgatgaaaatgaaagtccgcgatctcttcgttgctacaaggttggtagcatggcaatgccattcgtacaatatgtatcctctccgaatgaacactggctatggtgcccgtactccggaggtgaaatgcgcacgttagaagctttctatgctagcacacaacatctttggctatcagaccattactgaaaaatgcgttgaagcatcataggaatacatacatggcgaacaatgttcatcggactccaagacaagttaccaacaagcttacttttatgccacagacct

SEQ ID NO: 16970 - DNA, 229 bp, Glycine max
  Clone ID: LIB3106-111-Q1-K1-B12
tcttaacacaaaggcccctcaaaccacgatcgtcacactcttttagtgggtcgtatctattcctgtctttctgcacaattacgtcgtggaccgaccctttagtgtaagtgcaatggccatgcctaaacttgtatgtgtactgcatctggcattccttggcatttggatgatcacaactcaagttatagtaacagattctgtctctcactcggatgcaaggagttatgga

SEQ ID NO: 16971 - DNA, 354 bp, Glycine max
  Clone ID: LIB3106-111-Q1-K1-B2
cccacgcgtccgctcagacactgcgttgactgatatgttaagaaaatcaaatgatgagggaaaattggctataaaaaaaaaaaagggacgagacaaaaaaaaaaaaagaaaatgaccggcacaaacaaagaaacccaaccgaaaagagacaataaaggacaagggcgggccctccttaggcccccatcaaggttgaaccccagccggcatagaggatacctggcttggccaacccaacttacttcaatggcacacttcctggagacaatggatgtgaccctcagggactagctgaggacctagagaactagaggtgggacattcaagccagttcgcagaatggacgttgggcca

SEQ ID NO: 16972 - DNA, 458 bp, Glycine max
  Clone ID: LIB3106-111-Q1-K1-B3
gttatcctaaaatttcttccttgccactgccagtgtgtcaccaccatggccaccgtcacaacccaagcctccgccgcgattttccggccgtgtgcctcgaaatcgaggtttctgaccggctcttccggtaaactcaaccgggaagtgactatgaggccaatggggtgccctccttctgcctctttcaaggttgaagccaagaagggagagtggttacctggcttggcctccccaacttacctcaatggcactcttcctggtgacaatggatttgaccctctgggactagctgaggacccagagaacttgaggtggtacgttcaagccgagcttgtgaatggacgttgggccatgttgggtgttgcaggaatgctacttcctgaggttttcaccaagattggaatcatcaatgcccctcaatggtatgatgctgggaaatcggagtactttgctttatc

SEQ ID NO: 16973 - DNA, 452 bp, Glycine max
  Clone ID: LIB3106-111-Q1-K1-B5
ctgagaatcgccgcaagcgcaaagagaattgttcaaacggcgtcgttggaggcgccaccgttggggattagggttctgccgcgtgtctaccacgagagggtggtggaccactacgacaacccccgcaacgttggatccttcgacaagaacgaccccaccgtcggaacgggtcttgttggtgcacccgcgtgtggcgacgtcatgaagctccagattaaggttgacgacaaaacggggaagatcgtcgatgctcgcttcaaaaccttcggttgtcgatccgccattgcttcttcctccgtcgctactgaatgggtgaagggaaagcaaatggaggaagttttgaccattaaaaacactgaaattgcaaagcatctttcacttccaccagtcaagcttcactgcagcatgcttgctgaggatgctataaaagcagctgttaaagattatgaagc

SEQ ID NO: 16974 - DNA, 452 bp, Glycine max
  Clone ID: LIB3106-111-Q1-K1-B7
gctagtttatcgtgaggagaatatgaagttgtttgttttctttgttgctgcactagttttggtagcatggccatgccatggcgcaggctaccaaaggttccctctccgaatgaaaactggctatggtgagcgttcttcggaggtaaaatgcgcaagttttaggcttgctgtggaagcacacaacatccgagcctttaaaaccattcctgaagagtgcgttgaaccaacaaaggactacattaatggcgaacaatttagatcagactctaaaacagttaaccaacaagctttcttttatgctagtgaacgcgaagtccatcacaacgacatatttatattcggcatagataacaccgtactctctaatatcccatactatgaaaaacatggatatggggtggaggaatttaatgaaaccttatatgatgaatgggttaacaagggcgacgcac

SEQ ID NO: 16975 - DNA, 370 bp, Glycine max
  Clone ID: LIB3106-111-Q1-K1-B8
acgcgaggatggtggcagatgctgacgtgacggagactgaggctgctgagacggccgaggtggctcgagacgagccgatgtgacggtgggcgtcagagagaagagcatacttctccggtgtccagacgagtatacttgtacacgtccggactatatctatgcttgcggaccttcacctatctacaagtcagctcacattgtgaaagcaccattcatgatgaatcatgacctaatatgcatcaaaggataaaggcaatctctatgttgagccagatgaaacatctatcttcctgactaagctctttgaacaaaagtctgaacgtgtcatgtttatgctacaacgcttatgactcacatcaaggtgaatgta

SEQ ID NO: 16976 - DNA, 334 bp, Glycine max
  Clone ID: LIB3106-111-Q1-K1-B9
gtgtttttcatttcatcgtgcattcaatggccaccacagcagctctatccggaaccatggtgagcaccttcttcatgaggaggcaacctatgaccaccacaagcctaaagacattccccaacgttggtgaagctctttttggtctgaaaagtggacgaggtggtcgtgtcacttgcatggcctcgtacaaggtgaagctcataaccccagaaggagaagtggagtttgaatgcccagatgatgttttcattgttgacatggcataggacgaaggcatttgacttgtctactcgtgcagggccgtttcttgcgttttctgtgttggcaaaattgt

SEQ ID NO: 16977 - DNA, 446 bp, Glycine max
  Clone ID: LIB3106-111-Q1-K1-C1
cccacgcgtccgagcgttatgagactatgtgagatcagagttattgcataatttcaagtgtgggagtggacagatttagtttaaggggcgtaaatagtgagcatataaagaaaaggaatctgaggaataggggagacaaagacaatggatttgcatttgaagagtttgtataacagatgtctggagcaatttgggtctggtcctggtcttggccctggatctgggacatgtatgatgaaagtggatggcattgctccaaatttcattaaatctatatacaaagcttctgcagctttgtatagagctgagccgtggaagaggctgcttccagagcacttgtttggcgaccggattgagaaagattctgattggcctggcaagaaacaactctttccatgtgttcagttcattgtaggggatggatgagatgttgaattttacatgtt

SEQ ID NO: 16978 - DNA, 400 bp, Glycine max
  Clone ID: LIB3106-111-Q1-K1-A3
gtaggaagtaacacctgtagctggaggctcactatttgcagcattaggaagtggataggttgcttattgaagacgctggagcccttttttgattttgcttcggaatgaacagtaagttgtgtcatcgaaggacgaaagcagagtttactattgtggatgttggagaactaactataatatcttaatgcttgttgtacggcagattgtatagatgtttgtattgcttttcggttatctaagttaattgttcccacataatcagttcttctcgacatagaagtaacatgcaccagctctttttgaggatcttactgaggatgtattttgggatctttattggttacttccatgtactagacgataccttgaagttagccataaaaatcaactatattttctt

SEQ ID NO: 16979 - DNA, 341 bp, Glycine max
  Clone ID: LIB3106-111-Q1-K1-C10
ggaaccaaaactcaggcacttgctgtttggcactcagatacttctggaatgaatcatcacatgcgttatggactcatgggagttgatcctggaactaaccctgtttgccatttccttggaagcaaggtcattttatgggtaccctatatatctatggacactgcctatcaaactaaccttgatgtttaattagtccatgcatctgcatcttgggcaccataagatttgatataaaataaattatggtgtgttgtgtatgttgtgcaagacctggaactagatgtttctacgtacgtgtgctgatatgattcagtgtgctttgatgatactttgattaatat

SEQ ID NO: 16980 - DNA, 358 bp, Glycine max
  Clone ID: LIB3106-111-Q1-K1-C11
tccacgcgttcggaagcctcgactcttcaacagttggagttgcagcgcacggattggtcgacggtcttgttcagcttaatgagagatggcatgaattaccgtatattactggactctgcaaaaagttgcatattggcttcttctgatcccagaaggcatcaattcttgataacgcgtgtggcacgctacattgatcatagacatagagacatgcaagccctaacgtctcttgaggttgactctcatactggtattttagcaattactcctggccttgatcgctaccagacacatacgccaggcaagacatatagctgttattggaggttgccgtgaatacacaggagctccatatttt

SEQ ID NO: 16981 - DNA, 89 bp, Glycine max
  Clone ID: LIB3106-110-Q1-K1-H11
aaaaaaaaaaaaataaaaaaaaaagaaataatataaataaaaaaaaaaaaaaaaaaaggagagaagaaaaaaaaaaaaaagataagaag

SEQ ID NO: 16982 - DNA, 395 bp, Glycine max
  Clone ID: LIB3106-110-Q1-K1-H12
cgcgtacggcctttttctttatcaactcccttagattctctccatcgggtcttcaaaaatgcggatgagctgcattggatgtcgagttctcagagaaggttgcattgaaaattgcagcattagaccctgtttacaatggatcaaaagcccataatttcaagccaatgctactgtgtttcttgccaaggtctaccgacgtgctggtctaatgaacctggttaacgcacgcctcgaacatcttcgtccagagatctttttttcgatgttgtacgaggcatgcgggcggatattgaacccgatttaccaatctgtccgcttgttatgggccgagagctggcagctatgtcaagccgccttggaaaacgtcttgaaaggcgcaccgattacgccgatca

SEQ ID NO: 16983 - DNA, 450 bp, Glycine max
  Clone ID: LIB3106-110-Q1-K1-H2
ctttacttttgtttcatgggctcattttgggaccatagagcgccatgacgccatgaccaaacccaacactttctttcacaatctaatcaagcccttcaaattcagctccagcaaagagggacaaaccgaagaaaacgaaatacagaacttagctgcacaggagcagaagatcttcccctacgaaacattggttgctgctaccaacaaatttcatattcttaacaagctaggtgaaggaggatttggacccgtctataaggggaaattgaatgatgggagagagattgcggtgaagaagttatcgcatagatcgaatcaagggaagacgcagttcgtcaacgaggcaaagttgttggcacgtgtgcagcaccgtaatgtggtgaatttgtttggttattgtacccatggctccgaaaagcttcttgtttacgagtatgtccgtcgcgagag

SEQ ID NO: 16984 - DNA, 401 bp, Glycine max
  Clone ID: LIB3106-110-Q1-K1-H3
gcgaagcataggtcgacgcgtacaggttgagtgcgtgaccagcaacgttgcctgacagacagccggctactgtcaagggtgatgatggaagtccggtctatgaagctgctgcatttgctaagaattcgagtcacaccgtccaatatagcatcttcaagagtggcgacattgtagcggtgcatggctacctgggactggacgatgaggatgtctatcttgaagacagcttcatgacagagggacttgtctggtttacaggcgggagatgactacaaccgtggggatagatgcacaaatgagacactggttgctccatcagaggaaggagatcggtacgccaatgcacgcttaagaggggcggttgcatccccgtatactaaagctgatgaggcttatgtgac

SEQ ID NO: 16985 - DNA, 450 bp, Glycine max
  Clone ID: LIB3106-110-Q1-K1-H4
acttttgatcataacaattattattacaataataataataataataacaataataataatttcatgatgaatcccatgcacatggcatatcttaaccaaccaattgtggccactgcagacaacaacatgtttctgtggtgaagaatctgaaaaaaaaaattaagatttcgtgctagtgtgttgttctgttgggagtttcgtcacggtggaatcattcacgagtgagggtaaggtaaatatttgtggtacctactactagtgtgaggcaatatttattaagatattattattattattattattggagtgtcatcagaacttgcttgctacatttgatgtgatttaaataatggaatcaaatcacatagtggcatttgcttagttctgttgttaggtcaccaaagtggcatgctacttgccattgtccaatgttttggaaaaatggatgtc

SEQ ID NO: 16986 - DNA, 370 bp, Glycine max
  unsure at all n locations
  Clone ID: LIB3106-110-Q1-K1-H5
acgatttcaactccggatatttagctacattttctttgttgccttgtcttctgaaatggatgaaatatggtccatatgaagtcaggtcttgtgattaatgataactctgtctgccttccttttagaactgtgatttccggcttgtgtacgggatacactagtgaaatctgggaccaatttcaactccggatatttagctacattttctttgttgccttgtcttctgaaatagatgaaatattttccaaaanaaaaaaaaaaaaaaaaaaaaaaaaaaaaaaaaaaaaaaaaaaaaaaaaaaaaataaaaaaaaaaaaaaaaaaaaaaaaaaaaaaaaaaaaaaaaaaaaaaaangggggggggccgtttt

SEQ ID NO: 16987 - DNA, 313 bp, Glycine max
  unsure at all n locations
  Clone ID: LIB3106-110-Q1-K1-H6
gaaatggatgaaggtatggttcatatgaagtcagggctggtgattaatgataactctgtctgccttccttttagaactgtgatttccggcttgtgtacgggatacactagtgaaatctgggaccaatttcaactccggatatttagctacattttctttgttgccttgtcttctgaaatagatgaaatattttccaaancaaaaaatgggtggggggaaatataaagaaagataatataaaataccaactttactgtaagaggcattttaaatcgatcaaaatcattcatctcaaataaaaaaaaaggggggg

SEQ ID NO: 16988 - DNA, 441 bp, Glycine max
  Clone ID: LIB3106-110-Q1-K1-H7
gcacatcctacaccaaatacgagatcagaaagcgaaaccctgaaccaaaatcatgtgccctattggtaatcgacgtgcaaaaccacttctcatccatggccaccccaatcctccataacctcaacaccaccatctccctctgccgccgcgcctccatccccgtcatcttcactcgccactgccacaagtcaccctccgacgccggcatgctggaggagtggtggtccggggacctcatcgtcgacggcacggcggaggccgagctcctggaggctctggaccggaaaagcagcgaccttgtggtggagaagagcacctacagagcgttcaggagcactggcttggaagagaagttggtggagatgggtgtgaaggaggtcatagtgacaggtgtcatgaccaacctgtgctgcgaaacgacgtcgcgtgaagcgttcgtga

SEQ ID NO: 16989 - DNA, 444 bp, Glycine max
  Clone ID: LIB3106-110-Q1-K1-H8
gggaatttcagttataagactctcaggtggtggtgcatcgctgagttgtgtgagagtgagaaagagagagtgtgtgtgtgtgcagaagatgtggccattcagcagaaaaggggcttctggtttttcatcatcatccacggcagagcaagtcactgaaggaattgatggaactggtctcactgccattgtcacaggagcatccagtggtattggcactgagactacacgtgtcctttcattgcgtggtgtccatgtgattatgggtgtgagaaatatgcttgctgctaaagatgtcaaagaaacattacttaaggagattccctccgctaaagttgatgccatggagttagatctcagttcattggagtctgtcaagaaatttgcatcagagtttaagtcctctggtcttccattgaatatgttgataaacaatgcacgaattat

SEQ ID NO: 16990 - DNA, 430 bp, Glycine max
  Clone ID: LIB3106-110-Q1-K1-H9
ctgttttcccaaccaacttgaagctccttccaacaccatcatcatcatccatggcatctcaaggtcatggtaacaagctcatcgtttccacatcaccaaagagtgacagtggcagcggcggcggtggcggtgcagtgggatcattgcccaaagggcagtgcctgtgctcaccaacgacacatgaagggtccttccggtgtcgtttgcatcgtgggcctacagcctcaccaacaaattggatgaaacgctccaagtccatgcctgctaataagcctgtggtttctgactccacatgctgatgataacaccaaaaaatgctattgtgagttatgtgttcatgtgtacctttatatgatatatgatatgaatccttgcttggaactcttgaattttggcagtgttaattattatatatatggttggaactttg

SEQ ID NO: 16991 - DNA, 458 bp, Glycine max
  Clone ID: LIB3106-111-Q1-K1-A1
cccacgcgtccggcaagggaagaaagaaactacagaaaagaaatggcttccacttctgcagtttcaatggctatgccagtaacttatgctagccagaagagggtggtgcctagctcggatgcattcttcaagccactgcctctacggtcttccaaggcagtgacagcatcaaaactcaatggaaggtttcaagtgagggcctccatgaaggagaaagttgtgacggggctcaccgcagctgcattgacagcttcaatgatggttcctgatgtggctgaggctgccgttacaccttctctcaagaacttcttgctcagcatcgcggcaggtggagttgttgttgttgccattattggtgctgtgatcggtgtttccaatttcgatcccgtcaagcgtagctgatggagttctgaggcactgtgttttatttatttttttgttacctcttatcatgatat

SEQ ID NO: 16992 - DNA, 467 bp, Glycine max
  Clone ID: LIB3106-111-Q1-K1-A10
tcgcccacgcgttcgcccacgcgttcgatcgagataactagaaacagtgtgatgaaaatgaaggtgcttgttttcttcgttgctacaattttggtagcatggcaatgccatgcgtacgatatgttccctctccgaatgaacactggctatggtgcccgtactccggaggtgaaatgcgcaagttggaggcttgctgtggaagcacacaacatctttggctttgagaccattcctgaagagtgcgttgaagcaacaaaggaatacatccatggcgaacaatatagatcagactccaaaacagttaaccaacaagcttacttttatgccagagacctcgaagtccatcccaaggacacatttgtgttcagtatagatggcaccgtactctctaatattccatactacaaaaaacatggatatggggtggagaaatttaactcgaccttgtatgatgaatggggtaacaa

SEQ ID NO: 16993 - DNA, 447 bp, Glycine max
  Clone ID: LIB3106-111-Q1-K1-A11
cccacgcgtccgcccacgcgtccgcccacgcgtccgaaaaaaaaacatttttttctgctttctgtgataacccttttgtttctctccttgaattttgcatcaagaaactcagttctcacttctcagcatggtttcacttggagctatatatagtgtggcctatgtgttcatgcttgctgctactttggtcttgggtggggatatagttcaccatgatgatgttgcccccagaagacctggttgtgagaacaactttgttttggtaaaagtccccacttggattgatggtgtggaaaacagtgagtacgttggtgttggtgcaagatttggccctacattggaatcaaaagaaaaacgggccaatctttctagagttgtcatggctgatccggctgattgctggacaaagcctatgaataagctcaccaacgagatcattttggggca

SEQ ID NO: 16994 - DNA, 368 bp, Glycine max
  Clone ID: LIB3106-111-Q1-K1-A12
cccacgcgtccgcccacgcgtccgggaaaaaacacacaatacagcttgaagtttgaacaagctgcaccgaacaacagaatcttctgctttctttctttgttcatgttttccaaccaggttcacgtgttccgctctgcatttcgcgttctgaaatatccacgcacgaaaaccccacccaacacgcgtctcttccttcttctgcttcatgccaacaacaacaacaacacaaacgctggcacatcaccaccggcaccggcacgtcatacttttttggcacccgtgttaacaacccgacaaccttaaacaacggaagatttcacgcgcttctgaacttcggcaaaaagaatgctgcggcaccgtcaccgaag

SEQ ID NO: 16995 - DNA, 454 bp, Glycine max
  Clone ID: LIB3106-111-Q1-K1-A2
cgacatggaagccgtaacaggctcccaccatttttccactctctccctttctttctctcacaacaaaaccttgcgctcttcttctgccaaatcaatcaggctttcctctccttcgaccaacgcttccttatcttccagaaactggttcgcgaaagaggtatggggttgggtgaactccaactccaaaggcgtcgccgtgagaaggtacacacgcggagtggtggtcagggctgaaatgttcggccagttaacaagtggccttgagactgcatggaacaaactcaaaggagaagaggttttgtctaaggagaacattgtggaacctatgcgggatatcaggagagctctcttagaagctgatgttagtcttcctgttgtcagaaggtttgtgcagtctgtcagtgaccaggctgtgggtgttggtgtcattcgtggagtgagaccagatcagcaa

SEQ ID NO: 16996 - DNA, 449 bp, Glycine max
  Clone ID: LIB3106-110-Q1-K1-H10
tccatgtgcagactgaaaatgagggctgttcagctttccacagatcacagcacaagcattgaagaggaagtttttagaataagagcagaacaccctgatgataatcaggccatattcaatgatcgagtgaaaggacaattaaaagtgaccagagcatttggtgctggattcctgaagaggccgtcttttaatgaaccgctactgaagatgtttcgagttgattatgtggggaatgctccttacctaagttgtgcttcttctgtccttcatcaccgactttcctcaagtgaccggttcctggtgctctcctccgatgggctttaccaatttttcagcaatgaagaggtagttgcccatgtcacatggttcatggaaaatgttcctgaaggtgatcctgcacaataccttatcgcagagcttctctttcgtgcggctaataagaacggaat

SEQ ID NO: 16997 - DNA, 444 bp, Glycine max
  Clone ID: LIB3106-110-Q1-K1-F7
gactctgcaaaaacctatcctgaaacggttcgcagagaggcagcaaaacgctaaagccctaaacccccatattgagctttctccctctctctccgtcttcgatggcaacatctcttctgaaaactccgctcaatgtgttcaacagacaccacaatcacgtcgcattcttctccaatggcacaagtgcaagaagcagtgctccaatttcgcagaagaggagatcgcgtccattccccgtagtgtcaatggcatccacaccggttcaaacttctctcgaaaaaactgaactttcgtccaaaagcaccggtcttccaataatggttaatgcatgtactggaaaaatgggaaaggctgtgattaatgcggcggaagctgctggactgaatgttgttcctgtgtcgtttggctgtgaagaggagtctggacagacttttcagattggtg

SEQ ID NO: 16998 - DNA, 375 bp, Glycine max
  Clone ID: LIB3106-110-Q1-K1-F8
gcacgcattactgttgcacttcttactcggtctccctcttttttttcttcttcttggtctgggctaaaccccccctggatttgtcctatctcactaacatcgatgggagacgagaataagaccaagtcccctgcttccggcgtgtggtccaccatcaagcctttcgtcaatggcggagcctccggcatgctcgccacctgcgtcattcaacccatcgatatgatcaaggtgaggattcaacttgggcaaggatcagctgcgcaagtcactttcaccatgcttaagaatgagggtgttgctgccttctataagggtctatctgctggattactcacgcaggctacatacaccactgcccgtcttgcatcatttaaa

SEQ ID NO: 16999 - DNA, 436 bp, Glycine max
  Clone ID: LIB3106-110-Q1-K1-F9
gccacgcgtacggtgaagcctatgacgatatgtcacgcattgaacttgcccaagaggtcgggatagaacgcgtaaggggtgtggcaatacctaaggggaagaaacgggcgggagccacacaaattccacacactgctagggggagaaaccatatccttcaactttactgactggcagaacctattggaatggatatattatccgaagggggtgacgacgaaaaactgaaactaccttcgggtgctaaactaattcactgctaaacctgtttcaaatttgaataccataacttatctcttgctgttcgcctaaaattaacagctttccaatcatttccttgagatattgctgaaattcaatgacgcgcattattatgaaatggtaaggaatcggatattgtacttctgcagactgcagcgttcttattgaataattt

SEQ ID NO: 17000 - DNA, 441 bp, Glycine max
  Clone ID: LIB3106-110-Q1-K1-G1
gcagcattagggtttatcatctgcttcaatggggaagggaacagggagcttcggtaagaggaggaacaagacccacactctctgtgtgaggtgtggccgccgcagcttccacctccagaagagtcgctgcgccgcttgtgctttccccgctgcacgcacgcggaaatataactggagcgtcaaggcaattcgcagaaagaccaccggaactggcaggatgagatacttgcgtaacgtgcctcgccgtttcaagagtggcttcagagaaggtaccgaagctgcaccaaggaagaagggagcagctaccactgcatagacctttcaaagatcgttctcgttgggtacggatttacaggaatagattgctttttgtgcttttggcaagtattttggaacacttatttttagagtctcattgcttctttatcccccatttaattt

SEQ ID NO: 17001 - DNA, 448 bp, Glycine max
  Clone ID: LIB3106-110-Q1-K1-G10
gaaagaatggcagcttgcactgtctactcaacacaatctctgagcacaaattgctccatcggaaccccatcaaagacgcaactcagttttttccaccaaaagcaggtagttttctggaggaacagcaagaagggcagctgcagcagcagaagaagctatgtgataacatgtgcagcaggtgactcacagacagtggtgattggcctggctgcagactcagggtgtgggaagagcaccttcatgaggaggctgaccagtgtgtttggaggagcagcagagccaccaaagggtggcaaccctgactccaacactcttatcagtgacaccaccactgtcatatgcttggatgattaccactctgtggacagaactggaagaaaggagaagggtgtcactgcccttgaccctagagccaatgattttgatctcatgtatgaacaagttaaag

SEQ ID NO: 17002 - DNA, 445 bp, Glycine max
  Clone ID: LIB3106-110-Q1-K1-G11
cccacgcgtccgcccacgcgtccgccattgcaccacataaggccaaagctattaaggccactagttcggggtgacgtgaagatgacaatcaattctccttaccttctttcacctggttttattgttgttttgcttttttcctgcatccttgctttcttcctgaattacagtatttttctgaacacaactctcaattcagctctggcacagacaatatgtggtaatcttaaggatctatttactattggctttggctggataatttttggtgggctaccatttgatttttggaatgtagtaggacaacttctgggttttgcgggctctggtttatatgcctactataagctcatcggcagataactcactgcgtttgatgtctttatggatttcggactaccattgcttcggtcatctgaccttcactacatcaaggagaagaatc

SEQ ID NO: 17003 - DNA, 446 bp, Glycine max
  Clone ID: LIB3106-110-Q1-K1-G12
tccatggcgaacgccggtcccggaaccaacggatctcagttcttcatttgcacggagaagacagagtggctcgacggaaagcatgtcgtgttcggacaggtcatcgaaggattgaacgttgtcaaggacatcgagaaggtcggatccagctccggcaggacctccaagcccgttgtcatcgccaactgcggtcaactctcttagacgacgttgacccgcggctttaatctctgaatctgtgttatttctttcggtgtcgtttttgccttttttttctcttcttttctttctcgtgtcgtcgtttaggggattgtggtgttaaggatatcatttcgaaacccttcccctttccttttcaatatcagtatcatgtggttggttggttggggttcatagagtgagtgaatggagtctgttatgagaagcatataaaaaacatgatgagc

SEQ ID NO: 17004 - DNA, 303 bp, Glycine max
  Clone ID: LIB3106-110-Q1-K1-G2
cccacgcgttcgtccacgcgttcgggtcgtgtgggagaccaacagcgttgcatgacagaaatagggatagtgacgaggatgattatcaagatcgggactatgatgttgctgcattagctaataatttgagtcaggccttccgttatggcatttacaataatgaagacattgaagaggttcatggctctcttgaacgagaagatgaggatgtctattttgatgatgcttcttcacaggtggttataactcctttgtgggtggaaaatgactattgaaggtgggctttcggtgaaaaattcaact

SEQ ID NO: 17005 - DNA, 402 bp, Glycine max
  Clone ID: LIB3106-110-Q1-K1-G3
agaaagcagagggataggaagaaggaagaatggagaagtatttcggaaacgcttatcgtggcgacccgggcgtgccccattcggacccggatcgcttcgtcaacatatgggtcggatccgctgccttcgctgttctcacatatttcaatccctacatgtggcagctctctaatcagttcaattggcatgacaaagcaatgttatatgagcaatatcactggaaacaggcaaggaagaagaatcagccatatgagttcttgtggaacaagacctgggacaagaaccaccgggaacattactactacaactggcctatttactttccttaggccacttctatttcatttcttgcatactttgtcctatttattttggctgcaaacctggatcgccccccccccc

SEQ ID NO: 17006 - DNA, 441 bp, Glycine max
  Clone ID: LIB3106-110-Q1-K1-G5
cgttgatcgacataactagaaacagtgtgatgaagatgaacggccttgtgcaattcgttgatacagcaaacggcagcatgtcagatgcgcggcattactatatgctaccctctgcgaatgaacactggctatggtgcccgtactccggaagggatatgcgcatgatgaaggctagctgggcaagcacacaacatgtgtggctatgagaccatgcctgatgagtgcgttgaagcaacaaaggaattcatacatggcgaacaatatacatcagactccaaaacaggtaaccaacaagcttacttttatgccagagacctctacatccatcccaaggacacatttgtgctcagtatagatggcacgcgcctctctaatattccatactacaaaaaacatggatatggagtggagaaatttaactcgaccttgtatgatgaatgg

SEQ ID NO: 17007 - DNA, 452 bp, Glycine max
  Clone ID: LIB3106-110-Q1-K1-G6
cttttcattacatacgcaaaaaccattttactctctctttcacagaagaacaatatctctattttcgaaactacacacatcatttagaaccatgtctttctctaccaaattgcctttggtcctcttattttcatcccttttcatccatgcatctttggctgagatggtgtgtgaggacctgccaaaggaagtgtgtgctttctcagtagcttcatcagggaagaggtgtttgttggagactgagaaggcagccgacggtggcgtcgagtaccaatgccggacatcggaagtggtggtggagaggatggcagactacatagagacagaccaatgtgtggaggcatgtggggttgataggaactctgttgggatttcatctgatgccttctttgagcctcaattcaccggcaagctttgctctcctgcatgttaccagaagtgccccaacattg

SEQ ID NO: 17008 - DNA, 441 bp, Glycine max
  Clone ID: LIB3106-110-Q1-K1-G7
cccacgcgtccgcttggatcaggtttagggaatggctgcaatcttagctcgaaaatcactccttgctcttcgtgcgcgccaattggctgtaagcggtcaagggctgcacagctcccaatactatggccttcggttaagtgcacactccttctctaccaaaagagaggatgaggaaagggagcaactcgcaaaggacatttcaaaggattggagttctgtctttgaacgtagcattaacactctctttctcactgaaatggttcgaggactaatgctgactctgaaatacttctttgaaacaaaagttacaatcaattatccatttgagaaaggccctttgagccctcgttttcgtggtgaacatgcactccggcgatatccaacaggggaggaacgttgtattgcttgcaaactttgtgaggctatatgttctgcacaagc

SEQ ID NO: 17009 - DNA, 338 bp, Glycine max
  Clone ID: LIB3106-110-Q1-K1-G8
gccacgcgtacggttaaaaccatatttgggtgtgattcatctatctcaaacaaccatgaacgatagatcacgctttggctagctctttatcattcgagcgcactccgacggcggtaacgacacctcctcaccgtatccttgcatccgcggcaacggaaacagtggagtgatttctccaacgcgacaggcgtggacgacgatgttatggtttctacactgagacatacatacgacctggggcgaatcttctacatgactgacaaacatgtgcaagatatgcacgcgaggaactagatagaggggctcgaccaacactaattgcgattcgataagagcat

SEQ ID NO: 17010 - DNA, 441 bp, Glycine max
  Clone ID: LIB3106-110-Q1-K1-G9
cccacgcgtacggtgcaggccatgaggatgacttactgatagagcttgccaatgaagtgaggaaagtacttggaatgggaaatgtagtaccaaaggagaagaaactggttggagcagcacaacttccacaccctcctcatgtaacaatccctacccttcaactgcacccactgccagaacctattgcaatggatatatatctgaggggggagatgaccaaaaactgacgctgagttcggctactaaactgatttactgctaaccctcattcaaatgtaaataacatcacatatctattactcttcgcctacttttagcggcttttcagtcatttccttgagatattgcttaaattcagtgaggcgcaatattatgaattggaatgttcgcggatattttacttctgcagactgcagtgttattattgaaaaaggttcattt

SEQ ID NO: 17011 - DNA, 449 bp, Glycine max
  Clone ID: LIB3106-110-Q1-K1-H1
tgccatttcaaagctgggaaagaacattcaagtactttcaagttcctttgtcaataagcaagaccaatacactgtggaaggagtgcagaatcttggagacaaagcagtgatgtgtcataggctaaatttcagaactgcagtattttactgccatgaagtccgtgaaacaacagctttcatggttccattggtggctggtgatggaaccaaaactcaggcacttgctatttgccactcaaatacttctggaatgaatcatcaaatgcttcatcaacttatgggagttgatcctggaactaaccctgtttgccatttccttggaagcaaggccattttatgggtacccaatttatctgtggacactgcctatcagaccaacattgttgcttaattagtccatgcatcttgagcaccatgagaatgagattgtgtataaaataaattatcat

SEQ ID NO: 17012 - DNA, 457 bp, Glycine max
  unsure at all n locations
  Clone ID: LIB3106-110-Q1-K1-F6
tcgncacgcgtncgtataatagagcttgatgaaacggtggatctactggatgactgtgatgttccagagattcatgaagacagtgggtgtcgttttctgcttacagatgaaaatatggaccttgtaggtgctgcttttccagcagaagtcaaaaggttttggcaagagcaggaactgaaaagaagaaagaactcaacatcaagatctcaagaaaatgaaaaatcaccatcaccaaactcaagaagtattcagctaaacattacagagttctacccatcaaccaaagttaaacatcgtcaatcaaaacaaggaggaggagagtcatccaagattgctgatagtcaaggcaatgagggctcaaaaatgaaaaggaaaatgtcaagtcctgataagattccaaaatctgtgaggcgtcgccttttgtttgattagtatgtatatatgcttgagttatgat

SEQ ID NO: 17013 - DNA, 214 bp, Glycine max
  Clone ID: LIB3106-110-Q1-K1-E10
acgatatggctttcatttctgccaaatagttcgagggaaatcggtcttgggtgagttgtgttgaagttgcgatatgcaagctacctgaacatgtcattttagtatttgccaacgtatatttaacattaattaatgaattatgagtaatttgatgtcccaaaaaatatactaaatgacagaacctattgtaaataggtaaataatataaaggggg

SEQ ID NO: 17014 - DNA, 444 bp, Glycine max
  Clone ID: LIB3106-110-Q1-K1-E11
cccacgcgtccgaaaaatctaaaattttatagaaaacaatttatttcttgagataatctccttcttattttttagaagaaaagggaaggagaaagagaagattggattggggattaggaaaaaatggcgtgcaggggtatgcttcgttccaccattctcatagaacccagcctactccgttctttaaatttcaattctaacaaacatcacatagcttcactcaaccaatggtcttgccggtttcattctccaaaacccccttattcttcctctcagaacgaaacgccgttgtctcaggaccctgtcttgaaggccatttcagagatttccaaaggcgaagggagggttggccaaacaacaaacgtaattattggaagcactgctgccgatgattctaacaatgaatggttggctttggaccagaaagttttgtttcattgtttt

SEQ ID NO: 17015 - DNA, 359 bp, Glycine max
  Clone ID: LIB3106-110-Q1-K1-E12
ctcataagatcgctgtataacttgacatagtgtggagattctaaccatgtttgttttttgcgtagttcgcaaaggcttggtggcttgtacatactataggacctatcaaaccaatgcatgtctgcctgacgaaaacagactatgtggagcgctgctaacttgttaccacgcgcgggtcaaatgataagtattggaaccacaccacattcgtgtcttgtaaaccattcctgaagagtgcgttgaaccaacaaaagactgcctgtctgtctaacaatccagattaaactctacaacagtgcaacaacatgctttcttttatgctagagaacacgaaaatcatctgaacgacatatttatat

SEQ ID NO: 17016 - DNA, 361 bp, Glycine max
  Clone ID: LIB3106-110-Q1-K1-E2
aaaaaaaataaaaaaaaaaaaaaaaaaaatatttaatttaaaaacaaaaaaaaaaaaaaaaacaaaaggaaaaaaaaaaaaaagggaacgggtaaaaaaaaaaaaaaaaaaaataacctactcatataacaacacaaaacaaaaaataaaaaaaaggggccccccctttttaaaggttccaattttacttccccgtccttccaacgaattatttttttttttgtgccccctaatttaatttaccggcccctctttttccaccctcggaactggaaaacccctccctttccccactttataccctttgaaacaattcccctttttccaagttgggtaataaaaaaaaaccccccacccaatc

SEQ ID NO: 17017 - DNA, 450 bp, Glycine max
  unsure at all n locations
  Clone ID: LIB3106-110-Q1-K1-E3
gngagcttaccttacctgaagatggcttcggtgtcctttgccgtgggacttttaccttacgcttcagttcgatttcccgtattgagcaacgccaactcactgaaactcagttcctcagctagcatctctactccaattcttcagcaaaagctctgctctcttctttcccccctccctctaagccctcgccctcgccctctcaccattgtatccgctaagggctacaaaatgaaaacccacaaggcatctgcaaagcggtttagggtgaccggacgaggcaaaatagtgcgtaggagagctggcaagcagcatttgctcgtcaagaagaataccaagcgcaaatcccgactctccaaaatgcacgcggtcagcaggagcgactatgacaacgtaattggagccttgccatatctgaaagtaaacagaaatgctacatagatgttctgtttg

SEQ ID NO: 17018 - DNA, 448 bp, Glycine max
  Clone ID: LIB3106-110-Q1-K1-E4
gtgtgatgaaaatgaacgtcctcgttttcttcgttgctacaattttggtagcatggcaatgccatgcgtacgatatgttccgtctccgaatgaacactggctatggtgcccgtactccggaggtgaaatgcgcacgttggaggcttgctgtggaagcacacaacatctttggctttgagaccatccctgaagagtgcgttgaaacaacaaaggaatacatccatggcgaacaatatagatcagactccaaaacagttaaccaacaagcttacttttatgccagagacctcgaagtccattccaaggacacatttgtgttcagtatagatggcaccgtactctctaatattccatactacaaaaaacatggatatggggtggagaaatttaactcgaccttgtatgatgaatgggttaacaagggcaatgcaccggcactgtccgagac

SEQ ID NO: 17019 - DNA, 448 bp, Glycine max
  Clone ID: LIB3106-110-Q1-K1-E6
cttcccatttttttcattccactttatctcaacctcgatttttccattttccgattaactcactcttttcacgatcttatctacatataatttcaaaatttttaatttctcaattgattgtttgtgacggtgatcgatcggtcggcgcgatcgtacctgcatctcttctcttccaggtttggagaatgagttctgtgcaaggaccagttgtgtgcccttctgtccgtgccaagcaagtagggttctgcagcattcctatgattggggcagtgaaaatgaacgttagacgcattagaagtgaattttggggtctcaatggcgccaaggctaaacccggttttctttcttgccgtataaacacacgaaagtacaagactgtgcattgtacttttaactcaccctccaatgacagtggaagtactgctgacaatttcaatgaaaaagatga

SEQ ID NO: 17020 - DNA, 370 bp, Glycine max
  Clone ID: LIB3106-110-Q1-K1-E7
atataactagaaaccgtgcgatcaaaatgaaggaccctgttttctatgttgctacgatctgggtagcatgacaatgctatgcgcacataatgtccactctccgaatgaacactgtcaatggtgcccatactactgaagtgaaatgcgccagtcgaacgctatctttggtagcacacgacatcataagctttgagacccttcctacagagtgcgtgtgcagatctgaggaataccttcgtggcgaactgcatacatcctactacaaagcagtttaccatgaaccttactttcatgccaaaggcctcgacgtgcatcccaaggacacatgtgtgctcagaatatatggcacggcactttataatattccata

SEQ ID NO: 17021 - DNA, 290 bp, Glycine max
  Clone ID: LIB3106-110-Q1-K1-E8
aacgctcttaaaagcttttgctttactttatgcgcgctgttttcaatgaagctaagctcgggtttgtaaaaccaaggtatgtggacattttgagggttaaggtagtgagtactatcttggagaccacacacactgagattgagatgcgcgtacaagtatgaaatctttgaacttgctgaccagaacaatattggctcttctccgaggggtgtgaagcgcagaactggaagaatagaatgtaggacaaacgcatatatccctaaactaggtgttatactatgaacgttact

SEQ ID NO: 17022 - DNA, 80 bp, Glycine max
  Clone ID: LIB3106-110-Q1-K1-E9
accactcgtacgaccatgcgttctactttatgtgcgctgtttccaatgcacatacgttcgggatagtaagacaacggtat

SEQ ID NO: 17023 - DNA, 437 bp, Glycine max
  Clone ID: LIB3106-110-Q1-K1-F1
gattattcctcttttaacaatccacacccaaattctagggttccgaaatggacgctggcggaaagatcaagaagggcgccggaggtagaaagggcggcggcccaaagaagaagccggtttcaaggtccgtcaaagccggtctccaattccccgtcggaagaattggccgttatttgaagaaaggaaggtacgctcagcgtgtcggtaccggtgctcccgtatacttggctgcagttctcgaatacctagctgccgaggtgcttgagttggctgggaatgccgcacgtgacaacaagaagaacaggattattccaagacacgtgcttttggcagtgaggaacgatgaggagttggggaaattgcttgctggagtgacaattgcacatggtggcgtgcttccaaacattaaccctgttttgttgcctaagaagaccgag

SEQ ID NO: 17024 - DNA, 447 bp, Glycine max
  Clone ID: LIB3106-110-Q1-K1-F10
cccacgcgtccgcccacgcgtccgggatgctcgatcaatctatgttggtaatgttgactatgcatgtacgcctgaagaagtccagcagcattttcagtcctgtggaactgtgaacagggtgacaatactgacagacaaatttggtcaaccaaaagggtttgcttatgtagagtttgttgagattgatgctgtgcagaatgctctcctgttaaatgaatcagaattacatggtcgacaactgaaggtgtctgccaagcgtacaaatgttcctggaatgaagcagtattttggaagaagacctgctggtttccgatctaggaggcctttcatgcctgctccattctttccaccatatggatatggaagggttccaaggtatagaagacccactcgatacaggccatactagtgcacattctctgtttaataggtgatcacatatttaat

SEQ ID NO: 17025 - DNA, 401 bp, Glycine max
  Clone ID: LIB3106-110-Q1-K1-F12
gccagtcgtgcgctataagctactttatcgtgaggagaatatgaagactcttgccgtctgcgttgctaaaaaagatccggtggcatatacatgccatgtcgcatagctacacaaacgttccactcttagaatgaagactgtctatcgtgagcgttcttactacgtataaagcgcaacctgtatgctcgatgcataagcacacatcaatcctagcctgaaaaaccattcctgaacagagcgactgaccaacaaaagactacatttgtggcgaacattgtagatcaaactctataacacctaaacatcacgctttcttttatgctagcgaacgcgcacaccatcacgacgacactattatattcaacatatattacaccgcactctctaatatgccatactat

SEQ ID NO: 17026 - DNA, 107 bp, Glycine max
  Clone ID: LIB3106-110-Q1-K1-F2
gcgactgagaagtgcgacgctgctgcaaagtgcaagcggatttggtcttcttctttactcccaatcatttctctgtgcaaggataagtgtgttatctatctaaaaac

SEQ ID NO: 17027 - DNA, 223 bp, Glycine max
  Clone ID: LIB3106-110-Q1-K1-F3
ctgaagaagtgaaagaagaagcagaggagcctaaagaaactactgaaacagaatcagcagcagcagcaccaccagcagcttgctcacttcaatacacaactcccagaatttctcatgtcaccacgtggcaagcacgctgatgtggagccaagtgttgtgcttacacgtaggtgtacccttcataatacaaccaaagacttaagcatcatataataatattaat

SEQ ID NO: 17028 - DNA, 426 bp, Glycine max
  Clone ID: LIB3106-110-Q1-K1-F4
ttctaatcgcagggccgctctttattttttttttttttttagcaaccttttctgttttttgatctggttctatcaatggccgggctggaagttttcctttttttaactaatcttttttttaagccctttttccacattgcaaattcaataactttatgattggtgccgtggtttcaaagtttggtgacaagagtgtgtacttagatttgtaggatctgggcaacactacaaaaaaaaaaacttgtgtggtttatatgcaccttcaccctacaaccatattaagagcttgttcttcgagacattagctgctccattcacaaagaggggattgttactcaagtttctgatatttgaaagagtttcacccttgcatacttcagtgcaactgtctaagggacattctaccaatcaagaaaggaccacaac

SEQ ID NO: 17029 - DNA, 303 bp, Glycine max
  Clone ID: LIB3106-110-Q1-K1-F5
tgttgatcgacatacctagaaacagtgtgatgcacttgaaagcgcatgcatacttcattgatacaggaatcggcagcacgtcggatgcgaaacttacaatatgttacgtatcgaatgaagactggctatggtgcccgtacttctgaagacatatgcgcatgaagaaggctgggtgtgaaagcacacaacatgtatggctcttataccaatcctgattagtgctgaggagccacacagggacacatacatggggaacaaggtgcatcatactccaaaacaggtaatcaacaagcttactgttat

SEQ ID NO: 17030 - DNA, 448 bp, Glycine max
  Clone ID: LIB3106-110-Q1-K1-E1
cccacgcgtccgcaaaaaatattcttttcttcatctccaaacctgatgtcttcaagagtccaaattctgagacctatgtcatatttggtgaggcgaaaatagaggacttgagctctcagttgcagacacaggctgctcaacagttcaggatgccagatatgggatctgtaacggcaaaacaagaagatgctgcagctgcagcagtgcaacctgaagaagaggaggaggttgatgaaactggtgtggagccccatgacattgatttggtgatgacgcaggcaggagtgtcaagaagcaaggccgtcaaggctctcaagactcacaacggggacattgttggagccatcatggaactcactacttaattgggggtttatgttctatttgtatgtttttttgggaatgatatttagaactagtgccgtttctatgttataaaccgaatcaa

SEQ ID NO: 17031 - DNA, 447 bp, Glycine max
  unsure at all n locations
  Clone ID: LIB3106-110-Q1-K1-C6
gcaaaactctgctttttcggattccgatcgcacgcgccgtcaccatggtgaacgttccgaaaacaaagaagacatactgcaagagtaaggagtgcangaagcacacgctgcacaaggttacccaatacaagaagggtaaggatagcattgctgcccaaggaaaacgccgttatgatcgcaaacaatccggttatggtggacaaactaagcccgtcttccacaagaaggctaaaaccaccaagaagattgttctgaggttgcaatgccagggttgcaagcatgtcttccaacacgctattaagaggtgcaagcactttgagattggtggtgacaagaagggcaagggaacatcactcttctagtttgagaattaggatttagagctttatgtttcagcaatgttggaatgttttgtttctctctggattttttctgctagttatattt

SEQ ID NO: 17032 - DNA, 306 bp, Glycine max
  Clone ID: LIB3106-110-Q1-K1-C7
cccacgcgtgcgtgcatttgttatgattaaatatcgcgtcatataatgtatctaagatatggataaagaaactacagtatgcggatacaataacagcatttctacattggagaataaaggcgaccccaccagatcatatcgcgttgcactatctgaactgcatattttttcttacaggcatgactaacatcggactccctacggcaaaatagcactgcattacatacaagaatacgtacctggagtagtgcacaacacctactacaatgcaagtgaccgtgactattacttgcatcacaaatgaca

SEQ ID NO: 17033 - DNA, 299 bp, Glycine max
  Clone ID: LIB3106-110-Q1-K1-C8
gatcgagataactagaaacagtgtgatgaaaatgaaggtccttgttttcttcgttgctacaattttggtagcatggcaatgccatgcgtacgatatgttccctctccgaatgaacactggctatggtgcccgtactccggaggtgaaatgcgcaagttggaggcttgctgtggaagcacacaacatctttggctttgagaccattcctgaagagtgcgttgaagcaacaaaggaatacatccatggcgaacaatatagatcagactccaaaacagttaaccaacaagcttacttttatg

SEQ ID NO: 17034 - DNA, 450 bp, Glycine max
  Clone ID: LIB3106-110-Q1-K1-C9
cccacgcgtccgatggactgggtatgacgaatcaacgtgccgatacatctgaaacagaagtgtcttggatggccaagggatcgtccttaactaatacgttgatctgcgccgccaccgtattggtggcgatgagtccgtggccgacagccgtgggcggcggggaccaccacttgggaatgggatgggtttccagcacgtgcaaggggaccattgctgagtgcctgggaggggaggagtacgagttggattcggagatcaaccggcgcatcttagccaccaacaagtacatcagctacgttgcgctgcagaagaacactgctccctgctctcgccgcggcgcctcctactacaattgccgacccggagcacaggccaatccttacaaccgtgggtgcagcgccattacgaggggcaggagctgaatttttcctttctttaaaattttttttt

SEQ ID NO: 17035 - DNA, 414 bp, Glycine max
  unsure at all n locations
  Clone ID: LIB3106-110-Q1-K1-D1
cccacgcgtccgccgaaaatagacggaaatggatgggctaatgagatgactccaaaagatctgagtcttttacctagaacagagttcgtgtgtgcactataggacacgtgggttgtaacacaccccctcttgctgatcaatacttcaggtgcccattcgggctgtactgnaacacacaatctaatgtgcacagagcggcactgagcactacttttggggaaaggaaacttaggcttatccgcccaacatacctgatgataccacggatgcgtgctatggatacacacatggccggaccgctgttgggactaacctcacactcattattggtgccatcttagtactcacttctaaaaagggggataatgttatataagaatgaaaaattgggggcggtctttataaatggtgcca

SEQ ID NO: 17036 - DNA, 443 bp, Glycine max
  Clone ID: LIB3106-110-Q1-K1-D10
agagtttgttgtgagctataagctagtttatcgtgaggagaatatgaagttgtttgttttctttgttgctgcagtagttttggtagcatggccatgccatggcgcaggctaccaaaggttccctctccgaatgaaaactggctatggtgagcgttcttcggaggtaaaatgcgcaagttttaggcttgctgtggaagcacacaacatccgagcctttaaaaccattcctgaagagtgcgttgaaccaacaaaggactacattaatggcgaacaatttacatcagactctaaaacagttaaccaacaagctttcttttatgctagtgaacgcgaagtccatcacaacgacatatttatattcggcatagataacaccgtactctctaatatcccatactatgaaaaacatggatatggggtggaggaatttaatgaaaccttat

SEQ ID NO: 17037 - DNA, 444 bp, Glycine max
  Clone ID: LIB3106-110-Q1-K1-D11
gtgtaaccgccctctcctgtcttcaccgttcctctctttttccgacgcgcaaacactcacacaaatttcgtttctatttccgactacaactctctttccccaattctccgatgaccggcggcgacgagcgtcaccggacggagacctaaaaacatctctcacacacacactcattctccggcaggcatgtccgaggacgcggacctcgctctgcagaccttccgcgcgctggtggagagcgcggaccggaagttcggccgtgtacgcgacgtgccagcgtatggcggcggcgcgagccagtatcagcagcagcaccacgcgttccagaaggtgttcaaggcgtacacgaggctctggaagcaccagcaggagaaccgcgcgaagctggtagagtgcgggttgaagcggtgggaacttggtgagatcgcgagccgaatcggacag

SEQ ID NO: 17038 - DNA, 439 bp, Glycine max
  Clone ID: LIB3106-110-Q1-K1-D2
gcggctgctacttcggctccatcttctccgatctcctcaaactctatcagcgcagaaccaagcctctatcaccatggggaagacacatggaatgggagctgcccgcaagctgaagtctcaccgtaggagacaaaggtgggctgacaagtcatacaaaaagtctcatctgggaaatgaatggaagaagccttttgctggttcatcccatgccaagggtattgttcttgaaaagattggtattgaggctaagcagcccaactctgccattcgaaaatgtgccagggttcaactcatcaaaaatgggaagaagattgctgcatttgtgccaaatgacggttgcttaaattatattgaagagaatgatgaagtcttgatagctggatttggacgaaaaggtcatgccgtgggtgatattcctggagtcaggttcaaggtcgtg

SEQ ID NO: 17039 - DNA, 449 bp, Glycine max
  unsure at all n locations
  Clone ID: LIB3106-110-Q1-K1-D3
cccacgcgtccggttcgtgttgtgttgtgctgtgtttcatcattcatggcttcttctacaactcccacactccctctggctgtcccccagcgacatcactctgtttctcaccgtcaagttctcttcttcgccaaattcagtaacaaagtttcgctctcttcttctgtggcttcgaaacggagttgtaaatcaaagtgcttttatgcaaaagtgcaaaacgcactcaacgaggaagcggttgaaactcagagttcggagttggaggaggatacccaaagtaccccttcttcctccaaactggtccttgttgttggtggctccggaggcgttgggcagctggtagtagcatcactgcttcagcagaatattaagtcacggttgatacttangaatcctgagaaagccacagaattgtttggtgaacaagataaggagaaactgcaggtatt

SEQ ID NO: 17040 - DNA, 339 bp, Glycine max
  Clone ID: LIB3106-110-Q1-K1-D4
agataataattattaagtgagacataattggcttggccttagaatatatagcgcttgtctagttatcagtataatcggtgcgatgttggacgatcgataaatatgcttacctagatcgttcggtttgcatggaataaatttggaagggtgttaaagcatgttatatattgtgctcaatgagatgcatataatggatctttatgtctcacatagatttctttcttgaagtacaaagaaattctttttaatcttcttaaaatcaacaagattactattatgccaaatacctagttttttattctaaagtcacatttgtgttcaatatagatggcaccgtac

SEQ ID NO: 17041 - DNA, 445 bp, Glycine max
  unsure at all n locations
  Clone ID: LIB3106-110-Q1-K1-D5
gactcacgctggcagactacaacattcaaaacgagtctacccttcacctagtccttcatctgaggggaggtatgcagatctttgtggagactttgacaggaaaaactatcaccttggaggttgaaagttcagacacaattgataatgtcaaggcaaaaatacaggacaaggaaggtatccccccagaccaacaaatgttgatctttgctgggaagcaactggaggatggaacgactcttgctgactacaacattcagaaagagtctactcttcacctatgcttgcgtgttcgaggtgggttttgagtttgagaatggtctgcacgtaccttgattggtgtgaactgaattatgtgatagtctataatctggtcttttctttttttatgttactgaactctgtgtgagtgagcatncaacgaccattagcggaccttgaaagctat

SEQ ID NO: 17042 - DNA, 435 bp, Glycine max
  Clone ID: LIB3106-110-Q1-K1-D6
cccacccgtccgaccgactaaccagtaaagagacattaattaatttgcaaaaagaaaaagcattgaaattgggattgggagatggagcggaagtggagcagtgaatctggtgggaatgtgatatcgtcgccatcacactcgcgtaatgggcattctcgctcctcttcgctcactatccccggaggaggaatttcaaccgtcaaaaggactcagaatgttgctgccaaagccgccgctcagcgcctcgcccaggtcatggcttctcagactgccgacgacgacgacgacgacgaagacgatctaggatttcgctacactgctcctccacctctctctctttccaggagctctgctagatctccatctcctgcgttagctcggaacctcgtagaagaatcatcaatgtatcttcgcccagcaccacctgctgctggt

SEQ ID NO: 17043 - DNA, 446 bp, Glycine max
  Clone ID: LIB3106-110-Q1-K1-D7
ctcgttcgagtttgtgtttgtgctatcttcttcgctcttcacttttgttgtctaacatggctttggtgaatccgggtgtggtaccactcgaacgtccctccctctgcgagtttcaggtccaccaaaccaagtcctaccacgttggactctctgctcccaatattcattcaaaacatcatcactaagatcgaagcaactcaggtgtggcgccactgcagacatcaaagcacatcacgcggttcttgtgggccccaccagcgaggaggagagaaaaggggactatgactggacacaggaatggtaccctttgtatctcactcagaatgtgcccgaagatgcacctttgggtctcaaagtgtttgataaacagctcgtgttgttcaaggatggcaatggccaagttcgcttgtacgaagatcgctgcccccacaaggtagcgaaactat

SEQ ID NO: 17044 - DNA, 264 bp, Glycine max
  Clone ID: LIB3106-110-Q1-K1-D8
gaaagccattgtcacagatgtgctaacttcaacaatgggttctagcagattataagacatggtaatacttgcgctggtaagcgtatcatacatgatcattgactcaagggttgtagagggacgtacactgccaaaataagacttattgccttccaaaggtgatatacctactgctggtcctcttacactggtggcaccactgacaaatttgcctgttactctctctccagtgactgaactaccttcagtacctaaagtaccaat

SEQ ID NO: 17045 - DNA, 446 bp, Glycine max
  Clone ID: LIB3106-110-Q1-K1-D9
cccacgcgtccgaaagaaaaagaaagaagacatttccttccgaattgaggaagggaaaggtgtcttggatggccaaggcatcttccttagctatcacgttgatctgcgccgccacggtattggtggcgatgagtcggtggccgacagccgtgggcggcggggaccaccacttgggaatgggatgggtttccagcacgtgcaaggggaccattgctgagtgcctgggaggggaggagtacgagttggattcggagatcaaccggcgcatcttagccaccaacaagtacatcagctacgttgcgctgcagaggaacactgctccctgctctcgccgcggcgcctcctactacaattgccgacccggagcacaggccaatccttacagccgtggctgcagcgccattacgaggtgcaggagctgaattttccttttttttaaaattttt

SEQ ID NO: 17046 - DNA, 443 bp, Glycine max
  unsure at all n locations
  Clone ID: LIB3106-110-Q1-K1-C5
nccacgcgtccgaagaaacaaaacttgaaccaccgtgaaattcacaatgcanatcccatgctcgtggaaccaccacaacatgggcaaagccgttcatcttccaaccacagcctgtgaaatccacggcacaaacatggtctgttccattattcagatccacagaggtttatcttctaactctgtggacaccttcaacaacgtcatcgaagctgttatgacgaagatggaggcacaactcgatcccctcctcgaccgctttcatgcgccgccgacgttcatcatctacatgtttctcttctgggccggtgccatacgcaaacagaggggtattccgatgagcgcactctggatgtggatgacaaacacatcagaaaaagatcttatgtgagagagaagatgagggtggggttgggggtttgaactgcgagagagaagagagaatc

SEQ ID NO: 17047 - DNA, 421 bp, Glycine max
  Clone ID: LIB3106-110-Q1-K1-A9
cccacgcgtccgcccacgcgtccggttgaaaactaagaacaaagaaatggcttccgcaacggtctcctccacagctggtaccgccggcaaccgtgccggtgccggcatggaggctacattcaccggcctcaaatgcaagggtggcttccccacgaggaagaccaacaatgacattacctacattggtagcaacggtggaagaggacaatgcatgcaggtgtggacaccaattggcaacaagaagtgtgagactatttcctacttgccagacctggacgatgcccaattggcacaagaagttgaataccttctaaggaaaggatggattcctcgcttggaattcgagatggagcacggtttcgtgtaccgtgagcacaacaggtcacctggatactatgatggacactactggaccatgtgg

SEQ ID NO: 17048 - DNA, 443 bp, Glycine max
  Clone ID: LIB3106-110-Q1-K1-B1
cccacgcgtccgcccacgcgttcgagaaactcttatgcatagcgaaaatgacaaccaccttcgcgaccgtcgcacgactcggcggtgcatcactgtcatccacctcatctcgtctcacctcacggtttgtgaaatcgccagtgagtgctaggaatcccttgaggcaagctgtggcaatgggaaatgggagggttacatgcttcgagaggaattggctgcgggcacattacagtgtgattgggattgcgttgattggttggctagcaccctcaagcgtaccggctatcaacggtaaaagtctgactggcctcttctttgagagcattggagctgagcttgctcactttcccacccctactgcccttacttcatccttttggttatggctggatacgtggcaccttggctagttcatctgcctcacttttggggcacatggattc

SEQ ID NO: 17049 - DNA, 435 bp, Glycine max
  Clone ID: LIB3106-110-Q1-K1-B10
ctgcagtttcccctctagaacaaacccacaaaccacccttaaatcaaaagattttgctttctccccaacaccaaccaacaagagcatgcataaatccactacccttgactcaaatgacacaaaagataaggctgaatttcccccagtagaaataggaaccagaggcacagttgcatcactcataatgcaagaaattgagtacttcagcagaattggttccaattcacaaaggaacaagtcccaaatcacagaggtgagttcatccattagtacaagttctacaaccacaattgtatctaaagtagaagaaagtacaaagaaaaagcgaggaagtagcaagcttttaccaagtatgtgttctatggtggatgtatcagacagtggtaggccaaatgggacctcagccttcagttacaggaacctgaagtctgacac

SEQ ID NO: 17050 - DNA, 227 bp, Glycine max
  Clone ID: LIB3106-110-Q1-K1-B11
cccacgcgtccgctcacgcgtacatatgttttccaacctagaatgaaagcgttttggggaatggccaacgacgaacaagaggtgcgtgcatacatcctatacccgtggctcgaacatctcaagaaaggaggatagttctacacatttatagttgtggactagactcactcttgcatcactccttacccatgaaattgcctacttcttgcaaagtgtgttcaaatgac

SEQ ID NO: 17051 - DNA, 386 bp, Glycine max
  Clone ID: LIB3106-110-Q1-K1-B12
cccacgcgtccgcccacgcgtccgcccacgcgtccgctgaaatggcggcagtagtatcagcatcttctcatctattggttgttcttcgttcacaaccattatcatcatcaccctctttcatttctcttctcaaacctcttcttgtttcttccccctatgctgtatctacaccccttcggcatatccaagttccaccgcttcgaaaacctctcttctctacttcctcttccccctcccttaccgtttctcaagatagtgaagaattggaagaaaaagagattgcagacgatgatgatgaattggagactccaagaagagattttgaagatacccaattgggtcccacttgctcaccgttggagagaaagaggaaagagagtgtgaag

SEQ ID NO: 17052 - DNA, 391 bp, Glycine max
  Clone ID: LIB3106-110-Q1-K1-B2
gtggttgtgaacaagttcaaacccaagaccccttacgttggtagatgcctgctcaacacaaagatcactggggatgatgctccaggagaaacttggcacatggtcttcagcaccgagggagagattccttacagagaaggacaatcaattggggtaattcctgatggtgttgacaagaatggcaaacctcataaactgagattgtattctattgctagcagtgccattggtgattttggagattccaagactgtttctctatgcgtgaaacggctagtgtacacaaatgaaaatggagaaattgtcaagggagtctgctcaaatttcttgtgtgacctgaagccaggagctgaagtaacaataactggacctgttgggaaagaaatgctta

SEQ ID NO: 17053 - DNA, 405 bp, Glycine max
  Clone ID: LIB3106-110-Q1-K1-B5
gttataacctgtttccagagtccaaagtgtctagttccaccgagccaaaccaaaccaagggggcagcagcctcagccttatccatgatatcaacaccagactgatatccaaccatccaaaagcaccatcatttgaagccatccaacgcgcgcttccaaggtcttacacccctcttacggttcaccaaatgctcattaaccaaagtgagcaccaccaccaaaagggttattccaaagggtggggttagagctgaactcaactcagcccttgtgataagcctcagcactggactctccctcttcttgggaaggaatgaggtcttcaacttccaaagggagaacgcggcacagcaagtgcctgagcagaaccgcctcacacactgtgaggctggtgatacacgtgcca

SEQ ID NO: 17054 - DNA, 317 bp, Glycine max
  Clone ID: LIB3106-110-Q1-K1-B7
cccacgcgtgcgatcgatcgttataattgaatagtcggtcatattatgtatctacggtcccgattccgacacgagggtgtggggatactacaatatgttcttctagctggaagatcaaaagtggctatcaaagatgtaatggcggtggactcatctattctagtttttatcttacaagcaacactaacatcggatctcctaccataaaagtggactgcattcatgcaaaaatagatgccccgagtagggaacaacacctactacaatgcactggaacggatatttaacttgactaacatgtgagacgccttggatat

SEQ ID NO: 17055 - DNA, 433 bp, Glycine max
  Clone ID: LIB3106-110-Q1-K1-B8
cccacgcgtgcgtccacgcgttctaacacattaacccttctcattccccatctacgcaccggattcagccactgctgattgcgagggttccgaaatggacgctggcggaaagatcaagaagggcgcccgaggaagaaagggcggtggacctaataagaagcacgtttcaaggtccggcaaggccggtcttcaattccccgtcggaagaattggcctgtatttgaagaaaggaaggtacgcccagcgtggcagtacccgtgctaccgtgtacttggccgcagctcttacgtgcctaactgctgaggcgcttgagatggctgggaatgctgcacgtgacaaccagaagaacaggattattccgagacatgtgctattggctgtgaagaacgatgaagagttgaggaaattgcttgctggagtcaccattgcacat

SEQ ID NO: 17056 - DNA, 328 bp, Glycine max
  Clone ID: LIB3106-110-Q1-K1-B9
atcgatcgttctgaagttcgattctatgcatttgaagctcgaaatttttgtcagcgtggcggttattatagattattgctgagacatggctgattttatctggtctggaaaatgaaacttggctttatgtctaaagaaggcttctagcgctgtggaactatatttatgaagttattgactggcgtactttaaatccccgtccggaagaattggcctgtatttgaagaaaggaaggtacgcccagtggggcactacccgtgctaccgtttacttgaccgaaattgtggggtgcctatatagtgaccaagctttcgttccctggcaatgc

SEQ ID NO: 17057 - DNA, 380 bp, Glycine max
  Clone ID: LIB3106-110-Q1-K1-C1
ctagatcgcgagcggcccttagattgaaatggaggggttaatgaaatcactccagaagatctgagtggtttaaaaagaaaagtgaacggaaatgcactccgcgacatgtggcttgaagcacaacccattttacaaaacaatcctaacatgttacgcattccggtgactgctaataaagacgacacagctctcaatgtatcaatgagtggcaggagcactacttttgtggaagggttggttagccttatgagcccagaagacctgataataccaaggattagtcctatggatacgcacattggcggaccttggttggtgtgacacttacacttctcattttttaaaacttattaaatttataaataaaattttatattttt

SEQ ID NO: 17058 - DNA, 442 bp, Glycine max
  Clone ID: LIB3106-110-Q1-K1-C10
atttccttagcagatgtctatcatgtagtcactgccactgttccattatatgtcaccatgtttctagcctacatctctgtgaaatggtggaagctcttcacaccggaacaatgttcaggcataaacaaatttgtggccaatttctcagtcccaattttgtcattccaagtcatttcttccaataacatttacaagatgagcctcaaactcgtatatgccgacgttgttcagaaattgcttgcatttttagtcttcacggcaatcattaggatcaaggacagggggggtttgaagtggatcataactggtctctcactatcaacacttcccaacactttgatcctaggaatcccactcatgaaggctatgtatagggatgaagcttctcttctcctaccccagattatcttccttcagagcatggtgtggtacaatttgttat

SEQ ID NO: 17059 - DNA, 392 bp, Glycine max
  Clone ID: LIB3106-110-Q1-K1-C11
cccacgcgtccgcccacgcgtccgcccaattccatagctgcctcagtaattgggacctgaaaaactttctcttttaatcactgaggcatacaaggatgcacaccaaaagagtgtccaggccatgaaggaaaggatgaatgatcttgcacagagcttatgaatgccaccagggcttagtgaaggattgaagtgatgaatacttttattctagacttaggacttgggcctcaggtttgcacaaacatggcaggatagacttatttgttttcttcatttactatggctgttaatttgcaatcttggttattaagaaagaaatgtaatcctggaattatttgaaatggtggtggagcttcaattttttcacattttactcgtgttatttttgtttg

SEQ ID NO: 17060 - DNA, 405 bp, Glycine max
  Clone ID: LIB3106-110-Q1-K1-C12
ccgacgcgtgcgcggtcttgtcttcttcttggcgccgaggctgtctaagccccaatcctgcgatggatttattggtctggtgaacagtcccttaaaggacacgtctttccaaaccgtggcgattgagttcgatactttctctaacaaaaaatgggatcctgctaaccgacacatcctcattgacgtgtactcgatcaagaccgtcaaaacggcatactcggggttgtgcaatggacacgtagcggaaattctcgtcacctataatgccgacacgagcctattggctgcttctctgatccacccttcaatgtaaacaagttacattctctctgacacagtgaacttgaagagtaatcttaccgaatgggtgagcgttggcttctatgtcaccaactaattgcatga

SEQ ID NO: 17061 - DNA, 69 bp, Glycine max
  Clone ID: LIB3106-110-Q1-K1-C2
aaaaaaaaaaaaaaaaaaaaaaaaaaaaaaaaataaataaaaaaaaaaaaaatgggcatccgggttggg

SEQ ID NO: 17062 - DNA, 268 bp, Glycine max
  unsure at all n locations
  Clone ID: LIB3106-110-Q1-K1-C3
nccacgcgttcgnccacgcgtncggacgccataagtaagagcaagtcgaaaagttcctctgtctctgacacacacacatgccagccatgagcctcttcggtataggcagaaaccagagaacattccgcccgaaaaaaagtactccttctggaagtaagggagctcaacttcgaaaacatattgatgccacgttaggtagtggaaatctgagggaagcagtaaagctacctcctggggaggatttaaatgagtggctagctgtcaacac

SEQ ID NO: 17063 - DNA, 419 bp, Glycine max
  Clone ID: LIB3106-110-Q1-K1-A8
gccgtctcggatactagctgccctctatgtaagaatgaggtggaagatgcacgccatttgttttttcactgcagaaaagttacccccttatggtgggaatcaatgtcatgggtgagtcaatttcatgttttcccgaaagacccaaagatgcattttctacaacatgctctaactacgaccagggggtcttcggcccaaaaaatgaaggtgtggggggttagttgtaacatgaaccttttggaaccggagaaatacgatatttttctccaactaggactttgacagcaacaaagtcatggatgactcacttttttgctttggacatggatgaggaatctacagaaggattttcctatgcattttaaccaatggtctagtaacatttctgcagggttcatgtaacagtttgtatctaatct

SEQ ID NO: 17064 - DNA, 444 bp, Glycine max
  Clone ID: LIB3106-110-Q1-K1-C4
cacgaaatgaattagcgttgccattctcatcctcctctgtctctctctctccaccattgccatggatccttacaagctccggccatccagcgccttcaattctcccttctggactacaaattctggtgctcctgtttggaacaacaactcctctttaaccgttggagctagaggtccaattctgcttgaggattatcatcttgtggagaagcttgcaaactttgacagggaacgtatcccagaacgtgttgtccatgccaggggagctagtgcaaagggtttctttgaggtcacacatgacatttctcacctgacatgtgcagatttccttcgagcccctggagttcagacgcctgtaattgttcgtttctcaactgtcattcatgagcgtggtagccctgaaaccttgagggaccctcgaggttttgccgtgaagttttacac

SEQ ID NO: 17065 - DNA, 141 bp, Glycine max
  Clone ID: LIB3106-109-Q1-K1-H10
cttctttaccacttgaaaaaacttgtatccgctggaaaactcctcttttcgagctctttctattgaggaatggagatggaaagggacggatttcatacaacacacattcttactgtgaatgctacaaaccgtttttttcac

SEQ ID NO: 17066 - DNA, 241 bp, Glycine max
  Clone ID: LIB3106-109-Q1-K1-H11
caaaacgctactctagactctagtagtagcagagtagcatcatcgtcatcatcaaaccttggtgaatcaaaaagaaaattaggaggaaaagatgttgttggggaagagacctcgtcctccaattatgaagagaacaacaagcatgtcggaaataaccttcgatctgaacacgtccttggacgatgatccgaacaactccgtgaagggaccaggaggagatgggcctcctgttgggctcaac

SEQ ID NO: 17067 - DNA, 424 bp, Glycine max
  Clone ID: LIB3106-109-Q1-K1-H2
gcttcatgccaaaaagctcttttccttctaaatttgattccttagttcagcattctattattatatatggcttcttcaccttgctcagaaaacaaaaacctatagggagtagctggtggtgccggagagaaacccattccacttggtgagaacgttctgcagaagcatgctgcattctttgacttgaataaagatggtgtcatctacccatgggagacttttaaagggttgcgtgaaatcgggactggggttttgctgtccgttggaggtgctattttcatcaatgtgtttctcagtcagagtactcgtcccggaaagtttccatctatactttttccaattgaaattaaaaatatccaacgcggcaaacacggcagtgacactggagtctacgatactgaaggaaggtttgtaccttcaaaat

SEQ ID NO: 17068 - DNA, 424 bp, Glycine max
  Clone ID: LIB3106-109-Q1-K1-H3
cccacgcgtccgctcactgtgagagcaaagaataagaagaatgaaggacgccggatagagccacaaggcgaacggaaagctgtcgccggagactcggaaggatcggaagtcgtctacggggctgagctgatcgccgaataagggaggccacggcgggatgttcacgtggatcggccacggctactagcaagttgagattccgcacggtgctatggacgcctaggacccttacttttaggatccggtggagatcgccaccgtgtgatcgcggtggtttccggtggccaggtctgtaaatagtattaattggcgaaacgtgttttttcgtgttcaataatgtgaagcgaatcggagaagaagcgttttctgtgattgattgttatagatctgatctatctgcggtatttggtagtagcatggcact

SEQ ID NO: 17069 - DNA, 397 bp, Glycine max
  Clone ID: LIB3106-109-Q1-K1-H4
agtaaactaacgcaggcaggaagagtgagcgcgctagatgccttgggtgaggctttcagagtctccaaggctcgacgttgctattgacatgggtaatccatttctcaatctcactgttgatgggttccttaagatcggagctgtcgcagccacgcgatcagctgctgaagatacttatcatattatccaacaggggaatatcatcccttcctggtcaagctctgatgtcgaggagttcattgcttctgatcctgttcatggacccgtcctgaaaagtgctagagaagcagtgcaatttggcctcacaggaagtgctttgggagcattatttactgcaggctatgcctggaaatattcaaagagtttacatggcgcttgactgtcacttttagctgga

SEQ ID NO: 17070 - DNA, 397 bp, Glycine max
  Clone ID: LIB3106-109-Q1-K1-H5
acacttccggatgggctactcgtctaccattcgctgaatctactctactagtagcagagtagcatcatcgtaatgatcaaacctgggtgaatcaaaaagaaaattaggcggataatacgttgttggcgaagagacctaatactccaattatgagtagaacaacaagcctgtccgaaatatccttctatctgaacacgtgcttgtacaatgatccgcacaactgcgtgtaagtcaaaggcaccagctaagcccaaggcagctgctaagcctaaagacaaagctccagccaagcccaagcccgcccctaaaccaaaggctgctgctgctgctgcttacaatcccaagcctgctgccgccaagcccaaagggactaagccagctgccaagcccaagccca

SEQ ID NO: 17071 - DNA, 343 bp, Glycine max
  Clone ID: LIB3106-109-Q1-K1-H7
ctcacacgtccagattatttcattttacatttccgatcagactgggagacacgcttagaaagcttcgggctgcgtcctttctcacctagcgattccttaaagcactcggcatcctacacctctaaatttttggggaccgtgagcttgaaaactagaattaacttgggttacattatagaagctgtcgcctaatgctcaatgactgttgtaaccacagaggatacttccaccaggaccttgcgtgaaccgggtatccctatccgttaacatatcaggggttcggctgcatttttgggaacgatcaagttgttgtttggcatggaccatgcactgcgaacacctt

SEQ ID NO: 17072 - DNA, 341 bp, Glycine max
  Clone ID: LIB3106-109-Q1-K1-H8
tttgtctttgcacaaaatcaaaccctccccagtgccaatgtgtagatgggagcgagacaggctgccactcatgttgcaaaaattgcatttgcaataagaaatttcctcggacgtgtttttgtggagatataaccaacttctgctatgacaaatgtaactcaactgaagccaattaaagctcactagctaggaatatgaatgagcatgtttccataaataagttgtgaggcaaagcccctttaggctttgtctacttgtcttcgtgcatgtatgcatgcaaataaattactatttcaataaataaataaataaaaactacttggctaagaatttactttctc

SEQ ID NO: 17073 - DNA, 260 bp, Glycine max
  Clone ID: LIB3106-109-Q1-K1-H9
aaaaaaaaaaaaataaaaaaaaaaaaaaaaataaaaaaaaaaaaagggaaaaaaaaaaaaagggaaaagggaaaaaaaaaggggggccgaatataatattttctaaacttaaaaccacatgcattcacacgtcattagtcttacatcgtgttggctgggttcatttatgtgtgcacgcgttttacaaccgctttactggaaaaaccctttcttttccaaccttatatagctttgatcacagcccccttttcccacctgcc

SEQ ID NO: 17074 - DNA, 385 bp, Glycine max
  Clone ID: LIB3106-110-Q1-K1-A1
accctacttctacttcccccctttgctctcaaaccttatcacctaatccttatcctcccaaaccagaaaaccatgtctacctgcgcagcttccctcgcactcccaaccctcactctccgaacccgacaacctctatgttctccccaatgcttctcctcgtccctctccctcacacccaacaacaaacccatttccatttctgctggttttctcaaaccaacaactctgtcgtcgtctcgcttcgttccccacgtcgtggtgtcgtcggatttggggcaggaggaggacaccttcagtgacggagacggccccagcttctcccccgaccttaagctctttgtcgggaatcttccgttcaacgtcgacagcgcgcagctcgcggagc

SEQ ID NO: 17075 - DNA, 442 bp, Glycine max
  Clone ID: LIB3106-110-Q1-K1-A10
cccacgcgtccgctataactcacatatatataacgaacgaggttatagactattggaccacacaatacaacctaacgggatgatcgtgaatggaagcgttgctgtagcttcaaaaactacatctcccatgcatatgaagatggcggatcatgaattaaaaagcagcactaccagttccctactcactgacgaaacgtttatccgtttcgttccctgttggcctatgcatttgaacacttgttctcatgcttaagagctctcatccaaatgaatatggatttcatgctcacagggatcttggagctttcaagtacttggagcatgcaaatggcatttgtgcctgctactctctatttttatatgggattggtgttatacacatgccctgtcactatacacctagcttggactttctttatccttgatcatgtgctgacataca

SEQ ID NO: 17076 - DNA, 440 bp, Glycine max
  Clone ID: LIB3106-110-Q1-K1-A11
cggatacctcgtttgtgcgccagttccagtgtgtgcaaagtgcagtgatagaaagctagcgcgctagctagggttagggtgggggttaaggtttctgcgtttatgcgaagatgactaacttcaggaaattgggtcgacccaccggtcaccgaatgtccatgctcagaaccatggtctctcagttggtgaagcacgagcgcatcgaaactactgtcgccaaggcgaaagagatcagaagactcgcggataatatggtgcaacttggaaaggagggatcccaacatgctgcgagacgtgctgctagttttgtgcgaggagatgatgtccttcacaagctgcttacagaactggcttatcggtacaaggatagagctggaggatacaccacattgcttccgacccgtattcgaatgggtgatgctgcaccgatggcctatatt

SEQ ID NO: 17077 - DNA, 443 bp, Glycine max
  Clone ID: LIB3106-110-Q1-K1-A12
cccacgcgccggcaaaaatggcatcattcaccatgacagcttccatccttggcgggccagccgtcaccaaccggttgggagtagcaacgcagaggagatcactcgtagtgaatgctgccaaagctgttgaagcggaaaaggtcagttatgacaatgacatggatggtagcaatggaaggaggaacttgatgttcgccgcggcggcggcggctgctgtttgctctgttgctgggatggcagtggcagatgagccaaaaccaggaaccccagcagccaagaaaaagtatgctccgatttgtgtcaccatgccaactgctaggatttgtcgcaattgagggactcggtttttattttacttctgatgatcggaaatgtgcattagggttgtagtaatgttttgatttcacatgatcctcactgtactagatgttcataaaactatc

SEQ ID NO: 17078 - DNA, 450 bp, Glycine max
  Clone ID: LIB3106-110-Q1-K1-A2
acgcccacgcgtccggatcgagataactagaaacagtgtgatgaaaatgaaggtccttgttttcttcgttgctacaattttggtagcatggcaatgccatgcgtacgatatgttccctctccgaatgaacactggctatggtgcccgtactccggaggtgaaatgcgcaagttggaggcttgctgtggaagcacacaacatctttggctttgagaccattcctgaagagtgcgttgaagcaacaaaggaatacatccatggcgaacaatatagatcagactccaaaacagttaaccaacaagcttacttttatgccagagacctcgaagtccatcccaaggacacatttgtgttcagtatagatggcaccgtactctctaatattccatactacaaaaaacatggatatggggtggagaaatttaactcgaccttgtatgatgaatgggt

SEQ ID NO: 17079 - DNA, 183 bp, Glycine max
  Clone ID: LIB3106-110-Q1-K1-A3
cccacgcgttcgtccacgcgtacgcactgttctaatttatttctgaaatagaattccgttggtctgggtctctatctctcgtggcagggatgggtggcacaattgttgctgacgtacccacaaagaggggaaggggcataaaggccctgaaggagaaaaccccatcaacgaacgatgctaaca

SEQ ID NO: 17080 - DNA, 423 bp, Glycine max
  Clone ID: LIB3106-109-Q1-K1-H1
acggaccttacccatcctttgaacagcttgggtaatgggaatatattggtttggaaaaggaaggctgagcaatatctggctgattccggcatcccatatacaattataagggctggtggcttgcaagacaaagatggaggtcttcgggaactacttgtaaggaaggatgatgagcttctccagactgaaaccagaaccataagtagatctgatgttgcagaagtctgcattcaggcactaaattttgaggaggctaaattcaaggcatttgacttggcatcaaaacctgagggagcaggttcagcaacaaaggatttcaaggctttattttcccagatcaccactcgcttttgatttttgaatgttgttgtcatggtcccaaaatccttgtggattgaaccatatgggtattagtgctatctg

SEQ ID NO: 17081 - DNA, 123 bp, Glycine max
  Clone ID: LIB3106-110-Q1-K1-A4
gccacacgttctgtaacaaacacacatagtctatctgtttctagccaaactatatatacttggcatcttcctgaccacacgcggtggtctaagctccagcctggtatccacccgtgggttatc

SEQ ID NO: 17082 - DNA, 330 bp, Glycine max
  Clone ID: LIB3106-110-Q1-K1-A5
agaaaacactccttcaggtgtacacatagactatctctgttgagcaaaaccagatagacttggcagcgttctcagatgccacggtggtctaaggtccagcctgataaacaagcatgcaacataaggcgcgttagcactcgtctagcaagcgcatgcaacgtcttatacttatctgacggcccagaggatggttatcaaccaaagtgagcattataatggaaatggatattccacattatggcgttcgaaatcaacttatgtgaaaacgtgtcataaatctgagcaattacccgttgatattatttacaaaaaatgtgccactgaaacttc

SEQ ID NO: 17083 - DNA, 332 bp, Glycine max
  Clone ID: LIB3106-110-Q1-K1-A7
ctccctctgcgcatacactgtgctcgcagggtttatacaccaagagggaaatgggtgccgagccgactatttcgggtgggtgggttggactggacaaaggttacgtcgtcaccaacaaagaattgccttcacacccctcacatcgttaggggaaaacaagcaatatggtgcactatgtgcggaaccttatatgagatggagccggatttgcaccctatgaatagcgtctaactcagttggtgaatgatgagaacgataaaacggcactcgacgttgcaaaaagaaagctcggtacacacacacgcgcaaataataagcatgaggaaatgtcc

SEQ ID NO: 17084 - DNA, 419 bp, Glycine max
  Clone ID: LIB3106-109-Q1-K1-F3
cgcacgcgttcgcccacgcgtacgcgcacgcgttcgagagagagagagagagggcgcggagaatgttaagtctctcagctgcgtctccgtcttctgtaaccatatcctttcttccagagccattcaatgacattcagctccggcgctctgccacatgctccattccacccacgatatgcatcgcttcggggccagtggtgatgatgtctaaaaagacagacgaattgaaggaaattagacaaatgaccaccgcacaaattaacgaagagggtgtcgaccttaaaggcgagcttgtcatgcttcgccttcagaaatcggctcgcaacgagttcaagtccagcgaattcggtcgcatgcacaagatgattgctcgcatgcttactgtgaagcgggaaagagacattgaggagggtatcaat

SEQ ID NO: 17085 - DNA, 233 bp, Glycine max
  Clone ID: LIB3106-109-Q1-K1-F4
tcgcccacgcgtccgaaaaaaagtaagaaaaaacaataaaagaagagaaacagagaaggcgtaagagaaagtataaaactcgtgagcagcggttctgatatacgtgtaccatctagcttctacctgagtccgttccttggcctccagctcccgaatttttcaagatgctccattccacccaccatattgatcgcttctcctccagttacagatgatggcataaaaagccagct

SEQ ID NO: 17086 - DNA, 440 bp, Glycine max
  Clone ID: LIB3106-109-Q1-K1-F5
cccacgcgtccgccaacatgcccaagttggagtcggacatggcgaggcccatatgctgttgctgcggcattgacatggaccccaactgaagcgaacccgcacgtgcgccttggaattcaagtgcacccggaaccggaaggttgaaccttggcatgaaaccactcacactttgaggaaacggccacatctgagtctccgaggaagcagaagacgaagcccccgcggtaacgggaagcatccaaattgtgctaccagggggcccactggcgggagagggtgccacggcccacatcgctgttgcgggaagcaaattgctgggccgaagaagcccagaaccagcttcggattgctgcttcggtaacttatgcgaagacccatcaccatcaccgctctcgttctgcgattgggtattggtgctgttgatgttatcgtctttgaag

SEQ ID NO: 17087 - DNA, 427 bp, Glycine max
  unsure at all n locations
  Clone ID: LIB3106-109-Q1-K1-F6
cccacgcgttcgatggcctcttcagtgatggcatctgtggccctcaaacctgcccctttcactgttgagaagtcctcagtttgaggccttccctccctctcaaggaactcctcttcattcagagttgtggccagtggtggcaagaacatcaagactgacaagccttatggaattaatggtggcatggctttgagggaaggagttgatgcatctggcaggaaaggaaagggaaagggcgtttaccagttcgtagacaaatacggtgctaatgtcgatggttacagtcctatctactacaccaaggactggtctccaaccggtgatgtctacgctggcggtacgactggcttggctatcttggctgtgactctacntggtcttcttgctggtggggcacttcttgtctacaacacaagtgctttggcgc

SEQ ID NO: 17088 - DNA, 159 bp, Glycine max
  Clone ID: LIB3106-109-Q1-K1-F7
gcgaggctatccttgaggattaaaaatggcatctgcctggcccagggctctatctttccaatccttgggtggcaaggccattaaacttgtcccatcttcccccgaagcccgtagggtctgcctgaggaagaccgtcaccaagcgtgccttctaccggag

SEQ ID NO: 17089 - DNA, 418 bp, Glycine max
  Clone ID: LIB3106-109-Q1-K1-F9
atggatagcatggaaaaggtgtttccttatttggttcagaaaaaacacaaagaagggcaagaaatacgaagggtagctcagtgttgctggaacataattgctgatgattgtaatctgccattttctgcatcaggcttaaaatttattcctttgccagtaatgcatggagaggattatatctgtttgggtttcctttttggtgagaaagatagggtggcttatatatctgatgtttcacggattccagctagtacagagtatgtcatttcaaaaagtggggctggacagttggatcttcttatattggatacactgaaaaagactggatcgcataatgttcacttttgtcttccacaggctcttgaaactgtgaagaggttatgtccaaagcaaaccctattgattggaatgactcacg

SEQ ID NO: 17090 - DNA, 430 bp, Glycine max
  Clone ID: LIB3106-109-Q1-K1-G1
gggaaaagagatggcccgtttttgttgattttagtgggttttggcgggtgaagtggaaatggagcggtgagggaaggaaattagggtaattgcagtaatgtcgagttagggttttggcgtcccatttataaaggtctgctgcggctgtgcgcgcgtgtgtctgcattgcgagtgtcgtcgttttgattccccccttctctctctctctctctctataaacttctatctcttcccctctttccttataactctctgtctctcaccccactcactcactctcttactctctgcatgcttatgcttcttctctcgctctgattccgcggaatcaattcaaatcagcttctgggaatcgaatctcacatctcggagatcagaatggtggatccaactggaaaaggatcggaggttgaacctgatgactcaaact

SEQ ID NO: 17091 - DNA, 409 bp, Glycine max
  Clone ID: LIB3106-109-Q1-K1-G10
gccttcttggctttgttcaccaccatggactcttgttctaagagacttgcattctcggaaccctttatgtcacagaggagaaaggtgatttctgggttcagtttgggcgttggagtttctctccttttcctcactctcatcttgctcaacaacacttccctctccgttcccaaggttcaagtgtttctccaaggatccgattccaattcctcttcttcttcattctcgtggcgttttcccttcacaaccactctttctttcaacgcttccgtgagtcctctgcatagggttgaagtgaacgtgtcgtcaagtgagggttcggagaaaagttcggaggaaacccttttggggaatctcactggggatcagaaaaatgcaagcttgcatgatgggcacgaggaagatgatg

SEQ ID NO: 17092 - DNA, 384 bp, Glycine max
  Clone ID: LIB3106-109-Q1-K1-G11
ctcacactgtgtttggagcagaatcagatcgtgtgttccgtacgttcgttcgttcatttgcagtgtcaaacatggcgtctcagatgagcaagaagagaaagtttgttgcggacggagtgttcttcgccgaactgaacgaggttctgacacgtgaattggcggaggacggttactccggcgtggaagttagggttacgccgatgcgcaccgagatcatcatcagagccaccagaacccaggctgttctaggtgagaagggaaggagaattagggaacttacctcagtggtgcagaagaggttcaaattccccgaaaacagtgtcgagctttatgctgagaaggtcaacaacagaggcttgtgtgccattgctcaagccgagtcgc

SEQ ID NO: 17093 - DNA, 349 bp, Glycine max
  Clone ID: LIB3106-109-Q1-K1-G2
atcaaccgcgccctacaatcactttgggggcttggtgttgctggatcgggcacaacctacttttgcctcgctgaaccaagtaataagaatctaatacaatgtgttgttgacaacccatcaactgtctggcttgtcggtcctacttttgctgccttgacaggacttgtctttaaggaaggactctgctatgccaagcttgaagctggacttctcacctttgttattaccatacttcttcttggcatctgactggcttgatggatgacggagtttagcttactttactcgcttcgtggatgactctttttgtgatgtttgctgtaacgaaattcacccagcccatcaagga

SEQ ID NO: 17094 - DNA, 179 bp, Glycine max
  Clone ID: LIB3106-109-Q1-K1-G3
atttagcgtaactaaacgcgtccgaccacgcgttcgagagagagagattgagggcgtggagaaagttaactctctgcagttgctgaatcattcttcttaaaccagggcgcccgttctagaggcccaacttcattcacttgcttgcctctgccaaattctccattagtgccacctaattc

SEQ ID NO: 17095 - DNA, 68 bp, Glycine max
  Clone ID: LIB3106-109-Q1-K1-G4
atcatcctgtatttttggtttctgttttcggacttcaatggaaattaatggatgagaactaatgaatt

SEQ ID NO: 17096 - DNA, 441 bp, Glycine max
  Clone ID: LIB3106-109-Q1-K1-G5
cccacgcgtccgcccacgcgtccgggaaaacaaagtatagagtgaaagaatgggtgagaaaagcaagattttgatcataggaggcaccggctacatcggcaaacatatagtggaagcaagcgcaaaggctggaaatcccacttttgctttggtgagggaatccacactctctgacccctccaaggcacaactcatccacaattttgaggctttgggcgttaatttggtccgcggggatctgtacgatcatgagaagttggtgaaagctatcaagcaagtagatgtcgtcatatccacgctgggtcacctgcagcttgccgatcagctcaagatcatcgctgccattaaggaagccggtaatgttaagaggtttttcccttcggaattcggtaacgacgtggatcgtgtccatgccgtgggaccagcaaaatctgcattagc

SEQ ID NO: 17097 - DNA, 300 bp, Glycine max
  Clone ID: LIB3106-109-Q1-K1-G6
gccacgcgtacgcttacatctaaaatgatgtcatttgtggcccatagacctgcctcaaacaatctttattaagtatcggacgttgagcccttcccttcggctcacggtacttctgttctttcacagatgaagaccgtgtcaatactagcatcaagactgacaacactgatggaatcaatccggggatagctctgagggaaattctttatgcatcctgccatcaaacgtactggcaaggtcccataccactacgggtacaaacactgttgctaatgtcgatggttacagaactatttacca

SEQ ID NO: 17098 - DNA, 421 bp, Glycine max
  Clone ID: LIB3106-109-Q1-K1-G7
ataacataacatccttaaccctttgaacatcgttttgcagccatggaaacaggcattgcgtgcttcactcgcgggcctttcttgcctagtgcttcttccaagcactctccaccttccatttctgcatcttttggcttgaggagtctgaaatcaagctctttatttggagaatcgctaagagtggcctccaaatcaacaataaaggtttcaaagacaaagaatacttcactcgtgaccagatgtgaaatcggtgacagtctcgaagaattcctcacaaaagcaacaccagataaggggttgatcaggttgttggtgtccatgggagaagcattgagaacaatttccttcaaagtgaagacggcttcatgtggtggaacacaacgtgttaatacttttggggatgagcagctcgcagtggatt

SEQ ID NO: 17099 - DNA, 419 bp, Glycine max
  Clone ID: LIB3106-109-Q1-K1-G8
tgcagtattttactgacataaagtccgtgaaacaacagctttcatggttccattggtggcgggtgatggaaccaaaactcaggcacttgctgtttgccactcagatacttctggaatgaatcatcacatgcttcatgaactcatgggagttgatcctggaactaaccctgtttgccatttccttggaagcaaggccattttatgggtacccaatatatctatggacactgcctatcagactaacgttgttgtttaattagtccatgcatctgcatcttgggcaccataagattgtatataaaataaattatggtgtgttgtgtatgttgtgcaagacctggaactttacctttctacgtacgtgtgctgttaggatgcagtgtgctctgatgatgctttgatgaatatgcagcgtgctt

SEQ ID NO: 17100 - DNA, 413 bp, Glycine max
  Clone ID: LIB3106-109-Q1-K1-G9
cccacgcgtccgaaaaggtttaacaaagataccagacatatctgggtaaccaaattttgagaaaccttcatttgaatattggcagaatttaattacagctcatgattcgatttgtttaatttctaggtaagcttaaaatattgagtgcttttggttgcatcaagcttaggagttttccaaccatgaagttgacctcgcttgaagatctccatccttcatgttatacttgagagttttccaaaaatatcagaaaagatggaaaatgtaagggaacttcatttgcagtacactcccataagtatgtctgtctagttgtggagttgttcagttaccaagtagcactgtcgtgttaccagaactgactgatattatagcttttggatggaaagggtagcaatggctaaaacaggaag

SEQ ID NO: 17101 - DNA, 412 bp, Glycine max
  Clone ID: LIB3106-109-Q1-K1-F2
tgaaaacgcacacgacaatgggaatgctagtcatgaatcacaaaacaatgctgatgcgggacagggcaacaatgatgccactgttgagagtaaggcaagtgaaaatgaacgtggtgctcaaaacgaaacagtggagtcacaaaaagaggaggaatctgcacactccggcggagatagcaattctaacttgaatgatcaaggaagttctgatcattcaatcactcaagaggataaagaatctcgcgtggatttgggaactctaccacaatccaatgcagaaaacaataacattgaggttactgctgctgagtgataattcagatagagtaattgcatcaagcttcttttgatcctacttctttttttctatttttggtgagccatgtattgtttctttagttggatattatgc

SEQ ID NO: 17102 - DNA, 410 bp, Glycine max
  Clone ID: LIB3106-109-Q1-K1-D9
gcaacgcaaactcatatatggtttggcttctatgcgaagattgcggagacaacctcaaaaagcccaggttgtctagtcacttccgaacttgctctgcctacaaattgtcgtgcattgactgtggggaaatatttgggcgtgataccgttcaggatcacacgcagtgtatcacagaagcggagaaatatggaccaaaaggccaaggaaaaacttttaacgttgcaactgccaagcctaataaggatagcaagcaaaggcctgaagttgatattaatgtggggttatctgatcggcctccttggttctgtagtctctgcaatacgaaagctacaagtaagcaaacacttctttctccatgcggatggaaagaaacacaggtcaaaagctagagcatttcattgctttaaagc

SEQ ID NO: 17103 - DNA, 423 bp, Glycine max
  Clone ID: LIB3106-109-Q1-K1-E10
gaaagagatcacatagcagaatggcttctactcaatgtttcttggaccaccatgctcttaccacccctgccagatccccatcacaacgcatcatggttagcaccaagcctaaccagcttgtttgcaaggcacagaagcaagaggatattgatgtcagcccaatctctcgccggttagctctaaccgtgctcattggtgctgctgctgttggctccaaagtccaacctgctgatgcagcttatggggaagctgccaatgtgtttggaaagccaaagacagacacagatttcctgccatacaatggagatggattcaaactatcgattccctcaaagtggaacccaagcaaagaggttgagtacacaggtcaggttgttagatatgaggataactttgattcaaccaccaacggggttgtcacca

SEQ ID NO: 17104 - DNA, 400 bp, Glycine max
  Clone ID: LIB3106-109-Q1-K1-E11
ggtcactgacctatcttggtagagatttgaagtttaaaccttcaaattaatcaaaccattttaatttgcctttagattctgagtcactgctgctatggcgctacgcgtacttcttgtgttggggatgttgctgatgttgtgccttgttaaggtttcatctgatccaaagatagaagaagaaatactggaagcagaagaagaactgcagtttcccgataacgagccacttatcgtgagagacgcgaacagaaggctaatgcaagatatggattgtggtgggttgtgcaagacgaggtgcagtgcacattcgaagcccaacttgtgcactatggcgtgtggcacgtgctgtgtgaggtgcaagtgtgtcccacctggtacatctggaaataaggaactatgt

SEQ ID NO: 17105 - DNA, 413 bp, Glycine max
  Clone ID: LIB3106-109-Q1-K1-E2
cgtacgggaggcttttacattgaagtggattctgcatgactggagcgacgagcactgcgtcaagatcttgaagaactgcaggaaggcaataccatataaaacagggaaagtgatcatcgttgatcacgtgctgcggcccgaaggcaacgaactcttcaccgacgttggcattgcatttgacatgatgcttctcgctcacaacgccggcgtgaaagagaggacggaagagaactggaagtggctgttcaaagaaacaggcttcgcccgttacaacatcatcaagatcaacgctcttgcttccatcattgaagcgtttccaatctaacgtagaggaagccactacacttcatgtgcgtggttttatgttgcatgtgtcgttattattattaacagctatgtgatcttcgtgtgat

SEQ ID NO: 17106 - DNA, 347 bp, Glycine max
  Clone ID: LIB3106-109-Q1-K1-E3
ataccgctcgccttatgtagtttgaagtcttttgtttgtgattcacgtcattgatacagttcttgttattattgtggttctaatgctatgtttcttgcctttatgaatagataattttttgttattaaaaaaaaaaaaagagaataaagtaaaaaaaaaaataaaaaacaaaaaaaaaaaaataaaaaaagaataaaataaaataaaaaaaaacaaaaataaaccgggggggccgttttaaatgaaccaagttatcctacgcttcaatccgacgcaataacttttttataggggaacataaataaaattacctggccggctttttaaaccttctaaactggaaaaac

SEQ ID NO: 17107 - DNA, 254 bp, Glycine max
  Clone ID: LIB3106-109-Q1-K1-E4
ctcacgcgcacgacatggaggttgcagagcgttgattgtgtaagacatgaaagctctaaggtgtaatcctcacgcgctgcatcatggctgtaaccttttcatcataagctgcatcctgcatagtcactcaaccccaaactgaggaatttttgaagctcaaccaaaccaagccacagaatgatggtatgatacggtagttacacgtgaagcataaaaacataggtgcggtattatctgctacaccagagagttca

SEQ ID NO: 17108 - DNA, 310 bp, Glycine max
  Clone ID: LIB3106-109-Q1-K1-E5
catcagctttccagggggcaagtgactgtcctatccaatgttgcttcttgctgctctctctgggggaacaactgtggtatacaacctgttgtatagtgaggatattcatcacatgctttgtgcattaaagacccttgtactgcgtttgggaaactacaaatcatccaaacaatcaattgttgttgggtgttgtggatcgtttcccactactcaagtatgttaagatgaaattaacttattccttaggaatgctgcttctgcagtgcgaactttgacagcatcttcggtttctgcacgtggaaatgcaagc

SEQ ID NO: 17109 - DNA, 408 bp, Glycine max
  Clone ID: LIB3106-109-Q1-K1-E7
tcgtccacgcgttcgctagaaacagtgtgatgaaaatgaaggtccttgttttcttcgttgctacaattgtggtagcatggcaatgccatgcgtacgatatgttccctctccgaatgaacactggctatggtgcccgtactccggatgtgaaatgcgcaagttggaggcttgctgtggaagcacacaacatctatggctttgagaccattcctgaaaagtgcgttgaagcaacaaatgaatacatccatggcgaacaatatagatcagactccaatacagttaaccaacaagcttacttttatgccagagacctcgaagtccatcccaaggacacatttgtgttcattatagatggcaccgtactctgtaatatgtcatactacaaaaaacatggatatggggtggaga

SEQ ID NO: 17110 - DNA, 429 bp, Glycine max
  Clone ID: LIB3106-109-Q1-K1-E8
tcgcccacgcgtccgcccacgcgtccgcttgtccaaaaccaaaactttttgtcaattcatttcttgttgttagactctgcttctttctccaacttcacacacaaaaaaacatggcaaaggatagaacaattggtgtggctctagatttctccaaaagcagcaagaatgctctgaaatgggcatttgagaacttagccgataaaggtgacaccatttatgtcattcacatcaacccaaactctctagacgagtcccgcaacaagctatgggcaaaatctggttctcctcttattcctttggtagagttcagagagcctgagattatgaaaaagtatgatgttgaaattgatattgaggttcttgatatgcttgacactgcttcaagacaaaaagagatccacattgttacaaaaatatattggggggatg

SEQ ID NO: 17111 - DNA, 423 bp, Glycine max
  Clone ID: LIB3106-109-Q1-K1-E9
aagacggtgaccgtgtttccgttaccttgcgcgggccgaagacgccgacgccgatcacctaccgcgtgccgatggcctccgcacaggtgaagtccgccgtgctgctcgccggcctcaacacgcccggcatcacgacggtcatcgagccgatcatgacgcgcgatcatacggaaaagatgctgcagggctttggcgccaaccttaccgtcgagacggatgcggacggcgtgcgcaccatccgcctggaaggccgcggcaagctcaccggccaagtcatcgacgtgccgggcgacccgtcctcgacggccttcccgctggttgcggccctgcttgttccgggctccgacgtcaccatcctcaacgtgctgatgaaccccacccgcaccggcctcatcctgacgctgcatgaaatgggcgccgaca

SEQ ID NO: 17112 - DNA, 435 bp, Glycine max
  Clone ID: LIB3106-109-Q1-K1-F1
tccacgcgttcgcccacgcgtccgggtgattgtttgattgagccttgaagaaatggaccacagcgctgatgcacatcgcacggacttgatgaccataacgcggttcgtgctgaacgagcaatccaagcaccccgagtcacgcggcgatttcaccatcttgctcagtcacattgttctcggttgcaagttcgtttgttccgctgtcagcaaggctggtcttgctaaacttattggactcgctggagaaaccaatgttcagggtgaagaacagaagaaactggatgttctttccaatgaggttttcatcaaggctctcataagcagtggccgaacatgcatcttggtttctgaagaagatgaagaagcgataattgtggagccttctaagcgcggaaagtactgtgtttgctttgacccattggatggctcgtccat

SEQ ID NO: 17113 - DNA, 423 bp, Glycine max
  Clone ID: LIB3106-109-Q1-K1-F10
gtcattcctgtggaaattacagtctacgacgataaaagctttactttcatattgaagaccccacctgcttcggttctacttcttaaagccgctggggtggaaaagggttcaaaagaccccaaggcggaaatggtaggaaaggtcacgattgatcaattgcgtacaattgctgctgaaaagctaccggacttgaattgctcgagtatcgaatcagctatgagaattatagcgggcactgcggcaaacatggggattgtggttgatcctcctgttcttgaacccaaacagaaggaatttgtgtagagaaatttcagtttggccgagtgtaaaatcgcgcaggacatatttactgacttgttttgtcttctaaacagcaagggaaaccagtctttttagttatttggtatttgcatgaatgatatt

SEQ ID NO: 17114 - DNA, 422 bp, Glycine max
  Clone ID: LIB3106-109-Q1-K1-F11
gttgttgtggctgatgatgaggtagatgatggtgctggtttaggtgaagaagagaaagtggaggagaatgaaggagaagtagttgcagaacaagactctgattcctctgccaccaagctttattttgggaatttgccttatagtgttgatagtgccaaacttgcagggctaattcaggattttggtagcgcagaactaattgaggttctttacgacagggatactggaaaaagtagaggctttgcatttgttacaatgagttgtattgaagactgtaatgcagtaatagaaaatcttgatggaaaagagttcctgggcagaaccttgagggtgaacttctctagcaaaccaaaaccaaaagaacccttgtaccctgaaactgaacacaagctttttgttgggaacctgtcatggtcagtaac

SEQ ID NO: 17115 - DNA, 419 bp, Glycine max
  Clone ID: LIB3106-109-Q1-K1-F12
aaaaaaagaagcatgaggggcaagtgtggaaattaaaagaaactggtgcgtcgaccacctcgtcattgcttcctttccattttcatttctcggtgttgttgttcttcatccatggcttttcctcagcaccacttccaacagcactaccaaacccaacagcaacaacagccacaaaacaaatccttcagaaatctgcaaacaatcgatggtcagatgtcacagcacgtggcgttttacaaccctactgatttgcaagatcaatcccaacatccaccctacattcctccatttcatgttgttgggtttgctccgggtcctgttcctcctgctgatggcagtgatggtggagtttatttgcaattgcaatggaattatggtttggagccagagaggaagagacttaaagaacacgatttttt

SEQ ID NO: 17116 - DNA, 430 bp, Glycine max
  Clone ID: LIB3106-109-Q1-K1-D8
ctgttaccaatggctccctcatcaaactacatttctttccttttcctcaccacccttttgtttgctcttcaaatcagtgcaagagacagccagttcttcagcaaagtcacccattttgacaaaaacagtgtcaaagagacagaacttcccaacaaagaagcaccagaagtgaacaagccagagcaacaaccacctttcattccggagactgaaaacagctatggcctatatggtcatcatgatgagtataaccaagtcccttccaccaccaccaaccccacttcttaccacccctacaagaccgagtttgagaactccaacaacaagtattacaacaatgatgcctataacacaaggttctccgaaaccggttacaacaacaacaaggattcttatgagggtaaccaatatgagttaagtgacacaaagt

SEQ ID NO: 17117 - DNA, 421 bp, Glycine max
  Clone ID: LIB3106-109-Q1-K1-C12
caaaaaccctttcgcttattttattatcgttttcctttctcccgagtgttctcctttcttgcttccttctccggccatctttatcctgatggcgtcgtctctgggaattgcttgcggtggaaacaacgccaaattagggatcccaaagcagcggtgtggttcggttcttcagccgccgtgctccctcgctatggggcgctcgacggcgagggtggggaggatcacggcggcgatggccacggccacggcggtgatgaccacggccacggcgaaggagcaagagactaccactccgatgatgatggcaatggagctgttcgggaaacgcgatggaggagccaaaaacgacgctgttgagggacaggagaggctggacaggtggatgagagagtcggtggtggagatcgtgaagaattgaaag

SEQ ID NO: 17118 - DNA, 402 bp, Glycine max
  Clone ID: LIB3106-109-Q1-K1-C2
atttatatctagggccgggtatatgttattgaccgtgtaaacgtagccgatatatgcttggggttttatgaatacgcttttgttaataattgtaccgcgtcatcaaaagaaagagaaagggcaattaatgcatcaaaaacatttgaaccaactaatcctttctgccgagttgtcctgcgaccctcctatttgtataggggatgcataatgtatctgccttcctgctttgctgaaaagaatttgaatggggtttcgggattcatcaaactttagttgtccaacggtagacagtggtctgttcgctgcctctataggggaggtcgagccaagttaatccaatgttggtttgaattcacagtggagaacaatttgggagaaggtgacgtctgtttgtttgagctc

SEQ ID NO: 17119 - DNA, 354 bp, Glycine max
  Clone ID: LIB3106-109-Q1-K1-C3
atttttcacaccaccaacacaagatgtttctgcacattgagttcctccttttccttctctcatccacttaccatgccactggccaagacttctgtgtggcaaacctcaaaggtgcagacacccctgcaggctacccctgcaagccacctgctaatgtcacttcagatgactttgtgtacactggcttagctgaagctggcaatgtcacaaacataatcaatgctgctgggaccccagcttttgttgctcaattcccaggtctcaatggccctggactatctgcagcaaggttggaccttggtcctagtggtgttataccactccacactcatcccggtgccaatgaactactca

SEQ ID NO: 17120 - DNA, 429 bp, Glycine max
  Clone ID: LIB3106-109-Q1-K1-C4
ggctgtggacgtaaaataatggctctgtcttttggttttgggctcttgtcttcttcttcttcttcttcttctttatgtgttgtccctccatcagaaacccacactttcatgatgaggccttctgcttcttctggtttgcgcatgatgcgtaccagtcgcattacctgttgcaccctttctcagtcttctaagccagcccgcaaaatccgtggtatcatgaaaccccgcaaagtctcccccgagatggaagacctcgtcggcgctcccgagatggctcgaacccaagtcctcaaacggatttgggcttacattaatgacaacaatcttcatgaccctacagacaagaggactataaattgtgatgagaagctgaagaaggtgtttgcagggaaagatcaagttgagatgctagagattgctcgcttgatt

SEQ ID NO: 17121 - DNA, 434 bp, Glycine max
  Clone ID: LIB3106-109-Q1-K1-C5
cccacgcgtccgcccacgcgtccggtccttgttttcttcgttgctacaattttggtagcatggcaatgccatgcgtacgatatgttccctctccgaatgaacactggctatggtgcccgtactccggaggtgaaatgcgcaagttggaggcttgctgtggaagcacacaacatctttggctttgagaccattcctgaagagtgcgttgaagcaacaaaggaatacatccatggcgaacaatatagatcagactccaaaacagttaaccaacaagcttacttttatgccagagacctcgaagtccatcccaaggacacatttgtgttcagtatagatggcaccgtactctctaatattccatactacaaaaaacatggatatggggtggagaaatttaactcgaccttgtatgatgaatgggttaacaagggcaa

SEQ ID NO: 17122 - DNA, 217 bp, Glycine max
  Clone ID: LIB3106-109-Q1-K1-C6
atctcttattatagccaccgataaagaatgttttaattcagaacagctattcttcaagcaagaagccatcatgggggattagagctccagtccaggatgcccgctaaccaatactgggcttcccacttaaaatcggtgacaaaacattcaagtacttttaaattcccatagtaattatcactagcaaaacactgcggaagaagggcataaaccttca

SEQ ID NO: 17123 - DNA, 426 bp, Glycine max
  Clone ID: LIB3106-109-Q1-K1-C7
aaagatatcacataggcatatggcttccaccttttgttgctcggacgaccatgctgtgcaccatcacagccagatactcatcacatcacatcatggttagcaccaatccttaccagcttctttgagaggcacaaaacacagaggatattgatgtcagcccaatctctcaccggattgctctaaccgtgctcattggtgctgctgctgttagctacaaagttcaacctgctgatgcagcttatggagaaaccggcaatgatgttagttaaggctattacaaacacatatttcctgccatacaatggagatggattcaaactatcaattcgctcatagtggaacccaagcatataggtttaatacacaagtcaggttgttagatatgaggataactttgattcaaccaccaacgtggttgtcaacatc

SEQ ID NO: 17124 - DNA, 344 bp, Glycine max
  Clone ID: LIB3106-109-Q1-K1-C8
ggagaagctaatggcttcctcaatgatctctttcccactcttgggactgtaaaccgggccggtggcggcatggttgctccattcactggcctcaagtccatgggtggcttcccgacccgaaagaccaacaatgacattaccttcattgctagcaacgggggaagagtgcaatgcatgcaggtgtggccaccacttggcaagaagaagttggagactctttcctacctgccagaccttgatgatgcacaattggcaaaggaagtcgaataccttcttatgaagggatggattccttgcttggaattcgagttgcaacaccagctccatgttccgtgagcacaaca

SEQ ID NO: 17125 - DNA, 365 bp, Glycine max
  Clone ID: LIB3106-109-Q1-K1-D1
accgcgcgctcgaccatgtgttggtaactgggtagtttactagtggttgtataatccagaggcttgttctcgtgctcgaattgcgactttattagggtcagctgcttgctgaatgagttacagattgagtaaaaattagtgctgaaatgctgtttgataggcagaacaaccaaaataactgcctaaatttctacggacccatctatagtcacacctatggaaaatgaccaggatgaaagcatgcattcaagagcacatgcaggagcatttgaggctgcatttaatgcagacataagtagagacacttgaactgatactctgtcttgttcagacacaggatgcaacacttgattgagccagtcatt

SEQ ID NO: 17126 - DNA, 365 bp, Glycine max
  Clone ID: LIB3106-109-Q1-K1-D10
cccacgcgtccggcacgtacgaagcaaactgctcgtaagtccacaggaggaaaggcacctaggaagcagctcgcaaccaaggctgcacgtaagtctgcaccaactactggtggtgtgaagaagccacatcgttatcgtcctggtaccgttgctcttcgtgagattaggaaataccagaagagtaccgagcttttgatcaggaagctccccttccagaggctggttcgtgaaattgctcaggacttcaagactgatctgcgtttccagagccatgctgtgcttgcattgcaagaagctgctgaggcataccttgttggactctttgaggatactaatctgtgtgccattcacgctaagcgtgttac

SEQ ID NO: 17127 - DNA, 375 bp, Glycine max
  Clone ID: LIB3106-109-Q1-K1-D11
tcaaatcactatcttcttaaaaaaaaaaaattaaaaaaaaaaaaaaaggaacaaacgcaaggatgaagggaaaaaaaataatagggggggcccccctaaaaagatcctaacttaccgacgcattaaaacaacggggctgccgcttttatttgcaccaacttaactgaataatcctgccgccctttaacattttttctactggaaaaaaaattgaattttcccaactgatttttctatcaaaaaaaccgccaaaacccagttgttacaaaaacaaaaagccctgaaacaaattcccttctcaccatgtggggaaatcaaaaagagaacgggactcaccttctatcccaacattatcccctcctttttgggtattta

SEQ ID NO: 17128 - DNA, 440 bp, Glycine max
  Clone ID: LIB3106-109-Q1-K1-D2
ggagtctctcccaaaaattcgtcattctcacatctcactcaatcactcactacttcaacgaggttctcagtgccatcgttcgtcatttccgacacccttctcttccctctctccaccactccctccattctctcctatcagagtctcatcttcaccatcaccgtgacccaaaccccaaaaccccttaaccctaaaccttcttctccctgctctcgtcaaacccacctgcatcgccatagccgcgaccgcattcttcttcatgcgcctacactctgcccccgttgcattcgcatcgacgccggtcgctccaccggaatccgccgagtcggaaactctacccaacgaaagcgccactgaggagcaacttcgcaccaccgacaccgacgcgcttgaatcgctccttcaaaccaagatcagagccctcgaaatcaacgaagcga

SEQ ID NO: 17129 - DNA, 267 bp, Glycine max
  Clone ID: LIB3106-109-Q1-K1-D3
cccacgcgtacggttcgattcagatttcatttaaaataaaattcaaatcataccacgtttgggttattaaaaacgaggatgtgcataattaaacaacgagactcatccctatattgaacactcccttcatttattcctatgacagactcatagataactgataatggggacccatacgcgtaaaccggtttaccctaaaccttctttgtccttctcttatttaatcctgctgcatcttcttattctgttgcgcaatctttattattc

SEQ ID NO: 17130 - DNA, 414 bp, Glycine max
  Clone ID: LIB3106-109-Q1-K1-D4
cccacgcgtccgaaatgggtgtagtggcaccttactcttgtggtacatgtcttccttcccttgaacgcctttcaaccctgcctgcccaaaaatggaacaacttctcatcacctcttagttgccaccgtcaagtgaaatgtgctgtccaagtacaaccacaagtagcaccacgaattacacctgatgagagcctgcacgtgaagagaagaactctcatatgccacctagcatttgattgctgcctagcttattcttcattgcaagcagcaccaactgctgaaaatccgtgtgaattacaagtgtcaccttaaggcattgccttctgtgacaaacttgtgggagctggtcctcaatcagagaatggacagcttattaaagcgcattatctggggagactggagaatgggaaagttt

SEQ ID NO: 17131 - DNA, 438 bp, Glycine max
  Clone ID: LIB3106-109-Q1-K1-D5
ctctgccactgccataactcactcactagcttcttctctgttctcaccaatggcatcaacaatatcagcaatggccatgatcaacgccaaatgcgtcaacccaaagttccccaatcccaccaagctcgcaccatcaaaaccctcccttcagatcaaccttccaaagggcctcatagcctcacccgaaagcactaaactttcccccgcgacagcaatcgcaggagcaatattcacaaccctcggaacctgcgacgccgcattcgctgttcaacaaatagccgacatagcagaaggcgacaaccgcggactggcactgttgctgcccataatcccagcaatagggtgggttctgttcaacattctgcagccggcgctgaaccagctgaaccgaatgcgcagcaccaaaggcgtgatcattggcttggggcttggcggctt

SEQ ID NO: 17132 - DNA, 411 bp, Glycine max
  Clone ID: LIB3106-109-Q1-K1-C10
gcagcaactccactcaattgtatgcattgatccatggctagatacattaatattgtacttttgggaatagtgttggtagtggtgagattgaaaggtgcagaggcacagcgggcgttctttgtgtttggggattctcttgtggataatgggaacaacaactttttggcaactacagctcgagcagatgctccttcttatggcattgattacccaaccggtagacccactggccggttctctaatggctacaacattcctgacttcattagtcaatcacttggggccgaatccacattgccttatttagatcccgagctcgacggggaaagattgcttgttggtgccaactttgcttctgctggtattggaattctcaatgacactggaattcattttgttacttaatccgaa

SEQ ID NO: 17133 - DNA, 430 bp, Glycine max
  unsure at all n locations
  Clone ID: LIB3106-109-Q1-K1-D6
cttggcatttccgcagcacgtttggacttatcagcaggtggagttataccacttcacactcatcctggagcttcagaattacttgttgtaattgaagggagcatcctagctggattcatttcttctgccaacattgtctacctcaaaactcttaagaagggggatgttatggcattccctcaaggcttgcttcatttccaaatcaatgcaggcaaatcttcagccctggcaattgtaagcttcagtagctccaatcctggtctacaaattctggacttcgctttgttcaaaagtagcttccccacaccattgatagtacaaaccactttccttgatgctgctctggtgaagaagcttaagggtgtacttggaggctcangctaaaccatgggaagttatccatgaaagagactgaagtcaagcaagcata

SEQ ID NO: 17134 - DNA, 438 bp, Glycine max
  Clone ID: LIB3106-109-Q1-K1-A4
tcgtccacgcgtccgctttctctcgtttcaatcgaaaaaaatcatgggcagaaaattcttcgtgggtggcaactggaaatgcaatgggaccactgaggaggtgaagaagattgttactactttaaatgaagctaaagtccctggagaagatgttgtagaagttgttgtgagccctccttttgtgttccttccttttgtaaaaagtttgctgcgccctgatttccatgtctcggcccaaaattgttgggttcgcaaaggtggtgcttatactggagaggttagtgctgaaatgcttgttaatttgggaattccttgggttattattggtcactctgaacggaggcagcttttgaatgaatcaaatgagtttgtgggagataaagttgcctatgcacttcaacaaggtctgaaagttatagcatgcattggggaaactct

SEQ ID NO: 17135 - DNA, 433 bp, Glycine max
  Clone ID: LIB3106-109-Q1-K1-A5
cccacgcgtccgtaatgccctgaaagcaaagcaaaacaaagcaaaagctctagcttctgctcatcatcataaagacaccattcagactcttccctccatttttttttaacaaagttggccatgaataccataaccctcttgcttctttttcccttttttactcagtttttggaagttgagcctgcaagaaccaagcttcctgggaaaaccaggttccccatctcacaaatcagtgttatgggttttgtgtattgtgatttctgctccaacagcagcttttccagacacagctacttcttgccaggtgctgaggtcaaagtagattgcatgttcaaagcactttcagagaaaacttctgagcagatttcactttcagtgaacagaactaccaataagtatgggatgtacaagctggaaatcccttcagtggatg

SEQ ID NO: 17136 - DNA, 319 bp, Glycine max
  Clone ID: LIB3106-109-Q1-K1-A8
gtacgcctgcatggaccgctgctgcattgccggttccgacccacgcgtcccgggaagactacactcgtacgcgcagttggatgaattgcatacagatcaatgggcgcttccatctgggctccgtcactggcgctgcaccagcgatgacttgaactgttgcatcccatgtgatacgcgctatctatcctgggactgcgtcgtgactcatagctttggtttggggggccatgcacagaaagacctcgcccgatcagtagcaaaagatatatatgaccacgggacgcctgatatagatcttgatctagatgcgccacccttc

SEQ ID NO: 17137 - DNA, 334 bp, Glycine max
  Clone ID: LIB3106-109-Q1-K1-A9
ggcacgccgtacgcagttggcaacagtgcactcatacccggaccaatggctatcaagttctagttttgaggaccaaggctcattgttaggccgttggctggatgagcacatccaagatgcacagaacacccttcacaagccacttgtattcgcggagtttgggatttccacaaagagttatggtggcaactcaacaccaagggatcggttattcaacacagtatattctgcaatatactcatcaacaagcagtggcggggctgctgttggtggcttgttttggcaacttatggttcaaggaatggattcttatcgagacggttacgaaagtgtc

SEQ ID NO: 17138 - DNA, 405 bp, Glycine max
  Clone ID: LIB3106-109-Q1-K1-B1
agtttacaaacatttggaatgtgactttggcgaaagcaaatgtcattctcccagcagcataatgcatatgtttcaaagctcgcttttctgcttgcaaccccagggtgattcatacacgcgaagatctgcttttgattcaatgctggctggttgtatacctgtcttcttccatccaggctcagcatatacacagtatacttggcatcttcccaagaatttcacaaagtattctgtcttcattcccgaggatgatattcgtaagaggaatatcagtatagaggaaaggcttagtcagataccccctgagcaagtgaagatcatgagagaagaggtcattagtctcattccaagactagtgtatgctgatcctcgctccaaattagaaactcttatagatgcatttga

SEQ ID NO: 17139 - DNA, 414 bp, Glycine max
  Clone ID: LIB3106-109-Q1-K1-B10
cccacgcgtccggcataataggttatttgaagatttggtgtaatggggttcattcagctgctttctgttgcctctttcccggtgataaaagtgttgctggttactgcaattggcttgtttcttgcactggatgacatatcaatattgggagaagattcaaggaagaaagtgaatcagcttgtgttttatgtgtttaatccgtcgcttgtgggtagcaatctggccaaaacgataacttttgagagtattgttcagttgtggttcatgccgttgaatattctttgcacattcatactaggctcggccttgggatggattttgattaaaatgacaaggcctccgaaacacatggaaggtttaatcttggggtgctgttctgctggaaatttatggaacttgcttatagtcattatt

SEQ ID NO: 17140 - DNA, 425 bp, Glycine max
  Clone ID: LIB3106-109-Q1-K1-B12
ctgacgcgtgggcggacgcgtggggttggaggggttcatagatttagggaatcgattactatactagtaataaattgtacaaaaaataaaaatataaataatataaatataaaaagaacaaacacaaattttatgtgattagtcgcggtatttaaaataaaaaatgaaagtagacaaataaaaaaggaaaggagatgtttgaataaaaataattccccttcaagttcttattttttgagaggacaggacaatatgaatgttttattatgctctatcaacacattaaaaagattatatgatatatctgctgtggaagtaggtcaacatttctattggcaaatagggagtttccaagtacatgcccaagtacttattacttcttgggttggaattgctctcttattggtttcagccattctaattat

SEQ ID NO: 17141 - DNA, 285 bp, Glycine max
  Clone ID: LIB3106-109-Q1-K1-B2
tcgcgcacgcgtccgacgatcgcatggaaactagctggatcaaatcagtgctctatattgcaggctgttcaagtacacacccctccggaagttctgcttaaaggaaagccaataactacgttcttcttcaagggcaagtcatattttcgtagaaaaccgatgccggcaaccgggcttgaagggttgcggcaaaagcctctagtagaagacaaacccttgattttatggaacccttattgtggaagggtgaaccaattttcagaatctggcaccccatttccctac

SEQ ID NO: 17142 - DNA, 183 bp, Glycine max
  Clone ID: LIB3106-109-Q1-K1-B3
acctccacgcgtacggcataatgacattgacaatacgtacatgatatcacatgagaatctatggcatatatgggaagcacgggggatgacgatgacgaagatagagctgcgtgctcacaaatgatagggctgcttggcagtgaacttgacctcactaggactaacattcttaccaatagacct

SEQ ID NO: 17143 - DNA, 284 bp, Glycine max
  Clone ID: LIB3106-109-Q1-K1-B4
gcctcgcaagcaaggatcttctgacaacttatatgatcatttgctttctttctatagcaggcattacatattccaggggctcatgccaaccagatgagggcaaagctacctatatccttctcattattcctcaagccacatcctttacgatatcatttccccaaatcctggctagaatctaatactccacaactaatggttgaagacaggccattcattatattgaaaccttatactggaactacaaaccattctttcacatctcacatgccattttcttacat

SEQ ID NO: 17144 - DNA, 343 bp, Glycine max
  Clone ID: LIB3106-109-Q1-K1-B7
gcgggtagaaaaaaaaaaaaggcaaggccattcttgacggttgctggtgcttattaacatagagctgggcttgttccttgcaaaatcaacattgattaatacacacaacgatctggggagtgactaatagcaggcctgggagaatagctaactccttacatgctagctgaggatatacacactctacgctgtatttaatccaagaatttcacatgaaatattgccttcattgccaaacaggattcccataaaacgaatatcagtgtccaggacaagcctaacaacatcccctctgagcaagaaagattcatgatacaagactatacttatctgattgcatgac

SEQ ID NO: 17145 - DNA, 417 bp, Glycine max
  unsure at all n locations
  Clone ID: LIB3106-109-Q1-K1-B8
tcgcccacgcgtacgaggattgcatggaaactagctggatcaaatcagtgctctatatgcatgctttncaagtggcacccctggtgaagttctgcttagaggaaagccaataacttaagttcttcttcaagggcaagtcagattttgtaagaaaaccgataccggtaaccgggctagaggggttgcggcaaaagctgctggtagaagacagccccttgattttatggagcccttatggtggaaggatgaaccaattttcagaatctgacaccccatttccttacagaaatggaactctgttcataagtctgtacatctctctttggcaagagggagagaagaatgttgcaaagcacatagattggattggaaaccttcacaactacatggggggcttatgtgcctagtttcccaaga

SEQ ID NO: 17146 - DNA, 384 bp, Glycine max
  Clone ID: LIB3106-109-Q1-K1-B9
gctacctaaaacccttgctcctgtgtcaaattgacatacagccacctcacttctgcaactgattacctttaccggattcttgggccagacactatagggtaccggtgcctaaactctgtattcattattcctaaagccactggcttttcattctatattccttcaaagcaatggcagcatctaaaggacccaatagaaaggttcaagcaagggctttcatgaaggagaaaattgtgacaagcctcacagcatctgccttcacaaacttaatgattgctcctgatgaggccgaggccgacatttcgccttatcttaagaacttcttgatcagcatctccgccggtggtgtagatgttgcttccattatcgaaacagtggttcggg

SEQ ID NO: 17147 - DNA, 431 bp, Glycine max
  Clone ID: LIB3106-109-Q1-K1-A3
tcggccacttcctattagaaccctcgatcactgccacgcgctcctatatcctctccttcaccggcgctctctccaacgatcacaacaacatcgccctcccatggcaaacgccgcatctggtatgggagtccatgatgactgcaagttaaggtttttggagctgaagacaaagaggacacaccgattcatagatcgtaagattgacgagcagcagaagcaggtcattgtggagaagcttggtgagccagcccaaggctatgaagatgtcactgccagccttgctgctgatgagtgccgttatgctgctcatgatcttgagtatctgactgaagggaacgtccctaaaagcagaattcttttcattgcatggtcccctgacacatcaagggtgaggagcaagatgatctatgcaagctccaaagacagattca

SEQ ID NO: 17148 - DNA, 410 bp, Glycine max
  Clone ID: LIB3106-109-Q1-K1-C1
gctacctgaaacccttggtcgtctgccaaaggggcatcaggcaaccacattacttgaactcatgacaatcagggcatttcacagcaagatacttcgttgttacagccttggaacagctattggttttcgaatacggcgaggtgtattaacagatattcctgccattctagtgttcgtttccaggaaagttcacaagcagtggctcagtccaatccagtgtctacctactgctcttgaggttcttggagttgtccaaattgaacctgcttgatttaattttggagtttgaaatatttatatatcacaaacaggtttaagttgttatctggtgcctaagatgcatttaaaatcaatgttcaatttgtgaatcaagggcctggtggagtatggtgtgatgtggatgtggtgga

SEQ ID NO: 17149 - DNA, 337 bp, Glycine max
  Clone ID: LIB3106-108-Q1-K1-G8
aatccgcaaaaagctcagtgcaacgcaatcaggaagaaccaatgaatcctgtggagagtatgcagatgggttaatggaacttgtgaagagagaatatcaggccattatctgggtctgaattaaacaaaagattggtaacgtacttacgtggagtattatcacaagaacaggatggtaagaaataaagttaaaagaatgaaactattgatgatgaatgcactgaatcaaaattacattatctcagtctatgacacacctaaggttataattccgaaggtgcggggaatatagacttagattaatgcgaccattaagtaatattggtgatgactttgaa

SEQ ID NO: 17150 - DNA, 400 bp, Glycine max
  Clone ID: LIB3106-108-Q1-K1-H10
gtccagcaacgcgggcgcgagcaacgcgttcgcccaggcgtccgcacaattcttcttcgacaggagctgacatcctgtgcttcgatggccaccgcgcaactacaatgcctaacccttgatcgctcctacgcactcccttccgccaccttctcccctccgatcgccctctccggccgccggaactccgccgcgctgccgcgctacgcctgcctccgactccgacccgccgccgagacctgttttccgactcgcgccgccttgagaaccgctcctcgcggcggaggcgtcaagtgcgaggcaggagacaccgccgttgaagtggctcctattactgatgcacattggcaatcacttgtgcttgaatctgagtctccagtattggttgaattctgggctccat

SEQ ID NO: 17151 - DNA, 358 bp, Glycine max
  Clone ID: LIB3106-108-Q1-K1-H11
cccacgcgtccgcccacgcgtccgcactatagcaatagaaacatttgcttttgaaaaacccctcactcttcatcactacactagctagccacatacaatgtcgaccaaatttaaggtgtttcgtgaattcacaagcgatgactcattcctaaaccaagttatccctgaaaacatcaccgaattccaagtgactctgtccctcgctagagactacgatggcaacaactcaaccaacggaaagttcattccttactgtgacactgaaaaggtcactcccgaagtgataaaaaaattcaagaaaaaatacgaacccaccgcactgagggttaaggttctcgtcagcattggaaacaaaaac

SEQ ID NO: 17152 - DNA, 395 bp, Glycine max
  Clone ID: LIB3106-108-Q1-K1-H12
gtggagttctggatttgtttggtgctgaccctttttggttatatacctggaattatctatggtgtctattctatcaccaagtgagcgtcaccctttaacttttgtggacaataaacaaatgtcatgggcgcttctgtctttcaactcagatattactgcttcttcaatctatccgtgtcaatgttgccattttcttttgttctgcttttaaaaacccttctgtttttagcttaagcgagagtggagtgtgtagcttgctagcttgtgcatgtagtctctagatttggtaatcgacttgaaatacacaattttatttgtatcaacggtcttgttcatgtatcttatgtaaattgtactattcattactttcaaataataaatcggatttaattctt

SEQ ID NO: 17153 - DNA, 438 bp, Glycine max
  Clone ID: LIB3106-108-Q1-K1-H2
attggaagaaagagaaatggaggagactctttctctcagtctcatccacgtaaacaactcattggttttcaccaatagactacacatcatcctccatttcactgctctatgtttcttggtttactacaggctttgcttcttctttcagaatccacaaaccagacgaggaactactttgttcccttggcttcttgtttttgcctctgaaatcattctctccttcatttggattcttggtcaaggtttccgctggcaccccatttcaagaactgtgtttcctgaaaggttaccacaggatgacaagctccctctcattgatgttttcatatgcactgcagacccaactaaggaaccaactttggatgttatgaacactttgctatcagccatggcgcttgattacccgccagagaagctgcatgtgtatggttctgatga

SEQ ID NO: 17154 - DNA, 211 bp, Glycine max
  Clone ID: LIB3106-108-Q1-K1-H3
atgagagtacgtcgcttacctacataaggactatgtacattgctggtgcctgacagttgctcggattgctagatgtgtggatgataacacatctcattagagcgctctttatgccctcacgcatgtcatgaacaaatgatcgatgcccatgacatagcgcctactagcgacggaaactatcctgtccaagggatatccattgtgtagatgc

SEQ ID NO: 17155 - DNA, 469 bp, Glycine max
  Clone ID: LIB3106-108-Q1-K1-H4
gagagagagagagaagtgcagaaaaaatgagactgttcgatccatggtgttttcttcaagagagaatggaagcggaattggcccttcttggttggattcgccatcaccggaactctcatcaccaaactttcccttggtctctctgaggaggaagccaaaaagtcgaaattcgtccaggcacacaagaggtgactttagaatggaagatttgcagtggctttgcacattggattagatgtgtgaagagagcttttggttggaataaatgaagagagatgttggatacactccatgttcctatttccattttggttgcttactttaatgtgattgagaaattcatactaagcagttctgaatcgatggattcacattatgattactttaatctgataattaatggggacttgggaatttgttttgcaataatgccaaattgctaacctaataaaatcgtagttaatcatgt

SEQ ID NO: 17156 - DNA, 404 bp, Glycine max
  Clone ID: LIB3106-108-Q1-K1-H5
ctcctatctccggagttaaaggagataagagaatttcaaaatacaatatactatatggaactgtaatggcatgtcctcatgttactgcagcagctgtttacatcaaatcatttcatcccaactggtctcctgcagtgattaaatccgcattaatgacaactgctactccaatgcgtgatatacttaatcatggaaatgctgaatttggttatggtgctgggcaaatcaatcctatgaaggcagtaaaacctggattagtttacgatgctactgaaattgattaatgtcaagtttctggggtggagatggttatagtggatttatggacaaaattacaggagataattaaaccacttgtacaccagcaaatacaggaagtgttttggaccttaatctcccatctt

SEQ ID NO: 17157 - DNA, 340 bp, Glycine max
  unsure at all n locations
  Clone ID: LIB3106-108-Q1-K1-H6
cccacgcgtccgctcaacttcagttcaagagaaaactatgccatccaaaagggtctttctacgtctcggcatcgagcaccaagaaaatcctaataatgggaggcaccaggtttattggtgtgtttttatctaggctccttgttaaagagggtcaccaggtgactttattcacaagaggtaaagcgcctgtcactcaacagttgccaggtgaatcagacaatgattatgctgatttttcttccaagatcttgcatttgaaaggagacaggaaggactntgactttgtaaaatccagtctctcggcagaaggatttgatggttgttatgacataaaatggac

SEQ ID NO: 17158 - DNA, 348 bp, Glycine max
  Clone ID: LIB3106-108-Q1-K1-H7
ctctttgttcctaaacacggggcactggtttcgaaccctcgttgtgggtaggtcttcttcagctttcgaattttggaatccatgggtcagggaactccgggcggcatgaaccggcagggcgaccggaagccggacggcggcgacaagaaggagaagaagttcgagccgtcggctccgtcggcgcgcgtggggcggaaacagcggaagcagaaaggtccggaggcggcggcgcggttgccgacagtgactccggtgacgaagtgcaaactgcggcttctgaagctggagcggatcaaggactaccttctgatggaggaggagttcgtggcgaatcaggagcgactcaag

SEQ ID NO: 17159 - DNA, 417 bp, Glycine max
  Clone ID: LIB3106-108-Q1-K1-H8
tccacgcgtccggcttttcatcaccggcaagtgcatcctcctagccgactgcaaggtcttgcacaaggttgacaacatcgccgaggttccttacattttcgacatgaacgtcggcacctcaagattgtggttattgtcaaagataacatatcgttttggaagaaggtggatgtcatggaattgagtcatgcaatgtcatggaaagatgttgattcaagtctgatgccacacctattatgagctcctcaagtgtttcttggctcagacttgtaaccttctcgttgaaatggataccactccgaaacatttttaaccattcgcccttatcaatttgtatgccaaattgaaccttttggaagaagcacgaacactgtttgataaaatgtctgaaataaacctcttggcttatggcttttc

SEQ ID NO: 17160 - DNA, 278 bp, Glycine max
  Clone ID: LIB3106-108-Q1-K1-H9
acgcgtaaatgacttcaagggcaacgatggttctgactatattaccttgttagcctcagatgtcatgggtgttctctcctagaacaacttgctttgggttgtgaaacttgaaatttctgtgtttatctcgagaaaacgtggattcttttaatcgtaaggacttttgaaaaattttattgcaatctgttccgttatactaaaacttacgatcctattgtaatggctgttcaattgactgaagtgaccttacctttaccgattatttacagacctaccag

SEQ ID NO: 17161 - DNA, 75 bp, Glycine max
  Clone ID: LIB3106-109-Q1-K1-A1
acataattgatgtggtgttattcaaaaaaatttttaataaaaaaaaaataaaaaaatataaggtggaaaaataaa

SEQ ID NO: 17162 - DNA, 416 bp, Glycine max
  Clone ID: LIB3106-109-Q1-K1-A10
aatgccatgcgttcgatatgttccctctcctaatgaacactggctatggtgcccgtactccggaggtgaaatgcgcaagttggaggcttgctgtggaagcacacaacatctttggctttgagaccattcctgaagagtgcgttgaagcaacaaaggaatacattcatggcgaacaatatagatcagactccaaaacagttaaccaacaagcttacttttatgccagagacctcgaagtccatcccaaggacacatttgtgttcagtatagatggcaccgtactctctaatatttcatactacaaaaaacatggatatggggtggagaaatttaactcgaccttgtatgatgaatgggttaacaagggcaatgcaccggcactgcccgagactcttaagaattacaacaagcttgtg

SEQ ID NO: 17163 - DNA, 421 bp, Glycine max
  Clone ID: LIB3106-109-Q1-K1-A11
caccgttttcttcaatccttcattcgttccaatggcgctagggtttcatctcaattagaggcaccgaacgctccaaacggaaccatgaatctctcgttggcagctccttcggcatttcgcgggaatctcctcgttcctctgtcgcgctgcacctcttgcttcaaacttgatctccgttttcagcattccgacggttttcgccattcgcgttgtcgtcggagtttgttcaagctgattcgggatccgagatcgagcaggaggagagggattgcttgtagtgttaccgagccagataacggtagcgacgagaaggagaaagaagcagataaaaatggagaaacgctacgtgtggaagattcctctgagcaaaatatccctccacctgtagatgcagaacaactaaatgagtttagtgatgaaa

SEQ ID NO: 17164 - DNA, 409 bp, Glycine max
  Clone ID: LIB3106-109-Q1-K1-A12
ctcggagatgaagaagggcttgatgcatagctatggcgttgctgtgattgtgttggctttgagtttgtgtttgggttcatcatcggagcaattaagttcacgagaatgcgagaatctcggtttcaccggactcgccttgtgctccgactgcaacactctctccgagtacgtcaaggacaaagagttggtatcggattgtttcaagtgttgcaccgaagactccaacgatgccactaccaaggttacttactctggagctgtgttggaagtctgcatgaggaaacttgttttctatcctgaagttgtaagctttattgaagatgaaaaagatcaatttccatcagttaaagttcaatatgtttttaactctccaccaaagctaattatgctggatgatgcgggtcagcaa

SEQ ID NO: 17165 - DNA, 411 bp, Glycine max
  Clone ID: LIB3106-109-Q1-K1-A2
gctcactcttcttatcttgcagctaggattttagcgcatcttcttgtacacctaacgaagatgtgtaacgaaaaggcacacatcagtattccggttattggccatgtcgtctcttgcaagtgcactaccactgaccacctgatctacatgcttggccgcatcgacaagccgcttatcgagagatttgaaaaagaatctgctgacatgaacaagatgtctttcaagtttgcctgagtgcttgataagctcaaagctgagcgtgaaagaggaatcacagttgatattgacttgtggaagttcgaaaccaccaagtactattgcacagtcattgatgcccctggacacagggatttcatcaagaacatgatcactgagacatcccaagctgactgtgctgttcttatcattgat

SEQ ID NO: 17166 - DNA, 465 bp, Glycine max
  Clone ID: LIB3106-108-Q1-K1-G7
tcgcccacgcgtccggctcatccctagtaagccgtaatggtgaagtactcaagggagcctgacaatccaactaagtcttgcaaggctagaggcgccgaccttagggttcattttaagaacacaagggaaactgcctttgcaatcaggaagttgcccttggtcaaggctaaaaggtacttggaagatgttcttgcccacaagcaggcaattccattcagacgtttttgtcgacgtgttggaaggacagcccaggctaagaatagacactctaatggccaaggacggtggcctgtcaagtcagcaaaattcattcttgatttgctcaaaaatgctgagagcaatgctgaagtgaaagggttgggatgttgatgcactgtacatttcgcatatccacagtaatcaagcacagaagcatagacgtccgacataccgagcccatggaagaatcaatccttatatgtcatc

SEQ ID NO: 17167 - DNA, 424 bp, Glycine max
  Clone ID: LIB3106-108-Q1-K1-F11
aacacacaacagattaggattacgtaccatttccttgatcctttttctgactcttactaaaagtctaagctcaactgcatttgatgtcagtgaatatgaagattgggagagcgttgatacagcagattctatcttaagttatggaagtgaattgggagacatggaagaaaatgaatggcagatggtgcaaacgaaaggaaaccaatttgtggtgaacgaccaacctttctatgtcaatggattcaacacatactggttgatggtatttgctgctgatgagtccacacgagggaaggtcactgaggtgttcaaacatgcatcctctgtgggtatgtcagtttgtaggacttgggccctcaatgatggccaatggcgtgctcttcagaaatctccttcagttaatgatgaagacgtatccaaggcc

SEQ ID NO: 17168 - DNA, 383 bp, Glycine max
  Clone ID: LIB3106-108-Q1-K1-F12
acggtataaaatgggcatgctctttctgccgtctgcatgcttacaataaacagaggaacaaggttcgtacctacagcggcttctgacggaatacctcaaaggcattgaaactagagcagacgatattgttcaagtgctccaggggagaccacaataacattttcttctaactcgaaattggcttgtcgattggatgtcatgagccaaaacattgttctgcatgatggtagaagtggttcattatctgaagaacagatcatgctaatacactaaggtggagaaatatagatcatcatatcttcaacaggcagccttactcacgcggatcggaagattggctttgacaatacttcacgcaacagattaagtaatatatctcctga

SEQ ID NO: 17169 - DNA, 269 bp, Glycine max
  Clone ID: LIB3106-108-Q1-K1-F3
tcgaaaaaaaaaaaatgtaatgaaaaaagaaaaaattaaaaaaaaaaaaatataaaaaaaaaaaaaaaggaaaaaaaaaaagggaaatatgaaaaaataaaaagggaaaaaaaaaaaaaaaaaaaaaaaaaaaaaaaaaaaaaaaaaataaaaaaaagggcgtaaaatatgggggctcaattagttattccgaatcttaaaaacatgaatacaaatcataatagacctcctaattaaaacccaaaggttcccattttttacaacctttt

SEQ ID NO: 17170 - DNA, 389 bp, Glycine max
  Clone ID: LIB3106-108-Q1-K1-F4
tcgtccacgcgttcggaaacggtcaaacatatggaacttctcgtcaaggtgagcttgcaggatcacaaggggcatattctcaattgcgttctggcaccgttcctgtagggttttatacattgcagagggagaacatatttcctgagagacctggtcagcccgaatgccaattctacatgaagacaggagattgtaagtttggcgcagtctgtcggttccaccacccacaagagaggctagttcctgctcctaactgtgtcttgagtcccataggccttcctttacgtcctggagaacctttgtgtgtcttctattctcgttatggcatatgcaaatttggcccaagttgcaagtttgaccacccaatggaaattttctctcataatatc

SEQ ID NO: 17171 - DNA, 470 bp, Glycine max
  Clone ID: LIB3106-108-Q1-K1-F5
gagtgatttcagtgagtgatcggtgttcacttgatctcatcataatcgtcagcgtcaattgaagaagatgccgatcagaaacatcgccgtcggaaggcctgaagaggcgactcaccccgacacgttgaaggcggctttggctgagttcatctcaaccttcatcttcgtgttcgccggctcaggctccggcatcgcctacaacaagctcaccgacaacggcgctgccacccctgccggcctcatctccgccttcatcgcccatgcattcgccctcttcgtcgccgtctccgtcggcgccaacatcttccggcggccacgtcaaaccccgccgtcacccttcggctgccttcgtcggcggcaacatcacctttcttcgcggcatcgtctacgtcatcgcccagctcctcggctccatcgtcgcctccctcctcctggccttcgtcaccgccttcactgttccagcattcgga

SEQ ID NO: 17172 - DNA, 226 bp, Glycine max
  Clone ID: LIB3106-108-Q1-K1-F6
tcgaccagacttacgaacactctatcaaagacgcatgaagagagattatagaacgggaaagatagaatgttcaagttcaaggttctcaagttcaacatctaatcctctattatgcgtgttccgaggaagaacatgaaaaaaccctacgagtcaactctgacgagttgcctgatcgtactgttacatgctccgactctgtgctcttctttgcctttcgaaatcaccg

SEQ ID NO: 17173 - DNA, 192 bp, Glycine max
  Clone ID: LIB3106-108-Q1-K1-F7
aaagagacctcaggttctactcatttctcgttctgtactgtttttctcttttttttttttataatgatgggtattatttaatcatttctcaatttacattggtttgatacaatctccattttccaaaaaactaattttctatttttactttgataagaactgtaccgtcatgcgtttatgtgctcccactct

SEQ ID NO: 17174 - DNA, 311 bp, Glycine max
  unsure at all n locations
  Clone ID: LIB3106-108-Q1-K1-F8
tcggtttcatgatctgatcactttgtcatatccataaagaagggagaaaaagaaagtttggaagttgcagaagctttgcaagtatgttaagttgcaatagctgggagaaatgaaccactgtgcaggatgttcaatttattccatccgggggntcattaaaaaacttgctttgatcccggtctactaccggagatgcccaatgagtggaagttggtcttggttgagtttgctttagtaagaaatccctttttcaggttgcagaatctcttggatttattgcgtgagaaataaaaattctattaatgcttgtt

SEQ ID NO: 17175 - DNA, 476 bp, Glycine max
  unsure at all n locations
  Clone ID: LIB3106-108-Q1-K1-G1
tcgcccacgcgtccgcttctcttttcacgtcattatcctaaacttgcagattttcacatcccaggcaacatgaaggggaggttcatgtttctgtcggtgctcctttgtgccacctttcatgtctccttctccattactgacggcttagtagcaaacggcaacttcgagctgggtccgaagccctccgccctgaaaggaactgtggtgattggtggcagccactcgatcccagaatgggagatctctggcttcgtggagtacataaagtccggccagaagcatggcgacatgctgctcgtggtccccgagggggcctacgcggtgcgcctcgggaacgaggcctccatcaagcagaggatcaaggtgatcaagggcatgtactactccatcaccttcatggtggcccgcacctgcgcgcatgangagaggctcaacatatccgtcactccagactggggcgtcattcctattcagac

SEQ ID NO: 17176 - DNA, 394 bp, Glycine max
  Clone ID: LIB3106-108-Q1-K1-G10
cccacgcgtccgcccacgcgtccggccgaaagccaagaaaaagctttcgatccctgtaactgcgttcgactatttagggttttttcggagacaatggcggatgaatcggagcacacggcggcgccggctgccggcgaatcgctgctcgacaagatcgccgagaagattcacggccacgacgactcttcctcttcctccgattccgattcggataaaaaggaatcttcgtcgattaaggagaaggttttccgcctctttggaagggagaagccagttcactccgtcctcggcggcggaaaacctgctgatgttctcttgtggaggaacaagaagatatctggtgtacttggtgtagccacggctatttggatcttttttgagttgcttgaatatc

SEQ ID NO: 17177 - DNA, 384 bp, Glycine max
  Clone ID: LIB3106-108-Q1-K1-G11
cggacgcgtggtcggactcgtgggcggacgcgtgggcggacgcgtgggcggacgcgtggggaatgcattgcacgtatagaggcaaaggcatatgggttgttaaaggagctaggagcaacccatgtagacgaagttttcacagccggtggaggagctaaaaatgagaagtggataaagatacgagagagggtgattggtttgcctgtgagtcgtgcaaatcaaacagaagctgcatacggagctgcattattggcaatgaagggcgatcaacaaaatattttgtgaaaatattattacaccacctgtttgatcatgatgcgtttgaagagtaattcgtcatttgaaatgttatgagagaaaaaaacaattgaatttcttgggagc

SEQ ID NO: 17178 - DNA, 409 bp, Glycine max
  Clone ID: LIB3106-108-Q1-K1-G2
tcgcatagctgtagcggcgacactaagatcggagaaagaatggcgaaaacgacgtcgttgctgctctttacactgctcctcttcggaaccctagctctcatccaggcgaagaaatcgaaggaggatttgaaggaggtgacccacaaggtttactttgatgttgagattaatggaaaagaagcaggtcgtattgtaatgggtctttatgggaaggctgttccaaaaactgcagaaaacttccgagcactttgcacaggggaaaagggaactggtaaaagtggaaagcctctccattacaaaggtagctcattccatagaattattcctagctttatgctctaaagaggtgattttacacaaggaaatggaatgggtggagaatccatttaccgagagaagtttgctgatg

SEQ ID NO: 17179 - DNA, 423 bp, Glycine max
  Clone ID: LIB3106-108-Q1-K1-G3
ctttctttctttcttttttttctctgatgcgtttctacaaaaacacaaccttttaactgtggtttcttcttttttgcttgctccttatttcttccttcgccgaatcctagaatgtcctcgtcggggttccctggcggcggtggtgcgtcggagtttttcgccggggtaggtggtttcggcggcagatccattccggcgaccagcatgaacatccccaacgccgtcgccttcgccaccaacaacaacctccaccctctctaccgaacccatcaacatcaacaacatcatcttcatcagaaccttcccgcaatgtttctagatccttcctcgcagatcgcccaacggcaaacaccaaccctaatcggtaaacgtaccctaaccgaattccaagcctacaaccaaaccaacatcaacccataccac

SEQ ID NO: 17180 - DNA, 414 bp, Glycine max
  Clone ID: LIB3106-108-Q1-K1-G4
tcgggcgcagctaccctgaggcttctcttctcttctcttctctgtcgtgagtcaccatggtgagggttagtgtgctgaacgatgctctgaagagcatgtacaatgctgagaaaaggggaaagcgccaagtcatgattaggccatcctccaaagtcattatcaaattccttttggtgatgcaaaagcacggatacatcggagagtttgagtatgttgatgaccacagggctggtaaaatcgtggttgaattgaacggtagactgaacaagtgtggggttattagtccccgttttgatgtgggcgtcaaagagattgaaggttggactgctaggcttctcccctcaagacagtttgggtatattgtattgactacctctgctggcatcatggatcatgaagaggctaggaggaaaa

SEQ ID NO: 17181 - DNA, 459 bp, Glycine max
  Clone ID: LIB3106-108-Q1-K1-G5
tcgcgcggctatgtcagaaatccttggaaaccccgttaacctcagatgcgcaaccaggtctgctgcatcaccaactacacctgccagcttcaagaccgtcgcacttttctccaagaagaagccagctccacctccaaagaaaaagcctgccgctgtatcccccgccaatgaggaactcgccaagtggtatggtcctgacagaaggatcttcttgcctgagggtctcttggaccgatctgagatccccgagtacttgaccggagaagtgcctggagattatggttatgatccgtttggtcttagcaagaagccagaggacttcgccaagtaccaggcgtttgagttgattcatgccagatgggcaatgcttggtgctgctggattcatcattcctgaggcctttaacaaatacggagctaactgtggtcctgaggctgtttggttcaagactggagcttt

SEQ ID NO: 17182 - DNA, 370 bp, Glycine max
  Clone ID: LIB3106-108-Q1-K1-G6
ctcccatcatagaaaaccgaccctctcctttccctcttgaccaaccaatggctgccccaaaggccgagaagaagcccgcggagaaaaagcccgcagagaaggctccggcggagaagaagcccaaggccgagaagaagatatcgaaggaaggaggaagcgagaagaagaagaagagaacaaagaagagcgtggagacctacaagatttacatcttcaaggtgctgaagcaggttcaccccgacatcggaatctcaagcaaggccatggggatcatgaacagtttcataaacgacatcttcgagaagctcgcccaggagtcgtcgcgattggctaggtataacatgaagcctaccattacttccagggagat

SEQ ID NO: 17183 - DNA, 382 bp, Glycine max
  Clone ID: LIB3106-108-Q1-K1-F10
gcccgagtccacactcaaacccgcgcccatggcaaataacccttccgacgctcccgccgatgacttccttgaacaaatcctcggcctcccgaacttcgcttccgccgactccggcctttccgctgccgatgtcggcctcgccggtgcggccactcaggctccgatgatgctgcaactcaactccgccgacgccaacgctcacctcgccggcgccgccttccacgcgcccgtgtatcagctagggctgagcttggaccagggcaaaggtgggttcatgaagcccgaggaagcctccgctagcggaaagcgctttcgcgacgacgtcgttgataatagagctaagaatgtttttcatgggcaacccatgcctactactatgcct

SEQ ID NO: 17184 - DNA, 460 bp, Glycine max
  Clone ID: LIB3106-108-Q1-K1-D7
gacctttttgcccatagccatggctgaatcaatattaggtttcacccttttcaaatcacacactcttagttcatgtctacaaacaaaaaaagtttcaagcgaaccattcttcaagattgccaaagcagcattcaaagtctacccttttcaacagaccgtggcaggtcttagagggcaagagcgaaaaaagaggatctttgtgcaaagtgaatggcttgccagattggacactgatggcaattatagtagagcaaatggagggtcaaagagatttgatcactgagaaaacagtttcccatcttagtgatcgggcaataaagaatgtttactcttggtacataatgttcaccgtttggagctgcttattctttggtgccatgaaggatccatattacgactctgaaacatatatgggagatggatgagatggaactggcaactggatttatgaaaagcaaga

SEQ ID NO: 17185 - DNA, 444 bp, Glycine max
  Clone ID: LIB3106-108-Q1-K1-D8
tcgtccacgcgttcgcccactcgttcgcggacgcgtggggtttgttgttgtaactcgttcttcttcttttgatgttctgtgttcgggtttgcaacttctctgacctgaaaatgtcttgctgcggtgagaactgtggttgccgtagctgctgacagtgccgaaacggctgatgatgctgcaacatgctcccagacttgagctacacttgagtaaccaccaccgagaccttggtcatgggagtggcacctgttaaggctcaaattgagggatctgaaatgggtgtgcccactgagaacgatggctgcacatgtggaccagactgatactgcaacccctgcactagcaagtgacgtgtttggagagcaagcttcaagcatagatagcccttaattaggaataatgatcaactactaacgtgtagctaaaaacttatgtattatgtct

SEQ ID NO: 17186 - DNA, 459 bp, Glycine max
  unsure at all n locations
  Clone ID: LIB3106-108-Q1-K1-E1
tcgtccacgcgttcggngtatgatactcatgatcaagctaagctgctgaaagctgacttagcctttctggagtgtttggagaagcagcatgggagtactaaaggagaccctcatgttgctcatctttataagacaatgtgtgttaatggtctgaggaattttctgataccgtacagaaggaatattgtgaatctacaacagtttgggcaacctatgattcagtttggatggcttagcaatttgagatggggaggttggaactttcagaaaactcatagattgagctcactgnggggaagtactgtgtcataaattgtgaatttcatcgaattttgaaagtatgtgatcctgaccccccagtcttcaaagttcctttagttttaaccttctgtttgctagagcatgcttcttattggtatgacttccacattttgtatagactatagtagtgtacatagc

SEQ ID NO: 17187 - DNA, 351 bp, Glycine max
  Clone ID: LIB3106-108-Q1-K1-E10
cgcatgctgcactcacggacctttcttgcctaatgattcttacaagcactctgcacggtgcatctgtccatcttttggcttgaggagtctgaaatcgagctctgtatttggagaatctctaagagtggcatacaaatcaacactaaaggcttcaaagacaaagaatacttcactcgtgaccagatgtgaaattggcgacagtctggaagaattcctcacaaaagcaacaccagataaggggttgatcaggttgttggtgtccatgggagacgcattaagaacaatttccttcaaagtgaagacggcttcttgtggtggaacacaatgtgttaatacttttggggacgagca

SEQ ID NO: 17188 - DNA, 355 bp, Glycine max
  Clone ID: LIB3106-108-Q1-K1-E11
tgaagaagcaatagttcgccccctccatattgaaggggagttatatgtagggattccgccaggggtggaatcacgtcttgccgctctgactgtagatactgctgatttaagcaaagtctcagcactcgctaatcgtcctgaccttccctccaccttccaaccacagcaaattgctcaacttgcaaccagtttacctgttgctttcaatacactgaatgttcgccgtgccatcataccagcagctaatggacatgtatctgcccgggcacttgcacgttattatgcagccctagctgacggtggcaagataccaccacctcattcttctgcttctaagccagtacttggtagccat

SEQ ID NO: 17189 - DNA, 378 bp, Glycine max
  Clone ID: LIB3106-108-Q1-K1-E12
gcgcccacgcgtcctcccacgcgttcgtccacgcgttcgatcatcccttcacatcgctaggcaaaggggcaaggaagacattgatcgcgtttcattggcttctatgctcggaattcagcttttgcgtctgaattaggctgcgtgttgttcccgattgtttgtttttcaatcgttagcagcagagcgtgcttgaacaagttaattggttggttttgtgattttgacgcttggggaccgcaatggaatttgatctctgcgatagcagtggaacagatgatggtcttcctccttcccatcaatgtctaaatagatttcaatgaccagatcatgccacttggactggaaacggaagatctgcaattgtaggccttggtccat

SEQ ID NO: 17190 - DNA, 422 bp, Glycine max
  Clone ID: LIB3106-108-Q1-K1-E2
tcgcgaagatttgaggcatttatatcatcgaaattggaagcgaggaaggaaaatcgaaatcgaaaatggcagtaatggagaggttgaagatgttcgtcgttcaagagccagttgtcgccgcttcctgtctcatcgctggcttcggtctttttcttcctgcttttgtgaggcccatgttggattcatatcaggcaaccaagcaacctcctcaacctgctttaagcgatgtggttgcaggtatgactggaaaaaagtaaaggtgatttacttgacagatacaagtgcaaatttgctaatttccttgtttgaacttattttaattctcaaatgtgagagaaataagagtactgaatattggatctagctttcgtgtctgacgatgtctatttgttccggaatcattcagtggtttcacttcatat

SEQ ID NO: 17191 - DNA, 431 bp, Glycine max
  Clone ID: LIB3106-108-Q1-K1-E3
tcgggccgtccttttttttttttttttttaaagttggatcacgtcacgcatgtgtactcaaaccagggatggaaatgtaacagtgagttgatttctgtgttacattaccagaaaaataaagaaaaataattgtgtatctgatctacactccttacgcaatatcatctttcaaaaggtgaagggaaaaattacaacaacctgctactacagaattggcctaatgcccaaactaagctcaaaatttatgtgcggtagtgttctttaatggccgcccctgtctgttaagtttcaatcatttcttcaattatctctccttgttggcctccgacgtgcaggggcagatgattcctgcttctctttggtttcctcattcttaacaattgcctggcttagttgcagttctggttggtctaacgttggcctcttcaacc

SEQ ID NO: 17192 - DNA, 478 bp, Glycine max
  unsure at all n locations
  Clone ID: LIB3106-108-Q1-K1-E4
gtagttagaacatctacctggtggtgattcttccaccgagccctacattgttaaccaccacttaatacttgctcatggagcagcagtcaattgctacaagaacaaataccaggctcatcagaaaggacaaattggagtcaccatagtgactttcttctttgaaccaaaatctaatagtgatgctgatcgcaaggcagcaaggcgagctctggactttatgtttggctggtttgctaatcccattacatttggtgactatcctgagagtatgagatctttagttggttctagactccccacattcaccaaagctcaatctgaaagtctcaaaggttcatatgattntcttggtataaattattacaccttaaatttcgtggaatatgcttcaacaaccaccacttacaagacctatttcactgatatgctagccaaactttcttcgaccaggaatggtgtacccattggcacaccgact

SEQ ID NO: 17193 - DNA, 465 bp, Glycine max
  Clone ID: LIB3106-108-Q1-K1-E5
gagagagagagagaggcacttggaatccaaaaatgagagaaatcatcagcattcacataggtcaggccgggatccaggttggcaactcctgctgggaactctactgcctggaacatggcatccagcccgatggcatgatgccaagtgactcctccttcggtgtagcccacgacgccttcaacaccttcttcagcgaaaccggatccggcaagcacgtccctcgcgccgtcttcgtcgatctcgagcccaccgtcatcgacgaagtccgttgtggcacttaccgtcaactcttccaccccgaacaactcatctccggcaaggaagatgccgccaacaactttgccagaggccactacaccgttggcaaagagatcgtagatctgtgcttggatcgcgtccgaaagctcgcagacaactgcactggtctccagggcttcctcgtcttcaacgctgtcggcggtggca

SEQ ID NO: 17194 - DNA, 303 bp, Glycine max
  Clone ID: LIB3106-108-Q1-K1-E6
cccacgcgtccgggacaatgctaaggatccgattgtgaattcagtttcatttcctacaccattgactaatactctttccatggagctctctgaagattgcagaacatccatgaacagaaaccatactcttatgactgcttcaactgatttgtctaatgctagaggaaacaatgtttacctgaatacaagcactgtggaatctcgtgatcctacagccaatacaccatggcatggacttgttttctaagcaaaaaaaaaaaaaaaaacaaaaaggaactaaccgtaaactattacaacaagaac

SEQ ID NO: 17195 - DNA, 465 bp, Glycine max
  Clone ID: LIB3106-108-Q1-K1-E7
cggaaaacacttcttgaagggacaccacaatcattccaagaaggatggacagctgctaaaaaagacatcaactcactaaagtttgagcttgagagtgtgaaagccaagtacatggagcttcaaaatgatctggctagtttgcagaaacaatttgataagatgctaaagcagaagcatacttctgcgtggagcattgggtggaagaaactcatcaaacttggaaggacaacacatttagtggaaaatcaggatgattctcctaagattccagattcacttgaacaaaacagaaagactactagaaggtggagaaactcaatatcctgatacctgaaatatgagaattctctatttctttgaaattgattcttcttccctcttcatatcttatagcagttgcttctagctaaattgtaaacaaagctagtcatatttttccaagtgtgaattctactggtactccaa

SEQ ID NO: 17196 - DNA, 462 bp, Glycine max
  unsure at all n locations
  Clone ID: LIB3106-108-Q1-K1-E8
cccacgcgtccggaaaggatgaagcaatcaaaggatccgttcgaagcagcgttcgaggaaggggcgccagaatccccaacgggtacggagacagaggcagagacgcaaaaccctactcctcctcctgctcctgctactnctccttcttctttttctggggttgctgtagtagcactgaattcacaacagcctcagaatcagaaagtgaagaacaaagacaatgaggaagaggaggaagaggaggacaacatggacgtggagctcgccaagctccctttcaccggcgaccctcacaaaatggccaagatgcaagccattttgtcgcaattcaccgaagagcagatgagtcgatacgagtccttccggagggctggctttcagaaagccaacatgaaaaggttattggctagcatcactgggacccagaaaatttctgtgcccatgacgattgttgtatcgggc

SEQ ID NO: 17197 - DNA, 457 bp, Glycine max
  unsure at all n locations
  Clone ID: LIB3106-108-Q1-K1-F1
tcgcaggcagctgcctgtgatttgaaagaattggtgcgcaagttcatccctgaaatgattggaaaggagattgagaaggcaacatctagcatatatcctctacagaatgtgtttattcgtaaagttaagattcttaaagctccaaagtttgatctaggaaaactgatggaggttcatggtgattactcagaagatgttggtgccaaggtggatagacctgctgatgaaaccttggctgaggaagcaactgaagtagttggagcttgatccggctgataatgcatttttgtttggttagaattcctgttgcttttacaaatatttnatttttcaagttctggttttgacactttaggaaacacactttggtttttgcaaatctaaatcctggttttttggcaaaaagtttattggtacaacccaattaccaagaaccggtgaaaggcgtaattttctt

SEQ ID NO: 17198 - DNA, 467 bp, Glycine max
  Clone ID: LIB3106-108-Q1-K1-D6
gctgcaacagcttcaaggtttatcaagtgtgtgacagttggggatggagctgtaggcaaaacttgcatgctcatttgctatactagcaacaaattccccacggactatattccaacggtgtttgataatttcagtgcaaatgtagttgtggaaggcacaactgtcaatttaggcctctgggacactgctggacaagaggattacaacagactgaggcctttgagctacaggggggcagatgtctttgtcttggctttctctttagtcagtcatgcaagctatgaaaatgtgttgaagaagtgggttcctgaactgcagcattttgctcccggcattccagtggtgctagttggcaccaaattggatctccgagaagacaagcactatttggctgatcatcctggtctggtgcctgtgacttctgagcaaggtgaggaattgcgtaaactggtgggagctacatatta

SEQ ID NO: 17199 - DNA, 346 bp, Glycine max
  Clone ID: LIB3106-108-Q1-K1-C11
cccacgcgtccggtcgaagcgtggtcgtggtggttcggcggggaacaagttccgcatgtcggtgggtcttccagtggcggcgacggtgaactgcgccgacaacacgggggcgaagaacctctacatcatttcggtgaaagggatcaaaggccgtttgaaccgtcttccctcggcctgcgttggcgacatggtgatggccaccgtgaagaagggaaaacccgatctgaggaagaaggtcttgccagctgtcatcgttcgccagcgcaagccatggcgccgaaaggacggcgtctacatgtacttcgaagataatgctggtgttattgtcaatcccaaaggagaaatg

SEQ ID NO: 17200 - DNA, 268 bp, Glycine max
  Clone ID: LIB3106-108-Q1-K1-C2
actagttctagatcgcggcggccgccctttttttttttttttttaggatgaaatctagacaacttttatttcagctgctacaattgtatgattagattgagggaaaaaaaaatattttatatagctaagaaattaaaacgaaaagtatggggcgaaaaaagagaagtgctttctaatataaaaaaattcatccattttaaatatcagcatcctatgacacttgttttggatgattcaatgtaatcaaacttattgcaaagttcccact

SEQ ID NO: 17201 - DNA, 266 bp, Glycine max
  unsure at all n locations
  Clone ID: LIB3106-108-Q1-K1-C3
gagctgaaagctgcattttccattgatgatgtcaagctacctccttggttggacgggatgtgcttggcagaatatcttccaaatctagaagatatctttggggaacaagncntagcngatgtagcttaaaaagtaaaacgaaaagtagggggcgaagaaagagaagtacttttgaatatgaaaaaactcatccattttaaatatcaacatcctatcacacttgcttagtttcatttcatctaaacaaaagctgcggaaaataccca

SEQ ID NO: 17202 - DNA, 470 bp, Glycine max
  Clone ID: LIB3106-108-Q1-K1-C5
ctcttttcagcaccttaccttattccaatccaatagcaaggaggtaccaaaatagtgtgattcatggctgcaacgaatgcgtcaatctttgcatcttccacgcaaccatgcttgcctgtgcctcctaccattccaaacacgcttgctactccttttctcaatgtttcgtcaccaagaagttaccttgtgaagaaaaagcatgtgaaatttagcaaaaaaatcagtgctgctgctgttgcaacaacaacaacaactgaggaaattcaagagtacaagcttccatcatgggctaagtttgaaattgggagggctgctgtctattggaaaaccatgaatggcctccctcctacttcaggagaaaagctaaaacttttctataatccagctgcaactcaacttgtccctaatgaagaatttggaattgcttttaatggaggttttaatcagccaattatgtgcggtggtgagcc

SEQ ID NO: 17203 - DNA, 323 bp, Glycine max
  unsure at all n locations
  Clone ID: LIB3106-108-Q1-K1-C6
atctctgattcattgctagaggagaaacattcaattatcagattttgattggtgcaactggctcaacaggtataaggctgacagattttggtgtagaaagagctgatgcgaaaaacatcttttatttgagggaggttgatgatgctgacaaattgtatgaggcaatcaaggcaaagaagaatgggaaagctgtggttgttgggggaggatacattggtctggagcttagtgcagtgttgaaactcatcaatattgatgttaccatggtctacccggagccttgntgtatgccacgactttttacggctggtatagctgaattc

SEQ ID NO: 17204 - DNA, 460 bp, Glycine max
  unsure at all n locations
  Clone ID: LIB3106-108-Q1-K1-C7
cttggcatgccggatggtgttctcatcaacgggaaaggtccttaccgatataatgacacccttgttcctgatggcattgattatgaaacaattgaagttcatcctggaaaaacttaccgacttcgtgtacataatgttggagtatcaacaagtctgaatttcaggatccagagtcacaacttacttctagcagagacagaagggtcttacacagtgcaacagaactacactagcttagatattcatgttggacaatcttattcttttctgttaagcacagatcaaaatgcaagtacagattactacattgtagcaagtgccaggtttgtgaatgaatcacgttggcaaagagttactggagttgctatcttgcgctatacaaattccaaggggaagggcccgtgtcctttccaccgggtcctgatgatcaatttgacanaacttactcaatgaaccaagc

SEQ ID NO: 17205 - DNA, 454 bp, Glycine max
  Clone ID: LIB3106-108-Q1-K1-C8
gaaatcctgagcttccattgtgctcactcatctcttacaacgaaaccctcttcatcttgttctatctgtgacgagcatcatggcctcaagagcagtgttattgttggctatgcgtgtgcttccggcgatggttgtggccattcgcccagcaaagaaccctttttgcgtgaagggtcgtgtctactgtgacccttgccgtgctggttttgagacctcagctaccacctacattgctggtgctgagattatgttgcaatgcaagagcagggttagcaacgaggttgtgtacacgaagaaggggtacaccgactcaaccggagcatacacaaatgtacgtggatgaggatcacgcagatcagatctgcagtgccaagcttgtaagcagccctcaccctcaatgcagggaagtcaccccaggccgcgacgaagccgtcgtgattctcacccgctacaa

SEQ ID NO: 17206 - DNA, 196 bp, Glycine max
  Clone ID: LIB3106-108-Q1-K1-C9
acgcgctgaagaaaatgtggaaccaagagagccatcatccttctctttctgggtgccacatacggcggcgaacctctcttgggacaaggtagaaaacatctacctttctgacctcaacgagattgaaatagacgccttgactgaactcaagtcaaatctcgaacaatctatctcggcgaacaccctttttgattca

SEQ ID NO: 17207 - DNA, 480 bp, Glycine max
  unsure at all n locations
  Clone ID: LIB3106-108-Q1-K1-D1
gatatttccaatgaagacggagctgaacaagagacacagagacccttcacgaaatgctgtctattattcctttggatatctcggtatcctcaactcttgccaaagtctcacctttcaataacagttttaagaaaccaacctctttcccatccaagctttcaccttcctctgatgaattctctctcctttctctctcccactcaggaatttgcagggctagtcaagttgttgatttgttcccaaccgtgtcccccgaaattattgtccgcgaagcaaggttggaggactacttgggagtggcagagacgcactgcaagtgcttcttccctgaatattccttnccattagattntgtgctgaggatagacagattggtggtggctatgttagcagctatgttagcccgattctttaggcctagagattgcagaaggatctngttggtggctgntattgacagctcacttgatgagtcatttt

SEQ ID NO: 17208 - DNA, 415 bp, Glycine max
  Clone ID: LIB3106-108-Q1-K1-D10
cttccttatcttatatcttctcctcctccatctttgagattctcaaagaaacttctgaagatggctggcatagcattcggaagcttcaatgattctgtcagttttgcctccatcaaggcctacattgctgagttcatctcaacccttctctttgtttttgccggtgttggttcagccatagcctatgctaagttgacatcagatgcagctcttgatccaactgggttggtagccgttgctatttgccatggttttgctctcttcgttgctgcttctgttggagccaacatttctggtggccatgtgaaccctgctgagacctttgggttgtctcttgggggccacatcaccatcctcactggtctcttctactggattgcacagcttctcggatccatagtggcatccttactcc

SEQ ID NO: 17209 - DNA, 395 bp, Glycine max
  Clone ID: LIB3106-108-Q1-K1-D11
cccacgcgtccgcccacgcgtccggaaaaattccaagttggggttctcacgatttcgattaaccgtttctcccacaaactccgattcttcttgtaaacagcggtgccaggtgttaatctagaagttgatataggatgggggcaatgatgtcgaggttctggttcatgttattccctgcaaaagagtataagattgttgttgttggattggataacgctggaaaaaccactaccctttataaattgcatctgggtgaggttgtaacaaccaatcctactgttggtagcaacgtcgaagagctcgtctacaagaatatacgatttgaggtcttggatcttggtggacaagaaagactgatgacatcatgggcaacatattaccgaggaactcatgct

SEQ ID NO: 17210 - DNA, 435 bp, Glycine max
  Clone ID: LIB3106-108-Q1-K1-D12
cccacgcgtccggtttcacacttccaaaatcgtaacctcaaaaaaaaaaaaaccgaaccaactctgttcctatttccacactctttagtcttttgattgataatgtcggcgtcgacgggaagcagcaaaatccggcgcatagttcgggtgaggcaaatgcttctccggtggcggaggaaggcagcggcggacgttccggctggacacgtggcggtgtgcgtggggcccagcaggaggaggttcatcgttcgcgccacgcatctgaaccacccgattttcaagatgcttcttgtgaaggccgaagaggaatacggtttctgcaaccacggtcctctcgctataccctgcgacgagtcactcttcgaagagcttcttcgggtcgtgtcccgacccgtacccgtacccggattcttcacgctcgatgatttccagaga

SEQ ID NO: 17211 - DNA, 211 bp, Glycine max
  Clone ID: LIB3106-108-Q1-K1-D2
tcgaaaaaaaaaaaaaaaaacaagaaaaaaaacaattgacaaaaaaacaattaaacaaaaagattagggaaaatcacaaacgggtttacgagctccaaaattacgtacccttcctttacagtcatactacaattttttagctgcccctctgtttacaaaactgggtctcgtccaacacctgtgcaactgcaataacttttgttttccccca

SEQ ID NO: 17212 - DNA, 344 bp, Glycine max
  Clone ID: LIB3106-108-Q1-K1-D3
cttccacagtgttctcatatccttctcctcttcatcttaaaacctatccacacaaaacatcatcaaacccttcagagttttccattcacatccaacccaaaaagcacttttccattagatgcacatctttggactccattcctgaggctgagtttccaactccagatccttcctcaagcacagtgaacagtgcagagtcctttcccattgagaagagaaggaggtcagagatagtgagagagagaagaggagaaaaactagtgcagccagagccaccaaactttgaaataagttggaagaggaccaaagagatcaacctagagaggccaatagggcatgtcata

SEQ ID NO: 17213 - DNA, 306 bp, Glycine max
  Clone ID: LIB3106-108-Q1-K1-D4
tcgcttcagcttcttgtggcttgtggcaagtctcctcctcctggttacacctgctccctctaaaccagtgaaaggattgaggaaaatatggtcaaaatcgacatgagaggatgtcgagccacactatctctcttctgtcctgattggaactgctgttgcttgttttgctattatttgaaaaaccaatttgtttttaattgagattgttgcatgtatgttttaatcctaggcaagtagcagcaaagatgcttctctgtgacatgttcaattattaatttatatgaattgcgccttaatttgttgaat

SEQ ID NO: 17214 - DNA, 470 bp, Glycine max
  unsure at all n locations
  Clone ID: LIB3106-108-Q1-K1-D5
tcggcaaaagttgtcattgataggctaactggccggaccaagggatatggctttgtaaggttttcagatgagagtgagcaagtgagggctatgactgagatgcaaggggttctttgctcaacaagacccatgaggattggacccgcctctaataaaacccccaccactcagtcccagcccaaagcttcatatcagaattctcaacctcaaggttcacagaatgagaatgatccaaataatacaactatttttgttggtaatttggatcctaatgtcactgatgatcatctgaggcaagttttcagccagtatggagaattagtgcatgtgaagattccagcaggcaagcgatgtgggtttgtccaattcgcagacaggagctgtgctgaagaggcacttcgggtgttgaatgggaccctgttgggtggtcaaaatgttcgtctttcatggngtcgcagtccttcaaacaa

SEQ ID NO: 17215 - DNA, 461 bp, Glycine max
  Clone ID: LIB3106-108-Q1-K1-C10
cccacgcgtccgcggacgcgtgggctgattcattcacccagttttttttttctgtcctctttggctctcagaggagcctctgagtctgctcaggtgttccttgtgaagagatccttttgtttttgaggtgtgaagggaaagagaaaaaaaaaagatgaatcagtgtggttatcagcagaagaatgctttgacaagctgtgaggagatgaggatggaatcagtggtgtgccctaaaccacgaagattgggcctgttgaaccactcaacctttgatgaccacatcagacccttgaggccaccctttatcaactaccaatcagaaattgaagattcaggagttggggctgagcttctggacatcattctccccaagagatctggagggcaagtggcttcatcacccccatttttctgtggatctccacctaacagggcttcaaaccctgtgatccaagatgagc

SEQ ID NO: 17216 - DNA, 303 bp, Glycine max
  Clone ID: LIB3106-108-Q1-K1-A6
tcgtccacgcgtccggccactcgttcggtgagctataagctagtttatcgtgaggagaatatgaaggcggttgttttctttgctgctgcagtagttttggtagcatggccatgccatggcgcatgctaccaaaagttccctcttcgaatgaaaactggctatggtgagcgttcttcggaggtaaaatgcgcaagttttaggcttgctgtggaagcacacaacatccgagcctttaaaaccattcctgaagagtgcgttgaaccaacaaaggactacattaatggcgaacacattagatcagac

SEQ ID NO: 17217 - DNA, 412 bp, Glycine max
  Clone ID: LIB3106-108-Q1-K1-A7
cggacgcgtgggcggacgcgtgggcaaattccaatttccaattcaagaccctaactccgttcgaagcaccaaatcgtgatggcaccaaaggcagagaagaagccagcagagaagaagcccgcggaggagaagaaatcgacggtgggagacaaggctccggcggagaagaagccaaaggccggaaagaagcttccgaaggatggaggcgccggcggagaagggaagaagaagaagagaaacaagaagagcgtggagacatacaagatctacatcttcaaggttctgaagcaggttcaccctgacattggtatctcaagcaaggccatgggaatcatgaacagcttcatcaacgacatcttcgagaagcttgcccaggaatcttctagacttgcccggttcaacaagaaaccca

SEQ ID NO: 17218 - DNA, 462 bp, Glycine max
  Clone ID: LIB3106-108-Q1-K1-A8
ctcactgatctaaaagcctattctcaatatatatatatatcatggctttagaacctgttctagctgaaactatccacctcatagggtggatctaactgcagagatggcagaacacaagatgagttaaggtgatgactccatgatttctcttgttcatactgtcgtctagtctacacatacggcacacaggctcaagccaggcaagttattgatgaagcctattatttatacttgattagtacctatttttgttccacttttatggaaatatcaaggaactagatgtggttgttgtttctttccttagctaggtagtactagtattatttatctttaaaacatgttacatagaatacaactagaaggatgttaaagtctatgctgagttcccttttcaatagggtagaggctaactaggtattaattagggatggaatcagatgtataatcttattattattt

SEQ ID NO: 17219 - DNA, 484 bp, Glycine max
  Clone ID: LIB3106-108-Q1-K1-B1
cttcacttgtacactcttcaaccactcaacaaagtggttggtttttggttcttaagccatggcatccacatcctctctgcatctatctcaggcccttctggcacgtgctgtgtaccttcatggctcttcttctgaccgtgtctcactctccttcccatcattctctggcctcaagtcacattctccatgcaaagcagcagccacgtcctcacgtagaaggggtgcttgcgcttccaccagcgttgttcgagccgctgcggttgagacactggaccagaccactgaggtttctctggtggagaaatccgtcaacaccattcggtttttggccattgatgctgttgagaaggccaactctggtcaccctggtctccccatggcgtgtgctccaatgggtcacattctctacgatgaggtcatgaggtacaatcccaagaatcccacttggttcaaccgtgaccgtttcattctctctgctggacat

SEQ ID NO: 17220 - DNA, 441 bp, Glycine max
  Clone ID: LIB3106-108-Q1-K1-B10
cccacgcgtccgtctgcttccgctctttacttccttttatgcctatcgcccatcactttgcttgtttctgcgtttcgtgctcaagctcaatctcatgctccagctcccactttcaagtactgtgaaaagaatgcagactatgctgtgaaggtgagtggagtggaaatattgcctgaccccgtggagagaggagtgccattcacctttaagatcccagcttatactcctgaaccaattcaaagcggggacttgttatatgaaatttcttatgctggaatagaagcacaacctgctacatttctccatgatctctgtgaggaagcaccatgcccagtacctgcaggcaactttgtgctcgttcacaccgaattattgccttcggttaccccaccaggcacctataatgtgaagctgacttttaaggatcataacgacaagctg

SEQ ID NO: 17221 - DNA, 289 bp, Glycine max
  Clone ID: LIB3106-108-Q1-K1-B11
gaaaaacatggatatggggtggatgaatttaattaaacctcatatgattaatgggttaacatgggcgtctcaccggcgttgccagagactcttaaaaattacatcatgctgctgtctcttggcttcaagattgtattcttgccaggaagatatcttgacaaattggaccgcatcagaagcaaacctatagaaggctggcttccacacatggcttcagttaattctcaacgatccacatattatcactacaaatgcactttcatacaaataaccaatgagagagaatctg

SEQ ID NO: 17222 - DNA, 367 bp, Glycine max
  Clone ID: LIB3106-108-Q1-K1-B12
ctcacgcgtccggtaaagcaaactcctctgacttttccttccatctctggggaaacattcctggcgactccgagcagctcagtctgattttgcattcaatcctatcaatcccaaatttccttgccggagatagagaatcttaacagttccaccactttccggctagacatggccgttgccgtcttacgacccgcccgccataatcctatgtccgacgcgagccttcttacactctgtcccttccggagttcgctcatcgccaatcaatgctccttcaaaacggtgtcttccgtcgacaggtctctactccctccccgacgaaaactccgcctcgatccttgcaattacctctattctccatatgaac

SEQ ID NO: 17223 - DNA, 185 bp, Glycine max
  Clone ID: LIB3106-108-Q1-K1-B2
gtttttagtttatgtaatgtttctgcttcttgaagtggtttcagatattgctttaggttgaattgcagacaatattggcatttggcacatatagtttgtttttgcttgacttctcagtgagaagtgttttgatgagattaattgatagttataagagatgttttcttggttgttcttgtgaaaaa

SEQ ID NO: 17224 - DNA, 475 bp, Glycine max
  unsure at all n locations
  Clone ID: LIB3106-108-Q1-K1-B3
tccacgcgtccgaagaaagcagagggataggaagaaggaagaatggagaagtatttcggaaacgcttatcgtggcgacccgggcgtgccccattcggacccggatcgcttcgtcaacatatgggtcggatccgctgccttcgctgttctcacatatttcaatccctacatgtggcagctctctaatcagttcaattggcatgacaaagcaatgttatatgagcaatatcactggaaacaggcaaggaagaagaatcagccatatgagttcttgtggaacaagacctgggacaagaaccaccgggaacattactactacaactggcctatttactttccttaggccacttctatttcatttcttgcatactttgtcctatttattttggctgcaaaacctggatcgtccccccccctctatttttnnaatgctttccttgtgatcagttccttttttttttaaataactacacaat

SEQ ID NO: 17225 - DNA, 286 bp, Glycine max
  Clone ID: LIB3106-108-Q1-K1-B4
cccactcgtccgaaaaaaaaaaaaaaaaaaaaaaaattgaataataatataataaataaaagagaaaaataaaaaaagggacaaagataaaaaataaaagagaaaaaaaaataataaaaattaaaaaatcaaataaataaaaattaaataatataaaaggggggccctttttaaaggtccaaattttctgtccctttacttcaaccgtcaaactttttttttaggggccctaaatttaatttaattggcctcgttttaaaaacttctaaattgaaaaacccttggg

SEQ ID NO: 17226 - DNA, 470 bp, Glycine max
  Clone ID: LIB3106-108-Q1-K1-B5
gtgactgcgatcatcgtagttaaatggtctcattgagcgcaaagcgcggaagatccataggatcattgctgctaccatctgacaacttggcagcatgggacgcagaaatcacatcatgggtgtcaacggagccctcatgcaagccgatggtggcagagaacccatcgctcacccattcggtatgatcactcttaaagttgactgtgtcagagaggccatctaacttcatacatctgacattaatgtgacaactgaaaaatgtgatgacgacctagctagctagacgctggtgctactaataatggtagaccgattattactatataatacgtgatatactacgtctagacatactgatgctactaatgatgatgatgcatgacatgcggacgagcttatattcgcctctcattaggttgtcaacataactccgactgataagaagtctatcactgactatggttcacccg

SEQ ID NO: 17227 - DNA, 461 bp, Glycine max
  Clone ID: LIB3106-108-Q1-K1-B6
tcgctcaaattgtgcttatggattgtatgttcatatatgaatttgaggagcagagtggaaggatgaaagggtgcaaaagatggggaggcttttgcatttttggatagcattcgaagaataaccaacttgagaatgattggttttcaaagactgcagttttttctcatgcataataagactcagaagttgaggaaattggtagggtttttgaaattatactttttacttccatcattaaatatactcattaccctccatccaaattacgtgcttaattttgtcctgacttgcaaagcattagcattgagcaccaattgttgttctccgctatttgaactactttggtatctggcaaaaccaatgtccaggttataaatgacatgtaaagctatgcatggtttaatatatgatatgttataaaataatgttatataatataaaataattttttccatgctatc

SEQ ID NO: 17228 - DNA, 455 bp, Glycine max
  Clone ID: LIB3106-108-Q1-K1-B8
tcgtccacgcgttcgcccacgcgtccgtggagagtttttttttttttttttgtgttgtttagttgttgaggttggttggtttgtgagagagagaatggtgggtgctctatctgttgtgggatcatcagtaatggactctcacactggcccttgtttgtgtgtggatgctctcccaacaacaactagtgtcaatctcaagagtggtggagatgttgttttgtgcaagaatttgatgggaaggaagcataatttggtgaagcatggtggtggtggtggaactacaatgaagttgagcagttcatttgttgatcctggaagagagtggaggctctttgttagcaaaagttgcaagaggcagcgcaaggataggagagtgaccattgtcaatgagcttggaggacaatatgaggacacttttgaagatgttaaaacgcaaatgctcaactatttcacat

SEQ ID NO: 17229 - DNA, 455 bp, Glycine max
  Clone ID: LIB3106-108-Q1-K1-B9
cttgaaactgcgtttgaaaaagaaaaaaaacatggccacactattctcacctttgtctctgcactctgctcgccccgcttcttcttccttttcttcttcttcttcttcttcttcatcttctcccttctttgccttttgcagcttccctttgcgctcccgcatttcatctttgaaggcacaaacaattcttcttcagaagatgaagcgcgtggtaaaggcagtggaagaagagacccagcaagaactcaccgctgtggatgagtctgaacaaccatcaacctccgaagcaccacccgttgtggttcccgtttccccatcagatactctcaccatgttctttcatgcagagggaacagtgagtgaaacagctattccagctttaaccaaagctttagaagagacagatggtgttactgatttgaagtttcagcttgccgagggacttgcaattttag

SEQ ID NO: 17230 - DNA, 430 bp, Glycine max
  unsure at all n locations
  Clone ID: LIB3106-108-Q1-K1-A5
tcgtccacgcgtccggtttatgacacgctggagaaaatcgttcaagaggctcctcatccttcttatgctgaattcagaaacactggattggaaaggtctgcaagtttggcagaagatttggagtggttcaaggagcaaggttataccattcctgaaccttcttctcctggtcttacctatgcacaatatcttaaggagttatctgtgaaggatccccaagcattcatttgccatttttacaatatctactttgctcattcagctggtggtcgaatgattgggaaaaaggttgctgaaaagttacttaacaacaaggcgttggagttctacaaatgggatgatgaccttccacgattgttgcagaatgtgagagacaagttgaataaagttgctgaaccttggagtcnggaagaaaaggaccactgtctgg

SEQ ID NO: 17231 - DNA, 382 bp, Glycine max
  unsure at all n locations
  Clone ID: LIB3106-107-Q1-K1-G7
cccacgcgtccgcccacgcgtccgcaagtagttgagaactaagaaggagaagcaaatggcttcctcaatgatctcttccccagctgttaccactgtcaaccgtgccggtgccggcatggttgctccattcactggcctcaagtccatggctggcttccccaccagaaagaccaacaatgacattacctccattgctagcaacggtggaagagtgcaatgcatgcaggtgtggccaccagttggcaagaagaagtttgagactctttcctacctgccagaccttgatgatgcacaattggcaaaggaagtagaataccttcttaggaagggatggattccttgcttggaantcgacgtggagcacggtttcgtgtaccgtgag

SEQ ID NO: 17232 - DNA, 458 bp, Glycine max
  unsure at all n locations
  Clone ID: LIB3106-107-Q1-K1-G8
cccacgcgtccgcacgcttagtgagattgagattgttaatcttgagagagttggactttggcagaagaannttcattgggtagttattatttatgactgcaatctgtatttaatggtcttttcttgtattttttccaatttattagatagcttgtattatttgtttgtctttataaatatttttttttttttgttcttgcttttttttattttgttttaataatcttttattattatttcttttttactcttataacatattatttcagtttgttgttatgnattttttttgtttttttttgttttctttttttataatttgatttcctatttttatattttttaatgtttttttatttttttttatttgctaattagaattttaattttcgttgtattttgtttttcttattattgatttttttattatgatgtttattttttttattttgatggta

SEQ ID NO: 17233 - DNA, 236 bp, Glycine max
  Clone ID: LIB3106-107-Q1-K1-H1
cctagctacataataggatgtgttgagtactttaaaacattttcagatactcaaacatatgtcatagcaaatcttatttaccaacttaacgctatagatataaggagaattccacattatggttgagtatacattattaatagaatggtaaatttaaattgtcatatattactgatgtgagaattttttttttcatgttacctttttaaaagcaaaagtcttgattttttcatttg

SEQ ID NO: 17234 - DNA, 382 bp, Glycine max
  Clone ID: LIB3106-107-Q1-K1-H10
cccacgcgtccgcccacgcgttcgcccacgcgtccgctatcatggccacggcaacagcagctgccacctcgtcctttatggggacgcgtctcctggaggctcactccggagcggggcgagtgcacgcccgattcggcttcggcaagaaaaaggctcccgccccaaagaaagcctccaggggatcgggccgagacaccgacagacccctttggtatccgggcgccaaagcgcccgaatacctcgatgggagtcttgtcggagactacgggttcgatccgtttgggctagggaagcccgcggagtacctgcagttcgagctggactcgctggaccagaaccttggcgaagaacgtggcctgggacatcattggaaccaggaccg

SEQ ID NO: 17235 - DNA, 352 bp, Glycine max
  Clone ID: LIB3106-107-Q1-K1-H11
attgctctgcccttcccatgctaccttccactcttgagctgaaaccgaaggagaaaagcaatttcatgattcataaacagcaagacccctatgatgaatcctcaaggaacaacaatgagtttggactcgtcacttctgattccttgcttaaccctacacagaaaagaagctttgattcttcttcttcacaaaaggatgattctgagtcccaacaacaacattccctcaggcacttcattgatgactctcccaaaccaccatctcataatcatcatcgttcgtcgtccatttggcccgaactcgacaacatacagtcagataggactcagttatcaatctccataccaatatc

SEQ ID NO: 17236 - DNA, 346 bp, Glycine max
  unsure at all n locations
  Clone ID: LIB3106-107-Q1-K1-H3
aatggattttgtcgttttgtgcctgatagtcctggtgagtgcccaactattctaccacttctacagcctcatcaacatcttcgtcacgcgtttcggtcgcaaccctcctcctcctcctcctcccaccaccaccgncgncgccgncaagtccttcgatcaagacgcgccttcctcaaaggactcttgaagaacaatccaatcccaccactttgggggtaggcttttaaaataaataaaaaaaacgagggatccaatccagcaaaggttgttggttggtgtgtaatgttttaggttactatgtacctacgcactactgtaagagnttttttattattatttttgtgtg

SEQ ID NO: 17237 - DNA, 337 bp, Glycine max
  Clone ID: LIB3106-107-Q1-K1-H5
cccacgcgtccgctttgtttagatcagaaccagatcgtgttctcttcttccattggcaaacatggcaactcaaatgagcaagaagagaaagtttgtggcggatggagtgttcttcgccgaactgaacgaggttctgacacgtgagttggcggaggacggttactccggcgtggaggttagggttacgccgatgcgcaccgagattatcatcagagccaccagaacccaagccgttctcggtgagaagggaaggagaattagggaacttacctcagtggtgcagaagaggttcaaatttcccgagaacagtgtcgagctttatgctgagaaggtcaac

SEQ ID NO: 17238 - DNA, 323 bp, Glycine max
  unsure at all n locations
  Clone ID: LIB3106-107-Q1-K1-H6
gcgcagtgtgtgaccaaaaacacattcgtgcaaggaaaacccttccttccagttccagcagctcccactaaaaatgttcggagagtggttcaatgcggtgtgtggtgcangaagaaggagatacacccgcaattccacgaggaagcgaaggtgtactgcaacggggagctggtgctgacgacaggtgggacccagaaggagtacgtggtcgacgtgtggtcggggaaccaccctttctacctcggaagccggtcggcgtctatggtcagcgacgaccaggtcgagaagttccgcaagaagttcggagagctaaaagagatcat

SEQ ID NO: 17239 - DNA, 404 bp, Glycine max
  Clone ID: LIB3106-107-Q1-K1-H7
gtttgagagaaaggttgagctatagcctaaagggagagacacataaatagtttctactttgtattcatagatagatggctggcccaattatgagacctcagattgtgctatttggctcctccataattcaaatgagcttcgacaatggtggttggggtgctattctagctaacttgtacgctaggaaggcggacatcatcttaagaggatactctggttggaattcaaggcgggctttggaggttttggatgaaattttccccaaggatgcttatgtgcaaccatcattggtaattgtgtattttggtggcaatgattctattgatcctcacccatctggccctggtcctcatgtcccccttgagaatatgtttgaaacatgaggaacatgctaatcatcttaa

SEQ ID NO: 17240 - DNA, 445 bp, Glycine max
  unsure at all n locations
  Clone ID: LIB3106-107-Q1-K1-H8
gtttgaacatcgagaagaaaacagaaaggactgcttaaggacccttctccatctcattgaggaggcagggaaagctaataaactagtagatgatgctcgatcctcatacgtaaaagagaggcttcgtgccaatccagctttcatggagaggctgcatgccaagtcaatgaggttgcgagaatctaatcaggttcctgcttgaggttttcagatctgatgtatgaattattgaaattcacctgccataattttttattgctccctggttttttgtatgagtcttatcttgggttccagctgcagaaaacaacctccctgcttagagggtaaggcctcatacatctgatccttcctagaccccacaactgcaggggagactcatgcaccgnggtacctcttagtcatatctttcgtatttagtgcttgaataatggataattttttt

SEQ ID NO: 17241 - DNA, 384 bp, Glycine max
  unsure at all n locations
  Clone ID: LIB3106-107-Q1-K1-H9
atcaaaccacgccagcttcaaaacgctgcgtttcactcccgtcctcgcgtcgctcccaaaccctaatcctatccgcggcattcctctggtcgccgtcgacaccgtcccggtcgcgccaaccgccgcaacccgaagaaaccgaatcgatctgagagaaggtgcgatctcggaggtgggagccaaacgaaacgatgccgtctcacgcggatctggagcgacagatcgagcagctgatggactgcaagcctctgtcggagtcggaggtgaaggcgctgtgcgatcaagcgaggacgattcttgtggaggagtggaacgtgcaaccggttaagtgccccgtcaccgtctgcggcgatattcacggccagntctacgatctcatcgagc

SEQ ID NO: 17242 - DNA, 462 bp, Glycine max
  Clone ID: LIB3106-108-Q1-K1-A10
cggagaactctacagaggaagcatgatcgagtgcgaggacaactggaactgtcaactcgagagcattacctacactggcaaggatggcaaaacatcgcgacttgagcatgtgtttattcgaggcaacaaagtcaggtttatggtcatccctgacatgctgaagaatgctcctatgtttaagcgtttggatgcaagaatcaagggtaagggtgcatcacttggtgttggtaggggcagagcagttgcaatgcgagcaaaggctcaagctgctgggcgtggagctgcgcctggaaggggtgtaccaccagtgcggaggtgatcaccatttatatagtctggattctccttgcctgttggacatttttaaattcttttgtaaaagttatgtgagatagacatccaaacagaattgcgtatcaagacttattacagattacttttatgcaaatacttgatccctct

SEQ ID NO: 17243 - DNA, 454 bp, Glycine max
  Clone ID: LIB3106-108-Q1-K1-A12
ctcatcttcctctttttctcaacaaaaaggggttcaattctagctagttctattacgtcgtccgcgaccatgaacatggcgatcgcgcttctgttcatggttttcgcagtttcatcagctttagacatgtcaataatatcacacgacaacgctcatgcggatagggccacgaggcgcaccgacgaggaggtgatgtcaatgttcgaggagtggctggtgaaacacgacaaggtgtacaacgcgctcggtgagaaggagaagaggtttcaaatcttcaagcacaatctgcgcattatcgatgaacgaaactctctgaaccgaacctacaagttgggactcaacgtgttcgctgatctcaccaatgcggagtacagagccatgtacctgcgaaccttggacgagggtccgaggttgggcttggatacgccgccaagaaaccactacgtgccacgtg

SEQ ID NO: 17244 - DNA, 427 bp, Glycine max
  Clone ID: LIB3106-108-Q1-K1-A2
tccacgcgttcgcccacgcgtccgcccacgcgtccggttgcattacatcacaacatcaacatggctgccactgctgctgcaggcatagcttccttggtttcttcttctattaacagtgtcaaacgtcttcgttcctccaagaactgctccataatagaccctctcataacaacagtgccctcaaaccgtggcatgtttgggtcacacttggtggaacctttgtccattaattcgcacaagttgtggggacctagaatttctgctgctgttgcacaagaagaggctgctgatgatgcggatgatgatggtgctggtttagttgaagaagagaaagtggacgagaatgaacgagaagcggtggcagaacatgactctgattcctctgccaccaatgcttattttgggaatttgccttatagtgatgata

SEQ ID NO: 17245 - DNA, 438 bp, Glycine max
  Clone ID: LIB3106-108-Q1-K1-A3
aacccttccaaaaactcgtgcatgctttccttcgaaacctgctaacttacccatttgttagacatggcttggggaacaaaacattggtactgagaggaggatactgtgacttcgttaaaggatcttttgaactctggggccttcagcttgagcttgcatactctttatccgtatgaacattcaccattatcaatgacctcatcttgggtccctaagtattctgctatctaaaacgtactctgtaattaattgctcttgccataatgcatgcatgtgctgaatttcctaataataaaagtggatatggagatttctccacatatcaccctctattccaaattgaagttcaatccgttttgttcaacgaacgtgtaacattactatggtctttcaccactgcatttttattctttgatagggtaaagatgtggccaccat

SEQ ID NO: 17246 - DNA, 423 bp, Glycine max
  unsure at all n locations
  Clone ID: LIB3106-108-Q1-K1-A4
tccacgcgtccggctcaaccctagtaagccgcaatggtgaagtactcaagggagcctgacaatccaactaagtcttgcaaggctagaggcgccgaccttagggttcattttaagaacacaagggaaactgcctttgcaatcaggaagttgcccttggtcaaggctaaaaggtacttggaagatgttcttgcccacaagcaggcaattccattcagacgtttttgtcgaggtgttggaaggacagcccaggctaagaatagacactctaatggccaaggacggtggcctgtcaagtcagcanaattcattcttgatttgctcaaaaatgctgagagcaatgctgaagtgaaaggttggatcgtgatgcactgtacatttcgcatatccaagtcaatcaagcacagaagcaaagacgccgaacat

SEQ ID NO: 17247 - DNA, 364 bp, Glycine max
  Clone ID: LIB3106-107-Q1-K1-G6
aacaacacaaggccatcatcatggcagctgcttccccaatggcaagccaactcaagtccaccttgactaggactcttgtagctcccaagggcctctctgcctcttcaccacttcacctcgtgccttctagaaggcaatttagcttcactgttaaggccatccaatcagagaagccaacctatcaagtgattcagccaatcaacggtgacccattcattggaagcctggaaaccccagttacatccagccctttgatcgcatggtacttgtccaacctgcccgcatacagaaccgcagtgagcccactactaagagggatcgaggtgggcctggcccacggataccctctggggggcccaatcgt

SEQ ID NO: 17248 - DNA, 389 bp, Glycine max
  Clone ID: LIB3106-107-Q1-K1-F11
aacaaatcaaagccatggccacctccaacttctctattgttctctccgtctccctagccttctttttggtgctacttaccaaggcacactcgaccgataccgtttctttcaccttcaacaagttcaacccagtccaaccaaacattatgctccaaaaagatgctagtatttcatcctctggggtgttacaactcaccaaagttggcagcaacggcgtgcccacctcgggatctctcggtcgtgccctttacgctgccccaatccagatttgggacagcgaaaccggcaaggtagccagctgggctacatcctttaaattcaacattttcgcacccaacaaatcaaactcagctgacgggcttgccttcttctttgcacccgtcgggtct

SEQ ID NO: 17249 - DNA, 435 bp, Glycine max
  Clone ID: LIB3106-107-Q1-K1-F12
cttagtcccaattttctagggttttattcattttccgatggcttctgcagatgttgagtaccgttgctttgtcggtgggctcgcttgggccactgacgaccatgccctcgagagagccttctctcagtacggcgaaatcgttgaaacgaagattatcaacgatcgtgagactggcagatccaggggttttggatttgtgaccttcgcctcggagcagtccatgaaagatgcgatcggagcgatgaatggacagaacttggacggccgtaacatcactgtcaatgaagctcagtcccgcggtggcggcggcggcggcggaggaggaggatacaatcgtggtggcggtggatatggtggtcgtagtggcggtggcggtggtggataccgtagccgtgacggtggttatggcggtggctatggtggtggtgggtggtg

SEQ ID NO: 17250 - DNA, 406 bp, Glycine max
  unsure at all n locations
  Clone ID: LIB3106-107-Q1-K1-F3
tttaggtgacaaaactactcacagagaaagacactcggagaccttgcaagacttcatcaatggctgtcaaagtttatattgtgtactactccatgtatgggcatgttgagaaactagcagaagaaataaagaaagggtttcctctgtggaaggtgttgaggccaaattatggcaggtacctgagacgctgcaggatgaggtgctcggtaagatgagtgcaccacccaagagcgatgtaccagtcattaccccgaatgaactatccgaggctgatggctttgtattcggcttcccaacaaggtttggaatgatggctgctcagtttaaagcttttctagatgctactggaggcttatggagagcacaacagcttgcangcaagcctgctggcatcttttacagcact

SEQ ID NO: 17251 - DNA, 363 bp, Glycine max
  Clone ID: LIB3106-107-Q1-K1-F4
caaagcattacaaatgacagttactttggttattatggatgggataaaagctgtctttgacccatgtaactgtgttaacttttagagaaatgagcttgtataaaattgattgtagaggctaagctttagcctcaggggtgcaacaactgattatcatttagttgtgacattattaaaaaaaaaaaaaaaaaaaaaaaaaaaaaaaaaaaaataaaataaaataaaaaaaaaaaaataaaaaataataaaattaataaatttattaaataataaaaaaataataagggggggccgttttaagggatccaattttacttacccgggcttgcgaagtaaaaatttttttttaggggccccctaaat

SEQ ID NO: 17252 - DNA, 371 bp, Glycine max
  Clone ID: LIB3106-107-Q1-K1-F6
cttgagttaaaaaatggcagcagcttcttccatggctctctcatccccatccttggctggcaaggccgtgaagctgggcccatcagccccagaagtgggaagggtgagcatgaggaagaccgtcaccaagcaggtctcctcaggaagcccatggtacggcccagaccgagtcaagtacttgggcccattctctggcgagcccccgtcctacctaaccggtgagttcccaggcgactacggctgggacactgctgggctttccgcagacccagaaaccttcgccaagaaccgtgaactcgaagtgatccactccaggtgggccatgctcggagccttgggctgcgtcttcccggagttgcttgtccgcaacg

SEQ ID NO: 17253 - DNA, 319 bp, Glycine max
  Clone ID: LIB3106-107-Q1-K1-F7
ctgggatgacgttgttgctggccctcaacctgagcgtggccttggcaagctcagaaaactcaccaccctcaaaactattgatgaaggagacagtagcaagctgcagaagacgttgtcgatgccgtcgacaccgacaatcccgatgactcccacgactccaacgacaccgggatccgcgcgtaaagctgacaacgtttggaggagcgtcttccatcctgggagcaactccgccacaaagaccatcggtgctcagatgtttgacaaaccactttccaacactcccactgtctacgactggctgtacagtggggagaccaga

SEQ ID NO: 17254 - DNA, 413 bp, Glycine max
  Clone ID: LIB3106-107-Q1-K1-F9
cccacgcgtccgcgaaacggcagcacgcgcaaaaatggtgaagtttctgaaaccaaagaaagccgtcatcgtccttcagggacgctacgccggcaaaaaagccgtgatagtgcgaaccttcgatgaaggcacgcgcgagcgcccctacgggcactgcttggtggcagggataaagaagtaccctgcgaaggtgatcaagaaggattcggccaagaagacggccaagaagtcgcgtgtgaaggcgttcgtgaagctcgtgaactaccagcacctcatgcccacgcgctacacgctcgatgtcgatttgaaggacgcggttacccccgacgtgctccaagccaaggataagaacggtactgctctcaaggagaccaagaagcgcctcgaggagaggttcaagactgggaagaatc

SEQ ID NO: 17255 - DNA, 327 bp, Glycine max
  Clone ID: LIB3106-107-Q1-K1-G10
ctttctcattttctccacacgctctttctcttcaaaaccttcacatataccccgaagcaccaacatccaacggagtgggggtaggttacgcttatttcaagacatgaagattccttgcttttcttgtttcttgccatcgaccactgaagaaaacaacaacaacaacgactacccagatgaagatgggagctttcgtttgttcacttacaaccaattgaaattagccacgtgcaattttcattcctcggagaacgttggagaaggaggctttggatctgtcttttaaggtgaagcttggtaatggatcttttgtggcggtgaaagtgc

SEQ ID NO: 17256 - DNA, 318 bp, Glycine max
  Clone ID: LIB3106-107-Q1-K1-G12
agtgatttcagtgagtgatcggtgttcacttgatctcatcataatcgtcagcgtcaattgaagaagatgccgatcagaaacatcgccgtcggaaggcctgaagaggcgactcaccccgacacgttgaaggcggctttggctgagttcatctcaaccttcatcttcgtgttcgccggctcaggctccggcatcgcctacaacaagctcaccgacaacggcgctgccacccctgccggcctcatctccgcctccatcgcccatgcattcgccctcttcgtcgccgtctccgtcggcgccaacatctccggcggccacgtc

SEQ ID NO: 17257 - DNA, 477 bp, Glycine max
  unsure at all n locations
  Clone ID: LIB3106-107-Q1-K1-G2
gtctgaacagaaatcaaatgaaagcagtgaacatagagatgaagtccaggaggccatatcttggtacaataggatccttggttttcagattgaaggtggacgtggggtaaaattcagcttcaagaatattaatgtggacaacccaaatgaggagttcttttttaccatccgccacgaagatgacgtgtatacattgctaaattgtaaaccatctgtcaaagatactgacgagttgatccatgaattaaacaacacaaatgggctatttaaatttgtcagaacaatgaggaaaaagtttcaagaagtagtggcacaaggccgtttatctatgacaacaaatgaacatcaagaatctgcctttatctctgcatctggtccagttntatcaatatcaaccattactgaagattatgatcatcaagatgaacccaccaaaggtaatgcacatcttccagaaacaagttaatcgaagaaggg

SEQ ID NO: 17258 - DNA, 370 bp, Glycine max
  Clone ID: LIB3106-107-Q1-K1-G3
aatacttaggatgcacttccatgattgctttgtgcgaggttgtgacgcttctgttctcatagccggtgctggcactgagagaacagcggggccaaaccttagtttgagaggatttgatgtcattgacgatgctaaggctaagatcgaggctctgtgccctggtgttgtctcttgtgctgatatccttagccttgctgctcgtgattctgtagttctgagtggtggactaagttggcaagtgcccacaggacgcaaagatggaagggtttcaattggatcagaagccttaactttgcctggtcctaatgataccgtcgcaacccagaaggataagttttcaaacaagggccttaacaccgaagacctcgtc

SEQ ID NO: 17259 - DNA, 368 bp, Glycine max
  Clone ID: LIB3106-107-Q1-K1-G4
cttttctattccctcaccaacgtaccgttgttcaatttcaatttcaatttctcggcagccattgccatgttctttcacggctcaagtgagaagaagagggaaagggaaagtggtaatgagcatggaggcaggcattggagtgatgggcaccaagttgggtatgatgagctatttcgaatccgacggagaggttgttcctgtcactgtcgtgggtttcaaagaaggcaacatcgtcacccagatcaaaactgaggccaccgatggatacgacgccgtccaggttggttaccgaagggtcagagatcgcaaattgaccaaacccgaaatcggtcatctccagaaggtcggcgccattcccatgcgccatc

SEQ ID NO: 17260 - DNA, 399 bp, Glycine max
  Clone ID: LIB3106-107-Q1-K1-G5
atcggtgaaggcctggagggtgaatcacttctgatctgttctccattggaagccgtcgtgcattctgagtcagaccgaaaactcacagtcacactcattacgagttgaaatcgttggaacctcgtcgaacaaccattcaaattgagacagacacacgtgctctgactcgccggaatctcaccggaaaacaagttcgtcggaactcagttggcgaacttgaaattgacgcttagggcaactccaaccaaaaattccgtccaaaacgagggaattctaaaattcccattcgctctctctctcgctcttgcagattcacgctcgttctcactctggcggatcgtggctcgttttcgctctcaagctttctctctggttgaagctgaagagtaacctgagata

SEQ ID NO: 17261 - DNA, 415 bp, Glycine max
  Clone ID: LIB3106-107-Q1-K1-F10
cccacgcgtccgagaaaaacaagtagttgagaactaagaagaaggaaatggcttcctcagtgatctcctccccagctgttaccaccgtcaaccgtgccggtgccggcatggttgctccattcaccggcctcaaatccatggctggcttccccacgaggaagaccaacaatgacattacctccattgctagcaacggtggaagagtacaatgcatgcaggtgtggccaccaattggcaagaagaagttcgagactctttcctacttgccagacctcgatgatgcccaattggcaaaggaagtcgaataccttctaaggaaaggatggattccttgctttggaattcgagttggagcacggtttcgtgtaccgtgagcacaacaggtcacctggatactatgatggacgctactgga

SEQ ID NO: 17262 - DNA, 389 bp, Glycine max
  Clone ID: LIB3106-107-Q1-K1-D4
ccgtgaccatggcggctgcgtttacaagtacaagtgcaacactgagactgtcaaatgttggagagagcagaggtttgcagctgcgtaagtgtaaccctaatcctaataagctgaaggttatgggggggtttggaggttgttctggagtggcagtgggtgtgagagaaagaaaaggaattggaagggttagggttcgggttcgggcgagttcttcgtcggacgaggcagtgagtgcgcagtcaaaagtgactcataaagtattctttgacgtcagtattggaaatccacgttggaagcttgtgggacgtattgtgattggactgaacggcgacgatgtccctcaaacgggcgagaactttcgtgccctttgtactggagagaaaggcttt

SEQ ID NO: 17263 - DNA, 51 bp, Glycine max
  Clone ID: LIB3106-107-Q1-K1-D5
taatcagtaattgaagtatcaagtttttcctcaaaaaaaaaaaaaaataat

SEQ ID NO: 17264 - DNA, 462 bp, Glycine max
  Clone ID: LIB3106-107-Q1-K1-D6
gttagaagtaaagaagatcatggcttctctagcaaccttggctgctgttcaaccagctacgatcaatggccttgctggaagttccctctctggaactaagctctctttcaagccctctcgccacagtgtcaaatccaagaacttcaggagtggtgccgtggtagcaaagtatggtgacaagagtgtgtactttgatttggaggatctgggcaacactacagggcagtgggacttgtatggctcagatgcaccttcaccctacaaccctcttcagagcaagttcttcgagacatttgctgctccattcacaaagaggggattgttactcaagtttctgatattgggaggtggttccacccttgcatacttcagtgcaactgcctcaggtgacattctaccaatcaagaaaggaccacaactcccaccaaagctcgggcctcgtggcaagatctaatttgattt

SEQ ID NO: 17265 - DNA, 391 bp, Glycine max
  Clone ID: LIB3106-107-Q1-K1-D8
tgttgttgtaactcgttcttcttcttttgttgttctgtgtttgtgtttgttttttctctcacctgaaaatgtcttgctgcggtggtaactgtggttgcggaagctcctgcaagtgcggcaacggctgcggaggctgcaagatgtacccagacttgagctacactgagtcaaccaccaccgagaccttggtcatgggagtggcacctgttaaggctcaatttgagggtgctgaaatgggtgtgcccgctgagaacgatggctgcaaatgtggaccaaactgctcctgcaacccctgcacttgcaagtgaggttgtgggagagcaagcttcaagcagagatagcccttaattaggaataatgataaactattaatgtgtagctaaaaacttat

SEQ ID NO: 17266 - DNA, 382 bp, Glycine max
  Clone ID: LIB3106-107-Q1-K1-D9
tggatatgccgttgagcgtaaagcacgcttcacgaacgcgtgtcgtttttgtgttactgcttcctggcatcttgggtgggaaaaaaggatctctaccggctgctattgatcaacacgcctactgccaaaggagagagcaaaattcagagtgaagacaagcaacgtgatgcagagggagaagatggtaacgatgatgaaggcgacgatgacgacgatggagatggtggatttggggagggtgaagaggagttgtcatctgaagatggaggtggatatggcaacaattccaacaacaagagcaactcaaagaaggcacccgaaggtggcgcatgaggtgcaaaaaagaatggggaagaggatgaagatgaagatggtgatgatc

SEQ ID NO: 17267 - DNA, 405 bp, Glycine max
  unsure at all n locations
  Clone ID: LIB3106-107-Q1-K1-E1
caaggggcaattttttcaaaacctttttctctctcgcaacctcacctcttcctccttcaatctctttcggaatttcccaaaatccttagtgggaggaagagatggttctgactcagaagcttcacgaagccttcaaaggcaccgtcgagaggattactggcccccgaaccgtttccgccttcaaagaaaaaggagttctcagtgtctctgagttcgtcaccgctggcgataatctcgttgccaaatgccccacctggtcctgggaatcgggtgatccaggcaagaggaagccatacttgccacctgagaaacagttcttgattactagaaatgtgccttgtcttcngagagctgcatctgttgaagagaatatgaagctgctggagggggaagtctactcgatga

SEQ ID NO: 17268 - DNA, 451 bp, Glycine max
  Clone ID: LIB3106-107-Q1-K1-E10
cccacgcgtccgcccacgcgtccgcccacgcgtccgtctgcttccgagttccgagtggcgagttgcatatagagcaatgagtcatgaatcgtttatatatagcttcgtggctcgggggacgatggtgttagccgagtacaccgagttcactgggaactttcctgctattgcagctcagtgccttcagaaactaccctcttccaataacaagttcacctacacatgcgaccaccacaccttcaattttctcgtcaagacggttacgcttactgtgttgttgccaaggaatctgttagcaaacaaatctctattgctttccttgaacgtgtaaaagcggactttaagaaaagatatggtggtggaaaagcagacacggctgttgccaaaaagtttaacaaggagtttggaccatttatgaaagagcacatgaggtttatcatagaccatgctg

SEQ ID NO: 17269 - DNA, 156 bp, Glycine max
  unsure at all n locations
  Clone ID: LIB3106-107-Q1-K1-E11
acggccacgcgtaacatccacggcctcccttttattcttatgaagagacgctgagcaaaccagggtgggccatttaaaatgccggcgggaccgntctattctgtaagagaactccgacggacttttaggccgcctcccaacagtatctctatctaa

SEQ ID NO: 17270 - DNA, 459 bp, Glycine max
  Clone ID: LIB3106-107-Q1-K1-E12
cccacgcgtccgcccacgcgtccgcccacgcgtccgcccacgcgtccgaatttttcaatggtggtgtagaggggaccatggtaaagtagaaacgcgcacacatcattggatcaagtctccctcagtctctacgtacaagttgtgtgagtcagcgtcatcatcggtgatggagtgaggacgtgtgcaagtgttgccgttattatatatagcataggcgcgcgtttacaccatcaaccgctaatccattttgttcagtgtgggacatagaagctgttcttgtgtgtctgagagagagagatggagaaagaaacagagatgaagcaatccaagttcaagaggatttgtgtcttctgtggcagtagtccagggaacaaaactagttataaagacgctgctattgagcttggaagagaattggtgtcaagaaatattgatctagtatatggagggggcagcatt

SEQ ID NO: 17271 - DNA, 118 bp, Glycine max
  unsure at all n locations
  Clone ID: LIB3106-107-Q1-K1-E2
tnaaaaatcttaattgangataattcaatctgatggcttgattcanaanaaaaaaaanaaaggggggaataaaaaaaaaaaaaggggggttgtaaataaaaatgggggggacgtttta

SEQ ID NO: 17272 - DNA, 363 bp, Glycine max
  unsure at all n locations
  Clone ID: LIB3106-107-Q1-K1-E3
cccacgcgttcgcccacgcgtncgaattcgaattcccaatccaaaaccctaataccttcgaagaacctagtagtgaatcagtgatggcacctaaggcagagaagaagccagcggagaagaagccggtggaggagaagaagtcgacggtgggagacaaggctccggcggagaagaagccgaaggccggaaagaagcttccgaaggagggaggagccggcggagaaggggggaagaagaaaaagaggaacaagaagagcgtggagacatacaagatatacatattcaaggttctgaagcaggtccaccctgacattggtatctcaagcaaggccatgggaatcatgaacagcttcatcaacgaca

SEQ ID NO: 17273 - DNA, 456 bp, Glycine max
  Clone ID: LIB3106-107-Q1-K1-E4
atggctagccaatcaaacactaaatcagttcacgatttcacagttaaagatgccaggggaaatgatgttaatctcgccgattacaaaggaaaggtccttctccttgtcaatgttgcctcacaatgcggcttgactaattcaaactacacagagcttaatcaattgtatgagaaatacaaagggaaaggacttgaaattctggcattcccgtgcaatcagtttggggctcaggagccaggaactaatgaagagattgtggagtttgcttgtactcgcttcaaagctgagtttcccattttcgacaaggtggatgtgaatggtgacaatgctgctccactgtacaagtttctgaaatcaagcaaaggtggactctttggggatagtatcaaatggaacttctccaaattccttgttgataaggatggaaatgtcgttgaccgttatgcacccacaact

SEQ ID NO: 17274 - DNA, 409 bp, Glycine max
  unsure at all n locations
  Clone ID: LIB3106-107-Q1-K1-E5
gaaggtccggcgaagatcgtggccacgcctcatgctaagaagctcgcaaagcagcacaaggtcgacattgcaacggtcgccgggaccggtccgttcggtaggattactccggcggacgtggaggccgccgccggaatcgcgccgtcaaagagaaatgtggctccggcggcgattcctgctccggcgactccagctcctccatcgaaagctgcttctggttctgctgcaccggctccgattccgggttctagtgttgttcccttcactactatgcaatctgcggtggcgaagaacatgatggagagtctatctgtgcctacgttcagggtggggtaccctgtgactactgatgcgttggatgccctgtatgagaaggggaaacccnagggtgtgacaatgacggctattt

SEQ ID NO: 17275 - DNA, 128 bp, Glycine max
  Clone ID: LIB3106-107-Q1-K1-E6
cccacgcgtccgaagggaagtcggcaaaatttatctcgtaacctcgggaaaaggattggctgtgagggctggtcacgggggtgccatttcctaacccttctgctgtttgtggtttgttttatcttttt

SEQ ID NO: 17276 - DNA, 335 bp, Glycine max
  Clone ID: LIB3106-107-Q1-K1-E7
cccacgcgtccgcccacgcgtccgcccacgcgttcgtgcgcttcagcacaatgggtgcctacaagtatgtttcggaggtatggcgcaagaagcagtctgatgttatgagattcttgcagcgggtgaggtgctgggagtatcgccagcaaccttctattgtccgtttgacaaggtctactcgcccagataaggctcgtcgcttgggtttcaaggctaagcagggttacgtgatttaccgtgttcgcgtacgaaggggtggccgtaagagaccagttccaaagggtattgtttatggtaagcccaccaaccaaaggtgttacttaactgaaaattta

SEQ ID NO: 17277 - DNA, 247 bp, Glycine max
  Clone ID: LIB3106-107-Q1-K1-E8
gagacacatcacaaaaatggttcccatcacttgtctcccttcccacatctaaattcggctgaggtttttatagctgcgggtgtttcttgtgatctgtctcttatcagtgttcaactcacttggggggcgggagggacatcaagagtgattccagctttggattgtccccacccaataagacgccaatgcttctcaacacgactacttatttgcaatctttttgcccttgcttgtgcacacaggggaa

SEQ ID NO: 17278 - DNA, 468 bp, Glycine max
  unsure at all n locations
  Clone ID: LIB3106-107-Q1-K1-D3
atggaccgcagaagcctcctctgcctcgcaatcatcggcattgtcgtcgccgccgtcggaggtgagtctccagcggcggctcccaccacttcctcggcatccccagccacagccccttctaaacctaaaccaaaatcacctgcgccagttgcttctcccacttcatctcctccagcttcatcccccaatgctgcaaccgcaacccctcccgtttcgtctcccacggtagcatctcctccgtctaaagctgctgctccagctccagcaaccactcctccggtggccacacctnccgcggncactcctcctgcggctacacctcctgctgtgacaccagtgagctcgccgncagcgccagttccggtgagttcttcaccagcgcctgtnccggtgagctctccccttgactggcaccgacaactccggcacccgtggtagcacccagcgctgaggttcccgttcccgttc

SEQ ID NO: 17279 - DNA, 374 bp, Glycine max
  unsure at all n locations
  Clone ID: LIB3106-107-Q1-K1-E9
gaagcaacgagcaagataaggcaaagaaagggttagaaggcactgccatagatttacctactaaccgccgtgtcaacctgaaaagcgctaccagcgacgacgacttcaccaacattcttgcacacatcaaatcctccaaaacccccgctgtcatcaaatatggcgctccttggtgtcccgtttgtatccaaattctcccagcattctgtagactgagcaataattttccaaagcttacctttgtatacacagacatcgatgaatgcccagaaacaactcaacacattcggtacactcccaccttccaattttaccggaatggtgaaaaggtagatgagatgtatggtgcttggtggggaagagaggctncatga

SEQ ID NO: 17280 - DNA, 410 bp, Glycine max
  Clone ID: LIB3106-107-Q1-K1-F1
agagtttgttgtgagctataagctagtttatcgtgaggagaatatgaagttgtttgttttctttgttgctgcagtagttttggtagcatggccatgccatggcgcaggctaccaaaggttccctctccgaatgaaaactggctatggtgagcgttcttcggaggtaaaatgcgcaagttttaggcttgctgtggaagcacacaacatccgagcctttaaaaccattcctgaagagtgcgttgaaccaacaaaggactacattaatggcgaacaatttagatcagactctaaaacagttaaccaacaagctttcttttatgctagtgaacgcgaagtccatcacaacgacatatttatattctgcatagataacaccgtactctctaatatcccatactatgaaaaacatg

SEQ ID NO: 17281 - DNA, 451 bp, Glycine max
  Clone ID: LIB3106-107-Q1-K1-B6
cgtccgccaacccgtccgaggacttatttttggtaggccattcaatttggccattaataaaggattggaaagggcagaccaaattggaggaggcaaagctgtggccccagtcctagccattggcacagcaaatccacccaatttcatccttcaggaggattatcctgacttttactttcgggtcaccaatagcgaccatttgcaccgcttgaagcaaaagttcaagcgcatttgcgagaattcaaagatagaaaagcgacacatagtccacacggaagaatacctaaagcagaactcagacagcggcacgtacgatggccttcccttggagacacgacagaatgtccccacggaacaggtaataaaattaggtatggaagcagcatcaaaggccattaaggaatggggcgaacccttatcagaaatcacacacctcatcttctacaccact

SEQ ID NO: 17282 - DNA, 377 bp, Glycine max
  unsure at all n locations
  Clone ID: LIB3106-107-Q1-K1-B7
gaaatattgtaaatgttatcagtaccattcaggccaacaaaataacggaggatgggtcccaggcagcccaaggtttggttgttcgttgaggacgattgagtgaagcaattatctgagtatctagattttattcaggtggaattttttgatcttaaacagaggataagagtgtaatttgttttgttacgatttatttttccatttattttagttggctggtgactctaattatactaatcaactttggtatagccatttttggaaaaaaaganaaatttatcatattttgtaatgttatctatatttaattatatgttatataatcttattataaagtttatttttagttggattgtatctctttttatttttttgta

SEQ ID NO: 17283 - DNA, 369 bp, Glycine max
  Clone ID: LIB3106-107-Q1-K1-B8
ataaaccccctccagagaacaagaatcaaagaatggcaactatgactggtgtgagcctttcaagccccagggttttcttcaacgcatcaccctcaccgcaaaacacgtacgccgtaaagttcgcagttccactcagccaagggatgcgacttggtagtgtcaggttgggtcgggtgatgaggatccgacccgttcgcgcagctccagagcgcatttcggagaaggtggaggagagcataaagaacgcgcaggaggcgtgcgccggcgacccgacgagcggcgagtgcgtggcggcgtgggacgaggtggaagaactgagcgcggctgcaagccacgccaaatacaagcaaagggaaaagactccgaccc

SEQ ID NO: 17284 - DNA, 79 bp, Glycine max
  Clone ID: LIB3106-107-Q1-K1-B9
gttcggtctaaaacatggatattttcacccatttttattgcgaacttttattcaagcttgttggtttaactagcggagg

SEQ ID NO: 17285 - DNA, 355 bp, Glycine max
  unsure at all n locations
  Clone ID: LIB3106-107-Q1-K1-C1
cccacgcgtncgcccacgcgtncgcttgcaacaagtaactcgttcagattttggtttttgcttccctatccgctctctcttgttcacttcagtatggcggtggtaccttacaccaccggttctgcacctcttctttctcctccttctacttctagtgttgccacaaagctctactccggattgaaacttcaagctgcgagtcctttcggagctgcaaaacctaacgtaaccgctgagttttatggaaaagttcacaacactcttcactgtcggtatgctaaccacaatacatcaatggcacgtattcgaatgatgccaatagggactcctaaagtcccctataggacaccctggg

SEQ ID NO: 17286 - DNA, 178 bp, Glycine max
  Clone ID: LIB3106-107-Q1-K1-C10
cacaatataaaatatagacaataatctattttttatattcttcaaattctaacaataggtggggtaaaaaaaaacctaagggtgtgcaacaaaatattaatcaatatctcaaagtttttatttttgtgtttcttaccatggagatccttactttgcgtatcgtaacatataatttaac

SEQ ID NO: 17287 - DNA, 259 bp, Glycine max
  Clone ID: LIB3106-107-Q1-K1-C11
gataactagaaacagtgtgatgaaaatgaaggtccttgttttcttcgttgctacaaggttggtagcatggcaatgccatgcgtacgatatgttccctctccgaatgaacactggctatggtgcccgtactccggaggtgaaatgcgcaagttggaggcttgctgtggaagcacacaacatctttggctttgagaccattcctgaagagtgcgttgaagcaacaaaggaatacatccatggcgaacaatatagatcagac

SEQ ID NO: 17288 - DNA, 404 bp, Glycine max
  Clone ID: LIB3106-107-Q1-K1-C12
gccaaacctcaaccctatgctgggtgctgatgcaactcttaggccacgttctctacccttgaaaagaagaacatgctttactaccagagccattctctcatccaccagagaagatgtcttggagcatttgagcgagcgaagagctctcaagattatctcaagcctgcagaatttcaatgaagacaatgttgcctcggttgtcactgctgctgacaagggtggagcaactcacgtggatatagcatgtgaccctgagttggtaaagctggccattggcttaacttcttgtccggattgtgtttcttctgtagatcctgcaacatttccagctgcagttgaagcaggagcactaatggttgagattggaaactatgattcattctacgagaagggaatatttttca

SEQ ID NO: 17289 - DNA, 348 bp, Glycine max
  unsure at all n locations
  Clone ID: LIB3106-107-Q1-K1-C2
cccacgcgttcgnccacgcgttcgcccacgcgttcgcccacgcgtncgacggccgccgccgaaaactttccggtgaatgtaccaccggtgttgcctcccacgcggttgcctgaagatctgtatccggatcgcgtgcctatcaccatcatcgacacctcttcccgtgctgaggatagtgataaagttgctgaagaattgcagagggctgacacagttgtccttacctatgcatgtgatcggcctgagacacttgaaaatcttagtatattttggcttccacatcttcgcaaactagaggtgaaagttccagttatagtagttggttgtaagcttgatttgagagatgag

SEQ ID NO: 17290 - DNA, 394 bp, Glycine max
  unsure at all n locations
  Clone ID: LIB3106-107-Q1-K1-C3
gaactcttgccattgcttgacattgttgcaaacaaagttaaagcaattcgacgtttaagagaactccttacaacgaaacttccaatgggaacttttcctgttaaggttgccatccctgtggttcccaccatcagagtattggttacttttacaaagtttgaagaactagagccagtagacgaatttgcaacaccaccatcaagcccatctgcagctgagcaagagagccctgcagtgcctcacttctcggcatcgtcttggtttcaatggataaaggctccttatcgctctagtacatctgctccaggatccagcagtaggatagaaaatattgaagacccttttgcaattccatctgactatactngggttactgctgaagcaaagaaaaaga

SEQ ID NO: 17291 - DNA, 390 bp, Glycine max
  unsure at all n locations
  Clone ID: LIB3106-107-Q1-K1-C5
gcctccgccagtcctcgccggaggccccgcatttcgccggccagccaagacccgccactccccaccgcaaattccgcgtcttggctggaaaattcagccccaagctcaatggccggaacctccgcgtggcggtggtgggaggcggtccggctggcggngccgccgcggagacgctggcgaagggcggcgtggagacgttcctgatcgagcgaaagatggacaactgcaagccgtgcggtggcgccatcccgctgtgcatggtgggggagttcgacctgccgctggacatcatcgaccggcgcgtgacgaagatgaagatgatatcgccgtcgaacgtggcggtggacatcgggaggacgctgaagccgcacgagtacatcggcatggtgc

SEQ ID NO: 17292 - DNA, 213 bp, Glycine max
  Clone ID: LIB3106-107-Q1-K1-C6
gccaagtgcagtgcatcagcttcatcgcctacaagcccccaggcttctaagtgtgaaaaatttgcaaagcatttgtagccgccaccccactttgtttgtttgtacttaaactacattcccatttgtttttgctttttgagatttcatcatcctgtatttttggtttctgttttcggacttcaatggaaattaatggatgagaactaatgaatt

SEQ ID NO: 17293 - DNA, 326 bp, Glycine max
  Clone ID: LIB3106-107-Q1-K1-C7
gcgttccactgttcttcatctttcttctggtcaatggttgctctacaattattctagtttttcccattcagtattcttcactaggtgcaagtattcctcttagcgccaatcttcagcaaatttgaatacttttcgcggattcatcatttttaattttgtttgggttctgaatactcaaggggttttaaggatatttcgttactgggtatccattttctcaaaaaaccatgtctttgttccttaaagctttgcctttgatggccttccgcacgaggccatctctggtgtttctgcgcagagtttccaacaccattccattgtcactt

SEQ ID NO: 17294 - DNA, 400 bp, Glycine max
  unsure at all n locations
  Clone ID: LIB3106-107-Q1-K1-C8
atgaaggtagcatttgcagctgttctacttatatgccttgtcctcagctcctccttgttcgaggtgtcaatggctggttctgctttctgttcctccaagtgctcgaagaggtgttctagagctgggatgaaggacaggtgcatgaagttctgcgggatttgctgcagcaagtgcaactgtgtgccatctgggacttatgggaacaagcatgagtgcccttgctacagagacatgaagaactccaagggcaaggccaaatgcccttgattatttttttttttcaccatccacacatcaacttcaagcctttgattcagtcactaccgtgcatgtatatctccaccttagagatattccaccatggaccctngctagctgattattgttactacctttattg

SEQ ID NO: 17295 - DNA, 324 bp, Glycine max
  Clone ID: LIB3106-107-Q1-K1-C9
gttagtagatcagctcttgttcacattaatcagacacattggcttgggcatatccggacaccaatatttggcatattgtaattttaggaagagaagaagtaaataattttttttgcagaaagtaaattcaaatttgataattatgtaaagataaaaaatatattttagtctatatatatatacacacgcacgtctgtcaagcgaaaagctgaattttgagtacctttttggcatatttctttctcaatatctgaaggggcccacgtaagttagtgtacctaaaattatgacatgaaacaaataaatggctgccacacacacata

SEQ ID NO: 17296 - DNA, 418 bp, Glycine max
  Clone ID: LIB3106-107-Q1-K1-D11
cccacgcgtccgcaaaaagtcctctctctctctctctctttcacactctcactttttctgtgcttctcttctctctcctttcaccctcttggaataatagagtagggagaaaaaaaagggtctcaaagatgagaccaaaagacgggtttttcatcaaaggtccctataagggagggttttttctcatgcatgtggctagcagcagcagcaagtgcaaggtggccatgagcatgaccatggtcaacgaccctttgaggagaattgggaggtgtgaccaaaaaaaagaagccattagtggctctgaaattggagctgacaattctcctgcagcaggagcagcttcttcattctaatctggtgctatcctatctgagctttttactactactactaccctttctttcttcatctaaattct

SEQ ID NO: 17297 - DNA, 84 bp, Glycine max
  Clone ID: LIB3106-107-Q1-K1-D12
aaagatatcagatcgtatactgttcattttaaaggtttcacagtatcatataagaatgctttggaaatattattttgtttgtgt

SEQ ID NO: 17298 - DNA, 389 bp, Glycine max
  unsure at all n locations
  Clone ID: LIB3106-107-Q1-K1-B5
cccacgcgttcgcccacgcgtncgcccacgcgtncggaaaaaacaaacaaaaaaagaagaaaaaaaaatgtctatggcatgttcaatcccatgcatcaaaatcccaacacgttcctcttccccatcttgcacttcatccagttcatcctattctttgcgggtctcttcttctaagcctcacaacagtgtcaccataaggaattctcaagctgaagggcctataagaaggccagtggcacccccaataagagaaccatcatcatcatcaagtgctccacagcttcagaagccaacacttccttctcagcctccatcaccatcctcttcaccccctcagaagccagctactgttgttggggatgataagaatgtcattacattggagtttc

SEQ ID NO: 17299 - DNA, 300 bp, Glycine max
  Clone ID: LIB3106-107-Q1-K1-D2
cttccttaagctccttagtgctgctccttgcagctctaattctatcccctcaagttcttgcaactatgagaatcccccagtgtgcaagcctcccactgagaaaccaccagtttataagcccccagttgagaagcctcctgtttacaaacctccagttgaaaaccccccaatttataagcctccagtagagaagccaccagtgtacaagcccccagttgagaaacccccaggttataagcccccagttgagaaaccaccagtgtacaagccctccgttgaaaaaccaccagtgtacaagcc

SEQ ID NO: 17300 - DNA, 444 bp, Glycine max
  Clone ID: LIB3106-106-Q1-K1-H7
cccacgcgtgcgcccttgaatggatcacctaaggcacgcgctttgaagcgtgctgttggtgagccagtcaaggggggaatagagcagggtcctcagattgattcagaacaatttcagaaaatactgaagtatattagatccggtgttgaaagtggagctactcttgaaaccggacgagatagatttggtaactcgggcttctatattcagcctactgtcttctcaaatgttaacgatgacatgctgattgcgaatgaagagatctttggcccagtgcacagcatattaaaattcaaggaccttgatgatgtgattcaaagagcagattacacacactatggccttgcagcaggggtgttcacaaaagacattaacacagctaatactttgactagagcattgacagctggaacagtgtgggtgaactgctatgatacatttgat

SEQ ID NO: 17301 - DNA, 455 bp, Glycine max
  unsure at all n locations
  Clone ID: LIB3106-106-Q1-K1-H8
cttgcttctattatttacttgtttttctctagtattcatggtgctcgctggtaaacttagtactgaacttggggtgaaagcatccgctaccaaatggttcaacctcttaaccacgcaacttcaccatgttcagaacctttgtgaaagagtgcatgaaaccaagctgcatgatggtgatgactggcacggtgttggtaattcggttaaacactggacttatgtcatagacggcaaggtacacacatgtcaggagagtattgaagccattgatgaagagaacaaaacaatcaaattcatgctcttcggtggagatattagtcagcactacaagagctttaagctgatctttgaagtgactgataagaacgatggcggtgctgctgttaaatggactcttgaatatgagangatcaaagagaatatcgatccctcacatggctacatggactactttg

SEQ ID NO: 17302 - DNA, 168 bp, Glycine max
  Clone ID: LIB3106-106-Q1-K1-H9
cgagccgcttctaattaatgataggtggtcttgcaaacttggctggaggcttcttcaaaaagtagttacaaagcaactaaataagaccttaattgagtccttattctcggtctagtagtggggtttgggtaatatgcaccagatcatagatttaaatcttgttattgt

SEQ ID NO: 17303 - DNA, 234 bp, Glycine max
  Clone ID: LIB3106-107-Q1-K1-A1
cgcttcgccacaaagatcacatcagtgcatatggagaaggaaatgagagaaggttgactggaaagcatgagacagcaagcatcaacacattttcttggggagtggctaaccgtggttgctcaatccgtgtgggaagagacactgagaagaatggcaaaggttacttggaagataggcgaccggcttcaaacatggatccatatgttgtgacatcattacttgcagagactacac

SEQ ID NO: 17304 - DNA, 377 bp, Glycine max
  unsure at all n locations
  Clone ID: LIB3106-107-Q1-K1-A10
gcaaatttgatcatttgattctcatatcagctttgatggaaggacccccattgatgggttttgcgattcaatcagaattccatttagtcatgttccaagtgaagaaggcatgaagcggggctagacaatacattatacgttgcagcgcagaacatcatttgcacattcatgataaatcttggacaagaacagcacattggagtgagttcgcgactacataccacactattttaaaataagggtgaatttgtatatgtacagaggagtgagaggctgcttatttttttattttaagtattgcgttgtataatgtattcgagttatgttaaaggttctctacactggcatgcactatcgngcattcatcatttgatagc

SEQ ID NO: 17305 - DNA, 363 bp, Glycine max
  Clone ID: LIB3106-107-Q1-K1-A12
cacaccatcaaatctggacaatatctatcttcaattttcttcagattctaacaatggtagattaaaaaaaaacctaaatttctgcaacaaataattaagcaatatctcaaagttttaatttttgtgtttcttaccagggagatccttacgtggcgtagcgtaacagagaatagaacgcccgagaacggagagagaggaaacgacgccagcgacgtaaaacaccataaccaatccgagaacccacggcatcagcatgaacccgatgaagaaagtcaccgatccacacagcatcagcgccaccgaaatccctagcagtagcgacgcgaaccccgccggagtaatctgcgccctcgccggcgaacg

SEQ ID NO: 17306 - DNA, 287 bp, Glycine max
  unsure at all n locations
  Clone ID: LIB3106-107-Q1-K1-A2
gcgcttacgaccatccccaagaatgcttttctcacccttgctcactctcactttcttgctcctcttctcttcttccgntgctgcgatttactcagcggcaacatgttctaacatagtgccgctgagataccgcagcgacagaatctccataacggacttcggtggtgtcggcgacggccgcacgctgaacacgaaagcgttcagagcggccgtgtaccgcattcagcacctgagaaggcgcggcggcacggtgctttaacgtgcctncgggggttacttaacggaga

SEQ ID NO: 17307 - DNA, 253 bp, Glycine max
  Clone ID: LIB3106-107-Q1-K1-A3
actagttctagatcgcgaggtggtcaacggtcaatgtcatcgccgtgaagaggccgcggagaaggcacacggttgttcaagcattaaaagtaagaccattcaaattggctgttatacgcgatagttgctctatgatctagactagaggcttagttagggttttctgttaccgccatggatttcgagagtaggaggcttcatttgctcatctccgtggttgccatcattgctcttagcttcacagctgaaaaat

SEQ ID NO: 17308 - DNA, 403 bp, Glycine max
  Clone ID: LIB3106-107-Q1-K1-A4
cgttcgcaaccaccggccatactcactgttgttctcaagggattcgattctctctgcactcacttctagggttttctctgcgctataagcaatcatggcggatgaaacaccaaatgagatgaaggaggaggttccagaaattgttccttttgatcctaccaagaagaagaagaagaagaaaattacaattgtagatcctgctgatgaacctgtggagaaattggctgagaagacagaaaacctctcagtttccgagggggttgagactgcatttactggtttgaaaaagaagaagaagaagcctgttgaaatgggtaacttgaatgatgagagtggagatgcaattgaagatttggatgatcacccctgagatgatgaaggagaaatgggttgtccccaggct

SEQ ID NO: 17309 - DNA, 387 bp, Glycine max
  Clone ID: LIB3106-107-Q1-K1-A5
gaatggaatttcgatgctcagtcatctcttttaccattctcttctctcttgctcttgcaggagagagccatgtccatgcatcgctacctgaggaagattattgggaagctgtttggccaaacactcccattcccactgcactgcgagagcttctaaagcctctccctgcaggtgttgaaatcgatgaactccctaagcaaattgatgatacacagtacccaaaaacattcttctataaagaagaccttcatccaggcaaaacaatgaaagtacaattcaccaagcgtccctatgcacaaccttatggtgtatatacatggttaacggatattaaagacacctctaaagaaggatatagttttgaagagatatgcatcaagaaagaag

SEQ ID NO: 17310 - DNA, 431 bp, Glycine max
  Clone ID: LIB3106-107-Q1-K1-A6
ccggggatacgagaatacaaactacaatcttcccttcaccctctcagatctaactcatccacccattcggttcggtttccactcctcacctgttattcaatcaaattcatttcttcttattagttcatgtgctagctgcttttctttttaaattttcagatttgttttttcctgttttgtacggaatttcgatcgaccaagatgagcgtggttggtttcgatttcggtaacgagagttgcgttgttgcggttgcgaggcagagagggattgacgttgtgctcaatgatgagtccaagcgtgaaacgcccgccattgtgtgcttcggtgacaagcaacgcttcattggcactgccggtgctgcctccactatgatgaaccctaagaattcaatctcacagattaagagacctcatggtaggaaattcgctga

SEQ ID NO: 17311 - DNA, 277 bp, Glycine max
  unsure at all n locations
  Clone ID: LIB3106-107-Q1-K1-A7
tggtgggcttcaaagatgtagaaagagttgcagactcaggtcaattaaccaacctcaaatgagagataaaacgaggaaacttgaggttgtcactcagaagatcccaccattattcaactcgatccatgctctccttggaaacaagtgagattttttttggctttgagatttttcttttgttagaatggttaataatacgaaactaggtttacttatccattcgtgaattatttgagatgaacttctaattaaatgctcaatatttatttgtgtcngt

SEQ ID NO: 17312 - DNA, 118 bp, Glycine max
  Clone ID: LIB3106-107-Q1-K1-A8
cgccgccgaccggccgattccggcgacaccgtcgtactgcccaccaactaaaacctcaccaaacagtgtgctattacaggtttcagcagtttgcgcgatgcggctgcgcgcattcgcg

SEQ ID NO: 17313 - DNA, 253 bp, Glycine max
  Clone ID: LIB3106-107-Q1-K1-A9
cccacgcgtccgtctatattttggtgctctgtgtctctacgatctggatccaacggtccaaaatgttcggggcttgtgctgcttgttttcccaggttttagagctccaaaccttcacatccacctcattcgtctccagatcttccttccttgataacgttttcgggttcgagaaggcacttgtttgtttgtcgtacgaaatggagactaaaccgagttcggtgatggttacgctcagttacggcgcgttgacg

SEQ ID NO: 17314 - DNA, 257 bp, Glycine max
  Clone ID: LIB3106-107-Q1-K1-B1
agttgaggaaatgggaacccttgggagagcgatctacagcgttggtaactggattcgagaaactggacaggccattgatcgtctcggttcccgtcttcagggcggttactacttccaagagcagctctctaggcatcgaactctgatgaacatatttgataaggctcctgttgttgataaggatgtatttgttgcgccaagcgcctccgtcattggagacgttcaacttggaagaggatcatccatttggtatggag

SEQ ID NO: 17315 - DNA, 357 bp, Glycine max
  Clone ID: LIB3106-107-Q1-K1-B10
cccacgcgtccgggagtttcagtctctttccagattctaccttcttctttccttaaccatgctcttccttgcaccctttcacgctcaagctaaaattaaagtcacttactgcgataagaaggcagactatcctgtgaaggtgtctggagttgaaatatcaccagaccctgtggagagtggcaagcctgctacctttaagaactcggctacttctagtaaagctatttatggtggagaagttggaattggagtttcatacgttggggtgcctggccatacttgaagaattgatctctgtcatgaagtattcctgcctgttggcaatggcaattttctgatttctcacacccaaacatt

SEQ ID NO: 17316 - DNA, 317 bp, Glycine max
  Clone ID: LIB3106-107-Q1-K1-B12
cagcaacaataacaatggcagcctcactacaagctgcagctaccttcatgcaacccaccaaggtgggcatggccactcgcaacctcaaatctacacaatgcatttctaaggcttttggcttggaacccgctgcagctaaactcatttgctcccttaagcccgatctcaaagattttgctcaaaaatgtgtcgacgccaccaaaattgcaggattcgcccttgccacctcagctctcgttgtttctggagcgagtgcagaaggtgttccaaagaggctaaccttcgacgaaatccagagcaagacatacttggaaagt

SEQ ID NO: 17317 - DNA, 295 bp, Glycine max
  unsure at all n locations
  Clone ID: LIB3106-107-Q1-K1-B2
gngtgagtcaatagcagccatcttctgctgcaagttgaggtccttatagaaccttttaatgaactcctcagccgccacgtcaacttggttatcgtctccaccttcttcgtccttcaaaggaaagggcgagtctgtgattctgatcagttttctcccaattggactttttccgaacccgggtaacggagaagcctcaaccttgttattgttgagtatttcgagcactttctgtacggtcgaaacgtcgtcgtggtgggggaacttggtggtggtggtgcaacggtggtggtggtga

SEQ ID NO: 17318 - DNA, 467 bp, Glycine max
  Clone ID: LIB3106-106-Q1-K1-H6
ctttcttggaactttgttactctcacacatgtctcgctccgtgcctttggtttcaaccattgttgtgttgcttctgcttctggtggccactgagatgatggggccaacaatggtggcagaagcaagaacttgtgagtctcagagccaccgtttcaaggggccatgtttgagtgacaccaactgtggctctgtttgccgaaccgaacgtttcactggaggacactgccgtggcttccgtcgcagatgcttctgcaccaaacattgttaattttaaaaaattaattaagagtgctttgatagaagatgatagatctatcatctttctactcgtgttgttaattaaccactttgtgtttgagaataagggttacccattctactatgggtttctctgtttgcctcttatcttatctagttagagatccttttatgaaacgagtgatcagtgtgaacgaaatatgttatct

SEQ ID NO: 17319 - DNA, 324 bp, Glycine max
  Clone ID: LIB3106-107-Q1-K1-B3
cccacgcgttcggcagcatgaaaatcaaggtggttgcacctcctgagagaaagtacagcgtctggattggtggctctatcttggcatcacttagcaccttccaacagatgtggatctctaagggcgaatatgatgaatctgggccagctatcgttcatcggaagtgcttctaagttgggtcaagagctggatggtgatcaagttcttcatgcacccagtcctgtgccatatttcagtcaagtttggttgacttatttgatatttgaagctttgggtttttaatagatatatctagtttaatgaatggatttgtaagttgagtat

SEQ ID NO: 17320 - DNA, 472 bp, Glycine max
  Clone ID: LIB3106-106-Q1-K1-G2
cccacgcgtccgtgttgatcgagataactagaaacagtgtgatgaaaatgaaggtccttgttttcttcgttgctacaattttggtagcatggcaatgccatgcgtacgatatgttccctctccgaatgaacactggctatggtgcccgtactccggaggtgaaatgcgcaagttggaggcttgctgtggaagcacacaacatctttggctttgagaccattcctgaagagtgcgttgaagcaacaaaggaatacatccatggcgaacaatatagatcagactccaaaacagttaaccaacaagcttacttttatgccagagacctcgaagtccatcccaaggacacatttgtgttcagtatagatggcaccgtactctctaatattccatactacaaaaaacatggatatggggtggagaaatttaactcgaccttgtatgatgaatgggttaacaagggcaatgcaccggc

SEQ ID NO: 17321 - DNA, 476 bp, Glycine max
  Clone ID: LIB3106-106-Q1-K1-G3
acgcaagcacataacagttgaagtgaatggcataaaaatgcatgttgcagagaaaggagagggtccagtggtgttgttcctccacggcttccctgagctctggtactcatggcgccatcagattctctctctcagctacctcggctaccgcgccgtcgctccccgatctgcgtggctacggtgacaccgaagcaccaccttcaatcagcagctacaactgctttcacatcgtgggtgatctccgtgcgcttattgactctctgggtgtccaacaagtgttccttgtggctcatgactggggagccatcatacgttggtatctatgcatgtttcgccctgacaaagatcaggcctatgactgcctcagtgtccctctacttcgcagagacccaaacatcagaacggtggatggcatgcgtgctttgaatggagacgactactatgtctgcagatttcagaaaccaggggaaatggag

SEQ ID NO: 17322 - DNA, 470 bp, Glycine max
  Clone ID: LIB3106-106-Q1-K1-G4
acgcccacgcgtacgtccacgcgtacgtccacgcgtccgcttttttcaaggcataggattggtgaggcagacttgaattgaagtgaagaaggagatggctgcaacctcttccttgtgctcatcgaccctccaatcccagatcaatggattcttccttcacaaaacctctctttcccatactccttccctcactttctccaggaggaaaatttcaaccacagtgaaggctacatctcgagtcgacaagttttcaaaaagcgatatcattgtctctccgtccattctttctgcaaacttttcaaacttgggagagcaagtgtaagcaatcgaattggctggttgtgattggattcacgttgatgtaatggatggtcgctttgttccaaatattacaattggacctctcgtggttgatgcattgcgccctgtgacagatcttcctttggatgtacacctgatgattgtagagc

SEQ ID NO: 17323 - DNA, 474 bp, Glycine max
  Clone ID: LIB3106-106-Q1-K1-G5
cccacgcgtccgctcttggatcttctcagagttatcagtcatcatcgagctcggctagccacacccatccgcacagttcagaagatgtgcagtgatactgatttagatgttgatccatttgatgacaccattcccactcgttccagatcaaagaataaccgtcctttcccactgataaatccaccttataaagttaagccttcaactactacaaatgaggacaaagatactaagattgatgaaaccttgccatctgacttcaaagtagaacgtgacaaatttgctgcgacatcgagttcagtccagaagacctccaaatcccaaaagctcaaaaaggaaagagtaggaagttcagaaaagggaacaacatccaaaaatttgtcaaaatccaacgagtttggttctggagagactacttcaccatcaaaactagatgaagagaaatctgttatgtcatcatcatcagctagtcac

SEQ ID NO: 17324 - DNA, 473 bp, Glycine max
  Clone ID: LIB3106-106-Q1-K1-G7
gttgattggttgactgacaagatgagaagccgtgaccacacagtctcagcaacccacggagacatggaccagaataccagggacattattatgcgtgaattccgttctgggtcttcccgtgtcttgataaccactgatcttttggctcgtggtattgatgtgcaacaagtgtctctagttataaactttgatctccctacacagcctgagaactatctccaccgtattggtcgtagtgggaggttcggaaggaaaggtgttgcgatcaattttgtcacaaaggatgacgagaaaatgctgtttgacatccagaagttttacaacgtgcaagttgaggagctgccttcaaatgttgctgagctcctttgatcagattttgtcctccgtcgtagtagatgaaattagtttgcgtttggaaactgttatgtaatgtttctcactctaacctgtctcccccccctttcgtttctttg

SEQ ID NO: 17325 - DNA, 449 bp, Glycine max
  Clone ID: LIB3106-106-Q1-K1-G8
gccaattggtggaagctccaaatggaggatccattaggaaggtaagtgtccaatttttcaccaaaggcgatgctacgcttagtgaggaggagctcactgccaacaaagccaagatccaagggcttgtaaagctagttgaagggtaccttttggcaaatcctgattattgaaggtctttgtagttaattaataagagtttgactatggtgcaaattaataagccttgatggatttgcaggctcagcaccaaggctttcttctatgatattttctaaatttttctttgttatgaattgggagattaatcaatcataaattaatagtgtggttttgtaaaaaaaaaaaagcaattaataatcaacaatagacttgaaatatagttgttaaacagtccatttggacaggaacgaaatattcgtaaccaaaaaacgtgaaattcttaataaaaa

SEQ ID NO: 17326 - DNA, 224 bp, Glycine max
  Clone ID: LIB3106-106-Q1-K1-G9
gctgaacgcacaatggggaaaagcgggcttcgggatcatgaagtggcgacaacgttggatcattgagagccgcagagagagtctgagagctgcacctgtgatgctcctccttgaactttacatgctccttatctattggctttgggacttgagtccaaccccagagaaccggcactacgactggctagtgcacttatgggcggtcttcactccctgaagcacaa

SEQ ID NO: 17327 - DNA, 482 bp, Glycine max
  unsure at all n locations
  Clone ID: LIB3106-106-Q1-K1-H1
acgttaaataaccctgttggtcactaccctccagaagctgcttattcggcgcattcagtaaacccgggtccggtttactatgtttccggtccggttcgaccgggatccgtgccgggtcctatgcaaaccccttatcactacggtcaacaatcgtatcatgctgtggtgccacctcaggttcctatcgggtaccatcctttggttacgggttcgggtcaagtatatggagcgggcgtgaggcacatgaccccactgcaaccttacagtcccttcaccacgggggcggttcatgacggtttgaaacatgacgtgtatcatgccgtgccaaattcgggtccggttgcggctcacccagttgttccgatgactggtttggatgaaccgcanagaggtggagcgtaatttgggacgggtcgcggccccaattgacttaataactgatcccatttttatttagtggatgggtgctgaattcttactac

SEQ ID NO: 17328 - DNA, 311 bp, Glycine max
  Clone ID: LIB3106-106-Q1-K1-H12
acgcccacgcgtacgcccaacagcaagaacgaataatttaacttgtaaaccatcccattcaatatcagttgagccggggtatctatctacgacgcctagggggtcgatttcttcgtacaacactacacatgccccaatggccccgcagggtactaatgcaagagcccagcaaaggtcacagtggacgacttcttatactcctgccttgataccgccggcaacaactcaaacataattaaagccgcattgacccctgcattcgacgcacaattccccgaccttaacgggcttttaatattcattgcacgcct

SEQ ID NO: 17329 - DNA, 430 bp, Glycine max
  Clone ID: LIB3106-106-Q1-K1-H2
acgaacgcttaatctctctcattccccatttcctcacctccttcaaccgctgctaaattctagggttccgaaatggacgctggcggaaagatcaagaagggcgccggacgtagaaagggcggcggcccaaagaagaagccggtttcaaggtccgtcaaagccggtctccaattccccgtcggaagaattggccgttatttgaagaaaggaaggtacgctcagcgtgtcggtaccggtgctcccgtatacttggctgcaggtctcgaatacctagctgccgaagtgcttgagttggctgggaatgccgcacgtgacaacaagaagaacaggattattccaagacacgtgcttttggcagtgaggaacgatgaagagttggggaaattgcttgctggagtgacaattgcacatggtggcgtgctttcaaaca

SEQ ID NO: 17330 - DNA, 469 bp, Glycine max
  Clone ID: LIB3106-106-Q1-K1-H3
ggatgatttcaagaaaaaggtttgccgatgcgtaaggaagtcacaagaaatgttgtgattcgtcgcgtatgcctcatactgctgctgctctttgtgaactggaggacatataaatgtgtaatggattggttcacctgttactgatgatccgtataagaatcgcattggaagtgtccacattcttcctttcttcagttccatcatgttctctgcatggccatttgtcataacttggaaaacaaactgtattctaagtgctttggccggtcttttgactactttattggaaaatttactttggtcattcgcataagtttatattggatttcttatctaaaaaaaggtttattattttagttttggtacttgtttgctcttattgcgatggctcggctgattttgcactatatagccagttgtagctctcaagttgagtgcggattgagttatttttcacaacagatcaacg

SEQ ID NO: 17331 - DNA, 447 bp, Glycine max
  unsure at all n locations
  Clone ID: LIB3106-106-Q1-K1-H4
acgcaccaagccaacagaagatgtttctccacattgttttcctcctttcccttctctcatccacttcccatgccactgtccaagacttctgtgtggcagaccttaagggtgcagacaccccttcaggctacccctgcaagccacctgcaaatgtaacttcagatgactttgtgtacacaggcttagctgaagctgcaaatgtcacaaacataatcaatgctgctgtgaccccagcttttgttgctcaattcccaggtctcaatggccttgacctctctgcagcaagattagaccttggtcctggtggtgttatcccactccacactcaccctggtgccaatgaactactcattgntctccaaggtcacatncttgctggattcatatcttcaagtaacatagcttatcagaaggtgctaaaaaagggagagctcatggtttttccac

SEQ ID NO: 17332 - DNA, 475 bp, Glycine max
  unsure at all n locations
  Clone ID: LIB3106-106-Q1-K1-H5
cggacgcgtgggctcctcatcttcctctttttctcaacaaaaaggggttcaattctagctagttctattacgtcgtccgcgaccatgaacatggcgatcgcgcttctgttcatggttttcgcagtttcatcagctttagacatgtcaataatatcacacgacaacgctcatgcggatagggccacgaggcgcaccgacgaggaggtgatgtcaatgttcgaggagtggctggtgaaacacgacaaggtgtacaacgcgctcggtgagaaggagaagaggtttcaaatcttcaagcacaatctgcgcattatcgatgaacgaaactctctgaaccgaacctacaagttgggactcaacgtgttcgctgatctcaccaatgcggagtacagagccatgtacctgcgaaccttggacgagggtccgaggttgggcttggatacgccgncaagaaaccactacgtgccacgtgttggag

SEQ ID NO: 17333 - DNA, 340 bp, Glycine max
  Clone ID: LIB3106-106-Q1-K1-G12
acgcgtacgcccacgcgtgcgctgaactcttcagagattttatggagaaaatgatgatcacagaagatgaaacgggtcttacaacaggcaaagaacagcaaagtgaagtgatgaacggagacaaggacaatcatggaagcgaagatggcaaccccaaagagtggttgaacctgatcataggtggaacttcttgactatcaacatctggagacactgatttacaagccagaccatcaaccactggcaaagtcttttcatgcaacttctgcatgaggaagttctttagcttacaagcactatgaggccattagaacgctctcaatatggaaaggtgagcttg

SEQ ID NO: 17334 - DNA, 306 bp, Glycine max
  Clone ID: LIB3106-106-Q1-K1-E4
acgcgcacgcgtacgccttgagggtttttcttctatagagacacacggagagagtgtcacagcaatcaaggcccttgaatggctaccactggggcttacattgcctactattctacgtacggacatgttgagaaaggagctgaagagattaagaaagggagctggttccgatgaacgcgtggaagcagagctatggcatgtacctgaaacactttctgaagacgtgcttgggaagatgggtgcacctgcagagagtgatgcaccgattattacacccaacgagctacctgaggctgatggcttatt

SEQ ID NO: 17335 - DNA, 465 bp, Glycine max
  unsure at all n locations
  Clone ID: LIB3106-106-Q1-K1-E6
gtttcgttcgccaccatgacttttaagcgcaggaatggaggtcgcaacaaacacggccgtggccacgtcaagttcattcgatgctccaactgcggcaaatgctgtcctaaggacaaggctatcaagaggtttctggtgaggaacattgttgaacaggctgcagtcagagatgttcaggaggcttgtgtctatgaacaatacacgcttccgaagctttatgtgaagatgcagtattgtgtttcctgtgctatccactctcatgttgtgagggttcgatcccgcactgataggagaaagcgtgagcctccacagcgatttatcagacgcagggatgatgcaccaaggcctggtcagcctggtcaagccccacgtcctgctggagtaggagctcctgcccgaacttaaaaaacaaattccaaagttttttggggcttgttggttcagttntatgttacaaacttatac

SEQ ID NO: 17336 - DNA, 416 bp, Glycine max
  Clone ID: LIB3106-106-Q1-K1-E7
gcggcgttaagaaagaaagaaaaatgaaaaaaagtcatggcagcgagtgacggttgcagcagctgcttaacattgtcgtgtgcaagtgcagtgcaaaatcaacatgtatcacaccctacaagcgttttgggagttcctaaaaacaatcagagtaaatggaaaacaccgcacaggttagttggggttgcggtgactcaaggctctgctgaatcaagcaagtccgatgaaaaaatcccttcgtgggccaaaccggactccgatgaacctgcggcgtgggcccgggacgagcccaacaacaacagttcgcaacaagaaggatttgagatcccgttctatgcttatttgcttgcctctgctatcactgctattgccgctataggctccattttcgaatatgtgaatcaaaaacctggttt

SEQ ID NO: 17337 - DNA, 271 bp, Glycine max
  Clone ID: LIB3106-106-Q1-K1-E8
acgcccacgcgtacgatttttactatttttttttttatttttttgttttattatatatttttttgggtaagttttttttattcaattgtattggtgattatttttttttatattcaatatttttttagtaagaacctaatgacaattatttttgaacgggaaaacaaaacagattaaaaaagattcggttatataaacattaaatgcttcattctagttattttaaaaaatattttcgtggtccataaaatatttacactaatattaaaag

SEQ ID NO: 17338 - DNA, 426 bp, Glycine max
  Clone ID: LIB3106-106-Q1-K1-E9
acgcccacgcgtccgcaagatccatagttggtgccttgtagtatgctaccattacacaaccagaaattagttttcgtgtcaacgacgtgtgccaattcatgtcaaagccctctgaacaacactggctagctgtgaagagaattctaaggaggtccacttcaggagccagcatttctcttggtcctaacttaatctcttggcgggctaagaaacaatcggttgtggcctggtcaagtactgaagccgagtatagaagcatggctctaattgctgcagaatcgacttggattcaaactcttctttatgaacttgaagctgcttacactactgctttaattctctttgacaataccagcactgtctcttttggctcataatcctgctcttcactcttaaacaaagcatatggagctggatctgtttttt

SEQ ID NO: 17339 - DNA, 177 bp, Glycine max
  Clone ID: LIB3106-106-Q1-K1-F10
ctcactatcatcatacgctacctttagccaccgctgctgtggtgctggacatgcatggtaatcctctgcggaaacggctggcgatatgacatctctcatgttgccaccctacttgaggaagccgtggtgcaatagcactagctgcaactggaaatgaaacactccctgtaactgtcc

SEQ ID NO: 17340 - DNA, 408 bp, Glycine max
  Clone ID: LIB3106-106-Q1-K1-F11
acgcaaaaaaccttctgtcaccaaaacttacaacaacaacaaaataagaagaaaattttagaacaatggaggcatgaaagatgaagcttttcttggctttggtggtttccgtgttggcgatggcagcaactggggtttcagctgctgaggcacctgccccaggtccttcatccgatgccaccaccctctttgtgcccactgcttttgcttctctctttgatcttgcatttggctttctcttctaattttccaacaaccctttggttatttgttacatatataacgtgcagaggtggtgcgtgcgtatcgtgcttcgttcttcactcttttatccaactcaacttgagaagtggttgcttggtcactactctcttgtgagtagaacggtttgttttttttgaggatgcc

SEQ ID NO: 17341 - DNA, 225 bp, Glycine max
  Clone ID: LIB3106-106-Q1-K1-F12
acgacagatattcaacatggctctctctacatttgaaagaatggcctcagtctcgaaaaggattaccctgaccgaggcgactagggtaaacgtgactcacataacaaaaatgctatcgctactattgatggccacggatgggatcctactcaacttgaggaatcctcgaaacaaggcattgcaaatcatccagtggccgtacctatttctatagacgactatgaa

SEQ ID NO: 17342 - DNA, 109 bp, Glycine max
  Clone ID: LIB3106-106-Q1-K1-F3
aatatcagttccctttctttaaaaaaaacgcaaattaaaaaaaaaacaagataacaaacacaaacatgcgaaggtaaaaatcgcctacaggggtacgggataccagttc

SEQ ID NO: 17343 - DNA, 469 bp, Glycine max
  Clone ID: LIB3106-106-Q1-K1-F4
cttccataaacgggtggtgcctctcttccatctccccagccaaaacctctctcaggaaggccacattacgcccttccgtcttcgcaacccttaacactccttcttctccttcctcttcatcttccttcccctctctcattcaagacaggcctgtttttgctgcccctgcccccatcatcaccccaactgtgagagaggatatggcaaaggaatacgagaaagctattgaagaacttcagaaattgttgagggagaagagtgaactcaaagcgacagctgctgaaaaagtggagcagataacagcttctctagggacatcatcatctgatggcatcccatcatcagaagcctcagacaggatcaaagctggtttcattcacttcaagaaggagaaatacgacaagaatccagctttgtatggtgaacttgccaaaggccagagccccaagttcatggtgtttgcttgctc

SEQ ID NO: 17344 - DNA, 474 bp, Glycine max
  Clone ID: LIB3106-106-Q1-K1-F5
ttcacagaagagagagagagagaaaaaaaaaaaaaaagtctctgtttcttcacttgctcacaagccgcaactgctactgtgtacccaatctgagcccaacgagatgggggggcagaatctttccccaaaggaaaggagtagagattggattggagttcttatgaacagcagctttggttattgtacttatcaccatgatcttcgatctaatgagatgaatgtgttctgcgtggactgtgcacttaggatgtgtaggcactgtaaggaagctcattccctacatagaaggtttcagatttacaaatattcctaccaggatgtcttccgccatgccgagctgcagaagtattttgattgctccaaaattcagacttacatatccaataatgaaaggattgtgcatctcaaacctcgggccttcaatcaccaaatctaagtctgctgatctaagtcccgactctaaatacaaagaga

SEQ ID NO: 17345 - DNA, 374 bp, Glycine max
  Clone ID: LIB3106-106-Q1-K1-F6
cccacgcgtccggttgagagcaagagatgggtggatttcttcaacccagactcacagtcagtggaatgggccactccatggtcaagaacagctgagaactttgccaatgccactggtgagcaaggctacccagcaggcaaattctttgaccctttgagctttgctggcactatcaaggatggagtttacattccggatacagagaagctggaaagattgaaattggctgagattaagcatgccaggattgctatgttggccatgctgattttctactttgaggctggacaagggaagaccccccttggtgctcttggcttgtaaattaaacatttcatgtagataattgaattgagaggctagacagttgcaaa

SEQ ID NO: 17346 - DNA, 450 bp, Glycine max
  Clone ID: LIB3106-106-Q1-K1-F8
cccacgcgtccgcggacgcgtggggcagaggggggtgctcaggaccaactgcatagactgcttggatcgcacaaatgttgcacaatatgcatatgggttggctgctcttggccaccagctccatgctctgggggttattgaccacccaaaaattgatcttgatgagcctgtagcagatgatttgatggggttttatgagcggatgggtgatacacttgcacatcagtatggtggttctgctgcacacaacaagattttctctgagaggaggggccagtggagagctgcaacacagtctcaggagttttgtaggactcttcaacgctattatagcaatgcatacatggatgctatgaaacaggatgcaatcaatgtatacctgaggcattttcagccacaacagggcaagcctgctctatgagagttgcgttcagatcagctctatgatgc

SEQ ID NO: 17347 - DNA, 434 bp, Glycine max
  Clone ID: LIB3106-106-Q1-K1-F9
aggtacgcctacgcgtgcgacgtaaagttgcgaagggccactcgcttggtagaatttcttgcattgtattattttgaactgttagggtgaatgcaccattttgagacagacacaactcacatctgacttgaacttctatgtgttctgaaacagcatcaatgacaaataccatgactatgtggtttctgttggtctctctttccttcatttatgctgttgccactgctaatactcaaatcaaaattactaacaaccctgcggacaagttggtagctgcaatcaacgaaaacagaactgatcacaaggtatcatgcttaaccgacaacccttggcttgcgtgtattgatctacaatacattaaggcataccacggtgaatgcgatgctgtgggaggatctgatggcaagaaacctcctgaatcttactttgctgaa

SEQ ID NO: 17348 - DNA, 479 bp, Glycine max
  Clone ID: LIB3106-106-Q1-K1-G1
acgctccgagctcgtttcgttctcgaagaatcgatctgcgataatgactcgcggtaaccagagggatcgtgatcgcgaaagggctcaggctagaaccggtggtaaaggcaagcagaaagatgatgggttgacccctgaacagcgcagggaaagagatgcgaaggcgctgcaggagaaggcggcaaagaaagcggcacaggatgcaggagggaataatgcaggtggaaccaaaaaataggcaataattcaatgagtggtttgagttcgacattgttgtttgtagacatggaatttatggaaaatttatgttgcgttattcgtggagtatgatgtgtttattaatgtaatttgtgacagatgaataaataagttgtgcttctttgaaaggtgttgtcgctggggggctgaatcaataacttgtatctttgtttggaataaatagtatttggcaatgatattgcgtttgctcccctgtctta

SEQ ID NO: 17349 - DNA, 478 bp, Glycine max
  Clone ID: LIB3106-106-Q1-K1-E3
gttgagaactaagaaggagaagcaaatggcttcctcaatgatctcttccccagctgttaccactgtcaaccgtgccggtgccggcatggttgctccattcactggcctcaagtccatggctggcttccccaccaggaagaccaacaatgacattacctccattgctagcaacggtggaagagtgcaatgcatgcaggtgtggccaccagttggcaagaagaagtttgagactctttcctacctgccagaccttgatgatgcacaattggcaaaggaagtagaataccttcttaggaagggatggattccttgcttggaattcgagttggagcacgggttcgtgtaccgggagcacaacaagtcaccaagatactaccatggacgctactggaccatgtggaagcttgctatggttggttgcactgatgcttctcaggtgttgaaagagcttcaagaggctaagactgcataccccaac

SEQ ID NO: 17350 - DNA, 159 bp, Glycine max
  Clone ID: LIB3106-106-Q1-K1-G10
acgcgtacgcgcacacatcctacataacctgttcacaatttatgtctatcatgctccttacaagcaatgacaccggggttacaacggacgaagatcggcgctacgacgggcacatctgggactctgttcatcacgcaagcgacaattgctaccctaaca

SEQ ID NO: 17351 - DNA, 365 bp, Glycine max
  Clone ID: LIB3106-106-Q1-K1-C8
accacgcgttcgttcactcgtccgagatactaataccacactttactgagataaatacgacaccactgacatacggcactaacgaatcagtccgatatggcgtgcacgaagcacaccgctcgaaagacgaacgtcggcacggaggcacgtcagcagctcgctaccaaggccggtcgaatgaacaagccggagaccttcggactgaagaccgcggagctgttgaagctgagaacgcgccagatgagggacatgctaatgatccagaagatcacagagcatatgatcgtgagacatacattgcagaagctcatgacagatatgcggcaccagagcaagactgatttgcgtctccagaacactgctga

SEQ ID NO: 17352 - DNA, 414 bp, Glycine max
  unsure at all n locations
  Clone ID: LIB3106-106-Q1-K1-C9
acgctatcatgtgcctatgctggaactggataggtgcttacggttcaaaatctgacgggtccttgaccacagcaggttgatgcaggtgcaactcacgagtgtcctgctgcgcttggaatagctatggtcgctatggctgaagaactaggactcgacatggcaattcaatcattagaacatcttctacaatatggagagcataatattcgccgagcagttgctttggcacttggtctactctgtatatcaaatacaaaggtcaatgctatggataccttaagcagacttagccatgatactgattcagaagtagctatggcagctgttatctacttgagtctgataggtgctggaacgaacaatgctcgaattgctggcatgcttngcaatctttctagttattactacaaggat

SEQ ID NO: 17353 - DNA, 240 bp, Glycine max
  Clone ID: LIB3106-106-Q1-K1-D1
tggaaaactgttcatttgcaaggctcaagctggagacaagaggtggttcaagggagcaagaagatttgtggagagtgcagcaagttctttcagtgttgcttaaaaatcttcaataatagctggttatatatatctgctatgtgtaaatctaccttaagtgctatctatgtttgaagttgtctaacctcccttttgtccacgagtttcataattttaagggacttggttggattaagtatc

SEQ ID NO: 17354 - DNA, 305 bp, Glycine max
  Clone ID: LIB3106-106-Q1-K1-D10
acgcccacgcgtccgctcttcaaccgatcctgtctttttattgtcaaagcagatagggcatggcaacagatgaaaatgctgacctgtcagatgcgaagtcgcacttgagtcaattgcatgagacatggaatcacgagatggcataaagccaatatccaagtggatgtattgcagcttgaacttacagaaggaacgccttgcaagcagtcttcagatggaaattcgaatgaggcgttgaaggttctttggcgaacagccaacactgcttgtacattgatgacttacttaccatcaaaagctacgct

SEQ ID NO: 17355 - DNA, 275 bp, Glycine max
  Clone ID: LIB3106-106-Q1-K1-D11
ggtggatgccgaaaacctaatcagaaaaaaaatcgtagttggaggcgccgcactccactccactccaatcaatcagatactagcgatggggaggaagcgaaaggtagcaccgaaatcttctgtatccgccgagcccccgctgaagcaacaccaaccaaaacccgaaaatgccgctcaggaatacgaagaagaggtcgaagaggaagttgaggaagaagaggtagaggaagaagtcgaagaggaagaagaagaagaggaggacgaagaggacgagg

SEQ ID NO: 17356 - DNA, 134 bp, Glycine max
  Clone ID: LIB3106-106-Q1-K1-D12
cggtccgggaccggagtttcgagctaggcgtacgcgtacgctatgcgactgagcttgagtatgatgtcaacatctggggggtgagcactggctggtgctagcacttcgttcgctgaccatgagcatggccgaac

SEQ ID NO: 17357 - DNA, 239 bp, Glycine max
  Clone ID: LIB3106-106-Q1-K1-D2
acgcggacgcgtggggcataattaccatggtgataataccactgctccttcacaggctgcaaagtctaaaggtgaaaaaagtggtggtgcgttaagtggtcttgcaaacttggctggaggcttcttcaaaaagtagctacaaagcaactaaataagaccttaattgagtacttattctcggtctagtactggggtttgggtaatatgcaccacatcatagatttaaatcttgttattgt

SEQ ID NO: 17358 - DNA, 409 bp, Glycine max
  Clone ID: LIB3106-106-Q1-K1-D3
cgttcaagccgagcttgtgaatggacgttgggccatgttgggtgttgcaggaatgctacttcctgaggttttcaccaagattggaatcatcaatgcccctcaatggtatgatgctgggaaatcggagtactttgcttcatcgtcgaccctctttgtgatcgagttcatcttgttccactacgtcgagatccggagatggcaggacatcaagaaccctggctctgtcaaccaagaccccatcttcaagcaatacagcttgccccaacatgagtgtggataccctggtagtgtgtttaaccccttgaactttgcacctactttggaggccaaggagaaagaacttgccaatgggaagatggctatgttggcattctttggattcatagttcaacacaacgtgacaagcaaa

SEQ ID NO: 17359 - DNA, 438 bp, Glycine max
  Clone ID: LIB3106-106-Q1-K1-D5
cagttgatggaaaatggggacttgtgggattgtcttgttgaccacagcttcccctaagccatggccacttcggagttcgtcaccacgcgctcttcccgttccccgcattcgctgctgctctgtttcagagctttccccagataagcttccaactagtattgatttttctgtaactggtggggcatatgatttctcaaaagcaacaacatcactaacaaatgagttcatctcttcaccaaagaaagtaactcttttaaggcatggtcttagcacttggaattcagaaagtaggattcagggaagctcagatttgtctgtattaactgaagttggggaagagcaagcaaaaaggtgcaagaaagccttggaaaatatatactttgaccagtgttttgcaagtccaatatctcgtgccaagcaaactgctgaaattatatg

SEQ ID NO: 17360 - DNA, 233 bp, Glycine max
  Clone ID: LIB3106-106-Q1-K1-D6
cacgtgatagaaaatgcagacttgcgggatcgtttttgcgaccacagctgcccctaatccagggacgcttagtcaatcttcaggacgcgctcttacaattccccgcattgggtaaagccctgcgttacagatcttcatagattatctgcccactagtcttgattctgctggcactggagcgacatatgacgcatcaatcgctcctaccaaacttacagatgactgcatggcta

SEQ ID NO: 17361 - DNA, 467 bp, Glycine max
  Clone ID: LIB3106-106-Q1-K1-D7
gtcgttatgttgtccaacaacttgctaaaatgggatctcaagtcctagttcctttccgaggctctgaagataatccccgtcatctcaaattgatgggggatttgggacagattgtacccatgaaatacaatccaagggatgaaagttcagtaaaagctgtgatggctaaggccaatgttgttatcaaccttattggaagggattatgagacaagaaactacagctttgaagaagtgcactatcacatggctgagcaactagcaaagatttccaaagagcatggtggtatcctgagatttattcaagtttcttgtttaggtgcatctccttcatctccatctaggatgctcagaactaaatcagctgctgaggaaatgattttaagggaactacctgaagccacaatcttgaaacctgctgtaatgattggtacagaggatcggattttgaatccatgggctcatttt

SEQ ID NO: 17362 - DNA, 477 bp, Glycine max
  unsure at all n locations
  Clone ID: LIB3106-106-Q1-K1-D9
atgatgtgggaacacagtacagatctggaatatactactacacgccggaacaagagaaggcggccaaggagtcgttggaacaacagcagaagcagttgaacaggaagattgtcactgagatccttcctgccaaaaagttctacagggcagaggagtaccatcaacagtaccttgagaagggtggccgatttggtttcaagcaatctgcttctaaaggctgcaatgatccaatccggtgctacggttaattgtcataagtgaattgccatcaaagatcaatgtgaccggttctttagacgttgaaattccatagttttgttagtaagtatttgttaatatatcaacaaagcttgtgcacattgtatttgaggttgaagatggacatagccatatattcagntggagagttgtatattgtctttgatatataatatgactttgcttttgaaaaaaatatattattttttaatcttttat

SEQ ID NO: 17363 - DNA, 452 bp, Glycine max
  Clone ID: LIB3106-106-Q1-K1-E1
ggaatagcaaagggaaaatggccatgcatatgcaagcacccacaatcagtcttaacactgcaaggtccccatcttcattagctccagctgccaatgctggcctgcgaccacacctcaaccctttggctttaaagtcatctttcttctctggttcccttaacctcttacttcatccaatgcaacagtatcttacttctggagctcccaggatttccatgcgtgtggcctccaagcaagcctatatctgtcgtgattgcgggtatatttacaacgacaggatcccctttgagaaattgcctgataaattcttctgtcctgtttgtggtgctccaaaacgaaggtttaagccctacgcttcaactgttgcaagaaatgcaaatgaataagaatgtagaaaggcacgaaaatccgaaatcaagaaagaagaagcaattgggaacgcactttctatt

SEQ ID NO: 17364 - DNA, 349 bp, Glycine max
  Clone ID: LIB3106-106-Q1-K1-E10
acgcccacgcgtacgctttctggatggcatatactgccccatactgcatcctttcacaaagcaacgttgcacagtgtggccacctcaagcgccaaatgagtccatgatttcaccgttaaagatgccaagggaaatgatattaatcttggagactacaaaggaaaggtccttatcattgtcaatgttgacttacaatgtggcttgactaattcaaattacactgagctcagtcagttgtatgagaaatacaatcagaaaggtctggaaattctggcattttcatgcaatcagtttggggcacaagaacctgcatctaatgaacagattcaagaatttggttgtacttgct

SEQ ID NO: 17365 - DNA, 441 bp, Glycine max
  Clone ID: LIB3106-106-Q1-K1-E11
acgattagattggaggtaatggcagcgtcactacaagcagcagttactttcatgcaacccaccaagttgagcaggagcaacactttgcagcaaaagtctactcagtccattttcaaggcttttggtttggaacctgttggagctaaaaaggtcacatgctcccttcaggctgatcttaaggacttggctcacaagtgtgttgatgctaccaaaattgcatgattcgcccttgccacctctgccctttgtctctgggacaagtgctgaacgtgttccaaagaggctaaccttcgacgaaatccagagcatgacctacttggaagtgaatgggacaggaacagcaaaccagtgcttcacaattgatggtggattggactcatttgcctttaagcctgttaaatacaatgtcaagaagttatgccttgagccaacttcaattac

SEQ ID NO: 17366 - DNA, 328 bp, Glycine max
  Clone ID: LIB3106-106-Q1-K1-E12
cggtccgattccagttcgacccacgcgtacgcgtgcacatgatcgctgtggttggagcttaaacaactagattacgtggaggtccactctattcaagtgacactgtggacattatatacgctggttgcatgcacaaattggacacttacggtggaatgtgtcatggcttccggcttgaggatacgtatgcagagcacttgctattgaacacaataacttagagctttgtctggatcctacactattggaagtaaaggttctggaagcttaattatcttttgacaattcatattataaggttctcttggagaagccgtggacgtcttca

SEQ ID NO: 17367 - DNA, 457 bp, Glycine max
  unsure at all n locations
  Clone ID: LIB3106-106-Q1-K1-E2
ctttttctcaacaaaaaggggttcaattctagctagttctattacgtcgtccgcgaccatgaacatggcgatcgcgcttctgttcatggttttcgcagtttcatcagctttagacatgtcaataatatcacacgacaacgctcatgcggatagggccacgaggcgcaccgacgaggaggtgatgtcaatgttcgaggagtggctggtgaaacacgacaaggtgtacaacgcgctcggtgagaaggagaagaggtttcaaatcttcaagcacaatctgcgcattatcgatgaacgaaactctctgaaccgaacctacaagttgggactcaacgtgttcgctgatctcaccaatgcggagtacagagccatgtacctgcgaaccttggacgagggtccgaggttgggcttggatacgccgncaagaaaccactacgtgccacgtgttggagataacata

SEQ ID NO: 17368 - DNA, 473 bp, Glycine max
  Clone ID: LIB3106-106-Q1-K1-C7
atcagagtgcccttctgaatgcacaagaagatgtagccagacacagtaccacaagccgtgcatgttgttctgccaaaaatgctgcaaagcgtgcctttgtgttcctcctggctactatggcaacaagtctgcgtgcccctgctacaacaactggaagaacaagcgtggaggacccaaatgcccttgaaaattgaaattataaacatgatttcacctacaattttatattactcaaagtggaactataaactatatatggccattgctatatgtttaggtatcacctactacaatagggtataccatcttgttctctatcatgaaattaattcaattattaatttaatgaaaaaacctatatgttattccctttcctaaacaaatatgagaggggtgttctccttattagtcaatcatctttgtcattgttctttttggagtattatatatagtgaatttggagtattatatat

SEQ ID NO: 17369 - DNA, 453 bp, Glycine max
  Clone ID: LIB3106-106-Q1-K1-B3
cccacgcgttcggtttcactttctttgcatagggcaacctcctttctctgtgactctgagtatcgtatcgtgttattattatttctaattctctcttatcacgtccattgaatatgtctatgtcgttggatcttgctcccaagggtggcttcagttttgatctatgccgaagaaacgcaatgcttcaaaacaagggcctcaaagccccaacctttctcaaaactggcaccactattgtcggcttagttttccaggatggtgtcattcttggtgctgatactagggcaactgaaggacctatagtggctgataaaaactgtgagaaaattcattatatggcacccaacatatattgctgtggagcatgcacagctgctgatacacaggctgtaacagacatggttagctcacagctgcaattacatcgctaccatactggtccagaatcaagag

SEQ ID NO: 17370 - DNA, 342 bp, Glycine max
  Clone ID: LIB3106-106-Q1-K1-B4
cccacgcgtccgcccacgcgtccgcggacgcgtgggcgctttttgagccggaagggttcggcaccaccgggaacaagacgatgcagatgatggagatcgccggcttcttcggacacgtcggcagcaagacctcttgtggttatggagtggccactggaggacctttggcctggggtctttgttacaatcatgaaatgagtcctatgcagtcatactgtgatgactacttcaaactcacatacccctgtactcctggtgctgactactatggacgtggagccattcccattttttggaactacaactatggtgctgtcggagaagctctgaagattgacctac

SEQ ID NO: 17371 - DNA, 441 bp, Glycine max
  Clone ID: LIB3106-106-Q1-K1-B5
acgcactcatataatactctgtatcatttcatttcgataatcatccatagctactgaagaaaatggcaaccatctctgctgctatcacaaccccatcgatctcccgcgcaactcttgtgcaaaagcgggtctcatctcccgttcttggtttgccagcaatgggtaaggtgggaagagtgagttgctccatggaggaaaaaccttattctgtgaaggaaagcagctctagcatgttggggatgggggcatctctgatggcagctgccagcgctgcagccatgtcaggcccagccatggccttggtagatgagagactgagcactgaaggaaccggacttccctatggcctcagcaacaatcttcttgcgtggatccttttcggcgtctttggtcttatctggactctctatattgtctacacttccactctcgaagaggatg

SEQ ID NO: 17372 - DNA, 476 bp, Glycine max
  Clone ID: LIB3106-106-Q1-K1-B6
gatgacaggtgggatgtttggaaggaaggggcaaaagataaaggggacagtggtgttgatgccaaagaatgtgttggacttcaacgccataacctccgtcggaaaaggcagtgctaaggacaccgccaccgatttcttgggcaaaggcttggacgcattaggtcatgcagttgatgctctcactgccttcgctggccatagcatctccttgcagcttatcagtgctactcagactgatggtagtggaaaaggaaaagttggaaacgaagcctatttggaaaaacatcttccgaccttgccaacgttgggagcaaggcaggaagcattcgatattaactttgaatgggatgctagttttggaattccaggagcattttacatcaaaaactttatgactgatgagtttttcctcgtcagtgttaaactcgaggacattccaaaccatggaaccattaaacttcgtttgtactcatggg

SEQ ID NO: 17373 - DNA, 420 bp, Glycine max
  unsure at all n locations
  Clone ID: LIB3106-106-Q1-K1-B7
ctctgccactgccatcagcattctcaacacctcctccctcactcactcatcaatggcatcaacaatatcagcaatggccatgatcaacgccaaatgcgtcaacccaaagttccccaaccccaccaagctcgtaccatcaaaaccttcccttcaggtcaacncttccaaagggcctaatagcctcacccgaaaacaccaaactttccactgcgacagcaatcgcaggagcaatattcacaaccctcggaacctgcgacgccgctttcgccgttcaacaaatagccgacatagcagaaggcgacaaccgcggtctggcactgttgctgcccataattcctgcaatagggtgggttctgttcaacattctgcagccggcgctgaaccaactgaaccgcatgcgcagcaccaaaagcgtgatca

SEQ ID NO: 17374 - DNA, 350 bp, Glycine max
  Clone ID: LIB3106-106-Q1-K1-B8
acgcatggctctaccagactcttctacccggcgcaacttcctgaacccctccttcatctactcctcttactgcaaaacgctccctatcgaccacatgctcaacaccgccttcgctgccgacgacgacggtcccttcccgtcggcggccaatcttgacgccgcatcgcatggactcatgattccctctcccagcgagtcactcaagatcgaattatactctcacggcttatacgccgcctgcaccggcggtggaatcctcagctgaggcctcactcacatgaccgtcactcctcttgacctagacaagtgtaacatgcagattgaccctgctaagtgcaagagcatctcgt

SEQ ID NO: 17375 - DNA, 240 bp, Glycine max
  unsure at all n locations
  Clone ID: LIB3106-106-Q1-K1-B9
cccacgcgtccgctcctcataagattaatacaacctcaaaaagagttctttcaaaatgcaaacagccttaaccttcgctgcccccaacgttgtgccattggcacccacaaagagtgtctcccatattaccatctttcccaccaaattgaaagccccgcgcttctcacctcgntactctccgattagggttgcaaccgtggagcccgacacttcaactgtcgactacaactttgcggtctt

SEQ ID NO: 17376 - DNA, 456 bp, Glycine max
  Clone ID: LIB3106-106-Q1-K1-C1
cccacgcgtccggcacaacgaaccactctgaagccgctcacgttatccacaacactctcaaccctgcttaaaccctaaccaatccaaccatggcttcttcttccaccttcactgcaatgtccgcctgcaagctctcctcctccgccgccatctcctccttcccctcccgccgccgctccaacgccgtcgttctgtcgaggcgcagccgcgccgccagggtctccgccatggccaaggagttgcacttcaacaaagacggcaccgcaattaagaagctccagagcggtgtgaacaagctcgcggatctggttggggtcacgcttggtcccaagggaagaaatgttgttctcgagagcaagtatggctcgccgaaaatcgttaacgacggtgtcactgtcgctaaagaggttgaattggaggatccccgtgagaatattggtgccaagttggtgagac

SEQ ID NO: 17377 - DNA, 288 bp, Glycine max
  Clone ID: LIB3106-106-Q1-K1-C10
agcgaagacatgtaattggagaaaatgatgagtttatagggaagaaggctgtctatgctttgagtgagggtctaggtgtgatagcatgtattggggaactgttacaagaaagagaagctgggaaaactttcgatgtttgttttcagcaattgaaggcttttgcagatgtagtgccaagttgggataatatagttattgcatatgagcctgtatgggcaattggaactggcaaagtggccacacccgagcaagcccaggaagtccatgcagctgttcgtgactggctta

SEQ ID NO: 17378 - DNA, 301 bp, Glycine max
  Clone ID: LIB3106-106-Q1-K1-C11
gcaggtcgagcaggcgtacgcttcaaaaccgtactcagtcaatatgtctatgtttacggtactagatttgaccgtaacatgacacaagaaggtaatggcaacaccaacttctgcgtgagtgttaacaacaacggctacattagcgctaatgacccgttgaactgtggcgcggcagcggatgcgatagccggtagccacctcgacaaggtcaagcgcatggtgtaggagtacctgaggccgttcgtgaagctcggccgctagaccctgacgatctctcatatggcgacgatcgcggtgcacg

SEQ ID NO: 17379 - DNA, 299 bp, Glycine max
  Clone ID: LIB3106-106-Q1-K1-C12
gttcaagccgggccaactaaaatgattattgaaaatagtacgctttcttgtgggagcagcactcctgaggccttagttactcatggaagggatcctagtttgtgggatggtcaacttgtgtagttatggtcccaaactctcaattttccaagttgtggcataaattctattgcaccttttaacaagctttgcttattccagtgtgttttattatgatttgtgatttatactaccttgcttctgagtgccattttagtcatcttattcctgactagttgaatttgtaactgtttgtgtta

SEQ ID NO: 17380 - DNA, 338 bp, Glycine max
  Clone ID: LIB3106-106-Q1-K1-C2
cccacgcgtccgcccacgcgtccgcttcactctgaaccaaataccatagtcttctctttgtccgtgacaaaacagttcccacaaaaaaaagaaaaaagaaaaaagaaaagcactaaaaaaaaatgaagaagggtttctcccttgtgctgctgattcttctgatccagtacaacaacgttgtcaacgcctacaacaacaaaaactgtgtcacagaggattgcctcatcggcaacaaggatttggaatcagagttctactttggatcccatgtggccagaatgctctacgatgtgagccaatctgtgagtggcaaaacaggcaataaaaataacaaagct

SEQ ID NO: 17381 - DNA, 478 bp, Glycine max
  Clone ID: LIB3106-106-Q1-K1-C3
cccacgcgtccgcccacgcgtccgttctcatttcaatttgcatttgcatttcatttggcgttttgttgctttctggaagcttcacttcggcatccatggcgtcgtttgaagaagctcctcccggaaactccaagaacggcgagaagatcttcaagaccaagtgcgctcagtgccacaccgtggacaaaggtgccggtcacaaacaaggacccaatctgaatggtttgtttggaaggcaatctggcacaactcctggatattcctattctactgctaacaaaaacatggctgtgatttgggaggaaaagaccttgtatgattacttgctcaaccccaaaaagtatattccagggacaaagatggtgtttcccggtcttaagaaacctcaggaacgtgcagatcttattgcatatcttaaagaatccactgcataatgattaaattttcatacatgcagttatgcactttactttcaaag

SEQ ID NO: 17382 - DNA, 403 bp, Glycine max
  Clone ID: LIB3106-106-Q1-K1-C4
acgcccacgcgtacgaaaaaaataactagcatagactattgattattaaaagcataaagacattgatatgctagctgcggcaatgggatctagcagattatgattcaattaaagtacttgtgctatgaaaccttttcatccatgatcattgactcaagggttgcagaggcacgtaccctgccataatcagccttattgccttccaaagttgatatacctactgttggtcctcttccactggtggcaccactgccaaatatacctgtgactctccctacagtacctgaactacctgcagtacctattgtaccacttgctgtagtgatagttaataacgcccaaataatcccttgagtacctatgatctatgcattcactactacttattttgtcacttggtcaa

SEQ ID NO: 17383 - DNA, 418 bp, Glycine max
  unsure at all n locations
  Clone ID: LIB3106-106-Q1-K1-C5
caacaaccacatgccatggcaacagcgtcaatgtgtatgagcttcaacctggcaacagcattcaagggtctctctttatcttcttcttcatcgttcttcggtggaagtagtggttctctccgcgcgggtcctgcctcggtggtgtcgctgccccggcgctgcccgctgaccatagagaacgcgcacaagaagggggcggtcagcaccaagaacggccgcgactcgcatggcaagcgcctcggagtcaagatttacggcgaccaggtcgccaagcccggctccatcatcgttcgccagcgctgaaccaagtntcatgcaggaaagaatgtggggcttggcaaagactataccattttctccttgattgatggagttgtaacatttgagaaatatggacctgacaggaataaggtgagtg

SEQ ID NO: 17384 - DNA, 370 bp, Glycine max
  Clone ID: LIB3106-106-Q1-K1-C6
cccacgcgtccgataacttgcatagactattgattaagaaagctattgtcattgatttgctagctccaacaatgggttctagcagattatcattcattttagtacttgtgcttgtaaccttttcatccatgatcattgactcaagggttgcagaggcacgtaccctgccaaaatcagccttattgccttccaaagttgatatacctactgttgttcctcttccactggtggcaccactgccaaatttgcctgttactctccctccagtgcctgaactacctgcagtacctaaagtaccaattcctgaagtaatagttaataacgccaaaataatcccttgagtacctatgatctatccagtcactactac

SEQ ID NO: 17385 - DNA, 476 bp, Glycine max
  Clone ID: LIB3106-106-Q1-K1-B2
tctatgtgtccgtcgagtccttcgtctcacattcaaaggaggatctctcttgcgtgttctatacgtttgcggtatgtcctccaaccgaattctgaatgagctgacggattccgacaaagatcctccaacatcttgcagtgccaagcctggtgctgctgaagatatgtgccataggcaagctacaattatgggtcctgcagacagtccctatgcacgaggtgtattcctagcgaccattcattttcctccagagtatccctttaaggcacccaaggttgcatgcacgacaaatgttgtccacccaaatatagatagcaatggaagcatttgccttgatatattgaaggagcagtggagccctgctataaccatttccaaggtgttgcatctaattaggtccctattgacggatccaaatcctgatgatcctttggtccctgacattgcacacatgtacacgacagatctgaacaagt

SEQ ID NO: 17386 - DNA, 384 bp, Glycine max
  Clone ID: LIB3106-105-Q1-K1-H8
tcgtccacgcgttcgcccacgcgtccgaatcgatcattacttcacttcactaatacatcatggcagacgagacccataacaagtatgagagctctgaggttgaggtccaggatcgtggtgtttttgactttctcggttagaaaaaggatgaagaagacaagcctcatcctcaggaggaggtcatcgccaccgagtttcaaaaagtcactgtctcagaccaaggagagaacaagcacagcctcttataaaagcttcaccgatctgacagcagctctagctcttcaagtgaggaggtaggagaagatggtgagaaaatgaataagaagaagaatgaaaagaaagggcttgaagagaagatcgaggagaaaatagagggtgatcatt

SEQ ID NO: 17387 - DNA, 353 bp, Glycine max
  Clone ID: LIB3106-105-Q1-K1-H9
ggaatcatctggaccgaaagaagcgtcaaaaaagagcaatcctctattcgaggcacccgtccaaggccagagaatgattttactaccacatttaggtatcggcttcggcaacttaactgcaactgctgaaaatactcctccaggatttgaatcgaaattgcctgaagtgcccgaaatcttcaaggcagccacaaattggtttgaaaccttgtgcagttactgctgttgcatgtgctgcatccagtgctgtacccgggataacagccaatgtgcaaccgcattggcacaactctgcattggtctaagatgcttcggctgcatctcatggtgttcagatatatgcttgtctggaa

SEQ ID NO: 17388 - DNA, 355 bp, Glycine max
  unsure at all n locations
  Clone ID: LIB3106-106-Q1-K1-A1
gccaagtgaaagtgagaaaaaataaaaatcaaagagcataatgtcagggatcattcacaagattggggagacccttcatgtgggagggcacaagaaggaggaggagcataagggtgagcaccatgctggagaatacaaaggggagcaccatggtgaacacagtagtgagtacaaaggagagcatcatggtgaacacaaagctggagagtaccatggtgagcacaagccagagcacaaagaggggttcctagacaaagtcaaggacaagatccatggtgagggcggcgccgccgagggcgagaagaagaagaatgagaagaagaagaatgagcatggncatgagcatggncatgac

SEQ ID NO: 17389 - DNA, 406 bp, Glycine max
  unsure at all n locations
  Clone ID: LIB3106-106-Q1-K1-A11
gggtttttgagtgcggtgcggcgatcctagcactctcttctgcagctttcgccgacagcttcattcaccatggctgagcaaaccgagaaggcttttttgaaacaaccaaaagtgtttttcagctcgaagaaaactgggaagggaaagagacccggaaagggtgggaaccgcttttggaaatccattgggcttggatttaagactcccagggaagccatcgaaggaacctacattgacaagaagtgccccttcactggcaatgtttccatccgtggccgtatcttggctggaacatgtcacagtgctaagatgaacaggactattattgttaggaggaattatctncattttatcaagaagtaccagaggtacgagaaaaaggcactccaacattcctgctcatata

SEQ ID NO: 17390 - DNA, 388 bp, Glycine max
  Clone ID: LIB3106-106-Q1-K1-A12
cccacgcgtacggtggtttttttatctgtaggacgatagttttgaaaagacagattgcctatcttcgctttaatctcaggcgaaatacgatcggggggtgccaattcaaaaccttccggtaaaataagaacagcccccacattcaaagctccctttttaccattagcaagaacttgcttcacttgcatatcataaggaattcgtacaactgcttcaaatacagtatcaggaagtaccgcttgtggaacctcaatatccacgggcttattagctaaatggcaattggcacagacaatacgaccgggtggcttctcgggggattttcatacccttgctgggcaaaaatgggtttgccgttggaaaggggggctggaataataagtttttt

SEQ ID NO: 17391 - DNA, 476 bp, Glycine max
  Clone ID: LIB3106-106-Q1-K1-A2
gctgaacgcagaaaggggaaaaaggggattagggtttaggaagcagcgacaacaatggatttcacagcggagaagaaggaatcagagagcaacaccgaaaatgctcatccaacaactttagattcttcttctcaattggcatcggcacttgattccagcaacaaagaaatcgaagaacgacaagctcgtgaactcaaagccggtcttcaccccctcaagcacaagtttgtcttctggtacacgcgccgaacacctggagttcgaaatcaaacatcatacgaggacaacataaagaaaattgttgaatttagtacggttgaaggattttgggtctgctactgccatcttgctcgtcccgcttctttacctagtccaacagatttgcaccttttcaaggaaggaatccgtcctctatgggaggactctgctaactgcaatggtggtaaatggattatacgattcaaaaagggtgtctc

SEQ ID NO: 17392 - DNA, 463 bp, Glycine max
  Clone ID: LIB3106-106-Q1-K1-A3
catttctttttttctcgtccatcccgtaaccatgtctcagactgttgtcctcaaagttggtatgtcatgtgaaggatgtgttggagcagtgaagagagttttaggaaaattggatggtgtggaatcatatgacattgatttgaaggaacagaaggtggtagtgaagggaaatgtccagccagacacagttcttgcgaccgtttccaaaactgggaagaagactaccttctgggaaggtgaagcagcagcatccgaaactagcacagcaactgcctagaacatttcgctctattctgttcagaagaagtagctgcgtaaatcaaatactattttatggacttgaaataacgatgggacttgttatctggtgtattttagtgtgtcacaacaaagattgcttgatatgactgctttcaacatatgtgctactgtattaatgtgcttttattgagagtttaacttc

SEQ ID NO: 17393 - DNA, 479 bp, Glycine max
  unsure at all n locations
  Clone ID: LIB3106-106-Q1-K1-A4
aagaagagaaggggaaaaggaaaaaaaggcaaaatgggtaaggatctgagcgatgagcaagtgtcttcaatgaaggaagctttctctttattcgacacagacggtgacggtcggatcgcgccgtcggagctggggatcctgatgaggtctctgggagggaacccgactcaggcccaactcaaagccatcgtggccgaagagaacctcacggctcccttcgacttcccccgattcctcgatcttatggccaaacacatgaaacccgaacccttcgatcgccaactccgcgacgccttcaaggtcctcgacaaggactccaccggcttcgtcgccgtctccgagctccgncacatcctcaccaacatcggcgagaagctcgagccctccgagttcgacgagtggatccgtgaagtcgacgtcggttccgacggcaagatccgctacgaggatttcatctccagaatggtcgccaagtaacg

SEQ ID NO: 17394 - DNA, 428 bp, Glycine max
  Clone ID: LIB3106-106-Q1-K1-A5
tcgcgccgtcctcaccatggcccttgccgtgttcggaaacagcgcccctaagaagtacgatgaggtcgacgccgtcccctcaccgtgcgcgccgacgctgcaagttcgagcgcaagaagccccacgtgaacatcggcaccatcggccacgtggaccacggcaagaccaccctgaccgccaccgccgagtacgagaccgagaaccgtcactacgcccacgtaggactgtcctggccacgcggactacgtcaagaacatgatcaccggcgccgtccatatggacggcgccatccttgtcgtatacagagccgactgtcccatgccccaaaccaaagaacacattctcttagccaagcgagttggtgtccccaacatggtcgtctttctcaacaagcattaccaagtttacgacgaatagctttttctact

SEQ ID NO: 17395 - DNA, 466 bp, Glycine max
  Clone ID: LIB3106-106-Q1-K1-A6
cccacgcgtccgcccacgcgtccgcaaactgttgctgtgggagtcatcaagaacgttgagaagaaggatcctaccggagccaaggtgaccaaggctgcccagaagaagaagtgaatcgtgcgggctggttcatcaggggatgttggttacaataaatgttggtttcttttctgtactcttgtgtcttcttttctaggtagcttgtttttcggacaaagtttgaagtctccaccatcatctcgcaactgttgttcccagaactgggttcttgatcgacggtggcaaaattgcttttatttatctgtgttttaatgtgttgtgtttgtcggaacccctgattacatttttgttaagcgcagcgagtttcaagactttgctgcgttgtgttgctttggtttattaaatgtcaactttctatttgtagtgttcaatttttggcttggcttgctctgtctttaaaaagaaa

SEQ ID NO: 17396 - DNA, 443 bp, Glycine max
  Clone ID: LIB3106-106-Q1-K1-A7
gtcacgcgtccgggaagctctagaaatggccagaatctgagttgccaatgcctgattgaggtgtagtacgtacaaaaacatgcgggagccgtacttcacacggactatactttgagacgagcgatagcgttcccttgaataaggtgaatttcatacacaggctgcaaatgcatgaactctcgtctaagcatatgtgggccttgtaatctgatgatgatgatcagtgtaagtacacaccattagacaatcagattaagcaagagagagatgatgattcagacgatgcatagaattaggaaaaacggcagatgggaggagggaaatcaggatttcttgctgctcttgagctatctgatgcccttgtaaacttacttggtactggagaaagcgagttatcgagaactgatgtcataaaaagaatgtgggatcacattaatggaaac

SEQ ID NO: 17397 - DNA, 472 bp, Glycine max
  Clone ID: LIB3106-106-Q1-K1-A8
cccacgcgtccgaacaaatcaaagccatggccacctccaacttctctattgttctctccgtctccctagccttctttttggtgctacttaccaagtcacactcgaccgataccgtttctttcaccttcaacaagttcaacccagtccaaccaaacattatgctccaaaaagatgctagtatttcatcctctggggtgttacaactcaccaaagttggcagcaacggcgtgcccacctcgggatctctcggtcgtgccctttacgctgccccaatccagatttgggacagcgaaaccggcaaggtagccagctgggctacatcctttaaattcaacattttcgcacccaacaaatcaaactcagctgacgggcttgccttcttcttggcacccgtcgggtctcagccccaatccgacgatggatttcttggtcttttcaacagtcccttaaaggacaagtctctccaaaccgt

SEQ ID NO: 17398 - DNA, 474 bp, Glycine max
  Clone ID: LIB3106-106-Q1-K1-B1
cccacgcgtccgcccacgcgtccggctaactattcccaccctcatatctgccaatgtctgagtcacttgctgaccctccggcaacattttccggtcataattgccggaaaccgccgcaagaccggccaagagttggtggaggaagtgttgtccttggcacaaggcctgctccaccttggactcacatctggccaagtggttgccatctctgctttcaatagtgataggtatctggagtggttattagccattgcatttgttggaggaatagctgctcctctgaactatcgctggagttttgaagaggcaagattagcaatggctgcagtgaagcctgtgttgttagtgattgatgagagcagttacacatggtactcaaaactccagcaaaatgatgttccatctctgaagtggcatattttgttggattccccttcctcagatttttctaagtggaacgtgttaactccagaa

SEQ ID NO: 17399 - DNA, 303 bp, Glycine max
  Clone ID: LIB3106-106-Q1-K1-B10
cggacgcgtgggtttgctattacctctttttccaaactctaaaaatttttagttccacaaaaccaaaccaaaatggcatcagcctaggcctcatccaccatgatatcaacaccagccttatctccaagcacaagcatccaaaagcaccatcatttgaagccattcaacgtgtgctttcaaggccttagacccctcacaaggttcacaacctaagtgagcagcaccaccatatgggttattccaaagggcggcgtcggcgttagagctgaactcaactcaacacttgtcataagccttagcact

SEQ ID NO: 17400 - DNA, 380 bp, Glycine max
  Clone ID: LIB3106-106-Q1-K1-B12
acgcgtacgcgtaatgctgccagggccaactagcggccctttcatgtacgatcaaaaactgctatacaacgacatcgagagggattcaaaggcttttcttgacatggttgacgtgaaagacacatccacgatagagctaatggaagaccctattagtcaagagaagatgttgatatagagaatatagaatgctaagatggataaagctgcctcgaccatctcagagctcaccttggaaatagatagacttgcagggagggtatcagtctttgagtcaattattagcaaatgtgggaaagttcttgaaacagatgctcataatctgattgagttattgatgaatcaggagctcataatggatagcctgatggctcatgggg

SEQ ID NO: 17401 - DNA, 159 bp, Glycine max
  Clone ID: LIB3106-105-Q1-K1-H7
tgttgctctgaggcggtgcgcgactcttctgttatctgaatatgtctctgatgcgtggtcactgtggctgatgcagctcctgcaagtgcggcaacggatgcagtggctgaaggacgtaccgatacttgaactgcactgagtcaaccaccaccgagacct

SEQ ID NO: 17402 - DNA, 286 bp, Glycine max
  Clone ID: LIB3106-105-Q1-K1-G11
atgctgtccacccgttcgcgaacagcgtgggcggacgcgtgggaaaactttctatagcattaagttataactcatttgaggctctgtgagaattgagaaatggctaaagatgttgaggttcaagagcatggatgagagtactctgccaaagactaccatgacccttcttcagcacctttgtttaatccagaagagctcacacaggggtccttctatatagccctcatcgctgagttcatagcaacccttgtctttctttatgtcactgttgctaccattattggct

SEQ ID NO: 17403 - DNA, 424 bp, Glycine max
  Clone ID: LIB3106-105-Q1-K1-G2
gaaaaagagagctgagaagccagaagttcgagatgcagctagggaagctgctcttcgtgaaattaaggagaggatcaagaaaacaaaggatgagaagaaggctaagaaagcagaagttgcttccaagtcgcaaaaagcaggagggaaaggcaatgtttctaagggtgctatgcccaaaggtcccaaacttggcggtggaggcgggaaacgctgagcttttagttttgttcctaattttggctacaatttaaatagttgttttgacactgctgtactgatatttcatttggaagattaatcttttattttactgctttactaaacctgtgtttggatattcagaaggtacttggttattgaatggatttcgcaatctgtgcctagtttttattctttttacgccaatcatccctgacgttattcc

SEQ ID NO: 17404 - DNA, 414 bp, Glycine max
  Clone ID: LIB3106-105-Q1-K1-G3
ccaccgtgcaccacgtggctcacgagtctcaccaccacaccccccattccgctttctcctcccacaacaacgcaccccccaccactgttcatcacgtgagccaccaggttaacaccggtggtctctcgaccaaacccactgtcagggttttcaccaaagctaatcccaatttctctctcaccattcgtcgcggccaagtcattctcgctccctccgatcccaccaatgagtaccagcattggtataaggatgagaagtacagcacgagggtgaaggatgaagaggggtgccctgctttctctttgatcaacaaggccactggtgaggccttgaagcactccatcggtgctactcatccagttcggctgataccttacaagccagactatcttgatgagtctattctttggactg

SEQ ID NO: 17405 - DNA, 401 bp, Glycine max
  Clone ID: LIB3106-105-Q1-K1-G4
gctgaatcgaatctccgaagatggccgcgagcgatcgcacagtgttgcaattctcttcatcatcttcttcttcgcagagcttgtccgcgaaggtccaccctctggtcatcttcaacatctgcgattgctacgttcgacgccctgaccaagccgatcgcgtcatcggaaccctactcggctccgtccttcccgatggaaccgtcgatatccgcaattcctatgctgttcctcacaacgaatctatcgaacaggttgcgttggatatagagtaccaccacaatatgttaatatcccaccaaaaagtgaatccaaaggaaatcatagtaggatggtattcaaccggtcttggagtaacaagtggtagtgcattaattcacgagttttattctcgagaagtcccc

SEQ ID NO: 17406 - DNA, 469 bp, Glycine max
  Clone ID: LIB3106-105-Q1-K1-G5
gagataactagaaacagtgtgatgaaaatgaaggtccttgttttcttcgttgctacaattttggtagcatggcaatgccatgcgtacgatatgttccctctccgaatgaacactggctatggtgcccgtactccggaggtgaaatgcgcaagttggaggcttgctgtggaagcacacaacatctttggctttgagaccattcctgaagagtgcgttgaagcaacaaaggaatacatccatggcgaacaatatagatcagactccaaaacagttaaccaacaagcttacttttatgccagagacctcgaagtccatcccaaggacacatttgtgttcagtatagatggcaccgtactctctaatattccatactacaaaaaacatggatatggggtggagaaatttaactcgaccttgtatgatgaatgggttaacaagggcaatgcaccggcactgcccgagactctta

SEQ ID NO: 17407 - DNA, 262 bp, Glycine max
  Clone ID: LIB3106-105-Q1-K1-G6
cccacgcgtccgcccacgcgttcggatcgcgagcgccgccctttttttttttttttatttttgttaggattaatatttcatttgttttgtataatgcttttaaagctgaactttctttcatgtgggcaaagtttgacggaaaagccatttccctaagtggttttttccaaacgttcctaacttgccgttggaagagacaacttttaacttccccctgggggggtaatattgcctccatttaacaaaaaaggggggacactgt

SEQ ID NO: 17408 - DNA, 426 bp, Glycine max
  Clone ID: LIB3106-105-Q1-K1-G7
gcagggatggcctccactctctctatatcctcttcatccacccttgttgatgccaagcctccaactccaagacaatgcgtcacccttgccactcttccccctccaccttttcactctcagactcgtccttggaagaccactgctttctgtcgtaggcttgctcgcaattttatggcaatggccaccacaagagaggcagccgcagcagaagttgccgccacaactgacctctctattgccgagacgccagagattgtgaagactattcaagaagcttgggacaaagttgaagataaatatgcagtgagttcactggccgttgctggtgtggttgcattggtgggctcagctgggatgatctcagcaattgataggcttcctttaattcctgggcttcttgaggtcgtaggcattggctacactggg

SEQ ID NO: 17409 - DNA, 151 bp, Glycine max
  unsure at all n locations
  Clone ID: LIB3106-105-Q1-K1-G8
tcgacacgcgtgcggacacacgtacgcacacgcgtgtgntntttatgaactaaattggaaaaccaatatccaaaattggcttttcggattgagaaggcgtcccaagaaggaggacaaaccctcaggccctttttattaaaaaaaactaaat

SEQ ID NO: 17410 - DNA, 444 bp, Glycine max
  Clone ID: LIB3106-105-Q1-K1-G9
tcgcccacgcgtccgtcttgagccatttactttcctcaacttcaatttctgtagctagctactagttcagtgttcagcatatgtgaaatgaaatgagaagaaccatgtcaaatgcatcagcatgcttctttttctttgcttttgtagtattagtagcacttcataatgctgaatgccgttctcttcggcctagtgtttccgatggggttgatgcagttcaattacctcaagagtcttcttatctacaactcatagaccaaagtgttgttgtcgagtcttcttctgatgagcatttctgtaagcaaatgtacgggttcttgccatggtccaataacatacttggccatctctttctcattttggtttatgaatacttgttgttcacggagaaacatatttggctgcttggggtgagccaaacttaagaatcttggccttggggtt

SEQ ID NO: 17411 - DNA, 472 bp, Glycine max
  unsure at all n locations
  Clone ID: LIB3106-105-Q1-K1-H1
gtgtgatgaaaatgaaggtccttgttttcttcgttgctacaattttggtagcatggcaatgccatgcgtacgatatgttccctctccgaatgaacactggctatggtgcccgtactccggaggtgaaatgcgcaagttggaggcttgctgtggaagcacacaacatctttggctttgagaccattcctgaagagtgcgttgaagcaacaaaggaatacatccatggcgaacaatatagatcagactccaaaacagttaaccaacaagcttacttttatgccagagacctcgaagtccatcccaaggacacatttgtgttcagtatagatggcaccgtactctctaatattccatactacaaaaaacatggatatggggtggagaaatntaactcgacctttgatgatgaatgggttaacaagggcaatgcaccggcacttgccgagactcttaagaattacaacaagctggt

SEQ ID NO: 17412 - DNA, 433 bp, Glycine max
  Clone ID: LIB3106-105-Q1-K1-H10
gtgaaaccatctccaatgccagacagctggaagctgagggagatatttgccactggtattgtgctaggaagttacatggcactaatgacagtagtatttttctggatcatgaaggataccgacttcttctcggacaagttcggtgtgaggtctataaggaacagccccggagaaatgatggcagccctgtacctacaagtcagtatcataagtcaagcactaatttttgtcacaaggtcccgcagctggtcctatgttgaaagacctggtcttcttctactgagtgcttttatgattgcacaactggtggcaacttttctggcagtatatgctaactggggcttcgcaagaattcagggaatgggatggggttgggctggtgtaatctggctctacagtttagtgacatatatccctcttgatatactcaaat

SEQ ID NO: 17413 - DNA, 244 bp, Glycine max
  Clone ID: LIB3106-105-Q1-K1-H12
catgtgatccgttcggtccaatgtagcataagcccagcatggtcattgcatcagtagctgtcatctagtgcttcagggggacgcgcctcctggaggcccattccggggcggggcgggtgcatgcccggttcgggtttggtaataagtaagccgtcgtcccgaagaaagttttcagggggttggtgcggtagcttcgataggcccctgtggtatccgggcgccaaggcgcctcgatacctgtatg

SEQ ID NO: 17414 - DNA, 338 bp, Glycine max
  Clone ID: LIB3106-105-Q1-K1-H2
gcctagatgggtgtggagactcatctacacatgaatctggtctcttttttgacctaaattggaaaaccaatttccaaaatttgcttatggtttgagaaggggtcccaagaaggaagacaaaccctcaggcacgttataataaaaaaaaataaattatgcgcctattaataattgatttagcgagagagcgtttcttttttttctctctctctctgaacttgaactcaacccttccttcgttccgcgacaacgatgaccaactacggcacaattccaacctcctcctcgccttcgaccaacctcgacttcatctcacgcgccaagcagcgcgtcaagga

SEQ ID NO: 17415 - DNA, 422 bp, Glycine max
  Clone ID: LIB3106-105-Q1-K1-H3
tcgcccacgcgtccgcccacgcgtccggttgattagggtttcttcgggtgctaatgctcttgttttctcacagtcacacagcaatggaagcaatcacagagggagtgaacaacatcaacatctccgattcttacaagaagaatcgcattcaggtctccaacaccaaaaagcccctcttcttctacgtcaatctcgccaagaggtatatgcaacagcataatgaagttgagctctcagcactaggaatggctattgctacggtggttactgttgctgaaatcttgaaaaacaatgagcttgctgttgaaaagaaaatcacaacatcaacagttgacatcaaagatgattctagaggcagacctgtccaaaaggccaagattgaaatattactggggaagactgaaaaatttgatgagttgatg

SEQ ID NO: 17416 - DNA, 365 bp, Glycine max
  Clone ID: LIB3106-105-Q1-K1-H4
gttatgagaagctgaaccttcctctgcacaatctccttctaaaagcttctcatccatggcgaaaacgctcatttcgtctcaatcgttcatcggcacaccgctcccctcactccctcgccaccacctcccccaccgcaccaggctcgtcgccaccaaagtcctcgtcagcctccacgaaattcccccaatccactccataagccgcaacattgacttcgccggaatcgtgactagagccgaaggccttctctacacgctcgcccatgctgcggttgcagcggaccctgcggttgctgcggactctgcggcttccaccaccggtgcttgcgaacagaaaagcggaggctggttcggcttcatcttcg

SEQ ID NO: 17417 - DNA, 280 bp, Glycine max
  Clone ID: LIB3106-105-Q1-K1-H5
ttcagatattgttttaggttgaattgcagacaatattggcatttggcacatatagtttgtttttgcttgacttctcagtgagaagtgttttgatgagattaattgatagttataagagatgttttcttggttgttcttgcgaaataaaaaaacacacaaaaataattggcttttataccattactaaaaaagtagcggtgtatccacaaaagaatacatccatggcgaacaaatatttattcaaacttctatacaactttaccaacaggccggccttttt

SEQ ID NO: 17418 - DNA, 360 bp, Glycine max
  Clone ID: LIB3106-105-Q1-K1-G10
cggacgcgtgggcggacgcgtgggaaaacttgctatagcagtaagctataactcatttgaggctctgtgagaattgagaaatggctaaagatgttgaggttcaagagcaaggaggagagtactctgccaaagactaccatgaccctcctccagcacctttgttcgacccagaggagctcacacagtggtccttctatagagccctcatcgctgagttcatagcaacccttctcttcctttatgtcactgtgctcaccattattggctacaaaaggcagactgatacaacggtaggtggcaccgactgtgatggggttggcattttgggcatcgcttgggcctttggtggcatgatcttca

SEQ ID NO: 17419 - DNA, 359 bp, Glycine max
  Clone ID: LIB3106-105-Q1-K1-E3
atggcaccgtactctctaatattccatactacaaaaaacatggatatggggtggagaaatttaactcgaccttgtatgatgaatgggttaacaagggcaatgcaccggcactgcccgagactcttaagaattacaacaagctggtgtctcttggcttcaagattatattcttgtcaggaagaacactggacaaacaggccgtaacagaagcaaacttaaagaaggctggctaccacacatgggaaaaattaattctcaaggatccacaagatccttccactccaaatgcagtttcatacataacagcatcgagagagaaactgataagcagggatacaacatttgtgggatcattggag

SEQ ID NO: 17420 - DNA, 383 bp, Glycine max
  Clone ID: LIB3106-105-Q1-K1-E4
cccacgcgttcgcggacgcgtgggtttttgtccttcataaaactagctgaggggctttgaacatatcaagggggtgatattagagccgcatgaatttgacatggaaagagatttggtgactgcaacactgaagaagaaaagaaacaaactgctcaagtattatcaggtggaaatagatgaaatctaccaaagtttgacagggaaaaaagcataacttctgaggttgctaaattctagacacggatatgcctatttagtagtacccagtaaccccgttccacaactctcatctatatatataatcctagaagctcaatgctagtattttgtgtgaggtattatgcagcaactagcaactgctgaaccatgatatttacctaatt

SEQ ID NO: 17421 - DNA, 153 bp, Glycine max
  Clone ID: LIB3106-105-Q1-K1-E5
accacgcattcgacatactagtactcatacatgaactgagaaggctaaagagacctgtacgtcgtgctgtacgcctagaccgagccagagcttcgtcttggccctggattactcactgcagaaccaacaccagtcacaactgacaccgtcact

SEQ ID NO: 17422 - DNA, 371 bp, Glycine max
  Clone ID: LIB3106-105-Q1-K1-E6
attttgctctacctgctcacttgtaggggtcgcagcttggctctcaaacaatggcgctgttccttctctacgaatccgcttcgggctacaccctgttcgaggttcacggcctcgacgaaatcggtcagaacaccgaatcggttcggaactccgtttcggacctcaacaggttcggcaaagtcgttaagcttcgctccttcaaccctttcacttccgctctcgatgctctcaaacagagcaacgccggctgtgaaggcatattaactgatgagctgaggactgttttggagactaacttgcctaaagtgaaggaaggtaagaagtccaagttcagtttatgtgggcccgatcctaacattgcgtcgcagata

SEQ ID NO: 17423 - DNA, 463 bp, Glycine max
  Clone ID: LIB3106-105-Q1-K1-E7
aaacgatccaaactcttttttcatttgcagcatcaaaatgagtggtagcaacgatggtagcggcagctggagctctaggtttttgaaggtggctagtgcagctgccgctacagccgccgttgccggcggtttatatgccattctttcatcctcaacctctgctagctctgagatggaagtgccgcttggcagcgcacggcgtgagagcaaagaacgtgacgatggtggctccgggtctcatcctcgcgagggtgccaccacggtcagtcgttggaagaaacctgagattggttgggtgaagctgaacgtggatggttcacgcgacccatacaaaaagttctccgctggttgtggtggtcgtctgagggacgcatcagcaaagtggctccgtggctttgctaaaaaactgaaccctacttatgcagtgcaccagacagagttagaagccattcttacgggcttg

SEQ ID NO: 17424 - DNA, 457 bp, Glycine max
  Clone ID: LIB3106-105-Q1-K1-E8
gcgacaggtaggaaaggcagcgcatccatactctgcttcattagcgaagaaaaatggcaaccatcatcgccggcatcccaactacatcgatcactcgcgcaggtcttgtgctcaaacgacctgttggagcctcgtcctctaccgttcttggattgccagcaatggctaaggcagggaaagtgaggtgctccatggaggaaaagccttcaagcagctcaaatatagggatgggggcatccttgttagcagctgcagttgccgcaaccatgtcaagcccagccatggctttggtggatgagagactcaacactgaaggaaccgggcttccctttgggcttatcaacaacctccttggttggatcctgtttggcgtcttcggtcttatatgggctttctactttggctacgcttccacccttgaagaagatgaaaagtctggattggtcctctaaacccc

SEQ ID NO: 17425 - DNA, 342 bp, Glycine max
  Clone ID: LIB3106-105-Q1-K1-F1
tcaaaccctaaccctagaagaaaaaaaaaaccacatccaccaccatctagggtttttctttttctcatggctagtttgtcaactaggattttcttcatcatgtcccttgtgtgcctggctctcggtccaatggcacaaggggaaatgacatgtggccaggttgtgagcaacctgaccccatgcatctcctatgtggtgtatggtggaaccaatgttcctgaacagtgctgcaatgggataagaaatctctatggcatggctcagaccaaaccagaccgccaagctgtttgcaactgcatcaagaacggtgttaggaacaagggcttcaactactctgacttc

SEQ ID NO: 17426 - DNA, 416 bp, Glycine max
  unsure at all n locations
  Clone ID: LIB3106-105-Q1-K1-F10
gaggggagagattgccttcttcttttattctttaatctctcccctcttgccttcttcttttattcttttccaaccagtgaattaatcttattatcgtttctcctggtgttaaaaagtttctaaaattttctctacttgatattcacacatcaacatacctgaaagctccaagatcgctgtaatcaacagatccagagagaaaggttgagctatagcctaaagggagagacacataaatagtttctactttctattcatagatagatggctggcccaattatgagacctcagattgtgctatttggctcctccataattcanatgagcttcgacaatggtggttggggtgctattctagctaacttgtacgctaggagggcggacatcatcttaagaggatactctggttggaattc

SEQ ID NO: 17427 - DNA, 58 bp, Glycine max
  Clone ID: LIB3106-105-Q1-K1-F12
aagtagaagacgcgttccgaaaaagatagaaaaacaaaaaaaaaaaaatttttaaaaa

SEQ ID NO: 17428 - DNA, 266 bp, Glycine max
  Clone ID: LIB3106-105-Q1-K1-F2
cccacgcgtccgctaggattgtcagtgacttgagtcttatctgttgtggtaatccacattcgaaaagaaggtggggcgatcatctgctttcatagcttctacactcttggaagatgggggtgttccaaaagcagcatattcttctaccctctttggatgaggccatccatgttattacctggggtgtttaagataagacagaaggggggacagaagttgggtgagtatatggtcagttacctaatatattttaacaggttttaaga

SEQ ID NO: 17429 - DNA, 253 bp, Glycine max
  Clone ID: LIB3106-105-Q1-K1-F4
aaaagataaaaaaaaaagatttaatgaatcgggtgagaagtctaaactaaactttttacaagatataatatgatgattacgatcgaagacgaaataaactcatgtttcacattcaaagatgggaagccataacataattaaccaaagggaagctgatttttttaaaaatttaccaaccaaaaaaaaaaaaaaaaaaaaaaaaaaaagggaaagcggaataaaagaataaagaattcatttcaaaagaatgcaa

SEQ ID NO: 17430 - DNA, 433 bp, Glycine max
  Clone ID: LIB3106-105-Q1-K1-F5
aaatcaacgccccctaatcataaccctctttctttctcttccttttcatcattctcatatcctcaatcaccccccctcgcactcgctcttcccttcctctggtggcgacaatgtcgactcctgctaggaagaggctgatgagagacttcaagaggctgcaacaagacccgcctgcagggatcagtggtgccccccaggataacaacataatgctgtggaatgctgtcatatttggtcctgatgatactccatgggatggaggcacgttcaagttgacactccaatttactgaggactatccaaataaaccaccgactgtacgatttgtgtctcgcatgtgtcatccaaatatttatgctgatggaagtatttgtttggatatattacaaaatcaggggagtcctatttatgatgtggctgctatactcacatc

SEQ ID NO: 17431 - DNA, 398 bp, Glycine max
  Clone ID: LIB3106-105-Q1-K1-F6
ccttgatcacaggaattgacaatgagaagtcatcactaatgtctcaatcgaagtttgagaagaagtttgggcaatcatctgttttcatagcttcgacactcttggaagatgggggtgttccaaaagcagcaagttctgctacactcttgaaagaggccatccatgtaattagttgtggttatgaagataagacagaatgggggaaagaggttgggtggatatatggctcagttaccgaagatattttaacaggtttcaagatgcattgtcatggttggagatctgtatactgcatgccaaaaaggcctgcttttaaaggttcagctcctataaatctctcggatcgtctgcatcaagttcttcggtgggctcttggatctgttgagatctttttcagt

SEQ ID NO: 17432 - DNA, 460 bp, Glycine max
  Clone ID: LIB3106-105-Q1-K1-F7
ggtactgtagctccacagtttacaggcgtgtctataattgaggtagaagaagaagtgcatgaatttactgtatttgatcagtcgcaccctaaatcagatgatatatatcagatgattgacagattagtacaggacctcaggcaggttggatatgttccaatgatacatcagtagagatgaatgaaaatcaaattggttgcattattatgtaagcacagctgaaatgatgcttcaaggaatgaatatgatttttttagttgagcacagtgcattgctggtttactaaaaacaagtaaacaaatcattgtattcatcactaccactggtttagcaacaaagttgtatgcatggctcatggctgaacctatgcttctggtgcaagcatcacagtacggatcccaaaagctctgcttgcagcatggcgtgatatctcttgcatgattttgcctaacacagtaat

SEQ ID NO: 17433 - DNA, 171 bp, Glycine max
  Clone ID: LIB3106-105-Q1-K1-F8
ctccgaagaatggcgaccatgactgatgttagccagctattccccatggttttattgagcggatcaagctaaccgcggatcgcgcgtgcggtaaaaaagtaaatttcgcccacacatgccatgcaaccggatggaatggcattgggtctaatgatgataagcccaaacgtt

SEQ ID NO: 17434 - DNA, 433 bp, Glycine max
  unsure at all n locations
  Clone ID: LIB3106-105-Q1-K1-F9
cccacgcgtccgagaatttcgtgggattatcagttttggatggatacattgcatggggttcagaatctaatgaggtgtactgttatcacaaatcactgccggtgccaattgctactcataaatttgagtcagttgatcctatttctggccatctaaatagtggtgataataatggacagtttgtttccagtgtttgctggagaaagaaatctaacatgcttgttgctgccaactcagttggaattgtgaaactgttgcagatggtctgacagaaatgagaaaatatttggttaacattgaagcctgaaaagctatttatttcctgacttgataatattttgatttagtatacctctcagaagactaagcgtgcattntatttgagacaaactcgcagaccagttctttattcangcttcaatgattaatgggg

SEQ ID NO: 17435 - DNA, 426 bp, Glycine max
  Clone ID: LIB3106-105-Q1-K1-G1
cccacgcgtccgctttttcgtattcggggttgctgctttctttcgactctattgtcttcttaataaatacagaaagaaacaaaaaaaaaaaaaaaggggaaaaggaggaacaagggaaaaccctaatcctgaggcactgaaagtgtgatatggcaagagtcatttcctcttcctgcgcacgcctcgcaatgcgcctcttctccaccaccaccacagccaccgcgttcgccgtcactttacccaaaccctcatcactctccctctcatcgcgtcgattcctcttccctctctcccatgccatcgtccctccctccacccgcgtcgccggaatccggtgccgcgttaaccgcgccggagactcggcgtactcaccgctgaactcggggtcgtcgtcttcgtcgttcagcgaccgcccccccacggaga

SEQ ID NO: 17436 - DNA, 393 bp, Glycine max
  Clone ID: LIB3106-105-Q1-K1-E2
cccacgcgttcgcccacgcgtccggctggttctgcatttttcgtgcgtcaaatctcacaatcgataactaaactcatcgcctttattcagaatgtcggaagcaccattcagaccacgagaaaagcttgctgagaagcaaaaatatttccagagtatccacaggcatacctacttgaagggacccatggataagattacatctgtggccataccactggctttggctgcaacatcaatttacatgattggacgagggatctataatatgtcgcatggaattggaaagaaagaatgacctggaaatttctgattgaggaggggtttccacacatagcctccttaatatggactagtgggtttctttgcatttatgtttgttctcttaataaaaat

SEQ ID NO: 17437 - DNA, 475 bp, Glycine max
  Clone ID: LIB3106-105-Q1-K1-D1
tgcttgctcagactcaagggtgtccccatctcatgtgctagatttccaaccaggagaggcctttgtggtcagaaatgttgccaacattgtcccaccatatgaccagtcaaaatacgctggaactggggctgcagttgagtatgctgttttgcatcttaaggtgtcggagattgtggtcattggacacagtgcttgtggtggtattaaggggcttctgtctttcccatatgatggaacctactctactgattttattgaggagtgggtcaaaattggcttgcctgcaaaggcaaaggtgaagacacagcatggggatgccccttttgctgagttgtgctcacactgtgagaaggaatctgtgaatgtttcccttggaaacctgctaacttacccatttgttagagatggcttggtgaacaaaacattgtcactgaaaggaggatactatgactttgttaaaggatcttttgagctc

SEQ ID NO: 17438 - DNA, 326 bp, Glycine max
  Clone ID: LIB3106-105-Q1-K1-D10
gatctactccacgcgttcgcccattcgtccgcccacgcgtccggagcatatatagcatatagatttagaattttgtatgagcttatgatccttgctaaggttccatgatttatgatctttagcccttcctgatcctaagcaggatcttgatttaatgaccttggctagttccatgtgcattttgtgcttggtacttcgaattcaatatgcttctttattagctgcgtctagtgtaattgtgtctcttctgctttattaagcttcgagatatgctgctcaatcaaatgcatttcactggatttatagtctttcaataattgattctt

SEQ ID NO: 17439 - DNA, 474 bp, Glycine max
  Clone ID: LIB3106-105-Q1-K1-D11
atcaatgtatggataaaaataatttagtcaataagcaaaccataatgtacatgttttgctgggcctcgattggaaaatggacagaactgtagctggtggatggtggatcttggccaagatcatcaggaaaatcgatgaatgcagcttatgtgcaactactatactctgaggcaggacggttctaatgccttcccgagatgttggaatgttcagggctcacttgacggaaagagctggacaaacttgatagttcatgaaaatgatcggagtatatgtaaacctggccagtttgcctcttggcccataattgggcccaacgctctgcttcccttcaggtattttcgggttgtgctcacaagaaaccaccaccgatgccaccaatttcctggaaatttctgcatttgttacttggaattgtatgggtacttcctttaaaaagcctaaccatgccaataccataccttcttaaataca

SEQ ID NO: 17440 - DNA, 440 bp, Glycine max
  Clone ID: LIB3106-105-Q1-K1-D12
gcaaattcacaatgcctaagcagatccacgagattaaggattttcttgtgacggcgcggaggaaggatgcgaggtcggtgaaaatcaagaggagcagggatgtcgttaagtttaaggttcgatgctccaagtacttgtacacgctttgtgtctttgaccctgagaaatccgataagttgaagcaatctcttcctcccggtttgagtgttcaagacctgtagagctgttgagtgtggcagcatgcgtttgtttctctttttgttacctgatgctctagattttggggcttggttttatatgttggtgatttttacgaggacatttttgttttaaattggtacgaaatgtgaaagtttgatattgagcacaatttgaaatgaaattgcccaaaagtggtttattttaatttataaaatataatttttttttttattataaaa

SEQ ID NO: 17441 - DNA, 383 bp, Glycine max
  Clone ID: LIB3106-105-Q1-K1-D2
cattcctcctgcacccaggggtgttcctcagattacagtgtgctttgacattgatgccaatggtatcttgaatgtctctgccgaagataaaaccactggccagaaaaataagatcactatcaccaatgacaagggtagattgtcaaaggaagatattgagaagatggttcaagaggctgagaagtacacgtctgaggatgaagagcacaagaagaaggttgaggccaaaaacgctttggaaaactatgcatacaacatgaggaacaccgtgaaggatgacaagattggtgagaaacttgacccggctgacaagaagaagattgaggatgcaattgagcatgcaattcagtggttagacagcaaccagcttgcagaaacagatg

SEQ ID NO: 17442 - DNA, 459 bp, Glycine max
  Clone ID: LIB3106-105-Q1-K1-D3
ggaaagttgtcgcgtgcagcaaagaagattacatcgtcttccattcaagaactgtcccagctcgctcagagatgcaacgccatcaacctcgccgagggcttccccgacttcccctcccctccccacctcaaaaacgccgccgtttctgccatcaattccgacttcaaccagtacaggcacgtgcaaggtgtgtgtgatctcttggccaagatggtgaagcaaatgcatggtttagacatcgaccctgttactgacgtagctatttgctgcggtcaaagcgaggcattcgcagctgcaatctttgcaacaattgatccgggtgacgaagtcatactttttgacccttcctatgaaacgtatgaaggatgtgttgccatggccgggggagtccctattcacgtgccacttgacccgcctcaatggactctggatccaagcaaattactccgatcatttact

SEQ ID NO: 17443 - DNA, 385 bp, Glycine max
  Clone ID: LIB3106-105-Q1-K1-D4
cgagataactagaaacagtgtgatgaaaatgaaggtccttgttttcttcgttgctacaattttggtagcatggcaatgccatgcgtacgatatgttccctctccgaatgaacactggctatggtgcccgtactccggaggtgaaatgcgcaagttggaggcttgctgtggaagcacacaacatctttggctttgagaccattcctgaagagtgcgttgaagcaacaaaggaatacatccatggcgaacaatatagatcagactccaaaacagttaaccaacaagcttacttttatgccagagacctcgaagtccatcccaaggacacatttgtgttcagtatagatggcaccgtactctctaatattccatactacaaaaaacat

SEQ ID NO: 17444 - DNA, 468 bp, Glycine max
  Clone ID: LIB3106-105-Q1-K1-D5
ggaagatcgtcgacgtacttgttgaccaaaacattgttcccggtatcaaggtcgacaagggtttggtgcccctagctggttcgaacgatgagtcatggtgccaaggtcttgatggtcttgcgtctcgctcagctgcatactaccagcaaggtgcccgtttcgccaaatggcgtactgttgtgagcatccccaacggtccctctgctctggcagtgaaggaagctgcctggggtctagctcgctatgctgcaatttcacaggagaacgggttggtcccaattgtggagccagagatcttgcttgatggtgagcatgggattgacaggacattcgaagtagcccaaaaggtgtggtcagaggtattcttctacctggctgagaacaatgtcctgttggaaggtattctcctcaagcctagcatggttactccaggagccgagtccaaggacaaggccactcctctgcaag

SEQ ID NO: 17445 - DNA, 408 bp, Glycine max
  Clone ID: LIB3106-105-Q1-K1-D6
attgtttgttgttgtaactcgttcttcttcttttgttgttctgtgtttgtgtttgttttttctctcacctgaaaatgtcttgctgcggtggtaactgtggttgcggaagctcctgcaagtgcggcaacggctgcggaggctgcaagatgtacccagacttgagctacactgagtcaaccaccaccgagaccttggtcatgggagtggcacctgttaaggctcaatttgagggtgctgaaatgggtgtgcccgctgagaacgatggctgcaaatgtggaccaaactgctcctgcaacccctgcacttgcaagtgaggtgttgggagagcaagcttcaagcagagatagcccttaattaggattaatgataaactattaatgtgtagctaaaaacttatgtattatgtct

SEQ ID NO: 17446 - DNA, 348 bp, Glycine max
  Clone ID: LIB3106-105-Q1-K1-D7
cccacgcgtccggatccctttgatgtttgtgtacagtgttgtgttagcaatcgcctcttccgtacttatccattcttttgttttgttgtaaagcttgaaatagaccatcgatttcttagtttttctttgaaatgtacatttatgttatgatcgtgtaaattgttgtatattagtcacactagaaactacatcgcggaggagatttttgcacatttcattattcgctttaataatttatattaaaaattgatggtgtccaagtactaatagatagccaaggtattttaaaaaaaaaaaaataaaataaaaataaaaaattttaaaaaaaatataaaaccccctttatat

SEQ ID NO: 17447 - DNA, 382 bp, Glycine max
  Clone ID: LIB3106-105-Q1-K1-D8
gcgtatccctagggaaaaataatttcttgacattttcaatgcagcaatccactctattcctggtcctattcctattccccctcggacatgctctttcttacaatgctgcctatattaaagatggcctcaaatcctattcccagcttgatctccctcactccgccttcggttctgaacgcgtagccttcaattgccatgggaacggaccacatgctggagcggctgctggtataatcctgaaggggcaagagacctatagagagtggcttgactttgcaaatacctaaccacacaggaacatgtaattatgcgacgggttacacactgacacgacggaatctatgcgtgggagaccctttggcctcaaattcaacactgtaac

SEQ ID NO: 17448 - DNA, 369 bp, Glycine max
  Clone ID: LIB3106-105-Q1-K1-D9
atgctttccacgcgtccggtatgtatctgtgaacagggtgacaatactgacagacaaattgggtcaactctaaagggtttggttatgtagagtttgttgagattgatgctgtgcagaatgctctcctgttaaatgaatcagaattacatggtcgacaactgaaggtgtctgccaagcgtacaaatgttcctggaatgaagcagtattttggaagaagacctgctggttttcgatctaggaggcctttcatgcctgctccattctttccaccatatggatatggaagggttccaaggtatataagacccactcgatacaggccatactagtgcacattctctgtttaataggtgatcacatatttaatta

SEQ ID NO: 17449 - DNA, 101 bp, Glycine max
  Clone ID: LIB3106-105-Q1-K1-E1
aaaaaaaaaaaaaaaaaaaaaaaaaaaaaaaaaaaaaaaaaaaaaaaaaaaaaaaaaaaaaaaaaaaaaaaaaaaaaaaaaaaaaaaaaaaaaaaaaaagg

SEQ ID NO: 17450 - DNA, 382 bp, Glycine max
  Clone ID: LIB3106-105-Q1-K1-E10
tactttgacccgtccgaacttatatttcctaccaatttctctcgagttaatgtctggacgttgataatgttgcaagggtttggtcaagggaggcgccaagaggcacaggaaagttcttcgcgatatcattcagggtattacgaaacctgcgattcgtaggttagcgagaagaggtggtgtgattagaatcagtggtttgatctactaggaaaccatgggggttctgaagattttcttggataacgtgattttagatgctgtgatctacactcgagcacgctatgaggaagactgtgactgccatggatgtggtttatgctctcaagatgcatgtaatgaccctttacgggttttggaggctaatgaatttaaacccttcttt

SEQ ID NO: 17451 - DNA, 375 bp, Glycine max
  Clone ID: LIB3106-105-Q1-K1-E11
agattatccacgcgttcggtttagttttatcttccggttgcttaatctttagacatgagtatcaagcagcaatctttatggatggtgactaggatgtaaattgttgacgaatttgcctctaaggattgctaggtgtgttcgtatagatgtataaaaaaaatgtttaaatgttgatatttgcatttctgacaagtggctagagtgtaaaagccatataattagttcaaattgatactttgacaattattgtttgcgattaaaacagttgcattcttcataactattcatcctgattgggacttttccttactcattactcaagactatcaaaattgattatgtattaacttcagataaatatacatatttctttaa

SEQ ID NO: 17452 - DNA, 418 bp, Glycine max
  Clone ID: LIB3106-105-Q1-K1-E12
attaattgcaagaatggcacttcgttgcttggtgatgtccctttctgttctcttcactctgggtcttgcgagagaaagccatgccagagacgaagatttttggcatgctgtttggccaaacactcccattccaagttcattgcgagatcttctaaagcctggccctgcaagtgttgaaatcgatgatcaccctatgcaaattgaagaaacacagtacccgaaaaccttcttctataaagaagaccttcatccaggcaaaacaatgaaagtacaattcagcaagcctccctttcaacaaccatggggtgttggtacatggttaaaggaaattaaagacactactaaagaaggatatagttttgaagagctatgcatcaagaaagaagccattgagggagaagagaagtttgtgcaaaat

SEQ ID NO: 17453 - DNA, 343 bp, Glycine max
  Clone ID: LIB3106-105-Q1-K1-C8
catttgtgtctctctcttatcttttgctgttcaacattcttctctctcacaaagcaacaacacatacaccgagcgaggggaattcaactttcagcactggcggtttcttcttctgcaacaaaatgcgtcctcttcttgcttctggcgctgctcattcgataagaagccatggccatggctactaccccacagatctctgacctcaggaatgttgaagttgaaagacacaggttgccgagcttgacgaactcgtcattggtggcgagggcaaaagaggctgacaaattaaatgaacacgctgctgtggctaacccatatgaagtgggttcaatggctgagatga

SEQ ID NO: 17454 - DNA, 432 bp, Glycine max
  Clone ID: LIB3106-105-Q1-K1-B2
cagagcgagagagaatcgtaacagaaacgtcactggaagttgtctctaccaccctctcagccatggcaacaattccccctagccgatcatcatcacacgcgtttgttgccatggcaaccttcacgactctgttgttgtgcacggcggcggcgaaggagagcgtgtacgagatactccccaagtacgggctcccgagtggtctgttaccggataccgtcaccgactacaaactcgacgaggatggccaattcgtcgtcgttttgccgaagccctgctacatacagttcgattacttggtttactacgagagcaagatctccggcaagctcagctatggctccatcaccaatctcaagggcattcaggtccagcgcctcttcatctggttcaacgtcgacgagatcagggtcgatttgccaccctccgacagca

SEQ ID NO: 17455 - DNA, 212 bp, Glycine max
  Clone ID: LIB3106-105-Q1-K1-B3
atatcataatccaacgtgcatatatgacagaggatatggtgctcgtaatgtggctacttctatgtgatatgtgcgcatctgatcatagtacaacgggcggaagcattttcgaaagcctctacaaggtcgttatgcgtcgcaactctgtctacgttaccttcgtcatcgctggcgccttccttggagaacgggctggggggcgttttaaagga

SEQ ID NO: 17456 - DNA, 328 bp, Glycine max
  Clone ID: LIB3106-105-Q1-K1-B4
gccacgcgtgcgataaatataagcctcttctgcacatgtctaaagaagacgaggcatcacatgcagggttcaggactacgcacacggatacagtcacggttcatgaatagaataacacggctaatgctgatcaagtggcgcttgactttcagaagcacctgcatcactggcctaatttacacgcccttattaacttcctcacaaatatgggaagttggtgctttttcaactttaaaacatggttctcgcgacttggacaggcgtacaaatggggtgcaatataatggaaggtcactcgccaagaaagctttgtctacctccaaacaag

SEQ ID NO: 17457 - DNA, 427 bp, Glycine max
  unsure at all n locations
  Clone ID: LIB3106-105-Q1-K1-B5
ggaagaagaagagaaaagagagagaagggtgaggtaaccctagagtggtgaatcgaatctgcaaagatggaagctgtttctcgaagaagaggcggaggcattttcgaaagcctctacaaggtcgttatgcgtcgcaactctgtctacgttaccttcgtcatcgctggcgccttcctcggagaacgggctgtagattatggagtccacaagctctgggaggctaataatgttgggaaacgatatgaagacattcctgtgctatggcaaaggcagtcaaaatagtgaccagcttgttagccattttgaaagtttattattttcatgaaaatttgaagtgatttaaagctggaagcaggttccatttctacaataaataccatatgctngtctctttcaggcttaactcttatgcgtgggttcatttact

SEQ ID NO: 17458 - DNA, 309 bp, Glycine max
  Clone ID: LIB3106-105-Q1-K1-B6
ctttaaggatgatgagaagaaaagggaagttgtggttgagatgactggcgacccggctgagagccatgaggatctcgctgcatatcagcctgcagaatgattggacatatgctgcctttgaccattattgctgcactcctgagaactgacaaaagagcaaaaccttattcattgcatggtccccctcaacgtctggaatccgagccatgacgctctatgccactacttaagacaggtttagacgagagctagatggtgtccattatgaaattcaagatactgaccccacataaatggatcttgaagcac

SEQ ID NO: 17459 - DNA, 227 bp, Glycine max
  Clone ID: LIB3106-105-Q1-K1-B7
cccacgcgttcgtggacgcgtgggcggacgcgtttgggaagtttggaacgattacctcgaggaggagttcgcgttgatccgtgaaatgcgggacaattattactacgtggcgatggataccgagtttcccggcgtggttctgcgcccggtggggaatttcaagaacattaacgactactactaccataccttgaaagacaacgtggacatgttgaagctgatccaat

SEQ ID NO: 17460 - DNA, 367 bp, Glycine max
  Clone ID: LIB3106-105-Q1-K1-B8
cagcgtgatgaatataggcctcttctgcacatgtctaaggaagacaagacatcacaggctatgttaagtacaaggcatatggatacagtcacggttcatgaagagaataacacggaaaatgctgatcaggtagtgcttgactttaggaagcacctgcatcactggcctaatttacagtacttattaacttcctgacaaataggggaagttgctgcttcttcaactttagagcatgtttatgttgacttgaaaaggcgtccaaatggtgtgcaatgtaatggagattctcttgctaaaaaagctgtgtctacctcgaaacaagaatgctcagtagttgtagacttgaaatcaattaaagctgatgatg

SEQ ID NO: 17461 - DNA, 372 bp, Glycine max
  Clone ID: LIB3106-105-Q1-K1-B9
gaaactgattaggcactggaaagttgtcagaggggataatgttatgataataaggggcaaagataagggcgagactgggactattaagcgtgtcattcgctctcagaatcgtgtcattgttgagggtaaaaatctggtgaaaaagcacatcaagcaagggcaaggtcatgaagggggcatctttacagttgaagctccaatccatgcctccaatgtgcaagttcttgacccagtgacagggaagccttgcaagattggacacaaatatcttgaagatggtactaaagtcagagtatcaagaggaataggatcatctgggtccataatccctcggcctgagatcttaatgataagaactaccccacgacctac

SEQ ID NO: 17462 - DNA, 301 bp, Glycine max
  Clone ID: LIB3106-105-Q1-K1-C1
aaaacaacacaaagcagcacaagaaggtgttccattttcaacactcatcagatcccagtcatcaattgcgttaacaactcgtaaggcaaccatgaggggcattctttctgtaaggacagccttggttcaacatcgtagtgagaaattgggccttggtttcaggctatttagcactcagggtgcttccactgctagtaccccacagtcgccgtcaccaccttcaccaccagagaaaacccattttggtggccttaatgatgaggacaggatatttactaacttatatgggctgcatgatccc

SEQ ID NO: 17463 - DNA, 51 bp, Glycine max
  Clone ID: LIB3106-105-Q1-K1-C11
atgctgagcacgcgtccgctatggatcgatcgcgagtggccgccctatttt

SEQ ID NO: 17464 - DNA, 380 bp, Glycine max
  Clone ID: LIB3106-105-Q1-K1-C12
cgtgaagatttctgggttcttgcgcagtcgaactacggtgggagtggacaaaacacggaggagatacttcaccatacatgaagaggttgctggcatcatgaatgagaaaagatgggtgatatataagggagaggaggatcctacctctattccagttgaatggatatgttggctgaatgtgcagcgtaaaaaggctacaactacagaggaaatgatggaactggcagcaagacttgaatgtgttagacagaatgtagctcttctcatgaaagaagaagtaacgatagccctagaaggaagcaaaggaaaacgtgtcagcactggaacagtcagtggtccagactgtgaaagttttattcatcaatttccaattgcttcag

SEQ ID NO: 17465 - DNA, 413 bp, Glycine max
  Clone ID: LIB3106-105-Q1-K1-C2
gtagaagaaaagaaatcctcacaatgcattcattcggctacagagccaatgcgttgctaacctttgccgtcaccattttggctcttatgtgcgccatggcctctgtatccgacaacttcaacacccccactccctctgcacaagtccaggtgttgaacatcaactggtttcagaaacagcccaatggcaatgacgaggtcagcatgacactgaatatatctgcagatttgcagtcccttttcacatggaacacaaaacaggtttttgtttttctagctgctgagtatgaaactcctaagaattccttgaatcagatatccctgtgggatggtatcattccctctaaagagcatgcgaacgtttggattcatacatcaaataaataccgcttcattgaccaagggagcaatttg

SEQ ID NO: 17466 - DNA, 417 bp, Glycine max
  Clone ID: LIB3106-105-Q1-K1-C3
gttcttcttcttttgttgttctgtgtttgtgtttgttttttctctcacctgaaaatgtcttgctgcggtggtaactgtggttgcggaagctcctgcaagtgcggcaacggctgcggaggctgcaagatgtacccagacttgagctacactgagtcaaccaccaccgagaccttggtcatgggagtggcacctgttaaggctcaatttgagggtgctgaaatgggtgtgcccgctgagaacgatggctgcaaatgtggaccaaactgctcctgcaacccctgcacttgcaagtgaagtgttgggagagcaagcttcaagcagagatagcccttaattaggaataatgataaactattaatgtgtagctaaaaacttatgtattatgtctgtgatgggtttcgtgcactctggtgtttt

SEQ ID NO: 17467 - DNA, 382 bp, Glycine max
  Clone ID: LIB3106-105-Q1-K1-C4
gccctaccattttcattctctttctactttctgccttctacacctcactcctaccttcagccaccgctcaagtcgtggttgacatggaaggtaatgatcttcaaaatggtgggaaatattatgtgttgccagtaatagagtcatcatatggtggaataagagtagccgcaactggaaaagaaagatgccctctcactgttgtacaatctgccgatccgtatgataaggggattgcaacaattatttcaaccccatatcgagttcctgttatccgcgaaggctttcctttgaacattacgttcggtaattttgcaggtatactgccttgtgtccaccttcgttctgagtggaccgtcgttaatggccaaccagaaggacccgc

SEQ ID NO: 17468 - DNA, 470 bp, Glycine max
  Clone ID: LIB3106-105-Q1-K1-C5
tccacgcgtccgcccacgcgtgcgcccactcgtccgaccacgcgtccgcccacgcgtccgtccacgcgtccgcccacgcgtccgcccacgcgtgcgaaaacacgtgactcgcagtgtgcctctcacgccgacttcctatggcaagggatagctgcctcactcgtgtcaccgccggcgccgctatgggcggcgctgtcggcggcgccgtcggtgctgtgtatggaacatatgaagctattaggtacaaggtgcctggactattgaaaattaggcatattggacaaactacacttggaagtgctgctatttttggtcttttcttgggtgctggaagcttgatacattgtgggaaatcatactgaggataaagatttggcctgccccctacttacagtgctttggttgctacacttgtaaaggattagtagagcacggattttctgcttttttggttttctggaacatggaaa

SEQ ID NO: 17469 - DNA, 454 bp, Glycine max
  Clone ID: LIB3106-105-Q1-K1-B12
cggacgcgtgggcggacgcgtgggctcgccgaggccgccatgggaaatgccttcctcctgcagggcggagactgtgccgagagcttcaaggagttcaatgccaacaacatccgtgacaccttccgcatcatcctccagatgagcgtcgtcatgatgttcggcggccaaatgcccgtcatcaaggtggggagaatggcggggcaatttgcgaagccgaggtcggattcgtttgaggagaagaacggcgtgaagcttccgagttacagaggggacaacattaacggagactcctttgacgagaagtcgaggattccggatccgcagaggatgattagggcttattgccaagccgcggcgacgctgaatcttctcagagctttcgccaccggtggttatgctgctatgcagagggttactcagtggaatttggacttcacggatcacagggaacagg

SEQ ID NO: 17470 - DNA, 473 bp, Glycine max
  Clone ID: LIB3106-105-Q1-K1-C7
gtcagagacacacacccctccccagcaaactctcacacactcacacacaaacgctggcgtttcgccaaatcccaaacgtttctcctttggacaccataaaaagcacagcctctccaaaccttcaccctctctctccctgcgctactgcgccatggaccagcgccatggaccccaacctctcccagagtcagacaccataggaaacgattctcacccaaaaacgcaactcaccaaggaaacagaacgagttgtggaatcgctgtccgacgccgagtcgcggcaccgcgagttacggagctccgacaaaccttgttcggactccaatttagaaaccctaggcgctggtgttacctcttcggttgaaacccttgctgtgcagcatcggagtgacgatttgcaagggagctctactgctccgaattcgggtggcaaagccgaaagtaaggagacagttgaatctcctgaaaaggaaa

SEQ ID NO: 17471 - DNA, 93 bp, Glycine max
  Clone ID: LIB3106-104-Q1-K1-H6
tattcatattgttgatcatattgatataaaagtctggagtgtacctcaagtggtgaagcccctgtatgaatcagcaaaaatctttgctcaaaa

SEQ ID NO: 17472 - DNA, 407 bp, Glycine max
  Clone ID: LIB3106-104-Q1-K1-H7
gggagagtgacttacagacttgacaaagaagacaaagaaagccttagagttggactgaggaaggcattgaggattttggttgcagcagttgctatggaagtgggaacatacagaagtgatggccaaagaatcaagtgtaaggggatgaaggaggaagatttggaggagtttcttgacactgtgacaatagttgggggtccaaggtcaaggaatgaagtgtggacagtgtttaccactgcacatcagatgtcaagttgtagaatgggtgcctctgaagaagaaggtgcactcgatgagaatggtgagacttgggaagcagaacgcttgtatgtgtgtgatgggagtgttttgcctagtgcagttggtgtcaaccccatggtaaccattcagtctacatcttactgtat

SEQ ID NO: 17473 - DNA, 387 bp, Glycine max
  Clone ID: LIB3106-104-Q1-K1-H8
cccacgcgtccgttattattattattattggattagcgtggtgatcagagaccctcaggtagagagccatgtcaagggagggaggcttggattggaggagaactaatggggtgtgtgattagccgagaagtgtcatcgggaatagtctccgaggtgaaggaggagaagaatttgagtgttgggtccaacaagaaagttgatgaagcgtccacaagcggagctgatgagaacgcggtagtcgctcagaatggtgagaaggataaggaagagaatggtggcggtgatgatcgcgttctgcggccgaagggtgaaagaagaagatcaaagccaaatccaaggttaagtcatccaccaaagcatttgcacggggagcaagtagcatctggc

SEQ ID NO: 17474 - DNA, 398 bp, Glycine max
  Clone ID: LIB3106-104-Q1-K1-H9
cccacgcgtccgggctcttgaacctctcaggttttagaagctcagctaagcacaatagagaggttaattaggccattaacgtatgatatgggtgtgactaagcctcatgtgcttatgctgttgatcatcatggttgtctcaattgcagagaaaccatcagtaatagaaggaagggctctttccttgatatctggtcaagggtactcaaagatttttgcaacgcttggacttgtatgcaagtgttgtgatggggttggaggtgcctgcactagtacatggacagaatcttgcaataacttgcagtgtttaccttggaaatcacactagttaattattttctgtatctttccttgtattccattagctgtatattgagttttgaaatattatacaaaatt

SEQ ID NO: 17475 - DNA, 333 bp, Glycine max
  unsure at all n locations
  Clone ID: LIB3106-105-Q1-K1-A1
cccacgcgtccgtattcatattcttattgttcttgttcttgatgtatctgtgacgagcatcatggcctctatagcagcgctattgttggctatgtgcgtgcttccggccatggttgtggccattcgcccagcaaagaaccctttttgcgtgaagggtcgcgtctactgtgacccttgccgtgntggctacgagaccgcaccaaccacctacattggcggtggtgagattatgttgcaatgcaagagcagggttagcaacgatgttgcgtacaccaagaaagtgtacactgactcatctgtagcattacacaatgtacgtggacgatgatcacg

SEQ ID NO: 17476 - DNA, 337 bp, Glycine max
  Clone ID: LIB3106-105-Q1-K1-A10
cttgcagtcgcagaggaaaaccctagctagtagtctcagttcgtttgagagagaaaaaatggcagagggtctcgttctccgcggaaccatgcgcgcccacaccgacgtcgtgacggcgattgccactcccatcgacaactccgacatgatcgtgacggcgtcgcgcgacaaatccatcattctctggcacctcaccaaggaggacaagacctacggtgtcccccgccgtcgcctcaccggacattctcacttcgtccaggacgtcgtcctctcatccgacggtcagttcgccctctccggctcctgggacggcgagctccgcctctgggacctcgcg

SEQ ID NO: 17477 - DNA, 409 bp, Glycine max
  Clone ID: LIB3106-105-Q1-K1-A2
cccacgcgtccgtccacgcgtccgcccacgcgtccgctctctttctctctttctagttcgtgttcttcgtcgcaaatccgaagtttttcgcgatggcgtcgaagcgaattttgaaggagcttaaggatttgcagaaggatcctccaacatcttgcagtgccggtcctgttcatgaagatatgtttcattggcaagctacaattatgggtcctccagacagtccctatgctggaggtgttttcctagtgactattcatttccctccagattatccctttaagccacccaaggttgcattcaggacgaaggtgttccacccaaatataaatagcaatggaagcatttgccttgatatattgaaggagcagtggagccctgctctaaccatttccaaggtgttgctctcaat

SEQ ID NO: 17478 - DNA, 333 bp, Glycine max; identical to SEQ ID NO: 17475
  unsure at all n locations
  Clone ID: LIB3106-105-Q1-K1-A3

SEQ ID NO: 17479 - DNA, 456 bp, Glycine max
  Clone ID: LIB3106-105-Q1-K1-A4
aacaaatcccagggagccaccaaccatggcttccaagctctgcgactcatgcaaatcagccactgctaccttgtactgccgccccgacgcggccttcctctgcggcgcctgtgactctaaggttcatgccgccaacaagctcgcatcgcgccacccgcgcgtcgtgctctgcgaggtgtgcgagcaggcgcccgcgcatgtgacctgtaaagccgacgccgacgcgctctgccttgcctgcgatcgcgatatccactccgccaaccccctcgccagccgccacgagcgcattcccgtcacgccgttcttcgagtccgtacattcagtcaaggcctcctcgccgatcaacttccaccaccgcttcttctccgacgccgacgctgatgctgacgtcagcaccgatgaggccgaggccgcgtcatggctgctacctaatccaaagacagatctaaattc

SEQ ID NO: 17480 - DNA, 333 bp, Glycine max; identical to SEQ ID NO: 17475
  unsure at all n locations
  Clone ID: LIB3106-105-Q1-K1-A5

SEQ ID NO: 17481 - DNA, 335 bp, Glycine max
  Clone ID: LIB3106-105-Q1-K1-A6
tccacgcgtccggtccaggttctaactttcttgccctacttagattttcattacttgagcatgtatttttcttgaaaaagaacaacggtgtgctactgaagaataatttgaattcttttccatgtataaccaaatagcatcgcttactatttgagcctgtgaatgcaattgaattatatgaaacctcgtatcttgacttatgggtccttcatacagtccctaggctggaggtgatttcctagcgactattcatttcccttcaaattatgggcggacgccttacagggtccaattttacgaccacgtgatgcaaccaaatatctcttgtattggga

SEQ ID NO: 17482 - DNA, 333 bp, Glycine max; identical to SEQ ID NO: 17475
  unsure at all n locations
  Clone ID: LIB3106-105-Q1-K1-A7

SEQ ID NO: 17483 - DNA, 327 bp, Glycine max
  Clone ID: LIB3106-105-Q1-K1-A8
gcgcgtggatcgagataactagaaacagcgcgatgaaaatgaaggacctcgctttcttccatggtacaattttggtagcatggcaatgccatgcatacgatatgttccctgtccgaatgaacactggctatggtgcccgcactccggaggagaaatgcgcaagtcggaagcttgctgaggaagcacacaacatctttggctttgagaccattcctgaagagcgcgttgatgcaacaaaggaatacatccatggcgaacaatatagatcagacttcaatacagttaaccaacaagcttacttatatgacagagaacttgaagtccatt

SEQ ID NO: 17484 - DNA, 380 bp, Glycine max
  Clone ID: LIB3106-105-Q1-K1-A9
cgaaaaactgttttggtttgatttcatttccgaatacttaattcaccactgtgagtctgtgactgttctgttcatccctattggattttcagccacattcttcttattcccgaatatacacccaaattccactttcctatcctagggtcaccatcaccatgagagccagattgctcgtgttcccattacgtggcaggaactggtgcttctccagaaccatcgatcattctcttctctccgcttcccatgattcctctcaatcatccccttcaaccctcaaaggcttatggaccaacatcaacgtccgtgataaaccccttaacgccaaagccgagctctttgtcgattacatcgccaacaagatgaatagcgtttggatt

SEQ ID NO: 17485 - DNA, 284 bp, Glycine max
  unsure at all n locations
  Clone ID: LIB3106-105-Q1-K1-B1
cccacgcgttcgatcgagataactagaaacagtgtgatgaaaatgaaggtccttgttttcttcgttgctacaattttggtagcatggcaatgccatgcgtacgatatgttccctctccgaatgaacactggctatggtgcccgtactccggaggtgaaatgcgcaagttggaggcttgctgtggaagcacacaacatctttggctttgagaccattcctgaagagtgtgttgcagcaacaaaggaatacatncatggngaacaatatagatcagactccaaaac

SEQ ID NO: 17486 - DNA, 279 bp, Glycine max
  Clone ID: LIB3106-105-Q1-K1-B10
tacattccttgaagtttatactgaaagaagggtgtgaagatggcgttactgatcctaggcctttccctcatgctccttttggtctcctctgaggtggcatccacgaatacaaaagaggaggcaaatggagtggatgatgccaaatatcccgtgggaagctatggagggggttacccaggtcatggcggtggcggttatcctggccatggcggtggctggtatcctggccatggcggtggtggtggctatcctggtcaatggggtggccaccctggtcat

SEQ ID NO: 17487 - DNA, 420 bp, Glycine max
  Clone ID: LIB3106-105-Q1-K1-B11
gttcgtgcactttcactttaccaactcctaacaatttctctctgtatgcttcttcaccgcatcaatggagttggacggcgttctcctcggcatgtgcaaccctctcctcgacatctctgccgtcgtcgacgacgctttcttgcaaaaatacggtatcaagttgaacgatgcgattctcgctgaggataagcacaaacctatgtatgaagaattggctaacaatcctaatgtggagtacattgctggaggtgctactcataattcaatcagggttgctcagtggatgcttcaagcaccaggtgccacaagttacataggttgcatatgaaaggacaaatttggagaggagatgaagaataaatgtacacttgatggtgttaaggttaactattatgaaatcgacaatacacctactggaac

SEQ ID NO: 17488 - DNA, 413 bp, Glycine max
  Clone ID: LIB3106-104-Q1-K1-H5
cccacgcgtatgcagacgcgtgggcggacgcgtgggtttcttgaaaagggcttgtatgtatgtggagggcttacgagaggaccgactggaattatctccacaaacctctattgtgcagaagaaactgtttcgagcatatcagcagaccttgaaaacggagggttgatttcgtcatcaaccttgcccaaacctggcagggacggacttctccagcttctgcatgatagaaatgtcagagtactttcattaagtgattgggaaaagatagactcttaagaaaggaggcttggaagttcaaggaacaaacctagggaaaaactagccacctgggatgaactatacaaaactacctcataatgaatcaattatttcacatgatacttcattattttagcttgataaacatcttatcg

SEQ ID NO: 17489 - DNA, 443 bp, Glycine max
  Clone ID: LIB3106-104-Q1-K1-G10
ctattttatactatacccacattttgataattatttttctagttgataagccatggctactggaggaaagcttgaggttgacggtgatctcaagtctaacgcagacaagtactggcaaacccttaggaactccactgaaatattccccaaggccttccccaatgattacaaaagcattgaggttcttgagggtgatggcaaatcacctggttctatccgccacataagttatggtgaaggttcaccacttgtgaagtcatcctttgagaagattgaggctgttgatgaagaaaagaaggtagtgtcgtacactatcattgatggagaactcctccagcactacaaaacattcaagggagacatttctgtgactccagttggcgatggatgcgacgtgaagtggagtgctgtgtacgaaaaggttagccatgatgtttctgatc

SEQ ID NO: 17490 - DNA, 444 bp, Glycine max
  unsure at all n locations
  Clone ID: LIB3106-104-Q1-K1-G11
caagtaccagaggaatgttgaagcctatcacaacaaaagcagcagcatgaagccaaacgttggtcccaactgcatccgggcagagaattacatgattacttttgaagttgaagaagaaaagtttcctttatttggaaagaaataccagctaaaatttgctaatgatgtctctgctgaaacctattgcttggttcattttccaagtttcatcaggttggccagggaagctggtcttgagtacgtggagattcaaaatttgaccgagttttatgatgacaacatagtgtgttaacaggcctgctaattgtgctctgttgtcacactatgttccaaacctcttggatcctanggggagacttcttcctcgttcatatgatgcactangtctctacaccacgtttatatttcaaaaacctgacccggaattgcacccccgattcctac

SEQ ID NO: 17491 - DNA, 444 bp, Glycine max
  Clone ID: LIB3106-104-Q1-K1-G12
caggcaagccccactcaaccaccacacctctcctcgttcacgctacccctttctgctcttcgggtacctttcaagttttaaaagtgtaaagatggcagagacattcctatttacctcagagtcggtgaacgagggacaccctgacaagctctgcgaccaaatctccgatgctgtcctcgacgcttgcctcgagcaggacccagacagcaaagttgcctgcgaaacatgcaccaaaaccaacttggtcatggtcttcggagaaatcacgaccaaggccaacgttgactacgagaagatagtgcgtgacacctgcaggaacatcggcttcgtctcaaatgatgtgggactggatgccgacaactgcaaggtcctcgtcaacattgagcagcagagccctgatattgctcagggtgtacacggccaccttaccaaaaaacctgaaga

SEQ ID NO: 17492 - DNA, 426 bp, Glycine max
  Clone ID: LIB3106-104-Q1-K1-G2
atgttagtgtagaactccctgtttaaattatgcagaatcagcttttttacaatatgtttgggtgaacttaaaaaacattttttagaaaatgttgctgaaagtatgcccaaatccaaattctaaaaacaaagaatagtcgctttcagtgttttcctatcatgttccaattcaacatctcaatggttctgaatgctactggtacctctcaacctttattcctcactctcttttgccactcatcatttgctcaaagttgacaaattttaaaaccatttgtcataatatcattttggtccatcccatccattcacttcatggtagccgtggaggcaaaggggatatcttggctctaggtgctagttgaagaggatgttgttttggcaaggagagatggagaagatgagtggaaaatagatggaagaagag

SEQ ID NO: 17493 - DNA, 419 bp, Glycine max
  Clone ID: LIB3106-104-Q1-K1-G3
gtaggcagtgaactgaacatttcagattttgttagatgagacaggggaaagaagctactgaatcttgtgacgaatggtgtttgaatactctaaggagaataagagaagcctcccctttgagtttgaaagttactttacaatctatacgtgaaggtagatttgaaactctcgataaatgtcttatacgtgagtaccgcatgtccctacgtggaatttctaagcttgtctcctctgatttcttcgagggtgttcgagcacgaatggttgataaagattttgcaccaaagtgggacccacctagtttaaaagatatatcagaggacatgattgaatactatttctctcctttaagtgaagttcaatctgaactagtgctgccaacggctttgcgagaaccttacatgtgaaactagcatacc

SEQ ID NO: 17494 - DNA, 361 bp, Glycine max
  Clone ID: LIB3106-104-Q1-K1-G4
ggaagttggaagtcatggcagcaacattgatggcagcaacaacaagttctggtactcttaaagcaactcctttccttggccaaggcaagggtgccaatgccaatgctcttagggatgttgtctccatgggaactgggaagtacaccatgggcaatgatttgtggtatggaccagacagagtgaaatacttgggacccttctcagctcagaccccttcatacttgaaaggagaattccctggggattatggatgggacactgctggcttatctgctgacccagaagcatttgccaagaacagggctcttgaggtgatccatgggcgatgggccatgcttggagcactaggatgcatcacccc

SEQ ID NO: 17495 - DNA, 445 bp, Glycine max
  Clone ID: LIB3106-104-Q1-K1-G5
cactttttcagttctctctctctctctctaagatggccgacgatccaatgcccacgcgctggtctttccaggacttcaaattgtgttatgatgctaagtttggtagaaagaaagtcgcggagaacggagatgatgctgccggtaaagcggtcagcaatggaaatggaaattcagtgacagtggccattgtgtccaatggcaacaaaagggcatcggaaatggctgtttatgagcagtttcgaagcgaggggcagaatcagattcacacaaatggctttgtgccgacccttacagatgaaaggccgcagaagtctttgcttccaccctttgaatctgcggaaatgcgagctttagcagagagcttaagtagggatatcattcgtggaagtccagatgtgaagtgggaaagcatcaaggggttagagaatgccaaacgtttacttga

SEQ ID NO: 17496 - DNA, 259 bp, Glycine max
  Clone ID: LIB3106-104-Q1-K1-G6
gcgcgccgactcggttgctatcaacgagtgagagtgagtgagtggttctcttgcagcaacaaggggtagtgacaccaaacagactggaaaggggtcgtggggtcagtgctggtggtggacagagttccttggattatctctttggcagtggggtacctgccagcagtgcaaatggtgctcgcactcaaaatgcaagtgctccttcaccaccggttgataagcaaagtccagcaccagcagcagcagcagcacctgcacc

SEQ ID NO: 17497 - DNA, 324 bp, Glycine max
  Clone ID: LIB3106-104-Q1-K1-G7
cccacgcgtccgcccacgcgtccgaagatgttcgtgataagctcaacatgctttcagagcattggtctcgagatgaaaagaatggatgtttaaaagaaactacaaaggcattccggtatatgggacaaattgttcgtctaattgtctcataaatagacatttgttcttttttttttgttaacaacactgccgtctttgatggtaagctttctaatatttccttttcttcctatagcttctctaatttgtggcttttaattgatggaggggtatccctaactttgtaaagttcgatacattcttgagagaatatttgtttgattt

SEQ ID NO: 17498 - DNA, 449 bp, Glycine max
  Clone ID: LIB3106-104-Q1-K1-G8
cccacgcgtccgaaaaaaaataaaaaagaaaaccaaaaaataatgtcaatggaaatgatggcaacggaacgtgtttgttatgttcactgcaacttctgcaacaccattctagcggttagtgttccatacagcagtttgctaaccatagtgacggttagatgtggacattgtgccaatttgttatcagttaacatgggagcttcacttcaagcatttccccctcaagaccctcagtcacagaaacagcacctaagctttcaagaaccaagcagcaaggaactgggatcatcttcaaaatgtagcaaaatagcgccatttgaggcagtagagcatgaactacctaggattcctcccattcgtcctacagagaagagacatcgcgttccttctgcttataatcgcttcattaaggaggaaattcaaaggattaaggctagtaatccagatat

SEQ ID NO: 17499 - DNA, 450 bp, Glycine max
  Clone ID: LIB3106-104-Q1-K1-G9
gagaaaagagagagaagggtaaggtaaccctagagtggtgaatcgaatctgcaaagatggaagctgtttctcgaagaagaggtggaggcattttcgaaagcctctacaaggtcgttatgcgtcgcaactctgtctacgttaccttcgtcatcgctggcgccttcctcggagaacgggctgtagattatggagtccacaagctctgggaggctaataatgttgggaaacgatatgaagacattcctgtgctagggcaaaggcagtcagaatagtgaccagcttgttagccattttgaagttttattattttcatgaaaatttgaagtgattaagagctggaagcagtttccatttctacaataaataccatatgcttgtctctttcaggcttaactcttatgcgtggtttcatttactggcccatggaaatattaaatattgaaccattgc

SEQ ID NO: 17500 - DNA, 385 bp, Glycine max
  Clone ID: LIB3106-104-Q1-K1-H1
ctcattaccaacacgaaagcatagccaaaaccttttttcgaagtctctgattttcctaatggctccggcaaaggcagagaagaagccggcggagaagaagccagcggcggagaaggcaccggcggagaagaagccgaaggcggagaagaagatctcgaaggaaggagggagcgagaagaagaagaagcgcacgaagaagagcgtggagacctacaagatctacaatcttcaaggtcctcaagcaggttcaccccgacattggtatttccagcaaggccatgggcatcatgaacagcttcatcaacgacatcttcgagaagctcgcccaggaagcgtcgcgtttggctcgctacaacaagaaagccaccatcacctcgagggagat

SEQ ID NO: 17501 - DNA, 225 bp, Glycine max
  Clone ID: LIB3106-104-Q1-K1-H10
cccacgcgtccggaaaagcaggtagagggaaacatatcttgaatcttggacatggcattaaaggaggtacgcctgaggagaatgttgcacatttttttgaggttgctaaatcaatcagatactaagaagctaattatgattaattaattcttttgtttaattgcacttttagtttctttactatgatcgatgtttggttttgattctctaatgcattttatcagt

SEQ ID NO: 17502 - DNA, 409 bp, Glycine max
  Clone ID: LIB3106-104-Q1-K1-H11
gtggatccattattcatattgttgatcatattgatttagatgtctggagtgtacctgaagtgctgaggccgctgtatgaatcatgaaaaatcttggctcagaagttgacaattgctgccttgcaacatataagacagatagcactagaatcaagtggagaaattcagtatggtggtggacgccagcctgctgttttaagaacatttagccagagactttgcaggggctttaatgatgctgtgaatgggtttgttgatgatggctggtcactgatgggtactgatggagtggaagatgtgactatagccataaactcatctccaaacaaatttttgggctccaattacaacgcatcaatgtttccagcatttggaggtggcgtcttgtgtgccaaggcatcaatgctcct

SEQ ID NO: 17503 - DNA, 269 bp, Glycine max
  Clone ID: LIB3106-104-Q1-K1-H12
acgaccacgcgtccgatcatcataaaccccctccagagaacaagaatcaaagaatggcaactatgactggtgtgagcctttcaagccgcagggttttcttcaacgcatcaccctcaccgcaaaacacgtacgccgtaaagttcgcagttccactcagccaagggatgcgacttggtagtgtcaggttgggtcgggtgatgaggatccgacccgttcgcgcagcttcagagcgcatttcggagaaggtggaggagagcataaagaacgcg

SEQ ID NO: 17504 - DNA, 90 bp, Glycine max
  Clone ID: LIB3106-104-Q1-K1-H2
acgttctttgagatgagagtgttgatgaacagtaccattctgatgtattgctttccttgaaagttaatgcatgcttcttatcttctgtct

SEQ ID NO: 17505 - DNA, 386 bp, Glycine max
  Clone ID: LIB3106-104-Q1-K1-H4
tgtgtatttccctacctctcccttcaagatgcagatcttcgtcaagaccctcaccggcaagaccatgacccttgaggtggaaagctctgacaccatcgacaacgtcaaggccaacatccaggacaaggaaggaatccccccggaccagcaacgtctcattttcgccggaaagcaacttgaggacggccgtacccttgctgactacaacattcagaaggagagtactcttcacctcgtcctccgtcttcgtggtggcatgcagatcttcgttaagacactcaccggcaagaccataaccctagaagttgaaagctccgacaccatcgataacgtcaaagccaagatccaggacaaggagggtattcccccggaccagcaacgtctta

SEQ ID NO: 17506 - DNA, 394 bp, Glycine max
  unsure at all n locations
  Clone ID: LIB3106-104-Q1-K1-G1
ctnttgttcctctcacttcggatgaacatgataatcgtctcactcaatggactaatccatccgctcgataccctccacacttgagggatataattaaagagtatgttgaagagatggaaaagctgtcctttaagttgatggagcttatagctttgagtttaggccttgaggcaaagaggtttgaggaatttttcatcaaagatcagactagctttcttagactcaactactatccttcatgcccttaccctcaccttgcccttgggtgttggtcgacataaggactctggtcccttaaccattcttgcacaagatgaagttggaggacttgaagtgagacctaaagcacatcaagactggataagagtgaaacctattccaaatgcttatatta

SEQ ID NO: 17507 - DNA, 441 bp, Glycine max
  Clone ID: LIB3106-104-Q1-K1-E6
gcgcccacgcgtccgcccacgcgtccggtatggtgaaaaggatcccaatgggatacgcattgacataccaatgatgctccccctaattgatatgtgcaatcatagtttcaatccgaatgctagaattgttcaagaacaagataccagtaactcaaggatgcaagtgaaggttgtggccgagacagcaatcaaagaagatgatcctctgttactttgctatggatgtttaaacaatgatcttttccttcttgattatggatttgtgatgcactcaaacccttatgattgtattgagctcaaatatgatggtgctcttttggatgctgcaagcacggcagctggagtttcttcaccaaacttctcagcacctgttccatggcaggaactgatcttatctcagctgaatctagctggagaaactgcagatctcaaggtgagctt

SEQ ID NO: 17508 - DNA, 148 bp, Glycine max
  Clone ID: LIB3106-104-Q1-K1-E7
attcgtcgtgttttaatttggatcatgttattgtattttgttctaattgagttgtgggactattgatatgcttgctgtggacaaggaaagtctatatatgcagcacgttatgtgatgaatttgagtgtgatcattaaagttgccttat

SEQ ID NO: 17509 - DNA, 449 bp, Glycine max
  Clone ID: LIB3106-104-Q1-K1-E8
cccacgcgtccgcccacgcgtccgttcagcagctgtctcaaaaactgctgctgctcccattgaacgtgttaagcttttgatccagaaccaggatgagatgatcaaaactggtagactttctgagccctacaagggtattggtgattgctttaagagaacaatggcagatgagggtgttgtttctctatggagaggaaacactgcaaatgtcatccgttatttccctacccaggctttgaactttgcattcaaggactacttcaagaggctttttaactttaaaaaggatagggatggctactggaaatgggttgctggcaacttggcctctggtggtgctgctggtgcttcatccctttgtttgttactctcttgactatgcccgtacccgtctgccaatgatgctaaggctgcaaagaagggaggagagagacagttcaatggccttg

SEQ ID NO: 17510 - DNA, 454 bp, Glycine max
  Clone ID: LIB3106-104-Q1-K1-E9
gagaagggaaaaactttaatttttttatggtaaaaaattcaattatacctgttatttcacaagaaaaaaaagaaaaaaacccaggatcggttgaatttcaaatattcaaatttaccgatagaatacgaagacttacttcacattttgaattgcaccgaaaagactatttatctcaaagaggtttacgtaaaattttgggaaaacgacaaagattgctgtcttatttgtcaaagaaagatagaatacggtataaaaaattaataaatcagtttgatattcgagagtcacaaattcgttaaattgaagagtaattctcaattattcgatttattagatcttgaattttgatgaacttttttttttaagcgattcataaaaaaataaatcgaggaaaaacctatgaatatctcaactacaagaaaggacttcatgatagtcaatatggggcctcacc

SEQ ID NO: 17511 - DNA, 401 bp, Glycine max
  Clone ID: LIB3106-104-Q1-K1-F1
caggtgtgtgtctcatggcgtctgttattcctcgatgccttcctcccccaattccaattgcacaccgacgaaaggcgcacgtggtgaaatcgtgtcaccaaaacgagagctctgcttcggctcacacagaccactcctcaaatccaaaggaacttcgagtaacagtttccaggcgtaattgtctctcatgtttgtggtctactatagttttgattagtgattgcgccatgcctatttttttaccaaaggcatccgctgctgatggaaatggaatcatggaaaaacctgtgtgcacaaattgcttggggaagcggtgctgtgctttgtgatatgtgtggtggcacagggaaaatggaaagcttttaaccggaagcgagctaaagatgtttattaatttactt

SEQ ID NO: 17512 - DNA, 444 bp, Glycine max
  unsure at all n locations
  Clone ID: LIB3106-104-Q1-K1-F10
gtgaaccatagccatggctacttcatcaaccacattattgctatcatcactcatacctgcaggcatcccatcattcaactctggaaaccattcagtttttttgcttcaaaaccgttctttgaatcgacccaagaagagagtttccttcgttgttcaagcagccaagccccctattggtgtggaaattccaaaggtgcagcctcaatttaagcctccgtttcttgggttcactaagactgcagaagtatggaactctagagcttgcatgattggaatcattggagtttttattgtagagtttataataaacaagggcatacttcaagtgattggggttgatgttggcaaaggccttaatattcctctctgaacattatttttggctgtgctcgtaaatgttgtcatatataaagtcaatgttntaacctttttttttattgatct

SEQ ID NO: 17513 - DNA, 436 bp, Glycine max
  Clone ID: LIB3106-104-Q1-K1-F11
aaaacaccatcagcatcttcactcaccacgaaggttccgttctctgtggatctatatgtctagggcacgttacgtggaaggaagctcttcaccgacttcaatcgaagaagatggattacagtgctggttcgagtctgtttccgttgcaccgttgcaaaaccattcacctggtgaggcacgcgcaggggattcacaatgtggagggtgacaaaaactacaaagcctacatgaaccccgattacttcgatgctcatctcactcccttgggatggcaacaggttgacaatttgcgtaagcatgttcgcgactctggccttatcaacaccattgatctagtcattgcatctcctttgatgaggactctacaaacaactcgtggggtatttggaggtgagggctacacagataaaacagacgtccttcctcttatggttgc

SEQ ID NO: 17514 - DNA, 296 bp, Glycine max
  Clone ID: LIB3106-104-Q1-K1-F12
ctcacaactaccaatggccgaagagaaacaccacaagcaccgcctcttggggcaccacaaggacgaggatggggagccaatataaaccgatactggttacgacaacacatcatattccaagccttctgatgactatgactctggtttcaacaagccatcgtatgagtcttctggcggtggctatgaaggtgggtacaacaaaacatcttattctagtgatgagccagcttctggtggtggctatgaaggggggtacaagaaaacacgttattctggtggcattgatgagacttctg

SEQ ID NO: 17515 - DNA, 371 bp, Glycine max
  Clone ID: LIB3106-104-Q1-K1-F2
cggacgcgtgggcggacgcgtgggcggacgcgtgggcggacgcgtggggaggaatccaaaagctcctgatttcaaacacaaagatacaggggaagctctgtggatcgaaggcagatacaatccgccatgggtcaagtctcaactggaaatactagactcaagaatggggtcgtttgctagtcaaaatgctaggatgcctgtaggtatggtagctgcagatgaaattgtgtctttctaatggctcatgccaaatctcgcccatgtaatattcaattttaactgtgaaacttctttgtacagtttgcattttgcccctaattttaaattgtatgtatgtcagtactgataatggttaagtttgcccttgagct

SEQ ID NO: 17516 - DNA, 457 bp, Glycine max
  Clone ID: LIB3106-104-Q1-K1-F3
cccacgcgtccgcgattgaaggcatctaaggagagaaaaatgcacgatttctgcttcacgatcccctacggattgatgttagtgggtggtggactgttcgcctacataagcaaagggagcatcgcttctctcgccggaggcgccggctccggtttgcttctcatcgtcgccggctatctcagtctcaatgctttcggcaaacgaaaaaactcttacctcgctctctttctcgagaccgtttgtgcagccatactaacttgggtcatggggcagcgatatttggaaacatccaagattatgcctgctggtcttgttgctggaatcagtgctctcatgactctggtttaatcttacacattagcaactggtggcaaccatctccccaccaaggctgagtgatgatataatgatatatcatatatttgcttactataatacagatatgttggttgatctg

SEQ ID NO: 17517 - DNA, 455 bp, Glycine max
  unsure at all n locations
  Clone ID: LIB3106-104-Q1-K1-F4
cccacgcgtccgtctctctcaccaaattcttattagaacgaaaaaagaaaagaaaagaaaaaagagcgatttttccctcaccaaagaagaaccaaaacaatggcggatcaactcaccgatgaacagatctccgagttcaaggaagccttcagcttgttcgataaggacggcgatggttgcatcacaaccaaggagcttggaactgttatgcgttcattggggcaaaacccaactgaggcagaactccaggacatgatcaatgaagtggatgctgatgggaatggtaccattgacttccctgagttcctaaacctcatggctaggaagatgaaggacactgattctgaggaggagctgaaagaggcattccgggttttcgacaaggatcagaatgggttcatctctgctgctgagctccgtcatgtgatgaccaacctcggngagaaactcaccga

SEQ ID NO: 17518 - DNA, 451 bp, Glycine max
  Clone ID: LIB3106-104-Q1-K1-F5
tggactgcacagggcttctccatctcacatccctgcaaaaattaaccatagacagttgtcctttgctggagaatatggctggagaaaggcttcctgactctctaataaaattaaccatatgggaatgtcctttgctggaaaaacgatgccgcatgaagcaccctcaaatttggcctaaaatttcccacatccctggcattaaggttgacgatagatggatttagccaccaaggatgatcatcagagaatcaacaaatcatcaaaggcaacgtggaaattgaccttgtatatatgtttagaagaagtaacgatacagatatggttgattggcccggagaaactgtacctatccatgaatctaagttcaaatttgaactagtgctaaatgtaacttttgatttaattgacgtgaaattgacactttctcaatagttgaattttcatttgtgag

SEQ ID NO: 17519 - DNA, 410 bp, Glycine max
  unsure at all n locations
  Clone ID: LIB3106-104-Q1-K1-F6
tcgcccacgcgttcgcccacgcgtncgcccacgcgttcgtgagaacaaaggagatcaagaatgggggggtggccatgttggctgtgatgggggcatggttccagcacatttacactggcactggtcctattgacaacctctttgctcaccttgcagatcctggtcatgctactatttttgctgctttcactcccaagtgagaagggttggaacaactctatgattgccagccttggagaaacattgggaaacttgtttaactaagttgtaaggcttaaatgtctttaggggggagtttttatgttggtgaaagcttgtaaaatggtacttctattgtcatgcacagattgattattcaatgtacacatacctatttaagtttagatgcatttaatgtacattcaagaagt

SEQ ID NO: 17520 - DNA, 441 bp, Glycine max
  Clone ID: LIB3106-104-Q1-K1-F8
cccacgcgtccgaccacgcgtacgcccacgcgttcgatttcatcacaatcttcctcaatcatgtcttcagaaacaaaagcggagacacaaactttgaccaccccctcttactcctcagatgttgacaatggtatagtgaacgatgtcgtcctatggagaagaaagaaaataaatataagcgttcttgttgcggcaacagcggcatgggtgttgatggaaggagttgaattcaacttcctcactctcatatcatgggtggccatactcggacttgcttcaatattcctctatgccaatatgcttagacttttgggcaaggaaccaccgaacttgttggggttggaagtgagtgaaaaaacaacaacgagaatagcacacacagttcgagcatggattgaagaaggaataatgtggttgtttcttgtgggcgcacagaaagag

SEQ ID NO: 17521 - DNA, 452 bp, Glycine max
  Clone ID: LIB3106-104-Q1-K1-F9
cccacgcgtccgttcgaaattcccatctttttggatgcacattaattcggcatccctcgaagaagcgcgtttgatctaaaaccataaacctctgtctcgttagatctccttcttccgttctctaaacctctcctccgatccgatctgatccaaaatggcgacgatgacgagcttgattggtctcatcaataagatccaacgagccttgcaccgttttgggagatcacggtggcgagggcttgtcgctctgggagggctcttcctctgtcgccgtcgtcggtggacagagttcagggaaatcgtcggtgctagaaagtgttgtcgggagagattttctgcctcgtggatctggtattgttacacggaggccactagtgctgcaacttcacaagacggaagaagggacacatgagtatgctgagtttcttcacataccgagaaggagattcacc

SEQ ID NO: 17522 - DNA, 329 bp, Glycine max
  Clone ID: LIB3106-104-Q1-K1-E5
tccatgatcattgactcaagggtgaaaaaggttacgtaccctgccaaaatcagccttattgccttccaaagttgatatacctacgtgttgttcctcttccactggtggcaccactgccaaatttgcctgttactctccctccagagcctgaactacctgcagtacctaaagtaccaattcctgaagtaatagttaataacgccaaaataatcccttgagtacctatgatctatccagacactactacttattttgtcacttgctaaattaacttgttgttgccatcccagggtggttctggttcttgtggcggttaatttctgtcattc

SEQ ID NO: 17523 - DNA, 453 bp, Glycine max
  Clone ID: LIB3106-104-Q1-K1-D12
cccacgcgtccgcccacgcgtccggggaagcagaatcagcgtgatggcgagaaactgggtgggtcgatccttggcgcttcgtcacgcaatgaagaatagggttctcacactctccttcaaccgaattcttccctcactcccatcaaaatcctctctcttagccaccaccgccgccgccactgcctcctctcctccgcctcagctccttccgacgttgtccttgttaattccgaggaagagttcaacaatatccttaccaaagtccgagatgactcgttgcacgcggtcttctatttcactgcggcttggtgtggaccttgcaggtttatttcacctatcgttggggagctcagtaagaagtaccctcatgtaacaacatataagattgacattgatcaggaagcacttcaaggcacactgggcaagttgcagatttcatctgtgccaacactt

SEQ ID NO: 17524 - DNA, 346 bp, Glycine max
  Clone ID: LIB3106-104-Q1-K1-D2
cccacacgaccggtgagatctctggaaggatcgtgcgaaagatagaggggacaatggtggtgacgccgaagaatgtgccggactatgacgccgtctcctacgccataaaatgcagtgctaaaggcaccgctaccgacttcttgggcaaatgcttggacacatgatggcacgcatttggtgctgtcactgactttgttagtgatttcatttgccttcagattatcatggctactatcactgctgctcatactgaaggaaaaggtaaaagcaaagcctatttcgaaaaacattttgcgacccttcctacgatcgtagcaacgctggaagcattgcatgataactttga

SEQ ID NO: 17525 - DNA, 54 bp, Glycine max
  Clone ID: LIB3106-104-Q1-K1-D3
gccacgcgttcgtccacgcgttcgtccacgcgttcgaaataaaataaataaatt

SEQ ID NO: 17526 - DNA, 455 bp, Glycine max
  Clone ID: LIB3106-104-Q1-K1-D4
cccacgcgtccgcccacgcgtccggtgagctacattctaactgggaaaaaccaattggttatacttatgaaaggaaaaactctaaacaagccaacaccagtgaatttggcaaaccatgcttactggaacctaggaggccacaacagtggcaacatcctaaatgaagtggtgcacatctttggttccaaaatcacacctgtggacagcaaactcattccaacaggcaaatttgcttcggtgaaaggaacagcttatgatttccttaagccacaaactgttggaagcaggatcaatcaattggctgaaaccaaaggctatgacatcaactatgttcttgatggtgagaagggccaaaagatcaagctagcagctatagtgcaggataagaaatcagggagagtgttggagttgttcacaaatgctcctggtttgcagttctacactggtaactatgt

SEQ ID NO: 17527 - DNA, 456 bp, Glycine max
  Clone ID: LIB3106-104-Q1-K1-D5
tcgttccatttccccctttcctccgcccggcgagaaaatgagagaaatcctccacatccagggcggccaatgcggcaaccagatcggagccaagttctgggaagtaatctgcgacgagcacggcatcgaccacaccggaaagtacagcggcgactccgaactccaattggaacgcatcaatgtctactacaacgaggccagcggcggaaggtacgttcctcgcgccgtcctcatggatctggagcctggcacgatggactcggtcagatccgggcctttcgggcagatattccgccccgataattttgtgttcgggcagtccggcgccggcaacaactgggccaagggtcactacacggaaggtgccgagctcatcgattccgtcttggatgtcgtgaggaaggaggccgagaattgcgattgcttacaaaggtttcaagtgtgccactctttggg

SEQ ID NO: 17528 - DNA, 431 bp, Glycine max
  Clone ID: LIB3106-104-Q1-K1-D6
cccacgcgttcgcccacgcgtccgatcaccaacaagtgtttctgtaaccatggcatccaccggtcgggccctacaaccccttgtgaggtatgctcaggaaaaagtgggattttcagttcctcacaggcacttcttgtgaagccagtgaagaggcagatgatggggaagagcaagggattgagaattgcatgccaagccaccagcattttcgctgatagagtccctgacatgggcaaaagacagctcatgaatcttcttcttcttggtgccattttactccccactgctggaatgcttattccctacacctacttttttgtccctccaggttcaaggtctttagctggcggtactgctgccaaagatgccgctggaaatgatgtaattgtcgagaattggctcaaggcacatggacctggtgaccgaaccct

SEQ ID NO: 17529 - DNA, 385 bp, Glycine max
  Clone ID: LIB3106-104-Q1-K1-D7
cccacgcgtccgaggggacaaagttggggtgcccattaaggtactagtaaaaagagcgggtgataaattggtgactttgagtgtgatcccggaggaagccaatctcgatgtgtaaaggactggtgatgcttttttaatctgtgaactgtgatgcgtttatttctgggttgctgatgagctcaattttgattacaacaaatgcaagtgacaatgttgaaatggagaccatttttgtgatttgattatctcagggtttgtttgtttcaaagttggattcttgccattattttccctattttaccaaaattcaaaccattcaatattcaattagcacccatacgtttaagtggggaatcaatggaaaaggaaaattaaatccttgatg

SEQ ID NO: 17530 - DNA, 451 bp, Glycine max
  Clone ID: LIB3106-104-Q1-K1-D8
cccacgcgtccgtgaagacataactattccatttattttttgtttgttaatgcgtaaggtgcgcttgtgttgctgttgtggagaatatgtgtcattttgatgctgatggaaaacgatattacccatttggcagaggttcaggttctcaggttgttcagcagtttggaatacctcatctatttgatctccctattagaccaactctctctgcttctggagacagtggaatgcctgaagtggtagctgatcctcaaggtgaagtttccaagatattccaaaatctaagagtatgtgttgttcagcagtgtgccaaaatacgccaaccaggtttaactgcggtcacctatgataaatcaatcaaggcaatcaaagtgaaagtaccagattcaaaggaagaattctttctgcatcctgcaacagtgagacggaatgatcgctctgctcaaagtgt

SEQ ID NO: 17531 - DNA, 442 bp, Glycine max
  Clone ID: LIB3106-104-Q1-K1-D9
gatcgagataactagaaacagtgtgatgaaaatgaaggtccttgttttcttccttgctacaggtttggtagcatggcaatgccgggcgtacgatatgttccctctccgaatgaacactggctatggtgcccgtactccggaggtgaaatgcgcaagttggaggcttgctgtggaagcacacaacatctttggctttgagaccattcctgaagagtgcgttgaagcaacaaaggaatacatccatggcgaacaatatacatcagactccaaaacagttaaccaacaagcttactttttatgccagagacctcgaagtccattccaaggacacatttgggttcagtatagatgggaccgtactctctaatattccatactacaaaaaacatggatatggggtggagaaatttaactcgaccttgtatgatgaatgggttaacaa

SEQ ID NO: 17532 - DNA, 429 bp, Glycine max
  Clone ID: LIB3106-104-Q1-K1-E1
atccaatgttgatgctcccaattcgacgaactcgaacggaagcaaattgaattccgatgaggtggatgaggatgatgatggatgggaattcaagtctgcggaatgggaaactggaaccaagagccaggatgttaaggctgaaacgccaaaacatgatagtggtgctcttgatgtcggtactgtgttggattcatccaatgggatttcagacaaagctggtggatggcacatggagtttgagttcagtccacgttttgcatcgcaagatcatattaacccacaaccaagtccaaaaaatgaatcaaatgacattggaactggggtttgccatgtttaatcaaaattttggggagtttagttcaaggtcagggccagggccaaatcaaaatttggaagcaccgaagaaggctggcatttgtgccactaata

SEQ ID NO: 17533 - DNA, 360 bp, Glycine max
  Clone ID: LIB3106-104-Q1-K1-E10
agaaaactaaggaaggaaggaaggattgaagattgagcgtgaaagatgccttctgcggggcgtgcatggtcaccaaggggggacgttgctattgacatgggcaatccatttcttaatctcactgttgatggatttcttaagataggagctgtcgcagccacgcgatcagctgctgaagatacttatcatattatccgaaacgggaatatttcatagcatgattttgagaaaaccgtttacaacatttgtaaagaatgtgtatattggggaactttatctggtgtttatcttggaatgtaatatggtggatagaggattcttggtaccatagattgtaagaatgccatgaattgtgggtgc

SEQ ID NO: 17534 - DNA, 404 bp, Glycine max
  Clone ID: LIB3106-104-Q1-K1-E11
cccacgcgtccgcccacgcgtccgcccacgctttcgaaaaaaaaaaaaaaaaaataaaggtgaaaaatatcatataaaatggggttgtaataattaacctcctcttctttttattctttctttttctaatactaaccatcctaatttcttgccctcttcttttaaagttcccaaactttcttcccctttccttcccctttctacttctttctttttgttaccctatttctttttccatttccttcctcttccatcattttcccctttaacctcctttccttttccccccttaatcccctttcttatatattcccccttttcactctttcttcctctttttcttattaattcccccccctcttttctccttttctcactcttttttcccatttttttttttttct

SEQ ID NO: 17535 - DNA, 452 bp, Glycine max
  Clone ID: LIB3106-104-Q1-K1-E12
ctgacgggcttgccttcttcttggcacccgtcgggtctcagccccaatccgacgatggatttcttggtcttttcaacagtcccttaaaggacaagtctctccaaaccgtggcgattgagttcgatactttctcgaacaaaaaatgggatcctgcaaaccgacacatcggcattgacgtgaactcgatcaagtccgtcaaaacggcatcgtgggggttgtccaatggacaagtggcggagattctcgttacctataatgccgccacgagcctcttggttgcttctctgatccacccttcaaagaaaacaagttacatcctctctgacacagtgaacttgaagagtaatcttcccgaatgggtgagcgttgggttctctgccaccaccgggttgcatgaaggctccgttgaaacccatgatgtgatttcttggtcttttgcttccaagttgtca

SEQ ID NO: 17536 - DNA, 451 bp, Glycine max
  Clone ID: LIB3106-104-Q1-K1-E2
cggacgcgtgggcggacgcgtgggttgtgtttgtgagtaatttgcaaacacaccaaaaccatctctctctctctctctctctctctctctctctctccaattcagacccctagttctgttggatcttgcatatagtaaccctttattgattcgcaaagatgaaggtcacagtggtttctcggagtggaagagaagtggttaaaggtggcattgagctcagtgattctgctactatagcacatctgcaggaggcaattcataagcgaagtatgggaacttgttcattttctctactatgcttatgtatataaatactttggttttaaaagaatgtctgagatgtaaaataactaaaatccaattagtcttgggcttataagggtgctaaaggaggtgtactgtacatgtgggtataggtggtttttacttttgatgggattttaacttatta

SEQ ID NO: 17537 - DNA, 325 bp, Glycine max
  Clone ID: LIB3106-104-Q1-K1-E3
aataattcattcaataatgtatctcactttaatcatcagcaaaaatggagtaacacgcactatgaccataccatgatcctcattctgcggtgtggaaaatcctttggccaaatagaagctaaatcttatttacatcaataaaaaagaactgaattaatacacagtaaatattggaaataaaattggctgaatgaaaccaaaagtaatgtagcactggcattcagttaataggttcacgcattatttgcattccggctagggggaggagtaccggcaagtcaaccccacacgccaccagaacttctggctttgttatgcggataat

SEQ ID NO: 17538 - DNA, 456 bp, Glycine max
  Clone ID: LIB3106-104-Q1-K1-E4
aaaatgggtagcgaagaggattcgattgagcaaagcgttgcgtcccgtcgcgaaagactgctagctctcagagccgctcaggagttgtcgagtgttcccgaacctgaacctaacggcaacaaggacgatgataatgaagaagatcaagaacctcaagaaatgaagttccgtaactacgttcctcacgacaaaaacctccaggaagggaagcttgcccccgcggtgctcccaaagttcgaagaccctgtggatgatgtgcctccacccgagcctgaagctaaggaggatccgttcttgaatattgctccgaagaaacctaattgggacctgcgaagagacgtccagaagaagcttgataagctcgagaagcgaactcagaaggctctttatcaactcatggtggaacaagagaagcaaaatcaattaactgaaggagatgatacaaacggcacagta

SEQ ID NO: 17539 - DNA, 400 bp, Glycine max
  Clone ID: LIB3106-104-Q1-K1-D11
gatggcacaaacgctggcaatgcccgtggcaccttcgctagctatcatctccaattctcgcctctccaacacactctccgttcgcgttctgaacaaaccaaaggttcaagggtcaagcatcaagtgcgttcgtgttggcggtgtggagattccgaacaacaagcgaatcgagtactcgctgcagtacattcatggagttggaaggaccagagcgaaacagattctctgtgatatccaaatggataataaaatcacgaaggaactcactgaggaggagctaatcacactcagggacgaggtctccaaatacatgattgaaggcgacctgagacggttcaatgcggttaatataaagagactgaaggatattcagtgctacagaggaataaagcatattcag

SEQ ID NO: 17540 - DNA, 452 bp, Glycine max
  Clone ID: LIB3106-104-Q1-K1-B7
cccacgcgtccgcctcaatgcttactctagctgttgagaatccagaagctgcaaatcagaccattttcaactgcgtaagtgaccgtgcagtgactctagacggaatagccaaactatgtgctcaagctgcagggcgccccgttaacattttgcattatgatccaaaagctgttggagttgatgcaaagaaggctttccctttccgcacctatcacttctatgcagaacctagagcagccaaagctaaattgggatggcaatcaaccacaaacctccctgaagacctaaaagaacggtttgaggagtacgtaaagattgggagagataagaagtccatccagttcgagctagatgataagatattggaggcgttgaaagttccggtgactgtgtgatccatttatatccaaaatgtgtaaaaacaattcagacaagactgtaagatttttttg

SEQ ID NO: 17541 - DNA, 449 bp, Glycine max
  unsure at all n locations
  Clone ID: LIB3106-104-Q1-K1-B8
tgacattgttcaatgtgtcaattctagcagcaagaaagtggaagcagatgagggtctgaatctgaacactgtggggtgcctcagagggagattactggctgagagacaagcttcaagggtggccaagatggaagcagaatcaatggggaacaagtttgttgagttggaaaaattgcttagagaagagatcaaattaagagataaagctgaaagaaggcttaaacttttaaagaagaaggttggatctttcaattgcatgccctccaagacagggcaattggagcattctgattcgtcggagaaatgtgaaaattcttgtggatcatcctcaattagttcacttttcaaacattctgaattaaacgaaataacgcatgatgcanaaaatccagctttgccagaaaatgtacatcactgtgacaatgtttcagaagcctctacactcattc

SEQ ID NO: 17542 - DNA, 186 bp, Glycine max
  Clone ID: LIB3106-104-Q1-K1-B9
cccacgcgtccgattataataaacatctaaatacatcattcaattaaataaatatgagagtgaattgaaaaaaaaaaaggggaaaaaaaaaaaaaaaaaaaaaaaaaaaaaaaaaaaaaaaaaaaaaaaaaaaaaaaaaaaaaaaaaaaaaaaaaaaaaaaaaaaaaaaaaaaggggcgccccttt

SEQ ID NO: 17543 - DNA, 454 bp, Glycine max
  unsure at all n locations
  Clone ID: LIB3106-104-Q1-K1-C10
cccacgcgtccgcggcttcagcttccgctgcttctctctcccttcgctcttctccgttcaaactcaaccctccaaaactcaacggcgttacgctccgtttccctcaccttaatcgccgttataacagcgccttcagagtcgtcgccgcttccgtttccgtctccaaccccaacgtgcaaaccggccccgacgatctcgttgcttccattctctcaaaggtggtgcaaacggatggaggagtattgctgaaggaggaagagcataaagaggtggccgaagtggctcaggaactgcaaaagtattgcgtgagtgagccagtgaaatgccctttaatatttggagagtgggatgtggcatactgttcacgggcaacatcaccaggtggtggctataggagtgccattgggcgccttttcttcaacacanagcanatggttcaagttgttgaagctcc

SEQ ID NO: 17544 - DNA, 453 bp, Glycine max
  unsure at all n locations
  Clone ID: LIB3106-104-Q1-K1-C11
cccacgcgtccgcccacgcgtccgctcattcttcatccatagacatggccaccgtcacttctgcagccgttgctattccctcattcactggcctcaaggcaagcgcaggcaaagtgagtgccgcagttaaagtctcagctccccaagccacaaggttgggcatcaaggcttcgctgaaagacgttggagtcgctgttgtggccactgccgcgagtgcagtgctggctagcaacgccatggccattgaagtgttgctgggtggtgatgacgggtctctggctttcgttcccaacaatttctccgtggcctctggggagaagatcgtgttcaagaacaacgcatgtttcccccacaacgttgtgttcgacgaggacgagattcctagcggcgtggatgcanggaaaatctccatgagcgatgaagaccttttcaatgcgcctggtgagacttaca

SEQ ID NO: 17545 - DNA, 440 bp, Glycine max
  unsure at all n locations
  Clone ID: LIB3106-104-Q1-K1-C2
cggacgcgtgggcggacgcgtgggcaaaatttggacatggtgccctgtattctggtgacttttgagaatgaacaaattgtggtttggaggggaaaggattatgagccccggaaggatggatactttcttaaagatcgagaatcagttgacgacattggtggcttgtgtgtgggaaaagagcaacaggctatgtaacaccacaatcaggtgtgataattaaatgaaatctttgtgcaaattgccgccatgaataagaagttcccttgagattggattgttgtgttatttgtacattggaggtgttaatttattgtttttgtcacaaattcacagcacagctaattaggaatcaattcatggttttgctgacagccaagcttggaagagactnntgtaattcatgatgtcagagaataatggaggaaactcagttcaatagt

SEQ ID NO: 17546 - DNA, 386 bp, Glycine max
  unsure at all n locations
  Clone ID: LIB3106-104-Q1-K1-C3
actcattctccatacctcaacgaagaggttaaagagacggcaacactttgctgtccgccttgaccgagcagagcttcgtcttggccctggattttgccctaaagtactctcagtcacaacagacaccgtcgtcgtcgtcgtcgtcatcaatggcaccgaagcagaccaaggctgagaagaagatcgcttacgatgcgaagctgtgcgacctaatggaggagtacggccagatcctcgttgtgaactccgataacgtgggatcgaaccagctccagaacattcgcaagggtctccgtggcgactccgtcgtcctcatggggaagaacaccatgatgaagcgctcagtcaggatgcacgctgagaaaaccgganacaacgcctatctc

SEQ ID NO: 17547 - DNA, 428 bp, Glycine max
  Clone ID: LIB3106-104-Q1-K1-C4
attgaatatggacaatgggttgaagagcaacaaaggcggaacgaagaacttagacatgcatttcaagcgcaagcatctgatgtacagctgaatgtagtggttcagagtgtcttaaaccattactcaaatcttttcagaatgaaagcagatgctgcaaaggctgatgtcctctatttactctctggtgtgtggaaagcatcagtggagcgcattttcctttggattggaggctcccgtccatcacagcttctaaacatcatcgtgccacaacttgagcctttgactgatcaacaaattgttagtattagcaacctccgtctatcgtctcaacaagctgaagatgctctttcactaggattggaaaaacttcagcagagtttggtccacgacatggcagttgattcactgggtgtaggaaacttcggact

SEQ ID NO: 17548 - DNA, 324 bp, Glycine max
  Clone ID: LIB3106-104-Q1-K1-C6
atgcttctgatgggctaaagagatggggatgccatcaaaggcggggtgcaagaatattgctcattctactacaagtcagatgaggaactccaaaagacctgcctgcagcttggtggaaagaacttgtagaggtgggtcatggtgatatgaaagataaaccatggtggcaaagatgcaaactcttgaagagatggttgaagcttccgctatcctcatatggattgcttcagccctttatgctgctgttaactttggacagcatccatatggaggcttaatcctaaacaggccaactattagcaggagattcatgcctgaaaaggg

SEQ ID NO: 17549 - DNA, 450 bp, Glycine max
  unsure at all n locations
  Clone ID: LIB3106-104-Q1-K1-C7
ggaagaggagagcatggcagagattcagattctaaacctcggaggcccgccaagcttaagtgcgaggaaactgccatgcgattcgcattcccaaaactggacttgtttgcagcacaagctcaagtgcaacggcagattcctttgccttttctccaacaacagaaaggaggaacaagctagaaaagcattagaaggtgcactaagtgggaagaaaaatgaatttgacaagtggaacaaggaaattaaaagaaaagaagagctgggaggtggaggtgacactggtggaggtggttggtttgggtggggtaaacggnttggctggtctaatgatgataatttttggcaagaagcaaaacaagctattcttactatactcggtcttggtctagtatatctcctagttgcaaaaggcgatgtgctccttgctgtcatcttcaatccattgctata

SEQ ID NO: 17550 - DNA, 380 bp, Glycine max
  Clone ID: LIB3106-104-Q1-K1-C9
cccacgcgtccggaatttgcgggttttggatttggacttggtcgtcaacacagtctaattaagatctttttgctccttcgcttatgaatcttcttcttcttcttcttcttgttcctgcaacgcactgaattcgatcaatcaatccatcttcaattgctttgtttcgatcggaggaaaatggccgatcagttatcgaagggagaggaattcgagaaaaaggctgagaagaagctcagcggttggggcttgtttggctccaagtatgaagatgccgccgatctcttcgataaagccgccaattgcttcaagctcgccaaatcatgggacaaggctggagcgacatacctgaagttggcaatttgtcatttgaagttggaaag

SEQ ID NO: 17551 - DNA, 452 bp, Glycine max
  Clone ID: LIB3106-104-Q1-K1-D1
agaaggccacggggaagatcgtggctctgaagaagactcgtctccacgaggacgaagaaggtgtccctcccaccactctccgtgaggtttccattctgcgaatgctctctcgcgatccccatgtcgttaggttaatggatgtcaaacaaggtcagaacaaggaagggaagacagtgctctacttggtctttgagtacatggacaccgatctcaagaaattcattcgctctttccgtcaaactggacaaaccgttccaccccaaaccatcaaaagcttgatgtaccagctttgcaagggcgttgctttctgccacggtcatgggatcttgcacagggacttgaaacctcacaatctcttgatggacccaaaaaccatgatgccttaaaattgctgatcttggactcgctcgagcatttactgtgccgattaagaaatatacacatgagatact

SEQ ID NO: 17552 - DNA, 432 bp, Glycine max
  Clone ID: LIB3106-104-Q1-K1-D10
cccacgcgtccgacttaattagtccttctcacatccaaaatcttgtgccagcaaatcaaacatggcatccatgactatgcttcagaccatgattcctaagaatgcaccgaacctccctcctcgtgttggtgcttcttccaacaacactactaagatctcatttggtggctcacgtagggtactgtggaccgggattcagaggaacaggaataataggtcttcttcgattgtagttgctgcagttggagatgtttcatctgatggcactgcgtaccttgttgctggtgccattgctgtggctctagttggaacggccttccccatcttcttctctcgcaaagacacatgccctgaatgtgatggagcagggtttgtgcggaaggctaatgtgacattgagagcaaatgcagcaagaaaggatcaaacccaaat

SEQ ID NO: 17553 - DNA, 434 bp, Glycine max
  unsure at all n locations
  Clone ID: LIB3106-104-Q1-K1-B6
cccacgcgtncggcagcaccccagaaagaagaactccactgcttttgagctgaaggctcctcggccacgtctcacactcagtgtgaggtcctataaagtggtgattgagcacgatggagagtccactgaggtggaagttgaacctgacgagaccattctgtcaaaggcattggactctggcttgtctgtgcctcatgattgcaagcttggagtctgcatgacatgccctgctcgtctcattagtggatctgttgatcagagtgatggaatgctcantgatgatgtggtggagcgtggctatgcactcttgtgtgcagcctaccctcaatccgattgtcatattaagattatccccgaggaggagcttttgtcattgcagttagccacagccaatgactgactactagtctgtttttgagttttgaatctagtct

SEQ ID NO: 17554 - DNA, 406 bp, Glycine max
  Clone ID: LIB3106-104-Q1-K1-A2
ctcaaggaaagtgaagaaaaaaatgtttatttttgttttttcacgagagagagagagggagagagagaaataattcaattcaggtgctatgttttctcatgcatattttgtagtatggtctatagaaagtatctacctttcatagtttcatagagttgtggcaagtgagaatgaaaaactaccattgttaaattatggtcttaaattcacttctttgggtactttttggaattcttgaaaaggtgtcaagaaatattgatctggtttatggaggaggaagcattggtttgatggggttggtttcccacgctgtttatgaaggaggtcgccatgtaattggagttattcccaagacactgatgccaaaagagattactggagagacagtgggggaagtgatggcagt

SEQ ID NO: 17555 - DNA, 302 bp, Glycine max
  Clone ID: LIB3106-104-Q1-K1-A3
aaaaaaaaaaaaaaaaaaaaaaaaaaaaaaaattttatttaaaaaaaaaaaaaaaaaaaaaaaagggagggggaaaaaaaaaaaaggggggggcggtaaatataaaaagggccggcctttttaaaggtgccactctatcgcacgcgtccttgcaacagaaaactttttttttagggtcccctaatttcatttaactgcccgccttttaaaaccgccgggactggaaaaaccctggcctttccaaacttaatccccttgcaacaaatcccctttttgcaaattgccctattttcaaaaaggcc

SEQ ID NO: 17556 - DNA, 439 bp, Glycine max
  Clone ID: LIB3106-104-Q1-K1-A4
cccacgcgtccggggagtcagagaaaccctaggtaagaagaaaagatgccggctggtcatgggttgagatcccgcaccagagattccttctctcgtcctttcaggaagaagggaaccatcgccctcaccacatacctgagaacctaccacgtcggcgactatgttgacgtcaaggttaacggtgccgttcacaagggaatgccccacaaattctaccatggccgcaccggacgcgtctggaatgtcaccaaacgtggctgttggcgtcgaagtcaacaagcaggttggcaacagaattataaggaagaggattcatgtgcgggtagagcatgttatgccttcaaggtgcactgaggagttccgcctcaggaagattaagaatgatcagctaaaggccgaagccaacgtcaagggtgagaagatcagcaccaagagacag

SEQ ID NO: 17557 - DNA, 424 bp, Glycine max
  unsure at all n locations
  Clone ID: LIB3106-104-Q1-K1-A5
cccacgcgtncgattatgtgccgcccctgtagccactggccatcgaatgtcaccactccatactcccaaagtgtaaccattggcaaaaactccatctctctcactctccaaactcaaacttttaccaaatctctcaccttcgtgagcaaagcaagaagcttcgtgcaaattggagaatgaatcctcaatcaaagactagagagatcaatgttttgaaaagcaaaatgagaaatccttaaatcgggtcttatttttattatttcattttctgcattcatcacttgttcttgcaggttccgaggacttcattttttatttaccaaatctgagaagcaaaaaaaaaaaaaaaagttgagattacactcgaatttgggggttccttctctcagatatggggctctntatgatttcatgttccctactc

SEQ ID NO: 17558 - DNA, 335 bp, Glycine max
  Clone ID: LIB3106-104-Q1-K1-A6
gaaagtgcacttgccaggaaaatcagaagcacaggttaggttcaaggtagatgtttgcaaggatttgagtgtggtcgatgagcttggcaacaggaaagttccactgggacaacatctgcttcatgtgggaaacttgaagcatccattgagtctgagggtttgaaacaagtcttcaaatcctcggcactgatttcttttttttgccttcttttatttttgcctttttcctcgctgggttccttaaaagaattcttttatgggacccagaaataagtcagaggtaactgtaacaaaattctctgattggcattatcgctattaaatcacagatttgg

SEQ ID NO: 17559 - DNA, 415 bp, Glycine max
  Clone ID: LIB3106-104-Q1-K1-A7
cccacgcgtccggtttcttagtgcacttttttttggcatcaaagaggttaaatccatgggttctgattatggtattcccagggaactctcacatcttcaaaagattcggacggtgtaccaaacagagctaccttcttgacttcaatagatgactgactacagatcatgagaaactcaccatgctgtgagaacattaatgaaattgacatgtctggatactttttaaaaatcttgaggatgaccctataaatatttatgcttcatgaaaccactgagacgttggaatttggtgatgcaaccaccactgctgaccccactgatgcactcaccattagcagggcgtttcctaacacctatggacaccctttggctcactttctcagggcaactggcaaagtccctgatgctcacatca

SEQ ID NO: 17560 - DNA, 287 bp, Glycine max
  Clone ID: LIB3106-104-Q1-K1-A8
atttgttgcaagacatattattcaacgttttggggtttcgaataaacattccgtttttgtcaaggttatgtttggatttatgattttgcattcagcttgatctatatggatatgccatgcatagggctacaaaagaatggttttcttttcaagggtaagagctttttactgaaatgatgattgtattgctacactaaagagaacacatgctcagataagatcacactctcttctatgcattgagaaaagatggaacgtggaataataatattatcattttgatagcg

SEQ ID NO: 17561 - DNA, 453 bp, Glycine max
  unsure at all n locations
  Clone ID: LIB3106-104-Q1-K1-A9
agctgatcaacctgtcaaggattactatatggttgtctctacaagatttaccagacggatactcacaacaacttccgttcttcattatagctattcaaaaacaggggtatctggtcctgttcctccagggcctacccttgatattgcatcgtctgtctatcaggctagaactatccggtggaacctgacagcaagtggaccaagaccaaaccctcagggatcataccactatggattgatcaaaccgagtcgaaccatcatgcttgcaaattctgctccttatatcaatggcaagcagaggtatgcggtcaacggtgtctcatacaatgaaccagataccccattgaaacttgccgactacttcaacatccctggagttttctacgttggaaagcattcctacctatcctaacgggggcaacaatgcctacctncaaacttctgtcatggggg

SEQ ID NO: 17562 - DNA, 280 bp, Glycine max
  unsure at all n locations
  Clone ID: LIB3106-104-Q1-K1-B1
agcagctccttgagttgacatcaaatgcagttacagatggataaaccggnccattctttggtgcgggcgttataacggcacggccggccaatatatctatcattggaacaccatattaagttgtttttgtcgaaagggaaatacatttgatatcctccatcgatgacatttgctcgtagttgcttccaatgtgagattatatgcgtacacgaatatagtctattatgaacccagtgctttcaataatacctttgagggacaatattttggccatactttt

SEQ ID NO: 17563 - DNA, 390 bp, Glycine max
  Clone ID: LIB3106-104-Q1-K1-B10
gtgagttgaaatccatggtgcagctatgtcctcgctgctacattataatgattgccatgtcaaaactcataaggagcttagcttacatttgaattttagtctttgtcagttctggcatgctaagttctttcatgttggtatggtgcatagcaaaactattcaaattgggcaataagatttccatatgtggccgatgaatttctttctgtcagtaattatgaatttgttctccccccaccatcttgtcagaacttattgtctgtgcgttgccaaatttttttggctttgcagttggaatgcaacatatgaaagtttacttgggagcaacaagccattccatcagcctatccctcttgctgaaatggtagattttcttgtggacatatggga

SEQ ID NO: 17564 - DNA, 447 bp, Glycine max
  Clone ID: LIB3106-104-Q1-K1-B11
atttaaagctggttatgattcagagattcgccttggctgggcatctctttgggttggagatgaaggtgggaaagccaaaacagctccgatgcagatgaaagttcaattcatgctacaagtgccacaggacgacataaaatcttctgctttgatgtttcggattaagaaaagatgggacttttaaggctctactggtgactttacctgttttttatatataaaaaatgggtatttgactttgggcagttccattgtgttttagttggttgcatccacagtccactctttgcaaaagggggtattgactatttgacaggttgatatttctccaagtcagctaattgcttcgtggtgtgacaagtaagaacaattttcaatcgtacaaaaatttgtaaggatgatttttctgatttgtaagttggcaggattatggttatcgaatgcaga

SEQ ID NO: 17565 - DNA, 451 bp, Glycine max
  unsure at all n locations
  Clone ID: LIB3106-104-Q1-K1-B12
cccacgcgtccgcccacgcgtccgcccacgcgttcgaatgtttgggactttgtttgggggataagagagcgatgttggtgttccgaagattgatccagaatcctcctatgaatgacgataagagatgagagaacaaagctttggagataaaatgcatggaataactctccctctcactgcaactgcaaatagcttccttttgagatctcctctaccaagttgtttcatacccacttgtaaagttagctacggatttcgttttaaccattctcagtggaagcaccatataacagaaggatggagcaataggaatagaacgatggtggtgagagcaaggcgtnacgagtcaccgtatgatgttttgggagtgtctccatcagcattcgtcgacgaaatcaaaaaggcctatcggaaacttgctcttaagtatcatcccgatgttaataaagag

SEQ ID NO: 17566 - DNA, 401 bp, Glycine max
  unsure at all n locations
  Clone ID: LIB3106-104-Q1-K1-B2
cccacgcgttcgnccacgcgttcgnccacgcgttcggaacttcttaaagatgttgataccccggcaggattggcatcaaccaagcgactggcatttaaggacagcttacaacagagaattctcaaagctgagaagattgatgtctcatttgaaactttcccatattatctaagtgatacaacaaagaacgctttgattgcttctacatttattcatttgaagggcaaaggctttggaaaatatgcttcagacctcccatcagtgtctccacgaatagtgttatctggtcctgcagggtcggaaatatattacgagactttgtccaaagcacttgtgaagcattttggtgccaggctactaattgtggattctctttcactgcctggtggatcaccatcaaa

SEQ ID NO: 17567 - DNA, 370 bp, Glycine max
  Clone ID: LIB3106-104-Q1-K1-B3
cccacgcgtccgcttaaaccctctctttcacttcactcatcgcattaacaaaccaagtaaccggcaatgaaatgaacaacaacggcaatgattcttcaacttcaccgaaccttcttctcctccaccaccacctcctcctcctccgtaccttcctcacaccccctctctttctgccacttcatgttgcagttcagggcgatccagactccaccaatcgctctcgcgccgcacgccacgtcatctctcaccggcgccaccgtccaatttcgaactcgtcttctcttccctccaagagttaccgcgaagtgccacgcgacgtcgtttggtaatttccgtttgcagtttgctttgaactccacgacgcccgttg

SEQ ID NO: 17568 - DNA, 394 bp, Glycine max
  Clone ID: LIB3106-104-Q1-K1-B4
caacaagatgctttacaggatgatttgaccaccacacttgtgcagcagtgtcgtcggtcacagactactgtccagcgaattgttgaaacggctggggataatgaagcagtgctttttgaggccttgaatgttaacgatgagattcagaaggtcctcaccaaatacgaagagttgaagcagcctgcaactactccacttcatcctgaaccagctatgatacctgttgctgttgaacccagacgagtcaccctatcatagtaaagaagatgctttgattcgaaagccagctggatcaaggactggtgtcgagggagggagcaatgatgacatgatggatgatctcgatgagatgatttttgggaagaaaggtggggaagcatcagatggggacacg

SEQ ID NO: 17569 - DNA, 445 bp, Glycine max
  Clone ID: LIB3106-104-Q1-K1-B5
gacaaatcaagcttgaaggctatagagaaaaccatagttagctctgatcttggtatgactccgaatgatgatggagaatcgatacaattgagaatcccacagttgacatctgataggaggaaggaactatcgaagatagtggctaaacaagctgaagaagggaaggtggctttgaggaatataaggagagatgcattaaaagcttatgataaacttgagaaggagaaaaagctcttcggaagataatgtgaaggatttgtcaagtgatttgcagaagctgacagatgagtatatgaagaaagttgacaccatcttcaaacagaaagaaaaggagttgctgacagtttgatattttgatacaaaaagtaaatgcagagttctatctaaagagggtcaaattttgtgtctactttgctctaggtttggataattaatgcgcatatgt

SEQ ID NO: 17570 - DNA, 451 bp, Glycine max
  Clone ID: LIB3106-104-Q1-K1-A12
gtgattgttgtgactcgttcttcttcgtcgttatcttcttcttttgttgtttgtgtgtttgttttttctctcacctgaaaatgtcttgctgcggtggtaactgtggttgcggaagcgcctgcaagtgcggcaacggctgcggaggctgcaagatgtacccagacttgagctacaccgagtcaaccaccaccgagaccttggtcatgggagtggcaccagttaaggctcaattcgagagtgctgaaatgggtgttcccgctgagaacgatggctgcaaatgtggagctaactgcacctgcaacccctgcacttgcaagtgaggtgttggagagctaaagcttcaagcagagatggcccttagaaataatgataaaaactatatgtagtttcaaaacttcaaaattatgtagtatgtattatgttgcactctgggtgtttgtgtctaaacaaa

SEQ ID NO: 17571 - DNA, 440 bp, Glycine max
  Clone ID: LIB3106-103-Q1-K1-G5
tcgtccacgcgttcgattctcttcttctcactcaaactttccctctctgcgccgttcctctcaaatggatgcaccaatggagttttggggtgttgaggttaaggttgggcagactgtgacggttgacccaatggatcctgtggattcatacatacacatttctcaggttgcgctcggagaggcgaaaaaggacaaacctaatgaacctgtggttctgtacttgaaagttggtgaacagaagattgttttgggaaccctttctagggatggcatccctcacctatcattggatttggttctggactccgattctgagctttcccacacttcataaagtgccagtgtctttttctgtggatacaaagttctaactggcaattgaacaaaaatttggccctttttttcccttttttggggaaaaccacttttttttttttttt

SEQ ID NO: 17572 - DNA, 457 bp, Glycine max
  Clone ID: LIB3106-103-Q1-K1-G6
tcgcggtctcgtgggaaaaaaaaaaatataaaaaataaaaaaaaaaaaaaaaaaaaaaaggaaaaggaaaaataaaaaaaaggacaaaggaaataaaaaaaaaaataggggcggccgctttcatggttccaggcttcctttcgcttgcatcctacaacttagcttttctatagggtcccctacattcactttactggccgtccttttacaacgacctgtctggtaaaccccttgcgtttcccaactttttcgcctggcatcacttccccctttcccctgcttgtgttacttctaataggccgttactggattagcccttcctaacagttgctcatccttactgtccattgtgcccctccctttagctgctcttttatcgtcgttgcttttgctatttttttttttctcccttgttccctgtttttcctatattatgttccctttttttatttttttt

SEQ ID NO: 17573 - DNA, 369 bp, Glycine max
  Clone ID: LIB3106-103-Q1-K1-G8
gcaaaagatgtgactgaattaattggcaaaactccattggtatatctcaaccacatcgtggatggttgtgttgccaaagttgctgccaagcttgaaatgatggaaccttgctccagtgtcaaagacaggataggatatagcatgattgtagacgctgaggagaaaggactcatcacaccgggtgaaagtgtcctcattgaacctaccagtggaaacactggcataggtttggcattcatggcagctgctaagggttataaacttattataaccatgccttcttcgatgagtcttgaaagaagaaccattcttcgtgcttttggagctgagttagttctcactgatcccgccaagggtatgaaaggagct

SEQ ID NO: 17574 - DNA, 450 bp, Glycine max
  Clone ID: LIB3106-103-Q1-K1-G9
tcaaaagaggagaaaaaaagaagaaaagaatggtaacaatagctggtggtgtgagtctttcaagccctagcagggtatttgctaatgctaagggaatagactcagcacaaaaggcccaggccgtgaggtttccagctctgtcgaggcccattcaaaagtggcctggtttggtgaagacccggcccgttcgggcgacgccggagaagatatcggagaaggtagaggagagcataaagagcgcggaggaggcgtgctcgggaggcggcggtgacgcggaatgcgcggcggcctgggacgaggtggaggagctgagcgcggcggcgaaccacgccagggagaagcaaaagcaggctgacccgctcgaaaattactgcaaggacaatccagagactgatgagtgccgcacctatgataattgatgactgaactcagtcattccaaagttacatg

SEQ ID NO: 17575 - DNA, 398 bp, Glycine max
  Clone ID: LIB3106-103-Q1-K1-H1
cccacgcgtccgggctcgactacttgggcaacccaagcctgatccacgcccagagcatcctggccatctgggccacacaagtgatcctaatgggtgccgttgaaggttaccgtattgctggtggccccctcggtgaggtcactgacccaatctacccaggtggcagcttcgacccattgggccttgctgatgacccagaggcttttgctgagcttaaggtgaaggaactcaagaacggacgattggccatgttctctatgtttggcttctttgttcaggccattgtcaccggaaagggtccattggagaacctcgccgatcaccttgctgaccctgtcaacaacaacgcctgggcctatgccaccaacttcgtccccggaaaagtgtaaggccccggt

SEQ ID NO: 17576 - DNA, 379 bp, Glycine max
  unsure at all n locations
  Clone ID: LIB3106-103-Q1-K1-H11
cggacgcgtgggcggacgcgtgggcggacgcgtgggcggacgcgtggggttaatgtgtctggattatcattagtggctgccaaattggttgacttccggagacagagtggagataccacatccatattttgtatgactagactcatgcttaattcttataacaatagtattctcttttccgaaaaaaaaaaaaaaaaaaaaaaaaaaaaaaaaaaaaaaaaaaaaaaaaaaaaaaaaaaaaaaaaaaaaaaaaaaaaaaataaaaaaaaaaaaataacaaaaaaaaaaaaaaaataaaaaaanggggggggccgttttaaaggatcaaattttactcccccgggtttgcaaagaaaaaatttttttttaggggcaccaa

SEQ ID NO: 17577 - DNA, 242 bp, Glycine max
  Clone ID: LIB3106-103-Q1-K1-H12
gggcaagaaaggatgatgtggcgcagccaggtcttctctgtgtctgggtccggtggcatgcacatgcactcgctgtggctcctatagttactgcttctttttccaacacaagtcttgcgttgcaattccaaaagcctatcttcaaattcagcaactcctcttctctcgctcttacccatcggaagctgttaccctctgcactggcactaacgcagccctcaacttcaaaggaagattttgat

SEQ ID NO: 17578 - DNA, 427 bp, Glycine max
  Clone ID: LIB3106-103-Q1-K1-H2
ctcctctttaaccgttggagctagaggtccaattctgcttgaggattatcatcttgtggagaagcttgcaaactttgacagggaacgtatcccagaacgtgttgtccatgccaggggagctagtgcaaagggtttctttgaggtcacacatgacatttctcacctgacatgtgcagatttccttcgagcccctggagttcagacgcctgtaattgttcgtttctcaactgtcattcatgagcgtggtagccctgaaaccttgagggaccctcgaggttttgccgtgaagttttacaccagagagggtaactttgaccttgttggaaacaacctttccgtcttctttgtacgtgacggcatgaaatttccagatatggttcatgctacttaataaacccccccccaaaatattttccccccccccccc

SEQ ID NO: 17579 - DNA, 393 bp, Glycine max
  Clone ID: LIB3106-103-Q1-K1-H3
ctagtgcatagcatattccagtgtttgtcatttcatcgtgcattcaatggccaccacagcagctctatccggaaccatggtgagcaccttcttcatgaggaggcaacctatgaccaccacaagcctaaagacattccccaacgttggtgaagctctttttggtctgaaaagtggacgaggtggtcgtgtcacttgcatggcctcgtacaaggtgaagctcataaccccagaaggagaagtggagtttgaatgcccagatgatgttttcattgttgacaaggcacaggacgaatgcattgaacttccctactcgtgcaaggccggttcttgccgcttccgtgttggcaaaactgtggaaagtaacgtggaccagtcagatgggtaggccttttt

SEQ ID NO: 17580 - DNA, 342 bp, Glycine max
  Clone ID: LIB3106-103-Q1-K1-H5
gtaaagaagaagaaaagtatcgtgcgtttagcttaggaagatgaggctgcatactcttgtgtgaccaaaaagatgagtgaagacgtggagatgaaagatcaggcaacgccttcacactcgctttcttcagttcctccatctgcattgcagcatttgaaggaaatagcatcaattattgaaaccggttcgtactcaaaggaagttcgtcgaattgctcgtgccctgcgccttacatttgcattgaggcgtaaattgacagcaccagttctctcatctttcctcgattatgttcttccttccgcttctgaaccctacactaagttatcctcttttcttcctaat

SEQ ID NO: 17581 - DNA, 300 bp, Glycine max
  Clone ID: LIB3106-103-Q1-K1-H6
tcgtccacgcgtccgtccacgcgttcggtaaaaatgaaatgctgaagattgaagaagagagggaatgaattgaagagcttgagagagagagaggggagggggttgaagcacacgcatggcttggggtcagagatgagaggttgatgacgataaaaaggggtaataataatactaataatcatcaatctctcggccgtgcgggggtaatttatgaataataatgatgattaggtcctaatgaaatctatctatctagtgagtaatgctgtaaaaatcagtccacaattcacctctgcttcc

SEQ ID NO: 17582 - DNA, 247 bp, Glycine max
  Clone ID: LIB3106-103-Q1-K1-H7
ttctcctaaaacatctccagtgggttcttcttcttctattacaacaacgtcgtccaagaccatgaccatggccatgggcacgagcctgctcctgttcacggtcttcgcggcttcatcggccctagacatgtcgataatctcgtacgacaactcccacgccgccacgtcgcgcagcgacgaggagctgatgtccatgtacgagcagtggctggtgaagcacggcaaggtgtacaacgcgctcggggag

SEQ ID NO: 17583 - DNA, 426 bp, Glycine max
  Clone ID: LIB3106-103-Q1-K1-H8
tcgtccactcgttcgtccacgcgttcgagcttattgaataaatattggtggaagcacacagcacacagcacaagcctgaaagttgaagcgaaagaaacgtctaacccgaatggtgtaataatatggagagggggtaattccacccaacagaagcagcgacactgacacaccaaactacaaatctgaaatccccctttgactcctctcactttgagacgcctcattcccaactttcctcccaaacacccttttatttttttttgtgagtgatttcaaagcaaacaaataaaaaaccatttaacgctctctcttattattccaatttccaaatcacaaaacaaaaattctctctctctctctctctctctctctctctgaatttatacctccaaattttttttcccccaatttttttttttttccccc

SEQ ID NO: 17584 - DNA, 293 bp, Glycine max
  Clone ID: LIB3106-103-Q1-K1-H9
gccacgcgtgcgcccacgcgttcggaaacctggggcttcaagatgtctcatatgtgaagcgtgctccatcgcaagagacaaagattgaagaaattgtgaaggaagaacaggtggtggtacctgaagaagataatagcagcaaagtaactgaaaattaaatggcctttttaatttggagtatctgctactcgcaaggtacaccctagagaagctgaatgactctgtattattggtagatattagatatgtttgattactactgctgggtataatgcacgatttaaatgaatggt

SEQ ID NO: 17585 - DNA, 202 bp, Glycine max
  Clone ID: LIB3106-104-Q1-K1-A1
tcggccacgcgtgcggccacgcgtacgatcaggatagcatgcatatcaacatcatgatgaacaatgtgcgtgggtttgcaatactgatggtggctgtgcaacttctggggtaagagagtacaaaaggaaaggctgcgacttgatcccctgtggaggctattccttgtttgggggcaataacattgctgtgaaccaccatcaa

SEQ ID NO: 17586 - DNA, 432 bp, Glycine max
  Clone ID: LIB3106-104-Q1-K1-A10
cccacgcgtccgctaaacgctcggcgcaccttagcatataggctggcaggagctctgtcttcgtcatccgcaagcgcgtctcgctgtcgcttcgcattggcgttgcaccacgccaaacaaaccgtacccattcctcacccggcgagttttgcggttcggactcaatcttcgggttcgggttactcgcccctgaacgacccctccccgaactggagcaaccgtcccccgaaggagaccattcttctcgatggctgcgactacgagcactggctcatcgtcatggagttccccgataaccctaaaccctccgaggaccacatggttaactcctatgtcaaaaccctagctcaagtcctcggaagtgaggaggaggctaaaaagaagatatactctgtttccacttctacgtacacaggtttcggcgccctcatt

SEQ ID NO: 17587 - DNA, 448 bp, Glycine max
  Clone ID: LIB3106-104-Q1-K1-A11
tcttattattcctcttccatctctattcttcataacacccaccacaccacttgtgaagaaccggattaatatcacacactgacgtgtatctctgagctccaatccaatacaagaccacaccttgtcgtgttggacgaaccttggtgtctgttttttttttttttttttcattattttctccgaagagatgatgaagggcagaggtggaggcgccttggcggcggcggtggatgtgaacggattcattttaaaaggacccttggtaccggggcgtgaggaaaaaaccgtgggggagattcgccgtggacatcagagacccgttgaagaaagccagggtttggttgggaaccttcaattctgccgaggatgctggtcgtgcctacgacgccggcggtcggactttccgaggtccaaggccaaaacaaattttccccctctctaccttttt

SEQ ID NO: 17588 - DNA, 440 bp, Glycine max
  Clone ID: LIB3106-103-Q1-K1-G4
agcgtcctagtcgcaaccctaataagaagaaccacagcttcaagcgagtgacatccaccagccatgggtcgtatgcacagccgcggtaagggtatatcctcttctgctttgccctacaaaaggacaccccctagctggctcaagatctcttcgcaagatgtggaagaaaatatctgcaagtttgcgaagaagggtttgaccccgtctcagattggtgtcattcttcgagattctcacggtattgctcaggtcaacagcgtcactggcagcaaaatccttcgcatcctcaaagctcacgggcttgcgcctgaaattccagaggatctttaccatttgattaagaaggcagtttcaattaggaagcatcttgagaggaacatggaagggaccataagggggggaacctttttttccccccaaaaaaaagggggttttttttt

SEQ ID NO: 17589 - DNA, 451 bp, Glycine max
  Clone ID: LIB3106-103-Q1-K1-F11
gtctgagatagaagcatagaataaattttacacttagaacatagaagcaaagtgtttggtgtgagaagagagataatggcgcagagagctcaaccagcgttggccaccacggatgtttttcagaagggagatattcattggaagcaattcaatgttgaaacatccactgcttcttcctcacctccaaaaccattgcttatttttacaccaaccgtgcctggcttataccctgtaatattgttttgccatggcttttgtattcgcactagctactactctaagctcctagcccacatagtttcacatggattcatacttgttgctcctcagctgttttccattggggtgcctatgtttggaccagaagaagttaagtgtgaaagaagagttgtggattggctagataacgggcttcaaccattgctttccgagagcgttgaagccaaattgg

SEQ ID NO: 17590 - DNA, 114 bp, Glycine max
  Clone ID: LIB3106-103-Q1-K1-F12
tcgcccacgcgttcgaaaaaaaaataaataaaattaaaaaaaaaaagggcacaaactggtgggggggcaaaataaaaagtgggggcttaccaacgcattcatttttttttatta

SEQ ID NO: 17591 - DNA, 380 bp, Glycine max
  Clone ID: LIB3106-103-Q1-K1-F2
cccacgcgtccgggaaagccaaccttggcaaatttcaacccgaaatcgtcgatttcttctaaaatatatacagggcattggtctcctttttgaattgtggttgagggattaaagtactgttattggtagagatggcatgtaggggatgctgggaatgccttttgaagctttttaacttcatattgaccctcactggtcttgccattgtgggctatggaatctatctttttgttgaattctctaaagcttcagatgatgacaacatgccggcaatttctcctgtaagcgatgattcttctctgattcaacttggccggcctgtgcttatggccgtgtctctatccaacgacttttttgataacttgccccgtgcttggttt

SEQ ID NO: 17592 - DNA, 367 bp, Glycine max
  Clone ID: LIB3106-103-Q1-K1-F3
tcgtccacgcgttcgtccacgcgtacgttcacgcgttcgaaacagaaatcgtcgatttcttctaagatatataacggggcattggtctgatgttcgaatcgtacttgcgggatcaaacgactgctattggtagagaagggatgcatgggatgcttggaatgcccgttgaagctcatcaacttgatagtgacaatcactggtcttgccatcgtaggctacgggatctatatttctgttgaattctctaaagcttcagatgatgacaacatgccggtcgtttctccagcaagcgatgattcttatctgagtcaacttcgcccgcctgtgcttatcgccaagtccctatccaacgacttttacgatcact

SEQ ID NO: 17593 - DNA, 419 bp, Glycine max
  unsure at all n locations
  Clone ID: LIB3106-103-Q1-K1-F4
gataactagaaacagtgtgatgaaaatgaaggtccttgttttcttcgttgctacaattttggtagcatggcaatgccatgcgtacgatatgttccctctccgaatgaacactggctatggtgcccgtactccggaggtgaaatgcgcaagttggaggcttgctgtggaagcacacaacatctttggctttgagaccattcctgaagagtgcgttgaagcaacaaaggaatacatccatggcgaacaatatagatcagactccaaaacagttaaccaacaagcttacttttatgccagagacctcgaagtccatcccaaggacacatttgtgttcagtatagatggcaccgtactctctaatattccatactacaaaaaacattgggantaaatttggggggggggnttttggggggggg

SEQ ID NO: 17594 - DNA, 376 bp, Glycine max
  Clone ID: LIB3106-103-Q1-K1-F5
cccacgcgtccgcccacgcgtccgtccacgcgtccgcccacgcgtccgcgctctcgctctcgcgtcgctgctctattccgttcttcacgtgacatcacggcctcaagaaacgtcgtcgtattagagaaaggcgcgtaacgcatgaagagacaaatgttgcatgatctgattgagaatgcaggaggctgcgctgtcaccgatggaggattcgccacgcagctcgaaaagcatggagcctccatcaacgatcctctttggagcgccatctatttgatcaaagacccacatcttatcaaacaggttcacttggaatacttggaggctggtgctgatatatcggttacttcatcataccaggctacacttcctggatttt

SEQ ID NO: 17595 - DNA, 388 bp, Glycine max
  Clone ID: LIB3106-103-Q1-K1-F6
gcagagcactgcatcctcatcatttcaaggccaacacaaagcagagaaagcaaaaaaagaaaaaaaagcaaagagagagagagagataataaagagaaaaaactgaaggaagaagaaagggtttgtttgtgtgaaagaaagagaaagagaggatgcagagtgagaaccagaacaaccagttggtggtgcataattcggggagcctgatcttcatcagccatttgtcgaaggaagacgaatagatgtcaaggtctgctctcttcaccttcagagccaaggatgaagagattgaaaggaagaagatggaggtcagagaaaaggttcagcttcagttaggtcgagtcgaagaagaaactaagcgtcttgcaaccattcgtgaggaagcttt

SEQ ID NO: 17596 - DNA, 417 bp, Glycine max
  Clone ID: LIB3106-103-Q1-K1-F7
tcgtcttaatccaaatatcatcatctgaaacgatggctgccatggcaaccacaaccctgtcttcaaacccgaaactctcatttttccacggaaagcccgttacatattcttcccgcgtcgcacccaccaccaagttattctcatccaaacaaggcacaatctccatgtccctaacccaacccccatacgacctccaatccttcaaattccaacccatcaaagaatccatcgtctcacgcgaaatgacgcgccgctacatgaccgacatgataacctacgccgacaccgacgtcgtaatcgtcggagccggctcggcggggctctcctgtgcgtacgagatcagcaagaaccccgtcgtgagcgtcgccataatcgagcaagtcccggttggaaaagggcccccccccccctgggggg

SEQ ID NO: 17597 - DNA, 366 bp, Glycine max
  Clone ID: LIB3106-103-Q1-K1-F8
tccactcgttcgtacaagggtcagtttagatggttctgcggtatagagtttaaaaatggggaaggacacaattgctcgaaagagagagatggtacgttcgaaactcaaacccaaggcttggaataaggaatgtgatgatgatgacgatgatgggacccataagctcactcccgatcatgatttggtccggcatccgatcctaatcgatgatttcaagtgctgactcgagactaacgaaatatacgtatccacggtgtcatcctgtacaaacgagctgacattgcagtttttcttgcagaggcagccgtcggtggcggttgccgactctgcgacccgtgatcttaggcgtattgtgcggcttgaatg

SEQ ID NO: 17598 - DNA, 393 bp, Glycine max
  Clone ID: LIB3106-103-Q1-K1-F9
gagatttggttcaaaataatgctcacctgcaaaagctcatccacttcaaaaaaaaggccaattctcctttcctttcatttgcacgtatacacattacaacaagtttttttttttttgaggcccatctaactttgtctctattccaccacgtatttatcagcccttgctatttttcacttcacttccgttctgtttctatccctcactaggagctcttctccattggttcttcatctgcatgcacacacttgcatagttttggaaaccaagaatttttgaagggtagcatcaacaagaagttctggaaatggagatcaccaatgtcagcgagtatgaagctattgcaaagcagaagttgccaaagatggtgtttgactactacgcatctggtgc

SEQ ID NO: 17599 - DNA, 439 bp, Glycine max
  Clone ID: LIB3106-103-Q1-K1-G1
aagaagagcatcactgaactaacaaagcaaccctatgtcgaaggtggtttgtgtcaccggagccagcggcgccatcggatcatgggtggtcctcctcctcctccagcgtggttacaccgtccatgccaccgtccaagatatcaaggatgaaaatgagacgaaacatttggaggaaatggaaggagcaaagagtcatctccatttttttgaaatggatcttcttgacatcgactccattgccgctgccataaagggttgttccggcgtaatccaccttgcatgtcctaacatcattggtcaagtcgaagatcccgagaaacagatattggaaccggcgataaaaggaacggttaatgtgttgaaggcggcgaaggaagtcaggggtgtggaaggcccggtccggtttttggggggggtttttgggggggggggccccccc

SEQ ID NO: 17600 - DNA, 428 bp, Glycine max
  unsure at all n locations
  Clone ID: LIB3106-103-Q1-K1-G10
cggacgcgtgggggtaactgaagtttgggagaacatggtggacaaaaagttttatccttctgtctcaacatattctgtcatgatccatggtttttgtaagaagaagggaaagctagaggaggcatgtaagtattttgaaatgatgattgatgaaggaataccaccatatgttactactgttgagatgctgaggaatcggcttttgggtttagggtttatagatcacattgaaatactggctgctaagatgaggcaaagcacttcctatgcaattcaagaattggcaaatattatgattggcaatagaacagctcataatactttgggacgtgatgagatggacatagaaagtgactgangaagtgattattgtttctcgtaatactttctcattaagctattttgacaaatatgtggaggcaaccatt

SEQ ID NO: 17601 - DNA, 444 bp, Glycine max
  Clone ID: LIB3106-103-Q1-K1-G11
gtctcattctactacaagtcagatgaggaacttcaaaaagaccccgagctccaagcggggtggaaagaacttgtgggggggggtcatggggatttgaaggataagccatggtggcaaaatgcaaactcgtgaagagttggttgaagcttccgctaccctcatatggattgcttcagctcttcatgctgctggtaactttggacagtatccatatggaggtttaatcctgaataggccaactattaccaggagattcatgcctgagaaagggtctcctgaatatgatgcgttagctaagaaccctgagaaggagtttttgaagactattactggcaagaaagagaccctcattgaccttacaattatagaaattgttataaggcacgcatcttgatgagttctaccttgggcagagaaatggtggtgactacttgacttctgatg

SEQ ID NO: 17602 - DNA, 380 bp, Glycine max
  Clone ID: LIB3106-103-Q1-K1-G12
accacgcgttcgggaaatggcttcctcaatgatctcctacccagctgttaccaggggcaaccgtgccggtgccggcggggttgctccattcaccggcctcaaatccatggctggcttccccacgaggaagaccaacaatgacattacctccattgctagcaacggcggaagaggacaatgcatgcaggtgtggccaccaattggcaagaagaagtgcgagactctttcctacttgccagacctcgatgatgcccaattggcaaaggaagtcgaataccttctaaggaaaggatggattccttgcttggaatacgagttggagcacggcttcgtgtaccgagagcacaacaagacacctggatactatgaaggacgctact

SEQ ID NO: 17603 - DNA, 443 bp, Glycine max
  Clone ID: LIB3106-103-Q1-K1-G2
tcgcccacgcgtccgattttcatgattaggattgaattcaaagtttcgtacaattaaatgactcgttcaatgttggtaatcggtatacaatctacttcaaaagacatttgcctggcagtacagtgctttatgttcactataatttgattaattaaaaattaactattaatcgtcgtcattgagaatagcaataatttttaatattggctttgagtttttaacttgttcaataactgaattaaagtggttttggatcatctaaaaatttctaacctatggataatttacgatgaaaaatgtgtaagtgcttagtttgcctacttcaaccagatgcatctaatcccatgttccaatatcttaagttgtaagtttattatttatgttcaagcgtaatttaatttttttttaaacccttttttaaaatttttaaaaattttttaaaa

SEQ ID NO: 17604 - DNA, 283 bp, Glycine max
  Clone ID: LIB3106-103-Q1-K1-G3
tcgtccacgcgtacgatcgtaatgattaggattgttttcaaagtcaggcacacatgattgactcggtcaatgttggtaatcatgatacaacatacttctatagacataagcgtgacagcacaatgctgaatgatcactatagttacattaactaaaaaggaacgtatcaaaaggcgtcattgtatagagcactaaatgatcatatagacttcaagattgtaacctggtcacatgctgaattaaagtggatctggatcatataggaagttctaacctatggatg

SEQ ID NO: 17605 - DNA, 291 bp, Glycine max
  Clone ID: LIB3106-103-Q1-K1-F10
attctacttaccttttctcttaatccaaatatcatcatctgaaacgatggctggcatggcaaccacaaccctctcttcaaacccgaaactctcatttttccacggaaagcccgttacatattcttcccgcgtcgcacccaccaccaagttattctcattcaaacaaggcacaatctccatgtccctaacccaacccccatacgacctccaatccttcaaattccaacccatcaaagaatccatcgtcttacgcgaaatgacgcgccgctacatgaccgacattgataccta

SEQ ID NO: 17606 - DNA, 380 bp, Glycine max
  Clone ID: LIB3106-103-Q1-K1-D4
cccacgcgttcgcccacgcgtccgcccactcgttcgcccacgcgttcggaaaaggactcgtccttgaaatatgctcacaactgctatacttaacaattaacaacatactagagcatcctggattaataaataatacgatttttttgtgatgagcaaaaattgcaaaaggatataggatgggcccacttctatcatcttgaaaaaagcaccaagatgccctggttgtctaataaccattcagcagacgatgcccttcttcttgctatttttccagatagttgcagagaaacacttgctcactcagccccagcaaggatgaagacacgccacttacttaatgatctgtgtctagtagtgctagtgttagccctaggttgtgc

SEQ ID NO: 17607 - DNA, 375 bp, Glycine max
  Clone ID: LIB3106-103-Q1-K1-D6
gttggtgtgcccaccctcactctctaatctctaagactctctactcttctcttagtgctctaatctaattattattatcaacataagtcacaacaccaccattcttccattctctctctttcttctacactattcattcaatccatgccggtcaacgtgaggtgctgaaggtcaatcgtggtctttcgaaatggggaacgggagcagaagctactcggcgaaccggagcgactacaagcttctagaagaagtcggttacggcgccagcgccaccgtctaccgtgcaatctacctcccctacaacgaggaggtcgccgtcaagtgcctggatctggatcgctgcaatataaatctggacgacatacgtagggaggc

SEQ ID NO: 17608 - DNA, 375 bp, Glycine max
  Clone ID: LIB3106-103-Q1-K1-D7
tctagtttcaattcgatgccataaattctctctctatgccgagacgatttgaatcttcgttccaaaattgtcatttttttacaaccctatttccctcaatatcctatcttctatctaccaaagtatcatctcgaacaggatctatctgccattgtttcgaacaagattgttttgaataagtttgccttaaaccagaaaaaaaaagactgtcttctcttctccaattcctcagctgtgttcggacactcctaggtagctgtcggtttccgcgaaccaccctttcctcaaaattttccgaaacctgcatctccgcggaggtacagaacaaaagacagaactctgaggtcaaaatctggttagggttttgcctcgttt

SEQ ID NO: 17609 - DNA, 241 bp, Glycine max
  Clone ID: LIB3106-103-Q1-K1-D9
ttcacacacaactgatgatataaactttgatattaactgagctcaaaatgatgcggggattacatacttcactaaaggggctgacaaatacattaatagccaatccttaaatttgtgctacagcaaacctacttacattcctccttaccaaccacctggtctaacaggactcattaccaaatgtattcatccctacataataggctccaatatcacctttcacataatcttaagtggaata

SEQ ID NO: 17610 - DNA, 448 bp, Glycine max
  unsure at all n locations
  Clone ID: LIB3106-103-Q1-K1-E1
cccacgcgtccgcccacgcgtccggtaggttaatgactttgtgtgcatatcagacaatgcttatgttagtgaacaagtgttgatgatggagaaaacaatccttaggaagcttgaatggtacttaacagttccaacaccctatcacttcttggttaggtataccaaagcctccactccgtctgacaaagagatggagaacatggtgtttttccttgctgaacttggattgatgcattatcctactgtaatcttgtaccgtccttctctgattgctgcttctgctgcgtttgcggctcgatgtacccttggaaggagccctttctggacaaacactttgatgcactacacaggctactctgaggagcaactaagggattgcgtccaaanaatttccaaatttggggggccccccccccaaaaaaaaacccctcccccctttttttttttt

SEQ ID NO: 17611 - DNA, 279 bp, Glycine max
  Clone ID: LIB3106-103-Q1-K1-E10
gttctagatcgcgagcggccgccctctgttgtcatgtatatttaaacatgaaattcaaacattctgttttgtattaatgcataaatatattttgtaatcaaattgatattttgtgaactgaagctaagatggaaaggaacctgaacgggtcactttttaccgtgtaacttttcaccgtcggaaaaaaaaaaaaaaaaaaaataaaaaaaaaaaaaaaaaataggtgtaaatttttaaagggttgggttgtgatatgggggtatgtttagtggtggggtc

SEQ ID NO: 17612 - DNA, 421 bp, Glycine max
  unsure at all n locations
  Clone ID: LIB3106-103-Q1-K1-E11
gtattattagtattgagtttgttcctccatcgcgaaattagggttcgctcacttgtcttcaatttcccaaattcaccctgcaccatccttgaatcctccaattgacacgccttttggatccatttttctccgtgaggccgtgacgcatcgcgattttgttttgggaacccgcgaaactgaatcagatagtgcggcacggaaactaggaattagagcaatggcagaagatctggtgctggatactgcaatcagagactgggtgctgatccctctctctgtggttatggttctcattggggtgctccgntattttgtttctaagcttatgcactcttctcaaacccctgacgccaaaattgttaaagaagggcaagtgatcgttagagctcggaatttacgtgctgcggcgaattttattcct

SEQ ID NO: 17613 - DNA, 442 bp, Glycine max
  Clone ID: LIB3106-103-Q1-K1-E12
caatttcgaagtcatccaaccagccactggattcttggagagcatggacactcaggaaagtcaacctgagaagcaggcttcatccactgcaactgccccatctgttacttcatgtcgaaagaagaagaatgaagaagctgctttcttggacgatttgaaggaccacattgatgagtttattaatgcttctatggatgaacacaaaacttgttttaagaaaacaattcagaagatgtttggtatgtccaaggctgttgcagaaggtcagtccaatgcttccaaagaagttgaaagttctctgcctcttcagacaactgtacaagactagatttcttgcttttgaaccactaggttttaaccgaggcgtgtggttataccacccacatatttagttatattaggctatttgaaactaaattttgtttgtgaaaactacattcat

SEQ ID NO: 17614 - DNA, 378 bp, Glycine max
  Clone ID: LIB3106-103-Q1-K1-E2
gcataacttgcatagactattgattaagaaagctattgtcattgatttgctagctccaacaatgggttctagcagattatcattcattttagtacttgtgcttgtaaccttttcatccatgatcattgactcaagggttgcagaggcacgtaccctgccaaaatcagccttattgccttccaaagttgatatacctactgttgttcctcttccactggtggcaccactgccaaatttgcctgttactctccctccagtgcctgaactacctgcagtacctaaagtaccaattcctgaagtaatagttaataacgccaaaataatcccttgagtacctatgatctatccagtcactactacttattttgtcacttgcta

SEQ ID NO: 17615 - DNA, 386 bp, Glycine max
  unsure at all n locations
  Clone ID: LIB3106-103-Q1-K1-E3
tcggtccactntgttntaaaagaacttgtgcggaagtcaatttcagaaactgaggaactaaaaagatttcccacactttcaaatgatatagcaactgctgcaaatgaagctctggaaaaattccgagaagaaagcaggaagacagttttacggttggtcgatatggagtctagctatttaacagtggaatttttcaggaagattcattttgaaccagaaaagaatccaaatggaccaccaaatccaaatcggaatggtccccccaatatggatagttatactgacaatcacctgcgcaaaattggatcaaatgttaattcctatatcggtatggcttgcgatacacttaagaatactataccaaaggccgtggttcattgtcaaag

SEQ ID NO: 17616 - DNA, 452 bp, Glycine max
  unsure at all n locations
  Clone ID: LIB3106-103-Q1-K1-E4
tcggaccaagccttccgccaacccgtccgatcagttttgcctatggagccttgaggaaatttttgcctgaaaagaaggttgaggccgtgaaaggcctttcaatcactgctgatggaaatggcgttgtttttgatgtagcagctaaagatttagacttatatcttaacggtcaggaaaatgcctcgaatgtaagtttagagatagtgaaaaaattgccacagttgcaacagatggagcaccaccaaagaggtggcagatttggtgatggtggtggtcgtggttaccgcgttggtggaagaggtggaggaggcaggaatggtaggttctccaatggtggcggaagacgttnaccgtggcggcaactggggtggaaagagatggtgaagctgacaaagggacttttaaagggggggaagggtttttttttggggtcaaaagggtctttttttttt

SEQ ID NO: 17617 - DNA, 365 bp, Glycine max
  Clone ID: LIB3106-103-Q1-K1-E6
tccacgcgttcgatctgaatgcatgtctgctattgctggttcttacggatacatagctccagagtatgcctacactttgaaagttgatgagaaaagcgacgtgtacagctttggagtggttcttttggagcttgtaacaggcaggaaaccggttggcgagtttggcgatggtgtggacattgtacaatgggtgagaaaaatgacagactcaaacaaggaaggagttctaaaagttcttgatcctagtacttcctcggttccacttcatgaggtgatgcatgttttctatgtagccatgctgtgtgttgaggaacaggcggtggagaggccaactatgcgcgaagttgttcaaattctgaccgagc

SEQ ID NO: 17618 - DNA, 385 bp, Glycine max
  Clone ID: LIB3106-103-Q1-K1-E8
cttttaatttcctagatctcccaaacaaattgtagcataagtcccatggccaaagagactagtgttgtttatctatatcccagcaaatcacaagtttggggtgagaattttgatcataaaaaacttgtaataacaacactagctgctaatggaaagaaggaggagagtaatggagcacctaatgacacatatcctgcgtttcccgggtggtatgctgatgtttcctggccaggagaagcacacacatataaaatagaaaagattctattccacgggaaatcagaattccaagagcttcttgtatttgagtcttctagacaaggcaaggttgcaattcttgatgggcatatccagctgacagaaaacgatgaatttgctttaaccc

SEQ ID NO: 17619 - DNA, 449 bp, Glycine max
  unsure at all n locations
  Clone ID: LIB3106-103-Q1-K1-E9
cccacgcgtccgcccacgcgtccgcccacgcgtccgctttctgccacccccacaaaagggtgcttgcgtttctttctgtgatctcaaccatgaagcgtccactcacaccttcagccagcggcatgaagactaacaagaaagccaaggcgatggaaaatgacgaagacgtggaggggctggggcgtttcgacgacaaccttctgttcgaggtgttgaagcacgtggacgcgcggacgttggcgatggcgggatgcgtgaacaaacagtggcacaaaactgcgcaagacgagaggctctgggaactgatctgcacaaagcagtgggcaaacacagggtgcggtgagcaacagctgcgatccgtggtcctcgcgctcggtggcttccgtcgcctccacgcactntatctcttccctctctgcaaacctgaacaactacaacaactaacatca

SEQ ID NO: 17620 - DNA, 385 bp, Glycine max
  Clone ID: LIB3106-103-Q1-K1-D3
caattaacatattctcctctcattctcactcaaaacacaaaatcctaactaaggtgaaaatgaaggcatcacgcattgctttgttcactttggtggtgcttctttttgtggctgaagttcaagtgtcaaaggcagtgacctgcagcccagtgcagctgagtgcatgtgtgagtgcaataacctcttcaacccctccatcaaacctatgctgctccaagatcaaggaacagaaaccatgcctttgccaatatctcaagaaccccaatctcaagaagtttgctgactctcctaatgcaaggagagttgctaacacttgtggaactcccttcccaaggtgctaaggtgttactaaatttgaagtggttttaatttctctgccttgatt

SEQ ID NO: 17621 - DNA, 385 bp, Glycine max
  Clone ID: LIB3106-103-Q1-K1-F1
ctcacgcgtacgtactgccactaagaaggatgccgctggatccttgctagagctgctacgtgcagcccttatactcatgcgctgaagggctagctacttactacataccagttaagaagccaccagtgtacaaggctacagtgtacaagccatcagtgtacagaaccaccaggattatgagccagaaccaccggcttacaagcctgaaccacggtgttactagccaccatatttgaagactccatactggataccaccgtatggaacgtaccctgcattttaggacagcaaccattcctaaagcatgcaatgacgtctattatctactcaattgataagaagaactgctttgagttttatagcatcgtgatttacaacttcttat

SEQ ID NO: 17622 - DNA, 450 bp, Glycine max
  Clone ID: LIB3106-103-Q1-K1-C11
cccacgcgtccgagtctttcttggaactttgttactctcacacatgtctcgctccgtgcctttggtttcaaccatttgtgtcttgcttctgcttctggtggccactgagatgatggggccaacaatggtggcagaagcaagaacttgtgagtctcagagccaccgtttcaaggggccatgtttgagtgacaccaactgtggctctgtttgccgaaccgaacgtttcactggaggacactgccgtggcttccgtcgcagatgcttctgcaccaaacattgttaattttaaaaaattaattaagagtgctttgatagaagatgatagatctatcatctttctactcgtgttgttaattaaccactttgtgtttgagaataagggttacccattctactatgggtttctttgtttgcctcttactttatctagttagagatccttttatgaaa

SEQ ID NO: 17623 - DNA, 405 bp, Glycine max
  Clone ID: LIB3106-103-Q1-K1-C12
aaaaaagaagagaccaagagagagagagagagatggggcgcaagaacacaattttcttggcattggttgttactttgatcacgaaggagacaatggcagaacaacatgtagttggtggaagccaaggttgggatgaatcaacagacttcaattcttgggtttcaggccaaacatttaaggttggcgatcaacttgttttcaagtactcttctttgcatagtgtggttgaactaggtagtgagagtgagtacaagaattgtgatcttggcaatgcagtgaactcaatgagcagtggcaatgatgttgtgaaactgaacaagcctggcacacgttactttgcatgtggtacaatgggccattgcgatcaaggcatgaaggtgaagatcacaacagtgtctggctctg

SEQ ID NO: 17624 - DNA, 428 bp, Glycine max
  unsure at all n locations
  Clone ID: LIB3106-103-Q1-K1-C2
cccacgcgtccgaaccaaactaacaaggatcattcatggcttggttaagaaacctctcaaagtttgccaccatgaaaagagcatcatcatcatcatctcaaagacccaaaaacactgacccattttgtctattaccctccttcacttttttttccaacttcagcactaacaccattgaggagaagccctgtgtgaagccagttgagtataataattattcgggcttgcagccaacaaggcctcatgagaagccacgtgtggtggtgctgggctcaggttgggccgggtgcaggctcatgaagggcttggaccctcgtgtgtatgacattgtttgtgtctcacctcgcaaccacatggtcttcacccctctattagcctctaaacttgtgggttttttgggggganaaaaacccccttttttccctttt

SEQ ID NO: 17625 - DNA, 406 bp, Glycine max
  Clone ID: LIB3106-103-Q1-K1-C3
attcgactctctctgcactcacttctagggttttctctgcgctataagcaatcatggcggatgaaacaccaaatgagatgaaggaggaggttccagaaattgatccttttgatcctaccaagaagaagaagaagaagaaaattacaattgtagatcctgctgatgaacctgtggagaaattggctgagaagacagaaaacctctcagtttccgagggggttgagactgcatttactggtttgaaaaagaagaagaagaagcctgttgaaatgggtaacttgaatgatgagagtggagatgcaattgaagatttggatgatcaccctgaagatgatgaaggagaaatggttgttccccaggctcgttatccttgggaagggagtcgaatcggtttaaaaatttttta

SEQ ID NO: 17626 - DNA, 422 bp, Glycine max
  unsure at all n locations
  Clone ID: LIB3106-103-Q1-K1-C4
tcgaaaaaaaaaaattagaaaacaatatagatacgatcttttatcctataatcttatcaattatgcagatgagaaagactcatatatgtatggatatagatccctatttcaagtgaaaaaaaaccaagtgatttcttctaattacaacacgtataaaaaagaattattggatatcatagataatctctttatcaagaattatatatcggaagatgcgattctagatatggaaaaaaatatgtatagaaagtattttgattggatgggaatcaatagagaaatactaaatcgttccatatcgaatccagaattttgggtcttttcaaaatttgtgatattttatgacgcatataggggtaactcgcaggttataccaatcaaaattactttttttngtgtttttttttttccccttttttttt

SEQ ID NO: 17627 - DNA, 437 bp, Glycine max
  Clone ID: LIB3106-103-Q1-K1-C5
atcactttcgtcaccttcacagatacattcgttgcaatcatccatctcacttccacaaattcctccaaattctaaccaaacccttcactactccaaattccaaaacttcttcacactccttcttttccctcttctgttgcccgatcttctgcctccaagattttggtatttgggattgatcacctggagttggaaatggttaaaagttatggagtgttctgatttgcaaaagatatcatgttgcggtgcttagagggacttaagcctttatttgcttccatattacgatgttgtgacctggatatatataaccagccaagaggccttgaagatcctgaacttcttgctagagagactgtgttcagtgtaagcgaaatagaaaagccaaaccttttttttttaaccccccggaaaaataggggccccccttttttccc

SEQ ID NO: 17628 - DNA, 356 bp, Glycine max
  Clone ID: LIB3106-103-Q1-K1-C6
cccacgcgtccgcccacgcgtccggcagaactttgtttcccaatttccattgcctccgcttgcacctcgcaaccatgatcatgccggagaagaaccgcaaggagatctgcaaatacctcttccaagagggagtttgcttcgcgaagaaggacttcaatttggccaagcaccctgagatcgacgtgccgaatctgcaggtgattaagctgatgcagagtttcaagtctcgcgagtacgtgagagaaacttttgcttggatgcactattactggttcctcaccaacgatggcatcgagtttctcagaacttaccttaaccttccttccgaaattgtccctgctactttgaagaaacaa

SEQ ID NO: 17629 - DNA, 381 bp, Glycine max
  unsure at all n locations
  Clone ID: LIB3106-103-Q1-K1-C7
cccacgcgtccggaatattctgtggaagagacaggtggtgggcataaggcatcaaaactttcagtgtcagacagacaggttatgcattctggagggaataggagcagttcttcagaaatttctgcttcctcaatgaaaggctgtcacaaagagagagatgccattgatcaaggtactgctcctaatcgaagtaaagttgatgaaatttcaaaaaggaaacagcagcgtgaagctgttgatgctattctttactcatctttgatatctgcaaagaaggatgagacattaccaaaagtttctgctaaaaggcctttttcctcatttgttgctagtgggagtactaagccgtccaagacaaaaagtgcaagacaagatncaatg

SEQ ID NO: 17630 - DNA, 372 bp, Glycine max
  Clone ID: LIB3106-103-Q1-K1-C8
caagtagttgagaactaagaaggagaagcaaatggcttcctcaatgatctcttccccagctgttaccactgtcaaccgtgccggtgccggcatggttgctccattcactggcctcaagtccatggctggcttccccaccaggaagaccaacaatgacattacctccattgctagcaacggtggaagagtgcaatgcatgcaggtgtggccaccagttggcaagaagaagtttgagactctttcctacctgccagaccttgatgatgcacaattggcaaaggaagtagaataccttcttaggaagggatggattccttgcttggaattcgagttggagcacggtttcgtgtaccgtgagcacaacaggtcacc

SEQ ID NO: 17631 - DNA, 447 bp, Glycine max
  Clone ID: LIB3106-103-Q1-K1-C9
gttttaatgaaggatgccattcaccctacccttatgcagactctggaaggaactgctgttcttgttcatgcacgtccatttgcaaatattgctcatgggaattcttctattgtggctgataagattgcactaaagttagttggaccaggtggatttgtagttactgaagctggttttggtgctgatattggagctgaaaagtttatgaacattaagtgtcgttatagtggtttgacacctcaatgtgcgattattgtggcaactataagagcactaaaaatgcatggtggagggcctgcagttgttgctggaaaacctcttgaccatgcatatttgactgaaaatgttgccctggttgaggctggttgtgtgaatatggcacgacatatatcaaatacaaagtcttacggtgtaaatgttgtagttgctatcaacaagttttcaact

SEQ ID NO: 17632 - DNA, 417 bp, Glycine max
  Clone ID: LIB3106-103-Q1-K1-D1
ctctaccggtgcaaatttctactatttttcaatggcttctgcagatgttgagttccgttgctttgttggtgggcttgcttgggtcaccggcaacgatgccctcgagaaagccttttcaatctacggcgacatcgttgaatcgaaggttatcaacgaccgtgagactggaaggtccagaggattcggatttgtgaccttcgcctcagagcagtcaatgaaagatgcgatcgcaggaatgaacggccaggaccttgacggccgtaacatcactgtcaacgaagctcagacccgcgccagccgtggtggtggtggaggcggtggtttcggaagtggtggtggatacaaccgcggtagcggtggatatggtggtggtggtggcggcggccggtataatcccggggtttggggggtttttcc

SEQ ID NO: 17633 - DNA, 331 bp, Glycine max
  Clone ID: LIB3106-103-Q1-K1-D10
cgctctctattttcgtcctttctacctttctccgatcccaatccctaatctttctctcttcaaactctaattttttcatctggggagatcggctgacgaatcgagaggatctcatcgctcgcgagggattagggtttcaatcgatcgcatcacatatcacaatcatgtttagccggatgttcggtaaacctaaacaggaaaccaatgctgttgccactttggacaagctaaacgagacacttgaaatgctggagaaaaaagagaaagtgctccttaaaaaggtggcagcagaagttgaaaaggccaaagaattcacaagggggaagaacaa

SEQ ID NO: 17634 - DNA, 419 bp, Glycine max
  Clone ID: LIB3106-103-Q1-K1-D11
cattgactcatcaaattataacccattaattgggtggatgcatggagctcagatggttgcatttaatatgcagggatgtgggagatctctttggttgatgcatggaatgttcagagccaatggagggtgcggttatgttaaaaaaccaaattttctattggagactggtccagatgacgaggtcttcaatcctaaagctaagttacctgtgaagactactttgaaggtgactgtatatatgggggaaggatggtactatgatttcaagcatacacactttgatcaatattcacctgcagacttctacacaagagtggggattgctggagtccctaatgatactataatgaagagaactaatgcaatagaagataattggttacctacatggaatgaggcatttgagttccctctcactg

SEQ ID NO: 17635 - DNA, 439 bp, Glycine max
  unsure at all n locations
  Clone ID: LIB3106-103-Q1-K1-D12
ggatatgctcggaatgggtttggtgaagaggccacaagcttctttcgattaatgaagatgaaaagaatacatgttaataagttgacagttttaagtgtcttgatggcttgtggcacaattaagtctttgctatttggaagagaagttcatgcacagataattaaaagtaatatccataccaacatatatgtaggaagcactttggtatggttctattgcaaatgtaaagaatactcctatgctttcaaggtgctccaatatatgcctttcagggatgttgtttcatggactgccattatctctggttgtgccaggctcgggcttgaacatgangctctggagtttttgcaggaaatgatggaagaaggcgtgttgcctaattcctatacttactcgtcagccttgaaagcttgtgcagaactggaagctccaattcaag

SEQ ID NO: 17636 - DNA, 392 bp, Glycine max
  Clone ID: LIB3106-103-Q1-K1-C10
attttcgtggcattcgtcactctcgtgtcgggtgaaggcgaaaaccaaatcaagatgctgagagtgggcgcaaagaggcttttgggaacgacatctttgggcgttagggttccggcgaggctgtaccacgagagggttgtggatcactacgacaactccctgaacgttggatcgttagacaagaacgacccgagcgtggggacgggtttggtgggggcgccggcgtgcggcgacctgatgaatctacagattaaggtcgacgactaaaccggaaaaatcgtcgatgctcgattcaagactttcggttgtggctcctgcattgcttctttctacgtggatactgactgggggaagggaaagcaaatggaggaagttctgactataaaaaatac

SEQ ID NO: 17637 - DNA, 267 bp, Glycine max
  Clone ID: LIB3106-103-Q1-K1-A10
attttcccttggcacattgctgtgaaaattattgatcctcttatggagtgccttggggagtggaatggagctcctcttccaatctcttaaatttattgtaactcttaacaaatattttatttgtacctatgcaagaaaaaccataatcatttggtttgtctatcatttaacaaatcagtttgaaaagcctaatttcaatgttccttcaatgtcaaataggaccttgtaattttaatattttaatggaatttcatattcacatgttct

SEQ ID NO: 17638 - DNA, 416 bp, Glycine max
  Clone ID: LIB3106-103-Q1-K1-A11
gaaaatgtcttgctgcggtggtaactgtggttgcggaagctcctgcaagtgcggcaacgggtgcggaggctgcaagatgtacgcagacttgatctacactgagtcaaccaccaccgagaccttggtcatgggagtggcacctgttaaggctcaatttgagggtgctgaaatgggtgtgcccgctgagaacgatggctgcaaatgtggaccaaactgctcctgcaacccctgcacttgcaagtgaggtgttgggagagcaagcttcaagcagagatagcccttaattaggaataatgataaactattaatgtggagctaaaaacttatgtattatgtctgtgatggttttcgtgcactctggtgttttgtgttaaacaaacatccttagaataaaggggcatgtcttgcctttcaac

SEQ ID NO: 17639 - DNA, 448 bp, Glycine max
  Clone ID: LIB3106-103-Q1-K1-A12
aaaatatagaacacactaccctcaacatagtaaagcagctggtgcaagtgaagcgggggctcaaaccatgttgctcatgtctagtgtctctagcagttattccgtggatttgaagaaagaccttttcctccaattgcagagtcaaagtttaaggcctaagttctctcaactctcattcaacccacttccaccatcaacttcttccttttcttcaccccgtacattcacaaccctggctctcttcaaatctaagacaaaagccgctcctgctaagactaaggttacaaagccaaagcaaaaggttgaagatggtatctttggcacttctggaggatttggttttactaagcagaacgagctctttgtgggtcgtgttgctatgcttggttttgcagcatcatttgtgggtgaaggaataactgggaaaggaatcctagcacaattaaac

SEQ ID NO: 17640 - DNA, 417 bp, Glycine max
  Clone ID: LIB3106-103-Q1-K1-A2
tccactcgttcgcgccgaaggttcattcaatctccgaaggccttcaccggattgcaaccatgtcgaggagaaaggttagagagccaaaggaggaaaacgtgactctgggcccagctgttagagatggtgaacatgtttttggagtcgctcgcatctttgcctccttcaatgacaccttcattcatgtcactgatctgtctgggagggaaacacttgtccgcatcactggcgggatgaaggttaaagctgacagagatgaatcatctccatatgctgctatgcttgctgcgcaggatgttgctgctagatgcaaggaactgggcataactgctcttcatatcaagctccgtgccacaggtggaaacatgacttaaacaccagggttccccctttggggtttgggccccttttttcccc

SEQ ID NO: 17641 - DNA, 167 bp, Glycine max
  Clone ID: LIB3106-103-Q1-K1-A3
tcgatttattgtagcttttgcattgcatatgtcagttaatgtaaaatagaattatgcgtgtcaatttactttggattgttgtcaaacattcaacaaagaagttgtagtttgctgaattggttatgatcgcgcaatggtttttgaaaattagcttcattttggtttgc

SEQ ID NO: 17642 - DNA, 383 bp, Glycine max
  Clone ID: LIB3106-103-Q1-K1-A5
tcgtccacgcgttcgtccacgcgttcgtccactcgtccgatgcggtacataagtagatgatgctgtcctgcttgtggggtatggtacagaaaatggtgaagattattggatagcaaagaattcatatagtgataaatggggagataatggctatatcagaataaaaagaaaactgagcacttgtaaatttggaatcgagggttactatcccattataagagtcaccgatcaacaagcccccaaatattcgtgacaatggcatcggctaactgagcccattgaggctttggaagtcattaataacgaggccaaagtttgatggagactatctttgagctattttatctttatacaagtatcgtaatttctgttccctaaatcat

SEQ ID NO: 17643 - DNA, 197 bp, Glycine max
  Clone ID: LIB3106-103-Q1-K1-A6
tcgtccacgcgtccggttgagaactaagaaggagaatcaaaatgcttgctcaatgatcggttccacagctgttaccactgtcaaccgtgccggttcctgcatggctgcaacatgtcactgtgcctaaatgcatgtctgtctgttgaacgaggtatacccactatgacagtaccttctgtgctagcaacggttgatga

SEQ ID NO: 17644 - DNA, 69 bp, Glycine max
  Clone ID: LIB3106-103-Q1-K1-A7
tcgcccactcgtccgggatgcatttgtgtttttttaaaaaaaaataatacaaaaaagggaaacggaaaa

SEQ ID NO: 17645 - DNA, 246 bp, Glycine max
  Clone ID: LIB3106-103-Q1-K1-A8
tctgaatttgcgggttttggatttggacttggtcgtcaacacagtctaattaatatgtttgtgctccttcgcttatgaatcttcttcttcttcttcttcttgttcctgcaacgcactgaattcgatcaatcaatccatcttcaattgctttgtttcgatcggaggaaaatggccgatcagttatcgaagggagaggaattcgagaaaaaggctgagaagaagctcagcggttggggcttggttggc

SEQ ID NO: 17646 - DNA, 357 bp, Glycine max
  Clone ID: LIB3106-103-Q1-K1-A9
cccacgcgtccgtccacgcgtccggaagaacaagtagttgagaactaagaaggagaagcaggtggcttcctcaatgatctctgtgcccagctgttaccactgtcaaccgtgccggtgccggcatggttgctccattcactggcctcaagtccatggctggcttccccaccaggaagaccaacaatgacattacctccattggtagcaacggcggaagagtggcaatgcatgcaggtgtggccaccagttggcaagaagaagtttgagactctttcctacctgccaaaccttgatgaagcacaattggcaaaggaagaaaaatatcttcttaggaagggaggatttccttgcttggaa

SEQ ID NO: 17647 - DNA, 384 bp, Glycine max
  Clone ID: LIB3106-103-Q1-K1-B1
ctgcttcctcgtagtacttcattgagagagacatggacactgtactaagtactacgctgctgctcatgttggcatgctccatcgtgcatgttcttcgttcactacaagcaagaatgagaagaaaatcaaactacaatcttccaccaggaccctctcttctcaccatcattagaaactctaaacaactctataaaaagccacagcagacaatggccaagcttgccaaaacctatggccccataatgcgtttcaccataggccaatcaaccaccatagtaatctcctcaatagaagccacccaagaggttctccaaacccatgactcattattctcggacagaacaaaccccgacatcacaacctcgtacaaccacaaccgttaca

SEQ ID NO: 17648 - DNA, 339 bp, Glycine max
  unsure at all n locations
  Clone ID: LIB3106-103-Q1-K1-B10
agcccaatgtcaattattttttccaaatagaacataaattgtatcattaccaatcaggaacataaaattttcaaattaaaaattccttacaactacaaaaatatgagtacaaaccccaagtcaataatcatcaagggtggatggataagtgagatttatcaatttgcaaaagtcagctggctctactctgctgttggtacttaaactacattcccatttgtttttgctttttgagatttcatcatcctgtatttttgggttctgttttcggacttcaatggaaattaatggatgagaactaatgaataagctctcncncaaaaaaaataacaattaggg

SEQ ID NO: 17649 - DNA, 388 bp, Glycine max
  Clone ID: LIB3106-103-Q1-K1-B3
tcggttgtgggatacagctgggcaggaaagatttagaagtcttattccaagctacatcagggactcatctgtagctgttattgtatatgatgttgcaagccggcagactttcttaaatactgctaagtggattgaagaggtgcgaacagaaagaggcagtgatgtcattattgttcttgttgggaacaaaactgatcttgttgagaaaagacaagtctctatagaggaaggagaagcaaaagcacgtgagctcaatgtcatgtttattgaaactagtgctaaggctgggtttaatataaaggccctatttcgaaaaattgctgcagcattacctggaatggaaacactatcttctgcaaaacaagaagacatggttgatgtaaaactt

SEQ ID NO: 17650 - DNA, 451 bp, Glycine max
  Clone ID: LIB3106-103-Q1-K1-B4
cttccgccattctttgaattggccaaaacctactaacaaattccccatggccattaatggggctcaaccttttcttccccaaaactttgctggtaatattaggctacctgctttaacctgaaccggtaaaggtccttcctaatttccatcaaccagtggccccttatgaatggtaatgataatgggcccatgtgaataaggattcttccggtgggccctatgggaggaccccagagtgatgtcctctaaagctgaaatgtggtactggagtttggtggctgtagtgtgagattggcgggactatataaagcagatagaggtgcacacaattatttcttggaaaagggtgttgttgatagtcgtcctgatcaacatcctgaattctttaatttaaccccatttttttaaaatttttggggaaaaaaaagggggtgggaaaaaattttttttt

SEQ ID NO: 17651 - DNA, 381 bp, Glycine max
  Clone ID: LIB3106-103-Q1-K1-A1
gcacgccacttttcagttcaagtagctctccgcaaaggccaaaagagtggttggaaactgcttttgacttctcaagatttgattccttcagaacacatgatagtgtacctttgcctgctcgggagacgacagaacaatttgattcagtgcgcaacagtgcggattttgaccatgctcatgggtttccagcttttgatgactcggatcccttcggctctggcccgtttaggacttcatcagataatcaaactccaagacgaggatctgataattggagtgctttttagtttagcaattacacctgatgcattatttctgttttcagactttccgactgttgcctctggtggagtgggttgtctgtcttgctatttggaacct

SEQ ID NO: 17652 - DNA, 310 bp, Glycine max
  Clone ID: LIB3106-103-Q1-K1-B6
tccacgcgtccgcccacgcgtccgcccacgcgtccggaagaatgatagttagaactccaccgtcacccaagaggccacgcgccgatggcgatgacggacagctagtcatctacgaggatccgccggagtcatcccctccttcggagcaaatgctctgcacctatcaatgtcgccaaatggtcaaatccgattttattgatgccttaagcaaagctgaaaatcaagctcgtcattatcaatccaagtttgagacattggagcctcatttccgcaaagttgaatctgagaggaagatatttcaggaccaatt

SEQ ID NO: 17653 - DNA, 443 bp, Glycine max
  Clone ID: LIB3106-103-Q1-K1-B7
gggatttcggccgtttgctccccaaaaaggaaagaagcagattctgtcctttgaaatcaacaagaaaagatgtcaggtgaagaggtagctgttgcagttgaggtacctgctacttcaattccaggtgagccaatggacatcatgactgctctacagcttgtgctgagaaaatctctggcctatggtggtcttgcacgaggtcttcatgaaggtgccaaggtgatcgagaagcatgctgcacagctctgtgttctagcagaagattgtgaccaacctgattatgtgaaactggtgaaggctctttgtgcagagcacaatgttagtcttttgacagttccaagtgcaaagacccttggagaatgggctggtttgtgtaaagatttggatatttttcccaaattaaaaaggggggggggggggaaaaaaaaaaaaaaggggggggg

SEQ ID NO: 17654 - DNA, 247 bp, Glycine max
  Clone ID: LIB3106-103-Q1-K1-B8
tcggatagagataactagaaacagcgcgatgaacatgaaggtgcttgttttcttcgttgctacaattatggcagcatggctgtgccattcgtactatctggcacctgttcggatgaacactggctatggcgcccgtactcctgacgtgaaatgctcagattggaggcttgctggggaagctcacaacaactcttgctttgagaccatttctgaaaactgccttgaagaatcacatgaatacacacat

SEQ ID NO: 17655 - DNA, 344 bp, Glycine max
  Clone ID: LIB3106-102-Q1-K1-G3
gtgagtttgttgatcgagataactagaaacagtgtgatgaaaatgaaggtccttgttttctgggttgctacaattttggtagcgtggcaatgccatgcgtacgatatgttccctctccgaatgaacactggctatggtgcccgtactccggaggtgaaatgcgcaagttggaggcttgctgtggaagcacacaacatctttggctttgagaccattcctgaagagtgcgttgaagcaacaaaggaatacatccatggcgaacaatatagatcagactccaaaacagttaaccaacaagcttacttttatgccagaaacctcgaagtccatcccaaggacacatt

SEQ ID NO: 17656 - DNA, 432 bp, Glycine max
  Clone ID: LIB3106-102-Q1-K1-G4
gttcggggcttgtgctgtttgttttcccaggttttagagctccaaaccttcagatccacctgattcgtctccagatcttccttcctggataacgttttcgggttcgagaaggcacttgtgttgtttttcgtacgaaatggagactaaacagagttcggtgacggttacgctcagttacggcgcgttgacgtgcgccgcggaatttctcgcgactttgctagcttctgctgtcgtcaaagcctcgcttttggccccggatctctaccggctgctattgatcaacacgcctactgccaaaggagagagcaaaattcagagtgaagacaagcaacgtgatgcagagggagaagatggtaacgatgatgaaggcgacgatgacgacgatggagatggtggatttggggagggtgaagaggagttgtcatctgaaga

SEQ ID NO: 17657 - DNA, 267 bp, Glycine max
  Clone ID: LIB3106-102-Q1-K1-G5
gagcgccgtcctttttttttttttttttttttttttttttttttttttttttttgggttttggggttttttttttgggttttggtttttattttttttttttgggttttcccgggccattttttacttggaaaggaaaattggtactaaacggggccccaaaggtttgttgcaggaaacttgggtccacattttttcctcaaatgacctccatgttaattaggaaaaaagaccttggaaggggcaaagctttaataattggagcttt

SEQ ID NO: 17658 - DNA, 283 bp, Glycine max
  Clone ID: LIB3106-102-Q1-K1-G7
ttcatggttggtttgatccagtaatagttactccctctggtctctattataagcagcaaaagtcacttattttttggtctcaaatataagcaaaagttaactaactttgccttattttatgagactatcttcaaaatgtccttcattcaatagggccaaagactttttaatgcttgatattaagttccaatgaatggcagtttaggggaaaaaaagcttatttttgttgtgggattaacagaatttaatgaaataaactaatttattgataagtgtgaaatca

SEQ ID NO: 17659 - DNA, 424 bp, Glycine max
  Clone ID: LIB3106-102-Q1-K1-G8
tcgattatcagctctgcaagttctgatttgcgcaccacaacacaagtctccgtttgggtggcatgaatcacatccggcatgggtgcaggtcaagctatgaaaagaatccctcgcatcaagttccctcagagacatcccaaaccttcttctggttctacacctgagactcaagcttcgtcttcaacaactgatgtcagtctagcgttcttttcaagttcaaatgcctcaacctcagttggagggaaggcctctcttcaacccaaaagaactccagtgtccaaagaggagattgaggcaattttgttgggtggctgcttctaatcgagcgtgttcaagggcagactatattgtgcactcattttttgtggctttaattcatcattttccaaagtttatggttcttttttggtgccaagtgttggca

SEQ ID NO: 17660 - DNA, 423 bp, Glycine max
  Clone ID: LIB3106-102-Q1-K1-H1
atcgaagatggctctgcccaaagctaaggacatcgtgtcgtccaattgcgtcgtcgttttcagcaaagcctattgccctttctgcgtcgatgtgaacaagctcttcggtgacctcggtgccaattacaaggccatcgaactcgacactgaatccgatggaaaagagctccaagcagcattagttgagtggacggaccagcgaaccgtgcctaatgtgtttattggtggaaaccacattggtggctgtgactcatcaactgccctgcacactcaggggaagctggttcctctgctgatatctgctggagctgttgccaaatcaactgcttaaaggatctcccatttctaggttatgcagttgaatcaaacataaaacccaagtagctgggtcgggtatataattcaggtcccagaaactaatgt

SEQ ID NO: 17661 - DNA, 399 bp, Glycine max
  Clone ID: LIB3106-102-Q1-K1-H10
ccgtaaaagtggacaaggaaatatatttattaagaatttggatagggcaattgaccacaaggcattgcatgataccttttgtacatttggaaatatcctttcgtgcaaggtagctacggattcatctgggcaatcaaaaggctatggctttgttcaatttgataatgaggaatctgcccaaaaagctatagagaagctgaatggtatgctgttgaatgataacaagtgtacgtgggacccttccttcgcaagcaagagagagaaagtgctgctgacaaggcaaaattcaacaatgtttttgtgaagaatctatcagaatcaaccaccgatgatgagttgaagaacacttttggtgaatttggaactattactagtgctgtagtaatgagggatggggat

SEQ ID NO: 17662 - DNA, 295 bp, Glycine max
  Clone ID: LIB3106-102-Q1-K1-H11
ctggattctttccgctgtagatacaaggaagcaattgatgaatcagtgttaacgaataagaagtataaagatcagtgggcttgaaaaggattagaagtgcttaacctaatgaaacagctagctgctgccaaaggccaataggaaatttgcatggttgtatattaaaggatgtaatcccacatcctgagtcatgtcatttttttgtttatcatttatagatgggtccatcattccaagtggtcttattaatgtgtaaatcttatgccaatagtgaaagcttgatagatgcatgctg

SEQ ID NO: 17663 - DNA, 242 bp, Glycine max
  unsure at all n locations
  Clone ID: LIB3106-102-Q1-K1-H12
cccacgcgtgcgggccaacacattcgtgcaaggaaaaccctttcttccagttgcagcaggtgcgccactaaaaatcaggttcggagagcggttcantgcggtgtgtggtgcaagaagaaggagatacacccgcaattctacgaggaatcgaaggtgtactgcaacggggagctggtgctgacgacaggtgggacccagaaggaatacgtggtggacgtgtggtcggggaaccacccctttta

SEQ ID NO: 17664 - DNA, 424 bp, Glycine max
  Clone ID: LIB3106-102-Q1-K1-H2
attgaataaagctcagcgtaacgtcctcacgcacatcacattacaacacattgcaggcacctgaattatggataatgcaattgggggacacagagttctgattgaacatcttcaaccaatttcttacacgagaaatgtctcctctcaaacgcatcaatctacagatctctgagctatcattatgtaatgctgggaattctacgcatggtcaaacaagtggatcagatgaagaagtggagatagaacatgcatatcggactgacatctgcaaagcagagcgtgggggctttaaggatacccttccatatgacctgattgacacaactctcaacgctgtactacagaatacaaatgttgaccctgcagaagaaggagatattgtcgccggcacagtactggcacctgaatcagatagacgaatcga

SEQ ID NO: 17665 - DNA, 388 bp, Glycine max
  Clone ID: LIB3106-102-Q1-K1-H3
tcgcccacgcgtccgcttttgctttaccaaattccaatttccaattcaaaaccctaactccgttggaagcaccaaatcgtgatggcgccaaaggcagagaagaagccagcagagaagaagcccgcggaggagaagaaatcgacggtgggagacaaggctccggcggagaagaagccaaaggccggaaagaagcttccgaaggagggaggcgccggcggagaagggaagaagaagaagagaaacaagaagagcgtggagacatacaagatctacatcttcaaggttctgaagcaggttcaccctgacattggtatctcaagcaaggccatgggaatcatgaacagcttcatcaacgacatcttcgagaagcttgcccaggaatcttcta

SEQ ID NO: 17666 - DNA, 194 bp, Glycine max
  Clone ID: LIB3106-102-Q1-K1-H4
cggacgcgtggggaaaaatattaatatcccacataattaatacgtacgtagttctgaacatgagaataatccttttggagcaagtttgtaggccgtcttaaatatatgttcaagttcaaccttgtaagttcttatcacatattagacctcatcgccaaaatagaaacagtcagatcgaatggctagatttatag

SEQ ID NO: 17667 - DNA, 447 bp, Glycine max
  Clone ID: LIB3106-102-Q1-K1-G2
cccacgcgtccgctacgggatgaagaagctaggagattgagagcagctggtaaagctaatgctgatggtgtcaagaaatctcgtccacgtgagcgagttgggaggggaattgcagttccagaggccaatgccgaactgcaagcaaatattgatagacgacggctgatcacacattcaaatgctaagagcaagagtgagaagtttcctcctccccaccaagatggagctctaggctatcctttgggttcttcacatcacatggatccagtttttgatccccctgatgttccatttagttctacaaacttctcacaacctaaagcaaatatccaaacctggtccggcccattggtagatccttctggtgtgggcgtgccgaggagaaagaagaaacatggcaagtgatgagcatcatatacaatcaaattcatcaaaggaggactcaaa

SEQ ID NO: 17668 - DNA, 379 bp, Glycine max
  Clone ID: LIB3106-102-Q1-K1-H5
gttgatcgagataactagaaacagtgtgatgaaaatgaaggtccttgttttcttcgttgctgcaattttggtagcatggcagggccatgcgtacgatatgttccctctccgaatgaacactggctatggtgcccgtactccggaggtgaaatgcgcaagttggaggcttgctgtggaagcacacaacatctttggctttgagaccattcctgaagagtgcgttgaagcaacaaaggaatacatccatggcgaacaatatagatcagactccaaaacagttaaccaacaagcttacttttatgccagagacctcgaagtccatcccaaggacacatttgtgttcagtatagatggcaccgtactctctaatattccatac

SEQ ID NO: 17669 - DNA, 404 bp, Glycine max
  Clone ID: LIB3106-102-Q1-K1-H6
cccacgcgtccgcccacgcgtccgttcactttcttccttgtattggtagcccaggcaaaacggccaatctgactttgcgatgtgtcaacggcgactcaaaagcaaagcccggacatagtttgtcttcacgtgggtttaacaaagggttgcttacagagtttcttggcattctgtccacctccacttcttggccctatctacgtactcggaggtggatatactgccaatagagctgtgttggcttctctttgtcaagcctccgtgatactataaatctcagttaaatacataaacactgttttcccatttttcttttctggctatcaattatatgaggatcccaccggtcgtttgcaaaaaaatgctaagaaatcggataaagagtagaacgcctcgagtcgctt

SEQ ID NO: 17670 - DNA, 351 bp, Glycine max
  Clone ID: LIB3106-102-Q1-K1-H7
tccactcgttcgcccacgcgtccgggcttcttcaaaaagtagttcaagagcagtactactaatttcagctatcaatgaaataaaaccatagattgttttttttttaccttgttgtgggatttgaataatatggacgaggtatcagattctgtaaaaaaaagtcttttaacttttcgttttaggtctagtggcagtgagatttggataatatgcatatcaaattaaggattcaaatcttgttattgtaaaaaaagaagtctttaatttctcacttctagttctagtgctgttgctgctgttgttcttatgtgatgtaagttgaataaatatgatttggtgattgtactttgt

SEQ ID NO: 17671 - DNA, 349 bp, Glycine max
  Clone ID: LIB3106-102-Q1-K1-H8
gggaaaagaaaaatcagctttcttcaagcaccctagatttcctctctctctctctaaaatggcgttctcttcttttctcggccgagtcctcttcgcctctgttttcatcctctccgcttaccaagaatttaatgcttatggagttgatgggggacccacagcaaaagcactcagaccgaagtttgatgcctttgcacatcaagtacattctaaagctggctttcaacttccagatattgatatgaaaattttagttgctggggctattgctctcaagggcctctgatggattcttttcatacttggcagctcttttggagctttccttttgcttttacatcaaatgatt

SEQ ID NO: 17672 - DNA, 435 bp, Glycine max
  Clone ID: LIB3106-102-Q1-K1-E8
ggccgtcctttttttttttttttttaaaataaaagaagaaatccattcagagtgccacaaatacaatcaaggaagtaatcatgtcataatttacatccatacaatggattaacacaaaggcaaaaagattgacatgaattttcaaaatgaagaagacaccatacacataaataacaactaatacaagcaagcacatacaaaaacaagagcctaagcccttgtcttgaaaggaatggctcggatgactatctggtgatacacagcatcaagggcagctccaatgaaaggtccaacccagaaaatccattggtcatcccatgcatggtctctgttgtagatgatggcagctccgaaactcctagctgggttaatgccagttcctgtgatgggaatggtagccaagtggaccaagaacacagcaaatccaatgggaag

SEQ ID NO: 17673 - DNA, 456 bp, Glycine max
  Clone ID: LIB3106-102-Q1-K1-E9
ctaatatcactgagttaggaaaatggggaagaagaagaagagaagtagggtttccgaagacgaggaaatcgaatccgataccaaccccttcgataaaaacgaaaactctctctatcaggttcttggtgtggagaaaacagcatctcaacaggaaataaagaaggcatactacaagttggcattgaggctgcatcctgataagaaccctggtgatgaggaagctaaagcaaagtttcagcaattgcaaaacgttattgctattcttggggatgaagaaaaacgggccgtttatgatcagactggttgtgttgatgatgctgaacttgcaggggatgttgttcaaaatcttaaagaatatttcagagcaatgtacaagaaagtcactgaagctgatattgaggaatttgaagcaaactatagggggtctgacattgagaaaaatgaattgattgatct

SEQ ID NO: 17674 - DNA, 335 bp, Glycine max
  Clone ID: LIB3106-102-Q1-K1-F1
ggaccatgtggaagctgcctatgtttggttgcactgatgcttctcaggtgttgaaggagcttcaagaggctaagactgcataccccaacggcttcatccgtatcatcggattcgacaacgttcgccaagtgcagtgcatcagcttcatcgcctacaagcccccaggcttctaagtgtgaaaaatttgcaaagcatttgtagccgtcaccccactttgtttgcttgtacttaaactacattcccatttgtttttgctttttgagatttcatcatcctgtatttttggtttctgttttcggacttcaatggaaattaatggatgagaactaatgaat

SEQ ID NO: 17675 - DNA, 122 bp, Glycine max
  Clone ID: LIB3106-102-Q1-K1-F10
cccacgcgtccgatacatagtcagtgtagcttataaatgtattgttatttgttaatcatcgggtcgttgaacatttgcagcagtgttaaatcatcgattcatttaacattttaagtagcagc

SEQ ID NO: 17676 - DNA, 453 bp, Glycine max
  Clone ID: LIB3106-102-Q1-K1-F11
gaaaatttgaaagacaacaacaatgctaatgaatagaagagactaggatagtagaatagcagcttatatatcttttgaacttggtaactttatccattttttaatgctatttgtcattttcaaggaagaggccttgtgtgctatgctgtcatccatagtaggataattgtatgccaatgtttttagtatttagaactttttcttacttcccacttcccattatagctttgtttgccatagcccatatgtaaagaatgattgcattttttgtatagtactaaataatttctatgctcaaagatagaggtttcccttatagatgatgacacgcttgctgaagatcaagccttgctcaaaggatccaagagagtgtcactattgtctttgattttctggatgttgaacatcttctctttttggaacttgatgttgagtttgtctttgtttcctact

SEQ ID NO: 17677 - DNA, 431 bp, Glycine max
  Clone ID: LIB3106-102-Q1-K1-F12
gtcttttacatggaaggttcttgctccatactctggcacccttgctgttcttgggactgggctctatgtcctatccttctctcttggtgctggtcctgtgcctgcccttcttctaccggagatatttgcttctagaattagagcaaaagcagtttctttgtcattaggcacacattggatctccaacttcgtcatcggcctctacttcttgagtgttgtaaacaagtttggtatcagctccgtgtacttgggattctcggctgtctgtgttcttgctgttttgtacatagctggtaatgttgttgaaacaaagggtcgatcattggaggaaatagaacgtgctctcagtgctttaacatgaaaatcttgcaggaaatgctgttgttcataattcctatgctgctcaaagaactggtgtatgctcttactac

SEQ ID NO: 17678 - DNA, 406 bp, Glycine max
  Clone ID: LIB3106-102-Q1-K1-F3
cttatttaatatgatatctctcaaaggcaaagtaaaaccatctcctccgtgtctctcccacactgattgcaaacacgaacaaggaattgaaactcctacagttgaatcagaaacactccacgcctacgctattgccttataatctttgttccacgcttttccctctcctcttcgcacacagccttccttcctagggtttcatccaattatgaactgtgaagtgtgccagctcaaggaactggaactggagcattttgagatacgcgaggtcttgcgatgcatattgcacacgatcgtctttcaccgtgccttgggtctcgtgcgccctaaagacgttgacttggagctatttgacgtcacttatgtgcaatgtggaaaggcagagcttgaaaagaaaatagatgag

SEQ ID NO: 17679 - DNA, 431 bp, Glycine max
  unsure at all n locations
  Clone ID: LIB3106-102-Q1-K1-F4
cccacgcgtccggacgacgccgttttgacccggcgaccgggaaatggtggagccggtggaggttcgctgcgaggagcagctgtggcttctgtcagattcgagcaatggtgatcggtcgtggcggttgaacttcgacgggtttcagctatcttcggagcacgcggagaagcaagtgaaaccccctcgcggactccacgactgttacggggttctaggtcaagaagataatattgcagagtactatcagcagcaggttgaagtgcttgagggctttactgaaatggatgctttagcagagcgtggttttattcctggaatgtcaaaggaagagcgagacaagttagcaagaagtgagacatttgccatcagagtgtcaaatgcagcaaacatggttctttttgttgccaaagtttatgcatcaatcangagtg

SEQ ID NO: 17680 - DNA, 369 bp, Glycine max
  Clone ID: LIB3106-102-Q1-K1-F5
cccacgcgttcgagaggcggttaggtggatctgctcttgcccaggcgtttgaccaagttggagatgagtgtcctgatcttgatgatgttccttaccttaaaaaggcctttgaaggtgttcaagaccttctttctgatgaattgatatctgctggtcatgacatcagtgatggtgggctgctagtttgtgccttagagatggcatttgctggtaactgtggtcttagtttggacttggcgtctcaaggtaccagccttttccaaacactctatgctgaagagcttgggttagttcttgaggtaaacaagaaaaatctggctttgggtatggataaattgagtaatgtggggagtttaactgaaatcattg

SEQ ID NO: 17681 - DNA, 400 bp, Glycine max
  Clone ID: LIB3106-102-Q1-K1-F6
tcgaacccactaagatggcttcctttgtatccttcctagtgctgcttcttgcagcccttatcctcatgcctcaagggcttgctacttactacaaaccaattaagaagccaccagtgtacaagcctccagtgtacaagccaccagtgtacaaaccaccggtttataagccaaaaccaccggtttacaagccgaaaccaccggtttacaagccaccatataagaagccaccatacaagaaaccaccttatggaaagtaccctccagtagaggacaacacccatgcctaaagcaagcaatgaggtctattatctacttaataaataagaggaactgctttgtgttttctagcattgtgatttacaacttcgtagcaatgcatattcttgactcttgcatgcac

SEQ ID NO: 17682 - DNA, 412 bp, Glycine max
  unsure at all n locations
  Clone ID: LIB3106-102-Q1-K1-F7
tccacgcgtccgctcaatcatccatagacatggtcaccgtcacttctgcagcaggttctatggcctcattcactggcctcaaggcatgcgcaggcaaagtgagtgccgccgcagttaaagtctcagctccccaagccacaaggttctgcggcatcaaggcttccctcaaagacgttggagtcgctgttgtggccactgctgcgagcgcagttctagctagcaacgccatggccattgaagtgttactgggcactgatgacgggtctctggttttctattccaactctttctccgtggcccctggggaaaagatcgtgttcaagaacaacgcatgtttcccccacaacgttgagttcgacgaggacgagattcctagcggcgtggatgcagggaaaatctncatgagcgaaga

SEQ ID NO: 17683 - DNA, 431 bp, Glycine max
  Clone ID: LIB3106-102-Q1-K1-F9
caggaacccgtgtgcatgtcttccattttgaccagaatttggatctccttcccattggtgagagtcttgagcttaataaaaagatcacacccggtttaagtgcttacgaggatgatcccgagcaagctgcagaatctctgattccacttttggaggaagcagaaagtgtagttcctgaggacttgcgtcccaacacacccgttaggctaggggcaactgcaggcttaaggcttttgaaagggaatgcttctgaacaaatattgcaagcggttagggatatgctgagtaacagaagtaccctgaacctacaatctgatgcagtaactattcttgatggaaaccaagaagctgcttatatgtgggtggcattgaactatctattgggcaatttgggaaaagtgatttcaaagacggtgggagtagctgatctt

SEQ ID NO: 17684 - DNA, 410 bp, Glycine max
  Clone ID: LIB3106-102-Q1-K1-G1
ccccccttaacttttcgaggagctgaacagattctgggggttcctttcttcttcttcttcttcttcttcttcttattattatgattattattattattattcatttttcattctctcctagttttttttcttcttcttggtgttatggttttgtcacagtctttctacgatatgttggagaaccctgcaatattgggtctgtgcacagttattggaatgttttttagtcctctgtgggtaacatttttctttggtgtcatcgttggatggttgtggaaaccgaaatgggcgacgttgggggaaaataaattggcgacttccctcggcaaatccttagattttgcctcacccttctcggcttcttcgtcttctaagtttccagtgtctcctatgaagagttggtctttctc

SEQ ID NO: 17685 - DNA, 374 bp, Glycine max
  Clone ID: LIB3106-102-Q1-K1-E7
ctctacctctgcatcgtcccacgtggcagctgagttgagatatcaagcagaagaagcactctggttctgaggcgcaacctcgtgccaacaaccatggcggtccctgctacatcctcagcccctgtccttcgacccatccgcaccaatcactccttctcttaccctttccgctctctgccctctcccgccgccagaaaacccctaaccgtcttcgccatggcccccaaaaagaaggtgaacaagtacaatgataagtggaagaaggagtggtttggagcggggatattctacgagggaagcgaggatgtggaagtggacgtgttcaagacgattgagaagatgaaaggttttgagcaacgtggataaaagcttgc

SEQ ID NO: 17686 - DNA, 452 bp, Glycine max
  Clone ID: LIB3106-102-Q1-K1-G11
agccttcaatcatatagcattctaagaaatgaagagccctaccattttcattctctttctacgtttctgccttctacacctcagtcctaccttcagccaccgctcaagtcgtggttgacatggaaggtaatgatcttcaaaatggtgggaaatattatgtgttgccagtaatagagtcatcatatggtggaataagagtagccgcaactggaaaagaaagatgccctctcactgttgtacaatctgccgatccgtatgataaggggattgcaacaattatttcaaccccatatcgagttcctgttatccgcgaaggctttcctttgaacattacgttcggtaattttgcagttatactgccttgtgtccaccttcgttctgagtggaccgtcgttaatggccaaccagaaagacccgcagttaaaattggttcgcccccaaatgcagaaaat

SEQ ID NO: 17687 - DNA, 285 bp, Glycine max
  Clone ID: LIB3106-102-Q1-K1-G12
aaaaaaaaaaaaaaaaaaaaaaaaaaaaaaataaaaaaaaaaaaaagggcggacaaaaaaagggaaaaggggcttacagtacacgggcatgcaacaaaaaaaactcttatataaaaaaacatgggctgccgtttattgggacccaatttaaattaccggggcttggaaaacaacgcttttttttaggaaaacctaaatgcaatccattggcctttctttaaaaaggatgatactggaaaaacctggccttatcccaattaaaaccccttgcacaacctttccttt

SEQ ID NO: 17688 - DNA, 434 bp, Glycine max
  Clone ID: LIB3106-102-Q1-K1-D2
cggacgcgtgggcttgcatagactattgattaagaaagctattgtcattgatttgctagctgcaacaatgggttctagcagatgatcattcattttagtacttgtgcttgtaaccttttcatccatgatcattgactcaagggttgcagaggcacgtaccctgccaaaatcagccttattgccttccaaagttgatatacctactgttgttcctcttccactggtggcaccactgccaaatttgcctgttactctccctccagtgcctgaactacctgcagtacctaaagtaccaattcctgaagtaatagttaataacgccaaaataatcccttgagtacctatgatctatccagtcactactacttattttgtcacttgctaaattaacttggtgttgccatcccatggtggttctggttctgttggggttt

SEQ ID NO: 17689 - DNA, 441 bp, Glycine max
  Clone ID: LIB3106-102-Q1-K1-D3
cccacgcgtccgggtcaagcagtttggaaggggcacccagagcgtcgaattcagcagagagagcaacaatctctacaacctcaattcgtgcaagtactctggtttggcaaacaagaaaactgttactgttcagcctgagggcaaagatcaggctgtgttgttggctacaaccaagacaaagaagcaaaacaagcccgctgcattgctccacaaatctgtgatgaagaaggagttcaggaggatggcaaaagctgttgaaaaccaggtggccaaaaattactacaggcctgatctcaagaaagcttgccttgcaaggatgagtgctgttcacagaagcctcaaagttgccaagtctggtgtcaagaagaagaatagacagggcgtgagagtcgctggtaggaagtgaaaaggaattgagaaagaatctgctgttcaatcttc

SEQ ID NO: 17690 - DNA, 427 bp, Glycine max
  Clone ID: LIB3106-102-Q1-K1-D4
ctttgattgaaaataatccaagtttttttttcacagttaatttatttgtggagaaagaaaaggaatgtctgcttccactgttggtcacaatttttgttccgtcgcttgttgcatttcaaattgcggccataaccgaaccttggttcctacccatcatcagtttcattcacccaattcccttttgaggttaaagaagcaaactttcctcacgaacatttacttcaagagttccagaacccagaaacctcgctccagttttgtagtttccgcagcacaatcgaattttgttaaagttctgcagaatgcatggaaagttggtagggatggaattgaggcaggcactaatctcgttcctaattctgttccaaggccaatagcaaggatttcagtaacaattgtggctttgagtgttacgctttttgtactc

SEQ ID NO: 17691 - DNA, 388 bp, Glycine max
  Clone ID: LIB3106-102-Q1-K1-D5
atcgagataactagaaacagtgtgatgaaaatgaaggtccttgttttcttcgttgctacagggttggtagcatgggaatgccgggcgtacgatatgttccctctccgaatgaacactggctatggtgcccgtactccggaggtgaaatgcgcaagttggaggcttgctgtggaagcacacaacatctttggctttgagaccattcctgaagagtgcgttgaagcaacaaaggaatacatccatggcgaacaatatagatcagactccaaaacagttaaccaacaagcttacttttatgccatagacctcgaagtccattccaaagacacatttgtgttcagtatagatggcaccggaactctctaatattccatactacaaaaaacat

SEQ ID NO: 17692 - DNA, 426 bp, Glycine max
  Clone ID: LIB3106-102-Q1-K1-D6
cccacgcgtccggtttcatttgtgaaactaacaacaacacaaggccatcatcatggcatctgcttccccaatggcaagccaagtcaagtccaccttcactaggactcttgtagctcccaagggcctctctgcctcttcaccacttcacctcgtgccttctagaaggcaatttagcttcactgttaaggccatccaatcagagaagccaacctatcaagtgattcagccaatcaacggtgacccattcattggaagcctggaaaccccagttacatccagccctttgatcgcatggtacttgtccaacctgcccgcatacagaaccgcagtgagcccactactaagagggatcgacgtgggcctggcccacggataccttttggtgggcccattcgtgaaggccggcctcttatgaacaccgagatc

SEQ ID NO: 17693 - DNA, 414 bp, Glycine max
  Clone ID: LIB3106-102-Q1-K1-D7
cccacgcgttcggcgttggtgcaaagcatccttcgtttcaatttctctctctcagcgctttgtgcaatcgaacctttcatctccaaagggatccacaggccgaaggagaaatggggctgacattcacaaagcttttcagtcggcttttcgcgaagaaggaaatgcgaattctgatggttggtcttgatgctgctggtaagaccactatcctgtacaagctcaagctcggagagatcgttaccacaattcctaccatcgggttcaatgttgagactgtggaatacaagaacattagcttcactgcttgggatgttggtggccaggacaagattcgtcccttgtggaggcactacttccagaacacccagggtcttatttttgttgtagacagcaatgatagggacagagttgttg

SEQ ID NO: 17694 - DNA, 434 bp, Glycine max
  unsure at all n locations
  Clone ID: LIB3106-102-Q1-K1-D8
tcgccgaaaatggctgtttcggctatcactggagcgaggctaactctagggatgtctctttcctgttccacgcgatcacgaaccgtcgcaatggccgtatctatcgaccccaagaccgataacaaactcactcttaccaagtccgaggaagctttcgctgcggccaaggagctgatgcctggaggcgtgaactccccagttcgtgccttcaaatccgtgggtggtcaaccaattgtgattgattcagtcaaagggtctcgtatgtgggatatcgatggcaatgagtacattgactacgttggttcctggggtcctgcaatcattggtcacgctgatgatcaggtgcttgcagctctgggtgaaaccatgaagaaaggaaccagctttggtgcaccctgtctgctggaaaacactntggcagagctggttatcga

SEQ ID NO: 17695 - DNA, 268 bp, Glycine max
  Clone ID: LIB3106-102-Q1-K1-E1
gttttggtttgaagaaaaatgaatctaaaggattcaaagttgatttgctctttcatactgcttaattttcttttcttcagttgttttgcagctgataatctcccgtgccctccaaaatctactatcccaccttcctcttcaccgcagaaatgccccaaagacacgctcaagtttggtgtgtgtggaagttggttaagcttggttaaagaagtaattgggacaaaaccaagtgaagagtgctgcatccttttgaaaggtctcgctgatc

SEQ ID NO: 17696 - DNA, 433 bp, Glycine max
  Clone ID: LIB3106-102-Q1-K1-E11
gtcagaatcagaatcagaagaagcgagcaaagatgtcgggtcgtggaaagggaggcaagggtgtgggtaagggaggagccaagaggcacaggaaggtgctccgcgataacatccagggaatcacaaaacccgccattcgccgtttggctcgcagaggcggcgtcaagagaatcagtggcctcatctatgaagaaacccgcggcgtccttaagatcttcctcgagaacgttattcgcgacgctgttacctacaccgagcatgctaggaggaagactgttaccgctatggatgttgtttatgctctcaagaggcagggcaggactctctatggtttcggtggttaaattttaaggttttgatgggcttagcagctggttatttttgtaaatggtcgtttgtttgggaggatttgattttgtgcttttttgttttt

SEQ ID NO: 17697 - DNA, 444 bp, Glycine max
  Clone ID: LIB3106-102-Q1-K1-E12
gagaacgtttccgattctacttacgacatgattggtggtttagaccagcaaattaaagaaataaaagaggtcattgagttaccaatcaaacatcctgagctgtttgaaagtcttggaattgcacaaccaaagggtgtcctgctctatgggccacctggtacaggaaaaacattgttggctagggcagtggctcatcatactgactgtacattcatcagggtgtctggttctgaattagttcagaaatacattggagaaggttctagaatggtcagggaactttttgttatggccagggaacatgctccatcaattatcttcatggacgaaattgacagtattggatctgcccggatggaatctggaagtggcaatggtgatagtgaggtacagcgtactatgctggaacttctcaatcacttggatggatttgaagcttcaaac

SEQ ID NO: 17698 - DNA, 432 bp, Glycine max
  Clone ID: LIB3106-102-Q1-K1-E2
aaatcacacactctcttcaatttctagggttttgctattgctttgcctccgttccccctttgtcacaaaaacaacgccttttgtcttctgcttcgtatctgcattcacagcgtaattcgttgctgcattttaatcgatttatctaaccaggactgaatgacctaatggagtctaaaggtgggaaaaagaagtctagtagtagtagtagtaaatcaattttttacgaagctcccctcggatacagcattgaagacgttagaccaaacggtggaatcaagaaattcagatctgctgcttactctaactgttctcgcaaaccatcctgatacacatccggattgatagttcgttgcatgcaaccatagttttattaggattgtttcttctttgttttcaattaagtgtttttggtgctctccttcaaactccatc

SEQ ID NO: 17699 - DNA, 434 bp, Glycine max
  Clone ID: LIB3106-102-Q1-K1-E3
cgcacatgacacaacactctctctctccttgttatgttccctcctcctagaatataaattcacgagagaaacacgaaaatctttcgattccggcgagaaaaaaacttggacggtgaaattggaaggttttccgggatcccaaggccgaatcttggttcaatttacgaaaagagaagagagaggaacaacaacacccgttgttgaatcttcaagctgaatcaaatcatatagagagagaaagagagagacccggataggaaaatagcgtttagagagagaaaggtgaagtgaggttgtttaaagtttgggtcttggtgggtgaaagggaaagatgacggatgtggtactgcatatatacgatgtgacgaatagtggatccgaggaaaaccaacacaccattgttcaaatcaacaagatcttcaaggatgggattg

SEQ ID NO: 17700 - DNA, 349 bp, Glycine max
  Clone ID: LIB3106-102-Q1-K1-E4
cccacgcgtccgcccacgcgttcggaagtgttcggattgcggcgacgtgagcggttcgctggccgcgacgttgtgagaagtccactgaaccttatcatttagaggaggaggaatacatccgacctgccccagttttggctgctaataatgatattgaggtccctgtccctgtcgcatgaaatgttatacactggagcagtaattcatagtagctgagtgcctagtttttcttgtgcaatgttttttgacaagttcaaaattttgtagtttcttaaattttgaagaaattttcatactcggttacaagtattttaagtaatttgctttatctttttcaaaaaaaaaaaga

SEQ ID NO: 17701 - DNA, 277 bp, Glycine max
  Clone ID: LIB3106-102-Q1-K1-E5
gtacaactgaagtcacaacaatctgggccatgactgaactaataaaaaatccaagcattatgaagaaagtgcaagaagaaattagaggcttaagtggtaagaaagatttcttggatgaagatgatattcaaaagttttcctacttaagggcagtgataaaagagacacttagattgcacttaccagcaccactacttataccaagagaaacaaataaaaaatgcatggtagatggctacgaaatttcagccaagacattattatatgtgaatgcttg

SEQ ID NO: 17702 - DNA, 374 bp, Glycine max
  Clone ID: LIB3106-102-Q1-K1-D12
cttatcctcttcctgcaaaaccctgattcacacccaaagagaaaagaaaaaaaaaacaacagtggtgcgtgatgccaccgaagttcgatccctcgcacgtggtggacgtgttcgttcgagtcaccggcggcgatgttgttgcggagagttctttctccccaaacatcggtcccttgggactcttcccacataaaattggggaggatattgcgaaggaaacctcgaaggactggaaaggcctccgcgtgacggtgaagctaaccgtgcataaccttcaggcgaaagtgacggtggtggcatacatcgccgcgctggtcatcaatgcgctgaaggaacccgaaagggacaggatgaagacgaatgacatcaagcac

SEQ ID NO: 17703 - DNA, 426 bp, Glycine max
  Clone ID: LIB3106-102-Q1-K1-E6
aaagcattaaaggtcacactgccacctttcagatttgacttcctctccggcgctgccattctcttccacggcagtgtttctctttctctctctctatcttcaatttcgagaagtagctccagtattatatggcctccttcagagcattctggaacagtccagttggtcccaaaacaactcacttttggggacctattgccaactggggatttgtagcagctggattggctgacctgaacaaacctccagaaatgatctctggcaacatgacaggagcaatgtgtgtctattcagcattgttcatgagatttgcatggatggttcagccacgcaactatctactttttgcttgccatgcctcaaatgagactgttcaactctatcatttttcccgatgggcaaaggcacaggggcttctgtcggaaa

SEQ ID NO: 17704 - DNA, 64 bp, Glycine max
  Clone ID: LIB3106-102-Q1-K1-B9
gcgcccacgcgtacgcccacgcgtccgctcctattcatctatcaatttctttttagttctagac

SEQ ID NO: 17705 - DNA, 444 bp, Glycine max
  Clone ID: LIB3106-102-Q1-K1-C10
cccacgcgtccggggagaaagttaatatttctcctttcaaatccttcgtaacaatacaaggggaaggtgcagataagaccatgggtcaatggggtgacactgctcaaagccagccattaggaacctatggttctgcaacttttgctgtgaattcaccttatttcatagccaagaacatcacattcaaaaacactgccccaattccagcaccaggagcagttggaaagcagggagtggcattgagaatttcagcagacacagcagtattcctaggctgcaaattcttaggagcacaggacacactctatgatcatattggtaggcattactataaggattgctacattgaaggctctgttgatttcatatttggcaacgctctctctctctttgagggatgtcacgtgcatgccatagcacaacttacaagggccttaacagcgc

SEQ ID NO: 17706 - DNA, 416 bp, Glycine max
  Clone ID: LIB3106-102-Q1-K1-C11
accgattgctagaatggaatttcgatgctcagtcatctcttttaccattctcttctctctggctcttgcaggagagagccatgtccatgcatcgctacctgaggaagattattgggaagctgtttggccaaacactcccattcccactgcactgcgagagcttctaaagcctctccctgcaggtttattaattttatgagaattatcaattctagattattgattcttgaacatgggttcttatcttcctatcatgccttggcaagtttaaaacgttaattaggtttggctgtgtaacaaagtagcaaagacaaaatttaaaaggaaaatgcttaaagtattaaatgttagagtgcaagacatgcgaaaagtctgcttacaaattcattcataagggtgacttacccagttatata

SEQ ID NO: 17707 - DNA, 412 bp, Glycine max
  Clone ID: LIB3106-102-Q1-K1-C12
ctccggaactcgtttctaccttcacttcgcacatctcgaaccctctctttccggcaactaggttaaagttcatcaatggcaggtcgtggcaaaaccctaggatccagcgccgccaagaaggccacctcaaggagcagcaaagccggcctccaattccccgtcggccgtatcgcccgtttcctcaaagccggaaaatacgccgagcgcgtcggcgccggtgctcccgtttacctcgccgctgtcctcgaatatctcgcagccgaagttttggagttggctggaaacgctgcgagagacaataagaagactcgaattgtgccgcgccacattcaattggcggtgaggaacgacgaagaattgagcaagcttcttggtgacgtcaccatcgctaacggtggcgttatgcccaaca

SEQ ID NO: 17708 - DNA, 438 bp, Glycine max
  Clone ID: LIB3106-102-Q1-K1-C2
atttaatttcatatgaaaatgatttcatctgcctccaacgaaaacaagacggtggtggacatggacgaccacctcgccggcctgggatacaaagtccgttcatcggagctgtgtcaagtggctgcaaacatggagcgtttagaaaacgtgatttcatccaccgacctatctcaactcgcatcagacacaaccctctacgatccttccaacatagggttaggttcgtgggtggacacgctcctctccgagttcgaccaaacggcgtcgttaccgttacaatacgatttcgccacggatccaaaccataacaagcaattagcgctggtcaccaccgtggaagaagactcggggataagactggttcacatgctgatgacgtgtgctgattccgtgcaacgtggtgacttctcattcgctggctccctcattgggaacatg

SEQ ID NO: 17709 - DNA, 320 bp, Glycine max
  Clone ID: LIB3106-102-Q1-K1-C3
gtgatttcagtgagtgatcggtgttcacttgatctcatcataatcgtcagcgtcaattgaagaagatgccgatcagaaacatcgccgtcggaaggcctgaagaggcgactcaccccgacacgttgaaggcggctttggctgagttcatctcaaccttcatcttcgtgttcgccggctcaagctccggcatcgcctacaacaagctcacacgtcaacggcgctgccacccctgacggcctcatctacgactacatcgtccatgcattcgccctcttcgtcgacgtctacgtcggcgccaacatcttcggcggccacgtcaa

SEQ ID NO: 17710 - DNA, 428 bp, Glycine max
  Clone ID: LIB3106-102-Q1-K1-C4
gagaaaatcaagaaccccaactataaaggaaaatggaaggcaccattgattgataacccagagttcaaggatgaccccgacctgtatgttttccccaacttgaagtacgtggggattgaattgtggcaggtgaaatctggtactttgtttgacaatgtcttaattactgatgatcctgagtatgctaagcagctggttgaagaaacatggggcaagcacaaggatgctgagaaggcagcatttgaggaggccgagaagaagagggaagaggaggaatcaaaggatgacccagttgactctgatgctgatgaggaagaggaagatgctgatgaaactggcaatgactccgatgctgaatcaaagacggaagctggagaagacaccaaggaagagggtgtacatgatgaactctaggaagttgcaaaacg

SEQ ID NO: 17711 - DNA, 259 bp, Glycine max
  Clone ID: LIB3106-102-Q1-K1-C5
cccacgcgttcgtatttttatgcctctgctgaacaatagagcattttcctgtgggcactcggtctccttgcttccaggcagggtttttgaatgaatgctgtggtgataatgatattactatttgctgcatcgcatttggcatgaataatggcagtttggtataatccacttttcttttttgttagacctcttattggaccttatacagacatttttgttggttgaaatgagtagtcttgtggagactgtaccttgaaaa

SEQ ID NO: 17712 - DNA, 299 bp, Glycine max
  Clone ID: LIB3106-102-Q1-K1-C6
cccacgcgtccggtaagcactgccaagggttaatcgaccattgtaggaaaggtgtgcattgcgacttgtctaccacattaatggggtggcaaaaaccttaaaaatggaattccttaataatctggggttgggtgattcctatcaagtaagtttggaaaatgtttggcctgttataaattgcaactgccggggttccactccaattaaagattcctttttgcaccattcgatgccaaaaaaaaaaaaaaaaagggccggccgttttaaagatcccaagtttacttaccctgccttccaac

SEQ ID NO: 17713 - DNA, 432 bp, Glycine max
  Clone ID: LIB3106-102-Q1-K1-C7
ctagaaacagtgtgatgaaaatgaaggtccttgttttcttcgttgctacaattttggtaggatggcaatgccatgcgtacgagatgttccctctccgaatgaacactggctatggtgcccgtactccggaggtgaaatgcgcaagttggaggcttgctgtggaagcacacaacatctttggctttgagaccattcctgaagagtgcgttgaagcaacaaaggaatacatccatggcgaacaatatagatcagactccaaaacagttaaccaacaagcttacttttatgccagagacctcgaagtccatcccaaggacacatttgggttcaatatagatggcaccgtactctctaatattccatactacaaaaaacatggatatggggtggagaaatttaactcgaccttgtatgatgaatgggttaacaagg

SEQ ID NO: 17714 - DNA, 319 bp, Glycine max
  Clone ID: LIB3106-102-Q1-K1-C8
atagcattaaaggccacactgccacctgtcagattcgacttacggtgcgaaaccgggattggctatcacggtaaagggcctacgactctatctgtatactgaatgacatgtagaacctgcagtataatatggcctcattaagaggattatgcaacaatccaaatggaccgataacatctaacttgcggggacctaatgccaacggtggagttctagaacatgtattgcataacctgagctcacctccataagagagctttgggagcatgaccagtgcactgtatggccattcaccatagcgcatgagagctgcacagat

SEQ ID NO: 17715 - DNA, 455 bp, Glycine max
  Clone ID: LIB3106-102-Q1-K1-C9
ggcttccttaagctccttagtgctgctccttgcagctctaattctatcccctcaagttctggcgaactatgagaatcccccagtgtacaagcctcccactgagaaaccaccagtttataagcccccagttgagaagcctcctgtttacaaacctgcaggtgaaaaccccccaatttataagcctgcagtggagaagccaccagtgtacaagcccccagttgagaaacccccagtttataagcccccagttgagaaaccaccagtgtacaagcccccagttgaaaaaccaccagtgtacaagcccccagttgaaaaacccccagtgtacaagcccccagttgaaaaaccaccagtgtacaagcccccagttgagaagccctcactttacaagcccccacttgagaagccaccagtttacaagcccccagttgagaagccaccagtatacaagcccc

SEQ ID NO: 17716 - DNA, 439 bp, Glycine max
  Clone ID: LIB3106-102-Q1-K1-D1
aggcacgctgctgccaaggttttcagccatcctgatgttgttgctgaagtgccatggtacgggattgaacaagaatacacctggttgcggaaagatatccaatggcctcttgggtggcctgttggtggtttccctggacctcagggtccatactactgtggtgttggcgctgacaaggcttttggccgtgacattgttgacgcacactacaaagcctgtatttatgctggcatcaacatcagcggaattaatggagaagtgatgcccggtcagtgggaattccaagttggaccttcagttggaatctcagctggtgatgagatttgggcagctcgttacatcttggagaggatcactgagattgctggtgtggtggtttcctttgaccccaagccaattaagggtgattggaatggtgctggtgctcacacaaactaca

SEQ ID NO: 17717 - DNA, 434 bp, Glycine max
  Clone ID: LIB3106-102-Q1-K1-B8
cacacatctctgatcactctatagaccacttcgttgatctatcattcttcatcaaccaaccggcctccaaagtcagtgaatagggagtgagtgagtagcagctagcaatggaaattactgccatggcttcttcagctactcctccacgaccttctcttccaactccttccacttctccacacacagtagtcaccaccacctttagcaaacctcaactcagacgctctcacatagcactaccaacttcaaccaccatttcattgctcgctctcttcgcccctccaaacgaagccaaagccgctgtcagcatcgccaaggaccagattgtctcttctctcacccaagtggagaaaacgctggatcaggttcaggaaatgggttcgggtgtgctggacacggcacatcgtgttgctgaagtgatagggaacgctttg

SEQ ID NO: 17718 - DNA, 388 bp, Glycine max
  Clone ID: LIB3106-102-Q1-K1-D10
acataatgaaaattttacttccaaacccaaccaaatcaaagaaatgcaggatcacgagacagtccctattgcgaaaaatgaagcctctgattcaagcttattcggaagacgaagctacaaattctgggcactagctgacatactgatcttggcattctggtgcatgttcaccggcacattctatctgcgctggtacggcaccctcaacactttctcccacgcgtcccttgacgaccaccttgacgtgctcgaaatcgaggagcgggagaagctggtgaggcacatgtgggacgtgtacacgaataaccgtaggatcaggttgccgcggttctgggaaaaggccttcgaggctgcctacgaggatttgaccagcgacgccggcgatgtt

SEQ ID NO: 17719 - DNA, 382 bp, Glycine max
  Clone ID: LIB3106-102-Q1-K1-D11
tctccctacactacaggaagatttgtgatgggtggaagttctattggtgatgactgggagggcacttcctcatctaacgaggggcggacagtggtcttagttggacgaactggcaatggcaagagtgcaacaggtaataccattcttggaaggaaggtcttcaagtcaagggctagctcctctgctgtatccacctcatgtgaattgcagacaacagaattaaacgacggacaaattgttaatgttattgacaccccaggattatttgatttgtctgtcggatctgagtttgttggtaaggaaattgtcaaatgcattgatttggccaaggatgggatccatgctgtcattgtagtgttctcggttagaacacgctttactg

SEQ ID NO: 17720 - DNA, 453 bp, Glycine max
  Clone ID: LIB3106-102-Q1-K1-A12
cccacgcgtccgcaagatggttctgctagagaagctctgggatgacgttgttgctggccctcaacctgagcgtggccttggcaagctcagaaaactcaccaccctcaaaactattgatgaaggagacagtagcaagctgcagaagacgttgtcgatgccgtcgacaccgacaatcccgatgactcccacgactccaacgacaccgggatccgcgcgtaaagctgacaacgtttggaggagcgtcttccatcctgggagcaactccgccacaaagaccatcggtgctcagatgtttgacaaaccactttccaacactcccactgtctacgactggctgtacagtggggagaccagaagcaggcaccgctgaaaggataagctaagaaaaccgcgggttgcatgtaaatattgtcgtttttcgttaagcacctgccacgtttgaatctactacta

SEQ ID NO: 17721 - DNA, 110 bp, Glycine max
  Clone ID: LIB3106-102-Q1-K1-A2
tccacgcgttcgagacgagccgtttctaattaatgataggtgtcaagtggaagtgcagtgatgtatgcagctgaggcatcctggcagaccagtagacttgattggtttgc

SEQ ID NO: 17722 - DNA, 432 bp, Glycine max
  Clone ID: LIB3106-102-Q1-K1-A3
tcgcccacgcgtccgcttcctctttttctcaacaaaaaggggttcaattctagctagttctattacgtcgtccgcgaccatgaacgtggcgatcgcgcttctgttcatggttttcgcagtttcatcagctttagacatgtcaataatatcacacgacaacgctcatgcggatagggccacgaagcgcaccgacgaggaagtgatgtcaatgttcgaggagtggctggtgaaacacgacaaggtgtacaacgcgctccgtgagaaggagaagaggtttcaaatcttcaagcacaatctgcgcattatcgatgaacgaaactctctgaaccgaacctacaagttgggactcaacgtgttcgctgatctcaccaatgcggagtacagagccatgtacctgcgaaccttggacgatggttcgacgttgggcttgga

SEQ ID NO: 17723 - DNA, 439 bp, Glycine max
  Clone ID: LIB3106-102-Q1-K1-A4
cccacgcgttcgttcctttctttctcaacttgttttcttctttggatattaagatacaatagcgcagctgcattgtttaccaaccatcaaaccatcctaggtgatatgctaagtgattgtaaatctgattgtcaaatgtagtgatgagaatggagaagccaccaatctatggtgcagcatcagattgcaaaccactaaccacctttgttcagacaaactcagatgcattcagggaagtagtacaacgtttaacaggtccctcggaagcaagtgcagcaaaagaaggagatgcaaaaaaggttgcaactatgaaaaggacaacctcaaaactccatgagagaaggaaatacatgaagccaaaagttgagattgttaaacccacttttaattataaaacaggtgcatgtttgtcaccctctaagtcaagaagtctagcttt

SEQ ID NO: 17724 - DNA, 315 bp, Glycine max
  Clone ID: LIB3106-102-Q1-K1-A5
cccacgcgtccgtggagcgatatattaggaaccaacacaggccttaggaccttgaagttgcctgatcccatgtactacattagtcgacgactctaggctcttatgaatgaaatgagatatgtagtaactaataatggagagacttaacctaggggcactcgttattgctatgattcatatgtatgtgactttgtgtgagacagtagttacgtgagactgcacaagctcaactgaacgtagttttatctttcgtggttttagtatgattttgattttcagaattgattatgcgtctataatcaactttaggtctag

SEQ ID NO: 17725 - DNA, 390 bp, Glycine max
  Clone ID: LIB3106-102-Q1-K1-A6
cccacgcgtgcgaccacgcgtacggccacgcgtgcggcggtttcacagaccgagggatcccaatcctatggcagaggaggggaaacccgatgaacagctctttcagcttctctccaatcttctccaccaggtggaatcactgactaatcaagaagacgttgagctgcgttctaaaatcgaaactcttggattagaggttacaaaagttccttcaaagtcaacgcatcaccttaacgagttggaaatagctgacgagttggataaattatcagcaagattggataatcttgatgagatgatatcatcatcaatggcttcagatccacaagcgccatcactcttgagtgaaacaactcgatgtgtggatgccaggtatcactgctacttctg

SEQ ID NO: 17726 - DNA, 439 bp, Glycine max
  Clone ID: LIB3106-102-Q1-K1-A7
cccacgcgtccgcccacgcgtccgattttctctgtcttcaattgcaggtctgctgcaactaaaagaccctctaaaagtaatttcatttccaaaatccgcaatccaaggtgcaaagcctgtaatctctcagaacttgtggccacgcaaagcttcaaagaactcatcagatccattggtaaagcttgttcatgaactgcagagagatttggaattagtatatgttgggcaagtttgcctctcttgggaaatcctttgttggcaacacaagaaagcccttgagttacaacaatatgattcacaagggtctcatagtcataggtataaccatgttgctggtgagtttcaactttttcaagtcctaggtcagagattcatagagaatgagccatttcaaggccctatgctacagaactatgtcaagaaccgttgcgtgattcgc

SEQ ID NO: 17727 - DNA, 430 bp, Glycine max
  Clone ID: LIB3106-102-Q1-K1-A8
caaaagggaagattttggctgttggtaatggatttgacaaagaggataagccatcaaagggtgaaggtggggcaaaaaatcaaactgaaaaagaaattattcctccacctcccataaagaaaaatcctcttcattcaagagagaaacaaggcccagctgttgctagagcagaagatgatgacatttttgtaggtgaaggggttcactatgatgtacctggtaaagacttgagccaaagtccggtctctgaggacatggaagagtctcctaggaacaaagaaaaaccttcatatgtcacagaacctacttatggtcctgtcccaccttcaatggttcctcaagggtggcaagaaacaaatggatatgatgtaatgcaaacacaagcctttgatgctggctaccaaggagagtggcaggaataccattatgc

SEQ ID NO: 17728 - DNA, 264 bp, Glycine max
  Clone ID: LIB3106-102-Q1-K1-B1
ctcacgcgaacgattccaggagagcgtcctggagatcgtgcttgaaaagatgaatatgaaggggaacatcattggtggctgcggttggtgagattgcttttcagattccatagatgatgcaatatatgagggtaggagggatggtaggagtagcactaattggaacattaacagatacttacgcatatactggactgtgtccgctaccgtgaagaaaaccggctagaaaatgagcttgggacagatgtatggacataaatgcgt

SEQ ID NO: 17729 - DNA, 343 bp, Glycine max
  Clone ID: LIB3106-102-Q1-K1-B10
ctctactcacttcggataaacccatttttgagagtcctcacgctgatacaggagtcattgggcttgctttgttgacaatacaaactatactgcctacactctttgagggaaatcctggactaaggaatgttcatggtatcctgggtagaggtatcatgacactttttcttgttcattttgcccttggacttcaactaggcttcagttactaattacagcttccatttgaactcttgttatgttgagggtattgtattttagtcatggtgtacattctttcctgcactggttcttagctccaattctcaactctgattaccatgatgttatgttctcctctatc

SEQ ID NO: 17730 - DNA, 233 bp, Glycine max
  Clone ID: LIB3106-102-Q1-K1-B11
ggtgtagctgagaaaacaggtttaaatcacctctgaatttctgctatggcttcaaccacatcagtctttcttcttcttttcattcaattgtgcttctcacttctacccttgtcattcgctcaatcccccgccaccgggtctaccgaaggttacaccatttatggtcgagtgaagatccccagtgtgggaacaaaaattatattcttgctggaaaattcaaatgtcaagcatac

SEQ ID NO: 17731 - DNA, 229 bp, Glycine max
  unsure at all n locations
  Clone ID: LIB3106-102-Q1-K1-B12
cccacgcgtncgcaattttggattttctttgaggtttcgttctggctttatgtttaggattgtgttatacattatgtttttcgaatactatttgccttttaatttttgaaactatgctgactcttcatttgctttaccagtaatatatttagtttactcgggtttctaaagtttggttgaatatgttttaaaaaaaaaaaaaaatggataaaaaaaaatgaagggaatt

SEQ ID NO: 17732 - DNA, 432 bp, Glycine max
  Clone ID: LIB3106-102-Q1-K1-B3
ctagttctagatgagtggccgccttgggtataaagggatacatatattctagtggtagcagattggcgcaaaggctaatattgggaaagaccaaccatggggacctaagaaaatatttatctgggttttttgacactacagtggggaacaaaagagagacacgcagttatgttgaaatttctgagtcactcggtgttgaaaaaccatcagatattctatttgtcactgatgtatatcaagaagccacagctgcaacggctgcatgtttggacgtgataatttctattcgacctggaaatggaccccttcctgacaatcatggcttcaagacaatcaaatcccttctcggagatctaagaccaattgcagtcttatggaatgacattaaatgtgttatcattactaagaatagtgtaacggtcactttttaat

SEQ ID NO: 17733 - DNA, 449 bp, Glycine max
  Clone ID: LIB3106-102-Q1-K1-A10
gcattgcacaagttctagtggccgcttatagaaaacgaaaagttgagctaccacgtgagaagcatgttgatggggttttctatgatcctccacttattgggacaaacgttttgtcaaagctaccattgaccaaccaatttaggggtttgaataaagcagctgtaataatggagggggagctaaaccctgataggagtagagcaaataagtggaaacttgtcagcatccaacaagtggaagaggttaaatgcttggcaaggattttcccaatttgggctgctgggatcctaggttttacttccatggcacaacaaggaacatttactgtgtcacaagccttgaaaatggacagacaccttggaccaaaattccaaatcccagccgggtcacttggggtcatatcattcatcaccataggtgtgtgggttccattctatgacagaatcatg

SEQ ID NO: 17734 - DNA, 439 bp, Glycine max
  Clone ID: LIB3106-102-Q1-K1-B4
cccacgcgtccgcccacgcgtccgggcgccgggaacgtcaaagcctccccttccgccggcagcagcatcgaatgcgatagtggaatatactccggtctctctcaaagaggaagaggaggatctggaagtcaagctccgacggattatcgacaatgttcctgtccgtgttagcaatacttccggtagttccgccggttcaggctccggcgacttccaccagtatcggcaaatgagacgcaaggaacaagatcgtcttgccaggatggaagtcgactaccagaaaaggaaagagctggcagaatttaatttgagaagagaggaaagactaaaagcggctgaggaacggacggcaaagaagcgagcaaaacgtcaaaagaagaagcaaaggaaaaaggagaaaaagaccaaattaaatgctggagaacagctgcaagagaaa

SEQ ID NO: 17735 - DNA, 114 bp, Glycine max
  Clone ID: LIB3106-102-Q1-K1-B5
gatattattgctagtttacgatactatcactttgtcaccaatattagtttgcctgattatgggaaactatagaggacggattattactgaataaaaatgataccttttacattc

SEQ ID NO: 17736 - DNA, 233 bp, Glycine max
  Clone ID: LIB3106-102-Q1-K1-B6
cggacgcgtgggtgaaattttaaaaatgactgggataaacttaagaattcaattagtgaaattgaataagtaaacagtttaattggattggtcgaatggtatcaaaaaaatggagtactaactcccatttcttatttattattgaattaaccgatcaacttgctttgttatcgaacatttcttctttgatttcaaaaattttccggaaaaaatttgaatctatttttatatgc

SEQ ID NO: 17737 - DNA, 428 bp, Glycine max
  Clone ID: LIB3106-102-Q1-K1-B7
tcggaatgtcctattcctggcgaaaggagggaggcgataagacatgataatcaggtgcttaggagcctattggagtgaccctggccatcccaagctatacaaacacgtgtatatgactagttagcatagttcctatgaaccgggacagagctgactacgaggaagcatgagaaagctatgacgttaaaagattatataaggaatattaagatctgcatacacactagactctaccagtttggatattacactgccataaattgacgctgctacttatcttatagataaactagctctgaaggctggcaatgagaatgatgatgatgaagctgataccgttggatactgcacattcatcgtccagaatgtgacatgagtacccgacaactgacttaagtttaactttcttggtaaagaatctatcaagt

SEQ ID NO: 17738 - DNA, 335 bp, Glycine max
  Clone ID: LIB3106-101-Q1-K1-G2
cccacgcgtccgagcgtgtattcgatgtatcaattcaaggttttaaatatctgaaagattttaacattgcgaaagaagctggtggagtgggtaagggaatcactagggagtttaatgttaatgttacagaaagcaccttggaaatccacttatcctgggcaggaaaaggaactaatgccattcctataatacgtgtatatggacctctcatatctgctatcactgagaccccaaactttaaagtttatgcacatgggttctctactggaacaattgttggaattgttgctggggcatgtgtgattgtcatattgatgctctttgctctttggaag

SEQ ID NO: 17739 - DNA, 415 bp, Glycine max
  Clone ID: LIB3106-101-Q1-K1-G3
cccacgcgtccggcgacgacgatccaagtgatagacactcgtcgcgatggaacgtgtagctgaatgcgagcgaactctgtacccatacgtgactggatcctctgtagtcgctatcaaatacaaagatgggattctaatggccgctgacatgggaggttcgtatggatctaccctgcggtacaagagtgttgagcgtatcaagcctattggaaagcattctcttcttggtgctagcggggagataagtgactttcaggagattctgcgttaccttgatgagcttatcctatatgacaacatgtgggatgatgggaattctctagggccgaaggaggtgcataattatttaacccgcgtgatgtataatagacgtaacaagttcaacccattgtggaatgcacttgtacttggtggg

SEQ ID NO: 17740 - DNA, 474 bp, Glycine max
  unsure at all n locations
  Clone ID: LIB3106-101-Q1-K1-G4
cccacgcgtctcgtgaagaagagggtaactgcaaacaaagcaagcaaaacaaaagacgcantgatggagaggatgaagagggtgcttctgctgcttctggccttcactgttcttctcatgttgccagaagcttctgctacaaagtttactgttggaaacaaccagttttggaaccccaatattaactacactgagtgggctaaaggcaaacatttctaccttggtgactggctctattttgtgtacgataggaaccaagcgagcgtgttggaagtgaacaagacagattatgaaacatgtaactctgatcatccactcacaaattggactaggggagctggaagagacgtggttccattgaatgtaacaaaaacttactacattatcagtggccgagggttctgcttcagcggcatgaagatagcagttcatgttgaaaagctgccaccttcaccaaaagctgcccctgtaaag

SEQ ID NO: 17741 - DNA, 453 bp, Glycine max
  unsure at all n locations
  Clone ID: LIB3106-101-Q1-K1-G6
cccacgcgtncgcccacgcgtncgcggacgcgtgggtggagacgattttacaagcaacgtgaaaaggctcataattgatttggtcaccatttgaaggaagagaatgtgaaagagtgaggtcagagttgccagtagacgaagacaatcgtcatcagttgcagctgcaaaggaatgaggtaattgcattgacgaaccttctcaatcgactctcggaatccttcaaattcgtccacgaagtgggacctacagttgaaagaatcatggaaggaggacatttttctgctcatacaagaactgattagctcatggaaaaaaatttggtcctatgtatctaaaacttaggtaacatgctctcttctgagtatttgtcatatttctcgtttgttgtaccaaactgagtattacatgtttgcaatttgcaagctataaataagaaccaagttttaccaattt

SEQ ID NO: 17742 - DNA, 154 bp, Glycine max
  Clone ID: LIB3106-101-Q1-K1-G7
cttgcttactttttagtatgtaatgtaatcaatgtcatgatgtataggttctctctaaagatgcggcaagttcagcatatgctgaggggatcactattttcggctgcaatttggtttgctattatgattaatggaaaatgggacttctctacgt

SEQ ID NO: 17743 - DNA, 357 bp, Glycine max
  Clone ID: LIB3106-101-Q1-K1-G9
cttcgctgtcaatgtatcctacatttgatgttggagatcgaattgttgctgagaaggtttcatggtattttagaaaaccatgtgcgggtgacatagtgatatttaaaagccctccggtgcttcaagaagttggatatagcgatgatgatgtttttataaagcgtgtggttgcaaaggcaggtgatattgtggaggttcgtaaagggcatcttgtagttaatggggttgagaggaatgaagagtacatccttgaaccacctgcttatgagatgaaacccacacgtgtgccagagaactacgtctttgtaatgggagacaaccgcaataacagctatgactcccatgtgtggggtcccc

SEQ ID NO: 17744 - DNA, 369 bp, Glycine max
  unsure at all n locations
  Clone ID: LIB3106-101-Q1-K1-H1
agcagcagcgtcaatgtgtatgagcttaacctgcggcagcattcaaagggtctctcttgttcttcttcctcatcgntcttcgctggaagtggtagttattctctccgcgcgggtcccacctcggtggtgtcgcttgcccggcgcttgccgctgaccatagagaacgcccacaagaaaggggcgggcagcaccaagaacggccgcgactcgcaaggcaagcgtctcggagtcaagatatacggcgaccaggtcgccaagcccggctccatcatcgtccgccagcgcggaaccaagtttcatgcaagaaagaatgtggggcttggcaaagattataccattttctccttgattgatggagttgtaaaaatt

SEQ ID NO: 17745 - DNA, 452 bp, Glycine max
  Clone ID: LIB3106-101-Q1-K1-H10
cattctatcgcttcacacagagtgagatatagaatcactgaagagcttccttcaatggcggcttcttctctctctgttactcctctgtcgctctcaaattcttccccctctctatcttccaagccaaagtttccatctttttgttttctctctggcaacaacaccacattgagggtaacatgcccaaaacctctgcactcatccactgttgttcatgttgctaccgaagcgttggattcatcccctgatcccttggacccacctccagaaacccttgatgatgactctgacgccaccacctttgaggttggtgacttggggactcctagcacttcagcaattagcattggtggcgatgcagatacaatggcaccaaagcagaagattagaatcaagcttaggtcttactgggtgcccttgatagaggattccttgcagcagatattagatgc

SEQ ID NO: 17746 - DNA, 395 bp, Glycine max
  Clone ID: LIB3106-101-Q1-K1-H11
acgggtggtgcctctcttccatctccccagccaaaacctctctcaggaaggccacattacgcccttccgtcttcgcaacccttaacactccttcttctccttcctcttcatctttcttcccctctctcattcaagacaggcctgtttttgctgcccctgcccccatcatcaccccaactgtgagagaggatatggcaaaggaatacgagaaagctattgaagaacttcagacattgttgacggagaagagtgaactcaaagtcgcagctgctgaaaaagtggagcagataacagcttctctagggacatcatcatctgatggcatcccatcatcagaagcctcagacaggatcaaagctggtttcattcacttcaagaaggagaaatacgacaag

SEQ ID NO: 17747 - DNA, 302 bp, Glycine max
  unsure at all n locations
  Clone ID: LIB3106-101-Q1-K1-H12
cccaactgcagatgtcgtgttttaaagttaatattttaaattctttgctcattgagttggtggaatttgttgtgactagttaatttgcttcactttcctatttcatttgtagtgtgacacttaaaaaggatatcttgattagatgcggatagattatcacaacagcttgatcatttgcngnnnaaaaaaannaaaaaaaaaaaaaaaaaaaaagaatnnntttataaggaacaaatttaaaaacagaagcatgcaacagcatataataaaaaaaaaaaaaaaaaaggggcggccgttttaaa

SEQ ID NO: 17748 - DNA, 350 bp, Glycine max
  Clone ID: LIB3106-101-Q1-K1-H2
cgctcttgaaagagagagggagatggagggaatatagcacaagacaggtgaaagtaatggcataaagatgcacattgcaaaaaaaggggaaagcccttgggtgttgtttctccacggctttcccgaactctggcactggtggcacaaccagattgtggctcttggttccctcggataccatgcggtggcaccagatctccgaggctacggtgacaccgatgcaccaccttcaatagacagctacacatgctttcatatagtggctgatctcgttgcgcttattgattctcttggtgcagagcaagtgttccttgtggctcatgactggggagccatcataggttggtacc

SEQ ID NO: 17749 - DNA, 233 bp, Glycine max
  unsure at all n locations
  Clone ID: LIB3106-101-Q1-K1-H4
aaaaaaaaaaaaaaaaaaaaaaaaaaaaacaacaataaataaaaaaaataaaaaaaaaaacaaaaagggggggaaanngggcggccgggggggggttccatattaaagtccaagttaacccacgcgaccatgctattatagggtctataaagaaaaccctaaggtcaaccaactacaacggcctttaacaacaaaaccattgggaaaaccaatttaatacccaagaaaaacat

SEQ ID NO: 17750 - DNA, 224 bp, Glycine max
  unsure at all n locations
  Clone ID: LIB3106-101-Q1-K1-H5
ggaatgaaatgcttttttctcacaacaacaacctttgatcgtttcattactgcttccccttaaccccaaatagatataaaacacaacacgaatctcgtttttgagatacaatgattgggcgcagagacagagagggacccttgatgaggaacaacagcactaactctctttgcaaatcacgggtcctaactccagntgcaattggtgtccttattggatgcggc

SEQ ID NO: 17751 - DNA, 331 bp, Glycine max
  Clone ID: LIB3106-101-Q1-K1-H6
tacttacacttgataaattattggtctctctctttttgtaaaaataaaataaaatagacaagatgtttataaagagaactgtgtttgatgtcagattagttggaaatgggatcttatgtttttgaattttgtagttgagtgagggagaggatgtctggtggcacacagaagagtctgagaaaagcacttggagcccttaaggacaccacaacagtctcgttggctaaggtcaacagtgattacaaggaattggacattgctatagttagagccacaaatcatgttgaacgtccggctaaggaaaaacatataagagctatattttcagcta

SEQ ID NO: 17752 - DNA, 420 bp, Glycine max
  Clone ID: LIB3106-101-Q1-K1-G12
agcacactcctcccagggtttctccaccaagagggaaatggctcccaaaccgcctagtacgggtctgtttgttggactgaacaagggacatgtcgtcaccaagaaggaattgcccccacgcccctcggatcgtaaggggaaaacaagcaagagggtgcactttgtgaggaacctcataagagaggttgctggttttgcaccctatgaaaagcgtataactgagttgctgaaggttgggaaggataagagggcacttaaggttgcaaagagaaagcttggaacccacaaacgtgcaaagaagaagcgtgaggaaatgtccaatgttcttaggaagatgagggctggtggggctggagacaagaagaaataagtcttatttactcttttctagtttcactagatggacctgtgtattgatgg

SEQ ID NO: 17753 - DNA, 55 bp, Glycine max
  Clone ID: LIB3106-101-Q1-K1-H7
cccacgcgtccgatgagaaccattatatttttatatattagaaatttgggtcccc

SEQ ID NO: 17754 - DNA, 378 bp, Glycine max
  Clone ID: LIB3106-101-Q1-K1-H8
gtgaggctgacctcagagcagtagatggcttccacttccatagttccattccagctcttaacaattacatgagacagagaaagggttgacggacagagaacccaccttttgttgtattgcagatccatccgctctgccaccaggtgaatggaaggaagtggcggtggcggtgcttcaccgtctgcaccggtgaagcagtatttgcacgatttctcgaagctgtttcagtactatctggataaatccactccacattccacgtacagatggattgggactttcgtgatagcatccatctacgttttgcgcgttgtttatgtgcagggtttttacattggctcttatggactcggaatctaccttctgaatctcttggat

SEQ ID NO: 17755 - DNA, 508 bp, Glycine max
  Clone ID: LIB3106-101-Q1-K1-H9
agaacatcataataataacaaaaccatgggatgtgaaaagggtccaaaacgtggcacaaatagaggtagacaacaagcacaaaagcttcacaggtttggcttctcgtaccttgcatcatcttttctttacttagtcataaaggttaaggccttctacaatggatttcttggagatgttgctggggaagcgaaaatgggcattgaagcacctactgaggcatatttctcagtgccagttcttccaaattaacaaagctcctcctttgaagtagtggcaacatgttctcatgcatgtgtctagttcactagtatattatctgaatgtttatattattattaaaattgagtagaactttgtgaattatgttgctggctagagttgtaactctatgcgcaaggttcttaaaggaagttcctgctaggctatgaagttaaaatacattttttgggaactgtaaacatgtaatgatgtaataaataaactttgaacataatgttactagtaaaa

SEQ ID NO: 17756 - DNA, 441 bp, Glycine max
  Clone ID: LIB3106-102-Q1-K1-A1
gtgttcagctccttatggagctctcactctctccaacttcacatcgtgttccttccacaatggccactttgaatttcgctaaactatcatccactaaggccacaacgtcccaacctttgttcttaggattttccaaacacttcaactcaattgggttgaaccatcacagttacagatgctgctcaaatgctgttcctaagagaccccaaagacccagttccataagggcctgcactggagttggagctgctggttctgatcgtccattagctgaaagacttttagatttgaaagatgcttgctggagatttttaaggccacatactatacgtggtacagcactaggttcatttgctttggtggcaagagcattgattgagaacacgaatttgataaagtggtctcttttgttcaaagctttctctggtctttttgccctga

SEQ ID NO: 17757 - DNA, 421 bp, Glycine max
  Clone ID: LIB3106-101-Q1-K1-E5
aaattatgcaacgcgattaggaattaaaaaaatacaaagcttagcgacgcgggtttcttccataatggagcataattagtggaacagagaatgttattttggcggtaatagattagatgctgaatgatgatggacgaatgagtgttagtttcagcaattctcttccgtaagcaaagagcagtagctgaaacaaacaaacgaacactgtaagcatgaacaagcgccaagaagatttgcgcaacatagctactaccctcgactccagattcaatcagaccctcagaaatgttcaagggttactcaaaggtcgaagcatacccggtaaaatattattgagccgtagggtagatccttccgataactcaaactcgaagatatcctcaccaaattaacaaaaggagcttttttaacaatgatgctg

SEQ ID NO: 17758 - DNA, 384 bp, Glycine max
  Clone ID: LIB3106-101-Q1-K1-E6
ctagaaacagtgtgatgaaaatgaaggtccttgttttcttcgttgctacaattttggtagcatggggggccatgcgtacgatatgtgcggctctccgaatgaacactggctatggtgcccgtactccggaggtgaaatgcgcaagttggaggcttgctgtggaagcacacaacatctttggctttgagaccattcctgaagagtgcgttgaagcaacaaaggaatacattcatggcgaacaatatagatcagactccaaaacagttaaccaacaagcttacttttatgccagagacctcgaagtccatcccaaggacacatttgtgttcagtatagatggcaccgtactctctaatattccatactacaaaaaacatggatatg

SEQ ID NO: 17759 - DNA, 101 bp, Glycine max
  Clone ID: LIB3106-101-Q1-K1-E7
cccacgcgtccgcccacgcgtccgcttattattgacatatttagacaccttttaaaattatgatgagcatctctaaagcaaggtatggccataatttttcc

SEQ ID NO: 17760 - DNA, 264 bp, Glycine max
  Clone ID: LIB3106-101-Q1-K1-E8
attgctacgaagggctatatagcataaacatttgagtcttcattgcacaatgtcgacctcttggagtaacgggtggtgcctctcgtggcatctccccagccaaaacctctctcaagaaggccacattaggcccttctgtcttcgcaaccgttagcactccttcttctccttcttcttcttcttcttcttccttcccttctctcattcaagacaggcctgtctttgctgcacccgcccccatcattacccctactgtgagagagg

SEQ ID NO: 17761 - DNA, 457 bp, Glycine max
  Clone ID: LIB3106-101-Q1-K1-E9
gtttgagactctttcctacctgccagaccttgattatgcacaattggcaaaggaagtataatagcttcttatgaagggatggatgggttgcttggaattcgagttggagcacggtttcgtgtaccgtgagcacaacaggtcaccaggatactacgatggacgctactggaccatgtggaagctgcctatgtttggttgcactgatgcttctcacgtgttgaaggagcttcaagaggctaagactgcataccccaactgcttcatccgtatcatcggattcgacaacgttcgccaagtgcattgcatcatcttcatcgccttacaaccctcaggcttctaagtgtgaaaattttgcaaagcattttttgccgccaccctacttcgtttgcttgtacttaaactacattcccatttgtttttgctttttgaagattcatcattcctgatttttggtttc

SEQ ID NO: 17762 - DNA, 375 bp, Glycine max
  unsure at all n locations
  Clone ID: LIB3106-101-Q1-K1-F1
cccacgcgtncgnccacgcgtncgcttacttaaaatgggtcccatcagccaggtcttttctatgctggcaggatttagtgctgaattgatgccaaaaggccgtgagaaggaaagccaggcaaaaattaaacgttacatgacaatgatggactcgatgacaaatgaagagttggatagttcaaacccaaagctcatgaatgagtcccgaatgatgcgaatagctcgaggttctggtcgtccagttagggaagtaatggaaatgttagaagagtacaaacgtcttgcaaagatatggagcaaaatgaaagggcttaaaatacctaagaagggtgaaatgagcgccttatcccgaaatatgaatgctcaacacatgag

SEQ ID NO: 17763 - DNA, 506 bp, Glycine max
  unsure at all n locations
  Clone ID: LIB3106-101-Q1-K1-F10
ctattattttattcttcatccaatgactatacattcattatatttttgtgtaaatagaggaaaaactcgatggaaaaatggtggtttaattctatgttgtttaataggaagttagaatacaggtgtgaattaagtaaatcaatggatagtcttggtcctattgaaaataccagtctaagggaagaccctaaaattttaaccgatatagaaaaaaaaattcacagggatttggattatttagaaatggaaggttttttttctagcgatctgaatactgtttctaagaatgatgatgatcattacatgtatgagactcaatttagttttaacaataatattactagtttcattgatagttgcattgagagtttcaatttaggtgatattgacaaatacaatgatatttatttttatagttacattntttttgaagggcagacattgtagtgaaagcgataattctagtactagtataataactagtacgaatgatacaaatgatagtg

SEQ ID NO: 17764 - DNA, 253 bp, Glycine max
  Clone ID: LIB3106-101-Q1-K1-F11
aacaaatatgtttgtttcctctttattgttatgtgtcagaagctacaacaaagtcagttgaggtgttatttttcctctctattgttacataagaaaaggcagaaaatgagaattaggtaggggtaggtgccacaccacttgctcataactcatctttggatgctccatctcttccattatcatccaacgatgcatataccttaattattgactcgtagattttaatccctttcaagtattcatctttgtgcag

SEQ ID NO: 17765 - DNA, 425 bp, Glycine max
  Clone ID: LIB3106-101-Q1-K1-F2
caaagagaaaaaagtagagcaggttttatcagtaaattagcaaacaaagagacggattacaatgacaatgaaggtgacattatctgcataaaaattatccttcccaaattcagaattccttgtccctaataagattatcaagtaacaaccataaaactgtttcccttcagcccttatcaaagtctgctcatatattctgcaactgggaaaaggagatgcgaacaactgatccagaaagtggacttgcatgcttgcacacaagggcttcagtagcctgctcctcagtctcaaactgaacaagtgcctgtttttttccattcatctcaaagaccttgctgttgacaatggttccatgctcctccaaaaggcttacaacctcctcttcagttatgtcttgcgggagggtggacaagtggaccattttt

SEQ ID NO: 17766 - DNA, 418 bp, Glycine max
  Clone ID: LIB3106-101-Q1-K1-F3
cccacgcgtccggctcgtaagaagaaagaagagggagagaagagaatggggagagaaagagaaaaggggggaattcccattggcaaggggttgcttgaaacaaaacggattgaaaaaaaaaatgagaggaaacgtttgttggccttgaaaaaagtagagaaagaggaagagaaaagggctagggagaaaatcaagaaaaagttggaagaagacaaggcagaaagaaggcggagacttggattgcctccagaggaaccctcagcagccaaaccttcacctgcgcctattgtggaggagaaaaagagttttgtgcctgttaggcctgccacaaaagctgagcaaatgaaggagtgcctccgttctctcaagcagaaccacaaggaggatgacgctagagtgaagagagcattccaaactc

SEQ ID NO: 17767 - DNA, 462 bp, Glycine max
  unsure at all n locations
  Clone ID: LIB3106-101-Q1-K1-F4
ggcatcacagggcaaccatccaaaccctaaccctaaccctaaccggaataattccgttgcgtcggcggggccggtgtggccaaccatcgacggnccattgggcctgtcggaggaagaatcagtgggctacgctcgcaggttctacaagttcggcttcgcccttctccctctcctatgggccgtcaattgcttctacttctggcccgcccttcgccactctcactccttcccccgcattcgcccctatgttgttggatctgcaattgggtttgcagtatttgcgacacttctcagttcttgggctctaacatttgccattggaggggaacgtctcttcggccctgtttgggatcaattggttatgtacaatcttgctgataggttaggcttaacaaggctggagctaagtttgttgtgtggcacctctgatacaaaatattttgatcctttattaccagactt

SEQ ID NO: 17768 - DNA, 257 bp, Glycine max
  unsure at all n locations
  Clone ID: LIB3106-101-Q1-K1-F6
cccacgcgtacgctgtagccaccccactttgtttgttgtacttaaactacattcccatttgtttgtgctttatgagatttcatcatcctgtatttttggtttctgttttcggacttcaatggaaattaatggatgagaactaatgttnaaaaaaaaaaataaaaaaaaataaaaaaaaaaaaaaaaaaaaaaaaaaaaaaggaaaaaaaaaaaaaaaaaaaaaaaaaaaaaatattaaaaaaaaaaaaataattaag

SEQ ID NO: 17769 - DNA, 375 bp, Glycine max
  Clone ID: LIB3106-101-Q1-K1-F7
gaaagaaagaaagaaagaaagaaagcgagatcaaattgttggagaaacgcgaattaatccagggatcaaagaaagcgttacttgacgttcgtttgaacatcgaaaacattaacacaaatggcaacacgaactggtcgcttgtttcaaaaccaaaacctcaatgtccacgttaatggaggaggagctgtttctgggaaggctgatttaaccggacagaggaaagttggggctgggggaagaaaaccacttggagatctatccaatgcagggaacctcatcaaccaatttgatggaaagaaagcccttgacggttcattgaacacaggcaaaccctcagcctctgttagtcaagcaccgaaattgcacaagtcaaag

SEQ ID NO: 17770 - DNA, 432 bp, Glycine max
  Clone ID: LIB3106-101-Q1-K1-F8
aattaccacccctgtgctgaacacttctgcctacttttttaagaaaaccgctgatctcattgggttcaaggagaatcgtcaagtgagttatgaataccggcgctatggaaacccaacgactgtggttctggaggagaagataagtatattggagggggctgaatcaactgtgataatggcatctggaatgtgtgctagcgtagtcctatttatggcactggttccagctggtggacatcttgtgaccactacggattgttacaggaagactagaatattcattgagacttttcttccaaagatggggatcacgaccactgtaatttaatccagcagatgttggagccttggaatctgcattggagcagcacaatgtgtctctattcttcactgagtcgcctaccaatccattcctgagatgtgttgacatta

SEQ ID NO: 17771 - DNA, 435 bp, Glycine max
  unsure at all n locations
  Clone ID: LIB3106-101-Q1-K1-F9
gagagagtataaggttgatgcttcagttggaaaaccccgtgttaacttcagagaaactgatagtgagcgtgctgattttgactatgtgcataanaaacaaagtgtatgacaaggtcaatatggacgggtaattgggtatattgaaccacttcctgcagggtcatcaactaagtttgcatttgaaaacttgcttgtgggtcaagctattccatcaaattttatccctgcaattgagaaaggttatcaaagaagctgccaactctggtgccttaattggacatccaggtgaaaatctttgagttgtcttgacagatggtgctgcccatgcttgctgattacagagaacttgcatttaagttggcttctatctatgctcttagacagtgttatgcagcttccagaccggttatattagaacctgttatgcttgttgag

SEQ ID NO: 17772 - DNA, 417 bp, Glycine max
  unsure at all n locations
  Clone ID: LIB3106-101-Q1-K1-E4
ttaaatcatctacttgccctctttttgctcaaaaaaaaaaaaaaaaaaaaaaaggggngaattataaaaataatatggggggtataaaattatttttttataataaatttttattttttaaaattattttattttaaaatattaatatttcccccaaaaaaaaaaaagggccccccctcttaaaaaatccaaatttttctccccctcttttccaaataaaaatttttttaaaagccccccaaaataaaattccttcccccccttttaaacaccccttaccctgaaaaccccttcctttccccaaaataatccccttaaaaaaaatccccctttcccccattttctaaaaaacaaaaaagcccccccccaatccccttttccaaaattttcccctctcttattccaaatggccccccc

SEQ ID NO: 17773 - DNA, 290 bp, Glycine max
  unsure at all n locations
  Clone ID: LIB3106-101-Q1-K1-G1
tcttcccgaatgggtgagcgttgggttctctgccaccaccgggttgcatgagggctcccttgaaacccatgatgtgatttcttgggcttttgcttccaagttgtcagatggtagcagcaatgatgctttggatcttccaagctntgtgctcaatgaggccatctaacttcaaacatcgtagttaaatgtgacaaaagaaaaatgtaataacgccctagcttgctagaggctggtgctactaataatgtttgtcacaaaaattatataataataggtgttttactccgtct

SEQ ID NO: 17774 - DNA, 390 bp, Glycine max
  Clone ID: LIB3106-101-Q1-K1-G10
ctttttctcaaccaaaaggggttcaattctagctagttctattacatcgtccgcgaccatgagcgtggccatcgtgcttctgttcatggttttcgcactttcatcagctttagacatgtcaataatatcacatgacaacgctcatgcggatagggccacgaggcgcaccgacgacgaggtgatgtcaatgttcgaggagtggctggtgaaacacgacaaggtgtacaacgcgctcggtgagaaagagaagaggtttcaaatcttcaagaacaatctgcgctttatcgatgaacgaaactctctgaaccgaacctacaagttgggactcaacgtgttcgctgatctcaccaatgcggagtacagagccatgtacctgcgaacctgggacga

SEQ ID NO: 17775 - DNA, 257 bp, Glycine max
  Clone ID: LIB3106-101-Q1-K1-D10
accacgcgtccgctgtaaccaccccactttgtttgttgtacttaaactacattcccatttgcgggggcgtttattagatttcatgggcgctgtattcatggcttctgttttcagacttcaatggaacattaacggatgagaactattgagcaacagtggaagagtacaatgcatgcaagtgtggccaccaattggcaagaagaaagtcgagactctttcctacttgccagacctctatgatgcccaattggcaaagg

SEQ ID NO: 17776 - DNA, 437 bp, Glycine max
  Clone ID: LIB3106-101-Q1-K1-D11
cccacgcgtccgagccagctgggctacatcctttaaattcaacattttcgcacccaacaaatcgaactcagctgacgggcttgccttcttcttggcacccgtcgggtctcagccccaatccgacgatggatttcttggtcttttcaacagtcccttaaaggacaagtctctccaaaccgtggcgattgagttcgatactttctcgaacaaaaaatgggatcctgcaaaccgacacatcggcattgacgtgaactcgatcaagtccgtcaaaacggcatcgtgggggttgtccaatggacaagtggcggagattctcgttacctataatgccgccacgagcctcttggttgcttctctgatccacccttcaaaagaaaacaagttacatcctctctgacacagtgaacttgaagagtaatcttcccgaatgggtgagc

SEQ ID NO: 17777 - DNA, 381 bp, Glycine max
  Clone ID: LIB3106-101-Q1-K1-D12
cgacgatgagttctgctgaaaattaaaaatcgaaataaatccgttaggaagttgttgaagtgggtgggacccaacgaagcagagatggaggctatgctgcattcgcaccgatgcagagctccgtcgatgtgggtttctggcaccgattgtcttctttgaagctcaacaagcatgccattgacgattctccaattcccttattcggtttttatgcaccgtgctctcagtctcatttaactgttttagctgagtctttgccttctgttccagggatactttacaacactaatactgtggataagaatgacctgttgaatacagagaccattcttgatagctgttctgcataattaaatcagagaaggcaactcagatgtttct

SEQ ID NO: 17778 - DNA, 481 bp, Glycine max
  Clone ID: LIB3106-101-Q1-K1-D3
aaaaaacagcgccctagatttgctcttctttgcttcggaagaaagagaaaaacaaataacaatggcgtgcgcttctttcctcggcagaggtctcttcgcttccgtcttcatactctctgcttaccaagaatttaacgaatttggagttgatgggggacctgcagcaaaagcactcagacctaagtttgatgcctttacacatcgagtgcattctcaagttggctttcaacttcctgagattgatctgaaatttttaattgctggggctattgctttgaagggccttggaggggttcttttcatatttggcagctcttttggaagctttgcttctgctcctgcaccagctgattgctaccccaatccattatgatttttacaattatgacagtgaagacaaagaatttactcaactgttcatcaaatttacacagaacatggctcttttcggggctctattgtttttcattggcatgaaaac

SEQ ID NO: 17779 - DNA, 287 bp, Glycine max
  Clone ID: LIB3106-101-Q1-K1-D5
tgggtgcaagaatatgtctcattctactacaagtcagatgaggaactccaaaaagaccctgaactccaagcttggtggaaagaacttgtagaggtgggtcatggtgatttgaaagataagccatggtggcaaaagatgcaaactcgtgaagagttggttgaagcttccgctatcctcatatggattgcttcagcccttcatgctgctgttaactttggacagtatccatatggaggtttaatcctaaacaggccaactattagcaagagattcatgccctaaaaggg

SEQ ID NO: 17780 - DNA, 483 bp, Glycine max
  Clone ID: LIB3106-101-Q1-K1-D6
cccacgcgtccgcaaaaactttcatcttatttacaagtatttttttcagaaccttcacttctcaagtgtcaacacatacaacaatgggttttcgtttacctggtatcagaaaggcatcattaaaccaagcatcatcaaaagccatggacgtgccaaagggataccttgcagtctatgttggagagaaaatgaagcggtttgtcatccccttatcatacttgaagcaaacgtcgtttcaagacttgctgagtctagccgaggaagaatttgggtataaacatccaatgggtggtcttacaattccttgtggagaagatgtgttcttagatattacttctcgcttgaacaataggtgctaaccctgcgatgataagactgacctagacatatagtacttaacacaatttttgtaactcacttttttgcttgaaaatattttctctttttggtattatactcaagcaagtgtaaaaaatgttatac

SEQ ID NO: 17781 - DNA, 463 bp, Glycine max
  Clone ID: LIB3106-101-Q1-K1-D7
atttgcaaagtgttatttttccttttttctcatttgcactgcaaattgcaatggcttccaacgaggttattgccaccatcatggtgctttctctccttgcctactcaacatcattcaccaatgcatgtggcacatgccacccaaaacctaccccttctcctcctcctccatcaagaaagtgccctaaggacacattgaagctaggggtgtgtgcagatattctaagtcttgttactgatgatgttggctcccctgtctccagcaagtgttgtgcattgcttgaaggtttggctgatttggaggctgcactttgcctttgcactgctattaaggccaatgttcttggaatcaacttgaatgtgcctatcacactcagtgtgctactcaatgcttggcaaaaaaaactgtccttttggtttccaatgtgcataagcttccatcatgttacgttcattccatcact

SEQ ID NO: 17782 - DNA, 504 bp, Glycine max
  Clone ID: LIB3106-101-Q1-K1-D8
ctaagaaggagaagcaaatggcttcctcaatgatctcttccccagctgttaccactgtcaaccgtgccggtgccggcatggttgctccattcactggcctcaagtccatggctggcttccccaccagaaagaccaacaatgacattacctccattgctagcaacggtggaagagtgcaatgcatgcaggtgtggccaccagttggcaagaagaagtttgagactctttcctacctgccagaccttgatgatgcacaattggcaaaggaagtagaataccttcttaggaagggatggattccttgcttggaattcgagtttgagcacggtttcgtgtaccgtgagcacaacaggtcaccaggatactacgatggacgctactggaccatgtggaagctgcctatgtttggttgcactgatgcttctcaggtgttgaaggagcttcaagaggctaagactgcataccccaacggcttcatccgtatcatcggattcgacaacgttc

SEQ ID NO: 17783 - DNA, 502 bp, Glycine max
  Clone ID: LIB3106-101-Q1-K1-D9
ccacaaccctccggcccctatataaacacgagctttctgtggtgcaccagtgtgctatcttatgggtgtgcctcaagaaataggtgtggttccgagctgaaacaagatggctggtgataaacaaaaactctttaacagactgaagccattcataggtgtagtgttcttacagtttggatatgctggtatggatattctatccaaagctgcactgaacaagggaatgagtaactatgtatttgtcgtgtaccgtcatgtttttgcctttgttgtcatggccccttttgcactgatctttggagaagaaagtaaggccgaagatgacattttcaatcttcatgaagataatgattctcaacttggctagagcctgttattgaccaaaatttgatttttttggcatgaatacaccacagcaacctttgctgtttccatgtacaatgttcctcctgccattacctttgtcatggcttggattctaggcttgagaaggaaaactaaa

SEQ ID NO: 17784 - DNA, 438 bp, Glycine max
  unsure at all n locations
  Clone ID: LIB3106-101-Q1-K1-E1
cccacgcgtccgtccacgcgtccggcagatgccggtcaagcaagaatccatttatagatcatgaggattcttctggtagcaacctttctactaccaaacctcaaaaggtagccctaatcctagtccctggaataaaggaattcaatgatgcanattactggagggttgaccaggaggttgctgttctagagtgacggatagtaactcttgcttgtttgtatcaaaagttagaccaacaccagtggaccctattcttggttcgcaggagcgactgcagcacattaatgtacagtatattttttgtttcaattatgccttctttctgttgttcacgcttattagacatttgcgtattagagattaagcttgcttttaattctaagttttgccccttcctgtaagtgatttatgggttttcccacatttatggaattagtc

SEQ ID NO: 17785 - DNA, 301 bp, Glycine max
  Clone ID: LIB3106-101-Q1-K1-E10
gagataactagaaacagtgtgatgaaaatgaaggtccttgttttcttcgttgctacaattttggtagcatggcaatgccatgcgtgcgatatgttccctctccgaatgaacactggctatggtgcccgtactccggaggtgaaatgcgcaagttggaggcttgctgtggaagcacacaacatctttggctttgagaccattcctgaagagtgcgttgaagcaacaaaggaatacatccatggcgaacaatatagatcagactccaaaacagttaaccaacaagcttacttttatgccagag

SEQ ID NO: 17786 - DNA, 500 bp, Glycine max
  Clone ID: LIB3106-101-Q1-K1-E11
cccacgcgtccgcccgtccaacgcatgatttatgatgaaattcatggctactctttaacttcaatcaatcctttcttggatgattcaagcccaagggatcatgcctttgttgatgaattcagctgcataggctgcaaaaattgtgccaatgtagcccctggtgtgtttgcaattgaggaagactttggaagagccagagcatacaaccaatgtggggaccctgaattagttcaacaggcgattgacagttgccctgttagctgcattcattggacatcttctgcacagctatcattactggaagatgagatgcgccgtgtagaaagagtcaatgttgccctaatggtatcaggaatgggaacagcatcaattgatgttttcagaatggcaagttccaaatgggaaaaggaggcagcaaaagtcttgggtagaactcttatattcaatgccttcattttttggttaatatgtgaagcgtcactttattacatgcaattaaa

SEQ ID NO: 17787 - DNA, 406 bp, Glycine max
  Clone ID: LIB3106-101-Q1-K1-E12
caggggttggagctgcttggaatacagctaatgtgcattcgggttcaactgtagctgttttcggcttaggagctgttgggctcgctgttgctgaaggggcacgagctagaggtgcatccaaaataataggtgtagacatcaaccctgacaaattcatcaaagctatgggagtgacaaacttcataaaccccaaggatgaagagaagccagtatacgagagaattagagaaatgactgatggaggtgtacactacagttttgaatgtactggaaacgtggacgttcttagggatgccttcttgtctgctcatgagggttggggattgactgtagtattgggaattcatgcatcaccaactttgcttcccatccacccaatggagctcttcgatggtcgcaacattgt

SEQ ID NO: 17788 - DNA, 354 bp, Glycine max
  Clone ID: LIB3106-101-Q1-K1-E2
cccacgcgtccgaatgaaaattggaagagggtgatgaggatttatttgacatggtgggttttgtggcgattagccggtccgtgagtgagttggttgaatggcgagtagccggaaaagaacgtttggcaacatgaggtcattcgtaagcaattcgatgggaggtctcaggggcggaagcaaccttgcttcttgggtcgtcgccggaaccctagcctacttcctctggatcaaaccctcccaagacttcaagcgtcaacaacaggagaaggccactcttgccgccgctgagtctgattcttatcgtaaacccattcccgaccctcaggttacgggtttgatatatggaaacaagaa

SEQ ID NO: 17789 - DNA, 371 bp, Glycine max
  unsure at all n locations
  Clone ID: LIB3106-101-Q1-K1-D1
cccacgcgtncgctttgtttcatacattaggcatcattcagttcagaaaatgtgaatattttcatgcgcaattgagtagaatctgctatggtgtctgccttgggtgctgcggtgaaccttgatcacggagttgaaacaatcttttacaagctgaagaattagttcagataaagttgaggttactttagagatagtcgaagattgcaacagagtgaacggcaccttaatgtcgggattttgcccttaaatgttgtagtgtagttaatccgatactgtaatgttttactgagttacatatacttttttccataattgaaacagaatagatatttataattaatacacagttctctccgcgtttgcccttttcc

SEQ ID NO: 17790 - DNA, 327 bp, Glycine max
  Clone ID: LIB3106-101-Q1-K1-E3
gtagtatttgtactacaatttacattcttttcatctctacatagtttcattagtcatggcacctcaagcagtttccttcaagtccttcgccgttgctcttattgtggcgctcttcttttccgcctccgctctggacttagtttcggggcagtcgccggtgccggcgccggcgccggcaccagatgccggagcagctggatccgtgtcgagctcggtcgccatgattggagcttccgttgtgatttcattgctcgccatcttcaagcactgaagaataatctgatgatggatcgattttgtgtgaagattattgattcgttctgcaca

SEQ ID NO: 17791 - DNA, 446 bp, Glycine max
  unsure at all n locations
  Clone ID: LIB3106-101-Q1-K1-B3
ggacgtcatcaatacgggcaaggccatgcangccatgggcgccaggatccgtaaggaaggcgacaggtggatcatcgatggcgtcggcgatggcggcctcctggcgcctgaggcgccgctcgatttcggcaatgccgccacgggctgccgcctgaccatgggcctcgtcggggtctacgatttcgacagcaccttcatcggcgacgcctcgctcacaaagcgcccgatgggccgcgtgttgaacccgctgcgcgaaatgggcgtgcaggtgaaatcggaagacggtgaccgtcttcccgttaccttgcgcgggccgaagacgccgacgccgatcacctaccgcgtgccgatggcctccgcacaggtgaagtccgccgtgctgctcgccggcctcaacacgcccggcatcacgacggtcatcgagccgatcatgacgcgcgatcata

SEQ ID NO: 17792 - DNA, 389 bp, Glycine max
  Clone ID: LIB3106-101-Q1-K1-B4
gtgtgatgaaaatgaaggtccttgttttcttcgttgctacaattttggtagcatggcaatgccatgcgtacgatatgttccctctccgaatgaacactggctatggtgcccgtactccggaggtgaaatgcgcaagttggaggcttgctgtggaagcacacaacatctttggctttgagaccattcctgaagagtgcgttgaagcaacaaaggaatacatccatggcgaacaatatagatcagactccaaaacagttaaccaacaagcttacttttatgccagagacctcgaagtccatcccaaggacacatttgtgttcagtatagatgggaccgtactctctaatattccatactacaaaaaaacatgaatatgggggggaaaaatt

SEQ ID NO: 17793 - DNA, 328 bp, Glycine max
  Clone ID: LIB3106-101-Q1-K1-B5
tgctattacgagacgacgcagatttagttcggattgttcgattgcgatggctaggaagatgcttatcgatggtgaagctgaattggctcaaggtggtggagaagaagtgtcgaattttgacttcgacttgtttattattggggctggaagtggtggcgttcgtgccgctagattttcatccaattttggagctaaggtggggatttgtgagcttccatttcatccaattagttcagaaacaattggaggagtcgggggaacgtgtgttattcgtggttgtgttcccaaaaagattttggtctatggagcatctttttggaggtgatct

SEQ ID NO: 17794 - DNA, 402 bp, Glycine max
  Clone ID: LIB3106-101-Q1-K1-B6
acccacgcgtccgcccacgcgtccgcttttacttctcagcagcttcggctagggttcagaaacgaagaagggttcggtgttctgttcgcgatgagagccaagtggaagaagaagcgtatgaggaggttgaagaggaagcgccgaaagatgagacagagatccaagtagtgcgttaaacctagtttgtttctgttgcttttacaattgcttatgttgtcgaatgggacacccagttgttagtggcactggtttctcctttttgatgtttgatacattttgttggattcaagtagtttatgttcgtcttatgttattagctcaaaacaatgttgttactgcttttgctaatcaacatgatctcctatttgcatctctgaaaaaaaaaaaaaaaagggcggccgt

SEQ ID NO: 17795 - DNA, 477 bp, Glycine max
  unsure at all n locations
  Clone ID: LIB3106-101-Q1-K1-B7
cccacgcgtncgcccacgcgtccgaggaaaccttcgtatctcaagaggaaataagggaaccacgtttgtgttacagaagcaaactgagcctaggcaaaggttattgacagctatttcctcggggaagggcattaaagaggcaatagatgaacttatttccttaaagcagaatactggtcaagaagatccagaactagaagagggtgagtggcagatgatgtggaattcacagactgtgacggatagttggatagagaatgctgtcaatgggctgatgggcaagcagattatcaggaagaatggaagaataaagtttctggttgatatcttgcttgggcttaagttctccatgtgtggaaattttgtaaaaactggctccggagtgtatggcgttacaatggatgatgcagccataattggtggcccattcngatatccctagaaactgaaaacaacttcatattggagcttctatac

SEQ ID NO: 17796 - DNA, 82 bp, Glycine max
  Clone ID: LIB3106-101-Q1-K1-B8
ctgatgtaatagcaccctttggttatgcacgtcagctgtaaaatagcagagatgaacctcacgtaccaatattgactgatga

SEQ ID NO: 17797 - DNA, 439 bp, Glycine max
  Clone ID: LIB3106-101-Q1-K1-B9
gacaagataagtgagaagaagatgcttactccaatagaggtcttatgcaagtcatatccattggagtttacatcatacttccactgctgccgaacgttgcggtttgaagataagcctgattattcttatcttaagagactatttcgggacctattcatccgagaaggttatcagtttgattatgtatttgattggactatgctgaagtatcctcaaattggatccagttctagagcccgaccaagtgggaaaccagtcataaaccccggacaatcatgagagagaatagaacggccttcagggggtttctcaggtgctgttgaggcatttgcaaggaggaatggctctggacttgttctgcaaagtgagcattctaggcataagtcttcagatgatgtgccatcttccaaagacgtgcaagctgattctgagaggcctc

SEQ ID NO: 17798 - DNA, 485 bp, Glycine max
  Clone ID: LIB3106-101-Q1-K1-C1
gatttattgcctggaacagtgattttattgaggagtgggtcaaaattggcttgcctgcaaaggcggaggtgaagacacaacatggggatgcaccttttgctgagttgtgctcacactgtgagaaggaagctgtgaatgtttcccttggaaaccttctaacatacccatttgttagagatggcttggtgaacaagacattgtcactaaaaggaggatactatgactttgttaagggatcttttgagctctggggccttcagtttggccttgcatcctctttctccgtatgaacatcaaccattatcaatgacctcatcttggttccctaagtattctcctatctaaaatgtactctgaaattaatattgcccttgttatgaatgcatgcatgtgctgaatttcctaataataaaagtggatatggagatttctccatcaccctctattccaaatttgaagttcaatccattttgatcaaagaaaca

SEQ ID NO: 17799 - DNA, 414 bp, Glycine max
  Clone ID: LIB3106-101-Q1-K1-C10
cccacgcgtccgcccacgcgtccgtgttgatcgagataactagaaacagtgtgatgaaaatgagaggtccttgttttcttcgttgctacaattttggtagcatggcaatgccatgcgtacgatatgttccctctccgaatgaacactggctatggtgcccgtactccggaggtgaaatgcgcaagttggaggcttgctgtggaagcacacaacatctttggctttgagaccattcctgaagagtgcgttgaagcaacaaaggaatacatccatggcgaacaatatagatcagactccaaaacagttaaccaacaagcttacttttatgccagagacctcgaagtccatcccaaggacacaattggtgttcagtatagatggcacccgaccttcttaatattccatactacaaaa

SEQ ID NO: 17800 - DNA, 358 bp, Glycine max
  Clone ID: LIB3106-101-Q1-K1-C11
caaaagtgcctcactcaattcacgttcttggcttttatgtgctgcattttgttaaatgctgtgcgttcaagagggttccatctaggggaccaaccacgaacccgggcgttttacatgactctccagatctgagtcttttttctctttagtctttaccatgatgtgtgctacaaaagattgatgaagttgttggtgtcttgagtccatctttgctcagtgtatacgtatattatatatataaactctctctctctctctctctctctctcacacacacacacagtaacatacttgtgttgttctggtgtgaagtgtgaaagtgtggaatctgtgtccaattcaccatagtgcggaaaat

SEQ ID NO: 17801 - DNA, 422 bp, Glycine max
  unsure at all n locations
  Clone ID: LIB3106-101-Q1-K1-C2
caagtctcatactatatatactcttaattgttatatatactttcttcgttcagcatggactccgcgagagcggcaggcgcaaaagtttgtggtgacggtgacagcggtggtggcggtggtggcgaagcgggcgagccggctgcagcggaagctggcggcgagggaggagtggaggatcgagcttctgcgatcaccgaagaagcttctgagcaacataagcagcaaaacgctgccgtttaggaagaagaagaggggggaggaggattggggaaagggtggggtgtggcanaaggcgatcctgatgggagacaagtgcgagccgttggatttctcgggagtgatttattacgatagtaacgggaagcaggtgaacgagatgcccctcaggtcggcacgtgccagtcccgtgccgcccgggtact

SEQ ID NO: 17802 - DNA, 439 bp, Glycine max
  Clone ID: LIB3106-101-Q1-K1-C3
gtctcaagcaaccatggcaatggcaacccaagcctctctcttaaccccacccctctccggtctcagagccagcgaccgcgcctccgtgccatggaagcaaaactccagcctctccttctccagcccgaagcccctcaagttctccagaacaatcagagcagcagccgccgacgagaccacagaggcaccagcaaaagtagaggctgcaccggtcgggttcaccccaccagaacttgacccaaacaccccttccccgatcttcgggggcagcaccggcgggctcctgcgcaaggcacaggtggaggagttttatgtcattacgtgggactcacccaaagaacagatctttgaaatgcccactggcggcgccgctatcatgagggagggtcctaaccttctcaagttggccaggaaggagcagtgcttggctcttgggact

SEQ ID NO: 17803 - DNA, 380 bp, Glycine max
  Clone ID: LIB3106-101-Q1-K1-C5
cccacgcgtccgaaaacaaacccactaagatggcttcctttgtatccttcctagtgctgcttcttgcagcccttatcctcatgcctggagggcttgctacttactacaaaccaattaagaagccaccagtgtacaagcctccagtgtacaagccaccagtgtacaaaccaccggtttataagccaaaaccaccggtttacaagccgaaaccaccggtttacaagccaccatataagaagccaccatacaagaaaccaccttatggaaagtaccctccagtagaggacaacacccatgcctaaagcaagcaatgaggtctattatctacttaataaataagaagaactgctttgtgttttctagcattgtgaattacaact

SEQ ID NO: 17804 - DNA, 381 bp, Glycine max
  Clone ID: LIB3106-101-Q1-K1-B2
cgccatgggcttcaatattctgagaaccacttccatctccactcctatctcttcctccaaatccagacccattttctcaactcttctggttcttctccttccaccattttccccccaaagtccgttactcccaccactcttttcgtttctgccacccccttcttcactctccatcccaagcttggttttcgtggtgggattgtggccatggccgcacctggctctctccgcaaatccgaggaagagtggcgcgcaattctctcccctgaacagtttcggatcctcaggcaaaagggcaccgagttccctggaacaggagagtatgacaagttctatgaagagggagtttacaactgtgctggttgtgggactccactctac

SEQ ID NO: 17805 - DNA, 376 bp, Glycine max
  unsure at all n locations
  Clone ID: LIB3106-101-Q1-K1-C6
cccacgcgtncggaaaatgtggaagagaacgggttttgaagaagaagcagttcaattgatcaactgagatttcagggacctaagtctagctgctaatagactcgcccatcatgccatcaaacttggtggcattggctttggagcctcttttttcggattgtttgctgccattgctgctatttatctgttgattttggatcgtacaaactggaaaacaaatattctcacagcactactcattccatacattttcttcagcttgccttcattaattttcgacgtcttcaggggagagcttggaaaatggattgctgcagttgctgttgtattacgccttttccttccaagacacttccctgattggcttgaattggct

SEQ ID NO: 17806 - DNA, 250 bp, Glycine max
  Clone ID: LIB3106-101-Q1-K1-C8
cttccctgcaaagctgaagtggtgaagagttaattggagccatgaagtgccaataatttaccagtatagccaactagttttgtagtgagtagagagaattaataagctataaagctgttgttgcagtgtggtataagatattcttgtaagttgtatgaaataatatatgcagctataaagtcctatcagaaatatttttccttttaaaaaaaatgtaacaaaacaaaaaaaaatataaaaaaaaatttaa

SEQ ID NO: 17807 - DNA, 485 bp, Glycine max
  unsure at all n locations
  Clone ID: LIB3106-101-Q1-K1-C9
gattgctagaatggaatttcgatgctcagtcatctcttttaccattctcttctctcttgctcgtgcgggagagagccatgtccagtgcatcgctacctgaggaagattattgggaagctgtttggccaaacactcccattcccactgcactgcgagagcttctaaagcctctccctgcaggtgttgaaatcgatgaactccctaagcaaattgatgatacacagtacccaaaaacattcttctataaagaagaccttcatccatgcaaaacaatgaaagtacaattcaccaagcgtccctatgcacaaccttatggtgtatatacatggttaacggatattaaagacacctctaaagaaggatatagttttgaagagatatgcatcaaaaaagaaacgtttganggagaagagaagttttgtgcaaaatccttgggaacagtaattgggtttgccatttcaaagctgggaaagaacattcaagta

SEQ ID NO: 17808 - DNA, 422 bp, Glycine max
  unsure at all n locations
  Clone ID: LIB3106-100-Q1-K1-H6
cttctccccgtttgggggcttttgcgaggctgtgcacgccatgctctccaactacaccaacggcgtgcacaagatggaggacgaagggggcagagagagagcgacccattgatgtcttccggcaacacaggggacgcacacatgaagacatctttgccaaacatgggttagttcgccgtgggacagtggtggtggcgctcgcgattatggtggtcggaggcgttgtggattacatctggtcacctcagaatctgcagattcccacaagcggcaatcccgcggagaatgttgtcgctgtagcgctgcagttggagttcctacaaagtggagcacttctaggcgatgaccgatgtgaggccattgtcgacttctcgatcacttncaaggggagcatgtcctggcagaagcaccaaaaagggaga

SEQ ID NO: 17809 - DNA, 412 bp, Glycine max
  Clone ID: LIB3106-100-Q1-K1-H7
gggtttttgagtgcggcggtccaaacactcttctctgcagcttttgcctacaactcccttcaccatggctgaacaaaccgagaaagcttttctgaagcaaccaaaagtgtttctcagcacaaagaagactgggaagggaaagagacctggaaaaggtgggaaccgcttttggaagtccattgggcttggatttaagactcccagggaagccatcgaaggaacctatattgacaagaagtgccccttcactggcaatgtttccatccgtggccgtatcttggctggaacatgtcacagtgctaagatgaacaggactattattgttagaaggaattatctccattttatcaagaagtaccataggtacgagaagaggcactcaaatattcctgctcatatatcacctgccttc

SEQ ID NO: 17810 - DNA, 421 bp, Glycine max
  Clone ID: LIB3106-100-Q1-K1-H8
cttataacttagcattgtattgtgttcaaactttgtttcttccataccctcttcttctttggccttaaccgtcatatttggctttgaaatggagttcgaggaccgcttcagacaccaggttcagagaccaaaatatgattgccttctttttgatttagatgacactttgtatcctctcaaatctggtctggcaaaatcatgtctccaaaatattaaacactacatggttgagaagcttggcatagaccctagcaaaattgatgacctgtccaacctcctttacaagaattatggaactactatggctggtctaagggcaattggatatgactttgactatgatgaatatcatagctttgttcatgggagattaccttatgagaacctaaaaccagacccagttctgaggaacctgttgctg

SEQ ID NO: 17811 - DNA, 293 bp, Glycine max
  Clone ID: LIB3106-100-Q1-K1-H9
gtttcacaaactaaagaacaacaatatgcctccaatcttgccggatttctccaactcggtgaaactcaagtacgtgaaactagggtaccaatacctggtgaaccacattctgactctcactctcatacccatgatgatcgccatcttcatggagattctacgcttatgccctgaagagatcctgaacctctggcactccctccacttggaccttgtccaaatcctctgctccgccttcctcatcatcttcatcgccaccgtctacttcatgtgcaaaccccgcaccatctacc

SEQ ID NO: 17812 - DNA, 291 bp, Glycine max
  Clone ID: LIB3106-101-Q1-K1-A10
gcaagtttgtgatctctaaggaaggaaatgctgccgagacactctacaaatttataaggcccgagaatattcctgttcggtatggtggattgagtcgaccaagcgatttggagaatggtcccccaaaacctgcttctgagttcacagttaaaggaggagagatagtgaacatacaaatagaaggaattgagagtggtgcaactatcacttgggatattgtggtgggaggctgggacttggagtatagtgctgaatttgtcccaattgcacaaggtagctacaccttagcag

SEQ ID NO: 17813 - DNA, 326 bp, Glycine max
  Clone ID: LIB3106-101-Q1-K1-A11
agaggtttcagtgaaagatactcttatgcaagaaggtatagaaccccctctcggtctcctgtgaggtcataccgctacaatggaagagatgaccgggacagatattctacttacagaaggttttcccctaggcgtttcaggagcccaccaccacgtggaagaactcccccaaggtatcgaagcaggaggagcaggacgccatctgtttcacgcagtccacgatatcgagcccgacgatatagccgaagtaggagccccgttcgcagtcgttccctagttgatagatccccgccctctcgtgtggagaggcatgcatcttcttctcg

SEQ ID NO: 17814 - DNA, 92 bp, Glycine max
  unsure at all n locations
  Clone ID: LIB3106-101-Q1-K1-A12
cccacgcgtacgtccacgcgttcgcccacgcgtncgaaattatgcgcccttgttccatnngngagaaaaaaaaaaaaaatatacggaagaac

SEQ ID NO: 17815 - DNA, 372 bp, Glycine max
  Clone ID: LIB3106-101-Q1-K1-A2
cccacgcgtccgattcacctgagctttttgtgaggattccaaagcatggcttcccttgcagcatcgactgctgctgcttcccttggcgggtgagaaatgcttggaaaccccatcaacctcagtggtgccacaaggccagctccatctgcctctagccctgcctccttcaagactgtggctcttttctccaaaaagaaggctgcacctccaaaaaaagctgcagctgctgctcctgccaatgatgagcttgccaagtggtatggtcctgacagaaggatcttcttgcctgagggtctcttggaccgatctgagatcccagagtacttgaccggagaagtccccggagactatggttatgacccatttggtctt

SEQ ID NO: 17816 - DNA, 418 bp, Glycine max
  unsure at all n locations
  Clone ID: LIB3106-101-Q1-K1-A5
gcaagatgtacccagacttgagctacactgagtcaaccaccaccgagaccttggtcatgggagtggcacctgttaaggctcaatttgagggtgctgaaatgggtgtgcccgctgagaacgatggctgcaaatgtggaccaaactgctcctgcaacccctgcacttgcaagtgaggtgttgggagagcaagcttcaagcagagatagcccttaattaggaataatgataaactattaatgtgtagctaaaaacttatgtattatgtctgtgatggttttcgtgcactctggtgttttgtgttaaacaaacatccttagaatanagtggtcatgtcttgcctttcagcaagttcaagtgttttggacttgtgatgggtgtgtaagctcatgggtggcttctttttttttttttttaatgt

SEQ ID NO: 17817 - DNA, 344 bp, Glycine max
  Clone ID: LIB3106-101-Q1-K1-A6
ctctgctctcacccttattcctctctttcctttctttcttctgcaacaaaaatcatgtctgggtccttgggattcttctttgtgggtcttacgttgttgttgttggtcggggtggctaatgctgtggccaacacttccaacaaatttgatcaactcttccaaccaagctgggcttttgaccacttcattcatgaaggggatctcctcaaactcaaactagacaatttttccggcgctggttttacttccaagagcaagtatatgtttgggaaagtcaccatccagcttaagcttgtggaagggtgactctgctgaacagtcactgctttctatatgtcatcgga

SEQ ID NO: 17818 - DNA, 296 bp, Glycine max
  Clone ID: LIB3106-101-Q1-K1-A7
tgaaacagcacatgctgaggaaaagaaggggttcctcgacaagattaaggagaagctaccagggcgacaagaagacagaggaggccggggctactactcctcctccaccaccacctgttgcatcattggagcatggtgaaggtgctcatcatgaaggagaggccaaggagaagaaaggtatattagaaaagataaaagagaagcttcctgcgtatcactccaagacagaggaggaaaaggaaaaggaaaaagagaggtgtgctcattgatatttaagattgagacaaggctttttt

SEQ ID NO: 17819 - DNA, 384 bp, Glycine max
  unsure at all n locations
  Clone ID: LIB3106-101-Q1-K1-A8
catatctctctctcacacacacagtctcttcttcttgctattccttcctcgttatggagtcgcgagtgctgtcacgcgccggaaccttgtcctccctccctcacctccgcaagccgccgcgggaggccgtctccagcgccttcctcgtcgccgtgaaagccgtgggctccgtcgcggacggcggaaacctgatttgggggaggcagctgcgcccggagctctgctcgccggtgctgaaaagggaggctgtcctncttcggccatgcctcgccgnncgcttctngncggncgagggtagtgattccgccggagaagcaaaggttgctccggcggggttctttgacaagtacccggctctggtcaccggatttttcttcttcacgt

SEQ ID NO: 17820 - DNA, 412 bp, Glycine max
  Clone ID: LIB3106-101-Q1-K1-A9
ctccttctctgatattcgcactgcctaccgcaaactcgctatgaggtggcacccggacaagtgggctctgaatcccgcagccgccggcgaagccaagcgccggtttcagcaaatccaagaagcctactcagttctctccgatcagtctaaaaggtcaatgtacgatgcggggctctacgatcctttggaggaagaagaccaagatttttgtgacttcatgcaagagatgatctcgatgatgaacaatgtgaaagacgagggggacagtttggaggacctacagaggatgttcgtggatatggtggggggagatcatggccatggaatcggcgttgacttgaaccaagatcgaacggctggaaagcgaagacgagtatatggatcgaagggcaacgcgcccaagcgcagcaac

SEQ ID NO: 17821 - DNA, 417 bp, Glycine max
  Clone ID: LIB3106-100-Q1-K1-H5
aaaaaaactttccaatttcgtaggagatgctcaggagcagcacgctaacacagagtgttacagtcacctgtgttcatcacagtcacagacaatggttccaatcaattcccgtaaattatagattctgtgacgctgctcggaactctctatcatccaactccgccatcttcaagtggaaaagaacggctaattataatcgtaaccgttctggaatgggaaccttcaccacgcgcgcgttggcgcagccgctccagaacgccgacgaactcatcgattccgtcgagacatttattttcgattgtgacggagttatatggaaaggtgacaaattaatagaaggggtgcctgaaacgcttgacatgcttcggtcaaagggcaaaagattagtttttgtcaccaataactcaacaaagtcta

SEQ ID NO: 17822 - DNA, 336 bp, Glycine max
  unsure at all n locations
  Clone ID: LIB3106-101-Q1-K1-B1
cttgacaagagacatcacanaagaacttggcattggaaagtaaatacacacagaacaaataaaagtttgtgtttactcgatggcgacaagttcctcatatattcactacatgtcatttgatcaagtcaatcattctttgggttgacgttcgttatattcacccatttgcttcatgaagtaccctcctttgtctgagtaagtgagtatcttccactgatgtactgtaattctttttctttntttttacattatttgtatagcagaagagttcctattgtttctagccaatagccatatcatcataacttcgaaaaatgttatttttagttattggtt

SEQ ID NO: 17823 - DNA, 212 bp, Glycine max
  Clone ID: LIB3106-101-Q1-K1-B10
aacagcgagcagtgcagactaagatgcttactccaatagaggtcttatgcaagtcatatccattggggtttacatcatacttgcactggtgccgaacgttgctgtttgaagataagcctgattattcttatcttaagagactatttcgggacctattcatccgagaaggttatcagttagattatgtatttgattggactatgctgaagtat

SEQ ID NO: 17824 - DNA, 190 bp, Glycine max
  unsure at all n locations
  Clone ID: LIB3106-101-Q1-K1-B11
cccacgcgtccgcttggagttcggattctgttttacaagaaagatacattatactccaattgggcgccgaanaccaccagctttagggtgttatactacctatcttccctcatcattcacactctcatcttttcttctttaccctacccttttcccacctcttacccatgttcttcttctctcgcttttt

SEQ ID NO: 17825 - DNA, 343 bp, Glycine max
  Clone ID: LIB3106-101-Q1-K1-B12
cccacgcgtccgaaacaatgatggctggtgttagtggcagtagcactactcccttattgtgctctttgttctttatttcttccttactttttgcttcctgcacccatgcctcctcccaggcacctcctccaattgtggatggactttcatgggatttctataggacgagctgtcccatgcttgaagggatagtgagcaagcatctccagaaggtgttcaagaaagacaatggtcaagctcctgccttactcaggatcttcttccatgactgctttgttcagggttgcgatgggtcgatattgttggatggaagtccaaatgaaaaggatcaaccggcaaacat

SEQ ID NO: 17826 - DNA, 434 bp, Glycine max
  Clone ID: LIB3106-100-Q1-K1-G11
ggttgagtagttcttcatcatagtcttaaacattaaaccttagcaaaactcaacaatgctagacatcaaaggctacctcgtactcttcttcctatggttcatatcaaccattctgatacgttccatcttcaagaaaccacagcgtctaagactcccaccgggtcctccaatttcaatacccttgctgggacacgcgccatatctccgttcactgctccaccaagcattgtacaagctatcactgcgctatggacccttgatccacgtcatgatcggttcgaagcacgtggtggtggcgtcgtcggcggagacggccaagcagatcctcaaaacctcggaggaggcattctgcaaccgtcccttaatgatagcgagcgagagcctaacctacggcgcggcggactacttcttcatcccctacggaacatactggg

SEQ ID NO: 17827 - DNA, 431 bp, Glycine max
  Clone ID: LIB3106-100-Q1-K1-G12
agacaaactggcgcaggccaaagggcatagattctcgtgttaggagaaagttcaagggatgcactttgatgccaaacattggttatggttcagacaagaagacccgccactatctccctaatggtttcaagaaatttgttgttcacaatgtgaaggacttggagctgctcatgatgcacaacaggacttactgtgctgagattgcccacaatatatccacaagaaagagaaaagatatagttgagagagccgcgcagcttgatgttgttgtgacaaacaaaacggccagattacgcacacaggaggatgaatagtcactcattggtagtgaatcctgatgacacttgttgcgacattgattggattttgatctttttttatgcttctataaattgcagcatgatatacatttaacatggtcttttacccct

SEQ ID NO: 17828 - DNA, 414 bp, Glycine max
  Clone ID: LIB3106-100-Q1-K1-G2
cccacgcgtccgctcggtgaaactcaagtacgtgaaactagggtaccaatacctggtgaaccacattctgactctcactctcatacccatgatgatcgccatcttcatggagattctacgcttaggccctgaagagatcctgaacctctggcactccctccacttggaccttgtccaaatcctctgctccgccttcctcatcatcttcatcgccaccgtctacttcatgtccaaaccccgcaccatctacctcgtcgactacgcctgcttcaagccacccgtcacctgccgcgtccccttcgcaaccttcatggaacactccaggctcatccttaaagacaaccctaagagcgtcgagttccaaatgcgtattctcgaacgttccggtctcggtgaagaaacatgttttccccc

SEQ ID NO: 17829 - DNA, 413 bp, Glycine max
  Clone ID: LIB3106-100-Q1-K1-G3
atcaaaagtggaaaatctctcagtctcttatagtgatgagtttccataatattatggataacattgtattaaagatgactagtttatacaccttggttctcctactttttctttttctatcttatagacctgctctttcattttcttctagacataggcaatattggggtggtggtgggaggatattgagctctggtgagcataatggtgatcttgtgactaatttgcctggtcagcctagggtgaattttcagcactatgctggatatgtcacagtcaatgaaaccaatggaagagcactcttttactggttctatgaggctatcacccagccaaaagagaaaccattggtgctttggcttaatggaagtcctgggtgctcttctgtgggatatggagcaacacatgagatt

SEQ ID NO: 17830 - DNA, 418 bp, Glycine max
  Clone ID: LIB3106-100-Q1-K1-G4
gtcacttctgcagccgttgctattccctcattcactggcctcaaggcaagcgcaggcaaagtgagtgccgcagttaaagtctcagctccccaagccacaaggttgggcatcaaggcttcgctgaaagacgttggagtcgctgttgtggccactgccgcgagtgcagtgctggctagcaacgccatggccattgaagtgttgctgggtggtgatgacgggtctctggctttccgttcccaacaatttctccgtggcctctggggagaagatcgtgttcaagaacaacgcaggtttcccccacaacgttgtgttcgacgaggacgagattcctagcggcgtggatgcagggaaaatctccatgagcgatgaagaccttctcaatgcgcctggtgagacttacagcgttactttggatgct

SEQ ID NO: 17831 - DNA, 252 bp, Glycine max
  Clone ID: LIB3106-100-Q1-K1-G5
gtcacgcgttcgcccactcgtacggagactttttgtgggagagtgggccattcttggggcgatattgctgttgttggggtcaaaaatcaaagctttagcttctgagggataaaggatcgcatgaaagacgctttattctacatggttgaaaatgcccaaaataaataagatggtgtcacttcttcttctattgatttaactcacgaatgttcttatccttctcttggatggcctatttagaaggttactctc

SEQ ID NO: 17832 - DNA, 418 bp, Glycine max
  Clone ID: LIB3106-100-Q1-K1-G7
cgattacaacggcggcgacggtctccggctgccgataaaggtcttcgtcgaacacgcggatgtttctccgtcgccgtcggaggcgacgacgccggcggaaggaacatactgcgagtggaatccgaaagcggcggtgaagagcaactcgacgggattctcgaagctgtggaggttccgagacgtgaagctgcggagcaacagcgacggaaaagacgcgttcgtgttcttgaaccacgcgccggcggcgaagccggcggagaaggcgagcagcgtcgtcgtgaagaaggttgaggtgaagaaggggaaaacgacgacggcggcggcgtctgcgcacgagaagcattacgttatgagcagagcgaggaaagagagcgataaacgcaagtcgtatttgccgtataagcaagatctgttcggg

SEQ ID NO: 17833 - DNA, 415 bp, Glycine max
  Clone ID: LIB3106-100-Q1-K1-G8
gtttgttgtgagctataagctagtttatcgtgaggagaatatgaagttgtttgttttctttgttgctgcagtagttttggtagcatggccatgccatggcgcaggctaccaaaggttccctctccgaatgaaaactggctatggtgagcgttcttcggaggtaaaatgcgcaagttttaggcttgctgtggaagcacacaacatccgagcctttaaaaccattcctgaagagtgcgttgaaccaacaaaggactacattaatggcgaacaatttagatcagactctaaaacagttaaccaacaagctttcttttatgctagtgaacgcgaagtccatcacaacgacatatttatattcggcatagataacaccgtactctctaatatcccatactatgaaaaacatggatatggg

SEQ ID NO: 17834 - DNA, 374 bp, Glycine max
  Clone ID: LIB3106-100-Q1-K1-G9
gaagaaacttaatcgatcatcacttcacttcactaatacatcatggcagactagacccagaacaagtatgagagctctgaggttgaggtccaggatcgtggtgtttttgactttctcggtaagaaaaaggatgaagaagacaatcctcatcctcaggaggaggtcatcgccaccgagtttcaaaaagtcactgtctcagaccaaggagagaacatgcacagcctcttagaaaagcttcaccgatctgacagcagctctagctcttcaagtgaggaggaaggagaagattgagagaaaaggaagtagaagaagaatgaaaagaaagggctgcaagagaagatcgaggagaaaatagagggtgatcatcatcatca

SEQ ID NO: 17835 - DNA, 419 bp, Glycine max
  Clone ID: LIB3106-100-Q1-K1-H1
cttggcttcaagattgtattcttgtcaggaagatatcttgacaaaatggccgtaacagaagcaaacctaaagaaggctggcttccacacatgggagcagttaattctcaaggatccacatcttatcactccaaatgcactttcatacaaatcagcaatgagagagaatctgttgaggcagggatacagaattgttggaatcattggagaccaatggagcgatctgcttggagaccacagaggcgaaagcaggacctttaagcttcctaatcccatgtactacattgagtagtaccttcacctctctcaacaatctagctagagtttgctcctatctatatgtaataaggtatgctgatatgcactattcaaataggagcattagctatgtttggtaatgtcactttatgttatgtgggt

SEQ ID NO: 17836 - DNA, 433 bp, Glycine max
  Clone ID: LIB3106-100-Q1-K1-H11
attattttatattatttcttgcctatagttagtttgaaaattaggtactacatcatatgcatgatcagcatttgttactgctcctctgaatttgtctgagtctgagctgttgattctcccaacacaactaaaaaaaagaagaaaaacttatagtggtcgttgtaggaaagcaagaacagtgaagtgttctcctaattcagtgagtgaggttctgaattctttaacttgagatgatggcatcacttgcagggactactcagaagtgcaaagcatgtgagaagactgtgtatttggtggatcagctcactgctgacaacaagatctatcacaaatcatgtttcagatgctaccactgcaagggtacccttaaattgagtaactatagttcctttgagggtgtgttattactgtaagcctcattttgatcaactct

SEQ ID NO: 17837 - DNA, 372 bp, Glycine max
  unsure at all n locations
  Clone ID: LIB3106-100-Q1-K1-H12
gatgattaccttgtaattcacacaaatggattattgaggaagtatatgaacaatactatatggagctagattacaatctgaatcagtagtgtgtaaccctgtgggagatttacaaacatattggtacacatatctaattcctgtcacctaattgtatgacgagaattctggcttatttcttctggtctgcctagacagctgattctaaagttaattcttaactaggtctctgattcataaattatagattctattatattgtgtaatcctgaatgtgttaactctctttttcagaaccattgaataaaagaaagaccggacaacatacaagaaacatttattggttggtctggccnnaaaaaaacttaaaat

SEQ ID NO: 17838 - DNA, 426 bp, Glycine max
  Clone ID: LIB3106-100-Q1-K1-H2
ccttagtttcgaaagcatggcttccctggcggcttccaccgcggctatgtcagaaatccttggaaaccccgttaacctcagatgcgcaaccaggtctgctccatcaccaactacacctgccaccttcaagaccgtcgcacttttctccaagaagaagccagctccacctccaaagaaaaagcctgccgctgtatcccccgccaatgaggaactcgccaagtggtatggtcctgacagaaggatcttcttgcctgagggtctcttggaccgatctgagatccccgagtacttgaccggagaagtgcctggagattatggttatgatccgtttggtcttagcaagaagccagaggacttcgccaagtaccaggcgtttgagttgattcatgccagatgggcaatgcttggtgctgctggattcatcat

SEQ ID NO: 17839 - DNA, 424 bp, Glycine max
  Clone ID: LIB3106-100-Q1-K1-G1
cccacgcgtccgctctgtgtcatggtttggaaagtccaagttcggcttcagttcttcctgaggacattgataatattggggattccaatcaagtggtaaaaactttatcatcagagataagtgaagatgaagcagtgagatctggttcagaaagtataaaagaaaatggtaatatgaattttcacgggtctgaaaatgctgggaacaagcaacatcaaaacattgcttcaaatggcaactctagcagtagtggaactaacatggatggtgagaaaacctttagcattttgcttcggggaagaagaaatcgaaagcagactctgagaatgccaataagtttgcttactcgacctaatggctcacagtcatttaaggttatttataaccgtgtggttagaggaagtcatgctcccaagtctatgaa

SEQ ID NO: 17840 - DNA, 167 bp, Glycine max
  Clone ID: LIB3106-100-Q1-K1-H3
gttctagatcgcgagcgggccgcccttttttttttttattttttttttttttttttttgttgttgtttttttttttttttggtgcgttttcttttttttttttttttattttttttttttttaaaaaagaccatttccttttttatattttgaaaagagggaaaacc

SEQ ID NO: 17841 - DNA, 399 bp, Glycine max
  Clone ID: LIB3106-100-Q1-K1-H4
gttgagaactaagaaggagaagcaaatggcttcctcaatgatctcttacccagctgttaccactgtcaaccgtgccggtgccggcatggctgctccattcactggcctcaagtccatggctggcttgcccaccaggaagaccaacaatgacattacctccattgctagcaacggtggaagagtgcaatgcatgcaggcgtggccaccagttggcaagaagaagtttgagactctctcctacctggcagaccttgatgatgcacaattggcaaaggaagtagaataccttcttaggaagggatggattccttgcttggaattcgagttggagcacggattcgtgtaccgtgagcacaacaggtcaccaggatactacgatggacgctactggaccatgtg

SEQ ID NO: 17842 - DNA, 405 bp, Glycine max
  Clone ID: LIB3106-100-Q1-K1-E5
accacgcgtccggctcgatcggacaggtctgccaggtcatcggtgccgggttcgatggcagattccacgaggttttgcctccgatcatgaccgtgctggaggttctgtatcactactagaggctcgggcaggatgtggataagcatatcagtgatagcgacagctcgaaccattgcacatggatgccaccgaacgggtcgctagagggatgcactcactcaacactgtctaacttattacctttccagctggaaggactaccctgtgacgtatggtatatgtctgtggcgagcctatagatgactggggtgacatcaataccgagcgttatttgcccattcatagagaatctatcgcttatagctgagcatgactctcgacagcacgattcttgttactggaatc

SEQ ID NO: 17843 - DNA, 419 bp, Glycine max
  Clone ID: LIB3106-100-Q1-K1-E6
aaagggctttgcgttgaatagaagtagggtttaggtaataggtgaaacggtgggagagaagcagcctcaacctgaatctaaggtactgcaatctcttatggtttctattggttcaaaaacattggtgtcaagaagctcaatgggcgagcacgactatgaacccctcaaacatggcaaaactaagaggaggaagcataagaaaggaggatccactcatgcattcgattccaactccttcacttctccgcctcaactatcccgtgttaggaaacagcttgaccctgaaacaacccaatacttctctgaaatttctaatctttttgaaagtgacggggttgaattggaggatcgatcacttatatgtgctaatgctctcgaagaaaccaaggggaaagaattcgaaattgcaactgattata

SEQ ID NO: 17844 - DNA, 416 bp, Glycine max
  Clone ID: LIB3106-100-Q1-K1-E7
cccacgcgtccgatatagcccaagccctatacaaccaaaccctaacacacacccatttgattcagtttccatggctagcctcaaggttgcatttttggctgcagtgctctgcatggttgtggtgagtgcacccatggcacatgcagctatcacgtgcgggcaggtgacgagtagcctggccaattgcatcggttacctccagaagggaggaacgccgtcgtcgggatgctgcaacggagtgaagagcctcaatgccgtcgccaagaccaccgtcgaccgccagacggcgtgcaactgcctcaagtcggccgccagccaaatctccggcttcaacgccaacaacgccgactcgctccccggcaaatgcggagtcttcatcccctacaagatcagcaccttcaccaactgcgctacca

SEQ ID NO: 17845 - DNA, 419 bp, Glycine max
  Clone ID: LIB3106-100-Q1-K1-E8
cacttccatcttcatcgtaaacaaacctcaaagttgcattccaccatgtctaaacaacccattgatccctttcgccacatcaacatagttctcaaccctaacggaaccctaaatcgcttgcgccatattcccagcaccgcaccctcttccgaccccactctcccagttctcaccaaagacatcaccatcaaccaacaaaacaacacatggctccgcttattcctcccccgaatagcactatccccaaaccctaagaagctacctctcatcgttttcttccacggcagcggcttcatcgtaaccagcgccgcctccactatgttccacgacttctgcgccgccatgtccgacgccgtccccgccgtggtggcctctgtcgaataccgactcgcgccggagcaccgtcttccggcggcgta

SEQ ID NO: 17846 - DNA, 415 bp, Glycine max
  unsure at all n locations
  Clone ID: LIB3106-100-Q1-K1-E9
cggacgcgtgggcggacgcgtgggtttccgttcccactcccactgctactctgccattcaaatatgcaattgattcccaccattcaaagccaaattctctattctcatcctcaccacaaaaactgaacacaacccacctcatattacaagtagctgattctggcaagtggagcaacatggtttcatttttcccaggttttataaccgaaggtagagatgttcagagcctcaaggtggatctctatgaagcaattgcaccacttgaccgaggtgccgaggctactcctgaggaccaacaacgtgtggaccagattgctcgtaaacttgaggctgtgaatcctgttaaggagcctctcaagtctgatttgctcaatgggaaatgggagctnttctatacaacatctcaatcaattct

SEQ ID NO: 17847 - DNA, 404 bp, Glycine max
  Clone ID: LIB3106-100-Q1-K1-F10
atcatatctttgattcagcttccaaacgcgccattcccatttctctctctctgcttcttcttcagatacctaacctaatctcccaaacaaacaaaccaactcaaccttatcaatatcgtttaaataaattttgatcgcgcacgcgctttgagatagatcatgctgcgtttgtgctacggccctctggattgctgcttcggacgccgtggtggccgcgccgccgactgacttctctggcacaccgacttgaatccccacgccttcggcgacttcttcatcgccgtcgcccaggcgaattacagtcttgaggatcagagccaagtcttcaccttcccctccgccacctacgtcggcgtctacgacggccacggcggccccgaagcttccagattcgtcaacaagcg

SEQ ID NO: 17848 - DNA, 282 bp, Glycine max
  Clone ID: LIB3106-100-Q1-K1-F11
cccacgcgtccgctaggatactcatagttatacgaacttttattactaagctctcaaactcatttcaaagatcattaatgttttgtcgtactttcgcagcagttgaaggttggttctggtgaagcttcacagtattttttggcttcttttgagggacaagcaatctcttggagcttctgttttttctttatttggctgtcgttttgtatattatttttagctagtaagtagttttgctgatcaagtgaagcattttagtgaatggtggctcactcaaagttt

SEQ ID NO: 17849 - DNA, 254 bp, Glycine max
  Clone ID: LIB3106-100-Q1-K1-F12
atccacatggattgatcaggaagtatggccttatgtgctgcaggcagtgcttccgtagcaatgccaaggaaattggcttcatcaagtatcgctaaaagagctgttgtcacctacggaccaatattatgttctggcactaggatgttttgaagatgttatgtttgaagaaacttgagacttgtttttttcatctattttattatcagacataatgtgtggaacgaagaatacttttatataaattgttttgcact

SEQ ID NO: 17850 - DNA, 351 bp, Glycine max
  Clone ID: LIB3106-100-Q1-K1-F2
accacgcgtccgatggtggtttaattctatgttgtttaataggaagttagaatacaggtgtgaattaagtaaatcaatggatagtcttggtcctattgaaaataccagtctaagggaagaccctaaaattttaaccgatatagaaaaaaaaattcacagggatttggattatttagaaatggaaggtttattttctagcgatctgaatactgtttctaagaatgatgatgatcattacatgtatgagactcaatttagttgtaacaataatattactagtttcattgataggtgcattgagagtttcaatttaggtgatattgacaaatacaatgatatttatatttatag

SEQ ID NO: 17851 - DNA, 413 bp, Glycine max
  Clone ID: LIB3106-100-Q1-K1-F3
attcacccaacaaaatggctctgcttctgatagtacccatttcactggtaaccctctggctcggttacaccctataccagcggctacgcttcaagctccctcctggcccacggccctggccggtagtcggtaacctctacgacataaaacccgtccggttccggtgcttcgctgagtgggcgcagtcttacggccctatcatatcggtctggttcggttcgaccctaaacgtcatcgtttcaaactcggagttggccaaggaggttctgaaggagcacgatcagcagctggcggaccggcaccggagccggtcggcggcgaaattcaaccgcgacgggaaggatctcatttgggccgattatgggccgcactacgtgaaagtgaggaaagtttgcacgctcgagctttttacg

SEQ ID NO: 17852 - DNA, 361 bp, Glycine max
  Clone ID: LIB3106-100-Q1-K1-F4
cggacgcgtgggcagacgcgtgggttcatataaaacagcagtgagagagaaactgataaggcagggatacaacattgttgggatcattggagaccaatggagcgatctcataggaggccacagaggcgaatgcaggacctttaagcttcctaatcccctgtactacattcagtagagtccttcacctgtcaacaatctagcttgctcctatctatctatatgtaataagatgcgttcaaataggggcactagcttcactgtatggtgtttcagctgcgtgtgaacaagtcatgtaagagacttcactatgttggattctctttcgaggctttaataaattatgcgcccttgttgcacaaaa

SEQ ID NO: 17853 - DNA, 415 bp, Glycine max
  Clone ID: LIB3106-100-Q1-K1-F5
caccccatagggaaaaaatttctttacatttacaatgaatctatccactctattcctattgctattccacctggctcatgctgatctgtctgacgaagctactttcattagagatggcctcaaatcctattcccagcttgatctacctcactcggtttttggctctgaaagtgtagccttcgattgccatggtaaaagaccatatggtggcacgtctgatggtagaatcctcaagtggcacgagacacagagagagtggattgactttgcagctacctcgccacacaggaacaagaaattatgtgatgggttaacaaatgacaagatggaatcaatgtgtggaagacccttgcgcctcaaattcaacactctaacttgtgaactgtacattgccgatgcatactttgtgcttctg

SEQ ID NO: 17854 - DNA, 414 bp, Glycine max
  Clone ID: LIB3106-100-Q1-K1-F6
attttcttcttctgcttcaccttctcttctcttctctcatagggttagggtttttttctcttcattgctctctctgtcgttttatttccatggctcagcaagatgctcagaatggtgggtcggagaatgccgctgctgcggtgtcgtttgtcgctttgaagccgcagctcctcatcgaagctcccaaagcgaacgacgccgttctgttctacaaggccgcgtttgccgctgaggaggttggccgtacgctcaaccctaagcgtaaagcggagcacgagcttcctctcatactctccgcagagctcaaaatcgctggctctaccattctcgttgctgacctcgttgatgactctgcttcaacagcgaaggccggaagaaaccgtgtcgttttgtgcttggagacggaggacgttg

SEQ ID NO: 17855 - DNA, 416 bp, Glycine max
  Clone ID: LIB3106-100-Q1-K1-E4
cccacgcgtccggtcggaaagaataagaggatttccaagggaaagaagggtggcaagaagaaagccgctgatccctttgccaagaaagactggtacgatatcaaggccccttccctcttccaggtcaagaatattggcaaaaccctcgtctctcgtacccagggaaccaagattgcatccgaaggactcaaacatcgggtttttgaggtctcattggctgatcttcaaggggatgaagaccactccttcaagaagattcgcttgagagctgatgacgttcaagggaagaatgttctgacaaacttctggggaatggatttcacaactgacaagttgaggtctttggtgcgaaaatggcaaactttaattgaagctcatgtggatgttaataccactgataattatacattgaggat

SEQ ID NO: 17856 - DNA, 192 bp, Glycine max
  Clone ID: LIB3106-100-Q1-K1-F7
accacgcgttcgcccacgcgtccggtttgttttaattaaaaggtaaatagactcaacgtgtatagcacttgatatttacaccaaaaaaactattgcacttgttttgctaatgcactcaaacttcctttttttagtatgagtggatttagaaaaaatttaaagcactaaataaatgataaaagctttaaaagc

SEQ ID NO: 17857 - DNA, 422 bp, Glycine max
  Clone ID: LIB3106-100-Q1-K1-F8
ataagctagtttatcgtgaggagaatatgaagttgtttgttttctttgttgctgcagtagttttggtagcatggccatgccatggcgcaggctaccaaaggttccctctccgaatgaaaactggctatggtgagcgttcttcggaggtaaaatgcgcaagttttaggcttgctgtggaagcacacaacatccgagcctttaaaaccattcctgaagagtgcgttgaaccaacaaaggactacattaatggcgaacaatttagatcagactctaaaacagttaaccaacaagctttcttttatgctagtgaacgcgaagtccatcacaacgacatatttatattcggcatagataacaccgtactctctaatatcccatactatgaaaaacatggatatggcgtggaggaatttaatgaaacc

SEQ ID NO: 17858 - DNA, 251 bp, Glycine max
  Clone ID: LIB3106-100-Q1-K1-F9
atatttcctgaattgcccgagccttctttgttgatctcacaggtcaaggatctggtgggcaataaaatccctgattttgaatcaaacatatattaagatcatgttggagtcaagtgtgtatggctatgcatgttcttgtttcacgccttctaaacatcacaaaagtatttagtagcattagcatgcgtgagactttattactatcatatgtttggatctctccaaaatctaaaaaggaagactttggctgt

SEQ ID NO: 17859 - DNA, 236 bp, Glycine max
  Clone ID: LIB3106-100-Q1-K1-C8
cccacgcgtccgtttctctgttcctcacatttcactaccccctacaaatatattcaaggtcccatttttctcatctgggtcatcaacttaatcatctctctcttgttctctatccaattaattgcttttccctctgagtttctctccaccttgttgttgttgcaacttgatttcatggttgcataatgaagtgtttcttctttaaggagtttagcaaattcgtcccggaactgcac

SEQ ID NO: 17860 - DNA, 398 bp, Glycine max
  Clone ID: LIB3106-100-Q1-K1-C9
ctcatcttcctctttttctcaacaaaaaggggttcaattctagctagttctattacgtcgtccgcgaccatgaacatggcgatcgcgcttctgttcatggttttcgcagtttcatcagctttagacatgtcaataatatcacacgacaacgctcatgcggatagggccacgaggcgcaccgacgaggaggtgatgtcaatgttcgaggagtggctggtgaaacacgacaaggtgtacaacgcgctcggtgagaaggagaagaggtttcaaatcttcaagcacaatctgcgcattatcgatgaacgaaactctctgaaccgaacctacaagttgggactcaacgtgttcgctgatctcaccaatgcggagtacagagccatgtacctgcgaaccttgga

SEQ ID NO: 17861 - DNA, 374 bp, Glycine max
  Clone ID: LIB3106-100-Q1-K1-D10
cccacgcgttcgcaattcaggcttcacctgtttctattggggggcgtcaagctgtagtcgagataaagagaaccactacccgtgttggcagtggcattaatggtactggaagacctatgatcccatctggtaggggtgggttacgaaatgactctttctggggtcgtgggaattatgttgggggacggggataccgtcgaaatgattatgtcagccgtggttgcttttctggtacgggtcgtggccatggagaaggttttcaccaagggacagggagatgcggccggtcaagtggacaaaaacaaaatgctgcttgcaactgaaatactggatgattcttgggaggttgttctgagacccccctttttgggtca

SEQ ID NO: 17862 - DNA, 429 bp, Glycine max
  Clone ID: LIB3106-100-Q1-K1-D11
cccacgcgtccgctatggcccaagtttatcggtgtactgtgggtcgtgggtacgagatggtgagagcaattggcaagataggtgcagccctcagaaattgagtgggtctgggagaagaagcatcacctgcaaattcgagagtgtgagactcagtagagcatgcagtgtggcactgactaccttgctcacaaccgctgcggtgatagcttctgtggcagcagctgatgaacccgagactctatccaacataccccagactttgtccggtgagtgcacgttgcccaaagattgcaagaaagctagaatacagaaaccaaagtcaaggaaagcggaatcatgcacaatcaagtgtgtcaccacttgcatcagaggtggagatggctctcctggggaaggcccttttaacgtgataagacctctggttgtttc

SEQ ID NO: 17863 - DNA, 423 bp, Glycine max
  Clone ID: LIB3106-100-Q1-K1-D12
attcctttctcagaatccacatattcacagcatctttttgagccgaatgttatttgtttctatggccgaatttatttgtatctatcttctatcttcttcctcaccgtcaagttgtctctacacaaaaagtactcatggccagttctcttcaaaagcctagacattgaattaaccactcaataaatatggatacattttcacaaaaagtacccaacattattaccagactttatacgatatcacacaatgaaagaagatgaattcctatgttgtcagcttggtttctgggtgtttctgattatatgtctggtgcttgtgtcactggcaggcattgcatcaggcctagctctaggactactgtccttcagccaagtggatcttgaggtactcattaaggccggtcgaccaaaagacacaaaacat

SEQ ID NO: 17864 - DNA, 257 bp, Glycine max
  Clone ID: LIB3106-100-Q1-K1-D2
tccactcgtaagtacacgtgcagaaacggatctgtcagttgctgatgagcaaaagactatgtgaatgtgttcacgggttgggagatatatttacaaggtatggaacatctgttgtagcaatgttagcatgatggtcatgctatggtggttttaagttctacgggagactagagacgtgatccaggctttcttatttgatcgattatctgtaggactgagacagagtgtgctacaaggactccttttatgttaccata

SEQ ID NO: 17865 - DNA, 93 bp, Glycine max
  Clone ID: LIB3106-100-Q1-K1-D3
aacacgcgtacgtacaacgcggacgagataatcttctcgatgggaacgtagaaacatacaggcagcaaggttagcgtgagggggaggaatatt

SEQ ID NO: 17866 - DNA, 229 bp, Glycine max
  Clone ID: LIB3106-100-Q1-K1-D4
gttctagatcgcgggcggtcgcccttttttttttggacatgattgatatgctgttattcaagtgcctcgtgatttcttggctgctcgtttagtctaagagattatcccaatgcatattacaagccaaaatattgtctgcacctgccttgttcaccataaatattcaacctgccagaaagtttgagccaccattttcaaaggtttgcctcatcagcgcaaattttttaag

SEQ ID NO: 17867 - DNA, 416 bp, Glycine max
  Clone ID: LIB3106-100-Q1-K1-D5
cctgagactaaatagtgctaagaactctaatggtggacaagatgaatatgctgatattcaagtcccttgtgatttcttggctgctagttttctctagcagacacaccacagcagaaaagaaaacccatcacactaaaaacacatacataattcacatggacaagttcaacatgccagaaagtttcaacgaccatctccactggtatgattcatcactgaaatcagtatcagactcggcagagaggctctacacatacaaaaaagtagctcatggcttctctacaaggctaactacacaagaagccgagttactatcaaagcaacctggagttctctctgtgatcccagaagttagatatgaactccacacaactcgaacaccggagtttctggggttggccaaatacaccactctt

SEQ ID NO: 17868 - DNA, 259 bp, Glycine max
  Clone ID: LIB3106-100-Q1-K1-D6
accacgcgtccgcccacgcgtccgataattttttatttaaatttttcacctgatgttctactgtcaaaagctttacaattttaaccattgttgaaaatcaaaaaaaaaaaaaaaaaaaaaaaaaaaaaaaaaaaaaaaaaaaaaaaaaaaaaaaaaaaaaaaaaaaaaaaaaaaaaaaaaaagaataaataagaagtataaaaaatgcaaaaataaaaaatgcaatgcataacaaatttttagctaaacctaaataaat

SEQ ID NO: 17869 - DNA, 406 bp, Glycine max
  Clone ID: LIB3106-100-Q1-K1-D8
cttggttttcataacccattctccatctcagaatggagaatgcgagaataagccagtggttgatccttctggtgtgtgcgctgctgttgctgatatcagaagcttcttatgtgccaatcactattgttcagaacgcggtagcaaaaggagctgtttgtttggatgggagtccaccagcttatcattttgataggggatttggatcagggattaacaattggttggttgcatttgagggaggaggatggtgcaacaatgtcactacttgccttgctcgcaagaccaatcgtttaggttcatctaagcaaatggccaagctaattgccttttcaggaattttgaataacagggaaatgtttaatccagatttctacaactggaacagaatcaaggttaggtattgtga

SEQ ID NO: 17870 - DNA, 366 bp, Glycine max
  Clone ID: LIB3106-100-Q1-K1-D9
tgcacccttccacattctttctcgttctcgatctctctcgatttttccttcccttttctccataaacgaggtgcttcagatttgctcataataggagggaatcgaatcgaatcgaatcgaaaggaaagtgcagaatggatgacatgccgttgccggcgctctttgagcaagcccgcatgatccacgccgcagccaccgattccggcgccgaccaggaggttgtgaagaaggggtgcgaggctctgcatagatgcgaggacatggtcaataatctaggtttgttctctcccaacgagaccaaagaagatatcagcaccacgaatctcaaatacattctggtgccattttatcttgcggagttgtcag

SEQ ID NO: 17871 - DNA, 274 bp, Glycine max
  Clone ID: LIB3106-100-Q1-K1-E1
cggacgcgtgggcggacgcgtggggggttatatgccacaaaccacaagatacactggaacaagagaagctttgttgaagctgcaatagacccgtgtttgggtgtaatcttagtcctattcctagtagttaattttgtaactgttctttgtgtgattgaacgaaaatttgggaccaggtattgatgtaatgttgccagttgccatcttactaatgtctcatgacttaaattgttttcaagaaagtttttttgttaaattttgtcgtaagacattt

SEQ ID NO: 17872 - DNA, 362 bp, Glycine max
  Clone ID: LIB3106-100-Q1-K1-E10
ggtcatctgtggtgatgagtggtcatggaaccacaatcttgaagacagtggcagagtttgagaaatggaaagagtttgtggtgaaaaaggggtttgagccctctttcaaagagcaccatgaaaggattaggctcacccattatcgcttcttacaccttgtaattcctaatgctgctgggaagttaccatataccatactattcccagagtgtggtgggataatggagatcttcatcagctataaatgcagccacattgatgatacttctattgcctcaaactataacacagtgaggccctcttgcttgatgatatggatgagagagcgtgggattaaacgttatttccggctatgagcaact

SEQ ID NO: 17873 - DNA, 275 bp, Glycine max
  Clone ID: LIB3106-100-Q1-K1-E11
ccgacacattgtgggacgcctgtggaaatccatccttgactgacattctggatacaccgtcactagggaccatctgcacgctcacttttatttcttatacattcaatggcatcccactgacacatacgtgttcagtataaattgcaccgctctatccaatatcccatactataactcaacatgcttattgcgaggagaacattacaccctccttgtttgatgctttggtaaacacgggcagtgcaccgttgccgtggctgactcttacgaattac

SEQ ID NO: 17874 - DNA, 412 bp, Glycine max
  Clone ID: LIB3106-100-Q1-K1-C7
cttacgcgttcgatactatggtttagaccaaagcttcatcataggaatcatcctcagtggatgccactgaggtgatcacagagttgaatgctctgtgggacgctctcgcaatcatgtccactggacttggttatggaggtgctgctttactagctgctagtctatcgagcactcttgagtgcgccatctactttgcaaagttgcttgcaaagattatgctattggtcactctagggtacactgaatggtacgtctaccgataccttatgattaagtctatcgctacagacctagctacactcattgagtcactgactgagactgtttctggagctgaatacagtggcgatagcaggtacatagtctaggagctctactgggagcatgagttctgtttatcggacggattata

SEQ ID NO: 17875 - DNA, 392 bp, Glycine max
  unsure at all n locations
  Clone ID: LIB3106-100-Q1-K1-E12
cccacgcgtccgaagagttctttcaaaatgcaaacagccttaaccttcgctgcccccaacgttgtgccattggcacccacaaagagtgtctcccatattaccatctttcccaccaaattgaaagccccgcgctcctcacctcgttactctccgattagggttgcaaccgtggagcccgacacttcaactgtcgactacaactctgcgttctcagtgtttcctgcagaagcatgcgaaactgtaggaggggaagcctgcatggcggagatgtaccctgaaacgaagctacagccagaggctaagactccacgagtcgttacagagaacgttgagagagagtatcttgaatacgatgatcctaaaacggtatttcgaggagaggctngtgatga

SEQ ID NO: 17876 - DNA, 206 bp, Glycine max
  Clone ID: LIB3106-100-Q1-K1-E2
cccacgcgtgcggtaacgtggaacagctaatgctggtaatgggactgacaacagtatggatcggaaaatatatcttaagaggagaaaacttggaaatgacatatgcacatcaactacttgcctatgaatggaaagggatctagacttggtttgattccttaacatgtgcagagctacaatcgctggttgaagaagtagaggaatag

SEQ ID NO: 17877 - DNA, 414 bp, Glycine max
  Clone ID: LIB3106-100-Q1-K1-E3
gtgactcgagaatggccttgccagtggtcgtcgacgcagagtacctcaaagaggtcgacaaggctcgccgagatctccgcgcactcatcgctaacaggaactgcgctcctctcatgcttcgattggcctggcacgatgccggaacttacgatgctaagaccaagactggtggacctaacggttcgatccgtaacgaggaagagtattctcacggcgccaacaatggcttgaagaaggctattgatttctgtgaggaagtgaaggaaaaacatgctaaaattacatatgcagatctctaccagcttgcgggtgttgatgcagctgaggttaccgggggtgccacaattgatttcgctcctggtagaaaggattcacaaatatctcctaatgaaaggcggcttcctgaagctaaaa

SEQ ID NO: 17878 - DNA, 388 bp, Glycine max
  unsure at all n locations
  Clone ID: LIB3106-100-Q1-K1-B12
ggagggatctctctctctctctctttctctcctctcacacccccaaaagcttcttctgttccgtgcaggcaatttttctttggtttggttgcatcttttgatctgatcaacaagtttgagaattcagtttgggaaaggccattcctctttagtacaaaacagattgagggtgcctttgtgctgatggccactaatgaaaatcttccaccaaatgtaattaagcaacttgccaaggagttgaaaagtcttgatgaatcccctcctgagggcattaaggttgtggtaaatgatgatgatttttcgacaatattttctgacattgaatgcccagctggaactccttatgagaatggagttttccgaatgaagctgntgctgtctcatgatt

SEQ ID NO: 17879 - DNA, 323 bp, Glycine max
  Clone ID: LIB3106-100-Q1-K1-B2
cccacgcgtccggtttcgggccaatgaggttctcaatgggaagtacacaagagccacagccaaaagtgttttcctggtacccttcactcttcttctcatcatgctccctctttctctcatgagaagctctcatgaatcaactccagagatatcttctgtaagtgtaagcagcagtttgaacaacaacacagaagtaaaacaatgtaacatcttttctggaagatgggtgcataatcctgaagcaccttactacagcaatgaaacatgccattggataatagaccaacaaaactgcttgaagtttgggaggcctgatagagagt

SEQ ID NO: 17880 - DNA, 363 bp, Glycine max
  Clone ID: LIB3106-100-Q1-K1-B3
aagacacatactgaaagctgaaccacacaatctggttagtgaaggcagaccacgcatgacagggattatgatacggtggaagagacacaaatgtaaggtattgcggtattaccgttctgtgtctcacatggcagctcttctgcaggtaggattatacagaaatcatcctcacccagaagccaagataatgagtctgaagactactggtcgatgcactaatactcaggatcactcctcttggatagcacccattcatgtggacaccataattcattgtgaaaacctagatgaagtgtttatcgaaggtaccaataccaatcacttaccgacccacgaaatcaattacatgttacaggctgatga

SEQ ID NO: 17881 - DNA, 421 bp, Glycine max
  Clone ID: LIB3106-100-Q1-K1-B4
caacagcaacaacacccttatcctctcaccacaacgaccacctctgaccataagcccctctcagtttccacactgcccagaaagttgctctgtaaaccacccaaaggaaagtacgtcagagaggactatcttgtgaaaaagttgtcagctcaggaaatccaggagctggtaaagggagaaagaaaagtgcctcttattattgatttctatgcaacttggtgtggaccatgcattttaatggcacaagaacttgaaacacttgcagttgagtaccaaaacaaggcgctgattgttaaagttgatacagatgacgagtatgaatttgcacgcgacatgcatgttcgcgggttggctactgtgttccttaatagccctgatctgaacaaagaaactattcgaaccgaaagacttcttccaatac

SEQ ID NO: 17882 - DNA, 420 bp, Glycine max
  unsure at all n locations
  Clone ID: LIB3106-100-Q1-K1-B5
cccacgcgtccgcccacgcgtccgatcctctccgagtctctttatgcatttctattttttaaccgcgttagttttattactcataaagtcttctctttttttcttctttcccatcgtactagtaaacctaaacttaacacactatgcattgtcacgaaatatattattggtaggttaagggtcgctatatctataatctatcctcactacaaaaaagccaacccatatgctctgtttctcctctgctcaacacctctcctatgttacctccccctacatcctagtactcacactcactcctctatcatgcgcaacccgtattctgctacaaaaacattcttattctgaataacaatgactgaaacagcaaggtgtcacgaaactccaagcagcagcaccagcaactcctncacctcaaaa

SEQ ID NO: 17883 - DNA, 387 bp, Glycine max
  Clone ID: LIB3106-100-Q1-K1-B6
gccactctaaagaaaatggcggtgcctctactctcgaagaagatcgtgaagaagagggtgaagaagttcaagaggcctcagagtgacaggaaaatttctgtcaagacaaactggcgcagaccaaagggtatcgattcccgtgttaggagaaagttcaagggatgcactttgatgccaaacattggttatggttcagacaagaagacccgccactatctccctaatggttttaagaaatttgttgttcacaatgtgaaggacttggaactgctcatgatgcacaacaggacttactgtgctgagattgcccacaatatattcacaagaaagaggaaagatatagttgagagagccgcgcagtttgatgttggtgtgacaaacaaaaca

SEQ ID NO: 17884 - DNA, 414 bp, Glycine max
  unsure at all n locations
  Clone ID: LIB3106-100-Q1-K1-B7
aacaggttgaacactgcatcgcaaattctttatggaaatgtgtggagccacagctctgacatggtctcacaccatctgtccatcgcttcaccttcctcgatccgtctctaccagggaggctaggaggagcttcagtgtttggtgtgtctctgatcaagaccccaagggaaataaaatgatcatatctgtaactggagcaacaggttttattggtagaaggttggtgcaaagattacatgcagacaatcacagtgttcatgtcttgacacgatccaaatctaacgcagaaacaatttttccggcaaaagactttcctggaatcaagatagcagaagagcccgaatggaaagatagcattcagggctcaacggnggttgtgaatttggctggactgcccataagtacccgatggtc

SEQ ID NO: 17885 - DNA, 413 bp, Glycine max
  Clone ID: LIB3106-100-Q1-K1-B8
tccacgcgtccgggccactctttagattcttcttctccttattcctcttctccttcttcttcttcctctccttcttcttcttcttcttcttcttcttcttcttcttgctgtaattcttcaacttcaatcctgacttgtctctttctctctcgctctaaattttttttttgcttacctgcaaccggcttaagctgtggtaactccttcctttaattaatcactcttttgttacggctattactcttattcttaatggccttaccagtgtgttgctcactgagaaaccaccaattatcagcatgacaaacataagtcctgaagctgaaatcaggatgccaatgtaagcattatcaccactttcagctgatgtgagctctatttactaataatttttcctaaatacaaactggatg

SEQ ID NO: 17886 - DNA, 407 bp, Glycine max
  Clone ID: LIB3106-100-Q1-K1-C1
gtgaagttggagacaacgttagcttcttctctctccttcctccattcttgatcatcttgctctttcttattgtcaatttcacttcctaatcccaaaccctctcattccctacctttcgtgctcgaagccaaagacaggacccgtatggaagacaggtccgcgcgccacactcgcatcagaaagaaggtcgaagggacacccgagaggccgaggctgtccctgttccggtcgaacaagcatctatctgtgcaggtgatagatgacaccaatatgcacacgctcgcttcgatttggacaatgcagaagacgggtgctgaaaagttcaactactccgctggccctacacttgaagtagcaaagaggatggctgagatcattgcgaagtcctgattagagaaggggatcac

SEQ ID NO: 17887 - DNA, 347 bp, Glycine max
  unsure at all n locations
  Clone ID: LIB3106-100-Q1-K1-C11
atttggtcggaacttgttttggtatgctgctgtttttggaactataactgccattagccgggctgccattaccagtgaggttctggtcttagacgctgatggagcaatgtctatggtggtccaacatacacattatatgccaaagagatggcgtggcaaagaaagtactgaaatggttcgtgttgagtttgaaaccttattccagtatactggaatgatgttacttgaggagatggcctcaattttcctcactccatacttacttttgtgtattgtcccaaagcgggttgatgatattttgcnagtcattgctgatttcactgtaaatattganagtgttggccatg

SEQ ID NO: 17888 - DNA, 416 bp, Glycine max
  Clone ID: LIB3106-100-Q1-K1-C2
gctccttctctcatcactcatctatggctacctttccctcccctccttcaccatcttcttcttcttcaattccgtctccaagatctagaatgttttactatgctggaagtgaagaccactatgaggagcctcacttcctccaagcttgttttctttgcagaaaaccactaggccaaaatcgtgacatcttcatgtacagagggaacacaccattttgtagcaaagagtgcagacaggagcaaatagagattgatgaggcaaaggagaaaagttggaagctttctttcaaaaggggtgtgagacaatcagagaccaatcaaaatttcacacccaataaggctgtaagaacaggcacagttgcagtggcctaatcataatcaaacaaagaataatcatgacatgatgatgatgatgag

SEQ ID NO: 17889 - DNA, 408 bp, Glycine max
  Clone ID: LIB3106-100-Q1-K1-C3
tgaaagtacaagttgcagggatggcctcaaccttctcctccacactctctatatcctcttcatccacccttgttgatgccaaggctccaagtccaagacaatccccacaatgtgtctcccctccacctgttcactctccttggaagaccactgctttctgtcgcaggattgcaagcaatgttatggcaatggctaccaccagagaggcacccgcagcagaagttgccacgaccgagctctctgttgccgagacgccagagattgtgaagactattcaagaagcttgggacaaagttgaagacaaatatgcagtgagttcacttgccgtagccggtgtggttgcattggttggctcagctggcatgatctcagcaattgataagctttctttaattcctggggttcttg

SEQ ID NO: 17890 - DNA, 408 bp, Glycine max
  unsure at all n locations
  Clone ID: LIB3106-100-Q1-K1-C4
cccacgcgtccgggatattcaattttacataattaaagataaaatcaacgatagctatagttttaaaattaaccatcgatttagttgcaactggaacacaggtttctttcaatgaaataatattaatatcaatttaataagctggtaatgtaaaatactgctaatgttaatatgaagtttggatggtcttattggcagaagatgctaggtggtgttcatcaatattctgaaaggtaaaacgattttggtttttaatgataatataaccatgaatctaacatcagatattgaacgctacacatcaaaaataaatcgagccaacgcatttaattgtaagtgtcttcatattacctgtgttctgtcacatctntttgcataatattggcactaagtcttttttgatagaaa

SEQ ID NO: 17891 - DNA, 407 bp, Glycine max
  Clone ID: LIB3106-100-Q1-K1-C5
gcgacgcgtgcgacatggtcagctttttctctctgcttactccattcatgttcatcttcctctttcttatcgtcaattggacttcctaatccgaaaccctctcattccctacctttcgtgctcgaagccaaagacaggacccgtagggaagacaggttcgtgcgccacacttgcatgagaaagaaggtcgaagggacacccgagaggccgaggctggccgtgttccggtcgaacaagcatgagtctgtgcacgtgatagatgacacctagatgcacacgctcgcttctatctcgacaatgctcaagacggctgctgaagagttcaactacttcgctggccctacacttgaagtagcatacaggatgggtgagatccatgctaagtcctgtttagagaatgagatcac

SEQ ID NO: 17892 - DNA, 419 bp, Glycine max
  Clone ID: LIB3106-100-Q1-K1-C6
cccacgcgtccgctatgctggtggtgttttccttgtgaccatccattaccctcccgattatcccttcaaacctcacaaggtagcattcaggaccaaggtgttccatcccaacattaacagcaatggcaatatttgcctggacatactcaaagaacaatggagtcctgctctcaccatatccaaggtgctgctctctatatgttctctgctaacggatccaaatcctgatgaccctttagtgcctgatattgctcatttgtgcaagaccgacaaattcaagtctgagtctactgctagaagctggacccagatgtatgccatgggctaaaactcgcttgcctcatgccttctgcaatacacgttttggaattgtctttctgctcttcaaataccttccgctttatggtattatatattaa

SEQ ID NO: 17893 - DNA, 427 bp, Glycine max
  Clone ID: LIB3106-100-Q1-K1-B11
aagaagaagaagaagaagaaaaagggaaaaacgcaagaaaaatagaggaagatcgatcgagatctccctcgcgtttgtctcagttgaagaaattaaaaagcagaactagagtaactcaacggtctcagaattttcagggttttcagtacttccatattttttcttccggatttgagttggaagaagatcgaagaggtttctagttgcttcaattgttcctctgggtggtggagacttgttatatttttaaaatattgacaattcgaaatgccaaaggagagaagggatagatctttgtcacatgaaagtagcagagcatcaccttacccaagtagctctagtcgtgttggaagatctgctcttaaagagtcagaggagaatgttatagaatgggaagaagctaggtgtccagtgtgcatggaacacc

SEQ ID NO: 17894 - DNA, 408 bp, Glycine max
  Clone ID: LIB3106-099-Q1-K1-H7
ctatcttcttcaccttgctctcaccttctgggtaatgtttgaaacttggtgttagctgagctgtttgacaaaaatgaatattgcacaagttacagcatggcagcctgggatttgtgtgaaaaatatgtctcagttgcaccggcttcaatctaaaccatgtgttataccaaagagttttggtcctctcacttgtgttctactgagcttaagagcaagacaatcgtttagctcgaaatgttggcccattttacaatctcggaaacctcttcatatttgcttagccggtggaaaagggatgatgggaaatgatgagaattccccatggaaatctattgagaaagctattggaaaatttaagggagaatcattaatagaggatgtattacggcgccaaattgaaaaggtgta

SEQ ID NO: 17895 - DNA, 437 bp, Glycine max
  Clone ID: LIB3106-099-Q1-K1-H8
cccacgcgtccgaaaagtttcttatcaggagctaatcaaatagaagttttatgtgaggaagttgagagtgctatcactgtgaccttcgtcggttgtaggttcttgaagcgtctgtgtgatgttcagaccaggaaggataatgtttggctttattgagagaaattatgctatgacagcaccatgggccacaatggcgtggatatatggcagaattttggctttccactctttccaccgtccaccattgataacactatggtttagagacattataggaatcataaacatcttgtctgagattttggtgcatgaagaacaacatcggattagttggcatgagttattcatgataaatagttgtgtttaaccctgagttcattctagctacatcttgcttgctttactgttattgcgataaaataggttgcagatgtgca

SEQ ID NO: 17896 - DNA, 411 bp, Glycine max
  Clone ID: LIB3106-099-Q1-K1-H9
cccacgcgttcgcccacgcgttcgaaagaaagaaagtgcaacttcctctgttttgctcccctgtttaagccttatcataagcttagaatggcacacaaggaattttccattgccctagtgactctcattgttctctttgtcaacacgaacctccatggtgccatggctgactatggtggtggttggcagagtgctcatgccactttctatggtgggggtgatgcttctggcacaatgggtggagcatgtgggtatggaaatttgtatagccagggatatggaactgacactgtggctctaagcactgctttgttcaacaatggcttaagctgtggatcttgctatgaaatgagatgtgatgatgacccaagatggtgcaaacctggctctattaccgtcactgtactaact

SEQ ID NO: 17897 - DNA, 406 bp, Glycine max
  Clone ID: LIB3106-100-Q1-K1-A1
cccatttttcacaccaccaacacaagatgtttctccacattgtgttcctccttttccttctctcatccacttcccatgccactgtccaagacttctgtgtggcagacctcaaaggtgcagacacccctgcaggctacccctgcaagccacctgctaatgtcacttcagatgactttgtgtacactggcttagctgaagctgcaaatgtcacaaacataatcaatgctgctgtgaccccagcttttgttgctcaattcccaggtctcaatggccttgaactatctgcagcaaggttggaccttggtcctagtggtgttatcccactccacactcatcccggtgccaatgaactactcattgtgcttcaaggtcacatccttgctggattcatatcttcaggtaacat

SEQ ID NO: 17898 - DNA, 347 bp, Glycine max
  Clone ID: LIB3106-100-Q1-K1-A10
aaaaaaaaaaaaatgaaaaaacaagaaatatatgaagaaaaaaaaaaaagaaaaataaaagagggatggctcagtaccatgggcatgaccattgctctctcctgcctaattttccctctgtttttgttaactggccatggtggccactactttccggaggtgtcatgccaaagcttggaggcttggtggggattctcacccctttcatttactggaaaaccgttcctcaagattgccagggatatatttggaactacatgcttggcgaacattctttatcagactccgaaatagttaaccaacatgttgatttctatgctggaaccctcaatatcactgctcaaacc

SEQ ID NO: 17899 - DNA, 385 bp, Glycine max
  Clone ID: LIB3106-100-Q1-K1-A11
cccacgcgtccgggtgtgaatactataccttagcatgaaattcaactttgtgggactacatgttgaagtttgattggtgaacgagatctgatctcttgatccacaaaaccatggctgaaaaggtgaccatcatgaaactcaaggttgaccttgagtgtgagaaatgctacaagaaggttaagaaacttctcggcaagtaccctcaaattcgggaccagaagttcgatgagaaggaaaacattgtgttcatcacagtggtgtgttgtagccccgagaagataagagacaagctttgctacaaaggtggaggctctatcaagagcattgagatactggaactgcccaagcccaatgccgagaagcctaaagcagaccctcccaaagc

SEQ ID NO: 17900 - DNA, 297 bp, Glycine max
  Clone ID: LIB3106-100-Q1-K1-A12
gctttgagtccgagtctctcccacagcgacaccatccatcttctttcacattttccactacgttagggttcgtcttcatttcgaattgaaggattcaacaacttagcaaaccacgccatggcaactctgcaatctctgccaccttctttccgtccatcaatcccacccccaaattcccactcttttccagccactccctttaactattcccccaaattgattgcctcaaagggtgtcagcgttaccctcaggaactctatcacttctcccagggattcggtttccaattcggagtat

SEQ ID NO: 17901 - DNA, 424 bp, Glycine max
  Clone ID: LIB3106-100-Q1-K1-A2
ctcatcttcctctttttctcaacaaaaaggggttcaattctagctagttctattacgtcgtccgcgaccatgaacatggcgatcgcgcttctgttcatggttttcgcagtttcatcagctttagacatgtcaataatatcacacgacaacgctcatgcggatagggccacgaggcgcaccgacgaggaggtgatgtcaatgttcgaggagtggctggtgaaacacgacaaggtgtacaacgcgctcggtgagaaggagaagaggtttcaaatctttaagcacaatctgcgcattatcgatgaacgaaactctctgaaccgaacctacaagttgggactcaacgtgttcgctgatctcaccaatgcggagtacagagccatgtacctgcgaaccctggacgagggtccgaggttgggcttggata

SEQ ID NO: 17902 - DNA, 416 bp, Glycine max
  Clone ID: LIB3106-100-Q1-K1-A3
cccacgcgtccgctcccttcctccactatgtctctctatgggcaggattcttcactttctggcgtccattcttcagctcttggccgtgttggtgctcctattgttactacggtaatacaaacaatgcaaataccactatcctatgcggaagacatcattggtattcaagggactaatattgaatacattcgccgcactagtggagccatattgactgtgcaggagagccgggttcctgatgaaatcgttgtagaaataaaaggcacctcatctgaggttcaaacagctcaacaattgattcaggatgttataagcagtcacaaagaacctgtcactagcagttatggcaggctagatgcagttccaaggtcttcatactctcatttgggcactacattacgccttccttcatcttc

SEQ ID NO: 17903 - DNA, 225 bp, Glycine max
  Clone ID: LIB3106-100-Q1-K1-A4
accaggcgcacgttagcacaaactatcatggccacggcaacagcagctgccacctcgtcctttatggggacgcgtctcctggaggctcactccggagcggcgcgagtgcacgcccgattcggcttccgcaagaaaaaggctcccgccccaaagaaagcgtgcaggggatccggccgcgacaccgacagacccctctggtatccgggcgcgcaagcgcccgaatac

SEQ ID NO: 17904 - DNA, 414 bp, Glycine max
  Clone ID: LIB3106-100-Q1-K1-A5
atctcttctcttctctttcccctcaccaacacgtcatttcatttctttcaaagtcttcccttctctcctcttcctcttcacttcttaaaccgtcgccccttaacgacgccgtttcctgttctctcatgtaagcgcggttcgagaaaaaaaaaagaaaatccgttattggcgttgctttatttttgcttccggttcggattatttgaatggatcgggcggcgttgacggtcggaccgggcatggacatgccgataatgcacgacagcgaccgttacgatctggtccgcgacatcgggtccggaaatttcggcgtggcgaggctgatgcaggataaacaaaccaaggaactcgtcgccgtcaagtacatcgaaaggggtgataagattgatgaaaatgtgaagagggaaattatca

SEQ ID NO: 17905 - DNA, 394 bp, Glycine max
  Clone ID: LIB3106-100-Q1-K1-A6
cttgtgggactcatctttatgttggacacatcacaggaattcagaagcagcaagagcaagctcaagaggttgctcttgtgtgaataagtatagcatcatgtggaggggtcactgtgtatactgtctagttaagttaaaagcatcatagttttatagaagagaaaaagagatagaattatgatgggtatacgcaaggaaaatggcgtattctagaccaaaccctgagatcattaggaaaaatattgttttatttcatgttagaaatccaataagtgctgtgcggttaattcccgcaaattgatcttatgtggtatttcacatgaattcgtttgttaatttgttccaatcatatgttcaaactctttaaagagaaaaatgaaaaatctttccatat

SEQ ID NO: 17906 - DNA, 319 bp, Glycine max
  Clone ID: LIB3106-100-Q1-K1-A7
gttgatttggtcacagaaactgataaagcatgtgaagaactcatatttaatcatctgaaacagctttatcccactcacaagttcattggggaagagaccacagctgcctatggcactacagaacttacggatgaacccacatggatagttgatcccctggatggaactactaactttgtgcatgggttcccctttgtttgtgtctccattgggctcacaattggaaaaactcctacaattggtgttgtatacaatccagtaattaatgagctgtttactggaattcatggaaaaggtgcctttttgaatgggaatccca

SEQ ID NO: 17907 - DNA, 150 bp, Glycine max
  Clone ID: LIB3106-100-Q1-K1-A8
cccacgcgtccgcccacgcgtccgcccacgcgtccgggccgcccttttttttttgagtttgtatgcttttctggtacccacgttctttgtcttccctaccctcgcaaactcctctttgtttgccgccactgtatgatccgtttccgtttc

SEQ ID NO: 17908 - DNA, 415 bp, Glycine max
  Clone ID: LIB3106-100-Q1-K1-A9
caaattcccgtgaagagacactcagaaagatgaggttatcggtgaggcatgctttggtgtttgtgtttatcggcgcgttgtggaacttgcatagggcagagggtatccgatttgtgatagacagagacgagtgtttctcccatgatgtgaagtacgagggtgacactgttcatgtctctttcgttgctattaaggctgattctgcctggcattactgcgacgaaggtgtcgatctcgtggtaaagggaccttctggcgagcaaattcaagattttcgggacacgaccagtgagaagtgtgactttgaggctcacaaatccggggtccataaattctgcttcaccaacaagtctccttatcatgaaactgtcgattttgatgtacatgttggtcacttgtcttactttgacaacat

SEQ ID NO: 17909 - DNA, 233 bp, Glycine max
  Clone ID: LIB3106-100-Q1-K1-B1
cccacgcgtccggtgaaactcacgagacctcgttttcaggggattttctgtttgatgtccataaggattatcactgatgctatatatggtctgtgatacagtcttgacttacagttcataacttggttgttttcattgttatggcgagttgactatgatttgagaccaagtcacatgatacacaaggttaaatgaacacagtgaaggcaccagcttggacaatgctggtctaa

SEQ ID NO: 17910 - DNA, 303 bp, Glycine max
  unsure at all n locations
  Clone ID: LIB3106-099-Q1-K1-H6
gaggcacgcgtcacgccacgcgtncggatagagacgacacagtgccttatggtaagtggattcataaattatagtcaacaaacagtccgagctgcaaggtacattggtcagggtttcacgattaccctatctcacgcaaataggttacccgtaactattcaatatccttatgaaaaaataatctcatcagaacgtttccgcggtcgaatacattttgaatttgataaatgcattgcttgtgaagtatgtgttcgtgtatgtcccatccatctaactgttgttggttgggaactagaaactgat

SEQ ID NO: 17911 - DNA, 426 bp, Glycine max
  Clone ID: LIB3106-100-Q1-K1-B10
cccacgcgttcgtccacgcgtccgggaaaaatggtttcgctgaaactgcagaagcggctcgccgcgagcgtgctcaagtgtggcagaggaaaggtttggcttgaccccaatgaagtcaacgaaatctccatggccaattctcgccaaaacataaggaagctggttaaggatgggtttatcatcaggaagcccaccaagattcactctcgctcacgtgctcgtcgaatgaaggaagccaagaggaaaggacgtcactctggatacggtaagcgtaagggtacaagggaggcaaggcttcccactaaaattctatggatgaggagaatgcgtgtgctcagacgcttgcttcgcaagtacaggggatctaagaagattgacaagcacatgtatcatgacatgtacatgaagggtaagggtaatgttttc

SEQ ID NO: 17912 - DNA, 425 bp, Glycine max
  Clone ID: LIB3106-099-Q1-K1-G1
cggacgcgtgggcggacgcgtgggctcggcggcacacacaaaaccctttctcagtcactcactcggcaaaagagaagcgtcgacggtctgcacggtgggtgcttcatcgacggcagcgacctgtggcggaggacagggttcccttcgctcttggagttcgcatcgggcagagaagcttctctgcattgcgctgggacgcaaaaccctggcagcaatcagcaccacggcgcagccgcacacctctgagacgccaccgcaatcaggatgagtgaacttctttttgatgacattttcaaggtcgagaaggtagaccctgatggtaaaaagtatgacaaggtttctcggattgtggcacggagtgagaagtgtgacatgaacatgcttctagatgtaaataccgagatttatcaatggggggaaaagaa

SEQ ID NO: 17913 - DNA, 373 bp, Glycine max
  Clone ID: LIB3106-099-Q1-K1-G10
ccaccctatgtgtaccatagtgtgggattcctttttgctccaattgtgttggcatggctgttgggcatcagcacacttggtttatataatatattcaaatggaatccgcatgtatataaagctctttcgccatattatatgttcaagttcttgaagaagacaaggataagtggatggatgtctttgggtggaatattgctgtgcataacaggctcagaagctatgtttgctgatcttggacatttctcatatatggctattcagattgcattcacctttctggtatatcctgcgcttatattggcctatatgggtcaagctgcttatttgtcgcatcatcatgattccgaactccaaatcaagttctatgtct

SEQ ID NO: 17914 - DNA, 379 bp, Glycine max
  Clone ID: LIB3106-099-Q1-K1-G11
tcggccacgcgttcggtcattcaacatttctctctcccttaactaggttttaccaatggctggtgggggtagggcttcaatctctttttcattcaccaaagctacctctcttccaagcaagaacttcatcattaccccaaaaagagttgtattcaaaaaagcttcattgcaatacagagatgtttgtagcaagggaagggtagtttccatcagagctcaagtcaccactgaggctccagccaaagttgaaaaagagtccaagaaacaggatgaaggtgtggttgtgaacaagttcaaacccaagaccccttacgttggtagatgcctgctcaacacaaagatcactggggatgatgctccaggagaaacttggcacatg

SEQ ID NO: 17915 - DNA, 415 bp, Glycine max
  unsure at all n locations
  Clone ID: LIB3106-099-Q1-K1-G12
cggacgcgtgggcggggaccagtactataacgagaagctgataacggaagtgcacgggttcggggtggaagtgggggccgcggaatggaacatttcgccgtacgaggggaagaagaaagtggtgagtggggagaggatagaaagtgccgtgaagaggttgatggatgatggagagaaagggaagagaatgagaagcaaggccaaagagatgcangagaaggcttggaaagctgttcaagaaggtggttcttcttacgacagtctcacggctctgattcatcatttcaagactcttgtgcctaatcatgtgaatgggaatgggaatatcgatcactgaatgaatattacattgattcgagtttcatgtttttgattattaggtatttatcaagtgaatgcatgaatgcataatttt

SEQ ID NO: 17916 - DNA, 386 bp, Glycine max
  unsure at all n locations
  Clone ID: LIB3106-099-Q1-K1-G2
cccacgcgtncgaaacactatagcaatagaaacatttgcttttgaaaaacccctcactcttcatcactacactagctagccacatacaatgtcgaccaaatttaaggtgtttcgtgaattcacaagcgatgactcattcctaaaccaagttatccctgaaaacatcaccgaattccaagtgactctgtccctcgctagagactacgatggcaacaactcaaccaacggaaagttcattccttactgggacactgaaaaggtcactcccgaagtgataaaaaaattcaagaaaaaatacgaacccaccgcactgagggttaaggttcttgtcagcattggaaacaaaaacaaacaatttcctttcaccattggctcggactcgaaca

SEQ ID NO: 17917 - DNA, 107 bp, Glycine max
  unsure at all n locations
  Clone ID: LIB3106-099-Q1-K1-G3
cccacgcgtncgcttcattccttagcttacactaccaccactaacctctgtggctctttcctaggttgggattatcacaaccttggagttctcaacgcggacaaaat

SEQ ID NO: 17918 - DNA, 446 bp, Glycine max
  unsure at all n locations
  Clone ID: LIB3106-099-Q1-K1-G4
tttcttcatatcttccttgtcactgcccgtgtgtcgccgccatggccaccgtcaccacccaagcctgcgccgcaattttccggccatgtacctcgaaatcgaggtttttgaccggctcttccggtaaacttaaccgggaagtgactatgcggccaatggggtgccctccttctgcctctttcaaggttgaagccaagaagggagagtggttacctggcttggcctccccaacttacctcaatggcactcttcctggtgacaatggatttgaccctctggggctagctgaggacccagagaacttgaggtggtacgttcaagccgagcttgtgaatggacgttgggccatgttgggtgttgcaagaatgttgcttnctgaggttttcaccaagtttggaatcatcaatgccctcaatggtatgatgctgggaaatcagagtactttg

SEQ ID NO: 17919 - DNA, 283 bp, Glycine max
  Clone ID: LIB3106-099-Q1-K1-G5
gctacagcgtgcgatatctttctagctttctgcactagttgagaaatcatttttcttagtggaatctgcatttaactgaaatttgctcgcgtctacccccttcctatccatggattattatatggttttgaatgattaacgtttgctgctgtgacaatgtttattactcttcttttgggagtcaattaaaaatagcacggttggacgaacactctatttctgtcttgctagcccattgaaatgtagcgaacaccttttctgtccatttatgctcaactgaatt

SEQ ID NO: 17920 - DNA, 405 bp, Glycine max
  Clone ID: LIB3106-099-Q1-K1-G6
atccattctgttccttgcaccctttcacgctcaagctaaaattaaagtgacttactgcgataagaaggcagactatgctgtgaaggtgtctggagttgaaatatcaccaaaccctgtggtgagtggccaggcggctacctttaagatctcagcaacttctggtaaagctatttatggtggagaggtggtaattggagtttcatacgttggggtgccagtccatactgaaagaattgatctttgtgaagaagtaacctgtcctgttgctaatggcaattttctgatttctcacacccaaacattgcctgcaattactccaccgggaccctactctctgaagatgacattgaaggatgatcgggaggaggtgttaacttgcgttaaggttaaatttaaaaatggttt

SEQ ID NO: 17921 - DNA, 351 bp, Glycine max
  Clone ID: LIB3106-099-Q1-K1-G7
cggacgcgtggggtttccgaacttttacgcttaaactaaaattaaaagagacttactgcgataagaaagcaaaactatgctgagaaggtgtctggagttgaaatatcaccaaaccctgtggtgagtggccaggcagctacctttaagatctcaacaacttctggtaaagctatttatggtggagaggtggtaattggagtttcatacgttggggtgccagtccatactgaaagaattgatctttgtgaagaaataacctgttctgtttctaatggcaattttctgatttctcacactcaaacattgcctgcaatgacggtatcggtaccttactctttgaagatgacattg

SEQ ID NO: 17922 - DNA, 434 bp, Glycine max
  Clone ID: LIB3106-099-Q1-K1-G8
cccacgcgtccgcttcattccttagcttacactaccaccactaacctctgtggctcttccgtaggttgggattatcacaaccttggagttctcaacgcggacaaaatgtctttaatgccagctatggagggaagtactacaccaccatcactatcatcacctcaacactctgatttctcaactgggtatctcgaagatgctttgattgaatcatgtgagcgttccaaacgtagacgtgtgttaccatgtgctgctgatgaacatagcaagagtttcattgatgaccttgagcagagtttctggaatttcaaccccttatggaaccaaccagtagagaacttcaacttctactgcatgaaccagatagaaaggttttgtggattttcagatgagcatataaaccatcaaggagcgaggaaacaaacattcttcta

SEQ ID NO: 17923 - DNA, 251 bp, Glycine max
  unsure at all n locations
  Clone ID: LIB3106-099-Q1-K1-G9
ttgctgttttcatcattaccgtgattctggtagggtgaaccgtaagctatgattgtttttggccttgttgccttagtgattcttgctgtttctttgttttgnttaagttaccaacacttcattttgcttcttttcgatgaagcaaagcttctccatattttggttaccctacatattatatgctcttttacttttgttaaaaaaaaaaaaaaaanaaaggaaaaaaaaaaaaaaannntttttaatttttt

SEQ ID NO: 17924 - DNA, 296 bp, Glycine max
  unsure at all n locations
  Clone ID: LIB3106-099-Q1-K1-H1
cccacgcgtncgcatgagcaatgtccggcatcaaaaaaagctcctagagttgcctgattcagttgattgcaggagacctcagatttttgaactaaatgaatttggcatacaaatacttagctggacattggatatcataaagggaaaaatattggaactaatagaaagtttccaatcacttgtgaatgatttatttcaatcccctaagatggggaatgccacaacaattgcaacagagagggatgaaaaagttaagtcatctttccttctctccatactaatcctcttgattataa

SEQ ID NO: 17925 - DNA, 150 bp, Glycine max
  Clone ID: LIB3106-099-Q1-K1-H10
tcgcccacgcgttcgcccacgcgttcggccacgcgttcgaaaaaaaaaaaaaaaaaagaaaagggaaaaaaaaaaaaaagggaaggggggtattgggcggtcgggcggtattaagggtacatgcttacgtactcggtcttgtaaagtgtt

SEQ ID NO: 17926 - DNA, 148 bp, Glycine max
  unsure at all n locations
  Clone ID: LIB3106-099-Q1-K1-H11
tcgcccacgcgttcgcccacgcgttcgggaaaaaaaaaaggcttgaatttctcacttctagttctagtattggtgttggtgntggtatatgatgtatgggtgaataaatgtgatttggtgtttggtnaaaaaaaactattaaatttta

SEQ ID NO: 17927 - DNA, 222 bp, Glycine max
  Clone ID: LIB3106-099-Q1-K1-F9
cccacgcgttcgcccacgcgtccgtccacgcgttcggtttgaatgcatctttgtctgtagcaaacgtttccttcatgttacatccaaaattgagagcaaaaccttcttttagccttttgaagaatatacttgttatcaatggtagttgttcgttattggggaaaaaaaaaaaaaaaaaatataaataaaaaaaaaaaaaaaaaaaaatataatattttttta

SEQ ID NO: 17928 - DNA, 453 bp, Glycine max
  Clone ID: LIB3106-099-Q1-K1-H3
tctttgcgcagttccctacctctcctttcaagatgcagatcttcgtcaagaccctcaccggaaagaccatcacccttgaggtggaaagctctgacaccatcgacaacgtcaaggccaagatccaggacaaggaaggaattcccccggatcagcaacgtctcatcttcgccggaaagcagctcgaggacggccgtaccctcgccgactacaacatccagaaggagtcaacccttcaccttgtccttcgtctccgtggtggcatgcacatcttcgtcaagactctcactggcaaaaccataaccctagaggtcgaaagctctgacaccattgacaacgtcaaggccaagatccaggacaaggagggaatccccccagaccagcaacgtctcatcttcgccggaaagcaacttaggacgggcgcaccctcgccgactacaacattcagaaggaatc

SEQ ID NO: 17929 - DNA, 364 bp, Glycine max
  Clone ID: LIB3106-099-Q1-K1-H4
gatcactcgtagtgaatgctgccaaagctgttgaagcagaaaaggtcagttatgacaatgacatggatggtagcaatggaaggaggaacttgatgttcgccgcggcggcggctgctgtttgctctgttgctgggatggcagtggcagatgagcctaaaccaggaaccccagaagccaagaaaaagtatgctccgatttgtgtcaccatgccaactgctaggatttgtcgcaattgagggactttggttttattttacttctgatgattggaaatgtacaatggggttgttgtaatgctttgatgatttcatttgatcctcactgtacaagatgttcataaaactatcgagctttgctttgtgtc

SEQ ID NO: 17930 - DNA, 239 bp, Glycine max
  unsure at all n locations
  Clone ID: LIB3106-099-Q1-K1-H5
cccacgcgtncgcccacgcgtccgcccacgcgtccgcttcgctggtnataagagaagagaagagagagagagagagagagagggcgtggagaatgttaagtctctcagttgcttctccttcttcttcaaccatttcctttctcccaaagccattcaatggcattcagctccgtcgctctgccacatgctccattccacccacgaaatgcagcgcttcggtgccagtggtgatgatgtct

SEQ ID NO: 17931 - DNA, 186 bp, Glycine max
  Clone ID: LIB3106-099-Q1-K1-E5
gaagagaggagcccgaaagggtgcacggcttcggagcccgaattttacttgcagtgaccgaacaggaggaggcttacctgtcttagggggataagaccctaggatttcatcgagactcaacatgatgaatcagaacgaaacttgattctgcactgcatcattatccctatgtatacactgtgccca

SEQ ID NO: 17932 - DNA, 451 bp, Glycine max
  unsure at all n locations
  Clone ID: LIB3106-099-Q1-K1-E6
gccgctacatgaccgacatgataacctacgccgacaccgacgtcgtaatcgtcggagccggctcggcggggctctcctgtgcgtacgagatcagcaagaaccccgccgtgagcgtcgccataatcgagcagtccgtgagccccggcggcggcgcgtggctcggcggacaactcttcttcgccatggtggttcgcaagccggcgcacctctttctggacgagctcggcgtggcgtacgacgagcaagaggactacgttgtgataaagcacgcggctttgttcacgtccaccatcatgagcaggcttctagcgaggcccaacgtgaagctcttcaacgcggtggcggcggaggacttgatcgtgaaggaagggagggttgcaagggttgtgaccaactgggctctggtttgatgaaccatgacacgcagtctngcatggaccccaacgtgatg

SEQ ID NO: 17933 - DNA, 449 bp, Glycine max
  Clone ID: LIB3106-099-Q1-K1-E7
gtgacaatggtggcgacgaacgtgaaggcagaaaccatgtctctgatggacaagcgcagcgccttggaggctgagatgaactccatcatcgcccgcctctcccagcccggcgctcctggcctctccggaaatctcgtcgactctgagggttttccccgttccgatatcgacatccccgttgttcgagccgaacgacgtcgcctggcagagctgcgcagtgaccacaacgaagtaactgagaaaattaacctaaatattcagattctccattcggcaagactcggaaataggtcattgcccttcaagaattcaggtaacgatgatggttcagatactcagatctcatcaaatatggacactcgtgcatcaacaccatcacaaaatgtccttctgatacgatctccaactcaatggatgtgaacgtgttgattagtagaccatgtgcaatg

SEQ ID NO: 17934 - DNA, 443 bp, Glycine max
  unsure at all n locations
  Clone ID: LIB3106-099-Q1-K1-E8
atcattcattagctgggcggtttgtaaaggctaaattctaataacaccaacgtcttcatcttgtaagctccgtctcttgacaaaatcaacgtcccatttatgcaagctttgattaaccattttcattccctttttccttcgcactactccctcattctgtgccatgtcttcctctctcgttcttccttccactcccttcttcgcccatggaacaagaaccctccctctcactcgatctaggctttccatgaccgtctccgccggatctcagccttctctccgcgacgctctgttcgccgattacaaggcctccacttcattcctcttccccggccagggtgctcaagctgttggaatggngaaagaagctcagaatgtgcctactgctgcggttttgttcacaaggcaaacgacgtattgnggtttgatcttcttgatatatg

SEQ ID NO: 17935 - DNA, 430 bp, Glycine max
  unsure at all n locations
  Clone ID: LIB3106-099-Q1-K1-E9
gccaatcagttttttgaatccaggaagctttcacaaccaaccttttccgatctttctctcaaaccggctcgcatttccagaaaaaccctgagcttgaagatggcccaagttgctcaaaacccttctcagcagcagaaagtcataataactaacaagtatggcaataaactagtgggcattttgcatgaatctggaaccaaagagattgttatcctatgccatggtcttcgatccactaaggaagacgatatcataaaaaatcttgctgctgctctagaaaaggcaggagtcagttcttttcgctttgacttcactggaaatggggaaagtgaaggttcatttgagtttggtcactattggagggaggttgatgatctgcatgatgtggttcaacactttcatgggcaaaccatanagttattgcaattat

SEQ ID NO: 17936 - DNA, 430 bp, Glycine max
  Clone ID: LIB3106-099-Q1-K1-F1
cttgttggtaaagaaagaaagagaagagaagaatcgaagacgaagatggaggacgcatcagcatcaaagttcattccacaccaaatcggaggggtccaaaacgacgcgcttcgattcggtctccatggagtcaagagcgacatcgttggttctcaccctcttcaatcttcactccaatctacaaggagaatggatgaagcgatgaagaggcaatgcaaagttaacctgtacggaactgcttttcccatgaaggaggagcttgacaggcaaatcctgtccaggttccagcggcctcctggaccaattccttcttcaatgctgggtttggagactgttacaagaagtgttgatcactttggttttgaggattgtctaaatgacccccgtgagtcagagactttccggccctagacatgcatcatgggatgga

SEQ ID NO: 17937 - DNA, 397 bp, Glycine max
  Clone ID: LIB3106-099-Q1-K1-F10
ggataagctgaaactgaaacatggtatctctgggttccttcacttcttttgcatgtgacaacctttctctttctctttctcaggctctcaaaccgtcatcattgcctctcattcactctttcacacttccaagaaacactatcaggaagaagaacggtgctagtgtgaggcctctggtctgtgccctcaacaacaataacaacaacactgccttgcagtacagaaccctcggcgactccgacctcaacatcagcgaaatcactcttggtactatgacctttggggagcaaaacactgagaaagaagctcacgacattcttaattatgcattcgaccgtggaattaacgctctcgacactgctgaggcctacccaattcccatgaagaaagagacaca

SEQ ID NO: 17938 - DNA, 373 bp, Glycine max
  Clone ID: LIB3106-099-Q1-K1-F11
cccacgcgttcgggaaacttgaaagcatagcagagagatcacatcgcggctctctcatgtctcaacccaaccacccgctgaatctaaatgatgataacagagagagatgtaagaataccatcaaacagcatgaagataatcttaagtttcttaattctcaatcaaatcaattagctgaatcaatatttgacttgcaaggtaatgaagaaagagaactctgctgctagtatatttagttggctaaaagttaatgcacagacatcaaatttgacattaacaaaagatgttgtgggagttggtgcaacccttgccaaagttgagagcgatgatcttagcaagattctttctgaatttttgggcttggagacaatgc

SEQ ID NO: 17939 - DNA, 392 bp, Glycine max
  Clone ID: LIB3106-099-Q1-K1-F12
ggtgattttgtttatcataggaggatctgatgtactcgctcgtggatctcaactatattcacgatcatgatggcccttgaaaattctgaaaatatgcaaataaactgtgaggcatctttaaaatgcctccagggcaagggatttccttgcaattttcagagtaatgggagttctatggaaggctttacagagcttaaaaatgagcctggtactcatcctgctggggatgttgctgagcctaactgtcacttaggcagtgagtttcttgagccttccaatgaatttcacaccaaacctacttatcaccaaaattacagcacctggacaccctgccattttaactctcacaaggtgcagcaatgccaaatgaatgcttttgagagccattacta

SEQ ID NO: 17940 - DNA, 452 bp, Glycine max
  Clone ID: LIB3106-099-Q1-K1-F2
cccacgcgttcgcgagataactagaaacagtgtgatgaaaatgaaggtccttgttttcttcgttgctacaattttggtagcatggcaatgccatgcgtacgatatgttccctctccgaatgaacactggctatggtgcccgtactccggaggtgaaatgcgcaagttggaggcttgctgtggaagcacacaacatctttggctttgagaccattcctgaagagtgcgttgaagcaacaaaggaatacatccatggcgaacaatatagatcagactccaaaacagttaaccaacaagcttacttttatgccagagacctcgaagtccatcccaaggacacatttgtgttcagtatagatggcaccgtactctctaatattccatactacaaaaaacatggatatggggggagaaatttaactcgaccttgtatgatgaatgggttaacaaggg

SEQ ID NO: 17941 - DNA, 255 bp, Glycine max
  Clone ID: LIB3106-099-Q1-K1-F3
ccaggaccttctacgatttactggaaaagggtgagattactgttgttgcagaggaacagtgaaaatgttcttgttttgttgcctatgctctccatttataggcttttttttcccgtgttatattcaattggctcttcaaatgtaaatgagccaacatactatgagattgaaaagaataagtttcttgaactgattgaatactatgttggcctgtaaaagtttcatgcagttatgtttttattttgtgcttggctt

SEQ ID NO: 17942 - DNA, 361 bp, Glycine max
  Clone ID: LIB3106-099-Q1-K1-F4
attccaattcccaattcccaattcccaattcgaaacccttattcctttcaaagaaccaaattgagtgatcgtgatggcaccaaaggcagagaagaagccagcggagaagaagcccgcggaggagaagaagtccacggtgggagacaaggctccggcggagaagaagccaaaggccggaaagaagcttccgaaggagggaggcgccggcggagaagggaagaagaagaagagaaacaagaagagcgtggagacatacaagatctacatcttcaaggttctgaagcaggtccaccctgacattggtatctcaagcaaggccatgggaatcatgaacagcttcatcaacgacatcttcgagaag

SEQ ID NO: 17943 - DNA, 384 bp, Glycine max
  Clone ID: LIB3106-099-Q1-K1-F5
actcacaagagacaggctcaactaccagactaattttccaattccggcatgtgctccaaacctacggaccgcagataccctaaatgcggttcatacacataacacaacacaacctcgttcctttgctgaccaactcggatgtggctttgttctttcactttaacctatggttatggcttcgttgattcagtatgaccgaagtgccctctcctatgtgaccatcactacccgcttcagacggacccacaagcctcgacttcgttgctccttagatgctaaagtatgcgacatgagcgataacgcgcctaagggggggttttcttctgatccagaacattatcgaggacctgaactgaaagtggcaattattggagctggacttgc

SEQ ID NO: 17944 - DNA, 238 bp, Glycine max
  Clone ID: LIB3106-099-Q1-K1-F6
cccacgctccgcggacgcgtgggttgggcttggtggtgggcctttgtcattaacttcacaaatcaaagcgacgtcgttttcgtactgtgtagtggatcgcgactcgggaaaatcgtccacgctcgagttcaactcacctcgacccggtgactcggtcgttgcaccgttgttgaagaatcagaaggtgaacactttctactacgtggagctcaccggagttagcgtcggcggggaaatc

SEQ ID NO: 17945 - DNA, 425 bp, Glycine max
  Clone ID: LIB3106-099-Q1-K1-E4
attaaatccagattcatctagtctacttgcttgctatgcaaaggatgtttttgatattttagaaccggactttcccattcactttacacatccaagtagtggagatactcatgtgcaaagagatgacctgtcaacctctctgatgtctgcattctcttctacacctctctttgagccgtttgtcattcctctgcttcttgagaaactttcttcttcactgcattctgcaaagatcgattccttaaaatatcttagagtgtgctcttccaagtatggggcagagagaattgcaaaatatgccggggctatttggtcttcattaaaagacaccctatctacttatttgggggagccagatctttcttttactataacacctgtagatggtattggcttcccagagaatgatttgtgatagaagctct

SEQ ID NO: 17946 - DNA, 422 bp, Glycine max
  Clone ID: LIB3106-099-Q1-K1-F7
cccacgcgtccgcccacgcgtccgagagtttgttgtgagctataagctagtttatcgtgaggagaatatgaagttgtttgttttctttgttgctgcagtagttttggtagcatggccatgccatggcgcaagctaccaaaggttccctctccgaatgaaaactggctatggtgagcgttcttcggaggtaaaatgcgcaagttttaggcttgctgtggaagcacacaacatccgagcctttaaaaccattcctgaagagtgcgttgaaccaacaaaggactacattaatggcgaacaatttagatcagactctaaaacagttaaccaacaagctttcttttatgctagtgaacgcgaagtccatcacaacgacatatttatattcggcatagataacaccgtctctctaatatcccatacta

SEQ ID NO: 17947 - DNA, 436 bp, Glycine max
  Clone ID: LIB3106-099-Q1-K1-F8
gttcaaggagctgtttttgatcttcctgaggagattgctaaagaattacttaatagggacataccacctggaaacaccgtttccaagatcaccaagctaccttctttgcaagatgatgggcctccaagtgatttctatgggaggttctctgacagagatagaagtagccgaagaggttctacttctaggggaggttttagttctaggggaggttccgcttctagggaccggagaggttttaaatcctcacggggctgggatgtggaagactccggtgatgactttggtgatcaatccagtaggagaggtggtagaaattttaaaactggcaacagctggtctcgagcagcaggtaaaagcagtggcgatgattggctaattggaggtggtagacgatcaagcggccttcatcatcagacagatttggagggacctg

SEQ ID NO: 17948 - DNA, 341 bp, Glycine max
  Clone ID: LIB3106-099-Q1-K1-D11
ggcaaagaatttagatagtctagctctcaaatcctctgctgctcttccatccaatcctgtcagactgatcttagacgcaaacacatcctaatcacaaaagcggtgaccatggcaaacatgattatggcttccacaaaacctctggttccagtctgcaccagttaccgttcccccacaccaaaactccccattctccaaatttcactccccaaagccccaaccttgaaactgaaactgccaatttcaaagccccagatgctgtccctcctgggagggatagcaccactggtcttggccagaccctccctagcagaagaatttgagaaagcagcactctttga

SEQ ID NO: 17949 - DNA, 432 bp, Glycine max
  Clone ID: LIB3106-099-Q1-K1-D12
caggataggtgttttggtagaagtaaactgtgagacagattttgtctcacgaggtgaaatttttaaagagcttgtcgatgatatagccatgcaagtggctgcatgccctcaagtagagtatcttgttactgaagatgttcccgaggaaattgtgaacaaagaaaaagaaatagaaatgcagaaagaagatcttttgtcaaaaccagagcagataagatcaaagattgttgaagggcggataagaaaaagacttgaggagctggcattgctcgagcagtcctacattaaggatgataaggtagcagtaaaggacttcatcaagcaaactattgcaactattggagaaaatattaaagttaagaggtttgtgcggttcaaccttggagagggtttagagaagaaaagcaggattttgctgctgaagtagcagca

SEQ ID NO: 17950 - DNA, 449 bp, Glycine max
  Clone ID: LIB3106-099-Q1-K1-D2
gcagatcaatctaataatacttcttcagccgtccaagtaaagaatgaaccaacctatccaactatggacattaatgctaaaaaatctcgggaactggatgttcaagtagaatctcaaggagcgcaactaaatcagttaccatcatccagttctaatgctgttagtcaagaaacggaaagatcctcacttcacttacaaggccttaataaggagcaacaacagcatctacatttcccttcagcatatggtaacagtggtggtaattataaccctttttcgggctcaaccagtagttccacatcatctatcagaccacaaccttttgattcacacatgaggcaaattccacatcagagcatcagtccaaatcaattaggtgggtcaacacagggtttgattggtttgaaaaacttgatcagcaaaattctttcaatgatcccaagagaatg

SEQ ID NO: 17951 - DNA, 427 bp, Glycine max
  Clone ID: LIB3106-099-Q1-K1-D3
gcgagagagagagatggatactggtatgctatgaagatgggatctcagactcagcgtcatcaccactctctttgattctcttcaatcttgagtctccagtattactttgagtaccacttcaacaaactggtgctgctttgaaaaagtctgatgggttcaagattcccatctcatcagctcagcaatggcctgtatgtatcaggccggcctgaacagccaaaagaaaagactcccacaatgagctcagttgccatgccctatactactggtgacatcaagaggtcgggagaattaagcaaaatgtttgatatcccaatggatggctctaaatctagaaaatccggtcccataagtaatgctccttcaaggacaggatcatttgcaggtgcttgctcacactctggactatcatgcaaaatgctgcagc

SEQ ID NO: 17952 - DNA, 353 bp, Glycine max
  Clone ID: LIB3106-099-Q1-K1-D5
ggtaaactttgaacaaaaaatggtatgctttttaaggccaaacaagagtgacattcacctagcaggagacgatgaagctcccttagcggctatgaccagagagtactttgatggggtcgcaccataacgccgcacaaagactgatatacagagactatttagatccatatgtcaatgctttgtccaatgcccattactcttctataactataccacaaataacacaattgcaacttctacagaacgatcacctcgacaagtgattgctgtacaatgtgaggcacgtaccggcagaatttgtggagacagagtattaccaagatctcaacagcttggacaaacaccaccatacg

SEQ ID NO: 17953 - DNA, 450 bp, Glycine max
  Clone ID: LIB3106-099-Q1-K1-D6
ctcattcttgttgttagggtgtgtcatttgtgaaactatcaacaacacgaggccatcatcatggcagctgcttccccaatggcaagcgcaactcaagtccaccttcactaggactcttgtagctcccaagggcctctctgcctcttgaccacttcacctcgtgccttctagaaggcaacttagcttcactgttaaggccatccaatcagagaagccaacctatcaagtgattcagccaatcaacggtgacccattcattggaagcctggaaaccccagttacatccagccctttgatcgcatggtacttgtccaacctgcccgcatacagaaccgcagtgagcccactactaacagggatcgaggtgggcctggcccacggataccttctggtgggcccattcgtgaagccgggcctcttatgaacaccgagatcgccgggcaagcaggc

SEQ ID NO: 17954 - DNA, 450 bp, Glycine max
  Clone ID: LIB3106-099-Q1-K1-D7
ccaaagtccaaattttctagttccaccaaaccaaaccaaaccaaaatggcagcagcctcagcctcatccatgatatcaacaccagccttatctccaaccatccaaaagcaccatcatttgaagccatccaacgtgtgcttccaaggtcttagacccctcgcaaggttcaccaaagcctcatcaaccaaagtgagcaccaccaccaaaagggttattccaaagggtggtgttagagctgaactcaactcagcccttgtgataagcctcagcactggcctctccctcttcttgggaaggtttgtgttcttcaacttccaaagggagaacgtggcaaagcaagtgcctgagcagaacggcctcacacactttgaggctggtgatacacgtgccaaggagtatgtcacctcctcaaatccaatgaccctgttggattcaacattgttgatgtct

SEQ ID NO: 17955 - DNA, 444 bp, Glycine max
  Clone ID: LIB3106-099-Q1-K1-D8
cccacgcgtccggagcagcagcacattcctcgtgactcgtgaggttcgttactagcgtgtgtggattttaaatcaggtgcgacgcggtgtagagagtggcggtggtgtcgccgtggcggaagtgagaatgacttcggacggagcaacgtcggcggcgactaaccggaggaagccgtcttggagggagagggagaacaaccggaggagagagagaagaaggagagccatttcggcgaagatatactccggtcttagggcgcaagggaactacaatttgcccaaacactgcgacaacaacgaagtcttgaaggctctctgcgctgaagctggttgggccgtcgaagaagacggcaccacctatcgcaagggatgcagggcaccatatccaggtgatggtgtaggacctccaccagaaacactcctttctcatcacaaaatccaagt

SEQ ID NO: 17956 - DNA, 378 bp, Glycine max
  Clone ID: LIB3106-099-Q1-K1-D9
gagatgcgattgaacaatggtgaatgctgtttctcaacttggcactcagaaatgggttactggaactattcacttagaacatgatgcgggtggttcaacaaccaggactagatttcttactgggcttaatgcaggtctacatggtttacatctccacacgtggagggacactaccaatggttgcctcttatctggatcacatgtcaatcctgataacaaggagcatggtgcccatgaagatgagaatcgtcatactggtgatcttgacaacgataatgtcggcgatgatggtactgtcaagttcactattactgacagccagattacgctcactggaccaaacaacatcataggaagggcgggtgttgacatgctgat

SEQ ID NO: 17957 - DNA, 294 bp, Glycine max
  Clone ID: LIB3106-099-Q1-K1-E10
ctttgatgatgaggctctggaggtaaagataggtgaacagctccaggaatcaggtgagaatgttttcgtgggaggaaaaaaccgctggaagtactcgacatttgttaattgggaattctggtggccaaacttccctatcttggtttacttcaaggagtcacaaacgaagcctgagggacaaattcatttctttcccataatatttaatgggaagcagctttatgatgttatggtggaaagagctggcccttcaaaaactagtggaccaaaagaatcctgaggactgagatgtgt

SEQ ID NO: 17958 - DNA, 327 bp, Glycine max
  Clone ID: LIB3106-099-Q1-K1-E11
acatggcacaagggatacaaacccttaatcccaattccaatttccataaaccccaagttcctaaatcttcaagttttcttggttttggatctaaaaaactgaaaaattcagcaaattctatgttggttttgaaaaaagattcaatttttatgcaaaagttttgttcctttaagatttcagcatcagtggctacagcctgcatgcttcacggtgcaagcagccggcccgcaaccgcccgcaaatcctctggcctttccggaaccgtccgcattcccggcgacaagtcgatctcccaccggtccttcatgttcggcggtctcgcgagcg

SEQ ID NO: 17959 - DNA, 446 bp, Glycine max
  Clone ID: LIB3106-099-Q1-K1-E12
cggacgcgtgggttcagttttaagttacatagtttttcattgttttacttaatctacaatggctgcttcaacaatggctctctcttcatcatcattggctggccaagctatcaagcttgccccctccacccctgagcttggtgttggaagggttagcatgaggaaaacagcctccaaaactgtttcctcaggaagcccatggtacggcccagaccgtgtcaagtacttgggcccattctcaggtgagcccccatcctatctcactggtgaattcccaggtgactatggttgggacactgctgggctttctgctgacccagagacttttgccaaaaaccgtgaactggaagtcatccactccagatgggccatgttgggagccttgggctgtgttttccctgaatcttgtcccgcaacggagtcaagttggcgaggccgtgtggttc

SEQ ID NO: 17960 - DNA, 390 bp, Glycine max
  Clone ID: LIB3106-099-Q1-K1-D10
gttgatcgagataactagaaacagtgtgatgaaaatgaaggtccttgttttcttcgttgctacaattttggtagcatggcaatgccatgcgtacgatatgttccctctccgaatgaacactggctatggtgcccgtactccggaggtgaaatgcgcaagttggaggcttgctgtggaagcacacaacatctttggctttgagaccattcctgaagagtgcgttgaagcaacaaaggaatacatccatggcgaacaatatagatcagactccaaaacagttaaccaacaagcttacttttatgccagagacctcgaagtccatcccaaggacacatttgtgttcagtatagatggcaccgtactctctaatattccatactacaaaaaaca

SEQ ID NO: 17961 - DNA, 379 bp, Glycine max
  Clone ID: LIB3106-099-Q1-K1-E3
cttgagaaatataagcatctagtctacttgtttgctattcaaaggatgtttttgatattttagaacgggactttcccattcactttacacatccaagtagtggagatactcatgtgcaaagagatgacctgtcaacctctctgatgtctgcattctcttctacacctctctttgagcctgttgtcattcctctgcttcttgagaaactgtcttcttcactggattctgcaaagatcgatttcttaagatatccatgagcgtgttcttccgagcatagtcgtacaagagaattgcaaaaatatgccggggctattttggtcttcattaaaagacacccgtatctactttatttgggggagccagatatttcttttactat

SEQ ID NO: 17962 - DNA, 307 bp, Glycine max
  Clone ID: LIB3106-099-Q1-K1-B3
aagatgcttatcttttctagcgaatgttgtaatagcagaatgcttgctagaagtattctcttttgtgtaacttgggtttgtatgattgcttaaattagctaatacttttagctataattggaactcttgcaccctcttgtgcgtgcgtgctgtgttgcttacatcttgtttgtttgatttttgattgaatatatttccatgcgttttgttcttgaaaagttcactaatttttcagtttaaaagatcggttttgtccggttttccaaacattgataattaattgtgtaaacaaactgttgggaccttt

SEQ ID NO: 17963 - DNA, 366 bp, Glycine max
  Clone ID: LIB3106-099-Q1-K1-B4
ctatcttcttcaccttgctctcaccttctgggtaatgtttgaaacttggtgttagctgagctgcttgacaaaaatgaatattgcacaagttacagcatggcagcctgggatttgtgtgaaaaatatgtctcagttgcaccggcttcaatctaaaccatgtgttataccaaagagttttggtcctctcacttgtgttctactgagcttaagagcaagacaatcgtttagctcgaaatgttggcccattttacaatctcggaaacctcttcatatttgcttagccggtggaaaagggatgatgggaaatgatgagaattccccatggaaatctattgagaaagctattggaaaatttaagggagaatc

SEQ ID NO: 17964 - DNA, 431 bp, Glycine max
  unsure at all n locations
  Clone ID: LIB3106-099-Q1-K1-B5
ccattttctatctatcgtcaacgttagtgctttgtttaggtgaactaattcggagaccttgcaagacttcatcaatggctgtcaaagtttatattgtgtactactccatgtatgggcatgttgagaaactagcagaagaaataaagaaaggggcttcctctgtggaaggtgttgaggccaagttatggcaggtacctgagacactgctggatgaggtgcttggtaagatgagtgcaccacccaagagtgacgtaccagtcattacccccaatgaactatccgaggctgatggctttgtattcggcttcccaacaaggtttggaatgatggctgctcagtttaaagcctttctagatgctactggaggcttatggagagcacaacaacttgcangcaagcctgctggctcttctacaacaccggttcacaag

SEQ ID NO: 17965 - DNA, 313 bp, Glycine max
  Clone ID: LIB3106-099-Q1-K1-B6
aaaaaaaaaaaaaataaaaaaaaaaaaaaattttatttataaaaaaaaaaaaaaaaaatattaaaaaaggataaataaaaaataaaataagggtatattaaaaaataaaaaaaaaaataaaaaaaaaaaaaggggcggccgttttaaaaaataaaaatttatttacccttgcattgcaaagaataatttttttatagggcaaccaaaataaaattaaatggccgcctttttaaaacgtcggaactggaaaaaccttgcctttaccaaattaaattcctttgaaaaaaataccctttttgcaagttgggttaat

SEQ ID NO: 17966 - DNA, 427 bp, Glycine max
  Clone ID: LIB3106-099-Q1-K1-B7
cccacgcgtacgtggacgcatgggcagacttttggacccgctacgtcaataagaagcacgtgaaattgtatgaatggcgtatcaaacacaaaagaaacagaattgctacatagcaaaaactccttcaaacttctacggttatggcgtgcacgttgagcacttcttaaattgcgattctgactctccgctgtatatcatgtaacacttgcaagccttgcattcacacactctctctaacttcagggcagagctatgggcggaaattttatggaggaattggaattcatggcatcaagggaaggtctcagctctcagttgccaatgttgccactgaagttaactctgtagaacaagcccaaagtattgcttctaaagaaagccagaggccagtatactcatttctgccatagtttgacaagatgagatg

SEQ ID NO: 17967 - DNA, 240 bp, Glycine max
  Clone ID: LIB3106-099-Q1-K1-B8
gtaattggagccttgccatatctgaaagtaaacagaaatgctacatagatgttctgtttgaaaaactgagtcataagcctagctgggtttagtctagtgatttgtgacgtctcaaatctgctttcaaatgtttacagttagtttttgctaattgagatatcagtacctcaagataatggtacaccttcctgtatcatgtaacattggtatttattgacattattgtattgcaatttgttt

SEQ ID NO: 17968 - DNA, 373 bp, Glycine max
  Clone ID: LIB3106-099-Q1-K1-B9
ctcttctctctatcggcttcttcctctggtccattagggtttccttttctccctcggagcttccaattgaaatccaattcctcaatacctccacactttctcgttcggaaagctcgcgaattcgaaagacatcgacggctccacgtgatacgttttcttcctctctggttatcaatgttggctactagtgcagttgcatctttgcccgtattaccaccagtgagaagaggtggccaccacattgaacagaatgttgtttccacattgagctttccaagacgattactgacaactaataattcaatacctctgagtggtacacagtttccatttggcagaagagctcattctactcacacagcaactattatat

SEQ ID NO: 17969 - DNA, 293 bp, Glycine max
  Clone ID: LIB3106-099-Q1-K1-C1
ctgatttggtgatcttctttcatggtgatccatccatcaaaatcctgctttatgctcaacctcaatttacctgtcttacacaggcgcgtaatcttttcatacatgtatgtttttttccaccacacagtcgcagatgtattttgtagttctcaagtacatgccagcacatgttctggtaattgaaattcttcacatttcagcatctcgcattttctggggtggatgtttagttcacatccatgtacaaaatatggtttcacaaccagaataacagtacgcaaaatatgcatttt

SEQ ID NO: 17970 - DNA, 432 bp, Glycine max
  Clone ID: LIB3106-099-Q1-K1-C10
gattagccaagtggccgggaggagggacccttatgatgatctcctccaacatttctctaccccacctaagtgagtgttgctgaacttgccacaagcattatcggtgaaaaggatgaatttgtcgtaatttccccttgtaatatcctgtcttgttgcatgttgcagagattacaactggattgtgctgttatttcaaaaataaaggttccatataactatgctgttacagaagaattttttcctctccagaatttacattcttgcacaactgcacttcctggcaattattctgctttatcaatgtttcatgtcattatttagtatttacattgcttgtggatgattcatttcttgcgtgttgtatcctgtagaatgccatatttagaacctttaaatgtgttgatagttcacttgtagcttttcatagaatgc

SEQ ID NO: 17971 - DNA, 278 bp, Glycine max
  Clone ID: LIB3106-099-Q1-K1-C4
gattgtgtgtgtgtgtgtgtgagttttctttttagacaaaggaaaaaaagaaaacaaagggaagagcgagggaaaaggaataatgatatctatgtccaatggaaaagcaaagtggccaaggtgtatgggttggtgaatgtggcaccattgagtgcgaatactaaaaagcacactcttcatttaataatggtattgtcattttaatgctggctgaaaaacattattgtggaagtgaagaacaaatttgtgaactgcatacgaatatttatcaacgagaa

SEQ ID NO: 17972 - DNA, 438 bp, Glycine max
  unsure at all n locations
  Clone ID: LIB3106-099-Q1-K1-C5
atcacagtgaaacgaagaagccctaactacgcacgcactcattcttgagaaagctcaatattcattcgtccatggcactctcttctcgtctcttttccaaatccaaattgatctatggctgtcaaatacttctgcaaaaggagcatgctattccagttcgtcactttgctaaagagtctgcccctcctgcccttaagggagatcagatgctgaagaacatttttgtggaggtgaagaacaaatttgagactgccataggaatattaaagaaggagaagatcaccattgacccagaagatccagctgctgtttctcattatgcaaaagtcatgaaaacagntagagagaaggcaagcttgttgtcggagtcccaagacatactatccaccattgaaattgagactcangtattccagatgctcggacctatcttctgac

SEQ ID NO: 17973 - DNA, 395 bp, Glycine max
  Clone ID: LIB3106-099-Q1-K1-C6
gcttgacttgttacaggtcttatgcagatcctgtagtaggttttgaagagcaatccagcaatggatcaactccaccagcagattcccaagctaacatccccaatgggaaacatgtggtgaagaactgaaataatgtgccttgagaagcaccaatgcatgacatcatagaaaacttaacgcacatatagtcataattattaccaggaattctggaacttcgtgaactgaaaagatggtcatggtctcaaccatcaaattccaagcctaaactagatttcccggtcatggtttttctggggttctagttatgaatttaggaccgcaatttatatgatttagtatactgatcgcaaagtgaataatcgccacccactatttgatttttattctgcatt

SEQ ID NO: 17974 - DNA, 278 bp, Glycine max
  Clone ID: LIB3106-099-Q1-K1-B2
cttggatattattgataagttccatgatgtttttttgacctcaatgtcggatgatcttcacactcctgttgtattggctggaatgtccgatccattaaaatcaatcaatgatttgctgcatacccgtaaggggaaaaaacaacaatttcgaattgaatcactttcagctttggagaagagcatcagggatgtccttactgttttaagacttatgcctgcaagttactttgaggttttgcagcagcttaaggaaaaagctttaaagcgtgcaaacttga

SEQ ID NO: 17975 - DNA, 433 bp, Glycine max
  unsure at all n locations
  Clone ID: LIB3106-099-Q1-K1-C8
cccacgcgtncgcacaaatcacaatgtgctccgataactacaatctctcaattccccattaattaaaatcaaaatcaaaatctaatctgggtttctcccatcagaagacaaagcttccgactttgcgggattcgttcgtatttgtttcagtgctgtgatggggaaggtcgcggtgggagctgccgttgtctgcgccgccgccgtatgcgctgcggcggcgctggtggtgcgccaccgcatgattagttcccggaagtggagtcgcgccatggcgatactgaaggagtttgaggagaagtgtggcaccccaattgtgaagctaagacaagtggctgatgccatggatgttgagatgcacgcgggtctcgcatctgaaggtggtagcaagctcaatatgttgacagttttgtcgataatctcccaactggggatg

SEQ ID NO: 17976 - DNA, 441 bp, Glycine max
  unsure at all n locations
  Clone ID: LIB3106-099-Q1-K1-C9
cccacgcgtncggttccctctcctctcttctgctcaaacaatgtcgcaaacaacgctgcacgctttcgtcgccaaaaaccttggatgtggaatggcagaaggcaagtgtctcccatgttcaggtgtttctggaagaactgctgctgtatattcctactcttctctaggtcatcgcagaattcattcccatgtccaagttagaggactaaagtgtggctttaggggtgcatcttttgtatgtgaagcaaagaggaacccagatttctcaaggcaaaacaagcatgggtcctccagaagcagaaatcggaatagtgatgggagagacagctttgagagctttgacgacgatatgttttctttaaaaaatggaccacctgtgtctctttcaacctcaggaaaatccaggccacttcagcccctggtcctagggagaaggagatt

SEQ ID NO: 17977 - DNA, 451 bp, Glycine max
  Clone ID: LIB3106-099-Q1-K1-D1
cccacgcgtccggaaaagaaaatcctcacccattttcttcgtagccaaacactctgaaattctcaggtatgtcgtggcaagcgtatgtggatgatcacctactgtgtgaaatcgaaggtaaccacctcactcacgccgctatcatcggccaagacggaagcgtttgggctcagagcaccaacttccctcagttcaaacctgaggaaataactgccatcaataatgactttaatgagcctggatcacttgctccaactggattgtatatcggtggcaccaaatacatggtcatccagggtgagcctggtgctgtcattcgagggaagaagggtcctggtggtgttactgtgaagaagaccggtgcggccttgatcattggcatttatgatgaaccaatgactccaggcaatgcaacatggtagttgaaaggcttggcgattatctcattgat

SEQ ID NO: 17978 - DNA, 447 bp, Glycine max
  Clone ID: LIB3106-098-Q1-K1-H8
cgacggcatcgcgtcaggcgttctgcgatgtgagcgattgcagcggaagcatgcgaatctgtaggaggggaagcctgcatggcagaaatgtaccctgaagtgaggctacagccagaagctaagacaccacgagttgttacagagaacgttgagagagagtatcttgaatacgatgatcctaaaacggtatttagaggagaggcttgtgatgatcttggaggaactttttgtgagaccgagtatcataagggtgtctactagagagaaaagaaaaccctttttattgccatggctactgcgtttttaatgtctaccagtaatgattggagtggtgaatgtacataggtttaggctatggagctcaattttaaaatttttaattttttggggaaaaaatttttttttttccaaattttttttttttggcgggggctttttttttttttt

SEQ ID NO: 17979 - DNA, 418 bp, Glycine max
  Clone ID: LIB3106-098-Q1-K1-H9
cccacgcgtccgcaaaagagtagtggcctttaggtggtgaagaacaagagctcaaatcaaatcgaatcgaaaaaagaaagaaagagcatattcatggcgatggcaagcctggctcgacggaagggttacgccgtcgttttgtcgtcgaggtcgtcgttttgtctgacaagctggaggggattcgcgtccggatctgacgaaaacgacgtcgtcgtcatcggcggcggtcccggcggctacgtggccgccatcaaagccgcgcagctcggtctgaaaaccacttgcatcgaaaagcgtggcactctcggcggtacctgcctcaacgtcggatgcatcccttccaaggcacttctgcattcttcccacatgtatcatgaggctaaacatgcatttgccaaccatggggtcaagttttcat

SEQ ID NO: 17980 - DNA, 343 bp, Glycine max
  Clone ID: LIB3106-099-Q1-K1-A1
aacctctaagaagtaatgcagatgtggatccagaatccttaaattcaggagacaaatggaaggaaagtgcctgtgaagctggatcaaaggaataccgttctaagtcctcactaagacttcaatcaacaaaatattcaactggagttggtcttgtctatgcatcatcagaggaggaggatgtctgtccaacttgtcttgaagaatacactaaagagaatccaaagataatgacaaaatgctctcatcattttcaccttggttgcatttatgagtggatggagagaagtgacaactgtcctgtctgtggaaaggtgatggtattcgatgaaacgactttcacttg

SEQ ID NO: 17981 - DNA, 271 bp, Glycine max
  Clone ID: LIB3106-099-Q1-K1-A10
gcgggtgagaactaagaaggagaagcaaatggcttcctcaatgatctctttcccagctggtaccactgtcaaccgtgccggtgccggcatgggtgctccattcactggcctcaagtccatggctggctttcccaccaggaagaccaacaatgacattacctccattgctagcaaccggggaagaatgcaatgcatgcaagtgtggccaccaagtggcaagaagaagtttgagactctttcctacctgccagaccttgatgatgcacaattg

SEQ ID NO: 17982 - DNA, 349 bp, Glycine max
  unsure at all n locations
  Clone ID: LIB3106-099-Q1-K1-A11
agaatctattcttgctcagatggctgaactcaagaaaattttgtatgcgaagttcaatgactcgatcaatcttgaggaggattagtaactttcttcttgttgatagatttctagttgttgttttcttgttaatatgacctaatggacatttggcatttttgagtcatattgtctcttatcatttgattttaggatgtatgttatcttgcttgaacctctttcactccttggcctctgtttctgctttctttggcttcttgtgtgaatttcattttccctttattgtgtcctgaaaggggggnaaaaaaaaaaaaaaaaaaaaaaaaaaaaaaaaaaaaaaaaaggggcg

SEQ ID NO: 17983 - DNA, 433 bp, Glycine max
  Clone ID: LIB3106-099-Q1-K1-A12
gttccaatttaacaaatttataaaccggttcatcgtataaatgaattaaaaaagaactaataaccaacgcatcgcttcggattatctagatctaaagaactagtcaaaacaaaaaaaaatataaaaaaagatatattatagcaactgaactattgtgaagcataaaagaacaaaaatcttatttagttgtaaagcaataaaaatatacagataaatgaagaggtgaaagaaagagagaaaaaaaatcaatgatatagaattctaatatgtaaaggtctatgggttatctcataaaaggtagtgtaataaagcatcaatctaaatcaattcatatctatttatatatgaattaatttataacgtaaacaaattaaggagctctgaatcaataaaaactgagaatattgttcacgaaaaaaacaattcatattcg

SEQ ID NO: 17984 - DNA, 308 bp, Glycine max
  Clone ID: LIB3106-099-Q1-K1-A2
acgctttctattccatattcctaacaattcaattcattcatccttcactactacaccaaattaatagaaattaaagatatatcattccacaaaacaaattaaagttagtgagacgtacccttattatggccaaagaaggtcttggacttgaaatcactgagctaaggttgggtctacctgatgcggagcatcaagtaagtgtggtcaataagaaaaatgagaagaagagggcattctcggaaattgatgatggtgttggagatgaaaatagctcctccggcggaggcgaccggaaaatggagacgaat

SEQ ID NO: 17985 - DNA, 382 bp, Glycine max
  Clone ID: LIB3106-099-Q1-K1-A3
cagcgttgttgcattgtagaaggcgatggccgcgcgagctctgttgaccagaaaaaccctagccaccgtgctccgcaacgacgcgaagcccataatcggagttggcataacagcagcggctactcattcacgcgggttgcacgtgtacacgctacccgatctggattacgactatggcgcactggagccagccatcagcggcgacatcatgcagctgcaccaccagaagcaccaccagacttacatcaccacctacaacaaggccctcgagcagctccaagacgccatcgccaagaaagattcctccgccgtcgttaagctccagggcgccatcaagttcaacggcggaggtcatgtcaaccattctattttctggaaaaat

SEQ ID NO: 17986 - DNA, 456 bp, Glycine max
  Clone ID: LIB3106-099-Q1-K1-A4
cccacgcgttcgcccacgcgtccggtggccaccagttggcaagaagaagtttgagactctttcctacctgccagaccttgatgatgcacaattggcaaaggaagtagaataccttcttaggaagggatggattccttgcttggaattcgagttggagcacggtttcgtgtaccgtgagcacaacaggtcaccaggatactacgatggacgctactggaccatgtggaagctgcctatgtttggttgcactgatgcttctcaggtgttgaaggagcttcaagaggctaagactgcataccccaacggcttcatccgtatcatcggattcgacaacgttcgccaagtgcagtgcatcagcttcatcgcctacaagcccccaggcttctaagtgtgaaaaatttgcaaagcattgtagccgccaccccactttgtttggttgtacttaaactacattcc

SEQ ID NO: 17987 - DNA, 227 bp, Glycine max
  Clone ID: LIB3106-099-Q1-K1-A5
aaccagacgacgtgcttaattttttttttgttatagtgattgggcatatttgtgacaaatagtgagggtattacttttgccatatttgggaaaacaaaagaaattgttgcaccttaattcattagtttggagaggcttttcttactgtttatgcacaataggttttcttaaacaaaatcggctctgagacccttcctgatgagagcgtcgaatcatcaaacatatac

SEQ ID NO: 17988 - DNA, 306 bp, Glycine max
  Clone ID: LIB3106-099-Q1-K1-A6
cgttccaaaaaaaaaaaaaaaaaaaaaaaatttaaaataaaaaaaaaaaaaaaaaaaaaaaagggggggggcaaaataaaaaaagggtagggaaaagggggggcccttctggggagcccctctttttttccccgccctgccgccctttaactcccctttttgttggcacctcaaatttaattgcatgacccctgtttttacacagcatacttgggtaaaccccgggggttctctccctaagtgccttgctaaaaaaccccctctttccaagcgccttaaaaataaaaagggccccccccttggccc

SEQ ID NO: 17989 - DNA, 182 bp, Glycine max
  Clone ID: LIB3106-099-Q1-K1-A7
tcgaaaacaaaatactaaaaaaaaaaaattaattatacttaaataataaaacgacaatgggtgtaggttttccaggtttacttctgcgggccgccttcatggttgggccaagctaccgtattcttgcccaaaaaggcgttgcacttgtaatcactgacctaacgttgaaaacagctgacgcg

SEQ ID NO: 17990 - DNA, 366 bp, Glycine max
  Clone ID: LIB3106-099-Q1-K1-A8
cccacgcgttcggagaaacaaagttagaagtaaagaagatcatggcttctctagcaaccttggctgctgttcaaccagctacgatcaatggccttgctggaagttccctctctggaactaagctctctttcaagccctctcgccacagtgtcaaatccaagaacttcaagagtggtgccgtggtagcaaagtatggtgacaagagtgtgtactttgatttggaggatctgggcaacactacagggcagtgggacttgtatggctcagatgcaccttcaccctacaaccctcttcagagcaagttcttcgagacatttgctgctccattcacaaagaggggattggtactcaaagttctgatattgg

SEQ ID NO: 17991 - DNA, 212 bp, Glycine max
  Clone ID: LIB3106-099-Q1-K1-A9
atgcctatattgttcttgtgtgttttgccttctaaagttaaaaatgaatagagacaaattgaaattggcgagtgccctaaaaaaaaaaaaaaaaaaaaaaaaaaaaggggggaaaatttaaaaaaaaaaaaattaaggggtggggggttgggggggaaaagggttatgtttgggggggggtaaaaggaaagcattggctgtgggttagaaaa

SEQ ID NO: 17992 - DNA, 441 bp, Glycine max
  Clone ID: LIB3106-099-Q1-K1-B1
cttatggtggaggttactttcacccaactcagccacaagtgcagagggccatacgcccacaactgcagtcgcaacgtcattttcaaaatgtcagtcaaggaacaagctccaacagttcatcttcaaaaggacatacattggtgcatagaggccaacagatatggaggccaaagagttaaaaggggatctctattactccgaaaatgccatggttttagctttgaacaggtttttactattgcctttcagtttacttgttaacacaagtgattgaaagaatgggattttgattttttttgtgcccttgtggatcaaaaagtgatcaaccgtgtatattacatgaggttttggtggggcattatattgacgtttttacaactcttatgtacttgtggtaatattcgggcatgcaagagtttaaaatgtgcaactttgcatatg

SEQ ID NO: 17993 - DNA, 430 bp, Glycine max
  unsure at all n locations
  Clone ID: LIB3106-098-Q1-K1-H7
accacgcgtccgcccacgcgtccggtgaggcctccccatactcttcattcttcactctggactcttcactcccaaccctaggcaaacgcaaaccattcattcattcagttcagtaactcacctcaccatggccgcatccattacattgtccaggctcgtctcttgcaccctcaccactgcctctttcttcccacccataaccctgccttccaaactctcctctctccgactccccacccgccgccaccccaagccactcagattctcctcctgcaccatcaccgccaccatctgcgtcggcgacaagctcccggaggccaccttctcctacctggactcgtncggcgaaggggggggtttgggccccaaagggaaaacccgggaaacccgggaaccccggggggttggggtttttcccgggggggaaaaa

SEQ ID NO: 17994 - DNA, 425 bp, Glycine max
  unsure at all n locations
  Clone ID: LIB3106-099-Q1-K1-B10
caaggagactagttctgtattcagattacattgcaaaaatggcatcattcaccatgacagcttctatctttggctgcccagctgtcaccaaacggtcggcagtggctgcgcagaggagattactcgtagtgagtgctgccaaagctgaaggggaaaaggtcagttatgacaacaatgatagcaatggaaggaggaacttgatgttcgctgtggctgctgctgctgttttctctgttgctgggatggcagtggcagatgagcctaaaccaggaacctcagaagccaagaaaaagtatgccccggtttgtgtcaccaatcctacagctaggatttgtcgcaattgaggatctcctgtttcattntacctctgatgatcggaaatgtacgttgggggatgaagtatgtttttgatttaatatgatcct

SEQ ID NO: 17995 - DNA, 435 bp, Glycine max
  unsure at all n locations
  Clone ID: LIB3106-099-Q1-K1-B11
cacacacacacacaacaacactctgaaactaacaacaacaataaaagaccatgtcggtgaaggagtgcgagcaccacaaggggaagaagaggaagatcttccggcaagtgttctggtgcttagtggtgttccttttcatcgtgctggtcacaattcctttgatatgggcaatccttagacccaccaaacccaccttcacgctccaagacgtcaccgtctacgccttcaacgccaccgtggcgaacttcctcacttcgaattttcaggtcacgctcatctcgcgtaacccgaacgaccgcatcggtgtttactatgatcgcctcgaaaccttcgtgacctaaccgagccagcangtcacgtaccgaaccgccatccctccgacatatcaaggccaaaaaagagataatgttgggtctccgtttgttaatgcaccaa

SEQ ID NO: 17996 - DNA, 298 bp, Glycine max
  Clone ID: LIB3106-098-Q1-K1-G12
tcgaacctccctacaactcaagggaaagccatccctgatgcctccgactacaagggccgccccggcgagcgctctaaaaccggtggttggaccgcttccgccatgatattaggaggagaagtgatggagaggttgacaacactaggcatcgcggtgaatttggtaacatatttgactgggaccatgcatttgggtaatgctgcctctgccaacgttgtaaccaacttcttgggaacctccttcatgctctgtctgctcggtggcttcctggccgatactttcctcggaagataccgga

SEQ ID NO: 17997 - DNA, 407 bp, Glycine max
  Clone ID: LIB3106-098-Q1-K1-G2
cccacgcgtccggcgttggtgcgcacgctaatgttgggagttatcggagctggaacgtggttgcgatattcaaaggccctgcttcaaccatggaaggtagggttctcctctttgtccgctgtcgacggccggaaacaccaccttttggatttgcaggaaatcgaaacggttctcaccgacgttaaagctgacaacgttaaggttataccagttcccaagcactgggattgggctgatttcatggtactcggcactggcaggtccacctggcacgtcaagaacatctgccaagccctaatttacaagggcttagcagaaacagagaggagttgaacgaatgatgctaccaaagtggggttttggggggaaaaaaaagggggggtttccaaaaaaggcccccagggggg

SEQ ID NO: 17998 - DNA, 353 bp, Glycine max
  Clone ID: LIB3106-098-Q1-K1-G3
gccagttgtatctgtagattggctttatgataacctgaaggagccagatatcaaggtactagatgcttcgtggtacatgccggatgagcagaggaatccaattcaagaatatcaggttgctcacattcctggtgcccttttctttgatgtagatggaatagcagatcggactacaaaattaccacacatgctgccatcagcggaagcgtttgctgctgctgtttctgctcttggcatagagaacaaagatgatttggttgtttatgatggaaaaggattatttagtgcagctcgtgtttggtggatgttccgagtatttgggcatgacagagtttgggtattagatggtgggg

SEQ ID NO: 17999 - DNA, 377 bp, Glycine max
  Clone ID: LIB3106-098-Q1-K1-G4
cccacgcgtccggtggatcgtgcatatgtatgtgctgccctgtctccgaatcgagtgttgtttactcactgcgcattgagactgaaaaagtcaggcactgttgtaccaagaatggaattggaagaagttggcccgtccatggattttgttgttcgtcggcatcgtcctcctaatgaaagtttgaggaaggaagcaatgaaaacatcgagggagaagccaaagaaaaaggagaagaatgttaaaagggacgaattacagggaaagattggaagtatttatatcccagatcagaaggttggagaaactcctttaccttacaaagcaaaaggagtgaagagggagcgccaagaaagcccccaaaaaaagcccccgggggg

SEQ ID NO: 18000 - DNA, 337 bp, Glycine max
  Clone ID: LIB3106-098-Q1-K1-G5
cccacgcgtccgcccacgcgtccggattgctagaatggaatttcgatgctcagtcatctgttttaccattctcttctctctggctcttgcaggagagagccatgtccatgcatcgctacctgaggaagattattgggaagctgtttggccaaacactcccattcccactgcactgcgagagcttctaaagcctctccctgcaggtgttgaaatcgatgaactccctaagcaaattgatgatacacagtacccaaaaacattcttctataaagaagaccttcatccaggcataacaatgaaagtacaattcaccaagcgtccctatgcacaaccttat

SEQ ID NO: 18001 - DNA, 346 bp, Glycine max
  Clone ID: LIB3106-098-Q1-K1-G6
cccacgcgtccgcccacgcgtccgtctctctctctctctttccttctctctttgcaactcattgaggcattcatcaaacaccttctcaaaatggccaaagttggaaaactaacaaagctcaagtcagcaatcaagagatggccctcattgaccaggctcagccgcaacagcagcagtgtctcttccaacaaaggggtctctggaaaaggaacatcccttaattcatccaaggaacacgagcatgaacaagaacaacttcgtgcggtttatgttggcaagtctaggaggcggtacctcgtgaactccgaagtgatcgatcaccccgtgtttcaagagctagtggaca

SEQ ID NO: 18002 - DNA, 352 bp, Glycine max
  Clone ID: LIB3106-098-Q1-K1-G7
cccacgcgtccgggcggtttattttcttattcatcacttcccgaggaggagagtcctgacgtgaaagcattccactccgcggagagctggcagagccacttgaaagagatcaaagagtcccctaagctagttgtgatatatttcacggcgtcctggtgtggcccttgcaaattcatcactccagtgtttaaccagatagccgcagagtttgcaaacgctgacttcgtcaagatcgacgtggacgaattatctggtgtggcgaaggagtttaaggtggaggcgatgccgacgttcgtgttgtggaaggaaggaaaggaagttgagagggttgtgggagccaagaaggggaaaa

SEQ ID NO: 18003 - DNA, 438 bp, Glycine max
  unsure at all n locations
  Clone ID: LIB3106-098-Q1-K1-G8
ctgggcttagttgataagcataattgggtgaggaagagagaaagagagtgaagaagatggcgtcgagcggagcggtaccgttttggagggcggcggggatgacgtacataacatactcaaacatatgcgcgaatctgctcaggaattgcctcaaggaaccctacaaggccgaatccctctctcgtgagaagctccattttgttctctccaaatgggtcgacgccaagcctgaaaaacctactattcgttcagacaccccagagcagtgatctggaatagttggaagctataaatgcataaatctttgagatctggaagttcattgtcattttggaccctttctgtgattggnntnttttttttaaaaaattttttttctccccctttttttttgggggtttttttttttttttttttttttcccctttttcctttttt

SEQ ID NO: 18004 - DNA, 443 bp, Glycine max
  Clone ID: LIB3106-098-Q1-K1-G9
gaaattgttgtttcttcctctctgagttccaactttcacctcaaccaaatacacaacaaaatggggtttcagaagataagggttggcaaccccatcgtcgaaatggatggggatgaaatgacccgagtgatttggaaactgataaaagataagcttatttttccttatttggagctggatattaagtattttgaccttggccttcctcatcgcgatgccactaatgatagagttactattgaaagtgctgaagctacactcaagtataatgtagctatcaaatgtgctactataactccagatgaagctcgcatcaaggagtttaacttaaagcaaatgtggagaagtccaaatgggacgatccggaacattctaaatggtacagcttttagagagccaattatctgtaagaacattcctcgtcttgtttcaggatggacaaa

SEQ ID NO: 18005 - DNA, 443 bp, Glycine max
  Clone ID: LIB3106-098-Q1-K1-H1
cccacgcgtccgttcgttttcgacctcactttccttacggctgcaacaaagtttatgcaagatacttatagcataagagtggcagaatctctagccttaagatggtgtgttgaagtcatgtaataagggaccaacactgcattacacatattttgatggcattatcaaagattgcattcaattgatgcactctttttcatcacctggtgttcaatggataagaagaattattgctaataagttggcttctctagctttcatgctttaggaaagatactaaataaaagaggtttcaccttagaatgttagctatctgcaacatgatgtatgaacctcttttcctcaatttggaatataaaaaaaaaggggaaagggccccaaaaggttttaaaattttttttgtttttcccctttttacccttttttttccccttttttttttt

SEQ ID NO: 18006 - DNA, 425 bp, Glycine max
  unsure at all n locations
  Clone ID: LIB3106-098-Q1-K1-H10
tcgcccacgcgttcgcccacgcgtccgtccacgcgttcggtttcttttttccgagactttgaaggatcaacttttgtcttggcaaattgaaaccaatcagtttcaatgcaaaaattgcctgaatttggcactgatttggctcttcaggcaacctttaggattgtcctagaagaatcttcctcaaagttttcaaaattagcagatgctaatgatagatcagtgatgttagaaccatttgatcttcctggaatgaatgtgattcaccaaggagcaggcaaacctcttctcactgtagattcttcccaaggggggccgtctgctgnttttcttttggtaccaggattggatggacgaaatgaaaccgtatctttagaattccagagcaacaagggatgttatgtgtacagtggtatgagccctaatgc

SEQ ID NO: 18007 - DNA, 393 bp, Glycine max
  Clone ID: LIB3106-098-Q1-K1-H11
cccacgcgtccgaaagattctaaagaaatataactaatattctttagaataatcaaaaagaatgttaaattcaaataaattttagatagaaaaaagacttaaaaaggaggatttgaaatgcgagatctaaaaacatatctttccgtggcaccagtagtaagtactctatggttcggggctttggcgggtctcttgatagagatcaatcgtttttttccagatgcattgatattcccttttttttcattctagttattgacacggaaaggggtgaagaagattatagatccaattaagtattaaatatatgtaattaatatgtaattaatctcctcttctttatttcgtcttttatttcttcttttttttacaattgtaatagaataagttagg

SEQ ID NO: 18008 - DNA, 204 bp, Glycine max
  Clone ID: LIB3106-098-Q1-K1-H2
gggtaaaaaaaacaaaaatggggcgggggaaaatttcggccttggggggaaggggggcccttttgcgccctggctgtcccctttttcttttaagggtccttaaatcccaaaaaaagggggttttgaaccggccctaaaaaattccctgcgcccccaatggggcttcccagggccctctttccccaaaagaaaacccacaggggg

SEQ ID NO: 18009 - DNA, 316 bp, Glycine max
  Clone ID: LIB3106-098-Q1-K1-H3
tgcacgcgttcgaacgagcgtaccactctgcgaacattccgtaccctggaataaacttagcgagccgatgtccactcaccgggagaccctgttacacaatctcccctagaagcgcgcagactcccatactgtcaacaggaactagattatgacccttttgtaaaggatcgtaactcaaggcacaggcaccctgctacaccaccacatcattgcttagtttgacggaatgcctgacgataacaggctgatgcttactgataaggcctttagagaagtcttgacatactcacacgacgccatagttgtgccaccatgg

SEQ ID NO: 18010 - DNA, 430 bp, Glycine max
  unsure at all n locations
  Clone ID: LIB3106-098-Q1-K1-H4
caactctgcgttctcagtgtttccagcggaagcatgcgaaactgttggaggggaagcctgcatggcagaaatgtaccctgaagtgaagctacagccagaaactaagacaccacgagttgttacagagaacgttgagagagagtatctngaatacgaataatcctaaaacggttttaaaagagaggcttgggaagaactgggggaacctttttgtgagaaccaatttcaaaaggtggctaattgaggaaaaaagaaaacctttttaatggcctgggttactgcgtttttaaaggctaccagtaatgattgtagtggtgaatgtacattaggttaggctatggatctaagttttaaaattattaaatttttgggaaaaaggtttttttttcaaaaaatttttttttttggcgcggcgttttttttttttatt

SEQ ID NO: 18011 - DNA, 450 bp, Glycine max
  Clone ID: LIB3106-098-Q1-K1-G11
cccacgcgtccggagagagagaggatatgggttcgaagaggtatgcgctattgatgtgcggtgaggattcggagtacttggtgaagatgcacggaggcacctatggggtattcatgaagttgctccaagagcaagaggaaaagtgggacctctacaagctcgtccaaggagagttcccggagcagcatgacttgcctctctacgatggctttgtcatcagtggaagctgctatgatgcacatgccaatgacccatggatccttgacctcattgctctcgttatcaaattggactccatgcacaagaagatccttggcatttgctttggccaccagataattgggcgtgcattgggaggaaaagtgggtcgctctcccaatggttgggacattggtgttaaagctataaacgtgtcatcatctttacccttggctttctcatctcttaagc

SEQ ID NO: 18012 - DNA, 201 bp, Glycine max
  Clone ID: LIB3106-098-Q1-K1-H5
ctcacaaaacatctctaaacgcttgtaaagatctccatctcccaatatgttgatgcaaggaacttggagaaaaaatcaaaggaagaggtgaagaagccagaatcgtgcttagatggagggtccattggtggtgttgggggcattggcggcattggcggtgctggtggaggtggtggtggtttaggaggtggctatggatga

SEQ ID NO: 18013 - DNA, 291 bp, Glycine max
  Clone ID: LIB3106-098-Q1-K1-H6
cccacgcgtccgtaggttttcattctctttctctctctctctgattcgatcgatttcgattgttgaattcatcccatcgtggagccttcaaatttgtagttgaacaacgatggtgctgccgctatttgctgctttcattctcttttttgcttttattccgaatggattgttagcagttccttccaccgtccccgcattcctttggtcatcacattatgaactggcctctgaaaatggattgaaggaatctgtaaattaccaagtcatttctccaaaagatctagcaaaatc

SEQ ID NO: 18014 - DNA, 391 bp, Glycine max
  unsure at all n locations
  Clone ID: LIB3106-098-Q1-K1-E6
cccacgcgtccgggaacaagaacaagaacaacaaagtaacgtgaaagagagagagatggaggcgattgttccagtggtggatttccagaggctttcagaggaagaggagcgcatgaagctgagaaaaacatgtgagaaaccagggtgtttcagaatcatcaaccactcaattccactaacactcatggctgacatgaagtcagtggttaaatacttgcatgaccttcccacggaaatcaaaatgcgcaacatacccttcgtccctgagagtggctatagngcggcaatgcaacaagtnctctatacgagggcatgggaatatatgacatggcattgcttaccacaaggcccccccttttttttttgggggaaaaagggggaaatttttttt

SEQ ID NO: 18015 - DNA, 341 bp, Glycine max
  Clone ID: LIB3106-098-Q1-K1-E7
cagcagagagaagagaagggctacacaaacacaatctctaatggcactcaggatgtgggcttcttccactgccaatgcactgaaactctcttctgtctccagacctcatctcttgcctcctttttctttctccagatgcttatcttccgtcttggatggacttaagtacgctgattcacatgaatgggtcaagcacgaaggctcagtcgccaccattggtatcactgaccatgcccaggaccatcttggagaggttgtgtatgtggagctgccagaaccaggtggcacagtttccaagaagtctggcttcggagccgttgaaagtgttaaagcaacaagtg

SEQ ID NO: 18016 - DNA, 422 bp, Glycine max
  Clone ID: LIB3106-098-Q1-K1-E8
ctagaaacagtgtgatgaaaatgaaggtccttgttttcttcgttgctacaattttggtagcatggcaatgccatgcgtacgatatgttccctctccgaatgaacactggctatggtgcccgtactccggaggtgaaatgcgcaagttggaggcttgctgtggaagcacacaacatctttggctttgagaccattcctgaagagtgcgttgaagcaacaaaggaatacatccatggcgaacaatatagatcagactccaaaacagttaaccaacaagcttacttttatgccagagacctcgaagtccatcccaaggacacatttgtgttcagtatagatggcaccgggtaaaacccttttcctttccttttttaaaaaatttaaatttttttcccccaattttaaacccttttttaacccccc

SEQ ID NO: 18017 - DNA, 433 bp, Glycine max
  unsure at all n locations
  Clone ID: LIB3106-098-Q1-K1-F1
ccttcacaagattctcacaaacaactcttgagaaagaaagaatggctgccaacacattgaggagttctgccatctcagccttcccatctctcctttcctcctcaaaatccagatttgccgcagcagttcctctttccagctttgttgtcaccaatgcctcttcttctcgcttttccatgagtgctgattggatgcctggccagcctagacccccctaccttgatggttcagcacctggtgactttggattcgaccctcttcgtcttggtgaagtaccagagaatcttgagaggttcaaagagtcagaactcattcactgcagatgggccatgcttgctgttccaggggatttttttttggggggtttttttccccccaaagggnaagaggggcccccattttttggggggggggcccctttttttaaaaaggg

SEQ ID NO: 18018 - DNA, 449 bp, Glycine max
  Clone ID: LIB3106-098-Q1-K1-F10
cccacgcgtccggacacgcgttcgcttgaaaatatatcagcgaagatcaacctgaacggcatcacttggcgcgcgaccagttcttgccgctgcattaacttccatctccgacccacctgctcttttcgatggcacgcaccagcggtggacatacagctatcttatgaccctatgcacaacgtgcgtggatcgctaggaactacaaggggctacaagataagatcaatttggtccctattaaccttcaagacaggccagcttggtataaggagaaagtctaccctgaaaataaggtgccatccttggagcacaatggcaaggtgttgggagaaagtcttgatttgatcaaatatgtagatgcaaactttgaagggacacctttgtttcccagtgatcctgccaagaaagagttccgtgagcaattgatatcccatgttgatacattcagc

SEQ ID NO: 18019 - DNA, 413 bp, Glycine max
  Clone ID: LIB3106-098-Q1-K1-F11
gcaacagaatactattatctcttgtttcttctttggttcctctctagcttaaccttcttattggacaaccacgttgtgtttctacgcgtgaaaatactactcctattgggtgacattcactcctttgcctacagcacaaatgcttgggcttttcattcctagttggtaccatatgatacaaaaggttgataatctattttacttttttggtacattctgttgcttagtttgtatttcgggttgaatgccatccataccaattgtaagaaaaaataatagtgtgtaaatgacaaaacttcctctcaatatgagagagaccaaagattgatcacactttccattcaaaaaaaaaaaaaagataaatgagtccatagatttattctgagttgtagattgaagtgtattcacattat

SEQ ID NO: 18020 - DNA, 424 bp, Glycine max
  unsure at all n locations
  Clone ID: LIB3106-098-Q1-K1-F12
cttccctttgttctcaaaccttatcccttatcctcccaaaaccaaaccatgtctacctccgcagcttctctcgcactcccaaccctcactctccgaactcgacaacctctctgttctccccaatgcttctcctcgtccctctccctcacccctaactccaaacccatttccatttccgccgttttcctcaaaacaacgctgtcgtcgtcgtcgccgttgtcgctgtcgtctcgcttcgttccccgtgtctctgtgttggagcaggaggaggacaccttcggcgacggagacggccccagcttctcccgcgaccttaagctctttgtcgggaatctccccttcagtgtcgacagtgcgcggctcgcggagctcttcgagagtgccgngaantgtgaggtggttgaggttatttatgataagacta

SEQ ID NO: 18021 - DNA, 307 bp, Glycine max
  Clone ID: LIB3106-098-Q1-K1-F2
aatagccttcatagcttccatacaatccctagagaagataccacagtctttgagctcttcaggacggtttgactttcatataaagctgcctgctcctgcagcttctgagcgcagggctatgttgaagcatgaaatacagaggcgtcagttgcaatgtgatgatgacatcctgcttgatgtggctgtaaaatgtgatggttatgatggttatgatctggaaatattagttgacagaactgtccatgctagctgttgccgttttctgccatctaatgctggccattatgagcatgagagtcctgcttta

SEQ ID NO: 18022 - DNA, 346 bp, Glycine max
  Clone ID: LIB3106-098-Q1-K1-F3
aagaaattcacttcagaaagtgataattaacaagatgctggagctaccaaaagttgcctcgtaaaggaggtcttactcagaggccagcaacaataagtaatggcatcagcagaagggaaggctccttatacagctaattgttttactcaagatttccggattcccctgagttctctggatcatccgtcatcagtttcaaaaaaattagtatctgattgggttcctaataattctattaatgatcaaattctttctaattcagtttttgtaccccataatctgaattctgataagctaccagaaatgaaatggtggctacatgtgaaaagtgacttgggggatgaag

SEQ ID NO: 18023 - DNA, 297 bp, Glycine max
  Clone ID: LIB3106-098-Q1-K1-F4
cttcatttcctttgctccctctcattgtgctatatttccattacacaattactagtcctgtttctgtgttggtgacacacgcttttgcttattaaacacatatcataacaaggtataccaaaatgtgcggctctaagaccaaagtgacgattggcttagaagtcatcgctgctgctactactacaacaactgctaagccttcagtggctagaatcaatggaaggccagtcctccaaccaacttgtaaccgtgttccaaaccttgagaggaggaattcaatcaagaaagtggcaccag

SEQ ID NO: 18024 - DNA, 413 bp, Glycine max
  Clone ID: LIB3106-098-Q1-K1-F5
ctttgtcttttgcttgcgaatctgaatcgaataataatcaatcaatcatcatggcgtcggcgaagaagatcacactgaagagttcggacggcgaggctttcgaggtggacgaggcggtggcgctggagtctcagacgataaagcacatgatcgaggacgactgcgccgacagcggcatccctctgccgaacgtgacgagcaagatcctggcgaaggtgatcgagtactgcaagaagcacgtcgaggccgcgaatcccgaagacaaaccctacgaggacgatctcaaagcctgggacgccgatttcgtcaaggtcgaccaggccacgctcttcgatctttatcctggctttttggccccggaaaaaacccctttaaacccttttttgggaaaaacccaatttttccaaaaaggg

SEQ ID NO: 18025 - DNA, 231 bp, Glycine max
  Clone ID: LIB3106-098-Q1-K1-F6
cccacgcgtccgaaaaaaaaaaaaaaaaaaaaaaaaaaaaaaaaaaaaaaaaaaaaaaaggaaaaaaaaaaaaaaaaaaaaggaaaaaaaaaaaaaaaaaaaaaaaaaaaaaaaaaaaaaaaaaaaaaaaaaaaaaaaaaaaaaaaaaaaaaaaaaaaaaaaaaaggggggccctttttaaaggtcccaattttttttccctttatttgcaatgttaaaatttttttatgg

SEQ ID NO: 18026 - DNA, 350 bp, Glycine max
  Clone ID: LIB3106-098-Q1-K1-F7
cccgaaccctaagagcagagcgaaaatgacaaccaccttcgcgaccgtcgcaggactcggtggcgcattactgtcatccaggtcatctcgtctcacctcagggtttgtgaaatccccagtgattgctaggaatcccttgaggcaagctgtggcaatgggaaatgggaggattacatgctttgagaggaattggctgcgggcagattacagtgtgattgggtttgggttgattggttggctagcaccctcaagcataccggctatcaacggtaaaagtctgactggcctcttctttgagagcattggtgctgagcttgctcactttcccagccctcctgcccttacctttt

SEQ ID NO: 18027 - DNA, 198 bp, Glycine max
  Clone ID: LIB3106-098-Q1-K1-F8
aaaggacatcgtcaggagttgactaagttaaggataactgatattcaaggaattgagagacctcaaaatgtattgcctgagaaacctccaaaacctgctaagaaagaaaaggaaaaagttgcagttacagcttaaaaaggatgtacctacccccttgggtgttgatggttattgctatctttttgcctcagtgagttt

SEQ ID NO: 18028 - DNA, 443 bp, Glycine max
  Clone ID: LIB3106-098-Q1-K1-F9
aaacaccctttgagttcattaacctcttcagaaaaaacaacaacaacaacaaaaaaaaacatcatcatcaaaaaaacttccgagaggttaatggcaacacgcgtgatccctccaagaatcctcaagaagctccgttacaacacaacaaccaagccactcaacgctgcccacccctcaatctctccagtcatcgccccaccgtcactcttcgagaggtcgccgtcccctgtcgcggatgctgtttcaacaacatccacgactatggagacggcgaatctcaacctcgacgacgcggagcggcttttcgcgtcagtatcgacggaaaagctgctccggtcgtccgcggttttgcatgcgacggcggtggggcccatggtagacctgggaatgtggttgatgaagtctccggtgttccagaccgggctgccgaaggatctcatcat

SEQ ID NO: 18029 - DNA, 444 bp, Glycine max
  unsure at all n locations
  Clone ID: LIB3106-098-Q1-K1-E5
cgacgcagaaggttcatccaatctccgaatcctttaatcgcattgcaaccatgtcgaggagaaaggtcagagagccaaaggaggaaaacgtgactcttggcccagctgttagagatggcgaacatgtctttggcgtcgctcgcatatttgcctcctttaatgataccttcattcatgtcactgatctgtctgggagggaaacgcttgtccgcatcactggtggaatgaaggttaaggctgacagagatgaatcatctccttatgctgctatgcttgcagctcangattttgctgccagatgcaaggaacttggcattactgctcttcatatcnaagctcgtgcccaaaaccgggggggggtttttggggggggggaaaaaccccacaaaaggggaaccccataattaaaaaaaaaaccccttttttttcccccgcggggggggg

SEQ ID NO: 18030 - DNA, 345 bp, Glycine max
  Clone ID: LIB3106-098-Q1-K1-G1
cccacgcgtccgcaagtctcgtagcacacactcacacactcagatctctcttctctttctgcaattccattgttgttctcttcactctcacaatgcgaatcctcgttgtgctctctctcgccaccctcctcctcttctcctccctctttctcaccctctgcgacgacctcaccgacgacgaggacctcggcttcctcgacgagccctcccccgcgccggagcacggccactaccacgacgatgacgccaatttcggcgacttcgaggaggacccggaggcgtacaagcagcccgaggtggacgagaaggacgtcgtcattttgaaggaggatacaatcgtggtgg

SEQ ID NO: 18031 - DNA, 444 bp, Glycine max
  Clone ID: LIB3106-098-Q1-K1-G10
aaaaacaaaaacaaaaatcttagccgcagaggcagaggaggagatggagacgatgatgatgagtggcgtatcgattccgagttcagttccaaaatcaagaccttctattagcttgggtttgggaactcccaagttgttcaattcagtttcagtaagggtagccgtgaacgtgaatggtcggggaagaaacaaaggtttgagttgcaacgccatgttcggtctgggcgtgcctgaactggtcgttattgccggcgtggccgccctcgtttttgggcccaagaaattgcctgaagtcggccgcagcatcggcaaaactgtcaagagctttcaacaggctgcaaaggagtttgagtcggagcttaagaaggaaccggattccaccgaatgggactcatctgagaaatctattgtagtcagtgagaagcagcagcagcaggacaatga

SEQ ID NO: 18032 - DNA, 84 bp, Glycine max
  Clone ID: LIB3106-098-Q1-K1-C9
ggtgatcgagataactagaaaacagtgtggatgaaatggaaggccctggtttcttcggtggctccattttggtagcatggcaat

SEQ ID NO: 18033 - DNA, 349 bp, Glycine max
  Clone ID: LIB3106-098-Q1-K1-D1
cccacgcgtccgcttgactgcatttatggccatggcaactctaaccccaatgtgttgctcatgttcaacacccagattcaggggtcaacaccatcagcatggctatcaactaaaactaaaaccctcagttttgaatttcagacctcagaagcaaaatagaagcatcagaatccgatcaccctctgcctccaacccgaaccagaatgagtcttcttctcccggattatactctgccaagaaattcgacctcaccgcatccaacgtcgacctcgttctcgacgatgttcgcccttacctcatcgccgacggcggcaacgtggacgtggtgtcggtggaagacggcgtggta

SEQ ID NO: 18034 - DNA, 252 bp, Glycine max
  Clone ID: LIB3106-098-Q1-K1-D10
tcgctcacacgcacgatgagcataccgtgtgatgagactggggcgttacaagatatctgagttatcagacatcgcatacccacctcggggtctctaagtcgagccctttacgctgtcccaatccatacatgggacagcgaaaccggcaaggtagccatgctgagctacatacattcaagttcagcattttcgcactcaacaaatcggactcaactgtcgggcttgccttcttgttggcacccatctgttctc

SEQ ID NO: 18035 - DNA, 195 bp, Glycine max
  Clone ID: LIB3106-098-Q1-K1-D11
tcctacgcgccactataattcttcttttatttgaaataattttctttatcattcacaatattgatgataccgttcattttttaaggctcaagagagattatcacctattattacaccattgttagcacatatgttaacacatagtataacaccattgttatcacaaatgtgaacacttattataacaactccatt

SEQ ID NO: 18036 - DNA, 444 bp, Glycine max
  unsure at all n locations
  Clone ID: LIB3106-098-Q1-K1-D12
ctcaccgattgctagaatggaatttcgatgctcagtcatctcttttaccattctcttctctcttgctcttgcaggagagagccatgtccatgcatcgctacctgaggaagattattgggaagctgtttggccaaacactcccattcccactgcactgcgagagcttctaaagcctctccctgcaggtgttgaaatcgatgaactccctaagcaaattgatgatacacagtacccaaaaacattcttctataaagaagaccttcatccaggcaaaacaatgaaagtacaattcaccaagcgtccctatgcacaaccttatggtgtatatacatggttaacggatattaaagacacctctaaagaaggatatagttttgaagagatatgcatcaagaaagaagcgtttgagggagaagagaagttttgtgcanaatccttgggaac

SEQ ID NO: 18037 - DNA, 392 bp, Glycine max
  unsure at all n locations
  Clone ID: LIB3106-098-Q1-K1-D2
cacaaacacctcgtccgtcacaatgcagctagctgtggcggccaacgctgtcgtttcaccgtcgccgttccgacctcatccccttctccggtcatccttctccggcgtctccgttaagctcactccccaatccataacgttttcacgcttgaagcccctcaccgtcttcgccgccaccaagaaggccgtcgctgtcctcaaggggacctccgccgtcgaaggcgtcgccactctcatccaagaagacgatggcccgacgacagtttctgttagcatcactggccttactccggggcttcatggttttcacctacatgagtatggtgataccacanatgggtgtatatcaaaccaaagggggggaaaaggccccaaaccccaaattttttttt

SEQ ID NO: 18038 - DNA, 148 bp, Glycine max
  Clone ID: LIB3106-098-Q1-K1-D3
tgacattcgtccggaacatgtgaatgtgtatggttgtccttcctttgtgtttgctttcctggtgaatcggtggccgttgagcgtttgggtggatggacgatgatcctgaagttttcttttaagttaatttaattatcattttgtgcaa

SEQ ID NO: 18039 - DNA, 346 bp, Glycine max
  Clone ID: LIB3106-098-Q1-K1-D4
cccacgcgtccgcctccctcaaatcccaaaccagcaaaaacctttcttcacaaaatggccgtgaacaactctaacaaccctcaccctccgcacgctatcttatcctacaccctcctcttcttaccctacgcacctctccgccaaaccctcctccctccaattccccaatctctcccaccgcgccgccaccacgcgccgcccccgtgtcgtcgtctccgccgttgaggcgccggagaaaatcaccaagctcggcgacgaaatcgccggactcacgctcgaggaggccaagaacctcgtcgacttcctccaggacaagctcggcgtctccgcggcggcgttcgcccct

SEQ ID NO: 18040 - DNA, 424 bp, Glycine max
  unsure at all n locations
  Clone ID: LIB3106-098-Q1-K1-D5
gtttgtggaatctagtgagagagagcagaggaaaaggggaagaaaaatgttgagtgcgacggcgatcggcgcgttattgggtttgggaacccagatgtactccaatgctctccgcaaactcccctacatgcgccatccgtgggagcacgtggtcggaatggggttgggcgcggtgtttgtgaaccagcttctgaaatgggaggcccaagtggagcaagacctcgacaagatgctcgaaaaggccaaggccgccaacgaaagacgttatatagatggagatgatgattaatgcatgtcttcatggattgtggcagttggtgaaaataatcatgaaatatgttgnaaccccttttttggggttttttgggcccccctttttttttggggttttttttttcccttttgggaaaattttttttttggg

SEQ ID NO: 18041 - DNA, 448 bp, Glycine max
  Clone ID: LIB3106-098-Q1-K1-D6
cccacgcgtccgcccacgcgtccgtttctctctcccttagctagtttttaccaatggctgctgcggttagtgctgcagtctgcttttcatccaccaaatctccctctctcccagccagacctccatcattaccccagagagagttgtattcaagaaggcttcattgcaatacagagatgtttgtagcagtggaagggtagtttccatcagagctcaagtcaccactgaagcttcagccaaggttgaaaaagagtccaagaaacaggatgaaagtgtggtttgagaacaagttcacaccaaagaccccttacgttggtagatgccaaatgagtggaaagttgctcgtggtttttttttagggaaaagtttttttttcgggcccctttttatttaaaaggttttaaaaagaggaaaaaaaaatttccccccctccccctttttttttttt

SEQ ID NO: 18042 - DNA, 229 bp, Glycine max
  Clone ID: LIB3106-098-Q1-K1-D7
cccacgcgtccgcagacgcgtacgctgatttgtgacttagctactttttaccgagtcttaggtactattattgctagatttggatttatcatccaccaagtctacctttctactaatctaacctccatctttaccctacactgaattatattcattaattctatattataaatcatatatatttataacaattgaaatatattttacctaataaatttactttccaatt

SEQ ID NO: 18043 - DNA, 345 bp, Glycine max
  Clone ID: LIB3106-098-Q1-K1-E1
cccacgcgtccgtagatcgcgaggggcctccttgcaagctgtgagagagaaatacaaacggcataagttcaaatgtgtggcaacaacagcttctcctcccaagatacctctttctttttttgaatttggggggcagattctttggcaattgtaactttgctattcttgatacggctttggtttcaactattggcagaaaagtgtttcctaacactagagatgagagttccagactttctgttgcacttgttgatgcttatatagagagaggtgcttgccatgaaatgcagtgacaatatactatgctggcctcactgactttgtgatcgagcttgtgtgaaaatg

SEQ ID NO: 18044 - DNA, 452 bp, Glycine max
  Clone ID: LIB3106-098-Q1-K1-E10
tcggaaagccaccaaatggatcggctttcatcagcagctacgtttgaaagcatgcactatggcagtgcaagccaaatgggtttgatttggcaacaagccagggcacccctggtggttccattgatgaaattgctagtggttttgtgcctagccatgtcacttatgttatttgtggagagagtttatatgggtatagtcataatctttgtgaagttgtttaggtacaagccagaaaagaagtataaatgggagccactcagggatgaccttgagtttggaaactctgcataccctatggtcttggtgcaaattccaatgtacaatgagaaagaggtgtatcaattgtcaattggagctgcatgtgggctatcatggccatctgatagggttattattcaagttcttgatgattccactgacccaatcattaagaatatggtggaggtggaatg

SEQ ID NO: 18045 - DNA, 349 bp, Glycine max
  Clone ID: LIB3106-098-Q1-K1-E11
ccaactttcagcaacagaaccttaggattttgtttgataccgtcaataataaggttggcatagcccgtgaggtttgtaactagctggttggctacatttttatttatttatttattaatatgtaccagtggctttcttgattagctaactaggtttggatctttcgttgggttcaaaaacgtgatggtgtgggtgtgtggccacggtgaataagcttgccttgtgtgcctttggaagatatgcaatgtgaaataggacctagctagtactattttatcttagatcgatcgttgtcgatcattgtaatgatgtttgattaaattaataatgtaagatcaattaagtagca

SEQ ID NO: 18046 - DNA, 460 bp, Glycine max
  Clone ID: LIB3106-098-Q1-K1-E12
caaggcagaaagcaagctcatcctagagttttaaaaatggcagcagcctcctccatggctctggcttccccatccttggctggcaaggccgtgaagctgggcccatcagcccccgaagtcgggagggtcagcatgaggaagaccgtcaccaagcaggcctcctccggaagcccatggtacggcccagaccgcgtcaagtacttgggcccattctctggcgagcccccgtcctacctcactggcgagttcccaggtgactacggctgggacactgctgggctttcggccgacccagaaaccttcgccagaaaccgtgagctcgaagtgatccactccaggtgggccatgctcggggccttgggctgcgtcttccccgaactattgtcccgcaacggggtcaagtttggagaagctgtgtggttcaaggccgggtcccagatcttcagcgagggtgggctgg

SEQ ID NO: 18047 - DNA, 331 bp, Glycine max
  Clone ID: LIB3106-098-Q1-K1-C8
cccacgcgtccgcccacgcgtccgcccacgcgtccgcccacgcgtccgcaaagacatggtagaggttcttctacgagcatgacctccttcacctcactcttcttatctgagacaatgcaggacagtgtcaggaaggacattggtgaagtgctcgttggaagtcccaagtaaggttctgacaaagcatgtcttatctgggcttgctgcttccttgatatttatttctccagcaaatcagactattgcagcagatctatctcgtgcaccaaataatatatgccaacttgccagtgccagtgagaacgcagttacttcaccatttgagaatgaa

SEQ ID NO: 18048 - DNA, 313 bp, Glycine max
  unsure at all n locations
  Clone ID: LIB3106-098-Q1-K1-E2
ggtagaacccttccacggtggtgactgcgcgatgggtgcctacaagtatgtttcagaggtatggcgcaagaagcagtctgatgtcatgcgcttcttgcagcgggtgaggtgctgggagtataggcagcaaccttccattgttcgcttgacaaggtcgacccgccctgacaaggctcgtcgcttgggcttcaaggctaagcanggctatgtgatataccgtgttcgtgttaggaggggtggccgaaagaggccagttcccaaaggtattgtttatgggaagcccacaaaccagggtgttacccaactgaaattt

SEQ ID NO: 18049 - DNA, 438 bp, Glycine max
  Clone ID: LIB3106-098-Q1-K1-E3
gattatcacacctcgtgaacacaggttgcatttgctgcggaggatcgatctcgccaatggatttcaacaaggagcaaaagaaaaccatagaccaatccatcttattatgctgcaagttctttgtctccgaatcacgcaacaacgccaccctcaatgcaatagaacgagttgcaaggtcaaacccggaaactgtgattgtgaacatgtttcatgatcgaagttataacagggcaaggtacgaccttgtgtcatatgttttgcacgactgcacaggaaatcccatatacagccccttgcaccaaactgtcatagccatggctgaggctacattcaatgccatcaacctcgaaattttttcccccaaaatttgggaaaaaaaccggggtttggcccctttcaaaacccccccttttttcggggccctttttttgggggggg

SEQ ID NO: 18050 - DNA, 385 bp, Glycine max
  Clone ID: LIB3106-098-Q1-K1-E4
cccacgcgtccgcccacgcgtccgcccacgcgtccgtccatatggaggtttaatcttgagcaggccaaccattagcaggagattcatgcctgagaaagggtctgctgagtatgctgctttggctaagaaccctgagaaggagtttttgaaaactattactggcaagaaggagaccctcattgaccttacaattatagaaatcctgtcaaggcacgcatctgatgagttctaccttggggagagagatggtggtgacttctggacttctgatgctggtccactagaggccttcaagaggtttggaaagaagcttcaagagattgaacataagcttatacagaagaacaaggaattttgggaaaagggaacccggggtttttttggg

SEQ ID NO: 18051 - DNA, 344 bp, Glycine max
  Clone ID: LIB3106-098-Q1-K1-B2
cccacgcgtccggatcgagataactagaaacagtgtgatgaaaatgaaggtccttgtttggttcgttgctacaattttgggagcatggcaatgccatgcgtacgatatgttccctctccgaatgaacactggctatggtgcccgtcctccggaggtgaaatgcgcaagttggaggcttgctgtggaagcacacaacatctttggctttgaaaccattcttgaagagtgcgttgaaccaccaaaggattccatccatggcgaacattttggatcagactccaaaccagttaaccaacaagcttacttttatgccagagacctcgaaatccatcccaaggacacat

SEQ ID NO: 18052 - DNA, 340 bp, Glycine max
  Clone ID: LIB3106-098-Q1-K1-B3
cccacgcgtccgaaaccacattgtttgcaaggcagcacagaagcaggttactgtccaagagggtgaggacactactactggccttggctctcgcaggttggccctcactgtgctcattggtgctgctgctgttggctctaaggtggcacctgctgatgcagcctatggagaagctgccaatgtgtttggaaaaccaaagacaaacacagacttcctttcatacaatgggaatggattcaaactctcaattccctcaaagtggaacccaagcaaagaggttgagtacccaggtcaggttcttagatatgaggacaattttgattcaaccagcaatgttgct

SEQ ID NO: 18053 - DNA, 415 bp, Glycine max
  unsure at all n locations
  Clone ID: LIB3106-098-Q1-K1-B4
agatttttgacttatttgatctcaagcgcaatggggtcattgagttcggggaatttgttggatcattgggtgtttttcacgcaaatgcagctttagaagacaagattacttttgcttttaggttgtatgatctgaggcagacagggtttattgaacgagaggagttgaaggagatggtattggcacttttgcatgaatcagatcttgagctttcggatgatatgattgaaaccattgtggataagacttttagtgatgctgatataaacggtgatggaaggatcgatcaagatgagtggaaagaatttgtgtccaagcatccatccttgataaagaatatgacacttnncatttttaaaattttttttggggaaaaaagggggggaattttaaattttttaaacccccctttttt

SEQ ID NO: 18054 - DNA, 334 bp, Glycine max
  Clone ID: LIB3106-098-Q1-K1-B5
cttctcagctgaatgatggcaacagaatactattatctcttgtttcttctttggttcctctctagcttaaccttgttattggacaaccacgttgtgtttctacgcgtgaaaatactactcctattgggtgacattcactcctttgcctacagcacaaatgcttgggcttttcattcctagttggtaccatatgatacaaaaggttgataatctattttacttttttggtacattctgttgcttagtttgtatttcgggttgaatgccatccataccaattgtaagaaaaaataatagtgtgtaaatgacaaaactttctttcaatatgagagag

SEQ ID NO: 18055 - DNA, 322 bp, Glycine max
  Clone ID: LIB3106-098-Q1-K1-B6
gggagacatgactttgacaaccgcgttttcttgttcgctcgccgctgcttctctctccaccgccgccagtttccgccggagtaaatgcaccaccagcaagatttttcattcctcttccacgtgcatgccctctttcttgcatgatcatcactaccactctttcttattgcgagttgccaatgatgctgatagaagtgaagtgtcatctgatactgcaatcaagacatcgtattcagaagccgataagatggttgatggtatggactttggtgagctttgcaatgagtttgagtgcatcagcagtcccttggtagaatccact

SEQ ID NO: 18056 - DNA, 335 bp, Glycine max
  unsure at all n locations
  Clone ID: LIB3106-098-Q1-K1-B7
caaaaaatgaagagcactaccttgttcgctctctttctactttgtgccctcacttcatcgtacctaccttcagccaccgctgatgtggtgctggacatggatggtaatcctcttggaaacggttggcaaaatgaatatttcatgttgccagttacaagaggaagcggtggtggaatagcactagctgcaactggaaatgaaagatgccctgtaactgtcgtgcaatctcacattgagcgcgataaggngtatgcggcaacttttagagctccattccacctcccttttatcgcagaaggccttcctttgacgatttcattcgataactttgaagt

SEQ ID NO: 18057 - DNA, 354 bp, Glycine max
  unsure at all n locations
  Clone ID: LIB3106-098-Q1-K1-B8
gggacacattctagtgactaatactttggaggggcatttccatccagttctacatcaagtgaatcgctggatgttgtgattgatgaagctgctccatcctcgccttcaggaagtggaaattgttcaggattggttcccaatgaatttgagcttgaatatcctgaagacacaggaatgaaagattcaaaggcttgtttggatcaacaggatccgttgtgtcatttatcctgtaaagcagatggcttgactgaagaatcctccctcgtgtcaccctcaggaagcgaagacagaatcctgcacaatgagccacatagagatttacctgcaacagatcttangcgtggttttttcccg

SEQ ID NO: 18058 - DNA, 448 bp, Glycine max
  Clone ID: LIB3106-098-Q1-K1-B9
agcttatattgtgaactatatgtcaagaaatggtgctctcaggcagcagctttacaaggagattgaggttgctagcgttgattcctttcaaggaagggagaaagactacatcattctgtcttgtgttagaagtaatgaacatcagggcattggatttctgaatgatcctaggaggctcaatgttgctttgacacgagcaagatatggcattgttattttgggaaaccctaaagttttgagcaaacagcctctatggaatagtttattgactcactacaaggaacatgagtgcttagttgaagggcctttaaataacttgaagcaaagtatggttcagttccagaaacccaagaagatttacaatgaacgaaggcttttttatgggggtggacctggaattgcggctaatgataattttggtagtgttggatctggaagctgcacaagt

SEQ ID NO: 18059 - DNA, 370 bp, Glycine max
  Clone ID: LIB3106-098-Q1-K1-C1
ggcaaacaatgtacaactctagacttctgatttcccacatcacacctatcagcgagacgaggcttcctgttcctgaaattcgagggtttaaagaaaagttgcactgtttccagattattactagtcaatttaatcatatatctttagctttatttctgtgggcaacggtcatgttgtcatttgtcggcttctcataatcaatggatactaatgctctggtggagagaaagtgagcgaagaaaaaaaaaatagaaggaaataaatatttgaaattttgtggttgaaagttaacctttcttttctcacttttttttctaatcaaacaaaagaaaatattgtcatccatatttttttttcccccccttttttt

SEQ ID NO: 18060 - DNA, 356 bp, Glycine max
  Clone ID: LIB3106-098-Q1-K1-C10
tcgacagtatctatctaaataaaggtgcgatggctctatgggcatcattataaatgcaaaaaaaaagaaaaaaaaaaaaaaaaaaaaagggaaaaaaaaaaaaaaaaaaaaaaaaaaaaaaaaaaaaaaaaaaaaaaaaaaaaaaaaaataaaaaaaaaaaaaaaataaaaaaaaaaaaaaaaaaaaaaagggggggcccttttaaagaatcaaattttaattaccggtgtttggaaattaataatttttttttaagggacccaaaatcaaattaattgggagtgtttttaaaaagtcttaattggaaaaaacttggggttaccaaattttatggttttgaaaaaaatcccctttt

SEQ ID NO: 18061 - DNA, 447 bp, Glycine max
  Clone ID: LIB3106-098-Q1-K1-C12
tggcacttccccttcttcgaatccccgggattccacttgccaagcaacaccaatcattcccttgcaatacccgccgcaaagccacgacggcgcaggcggagctcgagacagcggtggcgcggacgggcggaaccggttaccagtctccgtccgtcgatgttcccacgcataaggtcatagtccacgacagacaacgaggaatcgttcacgaattcgtcgtgcctgaggaccagtatatattacatactgctgaggcccagaatattacccttccattcgcctgcaggcatggttgttgtactagctgtgctgtacgtataaagaatggaaagattaggcaaccagaggcactagggatatcggccgaattgagagacaagggttatgcacttctttgtgtggggcttccaacctctgatgttgaagtggaaactcaagatgaagatg

SEQ ID NO: 18062 - DNA, 302 bp, Glycine max
  Clone ID: LIB3106-098-Q1-K1-C2
aaaaaaaaaagaacaaaaaaaaaaaaacaaaaaaaaaaaaaaaaaaaaagacaaacagatgggaatgtgtaggctctcaaatgggggcggccagcgtactaggtcttagctcgtgtaaactttaatctaattacaagtcagtggtttacaatgtaccacctggaaaaacgcatggccttgtaaaatcactcgtattgcgaaatatacgcctttccccagctggcgtgtttgggaaaatggccgaatagagcaccgttccaaactgtttagaattctcaagggtgaatgggacacgatctgta

SEQ ID NO: 18063 - DNA, 367 bp, Glycine max
  Clone ID: LIB3106-098-Q1-K1-C3
catcatcaaagtttcttcctttctctgctctttgccttctctgacacatttggtgccttggagagcgtgttttggcaggaaggtggtatggcgaaggacgttgaggttgctgagcggtagctccttctctgggaaggactaccaggacccgtgcaccagcaccactcattgatgctgaggagctcacaaagtggtccttttacagggctctcattgctgaattcattgccactttgctcttcctctacattactgtgctcacagtcatagggtacaagcaccagactgacctcaaggaaaatggtgaaatctgtggtggggttggcattcttggcattgcatgggccctttgggggggggggtgggg

SEQ ID NO: 18064 - DNA, 393 bp, Glycine max
  unsure at all n locations
  Clone ID: LIB3106-098-Q1-K1-C4
gctctatccggaaccatggtgagcacctccttcatgaggaagcaacctatgacgaccaagagcctaaagacattccccaacgctctttttggtctgaaaggtggacgaggtggtcgtgtaacttgcatggcctcgtacaaggtgaagctcataaccccagaaggagaagtggagtttgaatgcccagatgatgttttcattgttgacaaggctgangaagaaggcattgaacttccctactcgtgcagggctggttcttgcgtttcatgtgttgggaaaattgtgaaaggtgacgtggaccagtcagatggtagcttccttgatgatgaacaaatagaaagtggatgggttcctttttttaaaaacccccttttgggttgggttttttggggc

SEQ ID NO: 18065 - DNA, 353 bp, Glycine max
  Clone ID: LIB3106-098-Q1-K1-C5
cccacgcgtccgcataattgaagtttttcttttgtgtgtgtggatttgtttggcaaatggtacaaaagttgaatgtttcagctcatgaggtgcgagttttttgttgggttttggcaagattttaaattgcattcgccgctgcgacagcatcaccatccttgctgttgtggaaaattgtggagaaatatgattgatgcagtcgcaagtgatgcagttgcagtgacatcaaaaactttgtcgctgtggtaacggccacaattgcagttacaaagcagttgtgctggcatcatcaattgcagtgactacaaaacattgatgctggttatcggccacaatttcagtttggggttggg

SEQ ID NO: 18066 - DNA, 351 bp, Glycine max
  Clone ID: LIB3106-098-Q1-K1-C6
gaggtctttaagatgaaaacaaaaaatgcaaatgtaggttcctttttttgaacacaaaagatttttacttccattttttgagtgaaagaataaaaaaatgatatgattcaacctcaaactcatttgaatgtagctgataatagcggagcacgcgaactgatgtgtattcgaatcctaggagctagtaatcgacgatatgcttatattggtgacattgttgttgctgtaatcaaacaagcagtaccaaatacgaacttagaaagatcagaagtgatcagagctgtaattgtacgtacttgtaaagaactcaaacgtagcaacggtataataattcagtatgaatgataaaaa

SEQ ID NO: 18067 - DNA, 429 bp, Glycine max
  Clone ID: LIB3106-098-Q1-K1-B12
tgattttgttgggttcatattctttgacttcaattccctcatctcctatatctctccgcccccagtcctctgttgcccatggaagaatggtgcagtgttcgcgcagatgcgagcttttcgatctgcatcaggaactgatcccttatgacgtggcatggtcttggcaaaaagacatcgtcagggaaaagaaatcacagattgagaacgaaggagattgcagcgacacacttattattctgcaacacccttctgtttacacattgggtaccgctagtacacaccacaacctcaactttgacatcgaaaatccaccctttcctatttatcgcactgaacgcggcggagaagttacgttccacggccctggccagctaattatgtaccctattatcaacctccgaagacacaagatggatcttcattggtacc

SEQ ID NO: 18068 - DNA, 438 bp, Glycine max
  Clone ID: LIB3106-098-Q1-K1-C7
cccacgcgtccgctctactgtgtcttcctcttccattttcattctctctgattgttgttctgagattattaggttactttgtctttacttagaaatcaaaggcagaacttcgctgggagagcaatggtgacagcaaaagtgattcaaatccatggaaataaatggcagttgctggtgtgcataatgtgactgtgctcgaatctactttcctaagggaatcccattcccagccatctgggaggcaaggagatggagggaggggaggcacccggtcaccttcggtcttgcaaatgtggcgagagattgaagatgagcaggtagtcagacaagttcaagggaagactccccccgggggggtggggaaaagggggggttttaaccccaaaaaaaagggggggaaaagtttttggggaaaattttgggggggggggttttttt

SEQ ID NO: 18069 - DNA, 404 bp, Glycine max
  Clone ID: LIB3106-097-Q1-K1-H7
gcggccactcgtgcggtcacaagtcacaactcgcaaaccactatgcctaagcagatccacgagattaaggattttcttctgacggcgcggaggaaggatgcgacgtcggtgaaaatcatgaggagcagggatgtcgttaagtttaaggttcgatgctccaagtacttgtacacgcttcgtgtctttgaccctgagaaagccgataagttgaagcaatctcttgctcccggtttgagcgttcaagacctgtagagctgttgagcgtggcagcatgcgtttgtttctcttcttgttacctgatgctctagattttgtggcttggatttatatgttggtgatttttacgaggacatttctggtttaaattggtacgaaatgtgaaagtttgatactgagcacacttg

SEQ ID NO: 18070 - DNA, 396 bp, Glycine max
  Clone ID: LIB3106-097-Q1-K1-H8
cccacgcgtccgggaaaactttggacaaaaaatggagtgctacacaaggccaaacaggagtgacatccacctctcagcagaggaagaagccaccatagaggcaaagaccagagagtactttgatggggtcgcaccacaacgccacacaaagcctcaacgaagtgactattcagctcaatatgtcgatgctttctccaatgcccatcactcttctttaactataccagaattaacacaattccaactcctccagaacgatccccaagagaagaaattggtgtacaatggaagtcaagtaccggaagaacttgtggaaacagagtattaccaagatctcaacagcgtggacaaacaccaccatacgactggaacaggatttatcaaagtagagaaaaa

SEQ ID NO: 18071 - DNA, 426 bp, Glycine max
  Clone ID: LIB3106-097-Q1-K1-H9
cggacgcgtgggcggacgcgtgggttgggattggattcaaaatctgtttcagacagattcagttctgatcataaacagatagatatgatgtttggatttcttaatctgtctctctataattttttacagaatgataaaacagaagcatgcatagcttttgacaaggctaagagtactgctagttttggaggtttagaacaatgtatgaagacatatgtgatgtttctggcttatgatgcgtggagcttgaaggaggatggttctgatggtgccatcaagaggattttggagttgtatgcagatggttcctctcaggcattgctagtccccaaggtgttgaccagaaaatttgttgacaacatcaagaagccaagagtacagcatcttattggtaacatattaagtccagtttcatttgactgttct

SEQ ID NO: 18072 - DNA, 258 bp, Glycine max
  Clone ID: LIB3106-098-Q1-K1-A1
ccttatgctatgttcttcatcaaattaacaaagatataatatagctttaatttattatgtccatatcatataattttcttggtcctttctatgtcttaattaaccaaaaaatgtatgtccattttggtcttagtaatactttgttgtattgaagatgccttttggagatagtgtgtgtgtgggctcctctgcatcataccactccttattatggcattgttggcttttaaatgaagtgtgtctaatactgttgctgtc

SEQ ID NO: 18073 - DNA, 392 bp, Glycine max
  Clone ID: LIB3106-098-Q1-K1-A10
gttgtgagccagcttatcggactcccaagtgtgttaaaaagtgtgtaagtggaaaccaagtttggaagaagtcaaagcactatagggttagtgcatacagagtcaactctgatccccatgatatcatggcggaagtttacaagaatgggccagttgaagttgcatttaccggttatgaagattttgcttactacaaatcaagagtttacaaacacatcactggttatgaactaagtggtcatgccgtaaagctaattgggtggggaacaactgatgatggggaggactattggcttctcgcaaatcaatggaacagagaatggggagatgatggttacttcaagatccgaagagggacaaacgaatgtgggattgaagaggatgtaacagct

SEQ ID NO: 18074 - DNA, 445 bp, Glycine max
  Clone ID: LIB3106-098-Q1-K1-A11
cattcccatttttcacaccaccaacacaagatgtttctccacattgtgttcctccttttcctgctctcatccacttcccatgccactgtccaagacttctgtgtggcagacctcaaaggtgcagacacccctgcaggctacccctgcaagccacctgctaatgtcacttcagatgactttgtgtacactggcttagctgaagctgcaaatgtcacaaacataatcaatgctgctgtgaccccagcttttgttgctcaattcccaggtctcaatggccttgaactatctgcagcaagggtggaccttggtcctagtggtgttatcccactccacactcatcccggtgccaatgaactactcattgtgcttcaaggtcacattcttgctggattcatatcttcaggtaacatagtttatcagaaggtgctgaaaaagggagagctca

SEQ ID NO: 18075 - DNA, 449 bp, Glycine max
  unsure at all n locations
  Clone ID: LIB3106-098-Q1-K1-A12
tcgcccacgcgtccgtggagcataatgtttggttggactggggtgttacaactcaccaaagttggcagcaacggcgtgcccacctcgggatctctcggtcgtgccctttacgctgccccaatccagatttgggacagcgaaaccggcaaggtagccagctgggctacatcctttaaattcaacattttcgcacccaacaaatcaaactcagctgacgggcttgccttcttcttggcacccgtcgggtctcagccccaatccgacgatggatttcttggtcttttcaacagtcccttaaaggacaagtctctccaaaccgtggcgattgagttcgatactttctcgaacaaaaaatgggatcctgcaaaccgacacatcggcattgacgtgaactcgatcaagtccgtcaaaacggcatcgtggnggttgttcaatggacaagtggcgga

SEQ ID NO: 18076 - DNA, 345 bp, Glycine max
  Clone ID: LIB3106-098-Q1-K1-A2
ctccattggtgttgtcaaatagtgacaacatggagattcagaaaatgaataatggtcacagtgttgttactgctactgttactgctactgctactcctactcctactactactttcgttgctgctgctactgctattactactactccttcttcattgagttctttatcttcttctaggtggccaaagacagaagttcatgctttgataagactgaggacaagtcttgaaaccaagtaccaagaaaatggaccaaaggctccattgtgggaggatatatcagcaggaatgctgaggctcgggtacaacaggagtgccaagagatgcaaagagaaatgggagaaca

SEQ ID NO: 18077 - DNA, 306 bp, Glycine max
  Clone ID: LIB3106-098-Q1-K1-A3
cccacgcgtccgaaaaaaaaaaaaaaaaaaaaaaaaaaaaaaaaaaaaaaaaaagggccgggccttttaaaaatccccatctgtgaggggcgggccttccaaattctacctttttttttggggcccccaaaattaaattacctgccccgggttttacaactaactttctttggaaaacccttgggttaccccactttaagggctttccttccaaaccccttttcccaaggttgcaaaacatcaaaaagcccctccccgttggcctttaccaaaagggccccccctaaattggcatttgaaaccccc

SEQ ID NO: 18078 - DNA, 443 bp, Glycine max
  Clone ID: LIB3106-098-Q1-K1-A4
aagaaatggctcttgttctcaacgtctcattgtgttccatttctaaaccccatctttctgtctcaacctccaatcccaacagagcttcttcaactcttcctcttcctattctgggacttaaaacaaagcaaagtctccaaccatctcagaaactcacattttcattgggtgaatcagtggctggtgccaccctcgttgctctcctctctgcttctttcatctttgttgatcccgcacttgcattcaagggtggagggccatacgggcaggaagtgacaaggggacaagatctcactgggaaggactttagtggcaagactctgatcaaacaagacttcaaaacgtccattacccttttggggaagggaacaccccaaagagggggcccccccaaaaaatttttttttttttaaaaaaaaaaggggggtgttttgggccccccc

SEQ ID NO: 18079 - DNA, 212 bp, Glycine max
  Clone ID: LIB3106-098-Q1-K1-A5
cccacgcgttcgacgaaaccctaggttttagtgagtggcgaaaatggcggtgattttttgaagtgcaataccaggagggggagcaccagcagcaatcgagcaagtgcagtgcttcgggcggaagaagacggcggtggcagtgacctactgcaagcgcggccgatgcctcattaagatcaacggctgcccgatcgagctggtggagccggaga

SEQ ID NO: 18080 - DNA, 217 bp, Glycine max
  unsure at all n locations
  Clone ID: LIB3106-098-Q1-K1-A6
atcgggttacctnctccaattctcaccgaaatccgtcgtcaaagttggtttccggcagagatcatatatctcctagggtttgcagctgaatcgagcatactccttcaatctccaattccacaatacaaaccctagaaaatctttcaagatgaatccaaaatcgctccaaatcctggtgcagtaaccggacctcggaatttcccttaaacccacaacc

SEQ ID NO: 18081 - DNA, 288 bp, Glycine max
  unsure at all n locations
  Clone ID: LIB3106-098-Q1-K1-A7
ggaagtcacactttcagcctgcaagtccgttagctcgccttctgttcccgtcgcangtttgtttgcggngaatggaggagttaagagctcgcaatgcagtttcttagcgggagcgagcaaagtgaggtttcctaggcaagtaggtcaagttagccaccttcgcaaacagcgccaaacgcgtcactgcggtgctctccacgcgacttgcagcggtgacaagatcctgatcgcgaacagaggcgagattgccgtccgcgttattcgaaccgctcatgaattggggattcc

SEQ ID NO: 18082 - DNA, 139 bp, Glycine max
  Clone ID: LIB3106-098-Q1-K1-A8
gtactttccaaacttaaaaatgttaaacgcctgtattaatccaacaaaaaatgggcctttgaaactaaagaaaaacaaactaagattggcccaaactgaagaaatacaaaaaaatggcttgagatcaagcctaaccacg

SEQ ID NO: 18083 - DNA, 386 bp, Glycine max
  unsure at all n locations
  Clone ID: LIB3106-098-Q1-K1-A9
gataactagaaacagtgtgatgaaaatgaaggtccttgttttcttcgttgctacaattttggtagcatggcaatgccatgcgtacgatatgttccctctccgaatgaacactggctatggtgcccgtactccggaggtgaaatgcgcaagttggaggcttgctgtggaagcacacaacatctttggctttgagaccattcctgaagagtgcgttgaagcaacaaaggaatacatccatggcgaacaatatagatcagactccaaaacagttaaccaacaagcttacttttatgccagagacctcgaagtccatcccaaggacacatttgtgttcagtatagatggcaccgtactctctaatattccatactacanaaaacatggat

SEQ ID NO: 18084 - DNA, 427 bp, Glycine max
  Clone ID: LIB3106-097-Q1-K1-H6
tcccacgcgttcggaagaaggaaaccccatcccaataatcatactcgtacttgggatgatattggatcatctcaacctcaattttctacaatattaaataaacaatcaccttcatttcttttttctcctcttcatttatgatctcatccccatggatccctttgatttaatacgcgaagggttcggttgaggctgactggacatgcgctgttactacttttaaagtctgctcatgctgtagttatttcgtccatattttacttaataatgaacttatccaagaaaggacccctaagggatgcaaagctattaagcccaaacaaggcaacaactctgaatccaaatgctgcagagtttgctccttttgacctcaaatcatcggcattatctggaactaccagcttcgtagatgcaacaacaaaacttt

SEQ ID NO: 18085 - DNA, 338 bp, Glycine max
  Clone ID: LIB3106-098-Q1-K1-B1
gatcgagataactagaaacagggtgatgaaaatgaacgtccttgctatcttcgttgctgcgattttggtagcatggcaatggcatgcgtacgatatgttccctctacgaatgaacactggctatggtgcccgtactccggaggtgaaatgcgcaagttggaagcttgctgtggaagcacacaacatgctttggctttgagaccattcctgaagagtgcgttgaagcaacagaagaatacattcatggcgaacaatatagatcagactccagaacagttaaccaacaagcttactcttatgccagagacctcgaagtccataccaaggacacatttgag

SEQ ID NO: 18086 - DNA, 393 bp, Glycine max
  Clone ID: LIB3106-098-Q1-K1-B10
tcgccacgcgttcgtccacgcgttcgtccacgcgttcgttttttttttttttttacattgcaaccaaggaatgtatatataataaaaagaacaaaatcgcccataacgtacatatacaccagatacaaatttttcaagacgtatgatattgcaaatgacttaaacttctacacaagaacgaacaaaatgctataatgaattcccacactgtcacacagttcaaagttattgcataccaataatttcaagaacccttattaacttacactttcaaagggattggcacaacaatattatatgctaataaatataataatcttaagatgatgaagcaggtttggaagatgggttgaaaggaaccttgctaacgcatgtaaggatgtcatggggccc

SEQ ID NO: 18087 - DNA, 342 bp, Glycine max
  Clone ID: LIB3106-098-Q1-K1-B11
ggaatacaggatctgactccagaattcaactctaattaaagcattgatttcccctcactaagatggctcaggctttgttgaagctcattctggagttgggtatctttgccattgaagaggtcaaatttaagtcacagtcaccatcagcattttattgtcattttttttgcttgatgcaaaggacaagacataactagctaatagtgaagtttcagtctaattttttagacggcctttaactaatttaaccgttcaaaagtgatgaagttgaaacccgtgggcaaattatggcaatgaaatacttgtcggcgcaatatgctgaaactcagctaggtttgatga

SEQ ID NO: 18088 - DNA, 343 bp, Glycine max
  Clone ID: LIB3106-097-Q1-K1-G11
tcgcaacaactacatataagcatacccaacatagaaaaagaaaaaaagattgggtgtggcatagctagctggctgaatctatctgctcctgttgccgctagtggtcatgatcgttgtacgattcactttcaggaacagaaaagcccttgtcgctagccatcgtcgcttttattgattgaaaaaagaataccacatatatttatttttgccactagcttcttacttcacgacccttctttttcttcctgtattacccctattccgcttcgtattcatctgagcaaaacttttctgctgctccttctctctgagctttcccgcacgtgcctacagctgcaacaat

SEQ ID NO: 18089 - DNA, 295 bp, Glycine max
  Clone ID: LIB3106-097-Q1-K1-G12
aaagtttgcacctcggatggttagtgcttctgccttcaccatagatgaaaagcgtttgactatcatccacgtgggaaagggcaggatctatgagggagtttccgtacatgcacttgatctgctcaatatacatcgtgcattaatttatgctggagatgcatccatcatggacggtgaccgcttcaatgctgggtgttggcaacaaaaacctgtgtataaagccctggtgaaaggaaaaactctctcgcgcgacaacattgcttatacatcatttgtgggatttgcctacagggcc

SEQ ID NO: 18090 - DNA, 307 bp, Glycine max
  Clone ID: LIB3106-097-Q1-K1-G2
aaaaaaactaaaaaacaaaagaaaaaaaaataaaagtacaagaaaaaaaaaaaaaaaaaagggatggcaacactggctaaggagagcatactatctagctccatctaccgacgaacactgggctctcctgccctctcgttcccctgttttctgcccccgtcttgcgacgtccttccttcccgctcgccgtctttatcttccactccctgcccgctgggtgcccatggtgggtcttgggaattccttggtggtccccaatttttttccctttcggaatttcctcttcttgtcccttgcttttatccct

SEQ ID NO: 18091 - DNA, 448 bp, Glycine max
  Clone ID: LIB3106-097-Q1-K1-G3
cccacgcgtccgcccacgcgtccgcccacgcgtccgctctcgcgccagtcaaaaaccctctcagagaaagcacacaacaaagatgaccgacgaagacaaacccaaagccttctccggcggccatcacaaccaccctccgccgcagccacaacccttccccgccgcccagtatggcaccttccaaggcgtcgccaactaccctccgccgcagccgcaccccgccatcggcttccctcacccggttccgccgtccggcgccgtcgactcctccgcccctactccgccctactacccgggctaccaagccgttcccggttatgcagttgctgaaggaagacctgtaagagaacgccgtcttggttgctgtggccttggatgcggctggtgtctgtttatattaggcttctttcttgctggcattccgtggtatgttggggcaataattatg

SEQ ID NO: 18092 - DNA, 427 bp, Glycine max
  unsure at all n locations
  Clone ID: LIB3106-097-Q1-K1-G4
gggaagaagcagtaagcactgagcttgaagtaatagatggacagcagtcgcaatttcttgcttagttctcatgtggcgccatccccacccgtcaaagtcaaagcacaggaaattcgggtatgcaccaaccgcacctgccgcagacagggctcatttcaaaccctagaaactctatctggcctcgctcctccaaacgtcgccgtgaagtcctgcgggtgcttggggcggtgcggtggcggtcccaatctggtggtcctgcctgatggcctcatcgttggccattgcgggacggctgctcgggcggcggaggtcatagcgactctgtttgccggagctggaggccatgacccaaagactcgtttagatgcgcttgctttgaggaagagagcggagattgagtttgcaagcgaaacttcactgangctga

SEQ ID NO: 18093 - DNA, 197 bp, Glycine max
  Clone ID: LIB3106-097-Q1-K1-G5
acgcgcacgcgtacgcgggcgacaaggctggcgctcacagtatatatcgtgccaacgtctgcggcaggacacctccgcggctggcgacgtgacagcctctcacctcgtacgatggatgacgtcccaaagacgactacgagcagagccacatctgcttcggcggacaagatcgaacgttgcaagggctcgtccagtac

SEQ ID NO: 18094 - DNA, 386 bp, Glycine max
  Clone ID: LIB3106-097-Q1-K1-G6
agaaagagaagcattagcaaaagcaagaagaactagtctaagcagaaatggcctcttcagtgatggcatctgtggccctcaaacctgcccctttcactgttgagaagtcctcagttagaggccttccctccctctcaaggaactcctcttcattcagagttgtggccagtggtggcaagaagatcaagactgacaagccttatggaattaatggtggcatggctttgaaggaaggagttgatgcatctggcaggaaaggaaagggaaagggcgtttaccagtttgtagaccaataccgtgctaatgtcgatggttacagtcctatctacgacaccaaggacttggtctcaacccgtgatgtctacgctggcggtacgactggcttg

SEQ ID NO: 18095 - DNA, 455 bp, Glycine max
  Clone ID: LIB3106-097-Q1-K1-G7
gttcgggacgcgtacgcgtacgcgcacgcgtacggatccttgaaagcattggttgcagccctaatctaatacgatctcatagtaggcacacaacatagatgaccgacgaagacaaatccgatagccttctacggcggacatcacaaccaccctgcgtcgtagccacaacccttacccgccgcccaagatggcgccttccaaggcgtcggcaactacccttcgtcgcagtcgcaccccgtcatcggctatcctcacacggttccgacggccggagccgtcgactcctccgcccctactccgacctactacccgggctaccaagccgttcccggttatgcagttgctgaaggaagacctgttagagaacgccgacttggttgctgtggccttggatgcggctggtgtctgcttatattaggctaccatcttgctggcattccgtggtatgttggggc

SEQ ID NO: 18096 - DNA, 429 bp, Glycine max
  Clone ID: LIB3106-097-Q1-K1-G9
agagtacaaccttttcaactccgaaggcgagccacgatgtcaggaagaggaaagggaggcaagggtttgggaaagggaggagcgaagaggcaccgtatggttctgagggacaacatccaggggatcaccaagcctgcgattcggcgcttggcgaggcgtggcggcgtcaagcgtatcatcggtctcatctacgaagagacacgtggcgttctcaagatcttcctcgaaaacgtcattcgcgacgctgttacttacaccgagcacgctcgccgcataaccgtcactgccatggacgttgtttatgccctcaaaagacagggcaggaccctttacggtttcggtggttagttaggacattatggtaggctcttactcttattagtatcgaatcatatgttgctagatggatcttcacattgtaatggctgg

SEQ ID NO: 18097 - DNA, 454 bp, Glycine max
  unsure at all n locations
  Clone ID: LIB3106-097-Q1-K1-H1
gcggcatcagcaatggctgcccctggaatggactcgagaattcttggatgtggtttggcttctggaactgctgctccatctgatgtgcataatcttggtaggatgggaaatcaaattcaaggcagtgctcttcaggctccttttgtcgatcccatgtatcttcagtacctgaggacgtctgagtttgctgcagcacaacttgctgctctcaatgacccctctgtggacaggaactacttgggcaattcatacatgaatttgcttgagctccagaaagcttatcttgggtctgtcctctcacctcagaaatcccaatacaatgtaccgccgggtggtaaatcaggcagcttcactcctcatggttattatggaaatcctgcatatggtgctgggttgtcttacccaggaagtcctatggcaaactctgttgtgtccacttctncagttggatctg

SEQ ID NO: 18098 - DNA, 422 bp, Glycine max
  Clone ID: LIB3106-097-Q1-K1-H10
attacgcgtgcgaggacccgtagcgccacgcgcgctctttgtgtttggggatgctgttggggataatgggaacaacaactttttggcaactacagctcgagcagatgctcctccttatggcattgatttcccaaccggaagacccactggccgcttctgtaatgggtacaacattcctgacttcatcagtcaatcacttggggccgaatccacattgccttatttagatcccgagctcgacggggaaagattgcttgttggtgccaactttgcttctgctggtattggaattctcaatgacactggaatccaatttgcaaacataatcagaatatatagactgttggagtactggcaagaataccagcagagggtgagtgctctgataggaccttaccatactgaacgcttaataaatggag

SEQ ID NO: 18099 - DNA, 404 bp, Glycine max
  Clone ID: LIB3106-097-Q1-K1-H11
cttttgagttgcattgttgcatcaccgcaagtccacaacatggctgccactgccgctgcaggcatagcttccttggtttcttcttctattaacagcgtcaaatgtcttcgttcctccaagaactgctccattatagacccccttataaccacagtgccctcaaaccgtggcatgtttgtgtcacacttggtggaacctttgtccattgggggtgccattaattcgcacaagttgtgggggcctagaatttctgctgctgttgcacaagaagaggctgttgttgtggctgatgatgaggtagatgatggtgctggcttacttgaagaagagaaagtggaggagaatgaaagagaagtagttgcagaacaagactctgattcctctgccaccaagctttattttgg

SEQ ID NO: 18100 - DNA, 422 bp, Glycine max
  unsure at all n locations
  Clone ID: LIB3106-097-Q1-K1-H12
cccacgcgtncgcaattccacaggtacatatgcaccacaccatggccacaaccaccatgttctcatcaccatcgggaattctctcctcagccgccacaaccaccaccccaaaaccatcctctgcagcaccacactccccatcatgcaagcatcctcttctactacccttcaaacagcccttaacaaccttaactgccgccgccgccatcgccactattttaacctccgctccaacaccctccttagcacaagagtccctctcatataaagtctactatggcaccgccgccagcgccgcgaactacggcgggtatggtggcaactccagcaagaaggactctgctgagtatgtctacgacgtgccttctggctggaaggaacggtaccaatggaacggacagtgagtttataacccaagaaag

SEQ ID NO: 18101 - DNA, 433 bp, Glycine max
  Clone ID: LIB3106-097-Q1-K1-H3
gaaagatgtcgaagcgtggtcgtggtggttcggcggggaacaagttccgcatgtcgctgggtcttccagtggcggcgacggtgaactgcgccgacaacacgggggcgaagaacctctacatcatttcggtgaaagggatcaaaggccggttgaaccgtcttccctcggcctgcgtctgcgacatggtgatggccaccgtgaagaagggaaaacccgatctgaggtagaaggtcttgccagctgtcatcgttcgccagcgcaagccatggcgccgaaaggactgcttctacatgtacttcgaagataatgctggtgttattgtcaatcccaagggagaaatgaaaggttctgctatcactggtcccattggaaaagagtgtgctgatttgtggcctaggattgcaagtgcagctaacgccatcgtttgagtgga

SEQ ID NO: 18102 - DNA, 417 bp, Glycine max
  Clone ID: LIB3106-097-Q1-K1-H4
caaaaatggcatcattcaccatgacagcttccatccttggcagcccagccgtcaccaaccggtcggcagtagcaacgcagaggagatcactcgtagtgaatgctgccaaagctgttgaagcagaaaaggtcagttatgacaatgacatggatggtagcaatggaaggaggaacttgatgttcgccgcggcggcggctgctgtttgctctgttgctgggatggcagtggcagatgagcctaaaccaggaaccccagaagccaagaaaaagtatgctccgatttgtgtcaccatgccaactgctaggatttgtcgcaattgagggactttggtttttattttacttctgatgattggaaatgtacaatggggttgttgtaatgctttgatgatttcacttgatcctcactgtacaagat

SEQ ID NO: 18103 - DNA, 440 bp, Glycine max
  Clone ID: LIB3106-097-Q1-K1-H5
gataatcatagctatggcaacggcgagtgcaagtcgtgcggcatcatttagaaacagcttcagtgtgagtaaaccctcggatcttgggttcttgagctctcgtctgaacggtctcagaatctgcttacccaaatcgccacccacacccatcactgcttctcccttccccacacccatacctatcgttgccaagagagtgtgtcccttcactggaaagaaatcaaacagggccaacatagtatcattttcaaaccacaagacagagaacctgcagctcgcgaaccttcagtactagagaatttggtgggaagcagggaagcgctacgtaaagcttcgtttgtcaactaaggcattgaagacgatggagaagaatggacttgatgcagttgcaaagaatgctggaactgatctcaggaagacatgagcctatctaataatta

SEQ ID NO: 18104 - DNA, 409 bp, Glycine max
  Clone ID: LIB3106-097-Q1-K1-G10
tttacagcgaaatggtatacaaagtcaacagatctaaatgaataaaaaatagtatttatggctacgcaaaccgttgaggataattctagatctggtccaagacgaactgttgtaggggatttattgaaaccattaaattcagaatatggtaaagtagctccggggtggggaactactcctttgatgggtgttgcaatggctctatttgcgatatttctatctattattaacagtaccctttttggagaatgttaataaattccaaaacccatttcgccgtccagtatcaaccaccatctttttgattggtactgtaattgccctttggttatgtattggagcaacattacctattgagaaatccctaactttaagtcttttttaaacttataaaattgattccattttg

SEQ ID NO: 18105 - DNA, 427 bp, Glycine max
  Clone ID: LIB3106-097-Q1-K1-E8
agattgttgaaaacggcatagtattgtatggcttgcttgggctaaaattagaaccctaagcccctcagcgagacagccgccgtcgccttcttcaataaccgtcgcaatcctctttcggcaaaaaaagaaaacccttcttctcactcatattcttacgcacacaaaacaagaaacacaacacagcaccaacctcggcagcacaacgtgctaacaattcaaagaaacaaaaacacagacacaaacaatggctggtcgattccgcgagctgatgaagaaatacggaaaagtcgcactcggggttcacttgagcgtcttcaccgtttccatcacgggtctatatgtcgccatcagaaacaacgtcgacgtggaagccatcctcgagaagctccacatgggcaccgtttccgaggaacaaaaccctaaccct

SEQ ID NO: 18106 - DNA, 305 bp, Glycine max
  Clone ID: LIB3106-097-Q1-K1-E9
ggcggcttggtttctactcttgttcctttcttatatgccatatttgcatctgatgcagcaattcctctgtaacgtgcattatttttgtgaaggggttggagagaaacactgatcagtgactactgcttggttgctactactgtaaatggattacagcactgacaacaaggagccatgggattggcatatggaggattattgtctccaaaggagtgtcaattatgaacttacacaagggatatggaatggagtttctcaaaatgaacatcgttcctttgcgttcaatgatgaaacaaccccagtga

SEQ ID NO: 18107 - DNA, 423 bp, Glycine max
  Clone ID: LIB3106-097-Q1-K1-F1
cccacgcgttcggatccgtaaggaaggcgacacctggatcatcgatggcgtcggcaatggcggcctcctggcgcctgaggcgccgctcgatttcggcaatgccgccacggtctgccgcctgaccatgggcctcgtcggggtctacgatttcgacagcaccttcatcggctactcctcgctcacaaagcgcccgatgggccgcgtgttgaacccgctgcgcgaaatgggcgtgcaggtgaaatcggaagacggtgaccgtcttcccgttaccttgcgcggtccgaagacgccgacgccgatcacctaccgcgtgccgatggcctacgcacaggtgaagttcgccgtgctgctcgccggcctcaacacgcccggcatcacgactgtcatcgagccgatcatgacgcgcgttcatacggaatagat

SEQ ID NO: 18108 - DNA, 396 bp, Glycine max
  Clone ID: LIB3106-097-Q1-K1-F10
cggacgcgtgggcggacgcgtgggttgccattctcatcctcctctgtctctctctctgcaccattgccatggatccttacaagctccggccatccagcgccttcaattctcccttctggactacaaattctggtgctcctgtttggaacaacaactcctctttaaccgttggagctagaggtccaattctgcttgaggattatcatcttgtggagaagcttgcaaactttgacagggaacgtatcccagaacgtgttgtccatgccaggggagctagtgcaaagggtttctttgaggtcacacatgacatttctcacctgacatgtgcagatttccttcgagcccctggagttcagacgcctgtaattgttcgtttctcaactgtcattcatgagc

SEQ ID NO: 18109 - DNA, 426 bp, Glycine max
  unsure at all n locations
  Clone ID: LIB3106-097-Q1-K1-F11
cccacgcgtccgcccacgcgtccgatcgctcgttcctcgtggttccttcctttgtgtctctctctcttcggacacaaagcaacactttccatttccatgtctctgtctcttcttcgtatctactcttccccccaccttctttcctcctctctcttctttccaaccccacctctctcttctttccttcccaaattaccaaatgccccccgcactccccacattgttttatgccaccgtagggacgcctcctcagcttcgaagcagcgagtcccagaagatacagaatacgaacaacccatgaggaccagttacgacgacgacgaagaagaagaagaggaatttcttggctccttagttntgccctgaagatgggatgtactgggtctcggtcaagcccatgtagatttctctggcatgggtgatgat

SEQ ID NO: 18110 - DNA, 425 bp, Glycine max
  unsure at all n locations
  Clone ID: LIB3106-097-Q1-K1-F12
gaaacatcgagcagcagaagaaagaaactacagaaaaaagaaaaaagacatggcttccacttctgcagtttcattggctatgccagtaacttatgccagccagaagagggtactggtgcctagctctgatgcattattcctcaagccactgcctctacgttcttattcttccaaggcaatggcagcatcaaaagtacccaatggaaggtttcaggtgagggcttccatgaaggagaaagttgtgacaggcctcacagcagctgcattcacagcctcaatgatggctcctgatgtggccgaggccgccgtttcgccttctctcaagaacttcttgctcagcatcgccgccggtggtgttgttgttgctgccattatcggtgcggtggtcggngtttccaatttcgatcccgtcaagcgaagctgat

SEQ ID NO: 18111 - DNA, 436 bp, Glycine max
  Clone ID: LIB3106-097-Q1-K1-F2
aagaattaatggcgaggctaatgttgtggctgtgaatgctgcaaaggaatacggaattcccaaattcatcctgatctctgttcatgattataacttaccatcatttttactttcatctgggtactttacgggaaagaggaaagcagaatccgaggttctctccaaataccccaattcaggtattgtcttaagacctgctttcatatatgggaagaggagagtgaatggttatgagcttcctttggatttggtaggggagccagcagaaaaaattctacgagcaatagagaacttcaccaaacctttaagttctcttcctgcatctgatttactcttagctccacctgttagtgttgacgatgttgcgctggctgttatcaatggtgtcacagatgatgacttctttggtgtttttacaattgaccagatcaaggac

SEQ ID NO: 18112 - DNA, 419 bp, Glycine max
  Clone ID: LIB3106-097-Q1-K1-F3
acacactatagtagcggccaggctgctgtatactatggagctggttatgtagaccttccggatatcttcaaaatgggcttcatcatggcttttattaatgctatcatctggggaggtgttggttctgtctggtggaaatttttgggattgtattgacatctcatttccttgtaagtaaatagcacatttcccagtttcagtaggcctttctttttcccggccgaaagaaaaaggtccttcaattgatgacagttgagctcagtcatcattttgagatgaaaattttctttctgcttctggctttgtagttttagacttttagcaatattgttgccctttttatttctctctttagtttacatacactcattaataatatatatttataaaggtttctgaggaaaccttttttatttgat

SEQ ID NO: 18113 - DNA, 309 bp, Glycine max
  Clone ID: LIB3106-097-Q1-K1-F4
aaaaaaaaaaaaacatacaaaaaaaaaaaaaaagctataaacaaaaaaataaaaaaaaagaaaaaaaggacgaacagatatataagatgctagcttaaattctgcatgcatgcgacattccatggtacaagcataccgaaaagttacctctccgaatgaaaaactggctttggtgcgcgttctttgggggtaaaattgccctgcctttaagcttgctgtggaagctcacatcatccgatcctttaataccattcctggagagtgcgttgaaccgacaaaggactacatcaatggcgaacaacttatatc

SEQ ID NO: 18114 - DNA, 449 bp, Glycine max
  Clone ID: LIB3106-097-Q1-K1-F5
tccactcgtccgtgttgatcgagataactagaaacagtgtgatgaaaatgaaggtccttgttttcttcgttgctacaattttggtagcatggcaatgccatgcgtacgatatgttccctctccgaatgaacactggctatggtgcccgtactccggaggtgaaatgcgcaagttggaggcttgctgtggaagcacacaacatctttggctttgagaccattcctgaagagtgcgttgaagcaacaaaggaatacatccatggcgaacaatatagatcagactccaaaacagttaaccaacaagcttacttttatgccagagacctcgaagtccatcccaaggacacatttgtgttcagtatagatggcaccgtactctctaatattccatactacaaaaaacatggatatggcgtggagaaatttaactcgaccttgtatgatgaatgg

SEQ ID NO: 18115 - DNA, 428 bp, Glycine max
  Clone ID: LIB3106-097-Q1-K1-F6
acgaccacgcgtccgagaggttgttgcgagctatgctctagatgatcgcgaggagaatatgaagatgcttgttttctttgatgctgcattactaccgatagcatggccatgccatggcgcctgctaccaaagggtccctctccgaatgaaaactggctatcgtgagccgcacttcaaggttaaacgcacaacctgcaggcttagctgggaagcacacagcatacgagcctttacaaccattgctgaagagtgcgttgcaccaacaaaggactacattaacggcgaacaacttagatcagactctaaaacagtttaccaacaagcattcacttatgactttgaacgcgaagtgcatcacaacgacatatttatattctgcatagattacaacgtactgtctaatatgccatactatcaaaaacacggat

SEQ ID NO: 18116 - DNA, 439 bp, Glycine max
  unsure at all n locations
  Clone ID: LIB3106-097-Q1-K1-F7
catcaatacgggcaaggccatgcatgccatgggcgccaggatccgtaaggaaggcgacacctgcatcatcgatggcgtcggcaatggcggcctcctggcgcctgaggctccgctcgatttcggcaatgccgacacgggctgccgcctgaccatgggcctcgtcggggtctacgatttcgacagcaccttcatcggcgacgcctcgctcacaaagcgcccgatgggccgcgtgttgaacccgctgcgcgaaatgggcgtgcaggtgaaatcggaagacggtgaccgtcttcccgttaccttgcgcgggccgaagacgccgacgcccgatcacctaccgcgtgccgatggcctncgcacaggtgaagtccgacgtgctgctcgacggcctgaacacgcccggcatcacgaccgtcatcgagccgatcatgacgcgcgatca

SEQ ID NO: 18117 - DNA, 337 bp, Glycine max
  Clone ID: LIB3106-097-Q1-K1-F8
aaagcattgaattcaaaaacttaagttcattccttgtgttttgctttcttcctgaaaaccaaacatgtcgaacacatgcggcaactgcgactgcgctgacaagactagctgcaccaagggaaacagctatggtgttattgtagagactgagaagagttacatcgagactgttgtcatggatgttccagcagctgagcatgatgggaagtgcaagtgtggcactaactgcacttgcacggactgcacctgtggccattaaggaatatgtatgaaaatgtaattgccatgtgtttggcaatacaaatatccaaataatgtaatcttcgtatgaataaat

SEQ ID NO: 18118 - DNA, 403 bp, Glycine max
  unsure at all n locations
  Clone ID: LIB3106-097-Q1-K1-F9
tttgagagaagaagggggttaccgtgtttgtttcttcaccgaacgaacaagcatatggtagcttaaagccctagtttcaatgcgaacatcctataatcttgttcttcttcgctctcgcttccgccgctctcacaatttccacgcataccgttccctctccgtcgtaatcctcaaaccagaccaccatccaccagctatcattccctcaaattcccgattccttcttcccggcttcaatgctcatcgccatcgcagtttctttaccagggctaagccagcaaccaccaacattgaattcaacgatcaccacaggtctcttttattttactttatttaatggctccatttacctgcacctgattnctttcctggtatggtattggagtcagcgagctgtaaaact

SEQ ID NO: 18119 - DNA, 444 bp, Glycine max
  Clone ID: LIB3106-097-Q1-K1-G1
gagataactagaaacagtgtgatgaaaatgaaggtccttgttttcttcgttgctacaattttggtagcatggcaatgccatgcgtacgatatgttccctctccgaatgaacactggctatggtgcccgtactccggaggtgaaatgcgcaagttggaggcttgctgtggaagcacacaacatctttggctttgagaccattcctgaagagtgcgttgaagcaacaaaggaatacatccatggcgaacaatatagatcagactccaaaacagttaaccaacaagcttacttttatgccagagacctcgaagtccatcccaaggacacatttgtgttcagtatagatggcaccgtactctctaatattccatactacaaaatacatggatatggggtggagaaatttaactcgaccgtgtatgatgaatgggttaacaaggggcat

SEQ ID NO: 18120 - DNA, 440 bp, Glycine max
  Clone ID: LIB3106-097-Q1-K1-E7
atattcactccaaaaaaaaaaaataagctcagagagagagaatggggaaaagacaaatcccagaccctccgaactttaagaaatacggcgttccttgtctactccgttgcgtggattccccaacacgttgtcaaatcgcgccaaatcgaaaccgccggtaactacctgctgttcgccggcggcggcggagcaggccacagcggtatccccaatgcttcggttattgcgcacttcgatgtcgcgtcgaattctctctctgatcaaccggtgtgtaagctaggaactgattctgaattgccttataggatggcacttaactctaatggtgatggccttatttgtgcaatggaaacgcccatggtttgcagatggtttgactgggatcaaaacaagagctctgaaattcataagttgagtctgaagctgtcagagaaagtgct

SEQ ID NO: 18121 - DNA, 420 bp, Glycine max
  Clone ID: LIB3106-097-Q1-K1-D10
gaagaagagaagactttcatcagttgcgttgagagaaggaaagggaaaatgggtagggatctgagcgaggaacaagtgtcttccatgaaggaatgccttctctctattcgacactgacggagacggtcgcatcgctccgtcggagctggggatcctgatgaggtgtctgggaggtcacccgtcgcaggcccaactcaaagacatcgtggctgaagagaacctaacggtccccttcgacttcccccgattcctcgatctaatggccaaacacattaaacccgaacccttcgatcgccaactccgcgacgccttcaaggtcctcgacaaggactccaccggcttcgtcgccgtcttcgagctccgccacatactgaccaacatcggcgagaagatcgagccctccgagttcgaccagtggat

SEQ ID NO: 18122 - DNA, 220 bp, Glycine max
  Clone ID: LIB3106-097-Q1-K1-D11
gagacattggttctacgtttgctgagggtcatgatttcatcatgaagtgtgacgtggaggataatccttcaggacatcataaaaggatgcgtcgtggtatatgtaacgggtcctgcacattctctagtgagaaacatagatgagcatgcatctgagggcactgctaactggctcacagccggtgtacttatatcaatggtggcaccagatattgtgcccg

SEQ ID NO: 18123 - DNA, 363 bp, Glycine max
  Clone ID: LIB3106-097-Q1-K1-D12
ctagatcacgtggctttggctttgtcacaatgtctgatgagacggaaatgaaagatgcggttgctgctcttgatggtcagagtttggacggaaggccaattagggtgagtgttgccgaggacaggccaaggcgtggttccttttgagcgttatctcatgtagttccccatgtcagctgctggagttatcttgcatttttttaatagctgaggatatactatagtgtcaatttttgttcaaaggaaaatcctttcttggggcaccaatttcagattagatttacgtattttgttgttattagtttaatgccctgatgaaaattaagttgtaatttcggactcctgagattggagaaaagtatac

SEQ ID NO: 18124 - DNA, 358 bp, Glycine max
  Clone ID: LIB3106-097-Q1-K1-D2
acgtacatacgaaaaatcgaatactaacacaaagggaagaaaaacttaactactaaggaaggatcaaagagaatgagctcaagcaatggcatcaatggctggcttgcgtggatcctctcaagctgtgttggaaggtagccttcaagtgagtggctacacacgcttgaatgttggggagtggaagcttggtggcctcagtcacacgtgcatggttcacagtttgagcacaacaacatcaagtgagtggggaggttcataacagccgtagggcagggctttcacttgttgctgctggtttgtccactggctctattgttcaatctgtgcttgctgatgccaaatctatcagagctggacc

SEQ ID NO: 18125 - DNA, 226 bp, Glycine max
  Clone ID: LIB3106-097-Q1-K1-D3
acggaaaactttggacaaaaaatggagtgctacacaaggccaaacaggagtgacatccacctgtcagcagaggaagaagccaccatagaggcaaagaccagagagtactttgatggggtcgcaccacaccgccacaaaaggcttcaccaaagtgactattcagctcaatatgtctatgctttctccattgcccataactctcgtttaactttccctgacttaaccc

SEQ ID NO: 18126 - DNA, 160 bp, Glycine max
  Clone ID: LIB3106-097-Q1-K1-D4
acgcccacgcgtacgtcgacgcttgctgatcctgctgagattacgtctgggctggcaccatcaggtgatcaagagcgaggggatacagtgacctggttgctgtggaagctacccatggctagatgtactgactgacactgtctgtttacaacgggattca

SEQ ID NO: 18127 - DNA, 335 bp, Glycine max
  Clone ID: LIB3106-097-Q1-K1-D5
acgtacaacacaaccccgaaatggcttatgcttctgttcccatggctctctcgctgagctctggtatcaacaacaacaagccttcatccgaagccttcttcaggccactacccctacggcaaccaaagaggaccctcttcaccacaaaggcagtgtcaaactccaaggctcaaatcaatgcatctttgaaggagaaggcagttgcaggactcacagcagcttctgtgacagcatctatggtggttccggaagtggctcatgctgctggatatgagttctgccctttcctcaagaactttctgctaagcatccttgctggtgggcttgttctagta

SEQ ID NO: 18128 - DNA, 270 bp, Glycine max
  Clone ID: LIB3106-097-Q1-K1-D6
cgtacgtcaagcctactgatcctgctgtgttaattctggtctgcgaacatggtgtgagcaagagcgaggggatagctgatctgctagctatggtagtgtcccatgcctttaaggtctgactgacgatttatgattacaaggggagttatgacaatcttgacgtgatcatcatgctcgtctaggatgcacattctgggcaacatcctattccacatgctgtcaactatgctccacaatgctcaaaaatgttctggtgtgagctcaatctca

SEQ ID NO: 18129 - DNA, 390 bp, Glycine max
  Clone ID: LIB3106-097-Q1-K1-D7
tccacgcgttcgtccacgcgtccgcgctcttgtctctcacggttgactctgcggttcttaatctctccgacatctccgatctctcccatgtccctgatcacatcctgctcgacctcttcctgagaatattgaacgctgggaagctgactgagaaagttctgagactttgcatagcaactggtaaggatgaagtcctctcatttgttcaggcactcaatatccaacatattttgacccctgtgcttcccaccaagtgttctgaggcaaaatcagacttttagtttggaagatagtctgtaccttgcaagatgtctcaagcagttatcaacgatcatgaagtggacattgtgactggtgcactgcattctgatcttacaacttttatgaatg

SEQ ID NO: 18130 - DNA, 392 bp, Glycine max
  Clone ID: LIB3106-097-Q1-K1-D8
gtgagctataagctagtttatcgtgaggagaatatgaagttgtttgctttctttgttgctgcagtagttttggtagcatggccatgccatggcgcaggctaccaaaggttccctctccgaatgaaaactggctatggtgagcgttcttcggaggtaaaatgcgcaagttttaggcttgctgtggaagcacacatcatccgagccttttaaaaccattcctgaagagtgcgttgaaccatcaaaggactacattaatggcgaacaatttagatcagactctaatacagttaaccaacaagctttcttttatgctagtgaacgcgaagtccatcacaacgtcatatttatattcgggatagataacaccgtactctctaatatcccatactatg

SEQ ID NO: 18131 - DNA, 333 bp, Glycine max
  Clone ID: LIB3106-097-Q1-K1-D9
gagaagtttaaggtctgcgagcaatttggtgagaccttcttttgatccggtgactcccaatgctaaatatgatttgagagtaaatattccgcccgccagagtgttggcaggcaatactagttcgtgtaaagatcacagagaactctctcatgaccatgactctgaaaatgtttacaacttgagattgcattttgcggacaagagtgcccccaacagcatattctccagtcctgttactagtccacgtacgtccagcaatgcagatttttatgacattttgaaagtgtcaccggctcaaactgctcatagcccagaccggtctagtctgctcat

SEQ ID NO: 18132 - DNA, 462 bp, Glycine max
  Clone ID: LIB3106-097-Q1-K1-E1
acgggacaagatatttttccctgcaagcaaggaactctttgaggtctttcaaattgattgtaggaacttttgcatttggatttgcatgaattttgctagaagacatggctactgcaaatggtgggactgggactgaggagcacaagaggaaatctaatgatctttttcttaagcaagggggacaccaaatcatgccaagatcacctagattgtgcacccctattcggaaggaatggccggaggagagtttgccaaatgacaatgtgattggcttgaatagctatgttacttccttagctggatctggacctcctagttctagtttttgttccacaattgattctgaacacattgttgaagagttgcctgttaggaattatgagaaccagaatataaacttagttaaccatccacataattcaagacaggcaaagaatcaattgactattgagtctaagtata

SEQ ID NO: 18133 - DNA, 261 bp, Glycine max
  Clone ID: LIB3106-097-Q1-K1-E10
acattaacaacatggctcacgggatacaaacccttattcccaattccaatttccataatccgcaagttgctaaatcttcaagtgttcttgattttgcatcttataaactgaaaaattcagcacattgcatgttggctttgaaaaatgatacaattgttatgcccaaggttcgctcctctaggacttgagcatccatggctacagcctgcatgcttcacggtgcaagctgccggaccgtatgcggccgaaaatgctttgggc

SEQ ID NO: 18134 - DNA, 233 bp, Glycine max
  Clone ID: LIB3106-097-Q1-K1-E11
atatttcctgaattgcccgagtcatctcacttgatctcacaggtcaaggatttcgtcaccaagaaaattcctgactttcaatcaaatatatattacgttcatgttggagtcaagtgcgcatggctatgcaagttcttgtttcaagccttctaaacaacacaatagtatttagtagtattagtatttcgtaagagtctattactattatatgtttggatctctccaaaacctaa

SEQ ID NO: 18135 - DNA, 381 bp, Glycine max
  Clone ID: LIB3106-097-Q1-K1-E2
acgcccacgcgtacggcgaagatgtcgggtcgtggaaagggaggcaagggtttgggaaagggaggagccaagaggcacaggaaggtgcttcgtgacaacatccagggtatcaccaaacccgcaattcggcgtttggctcgcagaggtggtgttaagagaatcagtggtctcatctacgaggagacacgtggcgtcctcaagatattcctcgagaacgttattcgcgacgctgttacctacaccgagcacgctagaagaaagaccgttaccgctatggatgttgactatgctctcaagaagcatggcaggactctctacggtttcggtggttaatttctagggtttgcatcggcgtatcagctgcttattggttattgctgt

SEQ ID NO: 18136 - DNA, 434 bp, Glycine max
  Clone ID: LIB3106-097-Q1-K1-D1
acgcacaacacaaccccgaaatggcttatgcttctgttcccatggctctctcgctgagctctggtatcaacaacaacaagccttcatccgaagccttcttcaggccactacccctacggcaaccaaagaggaccctcttcaccacaaaggcagtgtcaaactccaaggctcaaatcaatgcatctttgaaggagaaggcagttgcaggactcacagcagcttctgtgacagcatctatggcggttccggaggtggctcatgctgctggatatgagttctacccttccctcaagaactttctgctaagcatctttgctggtgggtttgttctagtagccatatttggagccgttattgaggtttccaactttgatccggttaagagaacttatagcccgcatgctccaatgctgtttaatttcatatgtcctttt

SEQ ID NO: 18137 - DNA, 425 bp, Glycine max
  Clone ID: LIB3106-097-Q1-K1-E3
acgaattagttcattctctttgcgcagttccctacctctcctttcaagatgcagatcttcgtcaagaccctcaccggaaagaccatcacccttgaggtggaaagctctgacaccatcgacaacgtcaaggccaagatccaggacaaggaaggaattcccccggatcagcaacgtctcatcttcgccggaaagcagctcgaggactgccgtaccctcgccgactacaacatccagaaggagtcaacccttcaccttgtccttcgtcttcgtggtggcatgcagatcttcgtcaagactctcactggcaaaaccataaccctagaggtcgaaagctctgacaccattgacaacgtcaaggccaagatccaggacaaggagggaatacccccataccagcaacgtctcatcttttccggaaagcaact

SEQ ID NO: 18138 - DNA, 331 bp, Glycine max
  Clone ID: LIB3106-097-Q1-K1-E4
agaacgctgaaaacggcatagttttgcatttcttgcttgggctaaaattagaaccctgggcccctcagcgagacagccggcgccgccttcttcaataaccgtcgcaatcctctttcggcaaaaaaagaaaacccttcttctcactcatattcttacgcacacataacaagatacacaacacagcaccaaccttggcagcacaacgtgcttacaattcaaagaaacatattcacagacacatacaatggctggtcgattccgcgagctgacgaagaaatacggaaaagtctcactccgtgttcacttgagcggcttcaccgattgcatcact

SEQ ID NO: 18139 - DNA, 155 bp, Glycine max
  Clone ID: LIB3106-097-Q1-K1-E5
atcgattactatactagtaataaattgtacaaaaaataaaaatataaataatataaatataaaaagaacaaacacaaattttatgtgattagtcgcggtatttaaaataaaaaatgaaagtagacaaataaaaaaggaaaggagatgtttgaatg

SEQ ID NO: 18140 - DNA, 378 bp, Glycine max
  Clone ID: LIB3106-097-Q1-K1-B6
acggcggcaactgcgactgcgctgacaagactagctgcaccaagggaaacatctatggtgttattgtagagactgagaagagttacatcgagactgttgtcatggatgttccagcagctgagcatgatgggaagtgcaagtgtggcactaactgcacttgcacggactgcacctgtggccattaaggaatatgtatgaaaatgtaatcgccatgtgtttggcaatacaaatatgcatataatgtaatcgtcgtatgaataaaaagcggagctgatatcctacttcacgtatgcgtagtcatgcagtctgaatcatttcaagttcctgtcttagttaatataacagccatggttgtggcattctatggcggattagact

SEQ ID NO: 18141 - DNA, 438 bp, Glycine max
  Clone ID: LIB3106-097-Q1-K1-B7
tccacgcgtacggccacgcgttcgtaaccattctatgtgcgcggacctgaatggattgggagttttggtaggaagaacaatgctgggacaaagtcggtatgcgtgtcagggcatgtgaacaagccttgcactgttgatgaggatatgagtattccagtgaaggaactgatagataggcactgtggaggtattcgaggaggatgggataatctacttgcagggattccaggatgatcatccgttcctctgattccaagacatgtatgtgatgatatctagatggattatgatgcattgaaggcttgtgagacagggttggggactgcatctgtaaccgagatggattaatctacggatgttgattatgctagtgctaggctttcctatttctactagcatgaaagctgttggcagtgcaccccatgcatagaggggact

SEQ ID NO: 18142 - DNA, 446 bp, Glycine max
  unsure at all n locations
  Clone ID: LIB3106-097-Q1-K1-B8
acgcccacgcgtacgcccacgcgtccgaccacattcacctgaggcttccaaagcaatggcttcccttgcagcatccactgctgctgcttcccttggcatgtcagaaatgcttggaaaccccatcaacttcagtggtgccacaaggccagctccatctgcttctagtcctgcctccttcaagactgtggctcttttctccaaaaagaaggctacaccaacacctccaaaaaaagctgctgctgctgctcctgccaatgatgagcttgccaagtggtatggtcctgacagaaggatcttcttgcctgagggtctcttggaccgatccgaaatcccagagtacttgaccggagaagtccctggagactatggttatgacccatttggtcttagcaagaagccagaagactntgccaaatatcaggcatttgagttgattcatgccagat

SEQ ID NO: 18143 - DNA, 350 bp, Glycine max
  Clone ID: LIB3106-097-Q1-K1-B9
gtgagggttagtgtgctgaacgatgctctgaagagcatgtacaatgctgagaaaaggggaaagcgccaagtcatgattcggccatcctccaaagtcattatcaaattccttttggtgatgcagaagcacggatacattggagagtttgagtatgttgatgaccacagggctggtaaaatcgtggttgaattgaacggtagactgaacaagtgtggggttattagtccccgttttgatgtcggcgtcaaagagattgaaggttggactgctaggcttctcccctcaagacagtttgggtatattgtattgactacctctgccggcatcatggatcacgaagaagctaggag

SEQ ID NO: 18144 - DNA, 311 bp, Glycine max
  Clone ID: LIB3106-097-Q1-K1-C1
gccaagcgtacggtagagtccagagcatcacgaggatcagcacgacactgggcatgcgcaagggctagcgcaggtctggctctagaactgactctgaagacctattggaggaactgttgctgacaccgtgtccgaatcgctgtgatcctctacgggctcaaatacgaatacatgctcatggatgtgctctctggagatcaatctctccatgtgaatcttgagctgaatgctgtcggtctagtgcacgatctagtggatgaccacgacgctctctacgacactatggacatgattaagtattatgaagacaa

SEQ ID NO: 18145 - DNA, 410 bp, Glycine max
  Clone ID: LIB3106-097-Q1-K1-C10
aggatgcagatacaacttcttatgaagtggattcaaaagtagtatgtatgatcctagaagatgctagcactaacggattgtgggattttcctaacagaaagatgcctctatagcagacaggatattccctagccactactcagcacccgctcagcaacccttgtcagagttagttatgaaatccttcagggtgattggtgaattgagaattatgcagaacaaaatagcaatttgttgtgatagccaaagtgcaatacatctcttaaaacatcaagtggatcacgcgagataaaattgcatatcgatgttggaattcatttttatcggagatgttattgagaaaaatgaggtttaggtggagaaggcattaaaagacaatcctacttatgcattcatgaggacactaactc

SEQ ID NO: 18146 - DNA, 52 bp, Glycine max
  Clone ID: LIB3106-097-Q1-K1-C11
gaaaaaaaaaaaaaaaaaaaaactaaaactatatagaaaaaaaacaaaactg

SEQ ID NO: 18147 - DNA, 394 bp, Glycine max
  Clone ID: LIB3106-097-Q1-K1-C12
attctcacaaacaactcttgagaaagaaagaatggctgccaacacattgatgagttctgccatctcagccttcccatctctcctttcctcctcaaaatccagatttgccgcagcagttcctctttccagctttgttgtcaccaatgcctcttcttctcgcttttccatgagtgctgattggatgcctggccagcctagacccccctaccttgatggttcagcacctggtgactttggattcgaccctcttcgtcttggtgaagtaccagagaatcttgagaggttcaaagagtcagaactcattcactgcagatgggccatgcttgctgttccagggattttggttccagaggcattgggcttatgcaactgggtaaaggctcaggaatgggct

SEQ ID NO: 18148 - DNA, 443 bp, Glycine max
  Clone ID: LIB3106-097-Q1-K1-C2
agaaactagtggtgaaggagatcaaaactttggctggctcttggcagaaagtcttgttttctcgcatctttcgggaagcccatggcggatgttttatagccaaggaagcgtatgggatgtgtgaagatttttctctcttctctgttattcccaattgtgtttacctgttcgcaggggttcttagttggggtttcagcccttttgctcaccaaaaaaaaataagaaactactgggtgtggcttttggtgtgtttgaagttgcgctgaaatagagacaatcggttggggttggtagtgttgcgttgcgttgcgtatttgtgaaattgatgcagcgcggtgctcgctgaagtgaagtaatcccttttggttgtgttgtgggtaatgcttctcagtaattctagtccaccattttcattcgtctcaggaatcactatgagtatgact

SEQ ID NO: 18149 - DNA, 444 bp, Glycine max
  unsure at all n locations
  Clone ID: LIB3106-097-Q1-K1-C3
cttggtgagaagctgaccgatgaggaagtcgacgagatgattcgtgaggctgatgttgatggtgatgggcagatcaactacgaggagtttgtcaaagtcatgatggccaagtgaggaccaatcaaccataacaaaaacatttgaaagcacatgaacagaaaagggacagggcagataagttttgatgaaaattctattttcattaggacaatcttcatttggggtcattagtttttgttggtcggatttgtgtttgcttttatttattggtattgctcattagtattttctacttgtttgctctgtcccttgttttagtagcttggattagctgtgtctcaccatgcatttgtacttcacttttcatgttttttgggttactactatgaaactggaacaattggttgcaaatagtgcttttacatatgggtgactnatactgtt

SEQ ID NO: 18150 - DNA, 330 bp, Glycine max
  Clone ID: LIB3106-097-Q1-K1-C4
acgcccacgcgtccgcccactcgttcgtccactcgtgcgcgttaatcataatcatgggtggaacctctgtggcctccggcagaagagtcacgaggtttttggccagtcaccaccgtgacttcacgtgcgttgttgccgatgttgagttcgactttcttgacgatattggagaaacgttgttagctcaaagtgctagcagtgatgaaatggatcggttcgatgaagacgaggatcacagagataccgtccaggagaatagaaccttttgggacatccaacacgagcttttgcagaccaatatatgcagaacgagttctttggagtcacgga

SEQ ID NO: 18151 - DNA, 262 bp, Glycine max
  Clone ID: LIB3106-097-Q1-K1-C5
gcgaccacgcgtacggtgtcggcacgtttagcaataaccaaaccctctctactctgtggtcttctccttctcttcgctaggggtgtagcttcttcctcttcacttcgttctttgtcgcctctaccatgagcaacgacttggacacattcaacgtcgacgatctcacttctgctctcaacgaggacaatagagcagaccttgtcaacgctcttaagagcaagatacagagtttggctggacaacactcggatattctagagtc

SEQ ID NO: 18152 - DNA, 432 bp, Glycine max
  Clone ID: LIB3106-097-Q1-K1-C6
tcggttgagaactaagaaggagaagcaaatggctttctcaatgatctcttccccagctgttaccactgtcaaccgtgccggtgccggcatggttgctccattcactggcctcaagtccatggctggcttccccaccaggatgaccaacaatgacattacctccattgctagcaactgtggaagagtgcaatgcatgcaggtgtggccaccagttggcaagaagaagtttgagactcttttctacctgccagaccttgatgatgcacaattggcaaaggaagtagaataccttcttaagaagggatggattccttgcttggaattctagttggagcacggtttcgtgtaccgtgagcacaacatgtcaccaggatactacgatggacgctactggaccatgtgggagctgccctatgttggatgcactgatgc

SEQ ID NO: 18153 - DNA, 448 bp, Glycine max
  Clone ID: LIB3106-097-Q1-K1-C7
tcgcttggtgagaagctgaccgatgaggaagtcgacgtgatgattcgtgaggctgatgttgatggtgatgggcagatcaactacgaggagtttgtcaaagtcatgatggccaagtgaggaccaatcaaccataacaaaaacatttgaaagcacatgaacagaaaagggacagggcagataagttttgatgaaaattctattttcattaggacaatcttcatttggggtcattagtttttgttggtcggatttgtgtttgcttttatttattggtattgctcattagtattttctacttgtttgctctgtcccttgttttagtagcttggattagctgtgtctcaccatgcatttgtacttcacttttcatgtttttttgggttactactatgaaactggaacaattggttgcaattaatgcttttacatatgggtgacttatactgtt

SEQ ID NO: 18154 - DNA, 445 bp, Glycine max
  Clone ID: LIB3106-097-Q1-K1-C8
caaaaacgaagtactactacaagggaagaaaaacttagctactaaggaaggatcaaagagaatggctcaagcaatggcatcaatggctggcttgcgtggttcctctcaggctgtgttggaaggtagccttcaggtgagtggctccacacgcttgaatgtggggagtggaagcagggtggcctcagtcacacgtgcagggttcacagttagagcacaacaacaacaagtgagtggtgaggtacaaagcagccgtagggcagtgctttcacttgttgctgctggtttggccactggctcttttgttcaagctgtgcttgctgatgccaaatctatcaaagttggaccaccttccccaccttctggtggattgcctggaacgttgaactcagatgaagcatgagaccttcagctgccattgaaagataggttcttccttcaaccattg

SEQ ID NO: 18155 - DNA, 492 bp, Glycine max
  Clone ID: LIB3106-097-Q1-K1-B5
taccgatctcccaattccaggtacgcgtcacgcgtacccattgaattcactctggaatcttccatctgtgtatcgttttccttccttgtgtgcccgtcctaattcactttacagggctgtaccagatcctttctgcttaaatcctcgtatggtcgatcatcatgcagttctctatgaagtgaaattatcactgaaagaattgatagagaggcactgtggaagtattcgaggaggatgggataatctacttgcactgattccaggaggatcatccgctactatgattccaaagcatgtatgtgatgatatcttgatggattatgatgcattgaaggctgttgcaacagcgtcgtatactggtgccgcatttgctgatggataaacctacggatgttgtttatgctattgcaaggctatcctatttctacaagcatgaatactggtgtcagtgcaccccatgcatagaggggactggcttgctttggaccatca

SEQ ID NO: 18156 - DNA, 404 bp, Glycine max
  Clone ID: LIB3106-097-Q1-K1-C9
cccacgcgtccgatcgagataactagaaacagtgtgatgaaaatgaaggtccttgttttcttcgttgctacaattttggtagcatggcaatgccatgcgtacgatatgttccctctccgaatgaacactggctatggtgcccgtactccggaggtgaaatgcgcaagttggaggcttgctgtggaagcacacaacatctttggctttgagaccattcctgaagagtgcgttgaagcaacaaaggaatacatccatggcgaacaatatagatcagactccaaaacagttaaccaacaagcttacttttatgccagagacctcgaagtccatcccaaggacacatttgtgttcagtatagatggcaccgtactctctaatattccatactacaaaaaacatggata

SEQ ID NO: 18157 - DNA, 430 bp, Glycine max
  Clone ID: LIB3106-097-Q1-K1-A10
gaagaaaatgaaagtccatgatttctttgttgctatagttctagcagcatggcattgccatggctcagaccatgaccatgaccatggccacacctaccaaattttacctctgagaatgaaaactggccatggtggccactacattccggaggtatcatgccaaagttggaggcttgtgcgtggaaagcacacaacgtcattgtactggaaaaccgttcctgaagattgcgagggatatattgcgaactacatgcttggcgaacaatatagatcagactgcaaaatagttaaccaacaagcttatttctatgctaaaaccctcaatatcactgacaaaaccgcatgggtgttcgacatagatgagactacactctctaatctcccttactatgctgaccatggatttggggttgaggtatataatgaaaca

SEQ ID NO: 18158 - DNA, 413 bp, Glycine max
  Clone ID: LIB3106-097-Q1-K1-A11
cccacgcgttcgtccactcgtccgtccactcgtccgaagagctcaaaaattgatgaattgggggcaattaaggttgcaggctaaaatggtaccgtacagtagttcacttcttttcctcaattggttgttgtcatttgttaaatttggaggggtctttcaattgacattatcaaatttcttgagggtagctagtgatctgactaaagattatcatgatggtgaattcacctgacgaaggaaaaggatgcacgtaaaattggatgaagataaacttttttttcccttttgtacaataacaattaccttataggattggcagtaatttgcaaaactgtagtcttcttccttttcccagtcttttggagcactggttatctcaacatgtatacattatttttggtttttaaaaatat

SEQ ID NO: 18159 - DNA, 74 bp, Glycine max
  Clone ID: LIB3106-097-Q1-K1-A12
tgagaacaaaaaaataccacagaaaaaaccatacatcttctttcacattttccaactacgagaaggctcaaatt

SEQ ID NO: 18160 - DNA, 416 bp, Glycine max
  Clone ID: LIB3106-097-Q1-K1-A2
gcttttccttatcccgacctaccaaagtaataccaatccgctctcatctctgtctctgtctctatgtctctatgtctcgaatcttctccgcatggagcaagacgaagctgcacctcatcttaatccccactcttttctcttcttcccccatcaacttcaatagcgggcttctacagcaatggggagttaccagaggattggcctcacgatcacgacgctgcttcggctatgcaaactccaattggaccctgggacgacatcaaagctgggtgggtcggagggtccaatttgcgtacggattttccaactccgaaggaaatcttcaagggtctcgacaagtttgttattggccagcacatggccaagaaggtcctctctgtagctgcttataaccactatcaaagaatctaccacgg

SEQ ID NO: 18161 - DNA, 350 bp, Glycine max
  Clone ID: LIB3106-097-Q1-K1-A3
actacgtggcagtgagccatcctcagacctgcgtgttaagaacgaaaggactcgattgcttctgtggtacaatcttggtagcatgcggatgccatgcctacgatatgctgcctctgtcgacgaacactgcctatggtgcccggactccgcgagggcaatgcgcaaggtcgaagcttgctgggggaacacacaacatctttggctttgttaccattcctgaaaagtgcgcttaagcaactaaacgtttcattcatggcgatccatatgagttcgactccataaccattaaccaacaagcttacttttatgccacaaacctcttcttccatgcccatgacacatttgtgttc

SEQ ID NO: 18162 - DNA, 360 bp, Glycine max
  Clone ID: LIB3106-097-Q1-K1-A6
acgagtacgcgtgcgagtcaacccgcgaggcgcccggaaacggactgggaagatgcctgtggggatcgcaccgtcgaccgaacctgataccgtgcgtaagcttctagggagagcatacgtgtcagcacacgtgtcatgaccagctataccttgaactatgcatgaccgaggcaactccggaggaagccctgatggatgctcacatggatactgacctgctgaccggtcgattgactcgaatgactgatcgaacgacttagcaaaccgtttagtacctagtttccttcaagatatccgtaacgctaggtcgagccctatcgcgaaaagtctatgattaaaggcatgattagcggaatgggc

SEQ ID NO: 18163 - DNA, 462 bp, Glycine max
  unsure at all n locations
  Clone ID: LIB3106-097-Q1-K1-A7
tgttgatcgagataactagaaacagtgtgatgaaaatgaaggtccttgttttcttcgttgctacaattttggtagcatggcaatgccatgcgtacgatatgttccctctccgaatgaacactggctatggtgcccgtactccggaggtgaaatgcgcaagttggaggcttgctgtggaagcacacatcatctttggctttgagaccattcctgaagagtgcgttgaagcaacataggaatacatccatggcgaacaatatagatcagactccaaaacagttaaccaacaagcttacttttatgccagagacctcgaagtccatcccaaggacacatttgtgttcagtatagatggcaccgtactctctaatattccatactacaaaaaacatggatatggngtggagaaatttaactcgaccttgtatgatgaatgggttaacaagggcaatgcaccggcac

SEQ ID NO: 18164 - DNA, 426 bp, Glycine max
  Clone ID: LIB3106-097-Q1-K1-A8
cgaaaaatcgtgcgcaatgttgggcgtgctctatcagattttgtggaaatagaatcacaggatatagtccagctgagtgtctctgctgatactgatcttggaactatttactctgtcactgtccctgtacggcgggttaagccagaatatcaagaaatggatgaattcgggacattaactaacgttgagtataaggacactggagagagttctggttctgttgatgttagatttgatttctatgttgcagacgaaagttcttgaatcttgatttcttgctcaaatgttaatgtgtgaaatgcttaccagtgaatgccaatccgaggtgctgtatatactctaaaatctggttctgttgatgacagaatgcatgtatttgtactacctatatctgacagcttaggttgatgcatcattgaactaaat

SEQ ID NO: 18165 - DNA, 411 bp, Glycine max
  Clone ID: LIB3106-097-Q1-K1-A9
caagttcacgagttgaatgttaaccctgatgtacatggtatattggttcagcttccgttgcctaagcacataaatgaagagaaagttctgactgaaatcagccttgagaaggatgtagatggctttcatcctttgaacattggcaagcttgcaatgaaaggcagagaccccctattccttccctgcactcccaaggcatgtattgaactattacagcgaagtggtgtaagtataaagggaaagaaagcagttgtggttggcagaagcaacatagttggactaccagcttcattgctgcttttgaaagcagatgctacagttactattgttcattcacacacaagtcaaccggaaagtatcatacatgaagcagatattgttattgcagcagcaggacagccgatgatgatc

SEQ ID NO: 18166 - DNA, 404 bp, Glycine max
  Clone ID: LIB3106-097-Q1-K1-B1
cccacgcgtccgctctctctccaatggccaaagacctcgaaacggagattcaaagtgggttgcctcacaaggactaccacgacccacccgccgccccattctacgaccccgccgagctccgaaagtggtccttcttccgagccctcatcgccgagttcgtcgccaccctcctcttcctctacgtcaccatcctcaccgtcatcggctacaaccaccagacagccaccgccgccgagccctgcagcggcgtcggcgtcctcggcatcgcttgggcctttggaggcatgatttttgtcctcgtctattgcaccgtcggcatatcagggggacacataaacccggcggtgacgttcgggttgtttttggcgaggaaggtgtcgctgacaagagcttgtgggtacatg

SEQ ID NO: 18167 - DNA, 371 bp, Glycine max
  Clone ID: LIB3106-097-Q1-K1-B10
cccacgcgtccgcccacgcgttcggtattggaccttggaaagatggacaaagctgatgactctggacttgcttcatatgttgccggtcaaattgatcgtactcttagctggaaggatgtgaagtggcttcaaacaatcaccaaactgccaattctggtgaagggtgtgctgactgctgaggacacaaggatagctgtacaaagtggtgcagctggaattatagtgtccaatcacggagctagacaacttgattatgttccagccactatatcagccttagaagaggatgtcaaagctgctgaaggtcgtgttcctgtatttttggatggtggtgctcgccgcggaactgatgtcttcaaggcattggcact

SEQ ID NO: 18168 - DNA, 251 bp, Glycine max
  Clone ID: LIB3106-097-Q1-K1-B11
aaattaacaacatggcacaagggatacaaacccttaatcccaattccaatttccataagccccacgttcctaaatcttcaagctctcttgtttttgcatctaaaaaactgaaaaattcaacaaattctatgttggttttgaaaaaagactcaatctttatgcaaaagttttgttcctttaggatttcagcatcactggctacagcctgcatgcttcacagtgcaagcagccggcccgcaaccgcccgcaaa

SEQ ID NO: 18169 - DNA, 397 bp, Glycine max
  unsure at all n locations
  Clone ID: LIB3106-097-Q1-K1-B12
cccacgcgtccgcccacgcgtccgttgactctcacaaaccttgcatccatccacacatggctggcatgaactctagcgtattggcctgtagctatgccatatctggtgcagcatgctccgagctcaatgggaaggtcacttccgtggcctctgttgcatcctctggctacaagttgccattgatcaaatgtgaggccagagttcccaaagccaaagaatctgaaggaaggagaggtgcccttgttctcttggcagctacccttttcatctctgcagcctccaattcttctgccaatgctgggatcattgatgattancctgagaggagcaaggctaacaaggaaatgaatgacaagaagaggttagctactactggagcaaactttgcaagagcata

SEQ ID NO: 18170 - DNA, 430 bp, Glycine max
  Clone ID: LIB3106-097-Q1-K1-B2
cccacgcgtccgcccacgcgtccgaaaagaaaatcctcacccattttcttcgtagccaaacactctgaaattctcagttatgtcgtggcaagcgtatgtggatgatcacctactgtgtgaaatcgaaggtatccacctcactcacgccgctatcatcggccaagactgaagcgtttgggctcagagcaccaacttccctcagttcaaacctgaggaaataactgccatcaataatgactttaatgagcctggatcacttgctccaactggattggatatcggtggcaccaaatacatggtcatccagggtgagcctggtgctgtcattcgagggaagaagggtcctggtggtgttactgtgaagaagaccgatgcggccttgatcattggcatttatgatgaaccaatgactccaggtcaatgcaacatg

SEQ ID NO: 18171 - DNA, 377 bp, Glycine max
  Clone ID: LIB3106-097-Q1-K1-A1
ctcaatttttctctcaaccggcccaatttagcataagcccagcatgggcaccgcatcagcagcagccacctcgtccttcatggggacgcgcctactggaggcccattccggggcggagcgggtgcaggcccggttcgggtttggcaagaagaaagccgtcggcccgaagaaagtttccagggggtcgggctctagctccgataggcccctgtggtatccgggcgccaaggcgcccgagtacctggatgggagccttgtcggagactacgggttcgacccatttgggctagggaagcccgccgagtacctgcagttcgagttggactcgctggaccagaaccttgcgaagaacgtggctggggacatcattgggacca

SEQ ID NO: 18172 - DNA, 466 bp, Glycine max
  Clone ID: LIB3106-097-Q1-K1-B3
cccacgcgttcgcccactcgttcgcatccattctaaggcgtggacctgaatggtttgccagttttggtaggaagaacaatgctgggacaaagttgttttgcgtgtcagggcatgtgaacaagccttgcactgttgaggaggaaatgagtattccactgaaggaattgatagagaggcactgtggaggtattcgaggaggatgggataatctacttgcagtgattccaggaggatcatccgttcctctgattccaaagcatgtatgtgatgatatcttgatggattatgatgcattgaatgctgttgggacagggttggggactgcagctgtaattgtgatggataaatctacggatgttgtggatgctattgcaaggctttcctatttctacaagcatgaaagctgtgggcagtgcaccccatgcatagaggggactggttggctttggacgatcatggaaagaat

SEQ ID NO: 18173 - DNA, 129 bp, Glycine max
  Clone ID: LIB3106-097-Q1-K1-B4
acgcccacgcgttcgcccacgcgtacgcttacataaacgggtggatcatgatttacatctgcggattcgatacctgcatcaagtgaggcacattacgttcttacgtcttagatgctgtgaacactcatt

SEQ ID NO: 18174 - DNA, 152 bp, Glycine max
  Clone ID: LIB3106-096-Q1-K1-G2
gccaacactgccgaaccttgcattgtatctacccacttctcaaccaacaatggcaatggcaacggaagcgtctctcttgaccccaggcctcgccggtctcaaacccagcgaccgagccaccgtgccatggaaacaatcctacaccctctcct

SEQ ID NO: 18175 - DNA, 293 bp, Glycine max
  Clone ID: LIB3106-096-Q1-K1-G3
gccacgcgtgcgatcacgcgtacgggaacatctctcgtagtggcttctgtggaatgcgctcagggaagtgtgatggctttattgatgcgtattcatatgatactattgctatgaaacttaaaggagatggaagatgttatatatctactagctacacatataataggctcattggatctggactgattgacggtactttataccgagctgacgattatgtcaccgatggcttccggagcatttgcactcgtctcatacttcgataccttgattgtagctgtcgttatgattta

SEQ ID NO: 18176 - DNA, 199 bp, Glycine max
  Clone ID: LIB3106-096-Q1-K1-G4
gccacgcgttcgataggacccagttttacatttgaaactgtcactgagatccaatggctcgccaggctgggtgcctgaatgctgatgtctacgtctattgctaaagccggtaagtctggtgtatctactaggtacacctaccatgcttggtgtctgatcgatcgatactctcaaatatgactctagctctccattatct

SEQ ID NO: 18177 - DNA, 450 bp, Glycine max
  Clone ID: LIB3106-096-Q1-K1-G5
gaacgagggacgtgttcccgccatgtgaatggagcgagtgcagtgtgcctatgcctgtgtggacgaagcgttcgaaatagggaaagaggcgtatcatgggcagcagtacagccagatttacttcgcgcgccttcatttgatgcgaacacttttatattccctcgttcctcattggaaacccaattttcccgtgtgcacagtgctgggattggaagaggggaaggagtgtgtcattgttggaaccctctataaacacatgaagctcaaaccttgcattcttgatgagtattccaaggagagatcagtggttccacttgtcaagccacataacttcatacacccggatgatcacctagttttggaagatgaaagctggcaggttaagctcagtgggagtatcattttgccatctgaatatgtaacacgaattgggggtgctatacttggaaa

SEQ ID NO: 18178 - DNA, 244 bp, Glycine max
  Clone ID: LIB3106-096-Q1-K1-G6
agggttttcgctgaccggtgcgcagtctggcctgcagaagacgaatcgaaaatgccgtctcggaagacattcagaatcaagaagaagttggcgaagaagatgaggcagaacaggcccattccctactggatccgcatgaggaccgataacaccatcaggtacaacgcgaagcgccgtcactggcgtcgcaccaagcttggattctgaggtgtatgctctgcctaggttcaatttatccaattaa

SEQ ID NO: 18179 - DNA, 450 bp, Glycine max
  Clone ID: LIB3106-096-Q1-K1-G7
aaaaaaactcaaacaccttcaagaacttgtatctttctttgttagtatttgttactacaattgtacattcttttcatctgtacatatttcattagtcatggcacctcaagcagtttccttcaagtccttcgccgttgctcttattgtggcgcttttcttctccgcctccgctctggacttagtttcggggcagtcgccggtgccggcgccggcgccggcaccagatgccggagcagctggatccgtgtcgagctcggtcgccatgattggagcttccgttgtgatttcattgctcgccatcttcaagcactgatgaataatctgatgatggatcgattttgtgtgaagattattgattcgttctgcacactcagatttattgttgctgctttataatacgttacgagtgatgattattatgtacgtataaaagagagagagagagggatt

SEQ ID NO: 18180 - DNA, 265 bp, Glycine max
  Clone ID: LIB3106-096-Q1-K1-G8
gaaatcctgagcttccattgtgctcactcatctcttacaacgaaaccctcttcatcttgttctatctgtgacgagcatcatggcctcaagagcagtgatattgctggctatgggtgtgcttacggcgatggttgtggccattcgcccagcaaagaaccctttttgcgtgaagggtcgcgtatactgtgacccttggcgtgctgggtttgagacctcagctaccaactacattgctggtgctgagaatatgttgcaatgcaagagc

SEQ ID NO: 18181 - DNA, 422 bp, Glycine max
  Clone ID: LIB3106-096-Q1-K1-G9
ctggaaaatactgtggtttgtggtggcacttcttctatggcaggttttgaagagagatttcagaaggaatctagcttaagttcatctgctgttcaacctacactcgttaagcctccagaatatatgccagaaaatttaaccatgtattctgcatgggtgggaggtgccatacttgccaaagtggttttccctcaaaatcagcatataactaaggcagactatgatgaaactggaccttccattgttcaccggaaatgcttctaacagtatctatccacatggtttcaacaactatttattcctctgcatctactggtactgtaacatgctgtaatagctgtatattccaagtgctagatgtcgtgtatatcttaaaagctgcagcgatctccattaatgcaatcttctcactctgcatgact

SEQ ID NO: 18182 - DNA, 455 bp, Glycine max
  Clone ID: LIB3106-096-Q1-K1-H1
ctcgtgcttcttcgcagttatcttcttcttttgttggttgagtgcatgcattttctctcacctgaaaatgtcttgctgcggaggagactgtggatgcggaagcgcctgcaagtgcggcaacggctgcggaggctgcaagatgtacccagacttgagctacaccgagtcaaccaccaccgataccttggtcatgggagtggcaccagttaaggctcaattcgagagtgctgaaatgggtgttcccgatgagaacgatggctgcaaatgtggagctaactgcacctgcaacccctgcacttgcaagtgaggagtttgagagctaaagcttcaagcagagatggcccttagaaataatgagtaaaactatatgtagtttcaaaacttcaaaattatgtagtatgtattatgttgcactctggtgttttgtgtctaaacaaacacccttagaataaagt

SEQ ID NO: 18183 - DNA, 250 bp, Glycine max
  Clone ID: LIB3106-096-Q1-K1-H10
ctgcgcacaaacacactaccagtctttcctacatgcaaaatccatcggatactcaccatcttcgacttaattacaaccttaccccttcttaaaaccttcctatactacaaactcttttctataagatcttccacacgaacacccaaatacatttctaacaatgaatctccacttagtcatgatcctaattctcaattactgacttaaaactatcaatcaaagactcaattatacctcataaattcaccta

SEQ ID NO: 18184 - DNA, 428 bp, Glycine max
  Clone ID: LIB3106-096-Q1-K1-H11
cccacttctcaaccaacaatggcaatggcaacccaagcctctctcttcaccccacgcctctccggtctcaaacccagcgaccgagccaccgcgccatggaaacaatcctccaccctctccttctccacctcgaagcccctcaagttctcgcgaacaatcagagcagcagccaccgaccagaccacagaggcaccggttgggttcaccccaccggaactggacccaaacaccccttccccgatcttcggaggcagcaccggcgggctcctgcgcaaggcccaagtggaggagttttatgtcatcacatgggactccccgaaagaacagatctttgaaatgcccactggcggcgctgccatcatgagggagggtcccaaccttctcaagttggcgaggaaggagcagtgcttggctctggggactaggct

SEQ ID NO: 18185 - DNA, 233 bp, Glycine max
  Clone ID: LIB3106-096-Q1-K1-H12
gcgttcacttttaatacggcaacttttttaacgtgtaaggctaattaataggtccgtgtaaccattagtttagataaaccaccgaaacgtcattactggaatctctcttaacatggacaagtatactagaaccacatggaaaaatagaggacggcccaatatctactataacaatcaataacgacacgtacattagcaataaaatcaacccaacggaactgaacacaaagacc

SEQ ID NO: 18186 - DNA, 445 bp, Glycine max
  Clone ID: LIB3106-096-Q1-K1-H4
agtttgctgtgagctataagctagtttatcgtgaggagaatatgaagttgtttgttttcttggttgctgcagtagttttggtagcatggccatgccatggagcaggctaccaaaggttccctctccgaatgaaaactggctatggtgagcgttcttcggaggtaaaatgcgcatgttttaggcttgctgtggaagcacacaacatccgagcctttaaaaccatttctgaagagagcgtttaaccaacacaggactacattaatggctaacaatttacatcagactctaaaacagttaaccaacaagctttcttttatgctagtgaacgcgaagtctatcacaacgacatatttatattcggcatagataacaccgtacatcataatatcccatactatgaaaaacatggatatggcgtggatgaatttaatgaaaccctatatga

SEQ ID NO: 18187 - DNA, 449 bp, Glycine max
  Clone ID: LIB3106-096-Q1-K1-H5
caaaaataaaaaggaaaaaagaaaaagtaaagacctctcaacacatggctgcttcaatcccatttacaggtatcaactcctcaagggtgcttcccattcctagagaaccacaccacccattttcccatttgctctcaaacatgtcaaagtttgcatctttgagaaccccttcttcttcttctgcttcttcttcttcttcttctgtgtcttgctctctcaccaaagacccttactctgttgtgccattggaggaacatagcaaaatggataatgggtcggttctgcttcagagacccgattcgtttgggaggtttggcaagtttggagggaagtatgtccctgagactctgatgcatgctctcactgagcttgaggctgctttttattccctctctgctgatgaagagtttcagaaagaactagctgggattctaaaagattatgttgga

SEQ ID NO: 18188 - DNA, 434 bp, Glycine max
  Clone ID: LIB3106-096-Q1-K1-G12
gcgcccacgcgtccgctaaaaacgtgtatttgaattcatccatccctaggcactccaggtgtcgatttcattccatgtgtaacctctctctctcccttcactacacttcattcattcattcaccattcagaggcagaggccagagagtgtgacgtgtgtgtgtgtctctctctttctctgctactgagtaattaaatgagagcaaaaatgacgctcaaaacagcggcggtagctgcggctatagtgtgcatttctgcctttagcatcactgcggtggctgaagatccatacaggttcttcaactggaatgttacatactgagacattcatccacttggtgatcgccaacagggaatacttatcaactgtcaattcccacgtccagacattcattctgttaccaacgacaacctcatcatcaatgtcttcaacag

SEQ ID NO: 18189 - DNA, 403 bp, Glycine max
  Clone ID: LIB3106-096-Q1-K1-H6
cccacgcgtccgcccacgcgtccgcccacgcgtccgcaggtgaattccttgtgctgttggatgtgtcagctgataataaggtactgcctacaacatatggtgaattgagacctacgcttggcaagcaccacataattagagcaactggtaaagatggaaaactgttcatttgcaaagctcaagctggagacaagaggtggttcaagggagcaagaagatttgtggagagtgcagcaagttctttcagtgttgcttaaaaatcttcaataatagctggttatatatatctgctatgcgtaaatctaccttaagtgctatctatgtttgaagttgtctaaaaaaaagactctgatgcatgctcacactgagcttgaagctgttttaaatcgcctctctgctgatg

SEQ ID NO: 18190 - DNA, 234 bp, Glycine max
  Clone ID: LIB3106-096-Q1-K1-H8
gcaagaactttctgaagttgctcatttaattcaattgctcgagaaactatcctctcatctcgagaagccatcacaagatgcattaccctttgcttctgaaatgaagattgttcaccatggtcaagggtgaattcatctcttgcaccctgaggatgttgggcatcgatagcatcaaggacttcttttaaaacttctaatgcatcactagcctttagaatcctagttctagatcgc

SEQ ID NO: 18191 - DNA, 421 bp, Glycine max
  Clone ID: LIB3106-096-Q1-K1-H9
cacaaacacactacactgcgtctctgttctgtgtgtgcgagaaatggcgatggcgatggcgcttcgcaggctatcatcttcaattgacaagcctctgcgccctctcttcaatgccggttccctctactacaagtcgactttgcctgatgaagctggttacgacacggagcgacccggagttacatggcctaagcagttgaatgctccacttgaggtcgatgatcctgagattgctgatattattgagcttgagaaagctaggcaatggaaggggctagaattgataccgtcagataatttcacctctgagtctgtgatgcaagcggttggatcggttatgaccaacaaatacagtgaggggtaccctggtgcaagatattatggcggaaatgagtatattgacatggctgaaacactgtgc

SEQ ID NO: 18192 - DNA, 391 bp, Glycine max
  Clone ID: LIB3106-096-Q1-K1-E4
cccacgcgtccgggcgaagatgttgtagaagttgttgtgagccctccttttgtgttccttcctggtgtaaaaagtttgctgctccctgatttccatgtctcggcccaaaattgttgggttcgcataggtggtgcttatactggagaggttagtgctgaaatgcttgttaatttgggaattccttgggttattattggtcactctgaacggacgcagcttttgaatgaatcaaatgagtttgtgggagatacagttgcctatgcactttaacaaggtctgaaagttatagcatgcattggcgaaactcttgaacagcgtgaaacttgtacaacaacggctgttggtgctgatcaaactaaaacaattgcagctaaaatatcaaattgggaca

SEQ ID NO: 18193 - DNA, 347 bp, Glycine max
  Clone ID: LIB3106-096-Q1-K1-E5
aacagacagactgatagcgagaagttgaagattatctatcggcagtggcgtcttctgacctgcccggtcacaatcctgggtggcgtatgctacgtcatcgccgccgtcaacgtgatctcttgcaagaatgatgcattcctgaggaccagaggagaggaactatgaaaatcagtctgctaccaagttggagaaatgtgacaacataagttcgcgtgttgatgtcatttaaaccctgatctatgagctcagtatactgttttgtaagatgcgctacagctagtgaaatatattgagttcatgaatgaaatctggactctggagcatgggccattagtttagaactaacc

SEQ ID NO: 18194 - DNA, 307 bp, Glycine max
  Clone ID: LIB3106-096-Q1-K1-E6
aacagacagactgatagcgagaagaagaagatggtctatcgcaagtggtgtctcctgaccggcccggtcaccagcctcggcggcgtagtctacgacatcgccgccgtcaacgttatcttcggcaagaatgatgcattcctcaaaccagaggagaggaactatgcaaattagtctgctactaagtaggagaaaagagacaacagaagctagcgtatcgatgtcgtttaaaccctgatctatgagctctagatactcgttcgcaagatccgctcacgctagttaatcagattgagttactgcatgaagt

SEQ ID NO: 18195 - DNA, 331 bp, Glycine max
  Clone ID: LIB3106-096-Q1-K1-E7
atcacgcgtagcgtcacgcatgcgaagagaatgggagatggcgtttccctagctgtgatttagactttgaattatctgcgagtcatgtgtaataatgtacaagaaatgtaacagatagatgttgcacttaattagaacatccttagctaacatgtcaaaaaacagattaaaatggctgctaattaacagagaagccactagtgtggctacaagatctaatatggaagatcccttgtctagagacaccgattcctgtctcataggctccggtgaagtaactcagacccaataccggaagcccatgatgtatttctgctgaaggtgctgcata

SEQ ID NO: 18196 - DNA, 353 bp, Glycine max
  Clone ID: LIB3106-096-Q1-K1-E8
cccacgcgtacggtagaagatgatgtcaaagtcgttgtgagccctactttcgcgtgccttcatttagtaaaaagtttgctgcgccctcatacacatgtctaggcccagaatagttgtgttcacaaacgtggtgcttatactggacaggtcagagctgaaatgctagttaattactgaatcactttggtcattattggtcactctgaactgagtcagcttatgaatgaatcatattagcttgttgaatataaagttgcctatgcacttcaacaaggtctgaacattatagcatgcattgaggaaactatggaacagcttgaacctgttacaacaactgatgttgatgctgagca

SEQ ID NO: 18197 - DNA, 124 bp, Glycine max
  Clone ID: LIB3106-096-Q1-K1-F1
tgacgcgccttgtagctgatcattaatcgctatgggagttagggtttcgcacatcgtgtcactgtcacttgctatggctttatttactgctactttggctctcgatcattccttttaaggtttt

SEQ ID NO: 18198 - DNA, 429 bp, Glycine max
  unsure at all n locations
  Clone ID: LIB3106-096-Q1-K1-F11
cccacgcgtccggccctatacaaccaaaccctaacacacacccatttgattcagtttccatggctagcctcaaggttgcatttttggctgcagtgctctgcatggttgtggtgagtgcacccatggcacatgcagctatcacgtgcgggcaggtgacgagtagcctggccaattgcatcggttacctccagaagggaggaacgccgtcgtcgggatgctgcaacggagtgaagagcctcaatgccgtcgccaagaccaccgccgaccgccagacggcgtgcaactgcctcaagtcggccgccagccaaatctccggcttcaacgccaacaacgccgnctcgctccccggcaaatgcggagtctccatcccctacaagatcagcaccttcaccaactgcgctaccatcaaggtttgaagagaaagtcatg

SEQ ID NO: 18199 - DNA, 434 bp, Glycine max
  Clone ID: LIB3106-096-Q1-K1-F12
cccacgcgtccggtcccaaagagctaacaagagattcaagaccggcatggctaatgaagaggaacagaaaaaccacctcttcggcatcaaagatctcggtcacaagactctccttcagagtgatgcactctatcagtatatacttgaaaccagtgtctatccaagagagcacgagtgcttgaaagagatacgcaagatgactgcaaaacacccactgaacatcatggcaacaccagcagacgaaggacaacttctgagcatgcttgttaagctcacgaattcaaagaacgccttggaaattggtgtattcactggttactctctgctctccactgccctggctcttccccctgatggaaagatcttggctttggatgtgaatcgcgaatactatgagttaggattgccaataattcaaaaagctggagtggctc

SEQ ID NO: 18200 - DNA, 161 bp, Glycine max
  Clone ID: LIB3106-096-Q1-K1-F2
tccatgcatcacgttggaccctgcgtcacatttttgcttaccatttaatgtcatctcttcttgcaccgggtacctcatcaccggcaccgtgacctatccgtcatctactgattccttatttgctccttactcacgcacacgggattgtggaccttacttca

SEQ ID NO: 18201 - DNA, 454 bp, Glycine max
  Clone ID: LIB3106-096-Q1-K1-F3
gcgctctagcacgtttgaggctgcgtcttatcattggataccatttgttgtcatctctgattcgaccgtgcacgtcatcaccggcgccgccaccgcaccgccatctactgattcgttctttgctccttcctcaggaaaatgggattgtggaccttacttgaggggttcctgcttcttgcaaacgcactagcaatactaaatgaggaccgctttctcacacctagaggatggggcttatcagatttttcagctggccatacaaaatcttttaaaggccagcttataggtctcatttatgcaactcattacctaagatttcctattatacttctcaactctgtcttcattatcgtgaagttagtttctggatgatgcctgaaaaggttccaagagttatcatcaggttatttcaatttgttataaagcacgaaaatttgacagttgttatctacca

SEQ ID NO: 18202 - DNA, 443 bp, Glycine max
  Clone ID: LIB3106-096-Q1-K1-F4
cccacgcgtccgaaaggacccagttttacatttttttttgttcctgagttccaatggctcttcaggctgcttccttggtttctgcttctttttctattgctaaagagggaaagtctggtgtatctctcagggacaccacaatgtttggtgtttcattgtcggatactctcaaatctgacttcagctctccctcatcgacttgcaaaagggaattccaacaaaaatttggccctttgagggttcagtcagtggcaacaacaactccaggagtcaccaaggcttcaccagaaggcaagaaaactttgaggaaaggcagtgttattatcactggggcttcctctggattaggcctggccactgctaaggctttggctgagacaggaaagtggcatgtgataatggcctgcccggatttcctcaaagccgaaagggctgcgaaatct

SEQ ID NO: 18203 - DNA, 418 bp, Glycine max
  Clone ID: LIB3106-096-Q1-K1-F5
cccacgcgtacggccccatacagctatacccctaacacacaaccgtactgactaatgcagacgaggagacaaaccacctcgtccgcgtcaaacatctccttcacaagactctccttcagcaccatgcactctatcagcacatacttgaaaccagtgtacatccaacatagcacgagtgctcgaaagacatccgcatgatgactcgacaacacccactgaacatcacggcatcaccagcctaccaaccacaacttataagcatgcttgccaagctgacgaattcaaagaacgccttgcaaactgctgccttaactgcgtactctatgctctccactgcccttagttttccctctgatgcaaagatctcggctcttaatgagacatctcgaatactatcagctctgattgccaattattt

SEQ ID NO: 18204 - DNA, 450 bp, Glycine max
  Clone ID: LIB3106-096-Q1-K1-F7
ctttctctctcgctcgcaaacgcaaataataaaaaacaaggttttagccatggcatcgaagcggatcttgaaggaactcaaggatctccaaaaggatcctcctacctcatgcagcgccggtcctgttgctgaagacatgtttcactggcaagcaacaattatgggtcctccagacagtccttatgctggaggtgttttcctagtcactattcatttccctccagattatccctttaagccacccaaggttgcattcaggacgaaggtatttcacccaaatataaatagcaatggaagcatttgccttgacatattgaaggagcagtggagccctgcgctaactatttcaaaggtgttgctctcaatttgttccctgttgacggaccctaatcctgacgatcctttggtccctgaaattgcccacatgtacaagacagacaggaacaagta

SEQ ID NO: 18205 - DNA, 309 bp, Glycine max
  Clone ID: LIB3106-096-Q1-K1-F8
ctcacgcgttcgctcacacacgctcataggcttaccctaggattatcccatgccttcgttccggtctttgatggaccggatctatctgaaaacgtttcatacgacgcttcataacggtcccgagttaaaagtgttaactgtacataccaccattaacttgtgcagatgctctttatgcttaaatacttgcccaagctgaaatccataactgtcaagtttttgctttgaagcatcctaagttgcctttccgtccaaagtattgtaaatcaatataacttgcattaggactcttagcattgatacatggac

SEQ ID NO: 18206 - DNA, 428 bp, Glycine max
  Clone ID: LIB3106-096-Q1-K1-F9
gcgcccacgcgtccgcccacgcgtccttccactcgtccgacaaaattgagtaatcacggtgccgaccacggttgctgtctccgtacctcaaaatcaaaacactaaccatggagtcgaatcccccaagaagaacaaaattcaggtttctaacaccaagaaaccccttttcttttacgtcaatcttgccaagaggtacatacaacagcgcaatgaggttgtgctttctgctcttggaatgggtataaccacagttgttacaattgcggagattttgaagaacaatggacttgctattgagaagaaagtttcgacatcttcagttacaatgaaagatgagaccaaaggtcgcctggttcaaaaggctaagattgaaattgttctggagaaaactgagaagtttgacagtctgacggcttgtgcaaacactg

SEQ ID NO: 18207 - DNA, 421 bp, Glycine max
  unsure at all n locations
  Clone ID: LIB3106-096-Q1-K1-E3
cccacgcgtccgagcgaatccctctctctatctctcacacacactttctctctctctctctctgacccagatcttgtagcaatggcgagcgctcccactccacgcgaagagttcgtgtacatggcgaagctggcggagcaggccgagcgctacgaggagatggtggagttcatggagaaggtctccgcctccgccgagagcgaggagctgaccgtggaggagcgtaacctcctctccgtcgcctacaagaacgtgatcggcgctcgccgcgcctcctggcgcatcatctcctcaatcgagcagaaggaggagagccgcggcaacgaggaccacgtcgccgtcatccgcgactaccgctccaagatcgaggccgagctctncaacatctgcgacggaatcctcaaactcctcgacacgcgcc

SEQ ID NO: 18208 - DNA, 423 bp, Glycine max
  Clone ID: LIB3106-096-Q1-K1-G1
gcgacacttgtcatccttgacattagaggaagttaacctggtgacaagaggaactttgaggacggttatgatgccaatgtgttcatgaaaagcatggatggagtggtcagagtggtaaaggatcttccttctcatgtaacaaaacatagaattgctgcggtcaaggttcccaatcgggttacagaagaatacatagctcaacatgttgaacctatttatagatcaaaggggagtgtaaggctcgctacttattttccttcaataaacatgaaaaatgcaagggataaaagtgatgctgattcttgtgcatgcttagcaatggatggaagcttagagttgcagcaagaaacgcacgaccttgttgactcaatgggtgaaagacttaagactttaagcccaaagtcagatgggcaatttatagct

SEQ ID NO: 18209 - DNA, 425 bp, Glycine max
  Clone ID: LIB3106-096-Q1-K1-G11
aatttttagtggctggggctattgctctcaagggccttggagggattcttttcgtgctcagcagctcttttggagctttccttttgcttttgcatcaagtgatcactactccaatactgtatgatttctacaattatcacagcgaggacaaagaatttatccaacttttcatcaaatttactcagaatatggctctcttcggggcattgttgtttttcattgggatgaaaaactctattcctagaaggcaacccaagaagaaggctgccaaaacaaaaacatattagttgaaaggacttctcggattgttcctggttgctcattatacccattttccatttctccaggattttggctttggtctctgtctggttcagaacgaatgtaccttctgtccgatggattatgtataatttataattatt

SEQ ID NO: 18210 - DNA, 405 bp, Glycine max
  Clone ID: LIB3106-096-Q1-K1-C6
cccacgcgttcgatgctttggaacttaatggcgttaccatacatgaaacagctaaatgaggcccttgcccagagaagcctattgaaatatatgaatttgagagctgtccattttgccgaatggttagagaaattgttgccattttggatctcgatgttcatatctatccttgtccaagaaatggcccaaatttacgtcaaaaggttctagacgggtggcaaactgcagtttccctacatggttgacccaaacacaggcgcttgaatgtatgaatcagatgacataattaggtattcgggagacaaatatggcgatggaaacgttcctttatcgttatcacttggcattttaacgacactaacggctggtcttggtatgcttagtcttatttcaaaggggactact

SEQ ID NO: 18211 - DNA, 348 bp, Glycine max
  Clone ID: LIB3106-096-Q1-K1-C7
cccacgcgtccgcccacgcgtccgttggaaacaacatgggaagcttgcatggaaaggacttgtgaagccagctgagattctagcgcgtagagggtttaaagtatcaccataccttcacaagcagatggaagaaacagagtcagatatattggaagacaagggtcttcgtagcatatttgccccatatggaaaactcttaaagataggtggcatttgctacaatatgaaactagccaagactctcagaacaatatcagagtctggaccaaaagccttatatgaaagattgattggtcttaatttagttaaagatgtccagaatgctggagggatatcgagcatgaaaga

SEQ ID NO: 18212 - DNA, 269 bp, Glycine max
  Clone ID: LIB3106-096-Q1-K1-C8
accaagcgtccgatgcggcgataggataaggcttaacgtggagtgtaagactttggctaccaggaactcgttagacatcggctaagcactcaagctgttctagagccattcgtgatacaatctaatcgacatgtaacttggactgatcctatttaaaaactgtggcttacttactatagtaccaccatgaaaatgaattgaattgaccgctaatactcgttcattgtttacggcataacggataaaccattttggcgaggaatctacac

SEQ ID NO: 18213 - DNA, 390 bp, Glycine max
  Clone ID: LIB3106-096-Q1-K1-C9
ttttcttctcgcagagcgaaatcttaatcccacacaaatggcatgctcagccacgtctgcgtctctcttctccgcaaaccccacacctctcttctctcccaaatcctccctctccctccctaacaactctctccacctcaaccctcttcccacgcgcccttctctcttcctcacgcgcccctcgcacactcgccgctccttcgtcgtcaaagcctccttcagcgagcttccgctagttggaaacaccgcaccggatttcgaagcagaggctgtgtttgaccaggagtttatcaacgtgaaactatctgattacattgggaagaaatatgttgtgctcttcttctacccgttggacttcacttttgtttgtcccacagaaatcactgcttt

SEQ ID NO: 18214 - DNA, 469 bp, Glycine max
  Clone ID: LIB3106-096-Q1-K1-D1
aaaaaaaataaaaaaaaaaaaaaaaaaaaaataatataaattcaaataaaaaataatataaaattaaaaaatgatacaaaaaaatatgtgaaatgaaaaaaaaataaaataataatatattatatttttattttttttattatttatattttctatttatctattattattatttatattatatatgctacttttttttatatttcattttttatatctctattttttttttaatatatttttttattgttttattctttttatattattttatttttatttattattcattttatttttataatctttttttttaaatatttaattttatttttatatttttttttattttattatattttatttaatttaataatcttatcttttattatattattttaatttttttaatatttctttatttttattttttttttttttatatatatttttttattatatttttttt

SEQ ID NO: 18215 - DNA, 430 bp, Glycine max
  Clone ID: LIB3106-096-Q1-K1-D10
cccacgcgtacgtccacgcgtccttccacgcgtccgcaactattatgtaatctagtttacgtttcaatcatttcttcgtattccttcaacacccatcagattaatggcaaaagctatcctcttgagcaacaaatggtacggatatgagcaattctgggtcacacgttcttaccccacaatacagaaattcagccacgggaaaatggatctcaaggtgaatgcagcaacttccttgaattcaaatgccaaacagaaggcaaatttgtttgctgaaaaaaaggagagaatccggctgccaacatataatgatgatcttggaggcaagaaatatcacatcagtgaatttctgagccaacctagcggaattgcagccgtgttgaatacgaaggccttgcaatcatttgaatctcttgatgctaacacatacagg

SEQ ID NO: 18216 - DNA, 404 bp, Glycine max
  Clone ID: LIB3106-096-Q1-K1-D11
attgtttgttgttgtaactcgttcttcttcttttgttgttctgtgtttgtgtgtgttttttctctcacctgaaaatgtcttgctgcggtggtaactgtggttgcggaagctcctgcaagtgcggcaacggctgctgaggctgcaagatgtacccagacttgagctacactgagtcaaccaccaccgagaccttggtcatgggagtggcacctgttaaggctcaatttgaaggtgctgaaatgggtgtgcccgctgagaacgatggctgcaaatgtggaccaaactgctccttgaacccctgcacttgcaagtgaggtgttgggaaaacaagcttcaagcaaaaatagcccttaattaagaataatgattaactattaatgtgtaactaaaaacttatgtattat

SEQ ID NO: 18217 - DNA, 433 bp, Glycine max
  Clone ID: LIB3106-096-Q1-K1-D12
gcgcccacgcgtccgcttcatccatattcatggccaccgtcacttctgcagccgtttgtattccctcattcactggcctcaaggcaagcgcaggcaaagtgagtgccgcagttaaagtctcagctccccaagccacaaggttgggcatcaaggcttcgctgaaagacgttggagtcgctgttgtggccactgccgcgagtgcagtgctggctagcaacgccatggccattgaagtgttgctgggtggtgatgacgggtctctggctttcgttcccaacaatttctccgtggcctctggggagaagatcgtgttcaagaacaacgcaggtttcccccacaacgttgtgttcgacgaggacgagattcctagcggcgtggatgcagggaaaatctccatgagcgatgaagaccttctcaatgcgcctggtgagac

SEQ ID NO: 18218 - DNA, 64 bp, Glycine max
  Clone ID: LIB3106-096-Q1-K1-D2
ctccatcttcaattcccgaatctacccactcatccaacatatcgttcaaacattctatacatat

SEQ ID NO: 18219 - DNA, 197 bp, Glycine max
  Clone ID: LIB3106-096-Q1-K1-D3
agcacacataagcagaagcagaggcctgaaggtgctcaacaggactgagttgatcttccatagaacccgactaggtcactaagagggaactatacatcgagaatacaacacattgaccatgagcccaagagagtcgaaccaggcgagcttgactacgataaggacaactttatgcgacaactttgaacgtccgatcg

SEQ ID NO: 18220 - DNA, 72 bp, Glycine max
  Clone ID: LIB3106-096-Q1-K1-D4
tccatccacgcgtccgatcaggcgtatcatccttcttaatttgtacattttacatttctttaaactacaata

SEQ ID NO: 18221 - DNA, 408 bp, Glycine max
  Clone ID: LIB3106-096-Q1-K1-D5
cccacgcgtccgcttcatccatagacatggccaccgtcacttctgcagccgttgcgtgttccctgattcactggcctcaaggcaagcgcaggcaaagtgagtgccgcagttaaagtctcagctccccaagccacaaggttgggcatcaaggcttcgctgaaagacgttggagtcgctgttgtggccactgccgcgagtgcagtgctggctagcaacgccatggccattgaagtgttgctgcgtggtgatgacgggtctctggctttcgttcccaacaatttctccgtggcctctggggagaagatcgtgttcaagaacaacgcatgtttcccccacaacgttgggttcgactaggaccagattcctagcggcgttgattcagggaaaatcttcatgagcgattaatac

SEQ ID NO: 18222 - DNA, 109 bp, Glycine max
  Clone ID: LIB3106-096-Q1-K1-D6
atcaagcattggatccatcatgatttataggctgcaccatgcttgaaacaaaagctcttccctgttaacaagggttttaagatcatagatatgaatttgctaccattgc

SEQ ID NO: 18223 - DNA, 246 bp, Glycine max
  Clone ID: LIB3106-096-Q1-K1-D7
ctcaagcattccattcttgtggagttttgggtgtgtttatacctgagactagtgctggatctggttatccagtgactgatgatcatatatattataagaggcactatatctttatatttacaatggtaccgcattgttagcatggtgtaaagttatgtatatagatatcaagacatctgacgatgtacagtcatgacgatgtgtacaactgcaacgagaaaagtactctgactttatgcttaaacg

SEQ ID NO: 18224 - DNA, 396 bp, Glycine max
  Clone ID: LIB3106-096-Q1-K1-C5
ccttgtagtaattctcttcctccttttgaagctatccctctcttgaaaaatctagaggtcgtcgtacttgatctacggttcccctttaatgaccggatcctgatggatcttgaccagatctacacgccgatggtgggtttggcctggtctttcatagatctgatgcatggaagctcagatctactgtacagaggtttgcgattcatatactggagataatcgatgagaagaacgcagatccagccgcttccgcttgctcgatcgctacagacgcttgtatcggattattcatgattgattcataagcagcatgtctttcttcggctatagttcgtgcagatctcggatgttgtaaaattagtgtatgatgtgaagctatgggcttgaaaatgtgga

SEQ ID NO: 18225 - DNA, 413 bp, Glycine max
  unsure at all n locations
  Clone ID: LIB3106-096-Q1-K1-D9
gtacgcagaatatgctactttctttgacactgtggtgtttctgagctgggtaaggtttagtccttctcgcgccaacccagttgcgagcttggaggagaagatccttgccgtggccaacgagtataaggccgtgaaggcctttctggtcgcttacagcaccgttgctgacgattgggctaatttttcgccacctatcttctttatcactctccatggccttctgggtaactctgcggttaagggagcgtccattaaggtcattagtgacgccaccgnctgctttccgccaagtggatcccttgaattttaattgttggctgcctctaattaatgacgtatgacatgaanggtgaacacgtatcttacaagtgttatgtgatatgtatgatgtgtgaatctttgaaataatatct

SEQ ID NO: 18226 - DNA, 419 bp, Glycine max
  Clone ID: LIB3106-096-Q1-K1-E11
tgaagattgagagttagggtttaagcgagatcagagaagaaggcatcatgtttgcgggaatgttcatgcgcaagcctgacaaagctgcagcactgaagcagctgaaatctcatgcggccatgttcgggacatgggttgttgttattcgagtcaccccttacgttcttcattttctctgcgccgagaaagaggaacttaagctcgagctttagcttctcaatcttccccgccagtggatcttcaggagtaggatgtgtccttgggtttgggacaataatggagtaatgtttttatgtaaccttgaaattgtgaggccatgatgatatattgagtttaatcatatttccttttgcatttggaatataaatgggtttggactagttgtgaaaaggataacaacttcaatagtcaattataga

SEQ ID NO: 18227 - DNA, 430 bp, Glycine max
  Clone ID: LIB3106-096-Q1-K1-E12
cccacgcgtccggctagatagttttggcttattatatacccccataagccccataggccataccactctcaattctgctctcacatttcctatatatatttgccactctttctgtgagcttctcaacagaaagacacaatgggcaaagaaagtagtacttgtgttcttctatcccttctcattctttcactctttgtggctgaaatatatggaaatagacaagttcaagctcttaacaaactgcacaagtccaccaagttcagaggaaattcacaaattgataggagtgagtttgaggtagaggagcttgcttatgatggcattgttcactctcaagagggtctcaaagagaaagatagaattgagagtcttccaggacaaccccctgtgagtttttctcactatggagggtatgtcactgtggataaag

SEQ ID NO: 18228 - DNA, 53 bp, Glycine max
  Clone ID: LIB3106-096-Q1-K1-E2
ggcacgaccatccgatcaaacatcacttttactttttaagattcacactgttt

SEQ ID NO: 18229 - DNA, 426 bp, Glycine max
  Clone ID: LIB3106-096-Q1-K1-B12
cccacgcgtccggggaaggcccgtgagttttgcgcgtgcgagagagacagtggggagaaaggaaagggatgacgctgggtctgatcaatgcgaatcctgtggttcacgccaagaaagagcgaatcgctcgttctgatgatcctcacgccgatgacgccgttgatcctctcgacatctatgatttcgtgagggatattcgggatcccgaacatccttattccctggaacagctcagtgttctctccgaggaatctatctccgttgacgacaaattaggccgaattctgataacttttacgccgaccgtacagcactgtagcatggccacggttattggactttgtctcagagttaaactgaagcactacttccctcctcattacaaagtggacatcaaggtttctcctggatctcatgccaacgaag

SEQ ID NO: 18230 - DNA, 327 bp, Glycine max
  Clone ID: LIB3106-096-Q1-K1-B2
cccacgcgtccgcccacgcgtccgttcttgtcttcctcgccactgttcccctgtctccataacagaccaacactcaacctcactcactcgctcattcgctctcttcacaatttccagatctgaaatcaaaatcgaaatcgaaaccgaagagagagaaaacgtgaaaccgagagagagagagagagagatgagggaaccatcgtcggtgggattcgaaggcaacggcgtcgcttcttcgccgccgcaagctctcatcgagagactgaaagactacgggcaagaagacgttttcgccctctggtacgagctcttccccgaggaacgcga

SEQ ID NO: 18231 - DNA, 240 bp, Glycine max
  Clone ID: LIB3106-096-Q1-K1-B3
tgatgatggatcagccaccccatttgctcaacaacttgtgaaagaggtgctcatgtccttcagaaactccctcttgttcttgcacaacaaccccacttctgaatcacatcatgtctccaatgttcaagtatgggactctcccaagtctgaggactctcatgagagcaattgcaaaagctccaccattaaggatccaagatggtgctacaagagaagaagaactgaacacacatgtgaaag

SEQ ID NO: 18232 - DNA, 377 bp, Glycine max
  Clone ID: LIB3106-096-Q1-K1-B4
ggagacgaagaagtgaagagaagagaagagaatggatttggatctgaaaagagaatatttctggaggaatggattcatacaagatcatgtccatagaggattgtagcacagccagagagtaattggagttatatctttgttgaactttcagtatctcatactcattgatcagatctttgtctttgcatataattgttcaagattgtatttccatttgtatacgaatcctatttgcaatattttatttattgttctctcatatttgtagttcatgatatttattatacttggttacttgttatgtgttcttatttttttttattgtaattctagtttatttttatttattttttttatttacatttttatctaatttt

SEQ ID NO: 18233 - DNA, 435 bp, Glycine max
  Clone ID: LIB3106-096-Q1-K1-B5
gccatggccacctccaacttctctattgttctctccgtctccctagccttcttttgggtgctacttaccaaggcacactcgaccgataccgtttctttcaccttcaacaagttcaacccagtccaaccaaacattatgctccaaaaagatgctagtatttcatcctctggggtgttacaactcaccaaagttggcagcaacggcgtgcccacctcgggatctctcggtcgtgccctttacgctgccccaatccatatttgggacagcgaaaccggcaaggtagccagctgggctacatcctttaaattcaacattttcgcactcaacaaatcaaactcatctgacgggcttgccttcttcatggcacccgtcgggtctcagtcccaattcgacgatggatttcttggtctttttaacagtcccttaaaggacaag

SEQ ID NO: 18234 - DNA, 450 bp, Glycine max
  Clone ID: LIB3106-096-Q1-K1-B6
cactctcccacttcaaacttcatgtctccctcttccctccacgcgctcctcatcattctcttcctaggttccgcacacgcgctcaaggtccccttccgagtcaacgatgttctccccgttctcccccacggaatctcctggccgctcctcaacaacctccacagcgccgtcgacttgctcccttccttcgtcgccgccgtccctcccgataacgattccgttcagtggagagccgcatgcttttacgataatcaagcctccctcgaattcaccgtccccggccacgacgacgccgatggcttgggcggtgccgtgctccgtctcaagacagaagctgcacacagttggacctgcatggatctgtatgtatttgcaacgccttataggattacatgggattactatgtctctgcgcgagaacatactttgaagtttgattcatgggaagat

SEQ ID NO: 18235 - DNA, 409 bp, Glycine max
  Clone ID: LIB3106-096-Q1-K1-B7
ttgagaactaagaagaaggaaatggcttcctcaatgatctactccccagctgttacgaccgtcaaccgtgccggtgccggcatggttgctccattcaccggcctcaaatccatggctggcttccccacgaggaagaccaacaatgacattacctgcattgatagcaacggtggaagagtacaatgcatgcacgtgtggccaccaattggcaacaagaacttcgagactctatcctacttgccagaccttgatgatgcctaattggcataggacgtcgaataccttctaatgaaaggatggattccctgcttggaattcgagttggagcacggattcgtgtaccgtgagcacaacatgtcacctggatactatgatggacgctactggaccacgtggaagctgcctatgt

SEQ ID NO: 18236 - DNA, 455 bp, Glycine max
  Clone ID: LIB3106-096-Q1-K1-B8
cagtttcaccgcacgaatatcttgttgtttggagcgatccgagaaaaactctgtaaacatgttggtttaccaggacctccttacaggtgatgagcttctctctgactccttccgttacaaggaaattgagaatggaatgctgtgggaagttgaggggaagtgggttgttaaaggagcagttgatgtagacattggtgcaaacccttctgctgagggtggaggagaagatgagggagttgatgatgcagctgttaaggttgttgacattgttgacacattcagacttcaggagcaacccgcattcgataagaagcagtttgttaccttcatgaagaggtttatcaagaatttgactcccaagctcgatgcagagcaacaggagttgtttaagaagcacatcgagggagcaactaaatacctgctctctaagattaagatttccaattttttgttgg

SEQ ID NO: 18237 - DNA, 432 bp, Glycine max
  Clone ID: LIB3106-096-Q1-K1-B9
gcgattggttttgccatttcaaagcttttaaagaacattcaagtactttcaagttccgttgtggataagcaagaccaatacactgtggaaggagtgcagaatcttggagacaaagcagtgatgtgtcataggctaaatttcagaactgcagtattttactgccatgaagtccgtgaaacaacagctttcatggttccattggtggctggtgatggaaccaaaactcaggcacttgctatttgccactcaaatacttctggaatgaatcatcaaatgcttcatcaacttatgggagttgatcctggaactaaccctgtttgccatttccttggaagcaaggccattttatgggtacccaatttatctgtggacactgcctatcagaccaacattgttgcttaattagtccatgcatcttgagcaccatgagaa

SEQ ID NO: 18238 - DNA, 372 bp, Glycine max
  Clone ID: LIB3106-096-Q1-K1-C1
cccacgcgtccggcgcctcaaagagacttgatgtgacagaattctctgggctaagatccactggatgtgtgacatatgctaacggtgctagagaatcttccttttttgatcttgtagcttcccaactcactcccaagaccaatggatcatcaactcctgtgaggggagagacagtggccaagttgaaggtggcaatcaatggtttcggacgcattggtagaaacttccttcgctgctggcacggccgaaaagactcaccccttgacgtcgttgatgtcaacgacagtggtggtgtcaagaatgctttgcacctgcttaaatatgattccatgctgggaacttttaaagcagatgtgaaaatactggacaatt

SEQ ID NO: 18239 - DNA, 402 bp, Glycine max
  Clone ID: LIB3106-096-Q1-K1-C10
cccacgcgtccgaaaaaaaaaaatttaaaaaaaaaaaaaaaaaaaaaaaaaacaagaaaaataaaaagatcccaaccttaaaatacgacatccattctaccatcgcaaatattctatgtgtcacttaactacaatttactctacatccatttacatcgccgtcactttacaacccctagacttacaaaactcaatcgcctctcatcatattcccctttcaccacatgccattttacccaactggcatactcccaacgaccttcccaacaattgcccttcctaaatgttgaacagtacgcaccctgaatcggaccctccatttcgcggcacattaagctcacccgctgttttacctacacacttagcaaccccttaactcaccatccttttactttcttctct

SEQ ID NO: 18240 - DNA, 390 bp, Glycine max
  Clone ID: LIB3106-096-Q1-K1-C11
cccactcgtcctaaaaaaaaatatatataatacacaaaaaaaaaaactcaaacacgaaaaattaaaaaattctccacaaaccccacacctctcttctatcccaaatcctatctatccctccctaacaactctatccacctcaaccctctatccactcgcccttctctctacctcacgctcccctcacacactcgcctctccttagtcttcaaagcctccttcatctagcttccactacttgtaaacacctcaccagatttctaatcacaagctgcctttgaccaggattttatcaacgtctaactatctgattacattctcaaaaaatttgtttagctcttcttctacccgtttgacttcactttttgttgtcccacataaatcacttct

SEQ ID NO: 18241 - DNA, 286 bp, Glycine max
  Clone ID: LIB3106-096-Q1-K1-C12
tcttgctcccactcatcctaaaacaaaaaactaaacattaacaaaaaaacaaactaaaacaaaaaaaaatttaaaaataaacaaaaacccaacacatctttaatataacaaatacatacataaacctacttaacaactctctacacctcaaccaactatcaacacaccctatattacacctcacactacccactcacactctcctttaccaacaaatacaatcctacacaaacaatctctctctacatttatacacatcaccatatttctaaacaatatccacatt

SEQ ID NO: 18242 - DNA, 453 bp, Glycine max
  Clone ID: LIB3106-096-Q1-K1-C2
cccacgcgtccgctctgtatcatttcatttcgataatcatccatagttactgaagaaaatggcgaccatctccgctgctatcacaaccccatcgatcacccgcgcatgtctagtgcaaaaacgttctcttgggttctcatctcccgttcttggtttgccagcaatgggtaacgtgggaagagtgagttgctccatggaggaaaagccttcttctgtgaaggaaagcagctcaagcatgttggggatgggggcatctttgatggcagcggccagcgccgcagccatgtcaggcccagccatggccttggtggatgagagacttagcactgaaggaaccgggctacccttcggcctcagcaacaaccttctcggttggatcctgttcggcgtcttcggactcatctgggctctctattttgtctacacttcctctcttgaagaggatgaagagtc

SEQ ID NO: 18243 - DNA, 412 bp, Glycine max
  Clone ID: LIB3106-096-Q1-K1-B10
gtcatggtgtaccctcagggcttgttgcacttccagatcaacgatggagagtctgaggctttggcttttgtgagcttcagcagtgctaaccctggcctccagattctggacttttctttgttcaagagtgatttccccactgagcttatcacgcaaaccactttcattgatgctgcagttgtcaagaagctcaagggtgttcttggagggtcaggttaattaaatataattaacgcgtgttgatgtgtttttaattaaacggagttgttcattcaaaacacaagagtctagagtgtgttgtgttgtgtcatttttggtaaaatttgttggtttggttttgtactggtttggcattagcagcatgcatgtaatttgtaaaagtatgaaggtatgggtttcttcttcgatcttt

SEQ ID NO: 18244 - DNA, 431 bp, Glycine max
  Clone ID: LIB3106-096-Q1-K1-C3
agcgaacacacacattgaaacccaacatcaagaatgaagaagatgattctaaccctcttcttcgatatcagtctatctctcctctgcctctgccacgcctccgtggtggatttctgcgtagcagactacacaggccccaatggccccgcatggtactcatgcaagagcccagcaaaggtcacggtggacgacttcgtatacttcggccttggcaccgtcggctacaccttaaacatcatcaaagccgtggtgacgccggcgttcgacgcgcaattccccggcgtcaacgggcttggaatctccaatgcacgcctagacctagcagccggtggagtcatccctcttcacacgcaccctggtgcctcagagctgctggtggctgtgcacggaacaatctgcaccggctgtcttgcttcggacaacactgtgta

SEQ ID NO: 18245 - DNA, 59 bp, Glycine max
  Clone ID: LIB3106-096-Q1-K1-C4
gataactagaaacagtgtgatgaaaatgaacgtccttgttttcttcgttgctacaattt

SEQ ID NO: 18246 - DNA, 354 bp, Glycine max
  unsure at all n locations
  Clone ID: LIB3106-095-Q1-K1-H6
cacgtgtatatgctgaagaaaatggtttgtttttcatggagacctctgccaaaactgcgtccggcgtgaatgatatattctatgaaatagccaagaggttaccaagggctcagccagctcagaacccagcaggaatggttcttgttgacagacccgccgaaggaactagggctgcatcatgttgttcataagtatttgagctgtatttgcacccnccaatccttnttaataatcatgttttctttgggtggatggactacacacttgattgcactgtattgggagctccaacaagtggtatgggctgcaatttacaaaacacaacaacttgatggtgcaaaatatatcctttgg

SEQ ID NO: 18247 - DNA, 425 bp, Glycine max
  unsure at all n locations
  Clone ID: LIB3106-095-Q1-K1-H8
gtcgaagcgaggtcgcggaggatcgtgtttaaacaagttccgcatgtcgctgggtctggcggtggcggcgacggtgaactgcgccnacaacaccggcgcgaagaacctctacatcatatcagtgaaggggatcaagggtaggctgaaccggttgccgtcagcttgcgtcggagacatggttatggccaccgtcaagaagggaaagcccgatctccgtaagaaggtgctgcccgccgtcatcgtccgccagcgcaagccttggcgccgaaaggacggtgtttacatgtacttcgaagataatgctggtgttatcgtgaatcccaagggtgaaatgaaaggttctgctatcactggtccaattgggaaggagtgtgctgatctgtggcccaggattgcaagtgctgccaatgctattgtttaagcta

SEQ ID NO: 18248 - DNA, 427 bp, Glycine max
  Clone ID: LIB3106-095-Q1-K1-H9
gcttaatctctctcattccccatttcctcacctccttcaaccgctgctaaattctaggggtccgaaatggacgctggcggaaagatcaagaagggcgccggaggtagaaagggcggcggcccaaagaagaagccggtttcaaggtccgtcaaagccggtctccaattccccgtcggaagaattggccgttatttgaagaaaggaaggtacgctcagcgtgtcggtaccggtgctcccgtatacttggctgcagttctcgaatacctagctgccgaggtgcttgagttggctgggaatgccgcacgtgacaacaagaagaacaggattattccaagacacgtgcttttggcagtgaggaacgatgaagagttggggaaattgcttgctggagtgacaattgcacatggtggcgtgcttccaaacatca

SEQ ID NO: 18249 - DNA, 423 bp, Glycine max
  Clone ID: LIB3106-096-Q1-K1-A10
cacactttgtactctccgtccttccttcttcgatccagatctctctccttctccgtgaaatggcttcccttctgcaatgttccatgcccctcgtctctctttccaatcgagctctggtacccggtaccaggatctccaacccaagttcagtttccctttcaattaagggaagaagtttcccatccgttacattgcagcccagaaggcgtcggtttcagcttagatgtgcggcaaaaccagagacagtgaagaaggtgtgtgacatagtcaagaagcaattggcactgccagatgaatcagctgttactggagagtctaaatttgctgcacttggagctgattctcttgacacggttgagattgtgatgggacttgaggaggaatttggtattaccgtggaagaagaaagtgcccagagtatca

SEQ ID NO: 18250 - DNA, 428 bp, Glycine max
  Clone ID: LIB3106-096-Q1-K1-A11
cccacgcgtccgctcaatgccctttcgaattcactcttgaagcctgaaaatcgggaagctatattttcactccaacggcatagaagtggtgaaaaatattgttgttttgagctctactagaagctcttactcaaatggatgacccttttgcatgttatattttctctcatgccagtgttttaaatttaagctatgccaactattactgggatcagcggagccaggtataaagatgtttcgaatctgaatcaaaatatcttgagatcagaaaaaaagactttactaagcttattttaagttggcaaatatgactacgctttattcaggtatatttcagagttctcttttgaaaacaaaacattcatagtgaaatcaggaaatactaagatgaatagattatgtaaaagtaaattggctcaatttcttat

SEQ ID NO: 18251 - DNA, 425 bp, Glycine max
  Clone ID: LIB3106-096-Q1-K1-A12
attaaacattcagcctgtgcgttttggaagcagagaccggattacttagagatggcccgtacaaagcaaactgctcggaagtcaactgcaggaacagctcccaagaagcagcttgcatcctaagctgcacgtaagtctgcaccagcaactgctggagtgaaaaagcctcatcgttatggatcttgaactagtgctactcgtgagactatgaaataccagaatagcactgagctcctaatcacgaagcttgctttacagaggttggttcgagaatattgccactatttcaagactgatctgcggtaacagagccatgctgagctcgcattgcaagaggctgatgaggcatgacccgtatgagctcttgaggacactaactcgtgtgccattcacgccaagcgcgtgactattatgcccaaggatat

SEQ ID NO: 18252 - DNA, 337 bp, Glycine max
  Clone ID: LIB3106-096-Q1-K1-A2
tcgcaattctctgtgaactttctagaatctcgatcttcctttcttctctcagattccccctttgcctgcttcttcaaccccttttctttctctctctgtctttcgcactttcattctctcttaaaaatctaaatcccttttgggcttcatccttgcctctgacccaagtatggcttctaaacgcattcttaaagagctcaaaggttttcaaaagggtcctcctacctcatgcagcgcaagtcccgttgcttaaaacatgttttactggcaagcccccatcatgggacctgctgattacccatatgcaagtggtgttttcttaggttcaattcatttt

SEQ ID NO: 18253 - DNA, 305 bp, Glycine max
  Clone ID: LIB3106-096-Q1-K1-A3
aacattgttgggatcattggagaccaatggagcgatctcctcggaggccacagaggcgaaagcgggacctttaagcttcctaatgccctgtactacattcagtagttccttcacctctcaacaatctagcttgctcctatctatctatatgtaataagatgcgttcaaataggggcactagcttcactttatgtcgtttcagctgtgtgtcaacaagtcatgtaagagacttcactatgttgctttctctttcgtggctttaataaattatgcgcccttgttgcaaaaataaaaacacaaatgga

SEQ ID NO: 18254 - DNA, 461 bp, Glycine max
  unsure at all n locations
  Clone ID: LIB3106-096-Q1-K1-A4
cccacgcgtccgaccacgcgtgcgcacaaaccgaaaaggcgaaaggggttttccgagtgagatctangggttccatcgattcggagagaggatattgatagaacgacctcaacgagcaaggtcaggaggtggagtactagaacatggattcggtgccttcgaattcgcatggaaacctcgatgagcagatttctcagctcatgcagtgcaaacccttgtccgagcaagaggtaagggtcttgtgtgataaggcaaaagaaattttgatggaagagagcaatgtccagcctgtgaaaagtcctgttacaatttgtggtgatattcatgggcaattccatgatcttgcagagctttttcgcattggagggaagtgtccagatacaaattacttgcttatgggagattatgttgatcgtggctattattctgttgaaactgttacgcttttggttgcccttaaa

SEQ ID NO: 18255 - DNA, 209 bp, Glycine max
  Clone ID: LIB3106-096-Q1-K1-A5
tccatccacacgtccgcacgaacattcaatgaaaaccaattttactcctctatgatctcttatacaactcatgcctatgtttacacgtgcctcggggctgaatggatgctacatatactggcctcaagctcatctatggcttcagcaatcaaatagaccaacaatgacattaccttcattgctatcatccctgagaagagatcaatgca

SEQ ID NO: 18256 - DNA, 206 bp, Glycine max
  Clone ID: LIB3106-096-Q1-K1-A6
agagaacggccgaggcgtcgtcatcatcccttatcacgttgaaggtgaaaccttgcattttcgggtctcctcggagatccgcggtggttcggaattgtgcgaagtcaacggcggggacaatatcgacgagttggagcctggacagctgtagggcgaagaatgcgcttcagcttgcggagtacccagatgcgaatgaattggaccta

SEQ ID NO: 18257 - DNA, 430 bp, Glycine max
  Clone ID: LIB3106-096-Q1-K1-A7
gtttctgctgtaataagaaagagaaaggcaaatggtggatttattatgagtgcaagccataatcctggcggacctgaatatgattggggtattaagtttaattacagcagcggacaacctgcaccagaatccatcactgacaagatttatggaaataccctgtcgatctctgtgataaagatagctgacattcctgatgttgacatatcaaaagttggggttacaaagtttggaagcttcagtgtggaagtaatagacccagtctctgactatctggagctattggagacagtattcgattttcagctaatcaaaggtcttctttcacgtccagattttaggtttatatttgatgccatgcatgcagttactggtgcttatgctaaacccatcttggttgataaactcggtgctagtctggattcaattt

SEQ ID NO: 18258 - DNA, 455 bp, Glycine max
  unsure at all n locations
  Clone ID: LIB3106-096-Q1-K1-A8
agagtttgttgtgagctataagctagtttatcgtgaggagaatatgaagttgtttgttatctttgttgctgcagtagttttggtagcatggccatgccatggcgcaggctaccaaaggttccctctccgaatgaaaactggctatggtgagcgttcttcggaggtaaaatgcgcaagttttaggcttgctgtggaagcacacaacatccgagcctttaaaaccattcctgaagagtgcgttgaaccaacaaaggactacattaatggcgaacaatttagatcagactctaaaacagttaaccaacaagctttcttttatgctagtgaacgcgaagtccatcacaacgacatatttatattcggcatagataacaccgtactctctaatatcccatactatgaaaaacatggatatggggtggaggaatntaatgaaaccttatatgatgaatggg

SEQ ID NO: 18259 - DNA, 436 bp, Glycine max
  Clone ID: LIB3106-096-Q1-K1-A9
gcgggcctaatccctgaaaatgcacttaatacaagtattcttgatggtctcttaagggctggggttcttggtgtgaagtcttttatgtgtccttcaggaatagatgacttccccatggctactattgaccatatcaaggcaggattgtctgtgttggcaaaatatagaaggcctatagttgtgcatgctgagattcaacaagattttgaaaatcatttggagcttaatgaggataaccttgatccacgtgcttacttgacctatctcaataccaggccaccttcatgggaggaggcagccattaaacaacttgtaagtgttacgaaggacacaagaaaaggtggccctttagaaggagcacatgttcacatcgtccacttgtctgattcaagtgcttccttacatctgattaaggaagcaaaaagtcatggtgaca

SEQ ID NO: 18260 - DNA, 249 bp, Glycine max
  Clone ID: LIB3106-096-Q1-K1-B1
atttttagctttaaggtatccatctattcaagtgaatattgacaaaaagaaaaaaaaataagagcataaagaaacttctgacgatccttaccggtactgccttaacatccaacacataccacaatagctactataacgtgcggccaccctagactgattcaaatttactatcacaaacatgcgtcattactgttcaaaccaaggtggtcctcaacttaataaactggcataacatcccactttattcat

SEQ ID NO: 18261 - DNA, 340 bp, Glycine max
  Clone ID: LIB3106-095-Q1-K1-F8
caccctacaatcatggacaacgttgctggtcagctacatctccgttctagtctttcatctggtattagaagttatgatggagcctaccgccacccagctatgtaccaaagaccctgttttgggaattactccaatgctgcattgcagattcctgtgatgcccacatgcaaagctaccatggatttgtctgctactgcaacatctgcctcacccgtctatgttgctgctccagcagagaaaggccattttcttttagactttctcatggcacgtgtttcagcatctgtctccaaaactgctgctgctcccattgaacctgttaagcttttgatccagaacc

SEQ ID NO: 18262 - DNA, 428 bp, Glycine max
  Clone ID: LIB3106-095-Q1-K1-F9
cccacgcgtccgtattaaccctcttttttacgccaaaacgatgtcgtatgtgcctgggggcctcagaaacgccacctccacctccgtcgccaccgccagaaccccctccgtaacccttgacaacaacaacaacaaccaccaccaccaccacaagctcgcattcccctccaacaccaccaccaccaattgctctccctctctctccttccacaacaatgcctctcgccggagctccgccgcgcctccctcgccgcggattcttgccacccccgacgccgtcttcccccaatggcaaccctccgaacgcgtttctcgcatgactcccgagcagattgaagaaatccgatccaggcttaatcttgatgttgctgtcgcatctgactctcctcctgcacctgcgcctgctccaatagaatcgtttactgata

SEQ ID NO: 18263 - DNA, 377 bp, Glycine max
  unsure at all n locations
  Clone ID: LIB3106-095-Q1-K1-G1
ccccacgcgtccgaaaataaaaaaaaaatttttttttaaaaaaaaaaaaaaaaaaaaaaggggggggttatttaaaaaaaaaaaaataataaaatatatttttntataantgtgnnantttttaaaaaaaataaaattaaaataaaaattgggccccccccttttaaaaatcccaattttcctcccccttccttccaccgttttactttttttttaggccccccaaattaaattcccccccccccctttttccccccccttccctgaaaaacccctcccttcccccactttattccctttcaaaccatcccccttttccccccttgccttattaccaaaaagcccccccccatcccccttccccaccatttcccccc

SEQ ID NO: 18264 - DNA, 226 bp, Glycine max
  unsure at all n locations
  Clone ID: LIB3106-095-Q1-K1-G10
tttatttttttttttttttannattttttttttttttttttatttccccaactttattttttatccaaccgccaattttaaaaaaaactctctccctatatattcaaaatttatttaaaatatattttaaacaccctttgtaatatcttaaaactaacatcttttttttaaaatataaacactaatcaattcattaaatttggctattaattaatatttccctttc

SEQ ID NO: 18265 - DNA, 161 bp, Glycine max
  Clone ID: LIB3106-095-Q1-K1-G11
acaacatccactgtctctctctctctctctctgtttcagcgtttcacaaatcacaaacgcgggggccatctgagtggattagatgtgaaacttcgcagctgattcaccatcgccttttttcttcccttgtgtcttaccaatctttaaatttcatgtttttt

SEQ ID NO: 18266 - DNA, 320 bp, Glycine max
  Clone ID: LIB3106-095-Q1-K1-G12
aaaaaacacacatgtttgcaagctttttttgaccatgaagcagttaattcgccgggaagcttaggtaaaggacaacccgatctctggctactccgtaacggaattaatatcactacctactatcgctcgaagttcgcactaataatatcatgctggaataccaaagcagaaagcgtccagatgctattcacaagaagattgactactccatgcagcttaatgattatagaattaaagttcttcaagttctagatgccgtgatcagtactatgaaagatgctgcacttcaagaattgcagaatgtgtgttatcattggcat

SEQ ID NO: 18267 - DNA, 431 bp, Glycine max
  Clone ID: LIB3106-095-Q1-K1-G2
caaagccatggccacctccaacttctctattgttctctccgtctccctagccttcttttgggtgctacttaccaaggcacactcgaccgataccgtttctttcaccttcaacaagttcaacccagtccaaccaaacattatgctccaaaaagatgctagtatttcatcctctggggtgttacaactcaccaaagttggcagcaacggcgtgcccacctcgggatctctcggtcgtgccctttacgctgccccaatccagatttgggacagcgaaaccggcaaggtagccagctgggctacatcctttaaattcaacattttcgcacccaacaaatcaaactcagctgacgggcttgccttcttcttggcacccgtcgggtctcagccccaatccgacgatggatttcttggtcttttcaacagtcccttaa

SEQ ID NO: 18268 - DNA, 412 bp, Glycine max
  unsure at all n locations
  Clone ID: LIB3106-095-Q1-K1-G4
tgttgatcgagataactagaaacagtgtgatgaaaatgaaggtccttgttttcttcggtgctacaattttggtagcatggcaatgccatgcgtacgatatgttccctctccgaatgaacactggctatggtgcccgtactccggaggtgaaatgcgcaagttggaggcttgctgtggaagcacacaacatctttggctttgagaccattcctgaaaagtgcgttgaaccaccaaaggattccatcctggcgaacaatatagatcagactccaaaacagttaaccaacaagcttacttttatgccagagacctcgaagtccatcccaaggacacatttgtgttcagtatagatggcaccgtactctctaaatattcatactacanaaaacatgggatatgggtggagaaatta

SEQ ID NO: 18269 - DNA, 285 bp, Glycine max
  unsure at all n locations
  Clone ID: LIB3106-095-Q1-K1-G5
tcgaccccacgccgttntcgatttgcaacaaaaataacttctcntgatgccatatatatgcttcggtcaacgggggggattcggacattcgtttgagtaagcggtacgcctctnnctgattggacaagaacatttgcacattaaaaaagaatttgtcttattcacattctttaaccannaggagaaaccagacatttaagaaactgaaatttcgcttannacaggaaagctttcagnncaccgaaaccttaagttagactactttggctttctcgttttgcaaaa

SEQ ID NO: 18270 - DNA, 361 bp, Glycine max
  Clone ID: LIB3106-095-Q1-K1-G6
accacgcgtacatccacgcgttcggaatttatctcagagagaaacccatcatcatcggaggggcactcattcattcccccaaaacccaaaacgatgtcgttttctcaccaccgtcgatctcaatcggagatgcatttccggatcagcgacaacttcgacctcgaggtcgatctctctccgtcgcatcatttccaatatccggccccgctcctccaagattccggatccataccccaatctccgcaacccgaaaccgcccgctccgctcaccatagaagcaactccgccgacgcctcttactccttcttggtcgacggcattgaggccaagaaggccttgtcccctgataagctcgctgaat

SEQ ID NO: 18271 - DNA, 398 bp, Glycine max
  Clone ID: LIB3106-095-Q1-K1-G7
cccagacaaaaactaatgatttcattacttccctctaacacatgccttgaaacagcggagggtctcttaaacccttcaaagctaggcatctctacacaaacatgctagctcgcaccaacgaagacatcacgtaaaatacaagtgaaatgcaactgtgcacaaaacaagggtgtgagaccaacgtatttgacactataagaagctgctttgcttgaaatatcacgtttgagcacacatgaacgctatctatgccgcgtaacgatatcttacctgaacttgctaagagtgatatcatatcacgaatgatgtgcaattgaggagctcaacgctaacaacatatgcgattggttgctcacagataagctgacaagagaacagaacttaggctctacggttct

SEQ ID NO: 18272 - DNA, 424 bp, Glycine max
  Clone ID: LIB3106-095-Q1-K1-G8
gttgaataccgtgttggcaagttcccgttcatggctaatagcagagctaaggcaatggacaatgctgaaggactggtgaagatattggctgaaaaggagacagacaagatattgggagtgcacattatggcacccaatgcaggagagcttattcatgaagcagcaatagcactacagtatgatgcatctagtgaggacattgcacgtgtgtgccatgcacatccaacaatgagcgaggctgtgaaagaagccgcaatggccacttatgacaagcccattcacatttaaaaggagccggttgctacttcttgttttcatttttgtccaagaattttacaatgacttggagatgatacatcctgtgttaaatttagattcaggtttttaaatgcaaattagccccttgtttacttgtttgcataat

SEQ ID NO: 18273 - DNA, 213 bp, Glycine max
  Clone ID: LIB3106-095-Q1-K1-G9
gtatactagcgacatgatatcatatattcttttctttttctctatatgtcaaccaaatgggacggtgccaccgacatctgtacctatttattgtttctttgttttcagtgtgggtagatccggtttgtgctacctgccagctgggatctgcatgtgtgcatataaacacttttcaattcattagatttagatattaattaatattgccctctc

SEQ ID NO: 18274 - DNA, 339 bp, Glycine max
  Clone ID: LIB3106-095-Q1-K1-H1
ccaagataaagatgaaaatgaagggaatgtagggaaagaggtggtgtcgttgggggtgctgagatggcgaagctgtggaggaggatgggccgaagcgccgaggtatgtggaaaaggcccctaagtttgtgaagcccaaggtgagcccacgggctattcaccagcccaggtagacgccacccggcccattcccccagcaccaccagctatgtacataaaaaaaaaaaagtgtcaagctctaaagacgaagtcattgcgcttgacattttccagattttaattttcgggttgatcttcttgttactctgatgttccataaagataaactcaagtttctttg

SEQ ID NO: 18275 - DNA, 286 bp, Glycine max
  Clone ID: LIB3106-095-Q1-K1-H10
cacgacggtcatcgagccgatcatgacgcgcgatcatacggaaaagatgctgcagggcgttggcgccaaccttaccgtcgagacggatgcggacggcgtgcgcaccatccgcctggaaggccgcggcaagctcaccggccaagtcatcgacgtgccgggcgacccgtcctcgacggccttcccgctggttgcggccctgcttgttccgggctccgacgtcaccatcctcaacgtgctgatgaaccccacccgcaccggcctcatcctgacgctgcaggaaatgggc

SEQ ID NO: 18276 - DNA, 367 bp, Glycine max
  Clone ID: LIB3106-095-Q1-K1-H11
ggcaatccttgaaggcttaaaccttctttttaggctggagaaccgatatcaaaaggtggggcacacacaacacaacacaacagcgtggaacgagacaactaagtacgaaaatcgttatccgccgcaacagccactaagatgttctttgagtcttggcacgccacgtgtcagaactgccaacagatagccccatctctttctccttctccctaaacctcgaactcagcacccccatccactggtgattgtttgattgcaccttgaagaaatggaccacagcgctgatgcacatcgcacggacttgatgaccataacgcggttcgtgctgaacgagcaatccaagcaccccgagtcacgcggcgatttc

SEQ ID NO: 18277 - DNA, 428 bp, Glycine max
  unsure at all n locations
  Clone ID: LIB3106-095-Q1-K1-H2
cccacgcgtncgcccacgcgtccgcccacgcgttcggtgatagattaatatatatttaaggtatctccaaatgtaatacagatgctgttattggatatgcttatgtgtgtatcaggtgataattaaacatgaaccttttattgatggtgtaagatgattactagttctccattcctgacttatatttttgaaaaatagtaattatatacaaatcattctttattttaaatactccactaacatttctcatttctctctatcttcacatatcataagaaaaatgttacatggacacccattgtgttacttaacacctagagagagagtgaaaaaagagaaaaaaaatataagtaaaataagatttatgatgtaataaaaagagagagagaaagaaatgagaggtgttgaagatatgtttaaaatgatga

SEQ ID NO: 18278 - DNA, 319 bp, Glycine max
  Clone ID: LIB3106-095-Q1-K1-D8
cccacgcgttcgacttaaactacattctatttgtttaagctttttgagactacaggaggctgtttttatggattccgttttacgacttaaatggaaattcatggatgagaactaatgaataatgctatacgtattgtattgctatgttgtacgatgaactacaatccaactaaggacatgcggttcactggctccgtctatttgccccacatccctggtcccatgatgaaaatctgcatgcttgtagatgctaagcatgtagaataggcagagaatataggactggactggatcgatctagatgccttgacaaaactaa

SEQ ID NO: 18279 - DNA, 423 bp, Glycine max
  Clone ID: LIB3106-095-Q1-K1-D9
cccacgcgtccgcccttacatacattgttagtcgctatatatacgatacataccagaggggtattcatatcactcgtggctatctacaaagtcccagcacacccatatccgaactttgtacttgatgagtgtagtctttggataaataaccgattagacagcaaaatatgaagtgatcaaatccacaagtgagtacgaaattcgcaagtatgcaccatcagtagtggctgaagtcacatatgacccttcacagttcaagggaaacaaagatggtggctttatgattttggccaattacattggcgctgtggggaagccccagaacaccaagcctgaaaagattgctatgactgcactggtcataacaaatgacattgttggtggtggtggcagagatggcgagatgattgctatgaccgctcc

SEQ ID NO: 18280 - DNA, 415 bp, Glycine max
  Clone ID: LIB3106-095-Q1-K1-E2
cacgagaacactgcctactgcggcgggttgttttctcctgtaacgagcctttcctttcagggcgttgattcggtaggtgcgggcgcagcgaaaccgagctagaccctgatcggcgtcggcacaccgccggagaacaagatgattgtctgcgctgccgacgtctagcaccaaaacaatccgctgtacatacagagcttcacggaagccgatgatgctctcaagctccaccacatcagccattgctcgctcgatgtggccgacgagcgagtgaacaatactaaaaaggctgggccgatgcttaatgagacagctttgggactgctttatcctatggaaaactacaaagtatatggatatctgactaatacgaacgtgaaatgtatcttggagaccacagatctggatattaaagatg

SEQ ID NO: 18281 - DNA, 426 bp, Glycine max
  unsure at all n locations
  Clone ID: LIB3106-095-Q1-K1-E4
cccacgcgtncgcaaatagccatataattcttttttatttgaaataatgtccgggatcggccggaagattgaggagaccctccatgtgggagggcacaagaaagaggagcacaaaggagaacaccatggtgagcacaaaggtgaacacaaaggagaacaccatggtgagcacaaaggtgaacacaaaggagaacaacaccatggggagcacaaggagggacttgtggataagatcaaggacaagatccatggtgatggccatgacaagggtgagaaaaagaagaagaaggacaagaagaagaaggagcatggacatgaccatcatggtcatagcagcagcagtgacagtgattagatcttatatgttaagcaggtgtacggtacgatggtagtgaggagccaaaaatcctcttcctgctttatgat

SEQ ID NO: 18282 - DNA, 418 bp, Glycine max
  Clone ID: LIB3106-095-Q1-K1-E5
ccacgcgtccggtaattctaattacttgttcctgaatcattttatccgctagacgtcgtacagaatgcagaattctaatttgtttaaatccaaataatataaatagtatgcatagaaacacaatattttataatccaaataaagtccaaaatggttttccacttttgactaaaaaaagaaaatattttgagaaagataaaaaaaaactaatgaatttcaaaatttttctttggccaaaatatcgattagaagatttagcttgtataaatcgatattggtttaatacccataatggaagccgcttcagtatagtaaggatacatatgtatccgcgaatgaaaattcgttaatccaaatttgtcttctatttaccatatttatatggtaaatagaagacaaattaatatctatatctatc

SEQ ID NO: 18283 - DNA, 424 bp, Glycine max
  Clone ID: LIB3106-095-Q1-K1-E8
cccacgcgtccgagagacttgagcttgttaatagatcgtgttcttagtggccaaccgtggccatcagagcaaaaacctaggtactttatattcttctccttttaattgtttgataatcttttaagtttaggactctattactttcacgtgcttaaggtcattgtttttctatgcatgaagtgttggatgcagcataaagtggcacccaaggaagaagttttgattgataaactgtaattatctttttcatcaaaagacattaatcagtgagttaaagtttctttttcaggttgctatgctttatgtaatgtcactaaccatattaggatgttacaccttattttctattcattcagtgttcctgttcacctacaatttccgtaagtgtgacttgcaaggaaatgatgtcatttgtggttcttat

SEQ ID NO: 18284 - DNA, 425 bp, Glycine max
  Clone ID: LIB3106-095-Q1-K1-E9
cgcacaccggcgtgaggcaagggattctttgacgatgagtatagtatgagtaatcggggtcaaagtgtatagtgattctgattctttcattttccatagattagcaagcaatcgagcgagggagggagagagagagagagagagagagaatggttcgggaagtatcagatagttgcattgatagcttatcgacggagatggtggcgtgctattgcaaccgattctacgcaaacaggcctgaactcgtcgaacgcaggatcgaggccattggatatcaggtcggtcaccagctctctgaaaggtataccatggatcggcctcggttcacggatcatctggaggccatcaagctcatatgcaaggatttctggtctgagctctgtaagaagcagattgacagcttgaagacaaaccataggtgtaca

SEQ ID NO: 18285 - DNA, 429 bp, Glycine max
  unsure at all n locations
  Clone ID: LIB3106-095-Q1-K1-F1
agctagttcacagcttcagttcggttttgttgatcctgngaacttatggctgacggggtgggggtgttggatacatgggccagcatgtttgggatgagggttaggattgcattagctgaaaaaggtgttgagtatgaatacaaggaagaaaatctcaggaacaagagtcctttgcttttgcaaatgaacccaattcacaagaaaattccagttctgatccataatggcaaaccaatttgtgaatctgcaattatagtgcagtacattgatgaggtctggaatgataaagctccaatcttgccctctgacccttatgagagagctcaagccagattctgggtagattacattgacaaaaaggtgtatgacacttggaggaaaatgtggctttctaaaggagaggagcatgaggcagggaagaaggagttt

SEQ ID NO: 18286 - DNA, 425 bp, Glycine max
  unsure at all n locations
  Clone ID: LIB3106-095-Q1-K1-F10
gcgcccacgcgtccgcccacgcgtctttgtttgtaccgcgaaagagaaggcaagcaagaaacgtcatcctcggcggaacaggcgcggaggctaatcgttaaccaaaccaacacagatcccataacgcttcgtctagggtttcgctgaatccccaattttcctaaccccgaccggacatgctccttccccgatggccgtcgtaaccagcaacggcaagcgccgccaacattggccatccgcgaattaccactttccatctnccaattccaaaagacccagagtttcaacaatgtcccaaaaccacgcgcaatccttgttatcctcgactagtatcatttcaagaatctctaagtaccccgaaaccaagccaccactgcatagggaggttcacgccccgtgtagaccacgtaagtttgattctcctg

SEQ ID NO: 18287 - DNA, 398 bp, Glycine max
  Clone ID: LIB3106-095-Q1-K1-F11
gaaacacgcacatgtttgaaagcttttttagcccatggtgcagttcatccgccaggaaggtgatgaaaaggccaacgagatctctgtctactccgaaaaggaattcactatcaagaagctacacttcgtctaagccgacaataaaaacatcatgctagaatacgaacgcagagatccccaaattgaaattcccaagaagattgagtactcgatgcagctaaatgcttgtcgaattaaagttcttcaagctcaatatgacatgatcagatacatgaaagaagctgcattcaacgaactgcagaatgtgagtcatcatatgcatgcgaatctactgagtcatcatcatcatgagtacagaaaccttctgaaagatcttattgttcattgtttgcttagac

SEQ ID NO: 18288 - DNA, 423 bp, Glycine max
  Clone ID: LIB3106-095-Q1-K1-F12
caccaccaccaccaccactactccttcattgtcactgccactgccaccttcaatgggaacctttctccaaaaataacataaaatcataatccgaatatctcagcattctctcattgctgcatcagctactcgcattttcgctttttttttccttccgggtgtccgtacttttcaatggaccgacgctggccatggaagaaaaaatcgtcggacaagaccgtgcttgagaaagcagctggcgaattggactctgctgcgggtgctggcactcagaagccgagctacgtccaaatctctgtagagtcatattcccatctgactggtttggaggatcaagtgaagacatatgaagaaaaagttcagacactggaggaagagatcaaggaattaaatgaaaaactgtcagcagctaattcagagata

SEQ ID NO: 18289 - DNA, 107 bp, Glycine max
  Clone ID: LIB3106-095-Q1-K1-F2
ctcattcataaactatttaaaattggattttataatttcgcaatgacaaacttttcccggggcgaatattttttattaacatacgctgcataccgtttctctaacat

SEQ ID NO: 18290 - DNA, 427 bp, Glycine max
  Clone ID: LIB3106-095-Q1-K1-F3
atcacccaccccacatctaaagccacttttaagtccaccacacacaacactttgcctacggaccggctacttactactatagtgtctgattcacaggccagagggcaaagattttgagcacaatggcctcgacacaatgctttttgcaccaccacgccctcaccactccagctagagcttcaacacagcgcctagttgtgagcaccaaaccaaaccacattgtttgcaaggcagcacagaagcaggttactgtccaagagggtgaggacactactactggccttgtctctcgcaggttggccctcactgtgctcattggtgctgctgctgttggctctaaggtggcacctgctgatgcagcctatggagaagctgccaatgtgtttggaaaaccaaagacaaacacagacttcctttcatacaatgg

SEQ ID NO: 18291 - DNA, 426 bp, Glycine max
  Clone ID: LIB3106-095-Q1-K1-D7
cgcttgagctctgcgagatcttgattcgtcgatttgaaaagatgagtaagcttcagagtgatgctttgcgtgaagccatctcaggaatcatggccgattccaaggagaagaatcgcaaatttgtggagaccatcgaactccaaatcggtttgaagaactacgatccacagaaggacaagcgtttcagtggctccgtcaagttgccccacatccctcgccccaagatgaaaatttgcatgcttggtgatgctcagcatgttgaagaggcagagaagataggactggactggatggatgtagaagccttgaaaaagctaaacaaaaataagaagttggtgaagaagctagctaaaaaataccatgcttttttagcatctgaagcagtcattaagcagattcctcgtcttttgggtcctggtctcaaca

SEQ ID NO: 18292 - DNA, 271 bp, Glycine max
  Clone ID: LIB3106-095-Q1-K1-F4
ctttatgttaagtttgtcaagattactttgcttgtcttgattttatggattgtaataagagaagagagatgctctagatagtctctttaagtctgtatcccatgttcttattttcagttttggttgtttacctaaatctggttgaaaaaaaaccacaatagttaataatttctgatttgagttatttccttcatttttaatacttatcctttagtttctcgtgttatgcatccaccataatcttggggacaatgtatgtctttaatggggt

SEQ ID NO: 18293 - DNA, 244 bp, Glycine max
  Clone ID: LIB3106-095-Q1-K1-F5
aggagacacaccttcagcagcagcagctttggttctcaaaaccgaactatgccgattgagcggtgccaagatctacccagggaaaggcatcacatttgttcgtggtgattctcacgttttcctgtttgctaactcgaaatgtaagaggtatttccacaacaggttgaagccatcaaagctcacctggactgcaatgtacagaaaagcacacaagaaggacattgctcaagaagctgtgaagaaa

SEQ ID NO: 18294 - DNA, 285 bp, Glycine max
  Clone ID: LIB3106-095-Q1-K1-F6
ggagatcttaagcaagctaggtctgcacttgaaatggctggtgtattgagctctgatggtcgagacttatggactggtggagaaactgtgttggttcaacttggagacatactatatcgacgtgaagatgaaattgccatcttgtgcatgctgcgatcattggatagacaggcaaaacgaaaaaggtggagcagtgttctagtaaatggtaatcatgaaaacctttattgtggaagggaatttaaattttgtgaagttgggggattttattaacgttatgatttc

SEQ ID NO: 18295 - DNA, 406 bp, Glycine max
  unsure at all n locations
  Clone ID: LIB3106-095-Q1-K1-C10
ntccgcccacgcgtnccgctctccctcacagtctatgtagatgatgcacttccatttcccattgcgggcattctcaaatctcaatcagtgcaggcacagaatcctttgaatcaacttctcctagataatgtaatggataatcaaattaccttaaaaagaagaatcctggtcgcatgatttgacagtgattagcacaaaatgcatctggcttccctcataaatccaacttctaattttccattactctcaagccgcacaaccaccacctctttcattttcaaccatagaagaaaaaaatcacagtccaattgcattaggagccaccagtccacaatacagcagaggtggactcttcagggcatgacagctctcgtcactggtggtactcgcggaattgggcacgcca

SEQ ID NO: 18296 - DNA, 364 bp, Glycine max
  Clone ID: LIB3106-095-Q1-K1-C11
cccacgcgtccgcccatgcgtccgttttttcatccggcaaatgaaggtgtttaagcgggcgatactgaatgggcactacggtattaccacttttcttataatcaacatattctatgttgttccttacaattttttgatgcctatcattgcggaagctgcggttacttatctttctggactacataaaagacgtaataacctttcattctttatctacgattatttgctaccgctacttgacttgacagccttatgatggttgatggagagcgttatacaaactatatcatagggcatgatcgtttgtagccgacttgcaacagtactgcttttaacaactgtatactattgacttccaaatgat

SEQ ID NO: 18297 - DNA, 313 bp, Glycine max
  Clone ID: LIB3106-095-Q1-K1-C12
cccacgcgtccgggccaattcctggccttaatacaaaaaccacttcgtttttagatccagatggatggaaaactgtcttggttgacaacgttgatttcttggaagaactgaagtgaagagcaagctttatatgaaataagtagtcctgctgcttttgtatgaataagttgtctcgcattttatcattgtgcgttttgtatcagtaccagtcatcaacttgttttcttgcttttatgggttcttttgttgacttaaaaccgcaattgaaacctcattctgcatgctacctatgattaatctactagtttatcat

SEQ ID NO: 18298 - DNA, 350 bp, Glycine max
  Clone ID: LIB3106-095-Q1-K1-C2
atctcgcgccagcaaacatggcatccatttcttctatgcttcagaccatcgttcccaagggtgcacccaatctccctcctcgtgttggtgtttccaacaacactactaacatctcatttgctggctcaggtagggtaccgagcacccggattcagaggaacaggaatagatcttcttccattgtggttgctgcagttggagatgtttcatctgatggcaccacttaccttcttgctgacgccattgctgtggctatcattgaaacaaccttccccatattcttctaccacaaacacacatgccctgaatgtcacggagcatggcctgtgcataaggctgatgtgacattg

SEQ ID NO: 18299 - DNA, 394 bp, Glycine max
  unsure at all n locations
  Clone ID: LIB3106-095-Q1-K1-C3
tgaagatgggtaggatcgcgtactggctgtactatattgtggtcactgttctcgccggggtgggaatcgcgcctaaggggaccgtcnatgttcatgagatgctcttcaagaccgctgactatttgaccagagggggtgactctgggattttctctccgatgcacatgatcctctgcagaaagccccatgacaaggacgaacaaaactctggttagggtttcgtttcatttggaaattggaaaacaaaaaccaccaccgccaccttgtttctttccggtactcttttttctcattattatcctgggtttaacttgttgttattagttattattactatgaacttggtgtaatttggattttgatcttttcaattttaattttagtttgcaatgtt

SEQ ID NO: 18300 - DNA, 303 bp, Glycine max
  Clone ID: LIB3106-095-Q1-K1-C4
cgaaacggggtctacaaaccccgttggtctacaaaacgcccatgttttaccccttcagcttcaacactcagaatttcttgctctggagtggctgactttgatggatctcatcagaaaaaaggaggtttgtttaatttcaatggaatcaacggcgtggctagaggtattcttgcagctagtgctgttacttctgctgcatttcctgtgactgctgctactcagaggctttccccattgttaactgagcccaatcgctgtgagcgggcgtattgtggcaacacaactcgtcaggcgaatggtgta

SEQ ID NO: 18301 - DNA, 424 bp, Glycine max
  Clone ID: LIB3106-095-Q1-K1-C5
ggaagagagaaaaaccatggcaataacactcttcaatggcttcaagatgcctatcattggagtgggcgtgtggcgcatggaaggaaacgaaatcagggacctaattctcaattccatcaaaattggttatcgccattttgattgtgctgctgactacaaaaacgaagcagaagttggagatgcgcttaaggaggcttttgatagtggccttgtgaagagagaggatctcttcattaccaccaagctttggaattctgatcaaggccacgttcttgaagcgtgtaaagacagtctcaagaagcttcagttaacgtatctagatttatatcttgttcactttcctgttgccgtaaagcatactggggttggtaatacttctagtcctttgggtgatgatggggtcctggacatagataccaccata

SEQ ID NO: 18302 - DNA, 422 bp, Glycine max
  Clone ID: LIB3106-095-Q1-K1-C7
cccacgcgtccgctttttctacttaccttttctcttaatccaaatacgatggcaggcagggcaaccacaaccctctcttcaaaccccaaactctcattcttcaacggaaagcccgtcacatattcttcccgcgtcgcgcccaccaccaaattatcctcatccaaacaaggcacaatttccatgtccctaaccccacccccctacgacctccagtccttcaaattccagcccatcaaaaaatccatcgtgtcacgggaaatgacgcgccgctacatgaccgacatgataacctacgccgacaccgacgtcgtaatcgtcggagccggttcggccgggctctcctgcgcgtacgagctcagcaagaaccccgccgtgagcgtggccatagtcgagcagtcagtgagccccggcggcggcgcgtg

SEQ ID NO: 18303 - DNA, 394 bp, Glycine max
  Clone ID: LIB3106-095-Q1-K1-C8
caacattggggaagtttcaagtgtttgtttcagtccttgcctcaagaagaacatagccgggggatatgtgaaatcaggattgcacaaggcaggcaccaaagtaaagattattattcgaggaaagtctaatgaaggagttgttacaaagatgccatttgtaccaacaaaatactataagccatcctaatttactttgaggtttcaccttgaacctttgacctttcctaatactccctctaaaccagttttcttataatctggaagttgtagtgaatatctatgccattgtcctactcctacccatatcaagtacaaggaagacgccttgcatcaataactcaattttcattcaaatatgtatgatagttgagagaaatcttgaaatattaaacaa

SEQ ID NO: 18304 - DNA, 164 bp, Glycine max
  Clone ID: LIB3106-095-Q1-K1-C9
gaatccggtcgcccactcgaagggcaatgcgatcttaatttttcatttcagaaagaggtccataggaaagctgagaatgtggttttggtcgcaggtagcttgtgcaccacaaacggaaggaaaggttccattccctattcacttaccttttatgcgtaactcat

SEQ ID NO: 18305 - DNA, 441 bp, Glycine max
  Clone ID: LIB3106-095-Q1-K1-D10
attcccggtcgaccccgcgtccgcccacgcgtccgaatttagccacttttatgtctaatatctccgaattccaagcgccgggggataggttctcccaccctaaccaagccagatcccgttttcaattccttctcagtttccttttctgtgaaaaaacatgttgagggttgcacctagaaggctctcttcttctctctcatcttattctccgttgcggcccaatcacgccgctttcgcttttctctctctaaacgacgtcatcatcgatgaccgcagatctgctacttcctcccatacccttcttcccttcagaggttatgctactgaatccctgatccacacaaaagaaaacagcattacttctgagattccgccaactgttactgctgttaagaaccctacttctaagattgtctatgatgatcacaaccatgaaagatt

SEQ ID NO: 18306 - DNA, 424 bp, Glycine max
  Clone ID: LIB3106-095-Q1-K1-D11
cccacgcgtccgcccacgcgtccgtttttttcctttctctctctacaaagagtgcgggggagagtgagagagagagagagaggcattcggaactttggatatctatagcgaaagcgtgacaccaccaaaaaccgaactgttcccagatctctctctcactcttccaacaatcgaaatccaaaaccctaccgacaccacactcaatcgaaattcttcattctcttctcatcgatggggcagaagtctatgatctacgcgttcgtgtcgcggggaacagtgattctcgcggagtacaccgaattcagcggaaacttcaactccatcgacttccagtgccttcataagctccctgccaccaacaacaagttcacctacaattgcgacacacacaccttcaattacctcgacgacaatggctacacat

SEQ ID NO: 18307 - DNA, 422 bp, Glycine max
  Clone ID: LIB3106-095-Q1-K1-D12
cccacgcgtccgcccacgcgtccgttcttgcgtccgagaaaatgaaggccatagtgatggcgaggccaggaggtcccgaagtgctccaacttgaggaagtggaagatccccaagtcggagacgacgagcttctcatcggagtccacgccacttcccttaacagagccgatacctttcagaggaaaggctcctaccctccccctaagggcgccagcccttacctcggtctcgaatgttccggaactgtcctttccctgggtaaaaacgtttccagctggaaaatcggtgatcaggtgtgtgctcttctcgccggaggcggatatgccgagaaagttgcagttccggtaggacaagttcttccggttccagccggtgtttctctcacggatgcagctagttttcctgaggttgcttgcactgtc

SEQ ID NO: 18308 - DNA, 179 bp, Glycine max
  Clone ID: LIB3106-095-Q1-K1-D3
ccacgcgtccggacgatcgtactagagacagcagaggctttttttctcctgtaacgcgcctttctttgcggtcgggttattcgtaatgagaggacgcccccatacagatctagaccattatcacagtttgcacacctgctgacaacaaaaacatcgggcgggctgctaatgtctcgtac

SEQ ID NO: 18309 - DNA, 403 bp, Glycine max
  Clone ID: LIB3106-095-Q1-K1-D4
ctcattcacacattcacagttatactctctctctctttgtcgcttggatcactgatctgatggggaattttcagatatgtcgacatctgataagccagaagtggtggaaaggggtagcaaggatgaaaaacacaaggaagatgatcaagaggaggggaagggtggattcattgagaaggtgaaggatttcattcatgacattggtgagaagattgaggaagctattgggtttgggaagccaactgctgacgttactgcgattcacattccatcgattaatcttcacaaggcacatcttgttgttgatgtgctcatcaaaaacccgaatccggtgccaatccctctgattgacatagattacttggttgacagtgatgaaaggaaactagtttctggattgata

SEQ ID NO: 18310 - DNA, 384 bp, Glycine max
  unsure at all n locations
  Clone ID: LIB3106-095-Q1-K1-C1
cccacgcgtacgaccacacgttcgatcttatcttcgtcgatcaccaccaccatgtcgtggctgcgccgatccaccaagtctaagttcctctattcctcttgctcttctactctttgtagaaccttcccctctctacctcgccctcagattggacccatatgtcccctccccgatctcttacaccggaacaccgccaccatgcctttcgcgaaggaaaacgcttcctgtggaaacttgaccgatcttctcatagtttccgcgaataagcttggcactgattctgatgcgaccaattcttcgacgtacaaagcttctggactgaacaccaatattctagctggagctagatatgtgtntagagtttgggctgaacagggtcaaatg

SEQ ID NO: 18311 - DNA, 377 bp, Glycine max
  Clone ID: LIB3106-095-Q1-K1-D5
cccacgcgtacgcctgaatctcgcaagtttacagctgcacctgttttggtcccagctaaggggattcatgctctgaacctcaaaattgatgacctcaatagccaaccacgtttcttgggtgcttttgacgtggactatgatgctttgttagcgaggaggaatgctcttctcttgcagcagaagttaagcatgctgcgagaagaggcagctaactatgaagctcttcgcctgcctcaagaatggacgtactgactcctttgataatagtgttcattcaaacaagattcaattcctataagttaatccttgctgaagaaagaaagctagtgaaattagtacgtttgtgatagggaagatggctttttttagttttttta

SEQ ID NO: 18312 - DNA, 417 bp, Glycine max
  Clone ID: LIB3106-095-Q1-K1-D6
attatttgaattcttaaaagttgtaagtttgtatttgtaaaataaaaaatatgctaaaagagattgcagattagagaaaacgctgctcactcactgcagctcccttgttcacgtggaccggagggcgacaaacgcacgactgatggtgacggacgcgggctttttcggcacgggctctcttcagtcttcgctctcccttttacggcacggtccgaggcggtctcacttctctcacccttttgcgacgaggtcaccactgtgtttgtgttttccggcgaggactctcatcatatggacaacttacgtcaggagaaagttcaaagatttgaagaatttgttgacaaacgcctgagacctgatcttgttcatgctattgctcagcggccagatacacaacacatatgtgtggatgtaaga

SEQ ID NO: 18313 - DNA, 166 bp, Glycine max
  Clone ID: LIB3106-095-Q1-K1-A12
tttatgtatagtagtggggaattatggtgtcaaaaaataaatccgcttggtttcagactgggtacaactcaaagtcatgattctatttggtttgctcaaccaacaaattattccgagaatatacaagaagataaaaaaatacgagattgtatcaaacattatatac

SEQ ID NO: 18314 - DNA, 278 bp, Glycine max
  unsure at all n locations
  Clone ID: LIB3106-095-Q1-K1-A2
accgacgcacgcgtccgccaacacgaccgacaaccccaagtttgttctaaagaacacgcccaagagggncagggggagttgaaagaaaagcctggggggcaaaagatgcacacttgtgaagagatgattgaagcctcggccaccctcatatggatcgcttgaggccttcatgcacctgttaactttggacagaatccatatggaggcttaatcttgaacaggccaaccattagcaggagattcatgcctgagaaagggtctgctgagtatgctgcttt

SEQ ID NO: 18315 - DNA, 329 bp, Glycine max
  Clone ID: LIB3106-095-Q1-K1-A3
cgtccagcgttcgacaccataccatgtcttttttgctgaagaataacatagtgaggttgcactctgcataacttccgtactttccacgaccttttcataagaatgaacttgacgtacatgtcttgagatatctctccaaagatgatttgaggcttctcactgctgttgaattgcgcatgcggaatcatgaaatcgtacccactgaactcatagaccgaattgcgcgtctcaagcatggaggcacgtacaaggttttgaaaaacttgctcaaacataagttgttgcaccacgactcctctaaatatgatcgataccgccttacctacctt

SEQ ID NO: 18316 - DNA, 353 bp, Glycine max
  Clone ID: LIB3106-095-Q1-K1-A4
cccacgcgtacgcgcatataaagaaattttcgttcataggtgcacttacaccttatccagctggaggttttaaactctctaccctatctattacatatcgaaaccttaaaattactatcatttctgagccatctggtgatgataaccattagtcttaacgagtcaagtcttatgtcttaattacaccatcaaattcctactgcacttcttaccttttggtgatgcatactttgctgactccaatgcttagtcaaacgcgtatgaccatatacttttacagcagacacaatggtggtgataagcctgactcccgctcagggcttgtaaaaagccttcacctataacatgatact

SEQ ID NO: 18317 - DNA, 237 bp, Glycine max
  Clone ID: LIB3106-095-Q1-K1-A5
catagatacataatcttcaagatcgatgagaagtcaaagcttgtcaccgtcggtgacgaggctgatccctgcgagagctattgagatctcaccgtcttcttgcccgacgatgattgcagatatgccgcattcgactttgatttcaccaccgtcgattactgccgcatgagcacgaacttcttcattgcatggtctgcaacagcattcaggataagagcaaagattctctacgcaaca

SEQ ID NO: 18318 - DNA, 427 bp, Glycine max
  unsure at all n locations
  Clone ID: LIB3106-095-Q1-K1-A6
gttggtcgagataactataaacagagtgttgtttatgaacgtccttgttttcttcgttgcggcgaattttggtagcatggcaatgccatgcgtacgatatgttccctctccgaatgaacactggctatggtgcccgtactccggaggtgaaatgcgcaagttggaggcttgctgcggaagcacacaacatctttggctttgagaccattcctgaagagtgcggtgaatcaacaaaggaatacatccatggcgaacaatatagatcagactccaaaacagttaaccaacaagcttacttttatgccagagacctcgaagtccatcccaaggacacatttgtgttcagtatagatggcaccgtactctctaatatttcatactacaaanaacatggatatggggtggagaaatttaactcgaccttgta

SEQ ID NO: 18319 - DNA, 309 bp, Glycine max
  Clone ID: LIB3106-095-Q1-K1-A7
taactgtgacgtcaaaagcagcaggggaggtttaatgctcagaactctacatcttcaagtggacatcactcttgatccctccaatgaccctactaatcatgaatattgttggggtgggagccggccacttttattccatgcaaccaggaaacaaatcatggggacctctcttggctagattgttcttagcattgaggctcatcctacatctttacccctacttgaaggggatgcttggaaaacacgatagaatgccaaccattatattaggttggtcaatccttctggcctccatcttgactctcatgt

SEQ ID NO: 18320 - DNA, 271 bp, Glycine max
  Clone ID: LIB3106-095-Q1-K1-A8
attagataaccaataccgttgtcattattatatttggcaataccaatttcagaaggggttattagttgatgcataatgtaaatgatggagtaatatggagttggaaatggaaaaaaaaaaaaaaaaaagaaaaatgttggggggggagaaggagatttttatgccatcaacaaaggaaaaaaaatcatggggacctctctttgcgagattgttctttgcattgtgggtgaaacaacatctctaccccttcttgaaaggattgcttgggccc

SEQ ID NO: 18321 - DNA, 404 bp, Glycine max
  Clone ID: LIB3106-095-Q1-K1-A9
cccacgcgtccgcccacgcgtcctttccattcgtccggggatcgatctcaaggccggagggaaaagcaaaaaaaccaaaagaacagcacccaagtccaatgatatctatcttaagctcttggtcaagctttatcgcttccttgttcggagaactggcagcaaattcaatgccgttatactcaagagattgttcatgagcaaggttaacaagcccccattgtctttgtcaaggttgattaagtataccaaggggaaggaagataagattgctgtggtggtgggcaatataaccgatgatattcgtgtttatgaagttccagccttaaaggtcacagcactcaggtttacagagactgctcgggcaagaattgagaaggcaggtggggaatgcttgacgtttgatc

SEQ ID NO: 18322 - DNA, 420 bp, Glycine max
  Clone ID: LIB3106-095-Q1-K1-B10
cccacgcgtccgcccacgcgtccgtcctttcgtccgggaaatgaaggtgtttaagcgagagagactgaatgggcactacggtattaccgcttttctcataagcaacatattctctgctgttccttacaattttttgatgtcaatcattccgggagctgtggttacttatctttctggactacataaaggagttgataactttgtattccttatttctgttttatttgctaccgagacttgggttgagagccttatgatggttgttgggagtgtttttccaaactatgtcatgggcgtgatcgtatgtggaggaattgaacgagtcatgattttaacacgtggattctatcgacttccaaatgatcttcccaaaccagtgtggaaattccctttctactacatttccttcctcacctatgc

SEQ ID NO: 18323 - DNA, 426 bp, Glycine max
  Clone ID: LIB3106-095-Q1-K1-B11
gttacagccgcagcttgaaacagatcagtgcgaccttgaagagctatggctgtcggaaagaataagaggatttccaagggaaagaagggtggcaagaagaaagccgctgatccctttgccaagaaagactggtacgatatcaaggccccttccctcttccaggtcaagaatattggcaaaaccctcgtctctcgtacccagggaaccaagattgcatccgaaggactcaaacatcgggtttttgaggtctcattggctgatctccaaggggatgaagaccactccttcaagaagattcgtttgagagctgaggacgttcaagggaagaatgttctgacaaacttctggggaatggatttcacaactgacaagttgaggtctttggtgcgaaaatggcaaactttaattgaagctcatgtggatgtt

SEQ ID NO: 18324 - DNA, 420 bp, Glycine max
  Clone ID: LIB3106-095-Q1-K1-B12
cccacgcgtccgagaagactcctcaatcatccatagacatggccaccgtcacttctgcagcagtttctattccctcattcactggcctcaaggcaagcgcaggcaaagtgagtgccgccgcagttaaagtctcagctccccaagccacaaggttctgcggcatcaaggcttccctcaaagacgttggagtcgctgttgtggccactgctgcgagcgcagttctagctagcaacgccatggccattgaagtgttactgggcactgatgacgggtctctggttttctctcccaactctttctccgtggcccctggggaaaagatcgtgttcaagaacaacgcacgtttcccccacaacgttgtgttcgacgaggacgagattcctagcggcgtggatgcagggaaaatctccatgagcgaag

SEQ ID NO: 18325 - DNA, 346 bp, Glycine max
  unsure at all n locations
  Clone ID: LIB3106-095-Q1-K1-B3
ccacgcgttcgncaaagcacaaagcatgctcatccttgcgttaaaaaatggcagcagcgtgcttccatggctctctcatccccatccttggctggcaaggccgtgaagctgggcccatcagccccagaagtgggaagggtgagcatgaggaagaccgccaccaagcacgtctcctcaagaagcccatggtacggcccacaccgagtcaagtacttgggcccattctctggcgagcccccgtcctacctaaccggtgagttcccaggcgactacggctgggacactgctgggctttccgcagacccagaaaccttcgccaagaaccgtgaactcgaagtgatccact

SEQ ID NO: 18326 - DNA, 246 bp, Glycine max
  unsure at all n locations
  Clone ID: LIB3106-095-Q1-K1-B4
gcacccctcacattgaagtgaccttcgaagttgatgccaacggcattctaaatgtgaaggcagaagacaagggaactggtacatcagataagatcaccattacaaacgaaaagggacctcttatccaagaagaaattgatagaatggctcgtgaagcataacagtttgccgacggagacaagaaggtgaaggagaggatcgatgctcgcaacantcttgaaacctacgtatacaacatgaagaatc

SEQ ID NO: 18327 - DNA, 427 bp, Glycine max
  Clone ID: LIB3106-095-Q1-K1-A11
gaacatcaccttgtcgataacgatttatattgacacggcttccttaaagatcatcgctggacatcataccaccgtatagcgcacctttgcctccacataagcaacattaaccactctcaaatgcatgtgctggcttccccacgaggaagaccaacaatgacattacctccattgctagcaacggtggaagagtacaatgcatgcaggtgtggccaccaattggcaagaagaagttcgagactctttcctacttgccagacctcgatgatgcccaattggcaaaggaagtcgaataccttctaaggaaaggatggattccttgcttggaattcgagttggagcacggtttcgtgtaccgtgagcacaacaggtcacctggatactatgatggacgctactggaccatgtggaagctgcctatgtttgg

SEQ ID NO: 18328 - DNA, 344 bp, Glycine max
  Clone ID: LIB3106-095-Q1-K1-B5
cctctccccccatgtatcagttcgttccttcctattgttcttcacatttaaaaacaagaagaaaaaaaattgaccacgatcacacgtcctataactagtctccaagatcacttcaccagttaggaactctgtaaggggcaaactcgtcactcgcccacaaaacttgaatcaacaacagtactataaataccagcattgtcagaatcccaaactccaatgcaagtagccacacacccctcccaccgattcattaacttcacacacagacacggtgtttccaccacaccatagcatatagtactagtagattaaacgccaaagaaataaagtactcactgtcacgt

SEQ ID NO: 18329 - DNA, 205 bp, Glycine max
  unsure at all n locations
  Clone ID: LIB3106-095-Q1-K1-B6
gtttttatttgccctacatanttattattaatcgatggatgtcactttgatgttgtgttccgcgttcgtatgtgtatactatctagcaatgcgtttgaactgccaaggacaagagtacttttattgataataaagaaacgaaaacgtttcaattgcgttggctaaaaaaaaaccaccttaggcagaaaaagacactctaaagaaa

SEQ ID NO: 18330 - DNA, 400 bp, Glycine max
  Clone ID: LIB3106-095-Q1-K1-B7
cccacgcgtccgcccacgcgtccttttttttcaccaatctcaaccttgtaagttgaggggttttcacaaattgagctttcactccattttcgttcccaaatactatctccaaattttgattttaccatcgatatacgacacaacatcgcaatttctcgcgggtcgttttgataactggcgaaatcgcacgataccgacagcgtcgtgcggtaatacgacacatttgttgtttgatcatgttagccaagagattaagctctttcttcaaactctccccaaaacctcagatttccacttccatgaagaaagtggatgaagagactggcaaatactatggtagaaaggctgtgtcatttgtcttgattactattacacgtggtgttgctttgagtgcccttga

SEQ ID NO: 18331 - DNA, 406 bp, Glycine max
  Clone ID: LIB3106-095-Q1-K1-B9
cccacgcgtccgctagtttatcgtgtaggagaatatgaagttgtttgttttctttggtgcggcagtagttttggtagcatggccatgccatggcgcaggctaccaaaggttccctctccgaatgaaaactggctatggtgagcgttcttcggaggtaaaatgcgcaagttttaggcttgctgtggaagcacacaacatccgagcctttaaaaccattcctgaagagtgcgttgaaccaacaaaggactacattaatggcgaacaatttagatcagactctaaaacagttaaccaacaagctttcttttatgctagtgaacgcgaagtccatcacaacgacatatttatattcggcatagataacaccgtactctctaatatcccatactatgaaaaacatggatat

SEQ ID NO: 18332 - DNA, 285 bp, Glycine max
  Clone ID: LIB3106-094-Q1-K1-G7
atcttccttgtcactgcccgtgtgtcgccgtcatggccaccgtcaccacccaagcctccggcgcaattttccggccatgtacctcgaaatcgaggtttttgaccggctcttccggtaaacttaaccgggaagtgactatgcggccaatggggtgccctacttctgcctctttcaaggttgaagccaagaagggagagtggttacctggcttggccgtcctaacctaacttaaatggcactcttcctggtgacaatggatatgaccctctggggctagctgaggac

SEQ ID NO: 18333 - DNA, 452 bp, Glycine max
  Clone ID: LIB3106-094-Q1-K1-G8
ggaggggcctcattctgattttgctggaccaacttcgggaagcactgcctgtgttgccgggattagaaacaaccaacttgttgttgcaaatgctggtgattcgcgttgtgtgatatctcggaagggccaggcatacaatttgtctagagaccacaaacctgatcttgagattgagaaggacagaatcttaaaagctggtggttttattcatgcaggacgagttaatggaagtttaaatcttgcaagagctattggtgacatggaatttaaacagaataagtttcttcctgctgaaaaacaaattgtaactgccaatccagacataaacactgttgagctttgtgacgaagatgaatttgtggtgttagcttgtgatggcatatgggattgcatgtcaagtcaacaactggtagattttgttcgtgaacaattgcacttgaaaacgaaacttt

SEQ ID NO: 18334 - DNA, 426 bp, Glycine max
  Clone ID: LIB3106-094-Q1-K1-H1
cccacgcgtccgcaccaaattaatccatatatagagagagttaggaaaacaatggaagccatttctcctaagcatcttatgacatcccttgtaataattatagcttctagtttgaccgcacactgtggctgtgccaagagagggggtgaaagaccatacaaagaagccaacacactgttcataagaacatcttgcagctccacaacatatccaagactctgctacagctccttagtgaagcatgcagacttgatccaaacaaatcgtgtggttctgacaggcgcagccctgaatgtgactcttgcgtcagtggaaatcgacatcggcaatgatgtcaacgctggcaaagaagcaggggctgaagccaaaagaggtgcaacgatgcaggactgtgtggagcagctgagtgacactgtggatgaactg

SEQ ID NO: 18335 - DNA, 406 bp, Glycine max
  Clone ID: LIB3106-094-Q1-K1-H10
ccaaaatgactcaagcccagattcaaccagttaaacttggaacccaaggctttgaggtttgaaaattgggattcggatgtatgggccttactggagcgtacaatgaccctctccaagaacaggatggcatatctgttatcaagtatgcgttcagtaagggaatcacattttttgatactgcggatgtttatggagccaatgctaatgaacttttggttggaaaggctttgaagcagctgcccagagaaaagattcagatagccacaaaatttggtattgctttacgaagttttcctgatttgaagatcaagggttcgcctgaatatgtgcgatcatgctgtgaagctagctttgagcgtcctgatgctgaatacattgatctctattatcagcacagagtggacac

SEQ ID NO: 18336 - DNA, 432 bp, Glycine max
  Clone ID: LIB3106-094-Q1-K1-H11
cccacgcgtccgagtttttgtgccctttccttcttcttacaatcagaaactctgaatcagacagcgtcgggtttgggaattaactccgtccgacaccgttcacggcgactccgggcaccgttgggtttcaactgcttcttgtttttgaaccggtgcagtagagagaggcatgggtgacaaagaggaagagtcggcaatgccaagggacgcaaagattgtgaagtctttgctgaaatcaatgggcgtggaggactacgaacctcgcgtcattcacaagtttcttgagctttggtatcggttcgtcgtcgatgtcttaaccgacgcacaagtctattcagagcatgctggaaaacctgcaattgactgtgacgacgttaagcttgcgattcagtccaaggtcaacttcagcttctcgcaaccaccccctcgtga

SEQ ID NO: 18337 - DNA, 445 bp, Glycine max
  unsure at all n locations
  Clone ID: LIB3106-094-Q1-K1-H12
gccagccaccataacgtgacaccaaattctcattctggcgcgcgtcctcacatccccacaggtaccactattcctcttttcttcttcatcatcttcttcttcttcttcttcttcttgcatttacatcaactcttctcccaacccataaaaaaaaaattaaaaaagttcgtattttccctcccatgatcgaccctcatggtcacagactccaagcccatcattccccggcgcggcctcgtcgtcggcaactactgtcatgacgtcctncaccgcgacggcgagaccgtcgccgagaccctcggcggcgccgncttcttcatctccgttatcctcgatgccctctcccttccctttcacaccgtctccaaggtgggccccaacttcgcctacaccgncgacacatcgaatcaccccccgttaataatcccaacctcccaaaccacgc

SEQ ID NO: 18338 - DNA, 427 bp, Glycine max
  Clone ID: LIB3106-094-Q1-K1-H2
aaagttacaagtaaagtaaattaagaagatcattaatggcttctcttgcaaccttagctgctgtgcaaccagctgcgctcaatggccttgctggaagttccctctctggaactaagctctctttcaagccctctcgccacactgtcaaatccaagaacttcaggagtggtgccgtggtagcaaagtatggtgacaagagtgtgtactttgatttggaggatctggacaaccctcttcagagcaagttcttcgagacatttgctgctccattcacaaagaggggattgttactcaagtttctgatattgggaggtggttccacccttgcatacttcagtgcaacagcctcaagtgacattctaccaatcaagaagggaccacaacttccaccaaagcttggtcctcgtggcaagatctaatttgattt

SEQ ID NO: 18339 - DNA, 356 bp, Glycine max
  Clone ID: LIB3106-094-Q1-K1-H3
gaaaaaagcctttcatagtgagatagccctataaatgtttcgtgaatctttgcttgctctgtttctactttctgccttctcctgctcactcctacctttaaccactgctcaagattacgttctcgacacggacggtcacgcggttgaaaatcacggtacatactatttgttgccagcgaaatcaggaagcggcggtggtggaatagaggtagccgcaactggcaaagaaagttgcgctctcactgtagtgcaatctctgaacgaggactccatggggctaccattgaagctttcaagcccatccatcactacgtctcacttcaccgaatacacttcggtgagcatcgagttcactt

SEQ ID NO: 18340 - DNA, 311 bp, Glycine max
  Clone ID: LIB3106-094-Q1-K1-H4
acggatgtttgtcagctttttcttgcttccatagttcatggcgtgtgttcaagtcatcacagtgcttgtctttgcattggctcttgcaaaaattgacccctcaacatgccaaatggtgcacggcagagtcttctgcgttgactgcactcacaactatgacttatctgatattaaggtttcagtgaggtgtgatggtgtgaaaaaactggctttggcaactacagaaaatgatggctccttcaaggttgatcttcccttagaccacacaaaaccttcttctgtgaagaattgcttatcaaaacttcttgggc

SEQ ID NO: 18341 - DNA, 319 bp, Glycine max
  unsure at all n locations
  Clone ID: LIB3106-094-Q1-K1-H5
gttgttgttaactgaacttttctgagcaagaatgtctgggcgtggaaagggaggcaagggtttgggaaagggaggagcgaaacgacaccgtaaggtgctgcgcgataacaatcagagcagcagccgccgacgagaccacagaggcaccagcaaaagtagaggctgcaccggtcgggttcaccccaccagaacttgacccaaacaccccttccccgatcttcggnggcagcaccggcgggctcctgcgcaaggcacaggtggaggagttttatgtcattacgtgggactcacccaaagaacagatctttgaaatggccaa

SEQ ID NO: 18342 - DNA, 214 bp, Glycine max
  Clone ID: LIB3106-094-Q1-K1-H6
gttctagatcgcgatcggccgccctttttttcttttttttttttggttaattcacatgctgtctttctaggacttttagaatgagggttttctatgggaatcattacaatgatggatgtcacgtaaaagcgggctttaaagactgaaatcccatatgcttttatatgttaattaatggtttgatttactaaacgagatttttaatttaagctct

SEQ ID NO: 18343 - DNA, 447 bp, Glycine max
  Clone ID: LIB3106-094-Q1-K1-H7
cccacgcgtccggcctctcactaccatctcttacacttggtggagaatttggctgaggttatcgaacatggaaccccggatcagccgtctgatgcattgatcaatgaatcgagcaaccactttgagaagtgcctgcagctgctaaactcaatctctggctccattagcaccaaggctatgacagttgagggacagaagaagaagctagaggaaagtgagcaattgctaaatcagcgaagagacttgattggcaattacagaaaatctgtggaggatcttgttaggtctgagccagtagagaatgttgtgctttagatagatctcactgtagacaagtgctttgaatttctccattcccagaacatcttgggattatttatgtaaaactaccttggagtatgccatgaacttataattcaatagatattctgcaagttacttatcatg

SEQ ID NO: 18344 - DNA, 407 bp, Glycine max
  Clone ID: LIB3106-094-Q1-K1-H8
cccacgcgtccgaaaagaaagaaatggcaatctcatcctcatcagagataggttggagttggagggttttgtgtcagagagttaacccagcaataccaaacacgcccttgttcctccaaatcccaaagtcaactcgcttcactgggtcttcttctgttgttgctcgcgcttgggaccctaaaacggcctcttcgcaagaggaggatctagtgtacgtgggaaaactagtggcgggttcttttgcgggtggggctgcaatcaagtacggcagtgctctattccctgagataacgactccgaaccttgtgctggctctgctcctcattctaactcctgtgcttgttgcttgttttcttttgatcaaggaaagtcgtacaaacccataataccaaccttttttttattta

SEQ ID NO: 18345 - DNA, 411 bp, Glycine max
  Clone ID: LIB3106-094-Q1-K1-H9
aggacttcctgaaggcacaaatagccaatcattggttaaggaggccatccatgttataagctgtggctatgaagagaagactgaatggggcaaagagattgggtggaatgctaataagactctgtggagaggccatgttgatgtcccaatgataagagttaattgcacttgtgtgcatgcttttattttcttactgctattgagtggtttgccttaattagaagagttatctgtgtacatagtcttaaaagaggaaagttgggtctgattggaatgtattcatttgatgatacaacaaaaccatatattgtagtatagccattgtcattgtttgggaaaacatgttctgtgttttgtgctactaagatgattttcatctattgagaataggatatatatttttgccacttc

SEQ ID NO: 18346 - DNA, 443 bp, Glycine max
  Clone ID: LIB3106-094-Q1-K1-G6
cccacgcgtccggttcctcccataccaggggccttcctttgcattgttggagatgttggacatgtttggagcaatggaaaattttggaatgccagacatcgtgtaatatgcaaggaaacgggtactcgttattcatttggtgcatttatgttatcaccaagggatggtaatgttgaggccccaaaaaaaattggtggaagttgaccatgtacaacgctatcgaccatttaagtacgaagatttgagggatttcagaatcaccacaggaaagagggatggcgaagtccttgatcaatatcgcatttgttagtcattttatgcatcgaaatacatcgccaatagaactttattttgaaaaataagttggcgataaaataaatgttgcatccattctaaataatttaaatagtttggtgtccttggtcgttcatgaatcctaattc

SEQ ID NO: 18347 - DNA, 231 bp, Glycine max
  Clone ID: LIB3106-095-Q1-K1-A1
cccttcaaaggatccttacaaccaactctggttaaaaaaagaatggctgccaacacatgggtgatttctgccatctcagccttcccatctttcctttcctcctcaaaaaccagattggccccagcagttcctctttccagctttgttggcaccaaggcctctttttttcccttttccatgattgctaatgggatgcctgcccagcctagacccccctaccttgatggttca

SEQ ID NO: 18348 - DNA, 426 bp, Glycine max
  Clone ID: LIB3106-095-Q1-K1-A10
gaaaaacaagtagttgagaactaataagatggaaatggcttcctcaatgatctcctgccgagctgttaccaccgtcaaccgtgccggtgccggcatggttgctccattcaccggcctcaaatccatggctggcttccccacgaggaagaccaacaatgacattacctccattgctagcaacggtggaagagtacaatgcatgcaggtgtggccaccaattggcaagaagaagttcgagactctttcctacttgccagacctcgatgatgcccaattggcaaaggaagtcgaataccttctaaggaaaggatggattccttgcttggaattcgagttggagcacggtttcgtgtaccgtgagcacaacaggtcacctggatactatgatggacgctactggaccatgtggaagctgcctatgtttgg

SEQ ID NO: 18349 - DNA, 310 bp, Glycine max
  unsure at all n locations
  Clone ID: LIB3106-094-Q1-K1-F1
gtctaatcagtaaatttggtggttttgaccttgtcatttatcagaatccatgctcttactgaagttccaggcttcaagccggtgtaggtctctccgctcttgatttttcagtgttttgtgaatgtgttcgagtcttgcaacgagtaagaggtatgtatcaaaggaagtgagtgaagtgactcgtatcttttgttgtacaaaataatgtcattcgatgcctttatggtgacatttaccgttcttacttgaacatttcgttttcctgctgtatatgtgacttctatatataaatntttctgtgcagggaaaa

SEQ ID NO: 18350 - DNA, 343 bp, Glycine max
  Clone ID: LIB3106-094-Q1-K1-F10
cccacgcgtccgcccacgcgtccgcccacgcgtccgaccaggtctaaggcggaaatatccatttcatgaatatgtatctgctgtacttctggtgattgggttgatcctattcacactagcagacgcacaaacatcacctaatttcagtgccattggtgttcttatgatatctggggctttgatcatggactcctttttgggaaatctgcaagaagcaatctttacaatgaaccctcagaccacacagatggaaatgcttttctgctctactgtggtgggattgcctttcttgattcctcccatgcttttcacaagagagttattcaaagcatggacatcatgc

SEQ ID NO: 18351 - DNA, 266 bp, Glycine max
  Clone ID: LIB3106-094-Q1-K1-F11
gttttaatggagataaccaaacttggcaagagatttcaaggtaaggtagctattgtgacagcttccacccttggaattggctttagcatagcagagaggcttggcttggagggtgcatctgttgtcatctcttctcgcaaacagcaaaatgttgatgaggctgctggtaaactgagagctaaaggaatcgaagtattggcggttgtttgccacgtttcaaatgcccaacaaaggaaaaatttgatagacaaaactttacagaagta

SEQ ID NO: 18352 - DNA, 386 bp, Glycine max
  Clone ID: LIB3106-094-Q1-K1-F12
cccatgcaaggagtcgaagcagttcgcgaagcgtgagaagcagtcgataaagaagctggagtcgtcgctgaagctctacgaggcgggcagcgcccccgcactggccattaaggcgagcgtggagaagacgaagaggaggttcgacaactacgcgaagcaggggttgctgtgcggcggcgatgggttgccgcacctgatcgtgagcggagaccagaggcactggggtgagttcatcacacccggaatactattcctgtacatctcgggatggatcggctgggtgggtcggagctacctgattgcgatcagggacgagaagaaacccaccatgaaagagatcatcatcgatgttcctctggcttctcgcttgctctttcaggggtttc

SEQ ID NO: 18353 - DNA, 292 bp, Glycine max
  Clone ID: LIB3106-094-Q1-K1-F3
cccacgcgtccgcccacgcgtccgcaggatctagaaaagccattccatcttcaccaccaagaagaaaataatggcaatggccagtgcaacaactccagccacaatcactgttgtggccatctccagtgttgccagcacaaaaagaagggagaggaatgtgcacttcatcagaggtttgaattcctttggagggttgaaggctcagaacagtgtgacatcactaggtcttcctgtgtgcactgaacagtgttttgcaaaggtggtgagctcattgaaatatcaatcatcatct

SEQ ID NO: 18354 - DNA, 413 bp, Glycine max
  Clone ID: LIB3106-094-Q1-K1-F4
agaacacgtacttgagaactaacaaggagtttcatttggccatctcaatgatactcatccggagcggttactatcgaagaccggtgcaacaactgcagccacaatcactgttgtggccatatgcagagttgccagcacaaaaagaaggtagcggaatgtgcacttcatcagaggtttgaattcctttggagggttgaaggctcacaacagtgtgacatcactaggtcttcctgtgtgcactgaacagtgttttgcaaaggtggtgagctcattgaaatatcaatcatcatctaaggtcagatgtggaggtgctgcctcttcaacatgcaatgctgctggtgagatttttcagattgcagccatcatgaatggtctcgtgcttgttggggtaacaattggatttgtccttcttc

SEQ ID NO: 18355 - DNA, 228 bp, Glycine max
  Clone ID: LIB3106-094-Q1-K1-F5
cccacgcgtccgcccacgcgtccggtcgcgttgtgttgcgtcgtgtcgtgcgctgttcctctgtctgtcgtttttgttttcagaccaaaccctagctccgcatcgcaaccatgtcgaccaagcaaggtggaaaagctaagcctttgaagaaacccaagtctgataagaaggattacgacgaggttgacatggctaacattcagaagaaaaaggaagaggagaaggcgc

SEQ ID NO: 18356 - DNA, 64 bp, Glycine max
  Clone ID: LIB3106-094-Q1-K1-F6
gaattatattatttggctgtatactcttttttatttattcataaaagtactacttaagatggtg

SEQ ID NO: 18357 - DNA, 141 bp, Glycine max
  Clone ID: LIB3106-094-Q1-K1-F7
ctataatactcgtggtctttgatggaaattttgcctgcctcatattcatcatacgaagatgcaatgtacagttttaggagtaggccgtatattctctaagcagcattaggagtattggactgtagcgaactcgatctaatc

SEQ ID NO: 18358 - DNA, 453 bp, Glycine max
  unsure at all n locations
  Clone ID: LIB3106-094-Q1-K1-F8
ctccttcttctctaaacactcatctatgactacctttccctcccctccttcaccatcttcgtcttcttcaattccttctccaagatctagcatgttttactatgctggaagtgaagatcactctgaggagcctcacttcctccaagcttgttttctttgcagaaaaccactcggccaaaaccgtgacatcttcatgtacagagggaacacaccattttgtagcaaagagtgcagacaggaacaaatagagattgatgagtcaaaggagaaaagttggaagctttcttccaaaaggggtgtgagacaatcagagaccaatcaaaattccacacccaataaggctgtaagaacaggcacagttgcagtggcctaatcaaagaataatccatgacatgatgatgagtgnngaaagtgcccaatttttgaaggaaaaaaagatggaatattggaatg

SEQ ID NO: 18359 - DNA, 296 bp, Glycine max
  unsure at all n locations
  Clone ID: LIB3106-094-Q1-K1-F9
gtctaatgttttcaggcttttcggcagagaatagcccattcatcatgttcttggcggtggaaaaccggctgatgtttttctatggagaaacaagaagatatccgcatcgacactcggagttgcgaccgctatatgggttctgtttgaattgcttgagtaccacctcctgactttggtttgccacttcctgatccttgctctggcggngttgttcttgtggtccaatgcatccactttcatcaacaagagtccaccaaagatcccacaagtgcacattccagaggaacctgtttaaa

SEQ ID NO: 18360 - DNA, 323 bp, Glycine max
  unsure at all n locations
  Clone ID: LIB3106-094-Q1-K1-G1
agagtttgttgtgagctataagctagtttatcgtgaggagaatatgaagttgtttgttttctttgttgctgcagtagttttggtagcatggccatgccatggcgcaggctaccaaaggttccctctccgaatgaaaactggctatggtgagcgttcttcggaggtaaaatgcgcaagttttaggcttgctgtggaagcacacaacatccgagcctttaaaaccattcctgaagagtgcgttgaaccaacanaggactacattaatggcgaacaatttagatcagactctaaaacagttaaccaacaagctttctttatgctag

SEQ ID NO: 18361 - DNA, 392 bp, Glycine max
  Clone ID: LIB3106-094-Q1-K1-G10
cttgctatcttcactaacatgtcctctttaacgttcacaacggaggtagcatccagcttcgtcggcctcgcttatcacaatcccaaacccttcactctctcactccaaaccactcttctccctcttctacgcagaacaaccactcattcccgatcgctaacatttcctctccgaccctctcgccgcttcttcgttacctccgccaccactgcacctcctcaatccgaggattccgacgtttccaccgtcattcctcccgacaatcgcataccggcaaccatcatcaccggctttctcggctccggcaagacgacactgctgaaccatattctgaccgcggaacatggaaagaaaattgcgggtattgagaatgagtttggtgaaattgatat

SEQ ID NO: 18362 - DNA, 205 bp, Glycine max
  Clone ID: LIB3106-094-Q1-K1-G11
tcgcaaactcacactattataatttactttttattttacatggctgaacaatccttcatgatgggctagctttatgacgtgcatggatgccttattagtctgatcattaacacatttgagaagaaaggtttctacttgaaaggtttgaatcttgctactgaagaccgtccttatactcataatcactatacttatatatctgcca

SEQ ID NO: 18363 - DNA, 438 bp, Glycine max
  Clone ID: LIB3106-094-Q1-K1-E9
gtttgagagaaaggttgagctatagcctaaagggagagacacataaatagtttctactttgtattcatagatagatggctggcccaattatgagacctcagattgtgctatttggctcctccataattcaaatgagcttcgacaatggtggttggggtgctattctagctaacttgtacgctaggaaggcggacatcatcttaagaggatactctggttggaattcaaggcgggctttggaggttttggatgaaattttccccaaggatgcttatgtgcaaccatcattggtaattgtgtattttggtggcaatgattctattgatcctcacccatctggccttggtcctcatgtaccccttgaagaatatgttgaaaacatgaggaaaattgctaatcatcttaagagcctctcggaccatattcgcattataattc

SEQ ID NO: 18364 - DNA, 430 bp, Glycine max
  Clone ID: LIB3106-094-Q1-K1-G12
gagaaatattccaagccgggttctgttgccgttaagaaagcctactttgaggctcattacggaagaaaggctgcagagcgagcagctgctgtgatccaagaagcaaacgctcaggctaatggaacttttgaggcacaagttcatgaaggaaactgtgccgattcatcctctgagacaagttcaaatgtggaaaacactgtggccgccaatgaacagccggataatgaaactgttaattaccaagttgttgaatgtgctgatagagaccaacataaatgtgatgcccgacaaagtgatttggacatttctaatgtggaaggagcagaggatgtgccgcgtcatcacactgctacggatcttaatgtggaaagttgcagatttgttgataattctaattctaaccagctttatcttggtgaggacaatacag

SEQ ID NO: 18365 - DNA, 379 bp, Glycine max
  Clone ID: LIB3106-094-Q1-K1-G2
cttttctccaaaaccatccaacatgggaaacagaatattattccattttttcacttccacggtttggtgcattcattccccattttcaactatggcctcttcagctcaattttccaccactttggtcgtactatgtctcttccaattcctagcaggttcatattcaacgacattcacaattgtgaacaagtgcagctacacagtttggcccggcattttaaccggcgccggaacctcaccgctctccaccaccggcttcgtcttacaacccggcgagtccaacgtgatcaccgtgccggccgcctggtccggccgcctctgggggcggaccgtctgcacccaagacgccaccggaaaattctcctgcgttacaagcgac

SEQ ID NO: 18366 - DNA, 300 bp, Glycine max
  Clone ID: LIB3106-094-Q1-K1-G3
cccacgcgtccggcaaaacatattattttcattttcatctttttttgagtatcaacaaatggcaaccactgtgatgaccactctcccccaattcagtggtcttagaccccaattctcagctgcccctgtgaagaacttggttgctgtgcaacccatgagtcgcaaggggaagggtgcattgggagctcgatgtgactacattggttcatccactaatctgattatggtggcttctacaaccctgatgctgattgctggaaggtttggattggctccatcagcaaacaggaaagccactgc

SEQ ID NO: 18367 - DNA, 379 bp, Glycine max
  Clone ID: LIB3106-094-Q1-K1-G5
cgcgtcctcggtggtggaagttgcttgaacgctggcttttacactcgcgctagccctcagtgatgtaagggaagcggcgtgggatggaagggtagtgaatgagtcgtacgaatgggtggagaagatagtggcatttgagccacaattgaagcagtggcagtcatctgtgcgggatggactaatagagataggtgtggtgcctaataatggcttaacttatgaccataatggtgggaactaaggtagggggaacatctttgaccagaatggcttcaagcacactggtggtgaacctctggaatatgccaaacccaatggaattaacctggttttggatgccactgtgcataggatcttggttagagtcaaagatagatca

SEQ ID NO: 18368 - DNA, 413 bp, Glycine max
  unsure at all n locations
  Clone ID: LIB3106-094-Q1-K1-D2
cccacgcgtccggaaagaagacatttccttccgaattgaggaagggaaaggtgtcttggatggccaagtcatcttccttagctatcacgttgatctgcgccgccacggtattggtggcgatgagtcggtggccgacagccgtgggcggcggggaccaccacttgggaatgggatgggtttccagcacgtgcaaggggaccattgctgagtgcctgggaggggaggagtacgagttggattcggagatcaaccggcgcatcttagccaccaacaagtacatcagctacgttgcgctgcagaggaacactgctccctgctctcgccgcggcgccttctactacaattgccgacccggagcacaggccaatccttacagccgtggctgcagcgccattacgaggtgcangagctga

SEQ ID NO: 18369 - DNA, 399 bp, Glycine max
  Clone ID: LIB3106-094-Q1-K1-D3
cccacgcgtccgagttgagaactaagaagaaggaaatggcttcctcaatgatctcctccccagctgttaccaccgtcaaccgtgccggtgccggcatggttgctccattcaccggcctcaaatccatggctggcttccccacgaggaagaccaacaatgacattacctccattgctagcaacggtggaagagtacaatgcatgcaggtgtggccaccaattggcaagaagaagttcgagactctttcctacttgccagacctcgatgatgcccaattggcaaaggaagtcgaataccttctaaggaaaggatggattccttgctcggaattcgagttggagcacgggttcgtgtaccgtgagcacaaacagtcaccctgatactatgatggacgctact

SEQ ID NO: 18370 - DNA, 328 bp, Glycine max
  Clone ID: LIB3106-094-Q1-K1-D4
cccacgcgtccggaaacatgcaagaggctgaggatcatgaagagttctgatgccattggtctagctcccagggctgttgaaaaatgtaagagcagaacctaggcagtaccagtgttcctcttcgaacatggtgtattggaagcgagaactgaaggcatatgggactggatagaatctcatactaagctgccataatccttctattgtttattatgtgtccgttttatgttgtcatggcgtttatgatttagtaagcttcttttcaagattgctgtgataaaacttaacaaaactctaagacttgacttggggagtagctatattttat

SEQ ID NO: 18371 - DNA, 373 bp, Glycine max
  Clone ID: LIB3106-094-Q1-K1-D5
cccacgcgtccgcccacgcgtccggtgagaactgagaatgcaggcatccaaggaggagatgattgatgctctatacaagccattggaaaatgagagtgatgatggtattatcaggcctatcaacatcttggtgaggttaatgttcccaagttcactgtgattgtggcacaataaaatcatcataccaagctgtttctgcctaatggcccagaaaatgttcctcctgggacggctgtggacacaacaatcacacatccaaaattatgatttttacatgtgtgctcatgcagggatgcttgaaccaaaggagcacaattgcaacctcaggtgtggcacccaatatgttatgctcaccatgctgcaacttaaaatg

SEQ ID NO: 18372 - DNA, 261 bp, Glycine max
  Clone ID: LIB3106-094-Q1-K1-D6
attttccaaacgagcatcttcgtagtttcttaagtcaagagaagaagtgaagtgctgcttcaatggcttcaagtcaggaagaggtgatccttttgggggttattggaagcccatttctgcacagggtgcagattgctctcaaattgaagggagttgaatacaaatatttggaagatgatttgaacaacaagagtgatttgctcctcaagtataacccagtttataaaatgattccagtgtttgttcacaatgaaaagccca

SEQ ID NO: 18373 - DNA, 364 bp, Glycine max
  Clone ID: LIB3106-094-Q1-K1-D7
cataacttgcatagactattgattaagaaagctattgtcattgatttgctagctccaacaatgggttctagcagattatcattcattttagtacttgtgcttgtaaccttttcatccatgatcattgactcaagggttgcagaggcacgtaccctgccaaaatcagccttattgccttccaaagttgatatacctactgttgttcctcttccactggtggcaccactgccaaatttgcctgttactctccctacagtgcctgaactacctgcagtacctaaagtaccaattcctgaagtaatagttaataacgccaaaataatcctttgagtacctatgatctatccagtcacttactactaat

SEQ ID NO: 18374 - DNA, 384 bp, Glycine max
  unsure at all n locations
  Clone ID: LIB3106-094-Q1-K1-D8
ctctcatctctctcgccctctctctcacattttcaccatttcacctatttttctctctctgtctctctctctctcgcatcacaatttcatcaaaaccttttaagtcttcatagttttccttctttctttctttgtgaaaaaacaaaaagtccaaaccatggctcagaaaaccgagaaagaagaaaccgacttcaaggttcccgaaacgattacgctttgcgttaacaactgcggcgtcaccggaaaccctgctacgaataacatgtgtcagaagtgcttcaccgccttcaccacctctaccgtcaccacgtccggcgccggaggtgccggaatagcttctncggctaccagatccggcatctncgcgcgtccactgaagagatc

SEQ ID NO: 18375 - DNA, 441 bp, Glycine max
  Clone ID: LIB3106-094-Q1-K1-D9
ctcaccgattgctagaatggaatttcgatgctcagtcatctcttttaccattctcttctctgcttgctcttgcaggagagagccatgtccatgcatcgctacctgaggaagattattgggaagctgtttggccaaacactcccattcccactgcactgcgagagcttctaaagcctctccctgcaggtgttgaaatcgatgaactccctaagcaaattgatgatacacagtacccaaaaacattcttctataaagaagaccttcatccaggcaaaacaatgaaagtacaattcaccaagcgtccctatgcacaaccttatggtgtatatacatggttaacggatattaaagacacctctaaagaaggatatagttttgaagagatatgcatcaagaaagaagcgtttgaaggagaagagaagtttgtgcaaaatccttggg

SEQ ID NO: 18376 - DNA, 77 bp, Glycine max
  Clone ID: LIB3106-094-Q1-K1-E1
cccacgcgtccggtgatggtactccacactgttcatcccgctttcaactacaattggttaggacgattcatactaac

SEQ ID NO: 18377 - DNA, 430 bp, Glycine max
  unsure at all n locations
  Clone ID: LIB3106-094-Q1-K1-E10
cccacgcgtccgccgaggctatgaagcttgtggctgcagccaaagtgagaagagctcaagaagctgttgtcaacggaagacccttctcagagaccctcgttgaagtcctctacaacatcaacgagcagctcctaactgaggacgtagacatccctctcacaaaggttaggcctgtcaagaaagttgcacttgttgtggtcaccggcgaccgtggtctctgcggcggtttcaacaacgcaatcataaagaaagctgaggctagaatcagggaattgaaggagcttggcttggaattcactgtcataagtgttggcaagaagggtaactcttatttcatcagaaggccttatattccggttgacaggtttctagaaggtggcacacttncaactgctaaggaagctcaagccattgctgatgatgtnttctc

SEQ ID NO: 18378 - DNA, 280 bp, Glycine max
  Clone ID: LIB3106-094-Q1-K1-E11
attaagttcattttcctccctttcactctcgtagacatcacaaaccttccctccattcatgccacgcatggctgccatgaactctagcgtattggcctgtagctatgccatatcaggtgcagcgtgttcggagctcaatgggaaggtcacttccgtggcctatgttgcatgctctggctacaagttgccattgatcaaagctgaggccagagttcctaaagccaaagaatctgaaggaggaaggagaggtgcccttgttctcttggcagctacccttttc

SEQ ID NO: 18379 - DNA, 208 bp, Glycine max
  Clone ID: LIB3106-094-Q1-K1-E12
accaggcacacactaaaccttagcattcagatgcacatccccaaccttgcctacaggcatggcacgcatgtctgccaagaccgccaacgaacacacctgtatacatactatactacatgaagattactcagatctcaatactaataccaactcaaacccctatgacaaatgctataactacaacctgccctacctcaacaccaaggcc

SEQ ID NO: 18380 - DNA, 351 bp, Glycine max
  Clone ID: LIB3106-094-Q1-K1-E2
cccacgcgtccggttacgctctaaccggttattcaactccgcatccaattcaatgcaatgttgagaaataaaactcaccactagcttcttcaaccaccatcaacaatgaggtattattcccaattcaaacacttatcccatttcctcaaaaccctaacccgacgaccccaaaaccctaccttcgcttctgcacggatctcacagaaccttccaccgcgtcccttccacgcgcgtgactactgcagcagcggcggcgcgtcgctgtcgcagggttcggagaaggtggcggcgatcgtggacgaggtgatggggctgacgctgctggaagtgatggacctggtggaggtcatg

SEQ ID NO: 18381 - DNA, 333 bp, Glycine max
  Clone ID: LIB3106-094-Q1-K1-E3
gaagctctgcctattctcatagaaatgtttttggttaaaaccagaagctcaatatttccggagagaggggccagattgactcagtctatcgcataaattacacagacccttggattcaaggagatgataaacgaacatctagaacaataatgattcagaattcaagaacacctggaaccattgctcatggtaatgcagatcgtaatggtagcctgaccattgtccgcatcacaggctgcatagagtttagtcgaccaatcaatgccaagtggatcggaacagtgggacttgtcttccagcatgccatagtacgtgatgatgctggaatcctat

SEQ ID NO: 18382 - DNA, 345 bp, Glycine max
  Clone ID: LIB3106-094-Q1-K1-E4
cccacgcgtccgcccacgcgtccgcccactcttccgcaatatagcccaagccctatacaggcaaaccctaacacacacccatttgattcagtttccatggctagcctcaaggttgcatttttggctgcagtgctctgcatggttgtggtgagtgcacccatggcacatgcagctatcacgtgcgggcaggtgacgagtagcctggccaattgcatcggttacctccagaagggaggaacgccgtcgtcgggatgctgcaacggattgaagagcctcaatgccgccgccaagaccaccgccgaccgccagacggcgtgcatctgcctcaagtcggccgtcagccaa

SEQ ID NO: 18383 - DNA, 302 bp, Glycine max
  Clone ID: LIB3106-094-Q1-K1-D12
gatttttatacaagtaaaaaaaaaaaaaaaataaaaaaaaaaaaaaaaaaaaaaaaaaaaagggaaaaaaaaaaaaaaaaaaagaaaaaaaaaaaaaaaaaaaaaaaaaaaaaaaaaaaaaaaaaaaaaaaaaaaaaaaaaaaaaaaaaaaaaaacaaaaatgaaaaaactgggaatgagtaaaacatggaaagaaggaaaaaaataaagaattaacaaattaaaacattgagacaaatattaaaaaatttatcaagcttaaaaacaaaggaatagggaaaaaacgaacagactaacaaaaa

SEQ ID NO: 18384 - DNA, 412 bp, Glycine max
  unsure at all n locations
  Clone ID: LIB3106-094-Q1-K1-E6
cttcacaacacctcacccattttccactctttcccttctaccttgttccacctcttaattgttctaacaaaatggaggaaagtgtgctaacaaagaggccaagagaagaagaacccctagagaacaaagatagtacttatgaattactagagtccttatcaaagaggcacaggtcatacaaccacatactctccctccttgaatcagaggaagatgactccacacaagacctatcttctctcatcacttccctccaacaagaaatcaccaattgtgcctctgattcggacacccttttgaaccaacacagcctcaccaacaccaccaccaccaccacaacaaatagtaatttagaggatggttcatcctcaacaactaaatattctagtgacatgatggangaacatgatga

SEQ ID NO: 18385 - DNA, 328 bp, Glycine max
  unsure at all n locations
  Clone ID: LIB3106-094-Q1-K1-E7
cccacgcgtccgagaagttgatggaaaagtgggggttggtgcactgtttgtcaaggtcagtatggatggtgctccctatttaaggaaagtagacttgaagaattactctacatatccagaattatcttctgctctagaaaagatgttcagctgttttactatgagtaaatgtggatctcatggaattctgggcagggagatgctgaatgaaaccaagctgaaggaccttcttcatggatcagaatatgttcttacatatgangacagagagggcgattggatgcttgtgggtgatgttccctgggagatgtttattgaaacatgcaag

SEQ ID NO: 18386 - DNA, 327 bp, Glycine max
  Clone ID: LIB3106-094-Q1-K1-E8
gcaaccttcttcatctgtgaaaactcttctttttctcatcattcttactataccatcgaccagttcaagccaattcatgctgtcacacccttacttatctcttactttctacaccatcagatgcaccaccactgataataactatcacaatactactaacaacaacacaaccaatgatgatgcaaactcaacttaatttcaatcaccaatggcatcatcaactaatcccgtagaaatactcttacggataagatctatacatcatgccaaacgactgccatagaacaatgccattcaatccacatctaaagtgatgcatttatactc

SEQ ID NO: 18387 - DNA, 439 bp, Glycine max
  Clone ID: LIB3106-094-Q1-K1-B8
cagcgatcgaagtttcacatcagccttatccagtttagggtttcggttccttaccctacctttgacgtatcgaaaccttaaatttgggattaggtctgagcaatctggttggtagaacctttggtcttagagagtcaagttttatgtctggattagacgatcaaattcctactgccttcgatccttttgctgatgcaaatgctgatgactcgggtgctgggtcaaaggagtatgtgcatattcgcgttcagcagcgaaatggtaggaaaagcctgacaaccgttcagggattgaaaaaagaattcagctataacaagatacttaaagacgttaagaaagagttctgttgcaatggaacagttgttcaggacccagaactaggacaggttattcaacttcaaggtgatcagaggaagaatgtttctactttcctagtaca

SEQ ID NO: 18388 - DNA, 293 bp, Glycine max
  unsure at all n locations
  Clone ID: LIB3106-094-Q1-K1-B9
cccacgcgtcctgtacttttgcaaatttatttgaaacctgctgtggnactnnnagtganggatgcatccttaaaaagtggcatgttcacttactcacagacactcattgataagccagttactaagcctatcataataaagcagcaagacatatacaattcacataccaagccacctatcatattcacttatagagcaccttgacatctacaaaaaacaatatcataaatcttcattattctatgataccctccatactcacaactacttaaattctaatctcactacaccta

SEQ ID NO: 18389 - DNA, 361 bp, Glycine max
  Clone ID: LIB3106-094-Q1-K1-C1
cccacgcgtccgcagggactcactctcttcgcagcggcactctcggtggctttcatcttcttggggtgagttgtcaagatgtacacatcgaggaagaaaattcacaaggataaggatgctgagccaactgaatttgaggaatcagttggacaggcattgtttgatctagaaaataccaacaatgagctgaaaagtgatctgaaagatttatacataaactcagctgtccaaattgatgtttctggcaaccgaaaggctgtggttatccatgtcccctacagactaaggaaaggattccggaagattcatgtcaggcttgtgagagaacttgagaaaaaagttagtggaaaagatgtaatct

SEQ ID NO: 18390 - DNA, 441 bp, Glycine max
  Clone ID: LIB3106-094-Q1-K1-C10
tgcttcttcgttcttctctctggcgaccaatctcgaagaatccaaacagcaggtttgttgtggaagatgagtggtgttgttagggctgcattgagatccaccactagtgtttgtgcacttgtgcagagaagccatggcctcctcccattgaggtgcttctccactgaggcagaacagccacctttgaattcaacaccccctcctcctccgttctttgagactgaccattcaggtttgacatatggtaatctgcttggtgttcgtaaatatgcgctgaaaactgatatcatcaactttcttgaagggtgtaatttgactctggaggatgttaaaatggattatgaccgtagcttttccccagtttcaacgttgttgcaattccctactcgtgattcctttgaccatgctgtaaaagtgattttaaagaagggtcgcttgtac

SEQ ID NO: 18391 - DNA, 198 bp, Glycine max
  Clone ID: LIB3106-094-Q1-K1-C11
aacgaactttccaacatctgaagaaattagcacactgattaatcccttaacttttggcaatttaatgtaaagaaaatcgagaatggccgagagcctgtctgttatgtgggctatatactccgttggctatgtaatacgaatattgcaaatgctggcaggtaattataatatcaacagctggtactgctttagtttcat

SEQ ID NO: 18392 - DNA, 260 bp, Glycine max
  Clone ID: LIB3106-094-Q1-K1-C12
gggctatatagcataaacatttgagtcttcattgcacaatgtcgacctcttccattaacgggtggtgcctctcttccatctgcccagccaaaacctctctcaagaaagccacattaggccccttctgtcttcgcaaccgttagcactccttcttctccttcttcttcttcttcttcttccttcccttctctcattcaagacaagcctgtctttgctggccctggccccatcatcaccccaactgtgaaaaaagatatggc

SEQ ID NO: 18393 - DNA, 257 bp, Glycine max
  Clone ID: LIB3106-094-Q1-K1-C3
cttccatggaggtggtttttgtgacaagtcattgcttgcctttttattgtatctgtctgctagtgttttgtaacctttttaggttgacccagttaggaataatgaagtgtatattaatatcaaaaaaataaattaaaacaaacataaaaaaaaaaaatgaaaaattgaaaaactatctatggttgaatagatatgtaaacgaaattgctgagttgtacgaggtccaactgaatattgagtacattctagttgactat

SEQ ID NO: 18394 - DNA, 423 bp, Glycine max
  unsure at all n locations
  Clone ID: LIB3106-094-Q1-K1-C4
tctaatcactctagctgttgcaaatttctactatttttcaatggcttctgcagatgttgagttccgttgctttgttggtgggcttgcttgggtcaccggcaacgatgccctcgagaaagccttttcaatctacggcgacatcgttgaatcgaaggttatcaacgaccgtgagactggaaggtccagaggattcggatttgtgaccttcgcctcagagcagtcaatgaaagatgcgatcgcaggaatgaacggccaggaccttgacggccgtaacatcactgtcaacgaagctcagacccgngccaggcgtggtggtggtggaggcggtggtttcggaagtggtggtggatacaaccgcggtagcggtggatatggtggtggtggtggcggcggcggatacggtggtcgtcgtgaaggtggata

SEQ ID NO: 18395 - DNA, 282 bp, Glycine max
  Clone ID: LIB3106-094-Q1-K1-C5
tgcactttaatttaaagaagaaaaatatatataattgaaaatgatcagtgattagttaatataattcaagaaagtatttcttaagttttataacatcaaaaagtttttttaaaatttttcttcacaaaaaatctaaaacacagcatacttttggaattataatgtcacctccatcaatgtataatgtaatgatatgtcttatttctttatgtttaaaataataaataaaagaacaaaaaaagaactaaaaatatagctttaattcaatatacatgtcaatat

SEQ ID NO: 18396 - DNA, 446 bp, Glycine max
  Clone ID: LIB3106-094-Q1-K1-C6
attttattttatttttgaatcaagggtgagggccttccatggcttccgcttgtgcttcctgtgcaattacagctgttgccatctctacgccgagttccgggcagaagaatggatcaggaggttgttttcttagtggaaggaaattgagggtgaaaaaggagagagcagcacttggaggacgatcgatgggcactacagtgtgcgcagatgctgaacctgacagacctctatggttcccaagcagcacccctcctccatggcttgatggcactctacctggagacttcggctttgaccctcttggtcttggatctgacccggagagtctgagatggaatgttcaggcagagctagtgcactgcagatgggcaatgttgggtgctgctggcattttcattccagaattcctaacaaagaatggtgtctggaacactccttcatggtac

SEQ ID NO: 18397 - DNA, 295 bp, Glycine max
  Clone ID: LIB3106-094-Q1-K1-C7
cccacgcgtccggaattttgtccttcaacgaaggacactttctcatagccacgagcattgagtttccacccatggctgctctcacttctctatctttctcagcagtgactcattgctcagaaagaaaagtgaccctttcctccactcgctttctggcttcctcctcagagatatttgggttccgaaccgatttctcgtaccactatgttggtgttcgagcttccaattccccatctaaaatggttgttcaatgcatgtcttctgctacagatgttcctgccactgtttctgagac

SEQ ID NO: 18398 - DNA, 443 bp, Glycine max
  Clone ID: LIB3106-094-Q1-K1-C8
caaaagagaagcaactttgaaaactcaatggctgcaacttattatttactgccaacaagtccgaaaactttctcacctttcctcagaaacccaccttccattccttcaggtcatcatgtttcactgttgggttcattattggactatccattccattgttccagcagaagaggaaacaatagtgttgaggccaattgcaatgcataaaagaagaacccttggttagacccttttgatgatggggaggatcctgagatggagtatggtttccttgtttgcagatgggaagcaggaagaggatcctaggccacctgatgaccctgacaacccttatggattcttgaagttcccttctggatattctgtggagatagcatccttggcattgaaagtgaaaggggatgtgaggagatgctgctgtgtgatatctgggtggtgttatg

SEQ ID NO: 18399 - DNA, 379 bp, Glycine max
  Clone ID: LIB3106-094-Q1-K1-C9
tgattcgttcgttcactttcactttaccaactcctaacaatttctctctgtttccttcttcaccgcatcaatggagttggacggcgttctcctcggcatgtgcaaccctctcctcgacatctctgccgtcgtcgacgacgctttcttgcaaaaatacggtatcaagttgaacgatgcgattctcgctgaggataagcacaaacctatgtatgaagaattggctaacaatcctaatgtggagtacattgctggaggtgctactcagaattcaatcagggttgctcagtggatgcttcaagcaccaggtgccacaagttacataggttgcataggaaaggacagatttggagaggagatgaagaagaaatgtacacttgat

SEQ ID NO: 18400 - DNA, 410 bp, Glycine max
  Clone ID: LIB3106-094-Q1-K1-D1
cccacgcgtccgcccacgcgtccgcttcgaagtcgtcgtttatctctcctcgttcgcatcttcaccctttccctgtctctcagaaagatgaaggtggtcgctgcgtatctgctcgccgtcctcggtggcaacaacaccccctccgccgatgacatcaaggaaatcctcggctccgttggaatagaggcagatgaagataggattgaatcgttcttgtctgaagttaagggtaaggatatagttgagctaattgctgccggtaaggaaaagctggcctcggtgccttctggtggcggtggtgccgttgccgtcgccgctgctcctggtggaagtggcggtggtgctgctccggctgctgaagtaaagaaagaagaaaaggtggaagaagaagaggaatctgatgatgatat

SEQ ID NO: 18401 - DNA, 452 bp, Glycine max
  Clone ID: LIB3106-094-Q1-K1-B7
cccacgcgtccgctctctgggcaatgagttgaggagatccgtcagcgagaagcttcatcacgttgatgaggccgatgctgccaagcaaggtagggttctaaagtatatacaaactgagaagcgacggaggaggagccaccgtgcagaagaccccataagaaccttgatgttcttaggctctatgaatcacacgtgacatatgatattattaatgaggtatttgggcctatagccttggtgttgaaattaattaaccccctttgactaattgggggtgaaaaatcaaaaccgaaattcatttcaattgtcacatatatgttaatacagcagtgatgtaaatatgtcatggaccttcatatctatagctagaagtatcccttacttcagatcggttatatttcgaaactatataccaaaaaatatcagcctatatgtatatgcttatatcatct

SEQ ID NO: 18402 - DNA, 445 bp, Glycine max
  unsure at all n locations
  Clone ID: LIB3106-094-Q1-K1-D10
caaggacaatgaataaaggttccagatattccaaagtaatttgaggtacatcaacgagatgaatgcgaagaggaagtcacctacgacgcaacatcgtttgggtctgaacaagtttgctgatatgagtcctgaggagtttatgaaaacctacttgaaagaaatagagatgccctactccaacttggagagtaggaagaagctgcagaagggtgatgatgctgactgtgataatcttcctcattctgtagattggagggacaagggagctgtcactgaagttagagaccaaggaaaatgccaaagccattgggctttcagtgtcacggnggccatagaaggaataaacaaaatagttactgggaatcttgtttccctatctgtacaacaagtcgtggattgtgaccctgctagccatggttgtgctggaggcttttacttcaatgcg

SEQ ID NO: 18403 - DNA, 317 bp, Glycine max
  unsure at all n locations
  Clone ID: LIB3106-094-Q1-K1-D11
cccacgcgtccgcccacgcgtccgcacacgttagaaagcaaattaagctgagtgcaagtgcttcattgagaaaatgaagatggaaattgaggaagttggcaactgcgaagcacttgctctgctttcactcaaccacgtgttcctctcgtgcagatcggagtgggtgtctatgaggttttatgaggatggcttgaagattgttcccatcaaacgcgcttcttcttgcaagtacactggagcctgggtttacaattatggcattggaatacactcgatcgagagtgccaacattgatgaatntgatacctgcgctaatg

SEQ ID NO: 18404 - DNA, 430 bp, Glycine max
  unsure at all n locations
  Clone ID: LIB3106-094-Q1-K1-A4
cccacccgcaccggcctcatcctgacgctgcaggaaatgggcgccgacatcgaagtcatcagcccgcgccttgccggcggcgaagacgtggcggacctgcgcgttcgctcctccacgctgaagggcgtcacggtgccggaagaccgcgcgccttcgatgatcgacgaatatccgattctcgctgtcgccgccgccttcgcggaaggggcgaccgtgatgaacggtctggaagaactccgcgtcaaggaaagcgaccgcctctcggccgtcgccaatggcctcaagctcaatggcgtggattgcgatgagggcgagacgtcgctcgtcgtgcgtggccgccctgacggcaaggggctcggcaacgcctcgggcgccgncgtcgncacccatctcgatcaccgcatcgncatgagcttnctcggcatgggcc

SEQ ID NO: 18405 - DNA, 422 bp, Glycine max
  unsure at all n locations
  Clone ID: LIB3106-094-Q1-K1-A5
agaaaatggcggtgcctctgctctcaatgaagatcgtgaagaagagggtaaagaagtgcaagaggcctcagagtgacaggaaaatttccgtcaagactaactggcgcagaccaaagggtatcgattctcgtgttaggagaaagttcaagggatgcactttgatgccaaacattggttatggttcagacaagaagacccgccactatctccctaatggtttcaagaaatttgttgttcacaatgtgaaggatttggaactgctcatgatgcacaacaggacttactgtgctgagattgcccacaatatatccacaagaaaaagaaaagatatagtcgagagagccgcgcagcttgatgttgttgtgacanacaaaacggccaggattacgcagcccaggaggaaatagtctaaatgactgaaa

SEQ ID NO: 18406 - DNA, 297 bp, Glycine max
  unsure at all n locations
  Clone ID: LIB3106-094-Q1-K1-A6
gagagaaaatggcagcgcctctgctttcaatttagacccacacgaagaagccatagagccggaacattctccangatgacaggactatggaaatcaatactaactgatgcataccaaaaggcatagaacgtcatgaaaacagaaagatcaaggtaagcactgagaagaccatcataggtaaaggtgcagactctaagacctaaggaaatgtaacgaacaagatcaggaaatcagaaggacccaatgagaatgatcatcaacagctcaggatgcacaacataacttactgcgctgata

SEQ ID NO: 18407 - DNA, 398 bp, Glycine max
  Clone ID: LIB3106-094-Q1-K1-A7
ctctgtctctgtcaaccgtgcctgcgttcaattctctcacaatggctgaatcctgcctcgtatctctcccttccctcttctacgccaaaaacaaaaccctttctctctcaattcccactaatcctctcaacctgcaattcccatgctcaaactcttcgctttttcccctcaccaccaagactacgcgccactcttctctcctcacattcgtggctcagacatctggttgggccaaagaaggggaggaggaagaagccgcgtgggagaaccaaggcgacactgcgtggggaactgaagaaggtggcgatgatatagaagatggcggcgaagggggtttcgctgaagaagaagctgaagaagtaagatcttcgttgggaacctgcctttcgacttcgaca

SEQ ID NO: 18408 - DNA, 421 bp, Glycine max
  Clone ID: LIB3106-094-Q1-K1-A8
ggtttccatgtccatgccttgggggacactaccaatggttgcctctcaactggatcacatgtcaatcctaataacaaggagcatggtgcccctgaggatgagaatcgtcatgctggtgatcttgggaatgttaatgtcggtgatgatggtactgtcagcttcactattactgacagccagattcctctcactggaccaaacaacatcataggaagggcggttgttgtccatgctgatcctgatgatcttgggaaaggtggtcatgagcttagcaaaactactggaaatgctggtggcagagtagcttgtggtatcattggtctgcaaggataaactaatcacatgaagttggaaacgtgctttagatttgtggataaagtagcacccatttaaaccccgttggttaggtccggtctgtact

SEQ ID NO: 18409 - DNA, 385 bp, Glycine max
  Clone ID: LIB3106-094-Q1-K1-A9
gaagagaagggctacacatacacaatctctaatggcactcaggatgtgggcttcttccactgccaatgcactcaaactctcttctgtctccagacctcatctcttgcctactttttctttctccagatgcttatcttccgtcttggatggacttaagtacgctgattcacatgaatgggtcaagcacgaaggctcagtcgccaccattggtatcactgaccatgcccaggaccatcttggagaggttgcgtatgtggagctgccagaaccaggtggcacagtttccaagaagtctggcttcggagccgttgaaagtgttaaagcaacacgtgatataaactctccaatctcgggggagatcgttgaagctaacaaatagctcaca

SEQ ID NO: 18410 - DNA, 442 bp, Glycine max
  Clone ID: LIB3106-094-Q1-K1-B1
cccacgcgtccgctctcactcatggcaacaacactcatgtttttccgaccaaccatgatccgggcgtgcgctggttctcccgccaagcccgacccgagaaacaggaagcccgtttcctccaactggtgggctcctctgttcggatggcccgcggatccggactacatgggcccattgcagaaggcgagtgagaaatcggatccggagcgggaagtgggcctggacctgggccggcccagatccaagttcacagcggggtgcttcacggagaagaaggcgaaagagctgagaaagaagaccgtggaaacgtcgacgtttcatgacatcatgtaccactccgctattgcatccagactcgcgtccgatgtttccaaagggtacgagaaataaatgttcggttttaattaatgttttttctacccttagactcagactcactcat

SEQ ID NO: 18411 - DNA, 372 bp, Glycine max
  unsure at all n locations
  Clone ID: LIB3106-094-Q1-K1-B10
cccacgcgtccgaacctttctcattccccatctcctcaccttattcagccactgctaatttctagggttccgaaatggacgctggcggaaagatcaagaagggcgccggaggaagaaagggcggcggccctaagaagaagccggtttcaaggtccgtcaaggccggtctccaattccccgtcggaagaattggccgttatttgaagaaaggaaggtacgcccagcgtgtcggtaccggtgctcccgtttacttggccgcagttctcgagtacctagctgctgaggtgcttgagttggctgggaatgctgcacgtgacaacaagaagaacaggattattccgagacatgtgctatnggctgtgaggaacgatg

SEQ ID NO: 18412 - DNA, 348 bp, Glycine max
  unsure at all n locations
  Clone ID: LIB3106-094-Q1-K1-B12
gtcgaaaggagttagtaaatccttaaatagatctcgttggtttcgagaaattagtctttgggtcacgacaaagaatatttgggataaccaaaataaataataaaaaaaaaggttaatgcatggttgttttgtgtgcaggacttggagccaagttggagacttgtgttggcaacggttattgggtttcttggatcagcatgtggaaccgttggtggggttggaggtggaggcattttcgttcccatgctcaatctgcttcttggctttgatactaagtctgctgctgctctttctaaatgtatgataatgngggcatcagcatcatncgnttggtataatgtgagagtg

SEQ ID NO: 18413 - DNA, 375 bp, Glycine max
  Clone ID: LIB3106-094-Q1-K1-B2
aacgaaaggggcactacccactccaaactgtgcctgcatcgtttcacatagcacacgcacgctctctacaccttacccttgggcaggccacaacgcttcatctatccatgggaaaccgcatgctcatacccggtgcaggtccagtagccactgcggatactgctgctgcagacatctagttgattccaacggatcagcaatatctgcatcaaccctgaattcaggttgaacaatgagcgaaggcatgctcgatctgcggagaacttttctgactgagagaagtattgctagcacttactgatgagtatgtgcgcatcagaactacggagatgatgccctgcatcaacagcttattcaatgacacgagtcgcaact

SEQ ID NO: 18414 - DNA, 452 bp, Glycine max
  Clone ID: LIB3106-094-Q1-K1-B3
agcaaagacagtcatggcgtcgtttcttcaatggtttctggatccgaagaagaactggttcgccgctcagcacatgaaatccctctccagacggcttcgcaaatacgggctccgatatgacgatttgtacgatccttactacgatctacatgtgaaggaggcgctgaatcggcttccgaaagaggtggtggacgctcgccacgcgcgtcttaaacgcgccatcgatctttccatgaagcacgagtacctccctgacaatcttcaggcaatgcaaacaccattcaggggctaccttcaggatatgctgactcttgtgaagagggagagagccgaacgtgaagcattgggaggtttgcccctatatcaacgatccattccttgagtgcattaatcattttgattgaagtgggaggtttaaattgtattgatgctgcgatagaatgtttctttta

SEQ ID NO: 18415 - DNA, 438 bp, Glycine max
  Clone ID: LIB3106-094-Q1-K1-B4
gttattttcagtatcagcatcatggctccaattgcagtgggagatgtcattccagacggcattttggcttacttggatgaagaaaacaaaccccaaactgtctctattcactctctcgccgccggcaagaaagtcatcatctttggggttcccggtgccttcactcctacatgcagcttgaagcacgtgcctggcttcattgagagagcagaagagctgaaaggaaagggtgtggacgaaataatctgtatcagcgtgaatgatccctttgtgatgaactcatgggccaaaacgttcccagagaacaagcatgttaagttccttgctgatggtgcagccaaatacaccaatgccctcggtcttgagcttgacctcaccgacaagggtctcggcgtccgctcaaagaggtttgctttgctggtggaagacctcaaggtg

SEQ ID NO: 18416 - DNA, 456 bp, Glycine max
  Clone ID: LIB3106-094-Q1-K1-B5
gcgaaactaaagtcagcattcgaaaaagatgagtagcatcggtacaggttacgatctatcggtcaccactttctcccctgatggccgcgttttccagatcgagtatgccgctaaagccgtcgacaacagcgggactgttattgggatcaagtgcaaagatggggttgtgttgggcgttgagaagcttattccgtcgaaaatgatgcttccgggttccaatagaagaatacactccgttcatcgtcactctgggatggctgtagcaggattagcagctgatggcagacaaattgttgccagggctaagtctgaagctactaactatgacagcgtatatggcgaaccaattcctgttaaggaacttgctgaccgtgtggctagttatgtgcacctctgtacgctatattggtggctcagaccttttggatgtggtgtcatactaggaggttatgacag

SEQ ID NO: 18417 - DNA, 362 bp, Glycine max
  Clone ID: LIB3106-094-Q1-K1-B6
cccacgcgtccgcccacgcgtacgcccacgcgtccgctctagtgcgttgctgcagctaagcctctctctctctctctctctgtcactatcgatctatcccaccataaccattaaccaccactctcataaactattcattccacagatcaccaacatttcccaattcgttcaccctctgaatcacacttctagcactttctaactgcaactcgcctatacacacatggattcaacatgttatggctgcaaggtggacaactgccattgactctaagaggccgtaagagacaataccttgaaaggaaatagatgtcgccaacttcgtcttctatggctgcttgcagcgaaaggaggattgaccg

SEQ ID NO: 18418 - DNA, 445 bp, Glycine max
  Clone ID: LIB3106-094-Q1-K1-A2
gaaggacttgctcaaggttgttgatagggagtacacatttgcatacattgatgacccctgcagtggaacataccctttgatgcaaaagctaaggcaagtgcttgtggactatgcattggccaatggagagaacgagaagaacacaaacacatcaatcttccaaaagattgcaacatttgaggaagagttgaagacccttttgcctaaggaagtggaaggtgcaagagttgcatatgagaatgaccaatgtgcaattccaaacaagatcaaggaatgcaggtcttaccccttgtacaagtttgtgagagaggagttggggacagcattgctaactggtgaaagggttatctcaccgggtgaagagtgtgacaaagtgttcactgctttgtgccaagggaagatcattgatccacttttggaaatgcctggggagtggaatggggca

SEQ ID NO: 18419 - DNA, 447 bp, Glycine max
  Clone ID: LIB3106-093-Q1-K1-H10
cccacgcgtccgggcaggttggagagatcggaggggagagcagccatggcgcatcgagtagaccacgagtatgactatctgttcaagatcgttttgatcggagactcaggtgtaggcaaatccaacatcctctccaggttcactcgaaacgagttctgtttggagtccaaatccactatcggagttgagttcgccaccagaactcttcaggtagagggtaaaactgtgaaagcacagatctgggacacagcaggtcaagagcggtaccgtgccattaccagtgcttattacagaggagctgttggtgctctacttgtatatgacataaccaagaggcaaacctttgacaatgtccaaaggtggttgcgtgaactgagggaccatgcggattctaatatagttatcatgatggctggaaataaatctgatttgagccatcttagagca

SEQ ID NO: 18420 - DNA, 360 bp, Glycine max
  Clone ID: LIB3106-093-Q1-K1-H11
cccacgcgtccgcccacgcgttcgaaaaaatttttaataaaaaaacaaaaaacataaaataggggaaggaaaatatatatatgtgaaagattaataaaaatagaatactaagagagtaggtatattgtagatcttcttaagttttactcaattacgagttctttttggaggccaaatatagtataacagttgagttttccatcataactctttagcaagagattcaaattttaaaagcttaaatcttttacataacacgtctaaaactctaccgtgccaataccagttcttattgcataggtaatgttgctgctctactagtatataacttatattagaagttgacaatggacaatgtct

SEQ ID NO: 18421 - DNA, 432 bp, Glycine max
  Clone ID: LIB3106-093-Q1-K1-H12
caacttcttcaaccacgctattgctatcatcactcacacttggaagcaccccatcaatcaactcccgaaacctttcattttttttgcttcaaaatcgttctttgaatcgacccaagaagcgagtttccttcgttgttcaagcagccaagcccactgttggtggaaattccaaaggtgcagcctcaatttaagcctccgtttcttgggttgactaagactgcagaaatatggaactctagagcttgcatgattggaatcattggagtttttattgtagagtttataataaacaagggaatacttcaggtgattgggcttgaagttggcaaaggccttaatcttcctctcggaacattatttttggttgtgctcgtgaatgttgtcatgcataaagtcaaccttctttttattgatttcaagaaatttttttga

SEQ ID NO: 18422 - DNA, 413 bp, Glycine max
  Clone ID: LIB3106-093-Q1-K1-H2
cgagcgtgcggagggtgttgatgagcgcccctctgtcggcggagctccggtcgaagtacaacgtgcggtcgatcccagtccgcaaggaggacgaggtgcaggtggtgcgcggaacatacaagggtcgcgaggggaaggtgacgcaggtgtaccgtcgcaagtgggtcattcacatcgagcgcataacccgcgagaaggtgaatggctccaccgtcaacgttgggattcacccctccaaggtggttgtcacaaagctcaaattggacaaggatcgcaaggccattctcgatcgcaaggccaaaggtcgtgccgccgccgattaggagaagggtaccaagtttggttccgaagacatcatgcaaaccggtgaataagctctttattatacaagccaattttatgtattggttttt

SEQ ID NO: 18423 - DNA, 277 bp, Glycine max
  Clone ID: LIB3106-093-Q1-K1-H3
gtcaacaaagttaacagttgcacttgaatgagttttaaaaaaaaaaaaaaaaaagaaaaaaaaaaaaaaaaaaaaaaaaaaaaaaaaaaaaaaaaaaaaaaaaaaaaaaaaaaaaaaaaaaaaaaaaaaaaaaaaaaaaaaaaaaaaaaaaaaaaaaaaaaaaaaaaaaaaaataaataagtaaaaccttaataaaaaaaaaaacaaaaacaatttacaaattaaaaaaaatctttaaaacaaggaaaacaatgaacttattaatgcaccaagtata

SEQ ID NO: 18424 - DNA, 404 bp, Glycine max
  Clone ID: LIB3106-093-Q1-K1-H4
cccacgcgtccgaaagaatgggcaaagtttcaattccagtcccgcaaaacggcttctccatacgcaatttctcaacgtccaaacgctcatgtttcaccccttcaccttcaacgctcagaatttcttgctctggagtagctgagttagatggatctcatgagaataagggaggtttgtttaatttcaatggaatcaagggcgtggcttgtggtattcttgcagcttgtacggttacttctgctgcatttcccgttactgctgctacccagagacttcccccattgtcaactgagccccatcgctgtgagcgtgcatttattggcaacacaattggtcaggcaaatggtgtatatgataaaccattagatctccggcaatgtgatttcacagatgaaaaaaccaac

SEQ ID NO: 18425 - DNA, 442 bp, Glycine max
  Clone ID: LIB3106-093-Q1-K1-H5
agtttccaggatttggatgatcatagcaagaatgttctcaaacgattataccatgactactatttctgtcgtcaagagaatctttggaggcaaaatgcattgaagaccctgcctgtacttctaaattcatcagacatgctggcctgtggggaagatttgggtctcattccatcttgtgtccatcctgttatgcaagaactgggattagttgggttgcgcattcagcgcatgcccaatgaacctgatctggaatttggtattccttctaagtacagctacatgacggtatgtgccccttcatgtcatgactgttccaccttgcgtgcttggtgggaagaagaataagaaagaagacttcggtttttcaagaatgggaaggagtcccaatggttggcggccgatcaatggggtccaaaagttggacattttggtataagggggg

SEQ ID NO: 18426 - DNA, 371 bp, Glycine max
  Clone ID: LIB3106-093-Q1-K1-H6
gtggattgcaaaggcagaatatgacgaatctggtccatcaattgtgcacagaaagtgcttctaaactgtttcgatagatagggttattgaagggaaagactactatcatcacgatttgtctggaagcaatgcattgcagattgtaaccctttgattctagcttttgttatcctttcattttattctcttgttggagtgatcatttatttgcagaaggtgaggagagttgttttttaaaatggtccagttcttttcttatactttgataagtttttaactggttcattctgagtatgagttagctggattatatcaaactacgcttgtacccttggtatgcataattataatcctttatccgttgaactacc

SEQ ID NO: 18427 - DNA, 435 bp, Glycine max
  Clone ID: LIB3106-093-Q1-K1-H7
cccacgcgtccgcccacgcgtccgaatcacactagtagtcagtagcagtagtacttggacccataacataacaaccatggctaatgtgtcccttctccttttccttttgttcttgtctctctcatcaggagggaatttgatcatggctaatgggcagaaaacttggtgtgtggcaaagccttcatcagatcaagcaacccttttggccaacctcaattatgcctgttctcaagttgattgcaggattcttcagaaaggatgcccctgctcttaccctgacaatctcatgaaccatgcttccatagccatgaatctctattaccaatccaggggaaaaaaccactggaattgtgatttcaaggcctctggaatcgttgttgtcactgatccaagttatggtaactgcatttatgcatagaagaagggtggagtaca

SEQ ID NO: 18428 - DNA, 270 bp, Glycine max
  Clone ID: LIB3106-093-Q1-K1-H8
tccacatccatatattggataattaataatcaaaatgaagcatttgtctatttttagacattagttgattttctttaaataaagtttttaattttgaggcttatgagaagaaggaaaaaaaaatctatattgatagaatcaattatcccattatagtataaatatttctaacctaaatagggttacctagctagtgtgcgtgatagtgtagacatacaaataaaataaaagcaaaaaacaagtgtctctctccaatatatatcctacttt

SEQ ID NO: 18429 - DNA, 408 bp, Glycine max
  Clone ID: LIB3106-093-Q1-K1-H9
cccacgcgtccggggatctcttggtatcagggtgtgaagcctgatgacatatgttcacaagtgggtttatgttcttccaaaaggcatgaatctaagagtgctggaattgaaatggtgactgaaaaggagcagggagagttgacggcaagagataatcctttgtgttcttcttgtcagatgcttgttctttggatccagaatcaactaaaacaaaaggcaacgaaggacagagtattcaactatgtgaatcaactgtgtgagagcctaccaagtccatctggagagtcagtgataagctgtaatagtctttccaagatgccaaacattacattcacaattggaaataaaccttttgtcctcacaccagagcagtatattctaaaaactggagaaggcattacagaagtc

SEQ ID NO: 18430 - DNA, 436 bp, Glycine max
  unsure at all n locations
  Clone ID: LIB3106-094-Q1-K1-A1
cccacgcgtccgcccacgcgtccggatcgagataactagaaacagtgtgatgaaaatgaaggtccttgttttcttcgttgctacaattttggtagcatggcaatgccatgcgtacgatatgttccctctccgaatgaacactggctatggtgcccgtactccggaggtgaaatgcgcaagttggaggcttgctgtggaagcacacaacatctttggctttgagaccattcctgaagagtgcgttgaagcaacaaaggaatacatccatggcgaacaatatagatcagactccaaaacagttaaccaacaagcttacttttatgccagagacctcgaagtccatcccaaggacacatttgtgttcagtatagatggcaccgtactctctaatattccatactacaaaaaacatggatatggngtggagaaatttaac

SEQ ID NO: 18431 - DNA, 430 bp, Glycine max
  Clone ID: LIB3106-094-Q1-K1-A10
gaacagaccaaaggttcaagggtcaagcatcaagtgcgttcgtgttggcggtgtggagattgcgaacaacaagcgaatcgagtactcgctgcagtacattcatggagttggaaggaccagagcgaaacagattctctgtgatatccaaatggataataaaatcacgaaggaactcactgaggaggagctaatcacactcagggacgaggtctccaaatacatgattgaaggcgacctgagacggttcaatgcggttaatataaagagactgaaggatattcagtgctacagaggaataaggcatattcaggggcttccttgcagaggccagcgaaccaagaataattgcagaaccttggagggtaacgagggtgccattggccggaaaaaggaaaaagtaaccgcttctaatttttgggaaggtggtttc

SEQ ID NO: 18432 - DNA, 444 bp, Glycine max
  unsure at all n locations
  Clone ID: LIB3106-094-Q1-K1-A11
cccacgcgtccgggaaaagtactttttttttaaaaaaaattatcttatttgagtgtgatcgatggcatacccaaacccttatccggcgcaaccgtatccctccacctccgtgccgatgccggcggtgcccaccgccgtgatcggcccccagttctgtgcgccctacccgctggatctggcggtggtgaagaaggtgatgacgctctccgacggtaactttgtggtcaccgacgtcaacggcaacgtcgtcttcaaagttaagggatcgctcatgaccctccgtgaccgccgcatcctcgtcgacgccgccggcaaccccctcgtcaccctacgccggaaggtttgttatctactctctctcacgcacacgtgttcatttaattttgggtatagntaaattgcatagtccacacgcttcatacgcgtgtatagctaagttttttt

SEQ ID NO: 18433 - DNA, 326 bp, Glycine max
  Clone ID: LIB3106-093-Q1-K1-H1
cggacgcgtgggcttttaccattctcttctctcttgctcttgcaggagagagccatgtccatgcatcgctacctgaggaagattattgggaagctgtttggccaaacactcccattcccactgcactgcgagagcttctaaagcctctccctgcaggtgttgaaatcgatgaactccctaagcaaattgatgatacacagtacccaaaaacattcttctataaagaagaccttcatccaggcaaaacaatgaaagtacaattcaccaagcgtccctatgcacaaccttatggtgtatatacatggttaacggatattaaagacacc

SEQ ID NO: 18434 - DNA, 423 bp, Glycine max
  unsure at all n locations
  Clone ID: LIB3106-094-Q1-K1-A12
caaaatattgtccaccccattatttgtcttctcattctcatcactaacacacaagtgtgtgttgtagatttctcagcttgcaacatggcttccatcatcatgtcatttgctccagcaactggtagagtctttgcagccacagcggcaaagggtgctggtggaagcaaagaagagaagggtcttcttgattggatccttggagggttgcagaaggaagaccagctgctagagactgatccaatcctcaagaaggtggaggagaagaatggaggcaccaccagcaacactggccgcaacaagaactcttgtgcagtgccacaaaagaaggaaggtggctttggaggcctctttgcgaagaactgaaggagccgtgatttattaccttatnatttgtttacctggtttttttttctcaaatgcatg

SEQ ID NO: 18435 - DNA, 358 bp, Glycine max
  Clone ID: LIB3106-093-Q1-K1-F5
cccacgcgtccggaaaaaacatgactactgcaaaagcagttcttgtggcatctttacatagggagtacggggataatttacggagtatgtatctgaagaaaccaacagttagtggggaagtcatagaagtttatcagccaagtcatgaatggaagcagaagtttaatgataatgggcataacctaaaagcatggacggatatgtatctgttaagtttatcagacgtgttggtgactacctctctctcaacatttggctacgttgctcaaggattgtgaaatttaaagccatggcttctctacaggctagtcagtatccatagcggctattttccacgctgcgaacgggatttatcaac

SEQ ID NO: 18436 - DNA, 387 bp, Glycine max
  Clone ID: LIB3106-093-Q1-K1-F6
atgacctgaacaagaaagaggttgctctggttaaaattcagggtttgcctaactgaaatggagccatgatttgtttgggaacgcctcgtaccaccatacttgttacctcgtcaaatttgtaggaagccgcgtgctttaggatgcgaacgttccacgaagacgagggatgactttctgtcacagggtttcaaatcgacattatgaggaagtctaagacgaagaagcaatggtacatgtgggtagctgaaactggctcggtaggaatgttctgcagttgattcaagccatactgaggttgaggaaaagtaagaacatgctgcttccgttacaatgactgtgatgtatcgttaaattagatactatcagctacatattttactttgggat

SEQ ID NO: 18437 - DNA, 326 bp, Glycine max
  unsure at all n locations
  Clone ID: LIB3106-093-Q1-K1-F7
tctacttctctctcctattgcggctagggtttaggtttttctttcaccgtctccgttcctgcaatcttcttattctctttcatctctgatggagacgttgcgggtttagttctaaggggtggttctggccttgggtttttggaacgtacggtgtcgttttggggttgggaaaacaaattctgagagatggcaaccacgaacccttttgatttgttgcgtgacgacgctgaggacccttctcagctcatcgccgncgagcaactcaaggcggcggctgcggcctcggcggccaccgcggctcccaagaaggcgccggctcagcagaa

SEQ ID NO: 18438 - DNA, 351 bp, Glycine max
  Clone ID: LIB3106-093-Q1-K1-F8
agcaaattcaatcataatgaggtgatactactatagaagagaaagtcatggaaagctgcgtcaaaaagcataaggtaatgcaaaccattacatggttgtcctgtgatgggacgatgctcatattcgacttgaagccgaggtcttcatctgctcataagtcaggtacaagcagtcgttgcggtgcacatataacattgtttgctaaaattggtttaaatcagataacaaacaaacagaagaacgtggttactcatgtaattgtataatgatgtattatatattattttgtaaaaaaaaaatctaacaaaaaaaaaaacaactttacaatacaaaaactaataagttacctaa

SEQ ID NO: 18439 - DNA, 447 bp, Glycine max
  unsure at all n locations
  Clone ID: LIB3106-093-Q1-K1-F9
gttgaaagttaagaagtagtaaagatgtttctattcgggcacaagggtcaaaagataaaggggactatggtggttatgcagaagaatgtgttggatatcaacagcatcaccagtgttgacgggatcgtcggcaccggcttagacttcttaggcagtgcactcgatacagttacttttttagcctcctccatctccatccaacttattagtgctaccaaggctgatggtgggaaaggaaaagttggaaaggctacaaatttgagaggaaagataacattaccaaccataggagctaaggaagaagcatacgatgctcaatntgattgggacagtgacttccgaattcccggtgcattttatattaaggacttcatgcaaaacgagttctacctcaagtctttaattctcgaagacattccaaaccatggaaccattcacttcatatgt

SEQ ID NO: 18440 - DNA, 349 bp, Glycine max
  Clone ID: LIB3106-093-Q1-K1-G1
cccacgcgtccgcttcactcctctttccccacacacaacacactcagatctctcaactcagatctcgcaactcagatctctctctgcttccattaatttcacaatggtcactctcttcgactccctcgccgtcgtgcgtctccccaccgccgccttctccccggctgccaccagccggacctccgttttgctcccgcactgcgccggcctcaggctcagacccgccgccgccacgcgcttagttgcgtcccccgctcgcagaatcgcttcacgcgccgcgcgcgtcgtatgtgaggctcaggataccgccgtcgaagtggctcctattactgatgcaaattggcaatcc

SEQ ID NO: 18441 - DNA, 175 bp, Glycine max
  Clone ID: LIB3106-093-Q1-K1-G10
cccacgcgtccgcccacgcgtccgagaacattttcacttagttggattagtagtacttgtgaaaaacttgtaacgtgaaattggagaggctaagcagaaatgcttctgcttgatgttaaaaaaaaaaaaaaaaaaaaaaaaaaaaaaaaaaaaaaaaaaaaaaaagttgtactgt

SEQ ID NO: 18442 - DNA, 440 bp, Glycine max
  Clone ID: LIB3106-093-Q1-K1-G11
cactcacaaacacacactgaactaaaaaacattaaaagagacatggctgagcaaaccttcatgatgatcaagcctgatggcgtccaaagaggccttattggcgagatcattagcagatttgagaagaaaggtttctacttgaaaggtttgaaacttgttactgtggaccgtccttttgctgagaagcactatgctgatttgtctgccaagcctttctttagtggtttggtggattacattatctctggccctgttgttgccatgatctgggagggcaagaatgttgttacaactggccgaaagattatcggagccacaaacccagctcaatctgagcctggaactatccgtggtgactttgccattgacattggaaggaatgttatccatggaagtgatgcagttgaaagtgctaacaaggaaattgcattgtggttccc

SEQ ID NO: 18443 - DNA, 437 bp, Glycine max
  Clone ID: LIB3106-093-Q1-K1-G12
ggggttcgggattggagggattgacgctgcttctcttcctcttctctttcgatccatccctgattcggaatcctgcaatccaaccacctcagcctcacactcacatatacacatatctgaacgcgtatcgtccctcctatggcttcaaagcgcatcctcaaggagctcaaggacttgcagaaagacccaccaacttcttgcagcgctggtccagtagctgaggacatgttccattggcaagcaacaataatgggtcctgctgatagtccttatgctggaggtgtattcctagtcactattcacttccctccggattatcctttcaagcctcctaaggttgcctttaggactaaggtgtttcacccgaacatcaatagcaatggtagcatttgtcttgatatcctgaaggagcagtggagccctgcactcaccatctc

SEQ ID NO: 18444 - DNA, 318 bp, Glycine max
  Clone ID: LIB3106-093-Q1-K1-G2
tctacgtcgatccatggctagttgtatggtttatgcgtgttacatttatattgttctgggaatatgagtgttgaaaggtgctgaggcacaacgtgcgttctttgggtttggggattctcttgtggataatgggaacaacaactttttggcaactacagctcgagcagatgctcctgcttatggcattgatttcccaaccggaagacccactggccgtttctctaatggctacaacattcctgacttcatcaggcaatcacttggggccgaatccacattgccttatttagatcccgagctcgaccgggaaagattgct

SEQ ID NO: 18445 - DNA, 434 bp, Glycine max
  Clone ID: LIB3106-093-Q1-K1-G3
gagagaaactgagagaaattcgcaaaccctaatttcggaaagatcggcgatggctgcctccaaggatcgcgagaacttcgtctacatcgccaagctcgccgaacaggccgagcgatacgaagagatggtggaatcaatgaagaacgttgcgaatctcgacgttgaactgactgtggaggagcggaatttactttctgttgggtacaagaatgtgattggtgctcggagagcatcgtggaggatcctgtcttccattgagcaaaaggaagaaacaaaagggaacgagttgaatgcgaagcggattaaggagtacaggcagaaggttgaattggagctttcaaacatctgtaatgatgttatgacagtgattgatgagcaccttatcccttcggctgcagctggtgaatccactgtgttttactataagatgaaag

SEQ ID NO: 18446 - DNA, 372 bp, Glycine max
  Clone ID: LIB3106-093-Q1-K1-G4
gttgagaactaagaagaaggaaatggcttcttcaatgatctcctccccagctgttaccaccgtcaaccgtgccggtgccggcatggttgctccattcaccggcctcaaatccatggctggcttccccacgaggaagaccaacaatgacattacctccattgctagcaacggtggaagagtacaatgcatgcaggtgtggccaccaattggcaagaagaagttcgagactctttcctacttgccagacctcgatgatgcccaattggcaaaggaagtcgaataccttctaaggaaaggatggattccttgcttggaattcgagttggagcacggtttcgtgtaccgtgagcacaacaagtcacctggatacta

SEQ ID NO: 18447 - DNA, 449 bp, Glycine max
  Clone ID: LIB3106-093-Q1-K1-G5
tccatgctgagatcctcccgtttactcatttttgcagtcaaggcacaaccggatacagtgcagaaggtctgcgatattgtgaggaaacaacttgctctgcctgctgaatctgagcttacctcatacaccaaattttcagcacttgttgctgattcccttgacacggtggaaatagtgatggctttagaggaagagtttggcataactggttaggaggatggatctcaaaacatctaaaccgttcaagaagcaggtgatctaatagagaaactgattcaagacaaaagtagagctagatagctaggatgtgaacaattctagggaaaatccattgagtgagtgcacatgattaacagacatgaggctaattattcaatccattcaatggaccatttgtactgtgcttacgctgtattcatttaccaagctttttttgggcgacttttttt

SEQ ID NO: 18448 - DNA, 424 bp, Glycine max
  Clone ID: LIB3106-093-Q1-K1-G6
tgtacgtatactactgtgcttctgttgagatttattcctgtcccttcatattcctcttctgtatctatctattctctttgctcgttacagtttgcttcattattatataaagggtctcaaggtttttaattttttttaaaaaattaaaacttttgccaatttgtgaactgggtctgcttgattctattttgctgctttttatttattttaatttgtttggtgtattgtgtattaagctgaacatgaaaatatgttgttgttgcggattgctcttttgttaattaaaaccagctagttagtcattatgaagcttgattccttatgtctatgcagttctctagatttaaatcttgggaaaagaatgttgctgtccacttatatattggccttgaactaatgatcttttttttatcctaagtaaaca

SEQ ID NO: 18449 - DNA, 342 bp, Glycine max
  unsure at all n locations
  Clone ID: LIB3106-093-Q1-K1-G8
cggacgcgtgggcggacgcgtgggttgcagaagtagagaaaagttgaagaaggaatctcctaagactgaaaaaaacccaatggatttgaattcctctccttccaacaacacaattgccgtgaatggaacaatccccgtcgcttccacgttcgcaaccgccaccgcgccgtcggataaccctccgccggcggacagctccggcgaccggaaacccatcgccctgtggccggggatgtaccattctccggtgaccatccgcctatgggaagctcgcagcaatattttcgagaggcttctggacctctccaaggacgctcctncgcagagtgaattgctcacgag

SEQ ID NO: 18450 - DNA, 442 bp, Glycine max
  Clone ID: LIB3106-093-Q1-K1-G9
aattctacagcagccctccgatttttaaggaggttgtgtgaattgctggtgagtgatttaaatggctcctactaaggtggacaatgccaaaagggctgatcccaaagctcaggccttgaagacagctaaggctgtcaaatcaagtggtcaagtgtttaggaagaaagctaaaaagatcaggacatcggttacatttcacaggccaaggaccttgaagaaggaaaggaaccctaagtaccctcgcattagtgctccacccagaaacaagttggaccattatcagatacttaaatttcctctaactactgagtctgctatgaagaaaattgaagattacaacacgctggtttttattggtgaccttcgtgcaaacaagaaaaagattaaggatgctgtgaagaagatgtatgacattcaggcaaagaaagtcaatacattaatc

SEQ ID NO: 18451 - DNA, 457 bp, Glycine max
  Clone ID: LIB3106-093-Q1-K1-F4
cccacgcgtccgcaaaagctggcactgtaacacccaatattccccaggctatagcagaattcaagcagggaaaagttgaatacagggcagacaaaactggaatcgtgcacttaccttttggaaaagctgactttccagaagaggatcttcttgtaaacttgcttgctgcagtgaaatcagtagaggcaaacaaaccttcaggtgctaaaggtgtgtactggaaaagtgctcacatatgctcagccatgggaccttcaatcaggttaaatatcagggagatgcttgattacagacctccatcagaatagaaccctcacatgtaaatgttcgtttggcctcagtcagctatcccgggtgccattgtgagatcttgccaaatatttattcaaagatgttaccaaagttacatacaaggggatggggatctcttctgttccaaaatgggtttttttttttt

SEQ ID NO: 18452 - DNA, 406 bp, Glycine max
  Clone ID: LIB3106-093-Q1-K1-D9
cccacgcgtccgatgccttagaccctagtatctaagatatggattagacaggaggttattggggatttggtggagcagtgtcgaacttacaagcagagagtggtacaccttgtcaactcaactttggatgaatcactgctatgccaaggactagccctgaatgatgatcttcagcgtgtactggctaagcacgaatctatttcttctggaacttctaccaaaaatgaaaatcacacacagaattcgaaacctgcacctgctggggctcttgtagatattgatgctcctttggttgatactggagatactagcaaacaaactgatgggagatcctcttctaatgtcgaagcagggtcccaaacactgaatcagttactgctttctgcaccttcaacttctaatggat

SEQ ID NO: 18453 - DNA, 402 bp, Glycine max
  Clone ID: LIB3106-093-Q1-K1-E1
cccacgcgtccgcccacgcgtccgcccacgtctccgtgaaaatttagccttgcttggagatgaggggtaccagacgaatatatatcaggatgaacgacccttcatcagatctagaaaggttttgatggaattggggccacctataagcaaggaagttcagcttatttcttttcactctgtgtcaaaaggttattatggtgaatgtggacagcgaggtggatattttgaaatgaccaacattccttcagagacagttgatgagatctacaaggttgcatcaatatcacttagtccaaatgttccagcacaaatatttatgggagttatgctcaatccaccttaacctggatatatttcttatgacaaatttggtagggagagcaccggaatacttgaatcact

SEQ ID NO: 18454 - DNA, 451 bp, Glycine max
  unsure at all n locations
  Clone ID: LIB3106-093-Q1-K1-E10
cccacgcgtccgcccacgcgtccgcggacgcgtgggcggacctgcgcgttcgctcctccacgctgaagggcgtcacggtgccggaagaccgcgcgccttcgatgatcgacgaatatccgattctcgctgtcgccgccgccttcgcggaaggggcgaccgtgatgaacggtctggaagaactccgcgtcaaggaaagcgaccgcctctcggccgtcgccaatggcctcaagctcaatggcgtggattgcgatgagggcgagacgtcgctcgtcgtgcgtggccgccctgacggcaaggggctcggcaacgcctcgggcgccgtcgtcgccacccatctcgatcaccgcatcgccatgagcttcctcgtcatgggcctcgtgtcggaaaaccctgtcacggtggacgatgccacgatgatcgccacgagcttncccgagttcatggacctgat

SEQ ID NO: 18455 - DNA, 450 bp, Glycine max
  unsure at all n locations
  Clone ID: LIB3106-093-Q1-K1-E11
cccacgcgtccgttcgctaacactcattaattgcaagaatggcacttcgttgcttggtgatgtccctttctgttctcttcactcttggtcttgcgagagaaagccatgccagagacgaagatttttggcatgctgtttggccaaacactcccattccaagttcattgcgagatcttctaaagcctggccctgcaagtgttgaaatcgatgatcaccctatgcaaattgaagaaacacagtacccgaaaaccttcttctataaagaagaccttcatccaggcaaaacaatgaaagtacaattcagcaagccttcctttcaacaaccatggggtgttggtacatggttaaaggaaattaaagacactactaaagaaggatatagttttgaagagctatgcatcaagaaagaagccattganggagaagagaaagtttgtgcaaaatccttgg

SEQ ID NO: 18456 - DNA, 451 bp, Glycine max
  Clone ID: LIB3106-093-Q1-K1-E12
cccacgcgtccgcatggacggcggcaccctttagaccgccctcgccgccagcggcacgttcgcggaagagcgactcgccaaggtggcgcgtgacgtcctcgaggggctcgcgtacctccacgcgcgcaacatcgctcaccgcgacataaagcccgcgaacatcctagtaaactccgaaggggatgttaagattgcagacttcggagtcagcaaactcatgtgccgctcgctcgaagcgtgtaactcttatgtcggcacgtgcgcgtacatgagtcccgaccggttcgacccggaagcgtatggcgggaactataacggctttgctgcggatatttggagtttgggtttgaccctatttgaactctatgtgggtcacttcccatttcttcaagcgggtcagagacccgactgggctacccttatgtgtgcaatttgcttcggcgacccgccg

SEQ ID NO: 18457 - DNA, 182 bp, Glycine max
  Clone ID: LIB3106-093-Q1-K1-E2
aaagagacatcatggcttctctagcaacctgtgctgctgctcaaccagctacgatcaatgagcttgcttaaagttccctctctggaactaagctctctttcaagccctctcgccacagtgtcaaatccaagaacttcacgagtattgccgtggtagcaaagtatattcacaagagtgtgtac

SEQ ID NO: 18458 - DNA, 346 bp, Glycine max
  Clone ID: LIB3106-093-Q1-K1-E3
cccacgcgtccgcccacgcgtccggccacgcttactgaagattttgggaattgacaagagggctaggttttcacattcgatggcgcttgaaggtggaagcattcatgtggatggagaaggaacttgtcttaccacataagagtgcctcttgaacatgaacaggaaccctcactcgagtaagaaccacatagaggctgaacttaagacatattttggaatcaggaaggatatatggttgcctcgtggattatatggagatgatgacacaaatggacatattgataacatgagctggactgtgaggcctggtgcggatatgctgcctaggattgatggtcaaactgat

SEQ ID NO: 18459 - DNA, 315 bp, Glycine max
  Clone ID: LIB3106-093-Q1-K1-E4
cacacacacaaacatatgctacaaactccacttcttcaacacaaaaatccgaaatttgtgctccaacacaaaaaaatgaaacctacaatcaccattctcttgttgtctctactacttctcataacttcaccctccttggcaacccgacccgcatccaaccctgatcaagtcaagcacaacaaaaacaacaaccaaggtggtggtgctggtgctggtgctggcgggttctttggccctggaggaaggttcagcatacccggttttggaaacgggtttggaaatggcatcataggaggaggatacggatccgggtat

SEQ ID NO: 18460 - DNA, 256 bp, Glycine max
  Clone ID: LIB3106-093-Q1-K1-E5
cccacgcgtccgaccacgcgtccggataggttgaaagaagagaaaaaaggggaatggcatggttgcagttgcagagaatcgtgaccaagggaggtgctaatttgatctcaccactcccactttcacgattcttctcgaaatcttcttccccctatgttgctaaagttggaattccagagtttctaaacgggattgggaaggtggttgagtcccacgttcctaagcttgaatccgatatcggtgattatcagatgct

SEQ ID NO: 18461 - DNA, 404 bp, Glycine max
  Clone ID: LIB3106-093-Q1-K1-E6
aaaccccctccagagaacaagaatcatagaatggcaactatgactggtgtgagcctttcaagccccagggttttcttcaacgcatcaccctcaccgcaaaacacgtacgccgtaaagttcgcagttccactcagccaagggatgcgacttggtagtgtcaggttgggtcgggtgatgaggatccgacccgttcgcgcagctccagagcgcatttcggagaaggtggaggagagcataaagaacgcgcaggaggcgtgcgccggcgacccgacgagcggcgagtgcgtggcggcgtgggacgaggtggaagagctgagcgcggctgcgagccacgccaaatacaagcaaaaggaaaaggacttcgacccgctcgagacctactgcaaggacaatccggagaccat

SEQ ID NO: 18462 - DNA, 91 bp, Glycine max
  Clone ID: LIB3106-093-Q1-K1-E7
cccacgcgtccgcccacgcgtccggttcgtttgcgatctagaacaaaaaaaaaaaaaaaaggaaaaaaaaaaaaaaaaggacggacaatat

SEQ ID NO: 18463 - DNA, 416 bp, Glycine max
  Clone ID: LIB3106-093-Q1-K1-E8
ccctaatctctatttctctctctctctttttctctgcataacacaaatgtctcacttcggacgttcgggtcccccagacatttccgacacttactctcttctcgttctgaacatcaccttccgtaccaccgccgacgacctattccctctcttcgacacgtatgggaaggtcgtcgacatcttcatccccaaggatcgaaggactggtgaatcgaggggttttgcgttcgtgcgttacaagtatgctgatgaggctcagaaggccgttgagaggctcgacgggagaatggttgatggtcgcgaaataacggtccagcatgcgaaatatgggcctaatgctgaaaggattcacaaaggacggattattgaaacatcctcaagatcaaggcgatcaaagagccgtagcccaaggaaaa

SEQ ID NO: 18464 - DNA, 447 bp, Glycine max
  Clone ID: LIB3106-093-Q1-K1-E9
ctcaattaccattccataacctaaatctcctttttgtttccgagtcagagagcaatggcacgtaccaagcaaaccgctcgcaagtccaccggcggaaaggcgccgaggaagcaattggcgactaaagccgctcgcaagtcagctccggccaccggcggagtgaagaagccccaccgcttcaggcccggaacggtggctctgagggagatcagaaagtaccagaagagcactgaacttctgatccgaaaactcccattccagaggctcgtcagagaaatcgctcaggatttcaaaacagatcttcgtttccagagcagcgctgtttctgcgcttcaggaagccgcagaggcttatctcgttggactcttcgaggacaccaacctctgcgctattcacgccaagagagtcaccattatgcccaaggatattcaactggctcgcagaatc

SEQ ID NO: 18465 - DNA, 422 bp, Glycine max
  Clone ID: LIB3106-093-Q1-K1-F1
tttcagaataggaaccaatggctcatttgctgtacaccaactcctaccactgctgcaacagctctcgccgccagagcccggaagagccccctctattcgttgaaaaatgtttactttccaacttcaagagtgtgctgcgttggtcaccaatatcaacaatctcacccctcttccctctctgatcttgatcaagtccctcctcccggtggcaatcactctctgcgtcgcaggacattgatggggttgagtggtgcggcaacgttggggttgagtttgagtgatgagcaaagtgcaaggggtgcagcaaggcgtccaccaccttcaccaccgacggagaagaaggacccgaatgtgagtggtgttcaggctaaagtgttggctagcaagaggagaaaagaagccatgaaagaagaagtggcaag

SEQ ID NO: 18466 - DNA, 450 bp, Glycine max
  Clone ID: LIB3106-093-Q1-K1-F10
cttcccttctccaacatgccaaacgacagcgttctgtgtcttttcttcttcgttaccctctggacatgccttctctctgctaattcccacgatgaccatattttcctaccgagtcaactccatgacgatgactcagtgagttgcactgctaccgacccaaaccttaactacaagccggtgatcggaatcctgacccaccccggcgacggtgcctctggccggctcagcaacgccaccggggtttcttacatcgccgcctgctacgttaaattcgtggagtccggtggtgctagagttattccccttatctacaatgagtcacctgagaaccttaacaagaagctcgatttggtcaatggagtgctcttcactggtgggtgggctgcttctggtccatatttggatactcttggaaacatttttaagaaagctttagagaaaaatgatgct

SEQ ID NO: 18467 - DNA, 344 bp, Glycine max
  Clone ID: LIB3106-093-Q1-K1-D8
atcattctgccactccttctataatttctctgatatgattcatggctttagcactggcctgcactgcattgacaagccttccaaacagacaaattcgtcaaaagggtttcccagacagaacacccacatgcttgagtttgaccagaataacagttgcatatgctacaaaaggggtctcagctgcctgagagccacttactccagataggccattgtggttccctggcagctcaccttctgagtggcttgattgaagtcttactggtgatttacagatttgaccctctgggattaggctctgatccacagctgctaaagtggattgctcaagcagatctaatgca

SEQ ID NO: 18468 - DNA, 433 bp, Glycine max
  Clone ID: LIB3106-093-Q1-K1-F12
cccacgcgtccgaaattatgttgctcctgatgtgcttaatgatagaggttatgttggttctacatctgatatctggtcctgtggagtcattctctttgtgcttatggctgggtacttgccctttgatgagccaaatcatgcgacactgtaccaaaaaattggcagggcccaattcacatgtccatcatggttttctcccgaggcaaagaaactattgaagcgtattcttgatccaaaccctctaacaaggataaaaattcctgaactcttagaagatgaatggttcaaaaaaggatacaagccaacaacttttgtagaggaagaggatgtcaatgtagatgatgttgctgctgctttcaatgattctaaggaaaatcttgtgacagagagaaaagagaaaccagtgtcaatgaatgcttttgagctcatatct

SEQ ID NO: 18469 - DNA, 254 bp, Glycine max
  Clone ID: LIB3106-093-Q1-K1-F2
cccacgcgtacgcacacgcgtccgaaaaattaatattaaatacaaaaaataaaaacaacagcggtgtaaaaaaaaaactatctgagccccatctattcgttcaataattttgactatactcctaaataaaaaatgcttcatcagaccacctatcttcaacatctcaagcatcttctctctcttatcttgatcatatcactcctgcaagacccaatgactctctgctctaatatctactacattcctcacattat

SEQ ID NO: 18470 - DNA, 125 bp, Glycine max
  Clone ID: LIB3106-093-Q1-K1-F3
cccacgcgtccgcaccaagaaggagctcaactacttttagaatcgcctcgtctcggagctcgaacggattcagaagctaaggaatcaaatcgggtccagcgagtttcaacccgggcagagcctta

SEQ ID NO: 18471 - DNA, 274 bp, Glycine max
  Clone ID: LIB3106-093-Q1-K1-C2
cgcacacaatacacacattttatttctcagtatcgttcaccacaccgaacctgccaattgcgtcacacccaccataataatatctttattgatctttgcttctttggtaccattgaaaaaacacacacacacaacatcaacaacagaagaccatgtcggagtgcgagcaccacaaggggaagaagaggaagatctttcggcacgcgttctggtgcatagtggtgctcctcatttctcgtgctagactaaaatcgattgatatgggcaatgctta

SEQ ID NO: 18472 - DNA, 434 bp, Glycine max
  Clone ID: LIB3106-093-Q1-K1-C3
ataactagaaacagtgtgatgaaaatgaaggtccttgttttcttcgttgctacaattttggtagcatggcaatgccatgcgtacgatatgttccctctccgaatgaacactggctatggtgcccgtactccggaggtgaaatgcgcaagttggaggcttgctgtggaagcacacaacatctttggctttgagaccattcctgaagagtgcgttgaagcaacaaaggaatacatccatggcgaacaatatagatcagactccaaaacagttaaccaacaagcttacttttatgccagagacctcgaagtccatcccaaggacacatttgtgttcagtatagatggcaccgtactctctaatattccatactacaaaaaacatggatatggggtggagaaatttaactcgaccttgtatgatgaatgggttaacaa

SEQ ID NO: 18473 - DNA, 355 bp, Glycine max
  Clone ID: LIB3106-093-Q1-K1-C4
cccacgcgtccgcaaaaaccaagtactacaagggaagaagaacttagctacaagctaaggaaggatcaaagagaatggctcaagcaatggcatcaatgactagcttacgtggttcctctcaggctgtgttggaaggtagccttggctccacacgcttgaatgtggggagtggaagcagggtggcctcagtcacacgtgcagggttcacagttagagcacagcaacaacaagtgaatggtggtgaggtacaaagtagccgtagggcagtgctttcacttgttgctgctggtttgaccactggctcttttgttcaagctgtgcttgctgatgccaaacctatcaaagttggaccacc

SEQ ID NO: 18474 - DNA, 436 bp, Glycine max
  Clone ID: LIB3106-093-Q1-K1-C5
gagataactagaaacagtgtgatgaaaatgataggtccttgttttcttcgttgctacaattgtggtagcatggcaatgccatgcgtacgatatgttccctctccgaatgaacactggctatggtgcccgtactccggaggtgaaatgcgcaagttggaggcttgctgtggaagcacacaacatctttggctttgagaccattcctgaagagtgcgttgaagcaacaaaggaatacatccatggcgaacaatatagatcagactccaaaacagttaaccaacaagcttacttttatgccagagacctcgaagtccatcccaaggacacatttgtgttcagtatagatggcaccgtactctctaatattccatactacaaaaaacatggatatggggtggagaaatttaactcgaccttgtatgatgaatgggttaac

SEQ ID NO: 18475 - DNA, 441 bp, Glycine max
  Clone ID: LIB3106-093-Q1-K1-C7
acgatccatacccatatcatatcgcattcttcaaacttactgcattcaatttctctctgtctacaacgcaacacacacacacacacaaagagaacttttcagcttcacgcttcaattcagttcaattttaaacatgctttgcgtcaacactgccttcacctctttcttacccagaaaatcaacttgcgtcttttcctccaaatcaaccaccccaatttcctgcaccctccaaggaacagttgcagagccaaaatctacagctgctgctgaaccgcttttgctaaatgcagttcgcgggatagatgttgaaagacccccggtttggctcatgaggcaagcagggaggtacatgaagagttaccaaaccatctgtgagaaatatccttcattccgtgaaagatctgaaaatgttgatctcgtggtggaaatttctctgcaacc

SEQ ID NO: 18476 - DNA, 386 bp, Glycine max
  Clone ID: LIB3106-093-Q1-K1-C8
atccatacatacatcctagtacaatgttcataacacttgcaaagattatctctatcgaggggtctcatatcacactcagacgcataaagtacatcattagctaaacgcaataaatcaggaaatgataaacatgctttacagtaaacacgtgcctacaactgtatcttacccaaaaaatcaacttgcgtcataaaccttcaaatcaaccaccccaatttacctgcgcacttcaaggaacagttgcagagccaaaatctacatgtgctgatgaaccgcttttgctacatgcatttcgcgagaaaaatgtcgaaagactcaaggatcggctcatgaggcaagcatggaggtacatgaagagttaccaaaccatatgtgataaatatcct

SEQ ID NO: 18477 - DNA, 406 bp, Glycine max
  Clone ID: LIB3106-093-Q1-K1-C9
gatctgtttatgaccaggatgtgctggctgtagataccattcttcattggttccgaaaaggagcaaactccaagggcaggcaaacctttgtgaaggcgctggaaccctttgttaattggctggaggaggctgaagaggacgagtaagtgtggtggaggttcagggctgaagaaattaccttgtctttcagatattgtaccatttaactaagatatttggctcgaattctcttaaattcggttctgcctagtagtactgattatctctgaattcgtatttgcgttgtgtttgactcctacttctactgcatcgtgctctcgggacatattcatggagcctgtgtgttttccgtacgccacattgatatgttatacggctgcattactgtattttgagtgattatttc

SEQ ID NO: 18478 - DNA, 443 bp, Glycine max
  Clone ID: LIB3106-093-Q1-K1-D11
ttcctcgttacttcctcttttcgcatcagcattttgaattctgtttttgttggtgagacagataaattcagagtttcaactgttcctggtgctcatgttggtttcattagaaagactgtagaatgtaaggaatcacgaattgggaagcaaccaattcctgtgccatccaatgtcacagtcaaattggaaggacaggatatacaagtgaaaggtcctttgggagaacttgcattaagttatcctcgagaagtgttggttgagagggaagagtcagggactctaagggttaaaaaggcagttgaaaccagaagggccaatcaaatgcatgggctttttaggacccttacagacaacctggtgattggagtatctaaaggttttgaaaagaaacttcaacttgttggtgttggttatcgtgctatggtagaaggaaacgaagtcgt

SEQ ID NO: 18479 - DNA, 412 bp, Glycine max
  Clone ID: LIB3106-093-Q1-K1-D12
gaacgaagcaatcgcaagtcgtctgttctgtctccgcgggagcagacgacctgtcttcatcggcaaacaacctcaaaaacattcatcaacgttcactattaatccatccatcattaagtaagaaaataaggttcgatttttttatctttgttttgcttctgatccatcatggaggtgccgagttcctgggatgcccttcgcaaacaggcaagaaaacttgaagctcagttggatgagcagatgaattcttatcgtaaattggtttctaataatgtttctacaaaagctgacgctgcagagagtgatctagagtcttggattgagcgtttactaaaacaactccaacaagtaaacacacagatgcaagcttgggtatcatctggtggttcagaaatggttctcatactttgac

SEQ ID NO: 18480 - DNA, 417 bp, Glycine max
  Clone ID: LIB3106-093-Q1-K1-D2
gcaaaggaatgggcggcttattttcttatttatcacttcccgaggaggagagtcctgacgtgaaagcattccactccgcggagagctggcagagccacttgaaagagatcaaagagtcccctaagctaataaataaaaatcaggttgtgatatatttcacggcgtcctggtgtggcccttgcaaattcatcactccagtgtttaaccagatagccgcagagtttgcaaacgctgacttcgtcaagatcgacgtggactaattatctgcgattttctcttccatattctctcttttctttattcaatccaattacttttgttagtttcccttggctcagttcgatagagtggatagaagactaatgaaattttgaattaaaatatactggaaaagcattgatctcatcagattatttt

SEQ ID NO: 18481 - DNA, 448 bp, Glycine max
  unsure at all n locations
  Clone ID: LIB3106-093-Q1-K1-D3
cccacgcgtccgcccacgcgtccggcggaaatcattacttataatagtcttgtacgattattcatagtgcggcaatagcagagcagcgactcacactggtcttcgcttctcattcatcatttctcacctaaccttctcttcctctcagtctcagatcagaaacctcagccagccatggcagcgttccagaagatcaaggtcgtcaaccccatcgtcgagatggacggagatgaaatgactagggttatctggaagtcaatcaaggacaagctcattttgcccttcttggagttggacatcaagtattatgacttaggccttccttaccgtgatgagaccgatgataaagttacaattgaaagtgcagaagcaactctcaagacaatgtagcaatcaagtgtgcaactatcactccagatgaagctcgtgtgaaggaagtntttttttt

SEQ ID NO: 18482 - DNA, 204 bp, Glycine max
  Clone ID: LIB3106-093-Q1-K1-D4
cccacgcgtccgcttaaattgatgttttaccttattaaatcagtttttgttaaaaaaaaggagaggaaaaaaaaataaaaaaaaaaaaaaaacaaacaaaacaacgcctctcaaggtctcgccgctctatcggacccaggcttacattccctttcatgccaccatatagctctcatatagcgccacctaaaccacattcactgg

SEQ ID NO: 18483 - DNA, 390 bp, Glycine max
  Clone ID: LIB3106-093-Q1-K1-C11
ccaattttctagggttttattcattttccgatggcttctgcagatgttgagtaccgttgcgttgtcggtgggctcgcttgggccactgacgaccatgccctcgagagagccttctctcagtacggcgaaatcgttgaaacgaagattatcaacgatcgtgagactggcagatccaggggttttggatttgtgaccttcgcctcggagcagtccatgaaagatgcgatcggagcgatgaatggacagaacttggacggccgtaacatcactgtcaatgaagctcagtcccgcggtggcggcggcggcggcggacgaggaggatacaatcgtggtggctgtggatatggtggtcgtagtggcggttgcggtggtggataccgtagccgtgac

SEQ ID NO: 18484 - DNA, 357 bp, Glycine max
  Clone ID: LIB3106-093-Q1-K1-D6
acctggtgaagctttgaatcaggttgtggaggtcaatatgaaagtcgaggaaccaggtgagaagaatgttcacaataatgcattctatgctgaagagactttgctcagatctgaattggaagccatgcgtgattgcaattctttgactgctcggcattgggttgtaaggaacacgagaacatgcaatagaactggacagttgacaggctataagctggtacctggctctaactgcttgccattggcaggctctgaagccaagtttttaagaagagctgctttcttgaagcataacttttgggtaacaacatattcacgtgatgaagttgttcctggaggagaatttcctaatcaaaa

SEQ ID NO: 18485 - DNA, 372 bp, Glycine max
  Clone ID: LIB3106-093-Q1-K1-D7
caacattttcggatctattcaaaaaaaaaattaaaaaaaaaaaaaaaaaaaaaaaaaaaaaagaaaaaaaaaaaaaaaaaaaaaaaaaaaaaaaaaaaaaaaaaaaaaaaaaaaaaaaaaaaaaaaaaaaaacaaaaaaaaaaaaaaaaagactgataaaaaataaaaatgaaacgaacacaagaaacatgcaatataaactggacagaaaacaagctataacactgatacataactataacatgattgccattgtgcaagctaagaaaccaagatcttaagaagagctgctttcatgaagcataactataggttaacaaaatattcacttaaagagatgggacctataagagaatttcctaatcaaaaacc

SEQ ID NO: 18486 - DNA, 433 bp, Glycine max
  Clone ID: LIB3106-093-Q1-K1-A7
acgcgtacgcgtacattcacacgtacagtaacaatgcacatcctacaattaatgctccttcatcctatgagccatggactccagtctaaagcgtataaatggctctccgcttcttgcggtaggctgctgctatgtacatgttcgcatgactgctgatcagatcggcacatagcacaatactcaggggacatcttcgttcagcagatagatttgtacggatcatgtgctgccaggagccgaccatcatctcgtccacgcctctgccaaagagctagcagaacttgatgtagacgctgtaactgcgtgccacctgacactgctgctaaccaagaattgtgaccctgctatacaagtttgactactcatagaggcaaacgcaagttcccttagacttaattggaccactaatccatgcatgcctatgacttatatt

SEQ ID NO: 18487 - DNA, 440 bp, Glycine max
  unsure at all n locations
  Clone ID: LIB3106-093-Q1-K1-A8
cccacgcgtccggcctcctccaaagaagcgaatggataagctcgatactgtcttcagctgccctttctgcaatcatggcagcagtgtcgaatgccgccttgacatgaagaacttgataggggaagctatctgtgggatatgccaagagagctttagcactacaatcacagctttatcagagccaatagacatatacagtgagtggattgatgaatgtgaactggtgaaccacccggatgatgatggtgctgagcactgatgctcagattcctgttcttgtggttgtcaaaatggattaactggccaattttatatcttaaaagttcaacctgtaactatgtcagttcctgatgtgagcactggtgcaactatatgatccatgtaatagcttagntatgtaataacatgtgcaagaacatgagaataattggccctttttt

SEQ ID NO: 18488 - DNA, 442 bp, Glycine max
  Clone ID: LIB3106-093-Q1-K1-A9
caaggatccacgagaggatgtccttcaagcctggtacatggatgatagtgatgaagatcaaagactcccccaccacaaagaacccaaggagtttgtctcgttggaccaacttgctgaacttggagtccttagctggaaactagatgctgataaccatgaaaatgatccagagctgaagaagattcgtgaagagcgtggttacacctacatggatgtttgtgaggtctgcccagaaaagttgccaaattatgaacagaaaatcaaaagcttctttgaagagcatcttcacactgatgaggagatccgcttttgtgctgctggaagtggctattttgatgttagggatcgcaatgaagcttggattcgtgtgtgggtcaagaaaggaagaatgatcatcttacctggccgaatttatcatcgctttacgctagatgagagcaac

SEQ ID NO: 18489 - DNA, 441 bp, Glycine max
  Clone ID: LIB3106-093-Q1-K1-B1
acgcccacgcgtccgcccacgcgtccggcacaatgggtgcctacaagtatgtttcggagctatggcgcaagaagcagtctgatgttatgagattcttgcagcgggtgaggtgctgggagtatcgccagcaaccttctattgtccgtttgacaaggtctactcgcccagataaggctcgtcgcttgggtttcaaggctaagcagggttacgtgatttaccgtgttcgcgtacgaaggggtggccgtaagagaccagttccaaagggtattgcttatggtaagcccaccaaccaaggtgttactcaactgaaatttcaacgcagcaagaagtctgttgccgaggagagagccggaaggaagttgggtggccttaagggtctcaattcatactgggtgaatgaggactccacttacaaatattttgagggcattctggtggatg

SEQ ID NO: 18490 - DNA, 453 bp, Glycine max
  Clone ID: LIB3106-093-Q1-K1-B10
tcgcaacaagtgtttctgtaaccatggcatccaccactctatcccctacaaccccttctcagctatgctcaggaaaaagtgggattttcagttcctcacaggcacttcttgtgaagccagtgaagaggcagatgatggggaagagcaagggattgagaattgcatgccaagccaccagcatttccgctgatagagtccctgacatgggcaaaagacagctcatgaatcttcttcttcttggtgccatttcactccccactgctggaatgcttattccctacacctacttctttgtccctccaggttcaggttcttcagctggcggtactgttgccaaagatgccgttggaaatgatgtaattgccgagaattggctcaaggcacatggacctggtgaccgaacccttacacaaggattgaagggagatcctacctatcttggtgtggagaaag

SEQ ID NO: 18491 - DNA, 439 bp, Glycine max
  Clone ID: LIB3106-093-Q1-K1-B11
cccacgcgtccgcccacgcgtccgcgcagatcgattacgaagtaatttcactgaatcttagtgaagatgtttctcacaaggactgagtatgaccgaggagtcaacaccttttctcctgaaggccgcttatttcaggttgaatatgcaatcgaagccatcaagctgggatcaactgcaattgggttgaagacgaaagagggtgttgtccttgcagttgaaaagcgcatcacttcgccgcttctggagccaagtagtgttgagaaaattatggaaattgatgagcatataggttgtgcaatgagtggattgattgctgatgctcgaacacttgttgagcatgcacgggttgaaactcagaatcataggttctcatatggtgaaccaatgactgttgagtccacaacccaagctctttgtgatctagccttgcgttttggtg

SEQ ID NO: 18492 - DNA, 202 bp, Glycine max
  Clone ID: LIB3106-093-Q1-K1-B12
cccacgcgtccgcccacgcgtccgcccacgtttccgttaacgcgtccgcccacgcgtacgagaaaagtaaaaaaaaaaaaaaaaaaaaaaaaaaaaaaaaaaaaaaaaaaaaaaaaaaaaaaaaaaaaaaaaaaaaaaaaaaaaaaaaaaaaaaaaaaaaaaaaaaaaaaaaaaaaaaaaaaaaaaaaaggggggacgattt

SEQ ID NO: 18493 - DNA, 316 bp, Glycine max
  Clone ID: LIB3106-093-Q1-K1-B2
cttacaaggcaaactctgaaacctctctggttctctgtgacagcggaacaaattatatgatcatgtattcgctgacactgaaacccttcttcactcctcaattaaggtcttcggcttcttcaacttccacttcgatctcttcgatttctctgcgtgccttcccatatcaggcgggctcattaattagctttcccagaaatttaaagcacaaaggaagatttggtctcagagttgaagcatacgattcctccaattatgacactttcaacccttgcagggcttgcagcgacttcaaacccccttatggcactttggc

SEQ ID NO: 18494 - DNA, 326 bp, Glycine max
  Clone ID: LIB3106-093-Q1-K1-B3
aggacgcgtgagttgactcgtgcgttttacttttgaacggacactatttcagacgcgagggcgtgacgcatacatctgaggcttggatgtttactgtaggaaatgcacttatagaatcattacaaagactgtgataatataatagacccaggattgtctgccatatattcatagcataattatgaactaataatacaatgtgaaatatagaaaggcgatatcttgagataaatgatggatgaaaacacaatggattaaaaaggaagcatataatctagatatgaatataacatatgactaatacatggaaacatagcactgtacaa

SEQ ID NO: 18495 - DNA, 65 bp, Glycine max
  Clone ID: LIB3106-093-Q1-K1-B4
gccatggttgtggcattctatatatggttttatagtagataaataagtttaactctccgttcaat

SEQ ID NO: 18496 - DNA, 409 bp, Glycine max
  Clone ID: LIB3106-093-Q1-K1-B5
cccacgcgtgcgctaatttgctcgttgtcttttaagaggcgaatccttaccattggtcgagatgggtgaagaagtgaatgccgcggttgcagagtatgttttgaagatgcatacgagagagtacgaatgggcgtttgtcatgaagcaagacctcgaggctgcgaagaagaagagagcctacagccgtatactcatgtacaacatagctaagcagaactctatggagtacgatcaccaggagaaggaattgattcagctgaaacgcgaggccaagctgaaaggtggattttatgatcatccagacgctaagctcttgatgattgttcgcattcgtggtattaatgccatggatcctaatgtaatgaagatcctgcatgtgttgcgattgatagagaatttcaatggtgta

SEQ ID NO: 18497 - DNA, 146 bp, Glycine max
  Clone ID: LIB3106-093-Q1-K1-B7
acgcggacgcgtgggctggacgcgtgggcgtgacgctgtgggcggacgcgatgggcgcgacgtcgtgggcgggacgtcgtgggcaggacgctgtgggatgtggactctatggaatatgcatgggatgcggggcacttacatgagac

SEQ ID NO: 18498 - DNA, 428 bp, Glycine max
  Clone ID: LIB3106-093-Q1-K1-B8
caacaagtgtttctgtcaccatggcatccaccactctatcccctacaaccccttctgagctatgctcaggaaaaagtggcattttcagttcctcacaggcacttcttgtgaagccagtgaagaggcctatgatggggaagagcaagggattgagaattgcatgccaagccaccagcatttccgctgatagagtccctgacatgggcaaaagacagctcatgaatcttcttcttcttggtgccctttcactccccactgctggaatgcttattccctacacctacttctttgtgcctacaggttcaggttcttcagctggcggtactgttgccaaggatgccgctggaaatgatgtgattgccgagaattggctcaaggcacatggacctggtgaccgaacccttacacaaggattgaatggcgatcct

SEQ ID NO: 18499 - DNA, 313 bp, Glycine max
  Clone ID: LIB3106-093-Q1-K1-B9
tgggggcctcagaatccttaacagaacaagttgcatgtatggcctccactctctctatatggtctgcatccacccttgttgatgccaagccttcaactccaagacaatgcgtcacccttcccactcttccctctccaccttttcactctcagactcgtccttggaagaccactgctttctgtcgtaggcttgctcgcaattttatggcaatggccaccacaagagaggcagccgcagcagaagttgccgccacaactgacctctctattgccgagacgccagagattgtgaagactattcaagaagcttggga

SEQ ID NO: 18500 - DNA, 437 bp, Glycine max
  Clone ID: LIB3106-093-Q1-K1-A5
tgatgattctttatattgaagtttgtttgcaatatttatgacggtatgttgactatatcatataattgatgatattaataaaaaggaaacggtagaaaagacagaagaattattaatgggatgataatggatgaattataaaatgacaaactaatagccctatttctgatccacttaatcttttgttattgcactatgttctttgtttacctgtacacacaaatcatatgcattcggtcactgaatgatggatgacacactcttgcttccatagtgtctatgtgtcaattattctatctttattaagccaattaacaagtgtctaaggcattatagatgctgcttaattacaagttataacatacgaataagttgctctttgtaaaaattggtgagctagtaaccagaaattcaacatttatgtgtcagatatttat

SEQ ID NO: 18501 - DNA, 456 bp, Glycine max
  Clone ID: LIB3106-093-Q1-K1-C1
cccacgcgtccgcaacaatgacattacctccattgctagcaacggtggaagagtgcaatgcgatgcaggtgtggacaccagttggcaagacgaagtttgagactctgtcctacctgccagaccttgatgatgcacaattggcaaacgacgtagaataccttcttaggaagggatggatttcttgcttggaattcgagttggagcacggcttcatgtaccgtgagcacaacaggtcactaggatactacgatggacgctactggaccatgctgaaactgcctatgcttggttgcactgatgcttctcaggtgatgaaggagcttcaagaggctcagactgtataccccaacggcttgattcggatcatgctattcgacaacgcttgccaagtgcagtgcatcaacttcatcgcctaccagctcccaggcttgtaagtgtgaaaatattttttttttt

SEQ ID NO: 18502 - DNA, 427 bp, Glycine max
  Clone ID: LIB3106-093-Q1-K1-C10
ccccagtagaggttcctgttgagaagactgaagcttatacctatggacagtgtgagtgagagaaacaagtttaaaaatggtcctagttgtggggatcaggtctaccattttgcatgccatgttgaaaagcctcttttttttttttctttttatttctttagtttactttattaatattattatatgatgcttaagtctttggttgtattatggagggtacacctacgtgtaagcacaacacttggctccacatcagcgtgcttgccacgtggtgacatgagaaattctgggagttgtgtattgaagtgagcaagctgctggtgctggagtttaggggtgatggtttattggcagggttacatgagtttgtgatgctgtgttactgtgtttctttaggtttgaataaatgatatttactttataattt

SEQ ID NO: 18503 - DNA, 413 bp, Glycine max
  Clone ID: LIB3106-092-Q1-K1-G8
ataatttcaaatctatctccaatcctttcaaccttctctctttctctctctgtgtattagttgttgctgttcacaccggtaatttcactgtgttctgttatatgcatctctttaccaaattgccccttctcagagggtttggaggctatgccgaaaacgggttaaataagctcggaaaatgattctcacaaagcagtaccgatgcatacactcagctagttgtcaatgtactaaagggcatttaagtgaagatatgatattcttagtatttcataatttgaattggaatcccaagctaattgcaactctatcatgtgtgtgcaaatggtttgatgatcttgccaagcgagttctatggaaagagttttgtcgaacaagagctccgaaaatgttgtgtgatctgcaatctaatg

SEQ ID NO: 18504 - DNA, 265 bp, Glycine max
  Clone ID: LIB3106-092-Q1-K1-G9
cccacgccgtccgcccacgccgtcctgaaaaacacttcctttcttcttctgacaccccacactcgccatctcacggggcgcgattgcatcacaacagatgtctgatcaccaattcactctccaactctcgtccaagcaccgccagccctccgccaccaaactaagctccaaagctagaggtccgccagccactaaccactcatcgatctcgcagctaccgactaacacacaacaaccaacaacaaccgtgtacctccgaccctga

SEQ ID NO: 18505 - DNA, 167 bp, Glycine max
  Clone ID: LIB3106-092-Q1-K1-H1
attttctaagcttacgggcgcactaaggttactaggctgcgcaggtacgatggacaccgctgaaatgactgcattgctgcggaacatgtccgcacttgaaaggagccaaccttgagcgctgccatttacttgtgttgggcgcgtcagaatctggacactgactcaaa

SEQ ID NO: 18506 - DNA, 329 bp, Glycine max
  Clone ID: LIB3106-092-Q1-K1-H10
cccacgcgtccgcccacacgttttctttcttactgtgagagcggcgaagaagaggaagagcaatattgaaagacgccggaaagagccacaatgcgaatgcaaagatgccgccggagacgcggaatgaacgaaaatcagagacggcgctgagtggatcgccaaagaacggatgccacagcaagaagttcacatggatcagcaactgctactagaacttctagatggagcacggtgctatgcactccaaggactcgtactttcaggatctcactgagatcgccgccctatcatcgccgtggtttccggcgacgagatctgaacatactaat

SEQ ID NO: 18507 - DNA, 192 bp, Glycine max
  Clone ID: LIB3106-092-Q1-K1-H11
cttacgcctagggttttaccgctgctttttctagatttaaggaagatgggtgaggaagaggtttacatcagcattgcggttatagcccatgttgactctcggaagtccactaccactggccacctgatctacaagcttggaagcattgacaagcacgttattgagagatttgagaaggaagctgcttacatg

SEQ ID NO: 18508 - DNA, 78 bp, Glycine max
  unsure at all n locations
  Clone ID: LIB3106-092-Q1-K1-H12
ttttgttgcattctaagnaagtatgagagtgtgatcagatccttggccaaagagattaaaagttttattctttgatgt

SEQ ID NO: 18509 - DNA, 232 bp, Glycine max
  Clone ID: LIB3106-092-Q1-K1-H2
acggacagtgcaccttcctctgttttgtttctttgtttaagccttatcataagcttaggggggcacacaaggaatgttgcattgccctaattactctcattgttctctttgtcaacaccaacctgcatggttccatggctgactattgtcgtggttggcagagtgctcatgccactttctatcgtgggggtgatgcttttaacacaatgctttgcgcatgtcggtttggaaa

SEQ ID NO: 18510 - DNA, 283 bp, Glycine max
  unsure at all n locations
  Clone ID: LIB3106-092-Q1-K1-H3
gcgagcgccgcccttacgcgtctgncctttcttttgactatttcgaactccgtcataggggggaccaacaggacggccacgttgtacttattagactcaaacctcaacaacacgacaactttaagcgatgatagaagacacgctcttctcaacttacgctaaaggtaggcggcgtcaccaacacctgagaaaaatgttgtgaaaataataccctacggcaaccggttggcgtagtttcctaatgcttagccacccgacttactcaacagaagtatgaacagct

SEQ ID NO: 18511 - DNA, 401 bp, Glycine max
  unsure at all n locations
  Clone ID: LIB3106-092-Q1-K1-H4
nccacgcgtncgcccacgcgtncgcctacgcgttcgactatttcgaactccgccatggctgggaccaccgccaccgccacgtcatacttttttggcacccgcctcaacaacccgacaaccttaaacaacggaagattccacgcgctcctcaacttcggcaaaaagaaggcggcggcgccgccaccgaagaaaaaggaagtgaaagtgaaaccctccggcgaccggctggtgtggtttcctaatgcggagccgccggagtggctcgacggaagcatgatcggcgaccgcgggttcgacccgttcgtgttcgcgaagcccgcggagtacctgcagttcgacctggactcgctggaccagaacctcgcgaagaacgtcgccggcgatgtgatcggaaccagggt

SEQ ID NO: 18512 - DNA, 225 bp, Glycine max
  Clone ID: LIB3106-092-Q1-K1-H5
acgctatgctctaaactaaccaatcttatttacgcgtgcgtgcgccgtattaccggtttgatagttatatcaaaatgcaaaacagtgaacagcagactacaacattaatgctgaaactaccgtgccagctcccaactttgttgcctcatgcaccatattggtttctgcaggtcctgtactatctaagaggcttgccactatcgacattgcgaacagttactcatt

SEQ ID NO: 18513 - DNA, 291 bp, Glycine max
  unsure at all n locations
  Clone ID: LIB3106-092-Q1-K1-H6
tgcaaccagcnnctctaggtgacccattctactcaatctaagaaggggaccnnacaacttccactncaaagcttggtcnnctcgtggcaacgaaatctaatttgactttgtatcaagaagcttttcatctattgagtnntcctttttaaatttttactttttctggctttgcattaatgtgtaacgtatgccttgcaagaccttactattcaaaagagtgcttctnnttccagtctacatttgagtgggcatttgctttggcttttcaaattgaaaagcaaagaaacatat

SEQ ID NO: 18514 - DNA, 100 bp, Glycine max
  Clone ID: LIB3106-092-Q1-K1-H7
aaaaaaaaaaaaaaaaaaaaaaatatatttaaaaaaaaaaaaaaaaaaagggcgggcggggtaaaaaaatccagcttccgtctcacatacatccgactta

SEQ ID NO: 18515 - DNA, 351 bp, Glycine max
  unsure at all n locations
  Clone ID: LIB3106-092-Q1-K1-H8
cccacgcgtccgcccacgcgtccttaatatataataccgtacttgaccacatagggtggatgagcctcaatgtgcactcacgaangatgccactgactcggtagggaataccccaatggtatttctaaacaacattgtcgtctggtgtgtagcccgtattgctgctaaactggagtacatgcacgcctgctgtagtgtcaaatataagattgctttgagcatcattgaagatgctgagaaaaaaggccttattactcctggaaagactgttctggttgagtatacaagtggtaacactcgcataggattgacattcatagcaccattgaggggctataaacttcaagtgac

SEQ ID NO: 18516 - DNA, 407 bp, Glycine max
  Clone ID: LIB3106-092-Q1-K1-H9
gggggggggggggtagattctgctctttttttagaaagttagaacataagtgctggtggctggattgctagcatgtgaataaaggtcagtttgggtaaacagcttgattaacagcttattgaattaatgcttatctgataagtacttatgtataactcgcttctacaattgaagaggaaatagcgttacatcgttttcattatctatgctggagagcttgcttaaattagatgaaaacagcttatggacataatataatctattattctattttcataagctatatcaaacagcatagttaaatcgccgctatagcactattgcataagcgaattacttgcatcttggggaagcaactctgcttactattgcaactgctatgggtgtagaggttgtggcatgcattt

SEQ ID NO: 18517 - DNA, 455 bp, Glycine max
  Clone ID: LIB3106-093-Q1-K1-A1
acgcccacgcgtccgcggacgcgtgggttttttttttttttattttatgattgtatgtttactggatatataatttgttgatattaataaaaaggaaacggtttaaaagacagaaaaattattaatgggatgataatggatgaattataaaatgtcaaactaatagccctatttttgctccccttaatcttttgtttttgcactatgttctttgtttccctgtacacacaaatcatatgcattcggtcactgaatgatggatgacacactcttgcttccatagtgtctttggttcaattattctctctttattaagccaattaacaagtgtctaaggcattaaagatgcagcttaattacaagttataacatctgaataagttgctctttgtaaaaattggtgagctagtaaccagaaattcaacatttaagtgtttgctttttattattttttt

SEQ ID NO: 18518 - DNA, 387 bp, Glycine max
  unsure at all n locations
  Clone ID: LIB3106-092-Q1-K1-G7
cccacgcgtccgcggctttctccttattaacttcttccgatgtgtttctctctgtgtgtgctccgtactcttgctttcttcataaaattttgcaatcggttcgacaactgaatttaaatttggtaatcaaattaataattgaaaaaaaaagaagaagaaaaaaagggtggggagacatagccagatattgaacctgccctctgttcttaatctcattgtgcctcccctcagatctcgtcttcaatcggagtgctttgccttcattgattcactgcttgatgatttgtgatgaaagatcccgttgttcctaactgaatccgacaatatctatttttgcatcgntaatacagtctctcagttagtctaaatttaagataaaatgcaatc

SEQ ID NO: 18519 - DNA, 423 bp, Glycine max
  Clone ID: LIB3106-093-Q1-K1-A10
caatttttctctcaaccggcccaatttagcataagcccagcatggccaccgcaacagcagcagccacctcgtccttcatggggacgcgcctcctggaggcccattccggggcggggcgggtgcaggcccggttcgggtttggcaagaagaaagccgccgccccgaagaaagtttccagggggtcgggctctagctccgataggcccctgtggtatccgggcgccaaggcgcccgagtacctggatgggagccttgtcggagactacgggttcgacccatttgggctagggaagcccgccgagtacctgcagttcgagttggactcgctggaccagaaccttgcgaagaacgtggctggggacatcattgggaccaggaccgagctcgcggacgtgaagtccacgccgttccagccctacagcg

SEQ ID NO: 18520 - DNA, 295 bp, Glycine max
  Clone ID: LIB3106-093-Q1-K1-A11
actcggactggaattcccgggcaggccgtccgaacttgctccaaagaaaaagcctgttgctgtttcccttgccaatgaggaactcgccaagtggtatggtcctgacagaaggatcttcttgcctgaaggtctcttggaccgatcagagatccccgagtccttgaccggagaagtgcctggagattatggttatgacccgtttggtcttagcaagaagccagaggacttcgccaaataccaggcgtttgagttgattcatgccaaatgggcaatgcttggtgctgctggattcatc

SEQ ID NO: 18521 - DNA, 323 bp, Glycine max
  unsure at all n locations
  Clone ID: LIB3106-093-Q1-K1-A12
ggtaacctcgctggacctaacccagactctcatccaaagacctccgaggttcctcttctgagctcaaacaagaaaagcaaaggcagcacgagaaccctaactgccgccgtcgcaggcgcagtttccggtgtcgttatgttatcccttactgttgctttcttcctcatcaaacgcaagaagaacgtggccgtcgatgaaggttccaataaaaaaggtggaacttctcgaggcggtggctcatcatcgctaccaaccaacctctgccgtaagttctcaatcgcagaaatcagagccgncaccaacaacttcgacgaaactctttg

SEQ ID NO: 18522 - DNA, 317 bp, Glycine max
  Clone ID: LIB3106-093-Q1-K1-A2
cccacgcgtccgggacctttaagcttcctaatcccctgtactacattcagtagttccttcggctgtcaacaatctagcttgctcctatctatctatatgtaataagatgcgttcaaataggggcactagcttcactttatgttgtttcagctgtgtgtcaacaagtcatgtaagagacttcactatgttgttttctctttcgtggctttaataaattatgcgcccttgttccataaaaaaaaaaaaaaaaaaaaaaaaaaaaaaaaaaaaaaaaaaaaaaaaaaaaaaaaaaaaaaaaaaaaaaaaaaaaagggcgg

SEQ ID NO: 18523 - DNA, 442 bp, Glycine max
  Clone ID: LIB3106-093-Q1-K1-A3
cgtgattgctctgtttcgagtggacttctcaggaagaggagagcttgcagatcgccagcagaaattggcacagatgctttctcgattaataaagatagctgaggaatttaatgttgccgtctatatgacaaatcaggtcatatctgatccaggaggtggcgtgtttgtaactgatccaaagaaaccagcaggagggcatgtgctagcccatgcagccacggtaaggttgatgttcagaaaagggaaaggggaacagcgcatttgcaaagtgtttgacgcccccaacctgccagaggctgaagcagtgttccagataacagcagggggaattgcagacgctaaggactaaagagtcgcttctgagttgtgacttctgggccgaatccacaaaagaaaccagagtggctgaatatttctggtaaccttaatcttccagatattt

SEQ ID NO: 18524 - DNA, 234 bp, Glycine max
  Clone ID: LIB3106-092-Q1-K1-E9
gttaaaagttgcaatcgtgaaaatttgtagttatctgtacaacaaggagtttgggcaagtcaaatgagcaatgaatccaaactaaatgaagcatttgactctgtggaaaatgtgatattagttttctcagtcaaccgtactagacattttcagggttgtgcaaagatgacatccagaattggtggttctgttgctggggggaattggaaatatgctcatggaactgcacattat

SEQ ID NO: 18525 - DNA, 173 bp, Glycine max
  Clone ID: LIB3106-092-Q1-K1-F10
gcgacgcgttcgtgtaggcattcggttagaatctgtggtaatagtgggttttggaggggcattataactcacggatgatggctagcttcaatattaatctgggcacagagtagtacatgacagtgcagtgaccactgatgacgctgtaagatgtaccctgactagagctacac

SEQ ID NO: 18526 - DNA, 320 bp, Glycine max
  Clone ID: LIB3106-092-Q1-K1-F11
gctacacgttcaaatctaaatatggttcaaatgcttccaaacagatgggaatggaaggactgtatagctgacagatcttaattatctttattataaatatgggcaaaatccatggaatgatagtctcagcagacctgttacagacctgcttactattatagcaggtgctgtaagaggcattactagcaacatatgcgatcttttagaaagctatctcatcatggaatgcttacaataatcaactcagggaacttgagcaaacatggaatgacattgaatgagcatattgagtacttgtagcgaaagatatgcaatatgct

SEQ ID NO: 18527 - DNA, 331 bp, Glycine max
  Clone ID: LIB3106-092-Q1-K1-F12
gttaaacatataggtggcgcactgagtgtagcaggtgcacaacaaatgactgtgatggataggttaatggtggtatgcaaatcaagcaagaatgcactctgcatgttctatacactgtggtacaagctacaccatgagctgctgaggttgggatttttcttcgatttccacaggagtgcacaaatcactgtaacagtttcatcaatcaataaaatgctgaagcggcatgcaacatgatgaggccgtgccactaacacctcatatacaaatggttgaagtaacagcacctgcaactgctgaaacctacgctgcagtcgcttctgctgtgtca

SEQ ID NO: 18528 - DNA, 330 bp, Glycine max
  Clone ID: LIB3106-092-Q1-K1-F2
cccactcgtaccactatctgtctaacattaattatcaacagcgccacgtgagcagccggacggcaaaacctgaggccctgctcgggttatacacagggagcgccttcctcttcgcacgcatgattgccggattccgccaaagcctatttctatacaactgtgccgaccactgaactgacgaccacggagacagcgactccgacgccacccagtgcgcgtactcgcgcgcggtgctaatgctcgacatggtacggaacctcatcttagtggatgccaccagcggcgtcctgctatacacgcttctagagcggacagcgacgcccctaaggc

SEQ ID NO: 18529 - DNA, 261 bp, Glycine max
  Clone ID: LIB3106-092-Q1-K1-F3
ccacatcgaaccactatcagtctcacgttatttatccactctcccgcgtgctttatctgaggagaaaaccttgcgctctgcttctgccaaatcaattaagctctcctctccttggaccaacgcttccttgacttccccaaaccgtttctcgaaagaagtatggggttgggtgaactccaactccaagggcgtcgccctgagaagggacaccctccgagtagtcgtgagggctgaaatgtcccgccaagtgactagaggcct

SEQ ID NO: 18530 - DNA, 264 bp, Glycine max
  unsure at all n locations
  Clone ID: LIB3106-092-Q1-K1-F4
ctctgctgcttacgtataggactaagcaagttggtatgctacggnngccttggatnngacgccacgcaggccggtcgtgctttctattctagcttttgcggtgcctcnttgaaaagagctctaagagactcgactgtggatgcctgatgcctgtgtgacaagcttgtgaacctggnngtggggtggttctccttaccttcttttgtttgacaaccgatttggatgtgggccgccgagggtgtactcggtggtcacaagtggggg

SEQ ID NO: 18531 - DNA, 333 bp, Glycine max
  unsure at all n locations
  Clone ID: LIB3106-092-Q1-K1-F5
ctcgtaagagtagtaactaagaaaatataggtttctaatttatttcgttcaattctccggcggcaccgcaaccgattccgccaccgcatatggcaaaaggtcgaaaactaacgaccagccggagcgagcgcttcttgggaacctatgcttacagccaaggctccgccgccgtgaacccgtcggagcttcgggaagaggatgtatggggcgccggagatgacgccggcgaacgcgagtgggatcctcacttcgccgccatgagcaacggcggcggaagccggcgccggattccgcgtgacacggatgtgcnaccgcgcgtgggtgggctgtctc

SEQ ID NO: 18532 - DNA, 336 bp, Glycine max
  unsure at all n locations
  Clone ID: LIB3106-092-Q1-K1-F6
cccacgcgtncgcccacgcgtccgtattatttttgataatgaaattaatgagagaagagagggggaggctagtgatgatttgtttagtactggaaccagtgtgggccaggtttcggattttaacaagagtagcggtgtggtgagtgtgagtactgatagcgaacagcttagtagtagctacaaagagagtgataagttgatgtctgggactgttttctctgagattgtggatccaaagccacgttgagagaatcaaattgatctcaagaatgaagacctaatactactagggctagcttgaggctcgcaagttatgtgtttagtttcataatatat

SEQ ID NO: 18533 - DNA, 353 bp, Glycine max
  Clone ID: LIB3106-092-Q1-K1-F7
attcggatttgtgaccttcgccttagttcagtcaatgaaagatgcgatcgcaggaatgagcggccaggaccttgacggccgtaacatcactgtcaacgaagctcagacccgcgccagccgtggtggtggtggaggcggtggtttcggaagtggtggtggatacaaccgcggtagcggtggatatggtggtggtggtggcggcggcggatacggtggtcgtcgtgaaagtggatacaaccgtaatggtgggggtggaggtggaggatacggcggtggtagagaccgtggttacggtggtgatggtggttctcgctactctcgcggtggggaaagcggtggatccgatggaaact

SEQ ID NO: 18534 - DNA, 388 bp, Glycine max
  Clone ID: LIB3106-092-Q1-K1-F9
cccacgcgtccctttctcaatatattgttactagcagctcatatcaaaacacagagacgctactgcatttatacgagcccactgtgatcattattcctccaaacacgttagcatacaattccacggctggagttacagaatcggttgatagattttatggttcagtgaagcaggtgatgctggcccagagttgctttgatgacacacacggtgctatcttaataaaaaacctttctgccaaggaaccttcaacacttggtgtggacacttactataagcagtattatcactgcctggctgctgctgctgtcactttaaagtggacggaagcaaaaaaagggggtgttggtaaccaataatcatttgtcgtcaacttcaattgaacaat

SEQ ID NO: 18535 - DNA, 341 bp, Glycine max
  Clone ID: LIB3106-092-Q1-K1-G1
catttctaataataggcgggaaccaaggtgtctatggcaaccatggcatgatttacattgcaggattgaaggccctgctgcatatgatatactcactaattttgagcagcgctggagaaaagccaccaaatggtctgagttgggtcggaaactcaagagagtatctcactggaacgatgattctttgatcaaggtagaacgcatcttttgtattcttagtccttcggaatcaactccagttgatgatcctgaactatgggtttcgaaggaagacgatcctgaaaattggcatgttcaagtttttcgatccataaattctggttctttgaaaggattcccta

SEQ ID NO: 18536 - DNA, 223 bp, Glycine max
  Clone ID: LIB3106-092-Q1-K1-G10
gccactcgttaaagccgcaacttgtttatattgctttgaaacagagaggaagggaagcgctgctctgtcagcagagcaatgactagctccatgagtaaactgtgcatgctaaagctcatgctaatgcaatgacaactagagaggctgcaataagtaccatgactagagctacacgaagcgaacctctcgacgagcctagctcacagaaaggtcacttgttaag

SEQ ID NO: 18537 - DNA, 241 bp, Glycine max
  Clone ID: LIB3106-092-Q1-K1-G11
gttactgttagagctgtgaatatgattaagaacaataatgaaagacgccggagggaggcacaaggcgaatgcagagctgtctcctcatactcagaaagatcggaaatcggcaacggatcttaatggatcgacaaataagggaggccacggcggtaagatcacgtggatcggcaacggctactataacgtcgagatggagcacggtgctatggactcctaagaccctgacttcgaggatcca

SEQ ID NO: 18538 - DNA, 400 bp, Glycine max
  Clone ID: LIB3106-092-Q1-K1-E8
cccacgcgtccggagcggccagcctgttacattcagcattgctgcaactacaggtaaagctttatctggagggaagctagtgattgatgtgtcatatttcggatggcacatacacagtgagacccatgacctttgtggagaaactacttgccctgtttcagctggtgattttgtgattgctcattcccaagttttacctggattcactccacctggttcatacactttgaagatgaagatgttcgatggaaacaagcatgagttaacctgcattacatttggttttgatattgggtttggttcctctgtggctgatagctaattgaaattggtcatcgaaatctatgatcagaaacagatctatataaattacttgtacaaactgcaaagtacctttatg

SEQ ID NO: 18539 - DNA, 319 bp, Glycine max
  Clone ID: LIB3106-092-Q1-K1-G2
gaaattgctaacatttagaaacgaaattttgttattaacaacaatgtacttaagagcaggccggattcattttctctccgcatgtccttatactgtgcactgctcttcccctctgtttaccacattccccctttctcacagggcttggaggctatgccgaaaacgctttaaataaactcggaaaatgattctcacaaagcagtaccgatgcatacacttcactagttgtcaatgtactaaaaggcatttaagtgaagatatgatattcttagtatttcataatttgaattggaatcccaagctaattgcaactctatca

SEQ ID NO: 18540 - DNA, 375 bp, Glycine max
  Clone ID: LIB3106-092-Q1-K1-G3
gttataaggatcctccaaaacctcgtcttaggtatgtgttgtgtggcgtgagatttcagtgctagcatcgtttcatcacatggcttgtatgactggagttcagcgtctgcttcgccgcactccacttgttcattcccactatgcttctattcgtctcagctcaactctcacttaccccaaactcttcgtaagcggtctttgtagactgacaacagatgaaaaacttaaggaagcattttcgtcttttgggcagctggttgaagctaacgtgataattgatagagcctctggaagatcaaaggggtttgcttttgtaacttatacaaccatagaagaagctgaaaaggcacgagaaggaatgaaccctcaattttt

SEQ ID NO: 18541 - DNA, 410 bp, Glycine max
  Clone ID: LIB3106-092-Q1-K1-G4
catttccataatcactttttcctactttcttttccatccatcccttgactaattaattatccgtcacaactaccaatggccgaagagaaacaccacaagcaccgcctcttccaccaccacaaggacgaggataataagccagtagaaaccgatactggttacgacaacacatcatattccaagccttctgatgactatgactctggtttcaacaagccatcgtatgagtcttctggcggtggctatgaaggtggttacaacaaaacatcttattctagtgatgagccagcttctggtggtggctatgaaggtgggtacaagaaaacaggttattctggtggcattgatgagacttctggtggctatggcgcctgtggtggtggatactctgacgtcactgatggtggcta

SEQ ID NO: 18542 - DNA, 445 bp, Glycine max
  unsure at all n locations
  Clone ID: LIB3106-092-Q1-K1-G5
nncgcaacattgttacanctcttttcnnttcttctcgtttgttgcnnttcgctgnnttgaatcatgcgatcgagaaggggtcgactttcagcgctctcccagttccattgggaacccannctatctatcggccgttaccttaccaacggcgggtgtctgttcttcggagcccgacttctcgaacctagcacctggagtggtatgttgcccaaccgagcatncggaccaaaatcacttcanngctcactgataactgtataccgctgtgtcgcttctgcgatcgnngctgctgcattctcaagattggtctctgattactgtgccgtnntacttcctcnncatcaacacnnacaatacaactttggaccaacctgcannacagttaaagtttgcttgcaaaaaccttgtcccgactttctcttcatatnnaacaataagaattttc

SEQ ID NO: 18543 - DNA, 269 bp, Glycine max
  unsure at all n locations
  Clone ID: LIB3106-092-Q1-K1-G6
nccacgcgtncgcccacgcgtncgnccacgcgttcgtccacgcgtncgcatcagagcagaggcgcggacattcttaatagtgactttgttagccactggcaaaatttgcaatatggccgattttgtcaaaactcacgtcatccgccttcaatgacatatccctcacctgttatggtgcctcctgtttatttgcaaggtcgatatccttgggatggccctggaagacctatttcttgtaacatgaatattttcagtcagcttatgagcta

SEQ ID NO: 18544 - DNA, 285 bp, Glycine max
  Clone ID: LIB3106-092-Q1-K1-D1
gcgagagctgatacagccatcagatgttatttgtggaacttaacctgctggatcacacgttcaagccctaaccatggaaatggtgtgcacatacaccatggtgttcatttccatggccgtggccactgactcaaacgcgacaggacagctatcacgagttgcagtaggttcttctgtttgcatagcaagcattgtagccggaccaatatcagggggatcaatgaacccagcaaggacattatgtcctgcaattgcaacatcatactacaagggacttttggtata

SEQ ID NO: 18545 - DNA, 288 bp, Glycine max
  Clone ID: LIB3106-092-Q1-K1-D10
gctacgcaccagtttcaccggacgaatttgttgttgttgggagcgatccgagaaaaagtgtgataacatgttggtttaccaggaccttcttacaggtgatgagcttctttgtgactccttacgttacaaggaaattgagaatggaatgctgtggtaagatgaggggaagtgacgttgttaaaggagcacatgatgtaacacattggtgcacacccttctgctgagtgtggatgagaagatgacggagttgaagatgcagctgttaaagttgtagacattgttgacaca

SEQ ID NO: 18546 - DNA, 217 bp, Glycine max
  Clone ID: LIB3106-092-Q1-K1-D11
cccacacttccgctctagaaaatttccaatgtccaccaccacaccctattttctaggcggtattattattatcttcacacacttcactctctctaactcttctctcgaatctaccaccgcaatggccaacgctaccgagaaactctccgctctcataaaagccggcgtcagatcgaacgaaatcactcagaatgtgaagaacggattcatcagcctc

SEQ ID NO: 18547 - DNA, 324 bp, Glycine max
  Clone ID: LIB3106-092-Q1-K1-D12
cgcttatcctttatggattgaacaaacttgccaccgttggacctgtcaacaccagcgcgactgaaatgtacaacacgagggacatagctaaactggatgcatggaaggccgttcgaggggacatccaaggacaaagcagtgggtgattacatcaataaggtggaacagctgctggaagcacatgacttgcctgctggataacagatggatgacttgctttctgcatactgagctagaaggtcacatcagctttgagagtaacaattgcaaagctttgaagctgttattatcataatcatactgatctctaacgattaagacatg

SEQ ID NO: 18548 - DNA, 220 bp, Glycine max
  Clone ID: LIB3106-092-Q1-K1-D2
gagactcgttattatagatttatcatttattttttacatacatacttcacaaggcaaggaaggaacacataacattgaaaagtgtgttcacttcagacttgatcgctattttcctatctgacaaagcctgcgcatttcattcaagtcccatcaaatgcacgctttcattattaaatacataaatcaagttctgaggaacccaactaaaaatacagtcttc

SEQ ID NO: 18549 - DNA, 376 bp, Glycine max
  Clone ID: LIB3106-092-Q1-K1-D3
agcacttactagtccaacagcgacggctgaatctctttgttctctctggctaagaagaagagagaagaagaagaagaagaagaagaatcaaatatccttgagccagacatgtacaggaacgctgcttcacgtcttagggtcatcagtgcccgttcgtgcagcagcagcaggatacctgccagtgccagatttgcaagttccgttgccacacaacaatcctcttctggtttgggtggtttatttggatggctcactggagaccgatccagttctttaccatctctggatttcccgcttccgggcgttacacttcccccttcattgcctgattttgttgcgcccggaaaaactattattactacactcccaaatggac

SEQ ID NO: 18550 - DNA, 360 bp, Glycine max
  Clone ID: LIB3106-092-Q1-K1-D4
cccacgcgtccgcccacgcgtccgcatatattgtgatatgcaaaacatgtctctaatgagctgcactcttctccacaacttcacaactcacttcccttccttccctcccttcttcctcctctccactttctcgcaaatttcccctcactttccgggaaaaaaacagaactccaatcacacctcacaagctccctttttcagcaaggcctaccaccaccagagtggtgttggtgaagtctcaagccacaacacctgcttcttctgaggctgtggcagtgacacctgtgtcttctgagatgaaagcattggtctattgggaatatgggggtgtggatgttctgaagctggactccaatgtta

SEQ ID NO: 18551 - DNA, 392 bp, Glycine max
  Clone ID: LIB3106-092-Q1-K1-D6
cttccaaaccctaacacttctcttcctcttctttcatcacctctccacaatgccgccgaagtgcgacccctcccagatagtcgacgtcttcgtccgcgttaccggcggcgaagtcggcgcggcgagttccctggccccgaagatcggtcccctcggtctctcccccaagaagatcggagaagacatcgccaaagaaaccgccaaggactggaagggcctccgcgtcaccgtcaagctcaccgttcagaatcgtcaggcgaaggtcacggtggtcccctccgccgccgccctcgttatcaaggccctcaaggagcccgagcgcgaccgcaagaagaccaagaacatcaagcacaacggcaacatctcgctcgatgacgtcatcgagatcgcta

SEQ ID NO: 18552 - DNA, 424 bp, Glycine max
  Clone ID: LIB3106-092-Q1-K1-D7
gaagatggagatgtatcagatctggagtaggagaatagcgttgggagcgttcgcgttggttctgcttttcctatcggcctcagcagacgacgtcgttgtgctctctgaagataacttcgagaaggaagttggtcaggacagaggagctctcgttgagttctatgctccttggtgtggacactgcaaaaagcttgctccagaatatgaaaagcttggtagcagcttcaagaaagccaaatctgttttaatcggcaaggttgactgtgatgagcacaagagtttgtgcagcaaatatggagtctctgggtacccaacaattcagtggtttccaaaaggatctcttgaacccaaaaagtatgaaaggccacgcactgctgattcacttgctgagtttgtaaatacggaaagaggaacaaatgtgaag

SEQ ID NO: 18553 - DNA, 109 bp, Glycine max
  Clone ID: LIB3106-092-Q1-K1-D8
cggacaccttctcccacgcgttttataataaaaaaaaaaaaaaaaaaaaaaaaagaaagaaaaatttacaacgatttatggcttccaaacattacctactcattgcgtc

SEQ ID NO: 18554 - DNA, 226 bp, Glycine max
  Clone ID: LIB3106-092-Q1-K1-E1
aagaaagcaagctcgtgaatatgaaattgttgttgaggcttccgattctgtagctgacgagaggatgatcaaagcactcctactgatgactcttacgcaaacgattctaatgccactgatagtggcgatgagaaagacaagcctgccaaaatggaatcaaagaaggatctgtcttctaaggcatttacttgtaaaaagaactcaccagattatgaagattgaaaga

SEQ ID NO: 18555 - DNA, 173 bp, Glycine max
  Clone ID: LIB3106-092-Q1-K1-E10
cccacacgtccgcccacgcgttttttgtgaaactgtgttaattaactctttttggggctaattgtaacttatgaatgattgctagcttcaatattaatctttttacagaatcatagattacatgaaagtgtttacgaatgtcgacatttacagaaaagtgcaaagatcacatc

SEQ ID NO: 18556 - DNA, 307 bp, Glycine max
  Clone ID: LIB3106-092-Q1-K1-E11
cccacgcgtccgcttgaaaatatgttttgtttgtgttgaactcaattgcgtccgattgataatagtactctaatatcccacctacgtctgttatgaatgtgtgaaatatgaaatgattaattgtcatatcgtgttgatttaatttgttctgaattggctagaggggacttaatgtggattttttattcgatttgagtggacttccatgcttgtcatgaaggaaaaacatggatgagttgtctgaaggatggtgatcatccttggaattcgatcgtattataggttgaagtcggtcttacgacactta

SEQ ID NO: 18557 - DNA, 351 bp, Glycine max
  Clone ID: LIB3106-092-Q1-K1-E12
attgaaattctttagttgtaactgacttagttttctgagaaaataaggattattattgagagaatggctggctcatcggaagagggacaagtcattagctgccacaccgttgaagaatggaacgatcaactccagaagggcaacgaatccaagaaactcattgttggggattttactgcttcttggtgtggaccatgccgtttcattgcaccattcttggctgagctggctaagaagttcacacgtgtcatattcctaaaggtggatgtggacgaattaaagagtgtttctcaagattgggctattgaggctatgcccacttttgtgtttgtgaaagagggaacgcttctg

SEQ ID NO: 18558 - DNA, 393 bp, Glycine max
  Clone ID: LIB3106-092-Q1-K1-C8
cccacgcgtccgcttttttgttgttgttgtgtttcatttgtgaaactaacaacagcacggggccatcatcatggcagctgcttccccaatggcaagccaactcaagtccaccttcactaggactcttgtagctcccaagggcctctctgcctcttcaccacttcacctcgtgccttctagaaggcaatttagcttcactgttaaggccatccaatcagagaagccaacctatcaagtgattcagccaatcaacggtgacccattcattggaagcctggaaaccccagttacatccagccctttgatcgcatggtacttgtccaacctgcccgcatacagaaccgcagtgagcccactactaaaaaggatcgaggtgggcctggcccacggata

SEQ ID NO: 18559 - DNA, 376 bp, Glycine max
  unsure at all n locations
  Clone ID: LIB3106-092-Q1-K1-E2
aggtgaggtgaccatatactgatgaatgttgttacacacgcgtaatccgnaagtgccagtgtgaatttttagacaatgatagcgtcttctctctccatcctacattcttgttcatcttcctctatcttattcacaatttcactttctaatcccaaaccctcttattccctacctttcatgctccaagcccaagacaggacccgtaaggaagacaggtccgcgcgccacactctcatcataaagaaagtcgaaggcacacccgagaggccgaggctctcccctttgctttcatattgcatttgtttcctctgtggctgatagctaattgaaatcgctcatctaaatctatgatcacaaacagatctatttaaattac

SEQ ID NO: 18560 - DNA, 345 bp, Glycine max
  Clone ID: LIB3106-092-Q1-K1-E3
cgacatggaagcagtatcaggctcccgttatttctccactctccccctttctttctctcaaagcaaaaccttgcgctcttcttctgccaaatcaattaagctttcctctccttggaccaacgcttccttgacttccccaaactgtttcgcgaaagaagtatggggttgggtgaactccaactccaagggcgtcgccgtgagaagggacacccgcggagtggtggtgagggctgaaatgttcggccaattgactagtggccttgagactgcatggaacaagctcaaaggagaagaggttttgtctaaagagaacattgtggagcccatgcgagatattaagagagc

SEQ ID NO: 18561 - DNA, 395 bp, Glycine max
  Clone ID: LIB3106-092-Q1-K1-E4
cggacgcgtgggcggacgcgtggggcgcgattctgcatcgcttgacctcgtgaattggctcgggaatagaccggagtggaagatcatgaatgggagagaccattttcttgtcgccggtaggatcacatgggattttcgaagactcactgaagaagaatcggattgggggaacaagcttttgtttttgcccgctgcgaagaacatgtcgatgcttgtggtggagtcaagtccttggaatgccaatgatttcgggattccgtatccgacttattttcatcctgccaaggatgatgatgtgttcacctgggcagagaggatgaggaggcttggagaggaagtggttgttttcgtttgccggacctccgggcccggataacccgaaatcgataaggggc

SEQ ID NO: 18562 - DNA, 411 bp, Glycine max
  Clone ID: LIB3106-092-Q1-K1-E6
cctcagttgtgtgtatgcacaagacacatcattccttgtgcctgcaatcataactttgggtgattctgctgtggatgtagggaacaatgactatcttcccacccttttcaaggctgattaccctccttatgggagggactttgttaaccaccaacctactgggaggttttgcaatggcaaattagctactgatttcactgctgacacattgggtttcaagacctatgctccagcatatcttagcccacatgcatcagggaaaaacctccttattggagcaaactttgcttcagctgcatctggttatgatgaaaatgctgctactttgaatcacgcgattccgttgtcccaacagttgagttatttcaaggaataccaaggcaagctggccaaggtagctggcagtaaaaa

SEQ ID NO: 18563 - DNA, 363 bp, Glycine max
  Clone ID: LIB3106-092-Q1-K1-E7
cccacgcgtccgaacactttgagttgctttacatcacaacaacaacatggctggcactgctgctgcaggcatagcttccttgttttcttcttctattaacagtgtcaaatgtcttcgttcctccaagaactgctccataatagaccctctcataacaacagtgccctcaaaccgtggcatgtttgggtcacacttggtggaacctttgtccattaattcgcacaagttgtggggacctagaatttctgctgctgttgcacaagaagaggctgttgttgttgtggatgatgatggtgctggtttagttgaagaagaaaaagtggaagagaatgaaagagaagcggtggcagaacaagactctga

SEQ ID NO: 18564 - DNA, 372 bp, Glycine max
  Clone ID: LIB3106-092-Q1-K1-B2
caaccccattttcccaggtggcacatattacattatgccatcaacttggggcgctgccggtggtggattgaaactaggccggacaggaaactcaaactgcccagttactgttttgcaagattactcagaaatcttccgtggcacaccagtcaaattcagcatacctgggataagccctggaatcatctttacaggtactccacttgaaatcgagttcgcagagaaaccttattgtgctgaatcctccaaatgggtggcgtttgtggacaatgaaatccaaaaagcatgtgtgggtattggtggtcctgaaagtcatcctggtcaacaaacatttagtggcacatttagcattcagaaatataaatttggata

SEQ ID NO: 18565 - DNA, 284 bp, Glycine max
  Clone ID: LIB3106-092-Q1-K1-B3
aagatccaatcattgatgttgataaattttaatgatcccaccaacttcaggcgctcacggcggtggaccaaaactaagtcatatataaaacatatacaaactacttactgtactgatctaacacttagaaatataccgtcgcacaccagacaaattcagcatacctgggataagccctggaatcaactttacaagtactccacttggaatcgagttctcaaagaaaccttattgtgcttaatccttcaaatgggttgcgtttgttgacaatgaaattcaaaaag

SEQ ID NO: 18566 - DNA, 310 bp, Glycine max
  Clone ID: LIB3106-092-Q1-K1-B4
ttttaatttcctagatctcccaaacaaattgttgcataagtcccatggccaaagagacgagtggggtttatctatatcccagcaaatcacaagtttggggtgagaattttgatcataaaaaacttgtaataacaacactagctgctaatggaaagaaggaggagagtaatggagcacctaatgacacatatcctgcgtttcccgggtggtatgctgatgtttcctggccaggagaagcacacacatataaaatagaaaagattctattccacgggaaatcagaattccaagagcttcttgtatttgagtc

SEQ ID NO: 18567 - DNA, 425 bp, Glycine max
  unsure at all n locations
  Clone ID: LIB3106-092-Q1-K1-B5
cccacgcgtccgcccacgcgtncgcggttgcgtgggcggacgcgtgggcaatctcgagggagggcaaaagtaatgggtacggagatcaatctgtctggatatattanaaaaccgaattccattgtctaatgatgaaactaaaacaaaatatttaactaaaatatatgatcctttcctgaacggacgctttcgtggacaaatcgaaaatgttttttcaacctcaatccaatatgaaaaaaatgaaaaaaaaataccattttgataaataaaattcatggtatccttatttctaataatacttataaaaaaaataatagtaattatccagaattagagaaaaaaataaatatatttgatagaaaatctttagtaactacattttttttttttaatttaatcaagtaatttttaaaaaaattaatatt

SEQ ID NO: 18568 - DNA, 441 bp, Glycine max
  Clone ID: LIB3106-092-Q1-K1-B6
gaaagaaactacagaaaaaagaaaaaagtacatggcttccacttctgcagtttcattggctatggcagtaacttatgccagccagaagagggtactggtgcctagctctgatgcattattcctcaagccactgcctctacgttcttattcttccaaggcaatggcagcatcaaaagtacccaatggaaggtttcaggtgagggcttccatgaaggagaaagttgtgacaggcctcacagcagctgcattcacagcctcaatgatggctcctgatgtggccgaagccgccgtttcgccttctctcaagaacttcttgctcagcatcgccgccggtggtgttgtttgtgctgccattatcggtgcggtggtcggggtttccaatttcgatcccgtcaagcgaagctgatcgatatatcaagttctcaagcactactgtgtttt

SEQ ID NO: 18569 - DNA, 388 bp, Glycine max
  Clone ID: LIB3106-092-Q1-K1-B7
cccacgcgtccgcccacgcgtccgttcactacttggaccgctactttattgcccggaggtcacttccgccacttaatgaagttgggttgacttgcttccgtgatttggtttacaaggaattaaacgggaaagtgagagatgcagtgatttcccttattgatcaagaacgtgaaggagagcagattgaccgagctttattgaagaatgtattagatatatttgttgaaattggaatggggcaaatggatcactatgagaatgattttgaagctgcgatgctcaaagacacttctgcttattattctcgaaaggcttcaaactggatcctagaagattcttgtcctgactatatgctcaaggctgaggaatgcttaaaacgggagaaaga

SEQ ID NO: 18570 - DNA, 451 bp, Glycine max
  Clone ID: LIB3106-092-Q1-K1-B8
ccctacgcgtccgaaaaaaaaaatttttataatataaaaaaaaaaaaaaaaaaaaagagagaaggaaaaaatattaaaaaaaaaaaaaaaaaaagaaccttcaatataaaaaatcctatctttcctacccttccatacacatacatctctcttctttggtctcccttttatttacttctcttgccctctgttttaccaccgtttaaatttgttatcccttttcctctctttactttacttgtctttaaactcctttcctttttttccgtttttccttaattacaatatcccccattttgtttttcctttttatactttcttctcaattttgttttatcataaatttcccttctcttttttctctttttaaatatctctttttttttccaacctcttctttttgatcactttttctttcccccccttttaatttctttactttttttttttt

SEQ ID NO: 18571 - DNA, 173 bp, Glycine max
  Clone ID: LIB3106-092-Q1-K1-B9
gcgagtgatagtgagtgcgtggtttttttgcagcagcaaggcatactgacaccgaacagactgaaaatgggtcgcggggtcagtactactagaaaacatagctcctaagcttatctatttggagaggatgtacctgcctacatacgcagatggggctcacactcaaaatgcat

SEQ ID NO: 18572 - DNA, 310 bp, Glycine max
  Clone ID: LIB3106-092-Q1-K1-C1
atgacccatgacttatggttggtgacttaacttttacatacaacgggcacggcacacaggtcggagctatggtcctaacaggttcttcttctggccccggcgcagtacagagaggcatgagtgacaaaaaagatgagtcggcaatgccaaaggacgcaaaaaatgtgaagtctttgctgaaatcaatgggcctggaagactactaacctcgcgttattcacaagtaccttgagctttgatatcgatacaacggctatgtcttaaccgacgcacaagtctatacacagcatgctgtataacctgcacttga

SEQ ID NO: 18573 - DNA, 424 bp, Glycine max
  Clone ID: LIB3106-092-Q1-K1-C10
cccacgcgtccgcaaaagaagcggcggttgtggcgggagccctagcattcgcgtggcgggctatagagctcgctctcaaacccttccttgccaaggcacgtgcttcgattgacaactccgacccgccacgtgaccccgacgacgatgctcttcctaaaaccaccactgacgacgttcccgacgccgccgattctaaacccgccggcgacgtgcctgccgctgctgatactataaccaccgacgccgtctgaagtggtctctcattcatgttattttgaatttcgtcatatctcaaaactactgtccaaatgaaataatattgttagcctcgtgtgcttctgttaaatatgtatattgtgttgtcggtaaatgctcctgttggtttgatttggttttaggattgaaaaaaatatcaagcgtgtct

SEQ ID NO: 18574 - DNA, 200 bp, Glycine max
  Clone ID: LIB3106-092-Q1-K1-C11
gccacactatcaggttaaaacttgtcctagtgtttttacccataatattgcatcgaaggtctagttttatcctgtataagattaacttacagcatcatccttcccttataaattaatcccaagcgtcacacaaatgggactacatcacccttcctaaaaccatgattcaatactttgtacatctacaagattttaaaggc

SEQ ID NO: 18575 - DNA, 433 bp, Glycine max
  Clone ID: LIB3106-092-Q1-K1-C12
ctacaagtggagaagagatgagcaagtttgagtctcttcttcttgataagaaccgtagaatggaacatgaactaacacagttgaaggtcacactttctgagaaaatgtccatactggaaacagctgaacagaagatagcagaacttacagcaaagtctaatgaacaacagaaattgatacagaagttggaagatgatatattgaagggatatagttccaattcaaaagaccgtaaagggaacctccttgatgattgcgatctttcagaaagctgtgggggtgaagtttctgagaatactgaccaaaggcaagtatccttagaccaagatcagagctcaatgcttaaagtgatttgcaatcaaagagatcgatttaagacccgcttgcgagagacagaagaggaaataaggcagttgaaggagaagatggggta

SEQ ID NO: 18576 - DNA, 284 bp, Glycine max
  Clone ID: LIB3106-092-Q1-K1-C2
catccccattttcctaggtggcacatattacattatgccatcaacttgacgcgctgccggaggaggattgaaactaggccggacaggaaactcaaactgcccaggtactgttttgcatgattactcagaaatctttcgtggcacaccactcaaattcagcatacctgggataagccctgcaatcatctttacaggtactccacttgaaatacagtttgcagagaaaccttattgtgctcaatcctacaaatacgtggcgtttgtggacaataaaatccaaaaag

SEQ ID NO: 18577 - DNA, 437 bp, Glycine max
  Clone ID: LIB3106-092-Q1-K1-C3
cccacgcgtccgattgttttatatgtttttattacttcctttctgccaatgtccaccagctggatctctaacatttgcaaaatattgtcaggactgcgtgagtgaaatcatgagacatgcaagacgatcaaatatcccaatagttatagacggggatggactttttcttgttacaaataatcttgaacttgttagcggctatgccttagctgttctaacaccaaatgtcaatgaatataagcgtctagttcagaaagtactaagttctgaagtaaatgacatagatgctcctcaacaactgctatctcttgccaaacaaattggtggtgttactatcctaagcaaaagaaattctgatcttataagcgattgggacacaagcaggtctttcacaaatatataaagcttggttggtcccttttttttggttttttttt

SEQ ID NO: 18578 - DNA, 435 bp, Glycine max
  unsure at all n locations
  Clone ID: LIB3106-092-Q1-K1-B12
cccacgcgtccgcccacgcgtccgcccttgcgtccgcccacgcgtccgattccagtggggttcatttcatcgtgcattcgatggccaccacagcagctctatccggaaccatggtgagcacctccttcatgaggaggcaacctatgaccaccacaagcctaaagacattccccaacgttggtgaagctctttttggtctgaaaagtggacgaggtggtcgtgtcacttgcatggcctcgtacaaggtgaagctcataaccccagaaggagaagtggagtttgaatgcccagatgatgttttcattgttgacaaggcataggacgaaggcattgaacttccctactcgtgcagggccggttcttgcgtttccctgtgtggcaaaattgtggaaggtaacgtggaccantcagatggtagctttcttgatgatgagc

SEQ ID NO: 18579 - DNA, 417 bp, Glycine max
  Clone ID: LIB3106-092-Q1-K1-C4
cccacgcgtccgtggagctctgccacatactttagaaagcagagaaaacgatgatgggcttgcgatggttgtactctcaaactcgcttcacttcccaatttctcttctccaactttccttttcaaaactccaaccctccgttttcagaaatctccattgtcacgccccatcagagctctatcttcctccgccctcgtccaaacatctactaccaaggccactgaagaccaaggtgtgaagcctcaatggaaggccacgatagacttcaagtggataaaggataacaaggaagctgttgctgccaacttaaagaaccgcaactctgatgctgatttgaacctcgtgctccacctttatgacaaaatgttcactcttcagaaggaagttgagagggttcgtggtgaaagaaatgcagtg

SEQ ID NO: 18580 - DNA, 179 bp, Glycine max
  unsure at all n locations
  Clone ID: LIB3106-092-Q1-K1-C5
attntggaggatttttttcacggccggggggtaaaccttttagcttcaattcatatagggcccattttccttttaaaaaaaaaacgggcagggctttggaaaaattttattatttggatttgtaaaaaaagaaactttttctctttttaaaaaaaataaggactttgtatacctttttt

SEQ ID NO: 18581 - DNA, 353 bp, Glycine max
  Clone ID: LIB3106-092-Q1-K1-C6
gtgaacttatggctgacggggtggttctgttttatacatgggccagcatgtttgggatgagggttaggattgcattagctgaaaagggtgttgagtatgaatacaaggaagaaaatctcaggaacaagagtcctttgcttttgcaaatgaacccaattcacaagaaaattccagttctgatccataatggcaaaccaatttgtgaatctgcaattatagtgcagtacattgatgaggtctggaatgataaagctccaatcttgccctctgacccttatgagagagctcaagccagattctgggtagattacattgacaaaaaggtgtatgacacttggaagaaaatgtggctt

SEQ ID NO: 18582 - DNA, 293 bp, Glycine max
  Clone ID: LIB3106-092-Q1-K1-C7
cccacgcgtccgtattttttaacgaaatgcaataagcaaggccacccgaaccagggaagcctaaacgccgtcgacgccgtggctggaagaatatggcttcatttgtttctacccactgtatccttcctagcggggttggatttgtgcatgaccaagatcgttcttgtggtagaactaacactttgcatcttcaaaatgctcctaaaagccctagctctctctcctttttgctctccgtgcgagaaagtagatcagatgccgttgttgttcagagcaagggtcgatcgtctttt

SEQ ID NO: 18583 - DNA, 286 bp, Glycine max
  Clone ID: LIB3106-091-Q1-K1-H3
gctaggcgtatgtgcacacgacattgcactttgactgacttgtagacactatactctaaggtcactggtatgcacgaaaaatacgtggcatacggccttcttgcttccaacgtgtctctccatgaactcatacgctaaaggacatgtcagcaataggagtagaaccaatgcccatgctacattctatggtgaaagacatgcttctgggacaatagatggtgctagtcagcatcgaaactagcatcgaccatgatatgggactaacacagcagcacttatcactgac

SEQ ID NO: 18584 - DNA, 346 bp, Glycine max
  Clone ID: LIB3106-091-Q1-K1-H4
gctaggcgcacgtgcacacgacattgcagtctgaaagcatcgtgaacactatactcttcggtcgcaggtatacaagaaaaaaatggtccatctcggcaactaacttccggcgtgactatacatgatctcacatgctcatggttatgtcagcaacgtgacttgaacccatgcccatgctacataccatggtggaagacatgcttctggaacaacgtatgtatctcgggggcatcgaaaccatgatacacaaggctctgggcctgacacagatgcacatatcactgacttactcagcaatgactagcatcagcactcatgcgtactgatcaagagtgcaaatgaccca

SEQ ID NO: 18585 - DNA, 379 bp, Glycine max
  Clone ID: LIB3106-091-Q1-K1-H6
aatggacattggaagcgaggaatgaaaacttaaatcgaaaatggcagcgatggagaggtgggagatgttcgtcgttcaagagccagttgttgccgcttcctgtctcatcgctggcttcggtctttttcttccagcttttgtgaggcccatgttggattcatatcacgcaaccaagcaacctacccagcctgctttaagtgacgtggttgcaggaatgactgcttaaaagtaaaggtgatttacttgacatatgcaagggcaaatttgctaagtttcttgtttgaacttattttaagtctcaaatgtgagagacataagagtactgaatattgcatttaacttccctgtctgacgatctctatctgttccggaatcattc

SEQ ID NO: 18586 - DNA, 297 bp, Glycine max
  Clone ID: LIB3106-091-Q1-K1-H7
gtcacaacaagccttaacgagactgagagttaagttggtatgagggaagaagagaaggaggtgcaacaacaagatcactccatgttcaacatcaagagcttcctctggcatggaggctctgtttgggacgcatggttcagctgtgcttcaaatcaagtggctcaagtgctgttgacactgccctattctttctctcaactgggcatgctatcaggaatcttgcttcagattttctatggaatcttgggaagttggacagcgtatctaatcagtgtcctctacatggagtaccgtacc

SEQ ID NO: 18587 - DNA, 439 bp, Glycine max
  Clone ID: LIB3106-091-Q1-K1-H8
gccatggccacctccaacttctctattgttctctccgtctccctagccttctttttggtgcgtcttaccaaggcacactcgaccgataccgtttctttcaccttcaacaagttcaacccagtccaaccaaacattatgctccaaaaagatgctagtatttcatcctctggggtgttacaactcaccaaagttggcagcaacggcgtgcccacctcgggatctctcggtcgtgccctttacgctgccccaatccagatttgggacagcgaaaccggcaaggtagccagctgggctacatcctttaaattcaacattttcgcacccaacaaatcaaactcagctgacgggcttgccttcttcttggcacccgtcgggtctcagccccaatccgacgatggatttcttggtcttttcaacagtcccttaaaggacaagtctc

SEQ ID NO: 18588 - DNA, 425 bp, Glycine max
  Clone ID: LIB3106-091-Q1-K1-H9
ggaagaagcggtggtttatactcacacgcttatcattggtctttttcaaaaatgatcctggtgcccttccacagaggggtggtgaagtaaacctgacgttggggggtattgacttaaacaattcagggaggtttttcaactgggggcttgtacactggtggtttttcaactgggggcttgtacactggtggtttctcaactgtagctgctatatatccatccagccattaaatacaaagatatgcctgattgtggttgtgatgtgatactggactaaggggagtttgtataaatatttatgttgtgaactttatcatttggtactggtaaaattatctccgtataggatcaggaaactgctaagaccatgttgtttatgtagtatgtaatttctgtatgtatgcttgacatatacaagtgggaaa

SEQ ID NO: 18589 - DNA, 240 bp, Glycine max
  Clone ID: LIB3106-092-Q1-K1-A1
agaagccatgggagatcacgggcccgtgcgcggaccctgagtacaaatccgcattgccgttggccgtggagtaccgcctcagctgccccgccaccgtcaaggagaagcccatcatccccaactccctcccggagaccgtctacgacatcaagtacttcacccgcgaccagcgccgcaaccgccctcccatacgacgcaccgtcttgaagaagcccgacgtcgagaagctcatgaaggaac

SEQ ID NO: 18590 - DNA, 258 bp, Glycine max
  Clone ID: LIB3106-092-Q1-K1-A10
aaaaaaaaaaaaaaaaaaaaaatttaaataaaaaaaaaaaaaaaaaaaaaaaaaaaaaaagaaaaaaaaaaaaaataaaaataataaaaaaaaaaaaaaaaaaaacattttcaaataataaaaaataaattaaattaaataaacggcctttaatttaattttattttttaattttttcgacttcacgaaccttaattatctttttttatatccccttttttccatttcatgttatactttttagacctgttccttttt

SEQ ID NO: 18591 - DNA, 423 bp, Glycine max
  unsure at all n locations
  Clone ID: LIB3106-092-Q1-K1-A11
cccacgcgtccgcgagataactagaattagtgtgatgaaaatgaaggtccttgttttcgtcgttgctacaattttggtagcatggcaatgccatgcgtacgatatgttccctctccgaatgaacactggctatggtgcccgtactccggaggtgaaatgcgcaagttggaggcttgctgtggaagcacacaacatctttggctttgagaccattcctgatagagtgcgttgaagcaacaaaagaatacatccatggcgaacaatatagatcagactccaaaacagttaaccaacaagcttacttttatgccagaaacctcgaagtccatcccaaggacacatttgtgttcagtatagatggcaccgtactctctaatattccatactacnaaaaacattgattatgggtggagaaaattaact

SEQ ID NO: 18592 - DNA, 389 bp, Glycine max
  Clone ID: LIB3106-092-Q1-K1-A2
ccatccatagacatggccaccgtcacttctgcattcgttgctattccctcattcactggcctcaaggcaagcgcaggcaaagtgagtgccgcagttaaagtctcagctccccaagccacaaggttgggcatcaaggcttcgctgaaagacgttggagtcgctgttgtggccactgccgcgagtgcagtgctggctagcaacgccatggccattgaagtgttgctgggtggtgatgacgggtctctggctttcgttcccaacaatttctccgtggcctctggggagaagatcgtgttcaagaacaacgcaggtttcccccacaacgttgtgttcgacgaggacgagattcctagcggcgtggatgcagggaaaatctccatgagcgatga

SEQ ID NO: 18593 - DNA, 380 bp, Glycine max
  Clone ID: LIB3106-092-Q1-K1-A3
gcaaaaggggagggacaaatggtgagagaatttaaagaggtgaaaattgtagatgcagcaaatcttggtttctttagtaatgcctatgcaattttgtttgtggttttgattaccttttgcattataccagcaatcatcttttcttgcgcggatggtgtatccaaagagaaaacttctgcagcagatcaagagccttatggagctggatgtggcgctggatgtggtgctgggtgtggtgctgggtgtggtgcatgagatccttcttgttactatcaatttcatgcatatacagatctagaagagggatataacacacagttcaagtagaagtggaattttagtgactactgtaatgttagttttttttttttttttttttt

SEQ ID NO: 18594 - DNA, 382 bp, Glycine max
  Clone ID: LIB3106-092-Q1-K1-A4
cggacgcgtgggttctgaccaatggcttccctcactgtcccaaaccattgtgttcccactttgcttcgcactcactctctcaactacccatcttcccaaaacctcccacttccttccgcgccatcaaattctcaattttttggcctcaagctatctcattcttccttttccacaattccctcttcttcttcttcactcaaaggctccattttcgccaaggtgactaaaggttcaaagccaccgaattttacgctaaaagatcagaacgggaagaatgttagcctctccaacttcaaaagaaaacccgtaggtggggatttctaccctgctgatgagacccctggctgtaccaaacaagcttgcgctttcagggattcatatg

SEQ ID NO: 18595 - DNA, 393 bp, Glycine max
  Clone ID: LIB3106-092-Q1-K1-A6
ggatactgaatgatgcgttgaggagtatggtgaatgcagagaggagagggaaagctttggtggaactcaagccaatctccactgttatgtcttcctttctccaaatcatgaaacaccatgggtatatcaaggactttcaagtctatgatccgcatagagtggggaggataagagttgaactacaaggtaggattaacgattgcaaggccctttcgcaccgaaaggaccttaaggcaagggatattgaagcctatagattgcagactcttccaacacatcagtggggttatggtgtcattacaactcctgatggtattttggatcatgaagaagccattaggaagaatgtaagtggccaggttcttggttactttcactaaaatgatcattact

SEQ ID NO: 18596 - DNA, 187 bp, Glycine max
  Clone ID: LIB3106-092-Q1-K1-A7
cgtccgaaaaattaaacttaagatagttttttttttttttttaaatactgagtcataatggaaggtgactcagtgcacctgtacagacgtcagatcatttatttgagtttcattttcttaagagttaactgtatcttgaaataccatgttgaaaactactgtgaggaccagcgttatgtgaacacca

SEQ ID NO: 18597 - DNA, 182 bp, Glycine max
  unsure at all n locations
  Clone ID: LIB3106-092-Q1-K1-A8
cttcttcgacgntatcttcttcggggggtgtttgtgagactgatttaggtctcaccttaaaatgtcttgctgccgaggcaactgtggttgctgaagcgcctgctagtgcagcaacggctgttgaggctggaaaatgtacccagacttgagctacatcgcatcaaccaccaccgagacctttt

SEQ ID NO: 18598 - DNA, 438 bp, Glycine max
  Clone ID: LIB3106-091-Q1-K1-H2
cccacgcgtccgcccacgcgtccgcccacgcgtccggtcgacgagaacttcgtgaagaagcacactggtcccggcatcctctccatggcgaacgccggtcccggaaccaacggatctcagttcttcatctgcacgacgaagacggagtggctcgacggaaagcacgtcgtgttcggacaggtcgtcgaggggatggacgtcgtcaaggagatagagaaggtcggatccagctccggcaggaccgtcaagcctgtcgtcgtcgccgactgtggtcaactctcttagatagacgacgttgaccctaggcttttatctctgtgtcggtggctctgaatgtgtcgtttctttcggtgtcgtttttgcctttttttctctatcccatgtcgtttagggtgattggcgtgttatggatatcatttcgaaaccccttccctttga

SEQ ID NO: 18599 - DNA, 421 bp, Glycine max
  Clone ID: LIB3106-092-Q1-K1-A9
gttcgtcatttttcgtgcctcaaatctttacaatcgataaccacacccatcgcctttagtcagaatgtcggaatcaccattcagaccacgagaaaagcttgctgagaagcaaaaatattttcagagtatccacaggcatacctacttgaagggacccatggataagattacatccgtggccataccactggctttggctgcaacgtcaatttacatgattggacgagggatctataatatgtcgcatggaattggaaagaaagaataacctgggaatttctgattgaggagggtttcccacacaaacctaccttagcttcgttaatatgggccagtggttttctttgcatttatgtctgttctcttaataaattgcttagttgcagattttgactgccattgggggtttaatacttgaatg

SEQ ID NO: 18600 - DNA, 255 bp, Glycine max
  Clone ID: LIB3106-092-Q1-K1-B1
cggacgcgtggggtcgggtttgggaattaacttcgtccgacaccgttcacggcgactcggggcaccgttgggtttcaactgcttcttgtttttgaaccggtgcagtagagagaggcatgggtgacaaagaggaagagtcggcaatgccaagggacgcaaagattgtgaagtctttgctgaaatcaatgggcgtggaggactacgaacctcgcgtcattcacaagtttcttgagctttgttatcgctacgtcgtcg

SEQ ID NO: 18601 - DNA, 350 bp, Glycine max
  Clone ID: LIB3106-091-Q1-K1-G1
caaacccctaatccctaatcaatcgcaagttcgaatccctaatttcaacctgttcttcctgaacgtgcgtcgtgagcgagttaaggttaagggaaagacaaagcgattatggacggttcacgacggctactaggacagtctgtaggggttttcaatgaagggatttgtttagttttatctcgctggtcggctcttcgatcggctgttgagaatgaatggggcggccgtgagtcccgccttaaagccgatcaacttgccggtgacattcttacctggttcactcaatccaaagagccactttatattgatgacttagaagacatactggatcaaggtatgctttctctcaa

SEQ ID NO: 18602 - DNA, 439 bp, Glycine max
  unsure at all n locations
  Clone ID: LIB3106-091-Q1-K1-G10
gtgcattngtcggatttcttcttttggtattgcccgnggattcattcaattaaaagctatagacatctacgcccattaactaaactatgtcaacggcattatatgatcaaaacagcaaaaccccctcttcctcaagttgcagatgagattcaacggtgttgctgagcatcaatgtagccagcaataaacaaaaacttttcttttttttagccatctcaatgtccgcggaaacaataattttcacaagctgctaaaaccacactataggtttaaaaccaaacaccttcttggcctgggacgcgtcctctgagaggttatcgtcttcagaggggagaaagtatctcttgtcaatggacgagaggaaccgatnctggactcggttgcaactcgttggcagctgttatttctgctatgctgttgagaagcttatcgcacctat

SEQ ID NO: 18603 - DNA, 356 bp, Glycine max
  Clone ID: LIB3106-091-Q1-K1-G11
cggccgcccacgcgtcgggaggtgtgagtcacactgtaccaatctatgaggggatgcactcccccatgccatccgtcgtttgcatctcgctggtcgtcatctaactgatcatttgatgaacatcctcactgagagaggatacatgttcaccacctctgctgagcgagaaattgtccgtgacatgaaggaaaaacttgcatatgttgccctagattatgagcaagaactcgagactgcaaaaagcagttcatcacttgagaaaagctatgagcttcctgatggacacgttatcacaaattgggcagagagattccgttgtccagaagttcttttccagccatctatgattggaatgg

SEQ ID NO: 18604 - DNA, 353 bp, Glycine max
  unsure at all n locations
  Clone ID: LIB3106-091-Q1-K1-G12
ctttagaataatcaaaaagaatattaaatttaaataaattttagatagaaaaaagacttaggaaggaggatttgaaatgcgagatctaaaaacatatctttccgtggcaccagtagtaagtactctatggttcggggctttggcgggtctcttgatagagatcaatcgtttttttccagatgcattgatattcccttttttttcattctagttattgacacggaaaggggtgaagaagattatagatccaattaagtattaaatatatgtaattaatatgtaattaatctcctcttctttatttcgncttttatttcttcttttttttacaattgtaatagaataagttaagg

SEQ ID NO: 18605 - DNA, 349 bp, Glycine max
  Clone ID: LIB3106-091-Q1-K1-G2
agaagagcaaaatcgctgtgaaaatgagcttaacggttaagaaagttagcgatgtagcatgtcaaggtgggaaggaacatcgattgggatggaatggcgaagcttctggtctccgatgaggctcgcagggagttctccaatctccgtcgcgctttcgacgaggttaactcccaactccaaaccaagtttagccaggaacctgagcccattgattgggattactatagaaagggaattggcactcgtttggtggatatgtacaaggagcattatgagagcattgagatccccaagtttgttgatacagtaactcctcaatataagcctaaatttgatgcccttttgattg

SEQ ID NO: 18606 - DNA, 335 bp, Glycine max
  Clone ID: LIB3106-091-Q1-K1-G3
cggacgcgtggggaacggcgcagcaactcgttcatctatcttccccggtgatcttcaacgagccggggaaaacacgattctcaccactcgcaaactcggacagggcacagaagatcgtgaaatcgtacgatcttacgagtcagatcgcggttttgagtaccatgaggtgaaagctttgttttttgaattgtgaggaagattgaccaaataaacagaggcaaaaatgaagatggtaactgctttcaacggcaacatgaagaaagctgctgctggacttaaacgcattaatcttgatggtcttcgatggagggtttttgacgcaaagggccaggttc

SEQ ID NO: 18607 - DNA, 386 bp, Glycine max
  Clone ID: LIB3106-091-Q1-K1-G4
gttggccaaagaggtgaagactacgtggcgctctaagacccgtcagtgttttcagttgcagagtagagagagaaagacacataagtaaaacaatggcgactctgaatctgttctctcaaccatggcaacctacaatttcaccttctttctgttgttctaatactaacaacaacaacaacgttgtctatgcctatcataatcataatagcaattccaacaattctaaattacatttattttccaattctcgccaattctctgttctttctcagttgtccaccaactcctcaaagtcagggagtggaagttcatggctgcaaaacagttcctttgttgctggcattgagtacaggaagcgtcctctataatctgtatttcccacaaag

SEQ ID NO: 18608 - DNA, 388 bp, Glycine max
  Clone ID: LIB3106-091-Q1-K1-G5
gcttcagagaagaaactttcgaacccaatgttggagataaaagtgcagaagctcgtcctcgatatctctgttggcgagagtggagatcgtctcaccagagccgccaaggtgttggaacaacttagtggccaaaccccagtgttttccaaagcaaggtacactgttcgttcctttgggattagaagaaatgagaagattgcatgctatgtcactgtcagaggtgacaaggcaatgcaacttttggagagtggtttgaaggtgaaggaatatgaacttctcagaaggaacttcagtgatactggttgctttggctttggtattcatgagcatatcgatttgggaaatcaagtatgatccttcaactggtatttatggaatggatttcttt

SEQ ID NO: 18609 - DNA, 450 bp, Glycine max
  Clone ID: LIB3106-091-Q1-K1-G6
cccacgcgtccgcccacgcgtcctaattgttcctggaggtgtagctcctgtacagactgagttttctcttaacaacatagacatgtttccttcattccccttttttcgatcaaaatcaaatcgtgtggaaaattccgtgtctggaccattggttgatcaaaaggatgggatgctagtgttgaaaaacaaggcccctaggtggcatgagcagctgcaatgttggtgcctgaactttcatggacgggtgacaattgcctcagttaaaaactttcagctggtggcttctgcagaaaacagacctgctggaccagaacatgataagatcatcctgcaatttggaaaagttgggaaggatttgttacaatggattaccgttccctatctcagcatttcaggcatttgcaatctgcctcagcagttttgataccaagattgcttgtgaatgacatg

SEQ ID NO: 18610 - DNA, 303 bp, Glycine max
  Clone ID: LIB3106-091-Q1-K1-G7
ccacgcgtgcgcgctggtacactcatctgggtcctctcttttctctcaatttcgagcctttcaaggctctggttctttgctgagtcctcatggaaacaggcatgcgaatgccgcggtctctgtgaaggcctctgcttctggggttgtgttggtggagaagtctgcggcagagaaggcctatcggctcaaaacagcttacactgagaaaattattcccttgctcatggaagagttctgttacaccaacaaacaccacgagcctaacattgagaagatctgcgtgaactgtggtattggagatgc

SEQ ID NO: 18611 - DNA, 440 bp, Glycine max
  Clone ID: LIB3106-091-Q1-K1-G8
tccacgcgtccgctcagaattttttaaatttgatctttttctgctctttgaagaaagaagggtctttgctcgattttggagacagtctctgctctcagatctcatcaaccttaacctctacgataccaccgagaaggtgatcgcatgagtacatatggatcggtgcatcaagaatggacctgaggagcatagcaaggactctaccaggaccagttatcgaccctacagagcttcccaagtggaactatgatggttccagcacaggtcaagctcctggtgaatacagtgaagtgattttatacccacaagtcattttcagggattcattcagaaggggtaacaatatcttgcttatctgagatgcctacacttctgctggagaacctattgccactaacaagaggcacgcttctgccaaggttttcagccatcctgatgtt

SEQ ID NO: 18612 - DNA, 476 bp, Glycine max
  unsure at all n locations
  Clone ID: LIB3106-091-Q1-K1-G9
aaacccgggcccgacccacgcgtctcgcttgagcatccccttcaactttctatttctctttttgtaaacacttagaaaagaaaanaaaaaatcggcggcgttccttttgctctttcctagtctttttctttctcagttcgatccggtggactcaatacanncctctaccatctccaatctatggaaacctcgtaaccattctcagcatagatggaggtggtataaggggtatcattccagctgtagttcttgaccacttcgaaaaggctcttcaggcatgggataaaagtgcatcactagcaagttattttgatgtcatagcagggactagcacaggaggactcatgactgctatgctcactactcctcacccagacgaccccactcaccctctgtttactcccagcggaatcatagaattttataaaaaatacggtccttctatattcaatgaaactagtggttgggataatgca

SEQ ID NO: 18613 - DNA, 279 bp, Glycine max
  Clone ID: LIB3106-091-Q1-K1-H1
cctacgcgtactcccaaaccaacatacacctttcttctcaaaatggcctccacacctacaggaaccgggaccctacccacgctatcttatcctacacccttctcttcttaccctacgcacctctccgtcaaaccctcctccctccaattccccaatctcttccaccgtgccgacaccacactcctcaaacgcgtcaccttctacctcaatcaggcgcacggaaaaatcaccaagctcggcgaccaaatcggcatactcacgctcgactaggccaaaaac

SEQ ID NO: 18614 - DNA, 439 bp, Glycine max
  unsure at all n locations
  Clone ID: LIB3106-091-Q1-K1-H11
ctctctgtctctttcctcccttccttccctttcaacttcattttcctttcaaatagtaacggtagagaacaaaagctctggctagaacttgtaatgtatatgcaagccatcatcattcacaacaattagtgcatcatcctccttcaactgaagaactttatttaatttgctcctaaaatattttgtcagaggatgtggtgcagtaatcctttgccattccttctttatttttaagcttacagcatctgcaatcatctcttattattacttcaaagtggcgatcacactatcattcattcagctgatcttgaagattttgtggcaggcataaaacctgcaatgagatggctttcttaccagcaaatttcatgctccaaacccctcaccatgatgatcaccatcatcatcaacctncaccttctctcacctcaattctaac

SEQ ID NO: 18615 - DNA, 209 bp, Glycine max
  Clone ID: LIB3106-091-Q1-K1-F8
gacacacatacggagacccagattttgaatttattaacggcatcatcattatcgtcactagcctccaccttttcttcaatgttacattacatgttaaccggaaactccaagggtcactcgactactcaattcactaacaaaaatgtacgctattaggtcctcgcttaagacaatgcttagaaacttgcaaagattattttgaaggttga

SEQ ID NO: 18616 - DNA, 440 bp, Glycine max
  Clone ID: LIB3106-091-Q1-K1-H12
cccacgcgtccgcccacgcgtacgtcagccatgtcgatcttttctattccctcaccaacggaccgttgttcaatgtcaatggcaatttctcggcagccattgccatgttctttcacggctcaggtgagaggaatagggaagggaaaactggaaataacattggaggcacgccatgggagtgatgggcaccacgttgggtatgatgagctatttcaaatccgacggagaggttgttcctgtcactgtcgtgggttacaaagaaggcaacatcgtcacccacatcaaaactgacgccaccgatggatacgacgccgtccaggttggttaccgaagggtcagagatcgcaaattgaccaaacccgaaatctgtcatctacagaaggtcgacgccattcccatgcgccatcttcaggagttacgtcttcaagccgtcgatggct

SEQ ID NO: 18617 - DNA, 360 bp, Glycine max
  Clone ID: LIB3106-091-Q1-K1-D6
cccacgcgtccgcttcctctctgcagagtgcagagctttctctccccgttgcttcattcagtctcaacaacaaaccaatctttcttagaaaatgagggggggcttgtggcaacttgggcaatcgatcactcgccgtcttgcccatggagataagaaggctgttgctcgtcgatgttttgcctcagaagctgagctgaaaaagacagtgtttcatgacttccatgttgctcatggtgggaagatggttccatttgctgggtggagcatgccaatccaatacaaggactcaatcatggactctaccatcaactgtagggagaatggtagcctctttgatgtttcccatatgtgtgggctgag

SEQ ID NO: 18618 - DNA, 463 bp, Glycine max
  unsure at all n locations
  Clone ID: LIB3106-091-Q1-K1-D9
ccggntggaaaaccggccgacgacgcgttcgcccacgcgtccgtcccgcgtccttccactttccggtattcttgtcaggaagatatctggacaaaatggccgtaacagaagcaaacctaaagaaggctggcttccacacatgggagcagttaattctcaaggatccacatcttatcactccaaatgcactttcatacaaatcagcaatgagagagaatctgttgaggcagggatacagaattgttggaatcattggagaccaatggagcgatctgcttggagaccacagaggcgaaagcaggacctttaagcttcctaatcccatgtactacattgagtagtaccttcacctctctcaacaatctagctagagtttgctcctatctatatgtaataaggtatgctgatatgcactattcaaataggagcattagctatgtttgttaatgtcactttatgttat

SEQ ID NO: 18619 - DNA, 226 bp, Glycine max
  Clone ID: LIB3106-091-Q1-K1-E1
caatactgtaattgagtgatagttttcttgttgtctatttagtgatctggctggtattgagactttagtgagagactattgagggtatttttcactttgttcataattataatataattgtaattatatgaaaaaaaaaaaaaaaaaaagataaaaaaaaaaaataaaaaaaataaaaataaaaaaaaaaacatagaaagacaaaaaaaggccggtcggtttaaag

SEQ ID NO: 18620 - DNA, 444 bp, Glycine max
  Clone ID: LIB3106-091-Q1-K1-E10
cccacgcgtccgctccaattagggtttttgttatctgcagctacgatgggtaagggaacggggagtttcggtaagaggaggaacaagacccacaccctctgtgtgaggtgtggccgccgcagcttccacctccagaagagtcgttgctctgcgtgcgcttaccccgctgcgcgcaccaggaaatataactggagcgtgaaggccattaggagaaagaccaccggaactggaaggatgaggtacttgcgtaacgtgcctcgcagattcaagagcggcttcagagagggtaccgaagctgcacccaggaagagaggagctgctgcctctgcctaagctttgaatgaatgacagcaatttttgctgggtcagtgaattataggagttaatgtttctgtgttggtgccaaactctttggaacacattttctttctgtcgttttaattt

SEQ ID NO: 18621 - DNA, 187 bp, Glycine max
  Clone ID: LIB3106-091-Q1-K1-E12
ccctcttttgctttaccaaattccaatttttaattcaaaaccctaactccgttcgaagcggcaaatcgtgatggcaccaaaggcagagaagaagccagcagagaagaagcccgcggaggagaagaaatcgacggtgggagacaaggctctcgcggagaagaagccaaaagccggaaagaagctttcg

SEQ ID NO: 18622 - DNA, 398 bp, Glycine max
  Clone ID: LIB3106-091-Q1-K1-E2
ctcttccgttcaagtgtgcaatttctcaggctgttttactgttgcttcggctgtttctgagcatttaaagtagacgatttaaatcctcagcattgaaaccaataactgatcttcgaatagcatcgcatagactcaaaaccaccccaaaataacaagaaaatccaattttttaggctctcacaaaaacgggtggagaaaaaaaaaacttgaacactgaacctacgttgaagctgaaagtggttgaaagggggttatggagagttccgttgggggagagaggagtggacgcgtggcactatcagaggtggtggcagattgtgtgaaacggtggttcagagatgcactgaaagaggccaaggcaggggacataaacattgcaagtgtggtgggtcagatgt

SEQ ID NO: 18623 - DNA, 331 bp, Glycine max
  Clone ID: LIB3106-091-Q1-K1-E3
ggccaatggtctttgttttgtcccagagatttaccgtttttgacagattgttggtgtgagagaatttgaggagctctatcttgaatatgaaagagaaggaaaagcaatgaacgttgaccaggctcagagcctctggttcgaaattctgaagtcacagatagaaaccggaaccccgtacatgctttttaaggatacttgcaataggaatagcactcaacagaatctgggtacaattaaatcgtcaaacttgtgtactgagataattgaatattcaagtccaactgaaactgctgtgtgcaatctagcatcaattgcactaccacgatatgta

SEQ ID NO: 18624 - DNA, 414 bp, Glycine max
  unsure at all n locations
  Clone ID: LIB3106-091-Q1-K1-E4
cggacgcgtgggtgtaaatcggcattcacttctttgaatggtgatactgttggcgattttgcctcagaaagttcagcagatcatgtcgagaaggttcataattgcaataagaaagagactcccgccatggaggaatacaacttgtttgcagcaagtaataacctaaggttttcaattttttaaaatgataaggtgagaagtattaggtggctgttgtcgaatccagtccctatcttcacatatggtaatggaggtttgagtaccttgtaatttggtgaacaataagcttcctttcagcaatttccaatttagcctatagctngattagttaattgttgcccaattgtctctattctttttattttttttggtgtagagaaagattgagagttgctggattttaaaggatttttt

SEQ ID NO: 18625 - DNA, 296 bp, Glycine max
  Clone ID: LIB3106-091-Q1-K1-E5
gctagaaaatcgtggggggaatatagagttttttgcgtggtagaatcctgccgtgttttggtgatcaggctcgtgccatggctcactgttcccatgtgattctctatctccaacgcacgctgcttctggcgaggcattattcgaacgtgaaagtcgcctattacaagcttgttgaagaggctcgcaacgtccgagcctatgatctcattactgcctatcgcatgcttgctacaaaggactacattgatggcaaccctttcagctcagagtatgctgcagccaactctcagcctatc

SEQ ID NO: 18626 - DNA, 468 bp, Glycine max
  Clone ID: LIB3106-091-Q1-K1-E6
cgtctcctcataagcattaatacaactctcaaaattagttcatttcaaaatgcaaacagcgcttaacgcgttcgctgcccccaacgtctgtgcgcattggcactccacaaagacgtgtactcccatattactcatctttcccaccaaattgaaagccccgcgctcctcacctcgttactctccgattagggttgcaaccgtggagcccgacacttcaactgtcgactacaactctgcgttctcagtgtttcctgcagaagcatgcgaaactgtaggaggggaagcctgcatggcggagatgtaccctgaaacgaagctacagccagaggctaagactccacgagtcgttacagagaacgttgagagagagtatcttgaatacgatgatcctaaaacggtatttcgaggagaggcttgtgatgatcttggaggaactttctgtgagaccgagtatcagaagggtgtcta

SEQ ID NO: 18627 - DNA, 457 bp, Glycine max
  Clone ID: LIB3106-091-Q1-K1-E9
aaaaccgggccgacgacgcgtccgcccacgcgtccgtaaaaaaataaaattaattttttttcatggtaaccattcgtgcagatggggttagtaaaattatccgtgaacgcattgagcaatataatacggaagtaaaaattgtaaatacgggtaccgtacttcaagtaggcgacggtattgctcgtatttatggtcttgatgaagtaatggcgggtgaattagtggaatttgaagagggtactataggcattgctttgaatttggaatccaaaaatgttggtgttgtattaatgggtgatggtttgatgatacaagagggaagttcagtaaaagcaacaggaagaattgctcagatacctgtaagtgaggcttatttgggtcgtgttataaatgccctggctaaaccaattgatggtcgaggagaaatttcagcttcggaatctcgattaatcgaatc

SEQ ID NO: 18628 - DNA, 138 bp, Glycine max
  Clone ID: LIB3106-091-Q1-K1-F1
gacaacctcatgttatctccaatgcgaataatcatatttcatgcaattcaaaccatcttaggtttggttccatttatctcaatctcagactgtatcacttaccatctataaccactacacgctatacaactctctcat

SEQ ID NO: 18629 - DNA, 415 bp, Glycine max
  unsure at all n locations
  Clone ID: LIB3106-091-Q1-K1-F10
gtttgntgttgtaactcgttctttttctattgccgnncggcgnnggggnncggggcgnccggcaaccggaaaaggccnggcgggcgaggaaacgggggnggcggaactcctgcaagtgccgcaacggctgcggaggcttcaagatgtacccagacttgagctacactgagtcaaccaccaccgagaccttggtcatgggagtggcacctgttaaagctcaatttgagggtgctgaaatgggtgtgcccgctgagaacgatggctgcaaatgtggaccaaactgattctgcaacccctgcacttgcaagtgaggtgttgggagagcaagctttaagcagagatagcccttaattaggaataatgataaactattaatgtgtagctaaaaacttatgtattatgtatgtgatggttt

SEQ ID NO: 18630 - DNA, 350 bp, Glycine max
  Clone ID: LIB3106-091-Q1-K1-F12
ccctaacaacacaggcgcagacgcaaacgctaacgcaaacgcaaacgcaaacgcagagcgtgatccattgacgaagatggtgcaacgtctcacctaccgcaggcggcacagctatgccaccaagtgcaaccaacacagggtcgtcaaaacccgtggtgggaagctcgtttatcagactaccaagaagagggccagcggacccaagtgccccgtgactggcaagaggattcaggggattacacacttgaggcctgcagagtacaagaggtcaaggttacccacaaaccgtatgactgtcaaccgtgcatatggtggagttttatctggaagtgccgtcagggagaggatta

SEQ ID NO: 18631 - DNA, 107 bp, Glycine max
  Clone ID: LIB3106-091-Q1-K1-F2
cccacgcgtccgcccacgcgtccgcccacgtgtccgattaaaaaaaaaaaaaaaaaaaagaggaaaagcggaaaaaaaaaaaaaaaaaagggcagcctttcttacgt

SEQ ID NO: 18632 - DNA, 265 bp, Glycine max
  Clone ID: LIB3106-091-Q1-K1-F3
gtgaagaggacgttcttgtgattgaaggtgtcgagtattacagcaacataccagtgaaaggggatgggctcattaatgatgaagatgataagcagatgtagccagaagattcgcagtatgcaagaagctttgtgactgtgcctcattcgcataagcacaaaaataagaagattatcacttgtttgaggctgggactgacagatttgttggaagaattggaagcagacgatgatgatagtgttgtggtgacgttggttccgaggta

SEQ ID NO: 18633 - DNA, 416 bp, Glycine max
  unsure at all n locations
  Clone ID: LIB3106-091-Q1-K1-D4
cccacgcgtccgcagcaagtgcgttttggatgcagagtccgaaatacttcgagatggcccgtacaaagcaaactgctcgtaagtcaactggaggaaaagctcccaggaagcagcttgcaaccaaggctgcacgtaagtctgcaccaacaactggtggtgtgaagaagcctcatcgttatcgccctggaactgttgctcttcgtgagattaggaaataccagaagagcactgagctcctaatcaggaagcttcctttccagaggttggttcgtgaaattgcccaggatttcaagactgatctgcgtttccagagccatgctgtgcttgcattgcangaagctgctgangcatacctttgtgggctctttgaggacacntaactgtgtgccattcacgccaagcgtgtgactattatg

SEQ ID NO: 18634 - DNA, 213 bp, Glycine max
  Clone ID: LIB3106-091-Q1-K1-F4
attgtttgttgttgtaactcgttcttcttctttcgttgttctgtgtttgtgtttgttttgtctctcacctgaaaatgtcttgctgcggtggtaactgtggttgcggaagctcctgcagtgccgcacggcttcgaagctgagatgtccagacttactcatgataccacaccaactgtcatggatgcactgtaagtattaggtctaatggttccc

SEQ ID NO: 18635 - DNA, 252 bp, Glycine max
  Clone ID: LIB3106-091-Q1-K1-F6
cccacgcgtccgcttttctccaatctcattttcatcaccaacaacaccaaaccgggcttggctttcacctcaaaacccataatttgtggggccaagaacctcacttccaaacggagcctcatccttcaaactgctctggtctgcattggcattggcctaactcctcaagtctcagttgcgcaagaatcgccgaccaaatcgcttctttctagcattgaatacacgacaatctggtttcagttttacggtgat

SEQ ID NO: 18636 - DNA, 323 bp, Glycine max
  Clone ID: LIB3106-091-Q1-K1-F7
cccacgcgtccgcccacgcgtactttcattttgcagaaccaacatctgtagacgagatgggaagcactggctagctacatttgatatgccttgacattgctttagtacgtgtgtcgcttgttcaagcagaagatgcgtataagtatttcacatggactgcgacttatgggactctttatccctagtctagtccccagtaggttatacttatcaatggtcacattactgcgcctatacatgacttggcaactaatgaaaatgttattctcaaccttatcaacaagctggacaaaccatttttactcacttagaacggtattaaa

SEQ ID NO: 18637 - DNA, 130 bp, Glycine max
  Clone ID: LIB3106-091-Q1-K1-B8
aaatgcttggaaaccccgtgagcctgagattcgccaccaggtctgctccatcagcgtctggacctgttactttcaagaccgctgcgcttttctccaagaagaaagcagctccagcttcttccaagaaaaa

SEQ ID NO: 18638 - DNA, 414 bp, Glycine max
  Clone ID: LIB3106-091-Q1-K1-B9
ggtaggttaaacactcttcttcatcgtcgttgcaatgggacgtgtgatccgtgcgcagcgggagggagcaggctcggtcttcaagtcccacacgcaccaccgcaagggccctgcccgcttccggagcctggatttcggagagcgcaacggctacctgaagggtgtcgtcactgacgtcatccacgatcctggccgtggcgcgcctctcgctaaggtcgccttccgccacccgttccgctacaagaagcagaacgagctcttcatcgccgccgagggtctctacaccggccagttcatctactgcggcaagaaggccaccctcgttgtcggcaatgtgttgcctcttcgatccattcctgaaggagctgtcatctgcaacgtcgagcaccatgtcggcgaccgcggcgtcttcgc

SEQ ID NO: 18639 - DNA, 323 bp, Glycine max
  Clone ID: LIB3106-091-Q1-K1-C1
gtaaaggtgcaacctttccagtctcttgattttgctccatggccaaccaaggatttgatgtgcctttgtacgaaaaaatttggttcaagcgaacatttcaaagagtgatggacaccttcattttagttctcctcctattgcttcttagttaccgaattttctcatccaacaacttcactttcccatggttccttgctttcttatgtgaatcttggttcaccttcacttggattgtgattctcaacgccaagtggagtcctgcagtaaccataacccaaccagatcgtctcttgcaacgggtacctgagctttcacgagtagac

SEQ ID NO: 18640 - DNA, 437 bp, Glycine max
  Clone ID: LIB3106-091-Q1-K1-C10
attgtttgttgttgtaactcgttcttctttttttgttgttctgtgtttgtgtttggttcggctctcacctgaaaatgtcttgctgcggtggtaactgtggttgcggaagctcctgcaagtgcggcaacggctgcggaggctgcaagatgtacccagacttgagctacactgagtcaaccaccaccgagaccttggtcatgggagtggcacctgttaaggctcaatttgagggtgctgaaatgggtgtgcccgctgagaacgatggctgcaaatgtggaccaaactgctcctgcaacccctgcacttgcaagtgaagtgttgggagagcaagcttcaagcaaaaatagcccttaattatgaataatggataactattaatgggtagctaaaaacctatgtattatgtctgtgatggttttcgtgcactctggtgtttt

SEQ ID NO: 18641 - DNA, 439 bp, Glycine max
  Clone ID: LIB3106-091-Q1-K1-C12
gagataactagaaacagtgtgatgaaaatgtaggtccttgttttcttcgttgctacaattgtggtagcatggcaatgccatgcgtacgatatgttccctctccgaatgaacactggctatggtgcccgtactccggaggtgaaatgcgcaagttggaggcttgctgtggaagcacacaacatctttggctttgagaccattcctgaagagtgcgttgaagcaacaaaggaatacatccatggcgaacaatatagatcagactccaaaacagttaaccaacaagcttacttttatgccagagacctcgaagtccatcccaaggacacatttgtgttcagtatagatggcaccgtactctctaatattccatactacaaaaaacatggatatggggtggggaaatttaactcgaccttgtatgatgaatgggttaacaagg

SEQ ID NO: 18642 - DNA, 367 bp, Glycine max
  unsure at all n locations
  Clone ID: LIB3106-091-Q1-K1-C2
caatgagttcgtcgaacctcagagatcttcaacgcgaattggagaacaaagccaatgatctcagcaagcttcaaaaggaaattgcgaagaatcaccaaatgagaaagaaatacacggtccagcttggcgagaacgagctcgtccttaaggaactggatttattgaaagacgacgcaaatgtttataagttgattgggccagtacttgttaagcaagatttggccgaggccaatgcaaatgtccgcaagagaatcgaatacatctcagctgaattgaagcgtctggatgccactgttcaagatttggaagagaagcanaatagcaagaaagatacgatactaaaattgcaacataggattcaatcatt

SEQ ID NO: 18643 - DNA, 458 bp, Glycine max
  Clone ID: LIB3106-091-Q1-K1-C4
gcccagttttgagagggtaatatttgagatttgagggaaccttgttagaacttagaaggggcatttgctgggcaaaggtggttaataatgttgataaggattgaggatacagattttgccacacttcaatatgcggttcagaagccttctgacaacggtgtgtgaagcaagaattatcaaccaaggttcctgcaagctatgtgacattttagattccaatgcacataaaatttatgtatataaagatggacactgaaatcaaatcaggcatttcatttagtcctttgtactgtatactagtagtatgttgctggccatcatttgttgaaaacttaaaatggttgaaaatgttaaaaggttgacaaatggtataaaaaaaaaaaataattaattaaaaaaaaataaaaataaaataaaaaaaaaaaaaagggcggtcggcctttttttttttttttttt

SEQ ID NO: 18644 - DNA, 313 bp, Glycine max
  unsure at all n locations
  Clone ID: LIB3106-091-Q1-K1-C5
cccacgcgtccgaagattcttccctctctctctccagaatttcctcctcccactgcttcggtcttccttgcagcgcgattgctgcatcctcctccaataagagctcgctgctagcgaaccctaacacggcggcaacgtgaggtgttcggttgaagttcagatcagccatggccgcagcaacccccacttctctgcggttcctcctctccgtttccgtaaccctaaccctaaccctgcttaacctcgccgnctcaaattccgaaggcgacgctctctacacgctgaaacggagcctctcggaccctgacaacgt

SEQ ID NO: 18645 - DNA, 222 bp, Glycine max
  Clone ID: LIB3106-091-Q1-K1-C6
cttagaactctgtccacgctgctgtttatgttatatcatgcctaaccaaatacacgggattggggatttacttctcactgtcagaatgcaggatgctaggtcatcgaacatcactacgagcagaaatttcggtacatacaccgtcagatgcttcaaatacctatacacactatgagtgattgacccagagaaagctgatacattgaagcaatctattcctac

SEQ ID NO: 18646 - DNA, 293 bp, Glycine max
  Clone ID: LIB3106-091-Q1-K1-C7
cccacgcgtacgccctgacacatccctgtctaactccgatttcagcttcccttgcgaggtgcgctacgagttcggattgtcttctccagagagcagcgacgacggcgaagaggacttcttcgccggcctcagtcgccgactcggtcagaccttgctacacgaaactcgcaagcaatctctcattcactggattccgagattccagagaaaactgcatgtttggtcagttcccctcattgcacgctcaccggaataggaagctggtccggtcggagcgccgtttccggcgactg

SEQ ID NO: 18647 - DNA, 332 bp, Glycine max
  Clone ID: LIB3106-091-Q1-K1-C8
gaaattgagcagtgcagagactcctgaacgtcaacggctatggcagcttcttggtttacagcatcttccattctcttcccattcacaactaggtctaaatcccctccttctcaactattcccctcttttccttgcaaacatcataccctccgtctcagacccgtctcagtctcagccgctttaaccccaaccccctacatccaagccgacaaatgcccggtctacgacactccctccaagcttctcccctttcggattggtcacggctttgacctccaccgattggaacccgggtatccactaatcatcggtggaatcaacattccccacga

SEQ ID NO: 18648 - DNA, 395 bp, Glycine max
  unsure at all n locations
  Clone ID: LIB3106-091-Q1-K1-C9
gaacacaggagtgtggcatccacatgttctttaacacgtgtcattacattcaatcctctgggtttcttatctcatccactactcggttacatagcatggtagtagttgtgatttatgaagccaaggagaagataatctcataaaaaacagaaaaaggagtgaaaaagagagacccttttgaatggagtctgttctaagccacgttggtgcaggtttcttcaatggcatgatcccaaggggagttttaggtacccatttcaaggctagttcctttgttggtgttgatggtgggaggccaaggcgtgtagtgttggtgaaagctgangctgtgagcataaacccagatataaggaagagtgaagagaaagtggtagattctgtggtggtaactgaac

SEQ ID NO: 18649 - DNA, 351 bp, Glycine max
  Clone ID: LIB3106-091-Q1-K1-D1
gtgaaaagttaaaccagatagaactttcagtctgtgaaatatatgcttcttgtgaaccttgccctatgtgctttggagcaattcacctctcacgagttaagaggttggtttatggagcaaaggcagaggcagcaattgctattggattcgatgacttcatttcagatgcattgcgaggcactggattctaccagaaagcacaattggagattaaaagggctgatggcaaagcggcaaacattgctgaagaagtttttgagagaaccaaggaaaaattccgaatgtattaattgaatctccatgtttcctaagccgttaggtatttacacctgatgaaatctgagttcacat

SEQ ID NO: 18650 - DNA, 197 bp, Glycine max
  Clone ID: LIB3106-091-Q1-K1-D10
attgttaattgcctgcttcccatttttctattttatcttatttgttctttacatgaaacagaacttttaaaaaaaaaaaaaaaaaaaaaaaaaaaaaaaaaaaaaaaaaaaaaaaaaaaaaaaaaaaataaaaaaaaaaaatacataacaataaaaaaaaactaacacaaaaaaaataccaaaaaacataattaaat

SEQ ID NO: 18651 - DNA, 436 bp, Glycine max
  Clone ID: LIB3106-091-Q1-K1-D12
cttccatccatcaccctttctctctgcttatggttttgatcgcatcggatcttcactctgttctccgatctcaaaatgcccgccgtttatggagctcgcttgaccaccttcgaagactccgagaaggagagtgaatacggttacgttcgcaaggtatcaggaccagtcgtcgttgcagatggcatggctggggctgctatgtatgaactcgtgcgtgttggtcatgataatctcattggtgaaattattcgtctcgaagggaattctgctaccatccaagtttatgaggaaactgctggcttgatggttaatgatccggtgttacggactcacaagcctttatccgtggagttgggacctggaatactggggaatattttcgatggaattcagaggcctttgaaaactatggctaaacgatctggtgatgtctata

SEQ ID NO: 18652 - DNA, 446 bp, Glycine max
  Clone ID: LIB3106-091-Q1-K1-B7
cccacgcgtccggcttcaatggcctctgtttcagcaacttgagagagggttggaagctgagagaagttgctgaaacagaggccattgaagctaagcttgcaaccctctctcaagttgtctacaaggactagccaggggtgttacaaaacttcaagtttggaggtagtttctgtgggatggaataggagaacctttccctctttgagatcctcccgtttctgcatttgtgcagtcaaggcacaaccggagacagtgcagaaggtctgcaatattgtgaggaaacaacttgctctgcctgctgaatctgagcttaccccagacaccaaattttcagcacttgttgctgattcccttgacacggtggaaatagtaatgggtttagaggaagagtttgccttaacttgttaggaggatggctctcaaaccatttaaaccgttcaagaggc

SEQ ID NO: 18653 - DNA, 311 bp, Glycine max
  Clone ID: LIB3106-091-Q1-K1-D2
attgcaatgaaagcaagcgaaccaatgtgttataaaattgccagcctggaaaatttattcaagtagtatattttcactagttgttactgtgaaataatggaatgcttgtttctttgggatgttgctgttttctgttgattgatttaaaagaaaatcaaataatggtcttagaaaggagttttagaccttgtcttagttacagggttattatgccaatgatgaatgacccaactgatattgaattgtatcgattgcaaggttttgattccaaaaaaaaaaacaatacattaactgaaacttgatcttttcta

SEQ ID NO: 18654 - DNA, 328 bp, Glycine max
  Clone ID: LIB3106-091-Q1-K1-D3
cccacgcgtccgcccacgcgtccgactgaatgctccaggttgctcaaatgcaactggtgcttgtgtctacaaagcaagctatggtgacacttccttctcaattggctatttgagtcaagatgtgctaaccttaaccccttcagcggcaccatcatcaggttttgtatatggctgtggtcaagacaatcaaggcttgtttggaaggtcagcaggtatcataggtctagccaacgacaaactctccatgcttggtcaattgtccaacaaatatggcaatgccttctcctattgtctcccctcatctttttcagcacaaccaaactcttct

SEQ ID NO: 18655 - DNA, 385 bp, Glycine max
  Clone ID: LIB3106-091-Q1-K1-A10
cccacgcgtccgcccacgcgtcctgtttttttcaatggagtgctcttcactggtgggtggggtgtttctggtccatatttggatactcttggaaacatttttaagaaagctttagagaaaaatgatgctggagaccatttcccagtaattgccttcaacttaggtggaaacctcgtaataaggatcgtaagcgagcaaactgatattcttgaaccatttactgcgtcgagtttgccaagttctcttatattgtggaaggaagcaaatgctaaaggaagtctatttcaaagatttccttcagatttgttgacacagctgaagacagattgtctcgtcctgcacaaatcatcgtatgccatatccccacgcaagcttcaatataata

SEQ ID NO: 18656 - DNA, 255 bp, Glycine max
  Clone ID: LIB3106-091-Q1-K1-A11
aaaaaccggcccgacccacgcgttcgaccaaacaaactaccaactcaattttatttttttaatggaatgctcaaaaaatcaaggaagagctgattttggtccatctttggatactctccaaaacatctttcacaaacctctacagaaaaatgatgctatagaccatcttccagtcattgccttcaacttcggtctaaacctccctatatggaacaacaccgagcaaaccgatcttatataaccatttactccttc

SEQ ID NO: 18657 - DNA, 436 bp, Glycine max
  Clone ID: LIB3106-091-Q1-K1-A12
aacaaatcaaagccatggccaccttcaacttctctattgttctctccgtctccctagcctgctttttggtgctacttaccaaggcacactcgaccgataccgtttctttcaccttcaacaagttcaacccagtccaaccaaacattatgctccaaaaagatgctagtatttcatcctctggggtgttacaactcaccaaagttggcagcaacggcgtgcccacctcgggatctctcggtcgtgccctttacgctgccccaatccagatttgggacagcgaaaccggcaaggtagccagctgggctacatcctttaaattcaacattttcgcacccaacaaatcaaactcagctgacgggcttgccttcttcttggcacccgtcgggtctcagccccaatccgacgatggatttcttggtcttttcaacagtccctt

SEQ ID NO: 18658 - DNA, 271 bp, Glycine max
  Clone ID: LIB3106-091-Q1-K1-A2
tgtaaatcaccacaaatttccttcaaaataattgagtgactggttcagtgttgtactatggttgtgatagcgcgcttttatttttccttctatttttgtcaaatattttcttttttcctttttctctcttcattcagaaaacaatgtctcgctgctgatttgcagtcttcttgtgttgactggaaaatgatgtacccttgattcccataaagagctattgaaactaaaaaaagcaaatacaaaacgaactttacaacaaatgaacaaactt

SEQ ID NO: 18659 - DNA, 451 bp, Glycine max
  Clone ID: LIB3106-091-Q1-K1-A3
cccatttttcacaccaccaagccaacagattatgtttctccacattgttttcctcctttggcttctctcatccacttcccatgccactgtccaagacttctgtgtggcagaccttaagggtgcagacaccccttcaggctacccctgcaagccacctgcaaatgtaacttcagatgactttgtgtacacaggcttagctgaagctgcaaatgtcacaaacataatcaatgctgctgtgaccccagcttttgttgctcaattcccaggtctcaatggccttgacctctctgcagcaagattagaccttggtccctgtggtgttatcccactccacactcacccttgtgccaatgaactactcattggtctccaaggtcacatccttgctggattcatatcctcaggtaacatagtttatcagaaggtgctaaaaaagggagagctcatgttt

SEQ ID NO: 18660 - DNA, 362 bp, Glycine max
  Clone ID: LIB3106-091-Q1-K1-A4
tccgaaccagaatttgggtttagtcgatggtgcttgccatggtggatgccacctgcggcgatgggtgtgaactttgacgacgacattaagatccgctccaacggcgatggcgctgttcgactgaggcagagagagtcaaagagatagtcgaacattgttcgagttctagatcgacgacgccggtggtccgagcctccgaggtcgacggcgccggagtttggacaacagagggctaactcgatgatgtctactccaatatcaatgatatagagtcctgggaaatggagggtttttacttataaaaaaaccacatattgaaagttttatttcgctaatatcttggttcagtgaagattctaata

SEQ ID NO: 18661 - DNA, 305 bp, Glycine max
  Clone ID: LIB3106-091-Q1-K1-A8
cccacgcgtccgatgaaaatgaaggtccttgttttcttcgttgctacaattttggtagcatggcaatgccatgcgtacgatatgttccctctccgaatgaacactggctatggtgcccgtactccggaggtgaaatgcgcaagttggaggcttgctgtggaagcacacaacatctttggctttgagaccattcctgaagagtgcgttgaagcaacaaaggaatacatccatggcgaacaatatagatcagactccaaaacagttaaccaacaagcttacttttatgccagagacctcgaagtcca

SEQ ID NO: 18662 - DNA, 394 bp, Glycine max
  Clone ID: LIB3106-091-Q1-K1-B1
gttgcctactaggcttggagctcacatgatttgggggccttgattgaccaagtgaatataggctaatcctgaaggtgaggcaacaagcaaaatcttgctctgttcaagtgctttgacctgttaaatgtaatggaatgtggatggctatatctgacaagaagcaaccatgtcttttcaacagtgttcaagaattggccgctcaattatgtaagagtaatctcttgatctatacaactggaaagtgtattcttttatcataaaacgcttagcccttgcatctctagataatatcttagaaactgtcattaaaatgctagttatttgaaaacagaaaaagatttatagagtaactgactcaactgaggaaccatgtgtgctagaaaaacttttttgt

SEQ ID NO: 18663 - DNA, 433 bp, Glycine max
  Clone ID: LIB3106-091-Q1-K1-B10
gataactagaaacagtgtgatgaatatgattttccttgttttcttcgttgctacaggttcgctagcatggcaatgccatgcgtacgatatgttccctctccgaatgaacactggctatggtgcccgtactccggaggtgaaatgcgcaagttggaggcttgctgtggaagcacacaacatctttggctttgagaccattcctgaagagtgcgttgaagcaacaaaggaatacatccatggcgaacaatatagatcagactccaaaacagttaaccaacaagcttacttttatgccagagacctcgaagtccatcccaaggacacatttgtgttcagtatagatggcaccgtactctctaatattccatactacaaaaaacatggatatggggtggagaaatttaactcgaccttgtatgatgaatgggttaac

SEQ ID NO: 18664 - DNA, 429 bp, Glycine max
  Clone ID: LIB3106-091-Q1-K1-B11
cccacgcgtacgcaagattctgattgttattaacgttgaggagggaatgactcctgaaggggacgctacttcggtagtgccaattggggccatgtttgcaatgactctttggctgggaaatactgcctacctgtatatttctgttgcttttgcacaaatgctgaaggcaattatgcctgtagctgtttttgtgcttggagtagctgcaggacttgaggtaatgagctacaaaatgctattaatcatgtcagtgattagttttggtgttctagtagcttcttatggagagataaatataaactggattggagtagtttaccaaatgggaggtgttgttggtgaagctctgagacttatcttcatggagatttttgttaagaggaaaggtcttaagttgaaccctctatccgtgatgtattatgttagtcc

SEQ ID NO: 18665 - DNA, 412 bp, Glycine max
  Clone ID: LIB3106-091-Q1-K1-B12
cccacgcgtacggatggtctcacttgactttattgcaagggatccacgacacactgatcgcggcacaaatgcttcggatccaattcctcagtaacatctgcaagaagtcttcttcttcaccatgccaccaactcctttagactatggctcaataaatgaaaacgtgaagaagagtcactatgctgtcagatgtgaatcataccttcgagcttctgagcttcagaaagagggcaaaaagattatatttactaatgttggcaactcacatgcattgggacagaaaccactgagctatcctcgacaggttgttgctttgtgcacaagctccattcctacttgatgatcctaatgttggactgttattccctgctgatgcaattgcaagagctaaacactatctatcattgacctc

SEQ ID NO: 18666 - DNA, 305 bp, Glycine max
  Clone ID: LIB3106-091-Q1-K1-B3
cagcgatgacaaagaaactaggcttggacttttgtgtttatgaaagaccacgtgcacatgcgtgaagggtcatagctatgctacaatctcaatcatattcatgtcactggctgtgtcttgataaatgtaatactgtgaaaatcgtgatatttgacaacattctaccattgctttacaacagtgtttaagaatctgccgttctatcatataagactgaacttatcatctatacaaatagaaagtcagtctgaatatcatatgacacttaccctttacatgtccagataattccttagatgctgtga

SEQ ID NO: 18667 - DNA, 313 bp, Glycine max
  Clone ID: LIB3106-091-Q1-K1-A1
gaaggaacgaattaagaatattggaagagttatgttgcgtcgccaactcatcggaaaaatttgaatttctggaaaaaaaaaaaagaagccattattaccaaccaccagcgccaccagggccaaagttaaaagttccggtcctgttttaaggaccccacagcaccgttaaacgttcggttttggttttgcaaagaccagaccaaaaaaccggaccaccattacaaacaccattttttccaaatgtgctcgttctcgggttcaaaccacattttttctcttcatatacactttctctctcctcctcttttttttt

SEQ ID NO: 18668 - DNA, 386 bp, Glycine max
  unsure at all n locations
  Clone ID: LIB3106-091-Q1-K1-B4
actactttctctctctttgtaacttgtaagcatggagtcctcaaagatctatgcttacctcttcctttgcatgctcttcctctcctccgccactcccattctcggttgtggctactgtggcaaaccccccaaaaagcacaagcctggtaaaacaccaaagacacccacagtacccgttgttaagccaccagtcacaatccctcccattgttaagccaccagtcacaatccctcccattgttaatccaccagtcacaatccctcccattgttaatccaccagtcacaatccctcccattgttaatccaccagtgacagttccacccgttgtgcttncaccaatagtgaagcccccgggttttctcccttcaattctaacccaccaag

SEQ ID NO: 18669 - DNA, 209 bp, Glycine max
  Clone ID: LIB3106-091-Q1-K1-B5
ccacccacacgtccggttctacatcgcgagcggccgtccttttttttttttttttttttttttttttggtttactgtttattttaatttgttatttgacctcttacttcttttaaacaatattaatctcctaattaaaatctttacaaaataattatatcttaaaacatattcccatttcttttctaaatcttttaaaaaattaacttt

SEQ ID NO: 18670 - DNA, 443 bp, Glycine max
  Clone ID: LIB3106-091-Q1-K1-B6
gcttaagatcacccaagagagatcctaagttacacaacacagactcacacaaagagttacgagagaaatcatcatggcatcagcagcatctgggtttgtgttgtcacttaatgttgcagctgccaccacaaactcaagggtggtcatgttcaacaccaagaacaacacttctaggtttgttgtaaaggcttcagatgagcctgcagcggcggcacccgccaccgtcacacccccagctgaagctgaagctaaaccaaagccaccacctattggccccaagagaggtgctaaagtgaagattcttaggacggaatcttactggtacaaaggcaccggtttaatggttgctgttgatcaagaccccaacactcgctaccctggtgcggttcgattcaacaaagtcaactatgccaatgtatcaacaaacaactatgctttggatg

SEQ ID NO: 18671 - DNA, 400 bp, Glycine max
  Clone ID: LIB3106-090-Q1-K1-G6
aaaaaaagagtagagtggataatggcttcgttatcgctttgcatagccatgagagcacccgctccctcagcttctctcattctcactaccccaaaaccatcttcactctctttgaaccttacccgcacttgctccagcgctcgctctccgctcctccattgctccttcctctcttctccttcccatctctcttccccttcctccgtttcaggcttgtcacttggattggatttgacatctaatgttgggaccagaagaggaaaaggttctggcctagttgtgagggcaggcaaggctgctctttgtctgactaagagaagcacatcaagaaaatcattggcacgcactcatggtttccgcaaaagaatgagcacaccaagtggaaaagctgttttaaggc

SEQ ID NO: 18672 - DNA, 439 bp, Glycine max
  Clone ID: LIB3106-090-Q1-K1-G7
ctcttacacacacaagcactacaacattttctttggtctctcattttctctatagctagatgggttctggtgctttacaacttcttctgatcttgggtcttctggctagctcatgcttagcacaagccccaggtgctgcacccacacaaccacccactacaaccccatcaccaccaccaccaagatcagcacctgcaccagcacccaccccgccagcaacaccaccaccagcaacaccaccaccagcaacaccaccaccagcagcagcaactcctccaccagcaacatcaccaccagcaacaacaccaacgccaacaccaacagctgcacctacacctgcttcttctcctgcaacctcaccagtcccttccgctagttctccaccagcaccaggcacacccggacccgctcccggacccgcatgtggcgccgagccacc

SEQ ID NO: 18673 - DNA, 436 bp, Glycine max
  Clone ID: LIB3106-090-Q1-K1-G8
ggtctctggagttacaccacagttcacggagctctaggactgctcattaggtagttttttatttagaggctaacatgagctttgctgcgccatcacttggttctgctggtggtagatctgctagaagagcatttgagtttgggagaacctatgttgtcaggcctaaaggtaaacaccaagcaactatagtctggttgcatggcctcggggataatggctccagttggtcccagctattagagacccttcctcttccaaatattaaatggatatgtccgactgctcctactcagccaatatctatatttggtggctttccgtccactgcttggtttgatgttggagatatttcagaagatgctcctgatgatctagaaggtttggatgcttctgctgcacatgttgcaaatttgctgtctacagaacctgcagacat

SEQ ID NO: 18674 - DNA, 279 bp, Glycine max
  Clone ID: LIB3106-090-Q1-K1-G9
tctgcactgtgaaagggatagaatcttgtggtttctcgacatctttgtgtatttatggctatgatctttttttccaagaagttcatcatcttgttgttccatgcaatttaaattgagttagttagctggctagaagtagcttttgtgtttgggaatactcgtgaggggtcttcattttgtataattgtttatttgtgggttttgatattaaaaaatatactagaaagataacataatgcaaaataattaaattaaggctaagattatatgatggatgtc

SEQ ID NO: 18675 - DNA, 421 bp, Glycine max
  Clone ID: LIB3106-090-Q1-K1-H1
agatgccccaagagctgcaagaatcgatttcgtggctgtcattgtgctaagagtcaatgcagaagtcgtcaatgtccatgttttgctgcagatagggaatgtgatccagatgtttgtaggaattgttgggtcagttgtggcgatggtacactagggattcctagccaaagaggggataattatgaatgtagaaacatgaagcttcttctcaaacagcatcaaagggttcttcttggaaggtctgatatatcaggttggggagccttcttaaagaatagtgttggtaagcatgaataccttggagagtatactggagagttgatttctcatcgggaagcagataagcgaggaaagatatatgaccgtgaaaattcatcttttctcttcaatttgaacgatccagttgttcttgatgcttacc

SEQ ID NO: 18676 - DNA, 423 bp, Glycine max
  Clone ID: LIB3106-090-Q1-K1-H10
cttgcctcgtcgctttgtgctgctgctgctgcaaaacctagggttgagccttttgctcaggttttcagcgcttctttcttacaatggttctacagaacgatattgatttgctgaatcctccagctgagttggagaagagaaagcacaagctcaagcgtcttgtgcagtcaccaaactctttcttcatggatgttaagtgccagggctgcttcaacataacaactgtgtttagccactctcagactgttgtggtttgcggaaactgccagactgtgttgtgccaaccaacatgctgacggtcaaggttaaccgaagggtgctcttttaggaagaagggagattgaatggtttgttaaccagacttttctttgtcaatgattgaaaattttcggttgttaggtttttgaaatggaatccatttcc

SEQ ID NO: 18677 - DNA, 421 bp, Glycine max
  Clone ID: LIB3106-090-Q1-K1-H11
cgcagagtactgcactgaacgaaccgtagttgttccgtttcagccatggtggagaacaatgtcttcgaggatatatttagggtcgaaaaattaaaccccgatgacaaaaaattattcgataaagtcactcgcattgaagcaagaagtgaaaagtttgacatgtttatgcacctggacattaattccgagatatatccgttaaaggttggtcagaagtttgctcttgtgcttgtttcaacacttaatcctgatggaactccagacactggatattatacccagatcagtcgacaatcactggccaacaattttgaatatgtcatgtatgggaagctctacaggataacagagggttcatggcgtgaaaaagcggagatgaatatttcatttggtgggcttctgatgatgctgaagggagata

SEQ ID NO: 18678 - DNA, 431 bp, Glycine max
  Clone ID: LIB3106-090-Q1-K1-H12
tcgcccacgcgtccgcaacaatgacattaccttcattgctagcaacggtggaagagtgcaatgcatgcaggtgtggccaccagttggcaagaagaagtttgagactctttcctacctgccagaccttgatgatgcacaattggcaaaggaagtagaataccttcttaggaagggatggattccttgcttggaattcgagttggagcacggtttcgtgtaccgtgagcacaacaggtcaccaggatactacgatggacgctactggaccatgtggaagctgcctatgtttggttgcactgatgcttctcaggtgttgaaggagcttcaagaggctaagactgcataccccaacggcttcatccgtatcatcggattcgacaacgttcgccaagtgcagtgcatcagcttcatcgcctacaagcccccatgct

SEQ ID NO: 18679 - DNA, 331 bp, Glycine max
  Clone ID: LIB3106-090-Q1-K1-H3
tcatgtcatgccaactcccctcatcaatccctttcatttcattctcaaataccttcaactaaagctatcctaaatattccaaacacattcttccaagtccatctatgatttaatcactttgtccataacatcttccataatgagcctattccataaagcctaccaaacaatctctcaactgatctccttacactaaccaaactcttataatccacactcataccagttttatacacatctcctcaaatcatcttcatctgaaaacaccatctccctacattcaacacccatctttactacttctgcatctctttcaaaacacatttattat

SEQ ID NO: 18680 - DNA, 456 bp, Glycine max
  Clone ID: LIB3106-090-Q1-K1-H4
cccacgcgttcggatcgagataactagaaacagtgtgatgaaaatgaaggtccttgttttcttcgttgctacaattttggtagcatggcaatgccatgcgtacgatatgttccctctccgaatgaacactggctatggtgcccgtactccggaggtgaaatgcgcaagttggaggcttgctgtggaagcacacaacatctttggctttgagaccattcctgaagagtgcgttgaagcaacaaaggaatacatccatggcgaacaatatagatcagactccaaaacagttaaccaacaagcttacttttatgccagagacctcgaagtccatcccaaggacacatttgtgttcagtatagatggcaccgtactctctaatattccatactacaaaaaacatggatatggggtggagaaatttaactcgaccttgtatgatgaatgggttaacaaggg

SEQ ID NO: 18681 - DNA, 438 bp, Glycine max
  Clone ID: LIB3106-090-Q1-K1-H5
cccacgcgtccgcccacgcgtccgcccactcgttcgcccacgcgtccggtttttcttcctggtctacccctttgatctcatgcaatctcccctcatggatccctttgatttgattcgcaaagggtttggctgaagctatctggaatatttgcgttacatttttggaggtccatctatgttttagtcattttgtccatattcttgtcaataatgagcttatccaagaaaggttcccaaacagacacaaaactgagctccttaaacaaagcaacctatttgaatccaaacgcagcagagtttgttccatttgccctcagatcatcgccatctggaagcaccagctcggtagatgcagcagcgaggtttactactgctggatctcttgggaaagcagctttagatcgatcagaatcatgcatttcaaataattccgatgat

SEQ ID NO: 18682 - DNA, 414 bp, Glycine max
  Clone ID: LIB3106-090-Q1-K1-H6
cgcgattccattttcactcggtcctgttgtgtgtgcgcagaataaaatttctcatcgacgggggcgaataccttacaacgcgcccttcgcgccaccatggcccggccgttctccaccggctcattggccgaaattaagcgaggcgagatcggaatggtttctggaattcctgaagaacaccttcgtaggagggttctaatttactctcctgctagaactgcatctcaacaaggatctggaaaggttggaagatggaagatcaacttcttatcaacccaaaagtgggaaaatccactgatgggctggacatccactgtggacccctactctcatgttggtgattctgccttgactattgatagcgaacaagcatcataagcatttgcagagaaacatggttgggagtattcggtc

SEQ ID NO: 18683 - DNA, 410 bp, Glycine max
  Clone ID: LIB3106-090-Q1-K1-H7
cccactcgtccgaacaaatcaaagccatggccacctccaacttctctattgatctctccgggtacctatccttctttttggtgctacttaccaaggcacactcgaccgataccgcttctttcaccttcaacaagttcaacccagtccaaccaaacattatgctccaaaaagatgctagtatctcatcctatggggcgttacaactcaccaaagttggcagcaacggcgtgcccatcctgggatctctcagtcgtgccctttacgctgtcccaatccagatttgggacagcgaaaacagctagggactcagctaggctacaatacttaaattcaacattctcgcacccaacaaatcaaactcagctgacaggcttgccttcttcttggcaaccgtcgggtcttatccccaa

SEQ ID NO: 18684 - DNA, 382 bp, Glycine max
  Clone ID: LIB3106-090-Q1-K1-H8
tccacgcgtccgaaaaaatctcaaaataaatcaaccaaaccacacacttcacaccctcttgaacatcctcagcaagtacaagaacaagaagaaacaatgtcttgctccaatctcacaatgttggtgtcctcaaaaccttccctttccgatccctccaatctctccttccgctctgtcctcaacccttttcagctcccttcacaaaacccaacttcatgcactccttcacgctcctcaaccacccaaattcagtgtggtctgagagaactcagaacccgcattgattccgtgaagaacactcagaaaatcaccgaggctatgaagcttgtggcttgagccaaagtgagaagagctcaagaagcctgtgtcaacggaagaccct

SEQ ID NO: 18685 - DNA, 407 bp, Glycine max
  Clone ID: LIB3106-090-Q1-K1-H9
cccactcgtccgctctctctagacttagattttgtgaatggctgaagtggaagagggacaggtcatcggcgtccacaccgttgatgagtggaagctgcatctccagaatgcaaaagactccaaaaaactgattgtggtggattttactgcttcctggtgtggtccatgccgttttatggccccagttcttgcagagattgcaaagaaaactcctgaattgatcttcctcaaagtggatgtggatgaagtgaggcctgttgctgaggaatattccattgaggccatgccaaccttcctcttcttgaaagatggcgagatcgtggacaaggtggttggtgctagtaaggatgaccttcaagccaccatatccaagcatgcatctgctgttgctgctgcttcttcttctt

SEQ ID NO: 18686 - DNA, 427 bp, Glycine max
  Clone ID: LIB3106-090-Q1-K1-F12
ggcactgcatgtgcagcaatcacctctgcccacttcatattattttgcacttgtcaacctgtctttgaaccactcatatcatcacacagccctctcacccttttacatatatatacacatgtatacatatatgtatgtaccttccaatctaccaagtgttttattgtcttaaagaattcaacacctgcaggcaattgataccctcatgccagccacaatgagcagcagtcctgcaccttgcagccgatcctggtcaattagtgaggactccctaagaaggtatgtgcagtttgcgagtgaaagctgcatacaagagttattggcagcttcggtcacaaacaaaggaaatggcaacgatggatggaaggtgctaactctggaaaatggagtggagatatcaaaacgaaggtcagactcactccacacg

SEQ ID NO: 18687 - DNA, 263 bp, Glycine max
  Clone ID: LIB3106-090-Q1-K1-F2
aacattgcaatgccattcctaccatatggtcccttttcgaatgaaaacttgctatggtacccctacctccgacgtgaaatgcgcaagttggaagcttgctgtggaaacacacaacatctttgtctttgagaccatacctgaagagtgcgttgaatcaacacaggaatacatccatggcgaacaatatagatcagactccaaaacaatttaacaacaaacttacttttattccataaacctttaaaaccatacaaaggacacat

SEQ ID NO: 18688 - DNA, 208 bp, Glycine max
  Clone ID: LIB3106-090-Q1-K1-F3
ccaccaccaaattatcctcatccaaacaaggcacaatttccatgtccctaaccccacccccgtacgacctccagtccttcaaattccccatccgccagctcccttccccgatctcaaacccctccccgccgcccaagttccggaaggtcctccgggactctggcgacagcggcgaggtggtgcaggacccgtggccttacggccctcc

SEQ ID NO: 18689 - DNA, 437 bp, Glycine max
  Clone ID: LIB3106-090-Q1-K1-F4
caccaccaagccaacagaagatgtttctccacattgttttcctcctttcccttctctcatcgacttcccatgccactgtccaagacttctgtgtggcagaccttaagggtgcagacaccccttcaggctacccctgcaagccacctgcaaatgtaacttcagatgactttgtgtacacaggcttagctgaagctgcaaatgtcacaaacataatcaatgctgctgtgaccccagcttttgttgctcaattcccaggtctcaatggccttgacctctctgcagcaagattagaccttggtcctggtggtgttatcccactccacactcaccctggtgccaatgaactactcattgttctccaaagtcacatccttgctggattcatatcttcaggtaacatagtttatcagaaggtgctaaaaaagggagagctcatg

SEQ ID NO: 18690 - DNA, 450 bp, Glycine max
  Clone ID: LIB3106-090-Q1-K1-F5
tcgcttttgggtatctctcagatggtctcttagctcgagcccaagagaggaagaaaggagtgccatggacagaagaggaacacagaatattccttgttggacttgagaagctgggaaagggtgactggaggggaatctctagaaactttgtgactacaagaaccccaacacaagtggcaagccatgctcaaaagtactttcttcgattggcaactatagacaagaaaaagcgacgttcaagtctctttgacttggtatgcatacataacaatgaattaatttactatatattgcttttattaattagctacctgataatttcacactgaatgaatgataaatgtttctctttaaactgaaaagtaattcacttttcttttttacttttcctttgtcgttgaattattgtggcaagttggtagcaacaaagcaggttctaattcattttcg

SEQ ID NO: 18691 - DNA, 295 bp, Glycine max
  Clone ID: LIB3106-090-Q1-K1-F6
gagataactagaaacagtgtgatgaaaatgaaggtccttgttttcttcgttgctacaattttggtagcatggcaatgccatgcgtacgatatgttccctctccgaatgaacactggctatggtgcccgtactccggaggtgaaatgcgcaagttggaagcttgctgtggaagcacacaacatctttggctttgagaccattcctgaagagtgcgttgaagcaacaaaggaatacattcatggcgaacaatatagatcaagactccaaaacagttaaccaacaagcttacttttat

SEQ ID NO: 18692 - DNA, 363 bp, Glycine max
  Clone ID: LIB3106-090-Q1-K1-F7
ctcgcaatccgcactaaaattctagggttcctaaatggacgctgacggaaagatcaagaagggctccggcggaagaaagggcggcggcccaaagaagaagccggtttcaaggtccgtcaaagccggtctccaattccccgtcggaagaattggccgttatttgaagaaaggaaggtacgctcagcgtgtcggtaccggtgctcccgtatacttggctgcagttctcgaatacctagctgccgaggtgcttgagttggctgggaatgcagcacgtgacaacaagaagaacaggattattccaagacacgtgcttttggcagtgaggaacgatgaggagttgtggaaattgctttgctgagtgac

SEQ ID NO: 18693 - DNA, 448 bp, Glycine max
  unsure at all n locations
  Clone ID: LIB3106-090-Q1-K1-F8
catctgttggatttgaaaccaatgggttatttatagaaagaaagatttccttacctattcttgacctcgaccacaagaactcgaaacttccaattttatgcacaaattcatcaaaaatgctagggatcactttagatgaggctgtttttaactccgcaacagccttatattatgatgcaaaatttatgcactggattgttgaccaaataccagatcaatctctactgaacactgcaggatggagatttattgttccccagctgtacaagaaatacccaaatcatgacatgaacttgaatgtatccttatcgtctcctccagttgtggagatttcaaatcagaaagctggtgccaccatatttgcagacatggcaatcgatgttttggaagaagatgaagtaataccagtggcatgcatatcnatggtaattcaaggtacaggtctggt

SEQ ID NO: 18694 - DNA, 464 bp, Glycine max
  Clone ID: LIB3106-090-Q1-K1-F9
aaactccttcctcatttctcatttctcattcaacaccatggcaagaaaaaccaagtccatgttcttggccttcttactactatgctctttctcactgggggtagtggtagtagcccaagaggaggcaatagcaaaatccgaaagtgaagcattaggggaaccagagaaaagagaaacacttgaaatcatcattggtggaggtggttcacctgctccttctccctctccccctacatattgcccaccttctccaccaaaaccactgagccggttggagaaagcaaaacgtgttcttctcaaattcaaaaccacaatcgacgaccccaattgttacacgcaaaactggagccaggacacagacgcgtgtaaattcaatggggtacgatgcgccaatttcccagacgatcagcagcgagcagtagctggacttgacctaaacggagcaaaactcgccactaaaaacg

SEQ ID NO: 18695 - DNA, 329 bp, Glycine max
  unsure at all n locations
  Clone ID: LIB3106-090-Q1-K1-G1
tgtcacactttgcgttattcgcgtgatctcctattcgccgacaatggccacccatatgagcaggaagagaaagttcgtagctgatggagtgttcttcgctgaactgaacgaggttctgacaagggagttagccgaggacggatactccggcgtggaagttagggttacgccgatgcgcaccgaaatcatcatcagagccaccagaacccaagccgttctcggtgagaagggaaggagaatcagggaacttacctcggtggttcagaagaggttcaaagtttccgagaacagtngtgaactttatgctgaaaaggtcaacaataggggtc

SEQ ID NO: 18696 - DNA, 453 bp, Glycine max
  Clone ID: LIB3106-090-Q1-K1-G10
cttcttcttcttcttcttcttcactctacaaccactaaactaagtggttggttttggtttagtttcatttttttgaagctcttaaacttaaggcttaagccatggcatcctcatcctctctgcatctatctcaggcccttctggcacgtgctgtgtaccttcatggctcttcttcttctgaccgtgtctcactctccttcccatcattctctggcctcaagtcacattctacatgcaaagcagcagcagccacgtcctcgcgtagaaggggtgcttgtccatccaccaacgttgttcgagccgctgcggttgagacactcgaccaaaccaccgaggtttctctggtggagaaatccgtcaacaccattcggtttttggccattgatgcagttgagaaggccaactctggtcaccctggtcctcccatggggtgtgctccaatgggtcacattc

SEQ ID NO: 18697 - DNA, 452 bp, Glycine max
  unsure at all n locations
  Clone ID: LIB3106-090-Q1-K1-G11
tttctctctctctctcttcaatttcacccttttagcatttgtacattcctttcccttccttgaatcgttcttaattgcgagaggggatatcggagaagttgattggcctcccattaattgcaggtctgaatgatctgatggagtctaaagttgggaagaagaagtcgtctagtagtaagtcccttttgtacgaagctcctctcgattacaccattgaagacgttcgaccacacggtggaattaagaagttcacatctgctgcttactccaactgcatccgcaagccatcctgagattccctaggttgtgtgacgacatagcccccgtagtcttgcatctgctatattattctagtctcttcttttcccttttcttgttctcttccttgcccttttgntctctctacctatacagcaagactttgtttctttttgagtcaagatggctggctc

SEQ ID NO: 18698 - DNA, 400 bp, Glycine max
  Clone ID: LIB3106-090-Q1-K1-G12
cccacgcgtccgcccacgcgtccgcccacgcgtccgcggagccctctcttcaggtcaccatctagactgcaatcatggctgatggaccacagcatccatcagttgttcagaagctagctggacagtcttacctggtgtccaggcttagccccaactttaactctaggaattattctgcaactggttcttacgtcaatggcggaatgcactcgcctgggttggctttgtgtcacctgtatctccagttactgtgcatgctccagcagagaaaggagtgagtggacttctagtggactttctgatgggtggagtatccgctgctgcatcgaagacagctgctgctccaattgaacgagtcaaatcgcttatccaaaatcaggatgaaatgatgaaaagtggt

SEQ ID NO: 18699 - DNA, 446 bp, Glycine max
  unsure at all n locations
  Clone ID: LIB3106-090-Q1-K1-G2
cccacgcgtccgcccacgcgttcgcgcttagagcgtctccaacaaatccctaatcgcaacaatgccggaatcacccggtggtggagacgccggcgctccaccgcaggcgacggagaatgagaatccccaaactgaacgaaccgccgcgggtcctccagtcctctcgaagaacgcgcggaagaagctggcgaagcagcagagattcgaggcgaagaaggcggaaaagaaagccgcggcaaaggagcagaagcgaaaagaagtagagagaaagcggaaggagtgggaagagagccttgccggcgtctccaaagaagagaaagcgaagctgatagagtctcgaaggaacctccgcaaggagagaatggagaagaggtcgctggagaaagagagcanaagagagagactcactgtagcgagaagacgaggccaaaacgtcgtcgtcgatc

SEQ ID NO: 18700 - DNA, 410 bp, Glycine max
  unsure at all n locations
  Clone ID: LIB3106-090-Q1-K1-F11
aaaaaacgaaaaggggaaaatcggaaacgaagtctcgcaaaacgcagcctacaacgcaagttcgcaaccctaacgcgaagctcctcgtcgctcccaaggcctccgccgtctccgtcgcgccagagtccagacatagcgtcgtgaacagttcaatgttctatctcagtaaaatcgaacacaaattgcccctgcctccttctcgttttgttcttcctattcgagaagctatacacatggagcttgagaaacttttcttagataaggttatagcaaacttgggcctctgcatttctgtctatgatatcagatccattgatggtgggtttatcttccctggtgatggngctccaacctatacggttgtgttcaacttgattatggttcgtccgtttgagatggagatcattact

SEQ ID NO: 18701 - DNA, 412 bp, Glycine max
  Clone ID: LIB3106-090-Q1-K1-G3
attggtttctctctctagcttggacgagtgaattagattcatcatcaagatgtcgtctctgatagcagaagatgtgaagagcagatcagaggtgtaccacggggacgaaatgtgccaagtgaagtccaaggagcttctcaaggaaatcgccctccccaacggccttcttcccctcaaggacatggaggagtgcggctacgacagacaaaccggcttcgtctggctcaaacaaaagaagagttacacccacaagttcgacaagatcggaaagcttgtctcctacgcgcccgaggtaactgctcatgtccaacaaggtaaaattaccaaactcaccggggttaagaccaaggagctcttgctctggatcacgctcagtgatatctatgttgatgacccttccactggcaaaatc

SEQ ID NO: 18702 - DNA, 427 bp, Glycine max
  Clone ID: LIB3106-090-Q1-K1-G4
acacaacccaaccatccctgtctctcccttcttttgccctctgtcctaaccagcctccccagatctggtacctgcatttccagtgcatcacaccttatcttcaaggcatcacaagttgtagatacaattaatactcaatatggagctgagtgctataaaagacgcttttgaccgtgttactaagaagcaaaagttatcttgttccaagactcaagaagcaattgatctgatcagacaggaaattgagagtgttttagacacgctgcagtcagtgaataacactgaccatgaacttgattataaaactgtcctgaatgagcttaaggccagtttacttaaaattgctccacttagtcaaatggaaggttcacagaaggagctaaatttagcactcaccaagtatgggaagcttcatgagaaacatttt

SEQ ID NO: 18703 - DNA, 458 bp, Glycine max
  Clone ID: LIB3106-090-Q1-K1-D9
cccacgcgtccgcccacgcgtccggttcactcctctctcctcccctcctgcaaggacccaggcgatctctctctctctctctctctctctgtttcatatcatgaaacgctcaaacgacgacgtcgctgcccccgtccccgcctcaacctccaagccagtgttcctaaccaaagcccaacgcgagcaattggctctccagcgccgccaggaagaagtcgccgaccagaagcgccgccaggagcagctcctctcccgcaaccactcctccgatcccaaaccctcctccgaccgcgacagagacagagaaagagaccgagaccaccaccgagaccgggaccgcgatcgtgacagagacagagaacgcgagcgcgcgaacgcgcccggttggagaaactcgcggagcgtgagcgcgagaaggagcttgagtccatcaaggagcagtacctgtgctcgaaaaa

SEQ ID NO: 18704 - DNA, 373 bp, Glycine max
  Clone ID: LIB3106-090-Q1-K1-E1
atcccacgcgaggagaaagatggaggggaaggagcaggatgtgtcgttgggagcgaacaagttccccgagagacagccaattgggacggctgcgcatagccaagacgacggctaggactaccaggagccgacgcctgcgccgctggttgacccgacggagtttacgtcatggtcgttttacagagcacggatagcagagtttgtggccacttttctgattctctacatcactgtcttaaccgttatgggagtcgccggggctaagtctaagtgtagtaccgttgggattcaaggaatcgcttgagccttcagtggcatgatcttcgccctcgtttactgcaccgctggcatctcaagaggacacataaacccg

SEQ ID NO: 18705 - DNA, 376 bp, Glycine max
  Clone ID: LIB3106-090-Q1-K1-E10
ctggtttctttcgtcatgctctcagtattctcttgctctttaacttgatcttggtcttcttcggactagtatttattgcttacgatttggaatagtgacaagtaaagacaaatcacaactcagggtcatccaattccaagaatagagttagagaagattgattcaccaaaaaaaatggttagaggagaatgatgacaaagagagttgacggagatgaacaaatcaagtggcccagtgcctagagaaaaaataaatttaccaacttggctttgaccaatttgcacgctcatttgactcttacgaattttcattttaaaaacttgatgttgtgactttgtaatgtcattcatattaggaaaatcatcctcttgcatac

SEQ ID NO: 18706 - DNA, 428 bp, Glycine max
  Clone ID: LIB3106-090-Q1-K1-E11
gagaaaaagagagaggtagagaaaagcgaatagtctctctcttcctatctctctctttcaatgtcagggcacaaatcttccacctctacttcttcttcttcttccttctaacctatatcagaaggaaacgcgaaaaaagaaaaaaaaaaaagaggcagaaggttctagaagccgccaatttttatttcttttaattcgtctgagtcagagacgttcgtgattgtaaccatggattcttcgtgtgtcccaaacggcgacgtttctgggttcaaagataaggagtcaatggttgaccctttcttggtcgaggctcttgagaaccctcggcaccgtgtcaccattttgcggatggagctggatatccagaggttcctgagtaatgcagattatcagcattttgagtttcaacatttcccttcttcctatct

SEQ ID NO: 18707 - DNA, 402 bp, Glycine max
  Clone ID: LIB3106-090-Q1-K1-E12
cccacgcgtccgtttagagagagaaaggatgaagatcacggcattgttggtgcttaaatgcacaggtgagggttccgatcccgttattctggcgaacgcttccgacgtcagccacttcggttacttccagcgttccagcgtcaaggagttcatcgtcttcgtcggtcgcaccgtcgcccgtcgcacccctcagggccaacgccaatccgtacaacacgaagagtacaaggtgcacacatacaacagaaatggtctttgcgcgttgggatttatggatgatcattacccgattcggagtgcgttttctcttctcaaccaggtaatagatgaatatcaaaaaaactttggcgagtcatggagaaatgctcaggaagacagttctcaaccatggccctatttgaa

SEQ ID NO: 18708 - DNA, 439 bp, Glycine max
  Clone ID: LIB3106-090-Q1-K1-E2
gtcaaaacacttcaactttaggctccatctcaaaaaaatgggtggtttagctagcaatcttgctctaattgttatggtgggtctgcaaattcattatgcagcacttgctatattcacaagagccgctttgttagatggattgagtacgacggtctttgtagtgtacaggcaaggcatagccactttggctttggcgcctatgtttttctctcctaagcggagacaatcagtgaaagattctttgggattcaggagcttctttttgatgtttgtgaccgctcttgttggagtcacagcaaatcagaatgcatactttaaaggtttattttatgcatcctctactgcagctaccgctatgagtaatctgataccagcattaacgtttgtaattgcggcaattgcgggatttgagaaagttgacataagcttaagaagcacg

SEQ ID NO: 18709 - DNA, 434 bp, Glycine max
  Clone ID: LIB3106-090-Q1-K1-E3
gtcgaagcgaggtcgcggaggatcggcgggaaacaagttccgcatgtcgctgggtctgccggtggcggcgacggtgaactgcgccgacaacaccggcgcgaagaacctctacatcatatcagtgaaggggatcaagggtaggctgaaccggttgccgtcagcttgcgtcggagacatggttatggccaccgtcaagaagggaaagcccgatctccgtaagaaggtgctgcccgccgtcatcgtccgccagcgcaagccttggcgccgaaaggacggtgtttacatgtacttcgaagataatgctggtgttatcgtgaatcccaagggtgaaatgaaaggttctgctatcactggtccaattgggaaggagtgtgctgatctgtggcccatgattgcaagtgctgccaatgctatgggttaagctaggattttag

SEQ ID NO: 18710 - DNA, 457 bp, Glycine max
  unsure at all n locations
  Clone ID: LIB3106-090-Q1-K1-E4
ggacactgttctatctactaaatgattcttgcccttgcttcttaccgcaagcataagttatgcttgtgttttccttggcctttttctaatttaagagttatttatggacttttaaaaaagaagtagatccgtgtggtccttgacacttttggccttcttggggggagtagccaaaaaaaggtgccacccgatgctattgaactaacaggccttattctacatccaaaattgatacatttttgtacctactcatccttttcttcctcatcatcattttccacatacctcagccaatcatgaggttttttttttagtttttctcttctcacaggctttcttgatgaagttccctactctgggaggatttttcttacaagaatttacatatccccttgcccatttggcatctnctagctctaggtaagggtagaagactagaaccctacatctgatctga

SEQ ID NO: 18711 - DNA, 450 bp, Glycine max
  Clone ID: LIB3106-090-Q1-K1-E5
ctggccgatttgatagacaggtgacagttgttgttccagatataaggggaaggactgaaagcctaaaggttcatgctagcatcaaaaagtttgatgctgatgtttctcttgaagtgattgcaatgagaacacctggctttagtggagctgatcttgcgaatctgttgaatgaagctgctatattagctggtcgccgtggaaagacagctatttcatctaaagaaattgatgattctattgataggattgtggctggaatggaaggaacagtgatgacagatgggaagagcaaaagtttagtggcatatcatgaagttggtcatgctatttgtggaactttgactcctggtcatgatgctgtgcataaggtaacactagttcctcgcggtcaagctcgtggacttacatggttcattcctaacgatgacccaactctgatctccaaacaac

SEQ ID NO: 18712 - DNA, 434 bp, Glycine max
  Clone ID: LIB3106-090-Q1-K1-E6
cccacgcgtccgcccacgcgtccggccctgttgaccatgagaattacaagcatgcatctagcggtttcactgtccaccagaatagtggtggagctgtggggattgaaatcagtggattcagtgaggaagaggttccactttcaaaattgcttgaactggtgtttgaagagggacttgaagttgttaattgtctttcaaccaaagtcaatggcagattactccacagtttgcagtgtgaggttgacaattccggcagtgtagatctatctgagctgagaaggaaattttccgatgtcattccatcacttcgttgttctgcgtaactttgtggactggaaattaacacataacacatatatctgccctttctaactggttcgtaatttggttgtgtgagtttgcttgcactgtatatatttggaacccctttgact

SEQ ID NO: 18713 - DNA, 452 bp, Glycine max
  Clone ID: LIB3106-090-Q1-K1-E7
cccacgcgtccgccttctccaacatgccaaacgacagcgttctgagtcttttcttgttcgtgaccctcttcacatgccttctctctgctacttcccacgatgaccatattttcctaccgagtcaactccatgacgatgactcagtgagttgcactgcaaccgacccaagccttaactacaagccggtgatcggaatcctgacccaccccggcgacggtgcctctggccggctcagcaacgccaccggggtttcttacatcgccgcctcctacgttaaattcgtggagtccggtggtgctagagttattccccttatctacaatgagtcacctgagaaccttaacaagaagctcgatttggtcaatggagtgctcttcactggtgggtgggctgtttctggtccatatttggatactcttggaaacatttttaagaaagctttagagaaaaat

SEQ ID NO: 18714 - DNA, 447 bp, Glycine max
  Clone ID: LIB3106-090-Q1-K1-E8
tgctgatgagtcacattttctgataaatgctcaggcaaagaggacaactgcttctcttccagtcataaagaaagctcaatatgcattattgcttagtggaacacctgctttatcacgaccaattgaactattcaagcagctggaagctttgtatcctgatgtatataggaacgttcatgaatatggtaaccggtactgcaagggtggattttttggagtttatcaaggtgcaagtaaccatgaagagttgcacaacttgatcaaggcaacagtgatgattcgcaggcttaaaaaggacgttctttctcaacttcctgtaaagcgcatgcaacaagtcttcctagacttggctggcaaggacatgaagcaaattaatgctttatttcgagagttggagatggttaaagccaaaattaaggcagctaaatcacatgaggaggctgaatc

SEQ ID NO: 18715 - DNA, 452 bp, Glycine max
  Clone ID: LIB3106-090-Q1-K1-E9
ccctcattgaccttacaattatagtaatcctgtcaaggcacgcatctgatgagttctaccttggggagagagatggtggtgacttctggacttctgatgctggtccactagaggccttcaagaggtttggaaagaagcttcaagagattgaacataagcttatacagaagaacaaggatgagacgttgagaaaccgcactgggccagctaaaatgccttacactctgctctatccttctagtgaggagggattgactttcagaggaattcccaacagtatctctatctaagggctctctcattgaggttgctgtactactctgcctgtttttcaataatgtgaaataggaggaatatgattccttcatctacctacgtatggtcaagttacatttggcgtggttgaatgttctcgtgtttgctgtattctgttttaatacagatcgaagaga

SEQ ID NO: 18716 - DNA, 191 bp, Glycine max
  Clone ID: LIB3106-090-Q1-K1-F1
cccacgcgtccgactagaaacagtgtgatgaaaacgaaggtccttgttttcttcgttgctacaattttggtagcatggcaatgccatgcgtacgatatgttccctctccgaatgaacactggctatggtgcccgtacttcggaggtgaaatgcgcaggttggaggcttgctgtggaagcacacatcatctt

SEQ ID NO: 18717 - DNA, 455 bp, Glycine max
  Clone ID: LIB3106-090-Q1-K1-F10
cccacgcgtccgagaacactaccctgaacatagtagagaagccagtgctaggatgggttcgtgaagcaatggctcaaaccatgttgctcacgtctagtgtctctagcaggtattccgtggatttgaagaaagaccttttcctccaattgcagagtcaaagtttaaggcctaagttctctcagctctcattcaacccacttccatcatcaacttcttccttttcttcaccccgtacattcacaactctggccctcttcaaatctaagaccaaagccgctcctgctaagactaaggttacaaagccaaagcaaaaggttgaagatggtatctttggcacttctggaggatttggttttactaagcagaacgagctctttgtgggtcgtgttgctatgcttggttttgcagcatcactgttgggtgaaggaataactgggaaaggaattctagcacaa

SEQ ID NO: 18718 - DNA, 446 bp, Glycine max
  unsure at all n locations
  Clone ID: LIB3106-090-Q1-K1-D8
ggtttggtagggtgatttcacctgatatagcaaagaatttacttggggcagactttgctgcagaattatcaaagactactctcagtgagcatgataatgaaatgtcaaggaggctggtgaaggtacttgagaagttgagaaatacagatcgtgcatattaccagttgtgccaccttgtgaggcaaggtgaacagcccaaagagggattcctccttcttgcaaaccttgttgaggaccagatgggtggtaacagtgggtatgctgaatggatgctgcagatatctcgacaagtgcagcaatcataatatatagcttccctggctaaataagcaagtcagatctgctatttgtctcacaagtgacgaccatttctttctgcattggaggtatattaaatctgtcctttggngtgcttggagaagcattnctgacctggctaattgatc

SEQ ID NO: 18719 - DNA, 453 bp, Glycine max
  Clone ID: LIB3106-090-Q1-K1-C2
gatggtgttgccgggctctaccgtggtttcaacatctcatgtgttggaatcatcgtgtatcgtggtctgtactttggattgtatgattctgttaaaccagttgtcctcacagggtcattgcaggatagcttttttgccagctttgcccttggatggctcatcaccaatggtgcaggtcttgcatcatacccaatagacactgttagaagaagaatgatgatgacctctggtgaagctgtcaagtacaagagctccttggatgcattcacacagatcctcaagaatgagggtgccaagtccttgttcaagggtgccggtgccaacatcctccgtgccgttgccggtgctggtgtgcttgctggttatgacaagttgcaggttcttgtgttcggcaagaagtacggctctggtggggcttaagttctaatgctgagtcagtactaatattggttt

SEQ ID NO: 18720 - DNA, 440 bp, Glycine max
  unsure at all n locations
  Clone ID: LIB3106-090-Q1-K1-C3
ttcagggttaagcggtgagatttgcgaatctgagaaatggcggattcttctcgggaggagaacgtttacatggcgaaattggcggagcaggccgagcgttacgaggagatggttgagttcatggagaaggttgcaaagactgtggaggttgaggagttgacggtggaggagaggaatctcctctctgtggcttacaagaacgtgattggtgcgaggagggcttcgtggaggatcatatcctccattgagcagaaggaggagagcaggggcaatgaggaccacgtggccattataaaggagtacaggggcaaaattgaggctgaactcagcaagatctgtgatgggattttgaaccttcttgagtncaacctcattccttccgctgcatctnccgagagcaaagtcttttaccttaaaatgaanggtgattaccacaggtt

SEQ ID NO: 18721 - DNA, 416 bp, Glycine max
  Clone ID: LIB3106-090-Q1-K1-C4
cccacgcgtccgtgaatatattggcttcttcgttctctggttatgcaaaaccctttgtaagagtaaacccttctcttcttacgctcagggcatcttctctgcgccatgactaccctcttgcaagcaaaattgttgtcaaaaatttaccatattctaccggtgagactactttgcagaaggaattttcaaattttggcaagatagctgaagttaaaatggttaaagatatgaacacaaaaagatctaagggtattgctttcattcaatatacatgtcaagatgatgccatgcttgcactagaaaccatggatcagaaggatttttatggtcgaacaatcggcgtggaaattgcaagactgggttgggatgattttggtgcatccccaagggcctcatgacccccaaaagagtgggat

SEQ ID NO: 18722 - DNA, 444 bp, Glycine max
  Clone ID: LIB3106-090-Q1-K1-C5
gctctcttctctgcaaatgcttcattccaagatggttaggactctgtaggctgataaagacaacactcataccgttggaaagaaggatgctgctggccatgttgcttaatttagttcttgcttcctttgtcttcttgagttttatcagagacgggagtgcagggatcactagctctttcattcggtcagagtggccggcagttgacatcccccttgatcatgaagcatttgcagttccaaagggttataatgcacctcaacaagtgcacatcacgcaaggtgactatgatggaaaagcagtaatcatctcatgggtgaccacagaagagccagggcacagccatatacagtatggcacatcagagaataaatttcaaactagtgaagaaggcacagttacaaactatactttccacaaatacaagtctggctacattcatcact

SEQ ID NO: 18723 - DNA, 398 bp, Glycine max
  Clone ID: LIB3106-090-Q1-K1-C6
cccacgcgttcgcccacgcgtccggtgggtgtagtgtagtagttggcattactgtgagctcgcgcaggcagcagcagcactcatagagcttgcgagcgagtggtcacttggccacagttatcgccgtttccccgccgagatctctcaatctccgacgactcagatacctctattaatttttgttcctccggttaggttaggctataatacgtagtttttccttatttatggcttcggagaatgtgaagaccggggattcggccgtgacgacgatcgtcaatctcgccgaggaggccaagctcgccagggaaggcgtcgtcaaggctcccagctacgccctcgccagcatctgcaagtcgctcgtcgccggtggcgtcgccggaggagtgtcacgtact

SEQ ID NO: 18724 - DNA, 128 bp, Glycine max
  Clone ID: LIB3106-090-Q1-K1-C7
gtcaactataatctaggttatcgctaggagtatatgaagacaggtgcctgcctcattgctgcagaagttcaccatacatggtcatgacatagcgaatgctaccataggcaccctcttgacataaatac

SEQ ID NO: 18725 - DNA, 411 bp, Glycine max
  Clone ID: LIB3106-090-Q1-K1-C8
ctcactcgttctactgaagtatctactatactatcaagggagcgaatgaaggagagtaagaagagagctaagaagattcgtgcagttgctaagactgctgcttacgatgctgccaaggctggagaaatgaaacgtgctgtcaaacatcctgtgttgatttgatggtgctattgctatagggacattctaatggtcattatacttcctattagctatctagaacgagatatgttgctgtaagtgatacattaattgatgatcactagagatataactcgagatctatcactggcacgatcaatgttgagaagctagttgaatgctatgtactaaaatgtttactattgtgattaaacaattaaataaacaattaaaaaaaaaaaaaaaaagtaaaataatgaaaattgaatt

SEQ ID NO: 18726 - DNA, 407 bp, Glycine max
  Clone ID: LIB3106-090-Q1-K1-C9
gtttttacaggcctggttcgggagactataggatacggctttttatccgaactgaactcttggggaagggaattccacccactcatcaatggcatctactctcttcgcttgcccgtcgttgtgttcctcctcttcttctatattttctacttccgtcaaattctccttaaacccgaataaaatttctcttccgttcgccggaaacaaaaaacctctttcggctccaattcgaaggcggttcaatgtcattgctatggctccccctaaacccggtgggaaggccaagaaagtggttggaattataaagctggctcttgaagctgggaaggctacacctgctcctcccgttggccctgctcttggttccagggtgtcaatattatggctttctgtaaggattacaacgc

SEQ ID NO: 18727 - DNA, 355 bp, Glycine max
  Clone ID: LIB3106-090-Q1-K1-D1
cccacgcgtccgggaagatggggttgtcaacagcaaggacaagcataggatcagtttgtggttgtgccatctcaaagcctctccgccgtcactgccatttcctcccaacctctgtttctcctgtcttctcatgtcttcagaaaaagtgcaaattgaattttcaaaaaccagttcaagatgctgcagactcaaaaatatcatgtagcttagtgaatgtggaagatgggatagatgatgaagcatgtgaattagtcagtggagtggagctttcacttgaggagggtgatgaaaatatccgtgcttatctgttcaaggcagtaaaaaataacaatggaactggcctattgcttctttc

SEQ ID NO: 18728 - DNA, 405 bp, Glycine max
  Clone ID: LIB3106-090-Q1-K1-D10
atggtgccttgggaattagaatggctctccttggatcaaacataacaagcgaggttggactccgtttgctcctttgtcctcttggttccaacgttgtaattagaacagcatgctgtactgtgggagttgctttgcctgtgtactctacgttcaaggcaatagaaagtaaagatcaagatgctcagcataagtgtcttctctactgggcagcctatggttcattcagtctcgctgaagtgttcacggacaagcttatttcttggtgtcctatctactatcacctgaagtttgcatttcttgtttggcttcaacttccatctaccagtggtgcaaaacaaatatatgcaaaccacttgcgccccttcttgttgaggcatcaagcacgaagtgatcaagtcctgggtt

SEQ ID NO: 18729 - DNA, 371 bp, Glycine max
  Clone ID: LIB3106-090-Q1-K1-D12
cccactcgtccgtgataaaattgttgcaatatccccaccatggcaaccaacttgtgaagagagaggctcaacaaattattgttgcagactctgctatttagtttctgttttagttaattattgtaatcttgataaaatctcatagttgttgagatttttagcaaatttcaagttgtttgtaaattgattctcatttatggaatatattgccttttgttttcaattctatggcccaatttttatcttaaaaaaaaaaaaaaaaaaaaacaaaaaaaaaaaaaaaaaaaaaaaaaaaaaaaaaaaaaaaaaaaaaaaaaaaattaaacaaatacaaaaacaaaaaccatctaaaaaaatatcacccttatatt

SEQ ID NO: 18730 - DNA, 390 bp, Glycine max
  unsure at all n locations
  Clone ID: LIB3106-090-Q1-K1-D2
caacagttgaccttgcgagacacagacacggcaccttcaattcttcattcctcaaatcgcgggtcacaaagcgtctcaaattcacattaaattttcccaaaactcaaactcaaactcaaactcaagtaattctaattttccctccccgaaaacgatgtcgttcgaggtggaggaggaggaggcgttcgagcacacgctcctggtggtgcgcgaggtgtcggtgtacaagatcccgccgcgaagcaccttcggcggctacaagtgcggcgagtggctccagtccgacaagatctggtcggggcggatccgcgtcgtgtcccggcgcgaccgctgcgagattcgcctcgaggatccgagctccggtgagctcttcgccgnctgcttcgtcta

SEQ ID NO: 18731 - DNA, 418 bp, Glycine max
  Clone ID: LIB3106-090-Q1-K1-D3
cacgatcaccaccgcaaagcaatgggcgctatactttctgccttaactggcggtgccgcaacggcggcgacgtcttcgccggagagttctgcttctagggtccagtctttccactcttcggcgcgctggcagctccacttcaacgagctcaaaaaataccaataagctcgttgtgatagatttctcggcgtcgtggtgcggcccttgcaaattcatagagccagcgattcacgccatgtccgaaaagttcaccgacgttgacttcgtcaagatcgacgtcgacgaattgccggatgtggcgaaagaagttaattgggaggccatgcccaccgtcggtgtgtgtaagaaagggaaggaagtcgacaaggttgtgggcgcaaaagatgacgagctcgaaagaagattgagaacatcgatc

SEQ ID NO: 18732 - DNA, 314 bp, Glycine max
  Clone ID: LIB3106-090-Q1-K1-D4
agaccaccctggtgcagtacccataacctcctccccagggggaggatttaaggctttttgcggctggggttccaataatcctggtgggaccaaagttggaccttcaggaagataagcaatttttatatagaccaccctgttgcattaccaatacttccacacacggggaagaatttagaaaactcgattggggctcctgcgtacatagagtgtggttcaaaaacacagcggaatgtgtaagctgtctttgacgctgtcatcaaagagggtcttctaccaccaaagcgcaagagaaagaagagaaaagcacacaa

SEQ ID NO: 18733 - DNA, 438 bp, Glycine max
  unsure at all n locations
  Clone ID: LIB3106-090-Q1-K1-D5
ctctctctgtctctctctctctagacttagattttgtgaatggctgaagtggaagagggacaggtcatcggcgtccacaccgttgatgagtggaagctgcaactccagaatgcaaaagactccaaaaaactgattgtggtggattttactgcttcctggtgtggtccatgccgttttatggccccagttcttgcagagattgcaaagaaaactcctgaattgatcttcctcaaagtggatgtggatgaagtgaggcctgttgctgaggaatattccattgaggccatgccaaccttcctcttcttgaaagatggcgagatcgtggacaaggtggttggtgctagtaaggatgaccttcaagccaccatagccaagcatgcatctgctgntgctgctgctttcttctcttgaagtgaagtatcataatatgaaagaaga

SEQ ID NO: 18734 - DNA, 382 bp, Glycine max
  unsure at all n locations
  Clone ID: LIB3106-090-Q1-K1-C12
catttctgcatttccattttctctctcacttttcaagaatcgtaagctatgggaaagtctgacccaactgtgagtgctgattaccagaaggccgttgagaaggcgaagaagaagctcagaggcttcatcgctgagaagagatgcgctcctctaatgctccgtttggcatggcactctgctggaacctttgacaagggcacgaagaccggtggacccttcggaaccatcaagcaccctgccgaactggctcacagcgctaacaacggtcttgacatcgctgntaggcttttggagccactcaaggcggagttccctattttgagctacgccgatttctaccagttggcttgcgttgttgccgttgagggcacgggtggacctg

SEQ ID NO: 18735 - DNA, 287 bp, Glycine max
  Clone ID: LIB3106-090-Q1-K1-D6
cccacgcgtccgtgcaaagatgggaaaattaaaaagctatatttcagtacttgctgtgacatttgtattggtgataggagtagctgaatgcagaaaaataaaagaaaatgagttagttgacggttttggaggaggtggattaggtggtggtggcggtggaggttttggtggaagagctggtgcatgatgaggggtaggaggcggacatgatggaagcattggatgacgtttaagtggatgtggttgtgttgcaggtggatgattggaacattatgcaggagtttaca

SEQ ID NO: 18736 - DNA, 227 bp, Glycine max
  Clone ID: LIB3106-090-Q1-K1-A9
tcaaaacttgtcccaaaaatcatgctctgcgtcgtacctactcttcccttacatataattgaaattcatctttatcctatactttaccgctttcattttaatctcatgcttctacagttccttcaaaacccaaacttgaacttcttgcttattgctcttgtaagcaaatgacatcctctccctgtgtttctgcttccttgtcatacgctgtctgattccgtgactgg

SEQ ID NO: 18737 - DNA, 468 bp, Glycine max
  Clone ID: LIB3106-090-Q1-K1-B1
tgctcttcacttccggaatcgacccacgcactccatgctgtctggccaatttgttgcatggatttaactggatattgcctgataatgtgaggaaggaggatttgaatatggatgagatttttgggctctctacacctaagaaactaccactggaaactgttgtggatcctatgcttccataccatctttattctctctgagcagtgcctttgcacaaagcgtttctctctaataagattgttgtagggataatgggtcttgagtgagtttatgtttgtcacactggattgcaataaatttttctctcttttcataacaatgttagaaagagagaaaaaaaaaaaagatgttgtggtgatagggactcgtggtaaccaatgcatggcaaatgtgcaagcgaaagtattttaatgtgaccattttctctctggcagaaacatgcttttctcttcctttccttttttggta

SEQ ID NO: 18738 - DNA, 311 bp, Glycine max
  Clone ID: LIB3106-090-Q1-K1-B10
tcacactctctctttctttcttcctgctgctacaatatggagcctctctcttccaccaaacacaacatcaatctctccaagccttcctccctccacacggaggctccgccgccggaggccagtcccctccggaagatcatggtggtggcctccatcgccgccggggtgcaattcgggtgggccctacagctctctctacttaccccttacgtccaactgctggggattccccacacttgggccgtcttcatctggctctgcggcccaatctccggcatgctcgtccagcccatcgtgggataccacagcga

SEQ ID NO: 18739 - DNA, 391 bp, Glycine max
  Clone ID: LIB3106-090-Q1-K1-B11
cccacgcgtccgtgtatttttagtttttgttttaatgtttttcaggatgtttgtgcctcacgtagagttgacaaaggtagatgaagttgataatgctagagaagggtgtggtgtggcacttagcttagctatttatgattgcaatttttccaaaaatggaagtttggattcgttgatgttgaccggatctgaataccccatttcactatcaccaccttttagctataggtcatggcctgcatcggctggatttgctttcccttttggcttataagggtcattaaggatggaaaatggcttcctttcacattcttaaatcctattcaatccaaaaagcaagggcttatttaagtgaaggatgaaaaggtttggggtggcagaagggttggaa

SEQ ID NO: 18740 - DNA, 447 bp, Glycine max
  unsure at all n locations
  Clone ID: LIB3106-090-Q1-K1-B12
cccacgcgtccgtgataatggtgtttttgaagttcttgccacaaatggagatactcatcttggaggtgaggactttgatcagagaataatggagtacttcattaaattgatcaagaaaaagcatggaaaggatattagcaaggacaacagagcacttggcaagctgaggagagaggctgatcgtgcaaagagggctctcagcagccagcaccaggtccgcgtggaaattgaatcactttttgatggtgttgattcttctgagccactcacccgagctcgttttgaggagttgaacaatgatttgttccggaagaccatggngccagtgaagaaggctatggaagatgcaggattacagaagagtcagatcgatgagatngttctttgtggtggaagcacatggattccaaagtacaacagcttttgagggactacttgatggaaagg

SEQ ID NO: 18741 - DNA, 327 bp, Glycine max
  Clone ID: LIB3106-090-Q1-K1-B2
agactatctttatataataatataaataagaataaaaaaataaaaaaaaaaaaaaaaaaaagagaaaaggaaaaaaaaaaaaaaaaaaaaaaaaaaaaaaaaaaaaaaaaaaaaaaaaaaaaaaaaaaaaaaaaaaaaaaaaaaaaaatacaaaaatatatactataaaaaacaaaaaaattacacataatattcaagctaaaatattaacagtaaaatccataaatgagcataaaatgaacataaaaataaaacacttgatatcaataaactactgtaaaaaaaacttacatacttaaaaaaagagttctataaaaaatatgtctt

SEQ ID NO: 18742 - DNA, 454 bp, Glycine max
  unsure at all n locations
  Clone ID: LIB3106-090-Q1-K1-B3
tgttgatcgagataactagaaacagtgtgatgaaaatgaaggtccttgttttcttcgttgctacaattgtggtagcatggcaatgccatgcgtacgatatgttccctctccgaatgaacactggctatggtgcccgtactccggaggtgaaatgcgcaagttggaggcttgctgtggaagcacacaacatctttggctttgagaccattcctgaagagtgcgttgaagcaacaaaggaatacatccatggcgaacaatatagatcagactccaaaacagttaaccaacaagcttacttttatgccagagacctcgaagtccatcccaaggacacatttgtgttcagtatagatggcaccgtactctctaatattccatactacananaacatggatatggngtggagaaatttaactcgaccttgtatgatgaatgggttaacaagggcaatgc

SEQ ID NO: 18743 - DNA, 420 bp, Glycine max
  unsure at all n locations
  Clone ID: LIB3106-090-Q1-K1-B4
cccacgcgtccgctatcacttccctcaccatggccgagtcctgcctcctctcttctccctcgtcactcgtccacaccaaaaccaaaccctctctctttacacccccctccaaacccctcacactccaattttcatgcctcaactcctccgtctctctctccctcgccgcaccaactcaccgttctccccttgtaactttcgtggcccaaacttccgattgggctcaacaagaagaagaacagagcctcgctgaaaccgaagcgggcctggaaagttgggagcccaacggcgaagacgccggcgatgagagcttcgtcgaaccgccggaagaggccaagctcttcgttgggaactngccttacgacgttgatagccagaanatggccatgcttttcgaacaggccggaacccgtgaaatcg

SEQ ID NO: 18744 - DNA, 437 bp, Glycine max
  unsure at all n locations
  Clone ID: LIB3106-090-Q1-K1-B5
cccacgcgtccggttacttcccagaacaaatcatgcagcaacagtgttatccccaagactatgccccgtttggtgtcattcagtagctcgtgccaccactctgcccacttctccaggtggggcggagcaggttgtggacagttcgtttgatgcacctaaagtgaaattattgaagcagaaaatggaacttcttggtatcaacttggaaaagtcttgtttgcctgggcagtaccataacctgttttgtccaaaatgcataggtgggcagttaaaggagaggagtttgtcttttcacattatctctgattgtgaatttgcaatgtggaggtgttttcgagctcaatgtggttgngctggtcaggtgacataacatggatttataaaattatgtctcctttcaacataaaaactngtaatggggtaacaaagacaaacta

SEQ ID NO: 18745 - DNA, 451 bp, Glycine max
  Clone ID: LIB3106-090-Q1-K1-B6
gtgaacctgatcccattcccacgtctccacttcttcatggtggggtttgcacctctcacctgacgcgggtctcagcagtacgtgtccctcactgtccccgaactcacccagcaaatgtgggacgccaagaacatgatgtgtgccgccgatcctcgccacggccgatacctgacagcatcagccatgttcaggggaaagatgagcaccaaggaagtggatgagcaaatgatcaacgtgcaaaacaagaactcatcctacttcgttgagtggattcccaacaacgttaagtcaagtgtgtgtgacatccctctcaagaacttgaagatgtcgtgcactttcattggaaactccacctcaattcaggagatgttcagaagggtgagtgagcaattcactgcaatgtacaggcgcaaggccttcttgcactggtacaccggtgaaggaatggacg

SEQ ID NO: 18746 - DNA, 251 bp, Glycine max
  Clone ID: LIB3106-090-Q1-K1-B7
gctcatccgagaccggaagcagcaatggggatcgatctcaaggccggaggtaaaagcaaaggaaccaaatgaacagcacccaagtccaatgatatctatcttaagctcttggtcaagctttatcgcttacttgttcggagaactggcagcaaattcaatgccgttatactcaagagattgttcatgagcaagggtaacaagcccccattggctttgtcaaggttgattaagtataccaaggggaaggaaga

SEQ ID NO: 18747 - DNA, 446 bp, Glycine max
  Clone ID: LIB3106-090-Q1-K1-B8
ggtttcccctcgtctccgggctcgtttcgttctcgaataatcgatctacgataatgactcatatcctttgatccgttgaaattttactgctaatttttcacaaattgtcgttaatttagggatagggttgactttctgttagaaaattcgaggaaaaaaataaatcacatttcaccctccgctacccccatttgttgtagatctttttggttttaccgcaattaatagtttcattcagtttggatccatggaaactaacacaagaataacacaattttaataattatacctttttttgtccttttcttttcaaattttgtttcctttgccacaatacagacggcgtattcgtggtttggtttgttaagccgttttgcttgttattgctttcaattaactctaaagcgcacgcggtagccagagggatcgtgatcgcgaaagggctc

SEQ ID NO: 18748 - DNA, 425 bp, Glycine max
  Clone ID: LIB3106-090-Q1-K1-B9
ccggaatcgacggacgcacccactcgtgcggttgctcggtctgaagccgctccgtctactctgtgacgctcagaaggcttcgagcctaccgaccaacgacctgcctaccgatttcgattggcgcgaacatggagccgttactggagtaaaaaatcagggttcgtgcggatcgtgttggtcctttagcgccgttggagcgttagaaggtgctcattttctttatacaggtgagctcgtgagccttagcgagcaacatcttgcggactgcgatcatgagcgtgatccggaagagcgtggagcatgtgactcgaactgtaacggtgctgtgatgaccactgcattcgatgacacactgcacgctggtggactaatgcgagaaaaggattatccttacactggaagagaccgtggtccctgcaaatttg

SEQ ID NO: 18749 - DNA, 339 bp, Glycine max
  Clone ID: LIB3106-090-Q1-K1-C10
cccactcgttcggcacaagcagagctgcaaggtgtgtcaaaagaattgacagctgctcttgaaaagaatgatagcctacaaaaagaattagttgaagtctacaaaaaggctgaaagcacagcagaggatttgaaggatcaaaatcagttagttgcttctctgaacaaagatttacaagcattagagcagcaagtctcaaaagacaaggagtcccgaaaatctcttgagagggacctggaggaggcgaccatatcactagatgaaatgaaccgaattgcgttgatcctttctggggaactactgatagctaatcctctggtttctagcctggaaaaagag

SEQ ID NO: 18750 - DNA, 437 bp, Glycine max
  Clone ID: LIB3106-090-Q1-K1-A7
caagtagttgagaactaagaaggagaagcaaatggcttcctcaatgatctcttggccagctgtaccactgtcaaccgtgccggtgccggcatggttgctccattcactggcctcaagtccatggctggcttccccaccagaaagaccaacaatgacattacctccattgctagcaacggtggaagagtgcaatgcatgcaggtgtggccaccagttggcaagaagaagtttgagactctttcctacctgccagaccttgatgatgcacaattggcaaaggaagtagaataccttcttaggaagggatggattccttgcttggaattcgagttggagcacggtttcgtgtaccgtgagcacatcaggtcaccaggatactacgatggacgctactggaccatgtggaagctgcctatgtttggttgcactgatgcttc

SEQ ID NO: 18751 - DNA, 429 bp, Glycine max
  Clone ID: LIB3106-090-Q1-K1-C11
cccactcgttcgccgaggcagtcttttattttatagtataattcattctgtcatatatctgtgtagcaatggtggtctttctttgcaaggaagaatatggtgtgctcttgggcaatgactgggctgcaactcatgaatttggccacaacttttgtatctcaaatgaaggtgacgatgacgatgatgataatggcgtcattgatgtggccccggcggcatagaagaatttcgcaaaacatgcataaatgaggaggatgaggagggatatagtagtagtcagtgtaagcttcattctgtggtcttgcttagtaattacattacatttgtgtttactcttggaataggttctagtgttatgcttaattacggtcactataaatttgagacataatacatgttttattagtaattatggcttaattccactca

SEQ ID NO: 18752 - DNA, 407 bp, Glycine max
  Clone ID: LIB3106-089-Q1-K1-H2
ggaactgaggatgctcatttcgttaaagagtgacgcaagtgaaataagtggtgtctttgaggtgagaaataacacaggcccgtcttcggtttgaatatttatccatttgatttgcaatgattcttttttctcaaaatttcccattcttccatggttttctacattctcttggatttgggttcattcattaaaactgatgaatccattgttattttgtgtataaaaggttctcgaatggggcttatttgtttgtgtgtgattctatttttattttctgaggggtggaaagtggggcgaggtttggggctcacaagtatttgttatgtaaaattgtaaatgtcttcagacatccacgtttgaaattgaaactgttttaagttatgaaatattagccagtttgtttgagg

SEQ ID NO: 18753 - DNA, 395 bp, Glycine max
  Clone ID: LIB3106-089-Q1-K1-H3
aaaaaatatatctaaaataataatccaaagacaatagttgtgttgtgttcagttaagggtgagccttagcaacaacatgctcatcactattctgtgtggaacctgttaaatgtgctatagcttatttcaacttctccatggcttcttttctttccttatctcttcccaaattaaacttaataaaggcctcttcagcagctaacaccaatacaacaaccactcttcccacagctgagacactcaatgagaaatttggcaggaaaggcatcaagttcttggagtctgataacattcccatagttgagctaacagtgagaaatggcagctccttgaggctgaagatacctgatgctcatgtgacatcatacaaaccaaaagttaattggaaagatgat

SEQ ID NO: 18754 - DNA, 441 bp, Glycine max
  Clone ID: LIB3106-089-Q1-K1-H4
gcgaaaatataacaaataatttgtactttcatcaaaacaaaatcccgttgtatttttctcaaatggctcgaacgaagcaaacggcccgcaagtcaaccggcggcaaggcgccgcggaagcagctggcgactaaggcggctcgcaagtcggctccggcgaccggcggcgtgaagaagccgcacagattcaggccgggaaccgtggcgctgcgcgagatccggaagtaccagaagagcacggagctactcatccggaagcttccgttccagcgcttggtccgagagatcgcgcaggacttcaagaccgacctccggttccagagctccgccgtctccgcgctccaggaggccgccgaggcttacttggtcggtctcttcgaagacacgaacctctgcgccattcatgccaagcgtgttactatcatgcccaaggacattcagc

SEQ ID NO: 18755 - DNA, 169 bp, Glycine max
  Clone ID: LIB3106-089-Q1-K1-H5
gcctttataacttaaacttcatggactctgatgacttgctttgcttgtaacgttaacctgcgattgcataaactttcaatacgctcagtgctcacacttgaatcacaagctttggttaagcacttgacgctagagacccattgacagcctcagctgtgtccaacacatt

SEQ ID NO: 18756 - DNA, 461 bp, Glycine max
  Clone ID: LIB3106-089-Q1-K1-H6
cttctttctttcgatcagggtttcccctcgtctccgggctcgtttcgttctcgagtaatcgatctacgataatgactcgcggtagccagagggatcgtgatcgcgaaagggctcaggctagaactggtgctaaaggcaagcagaaagatgatggattgacccctgaacagcgcagggaaagagatgcaaaggcgctgcaggagaaggccgcaaagaaagcggcacagggtgcaggagggaataatgcagctggaagcaaaaaataggcaataattcaatgagtagtttgagtttgccgtttgttgattgtggacatggaatttgtggaaattttatgttgcattattcatggagtatgatgtgtttattaatgtaacttgcgacggaagaacaaataagttgtgcttctttgaaagatgttgtcgctgggggcagaatcaataacttgtatctttgtttgg

SEQ ID NO: 18757 - DNA, 392 bp, Glycine max
  Clone ID: LIB3106-089-Q1-K1-H7
gaacaccaatcaggatctgaaaagtgacttgaaagatctctacataaaccaagctattcaaatggatgtggctggtaatcgcaaggctgtagtcatctatgtgcctttcagattgaggaaggcattccgcaagattcatcttcgacttgtcagagagttggagaagaagtttagtgggaaggatgttgtcttgattgccacaaggaggatcgtgcgaccgccaaagaaaggctctgctgttcagcgaccccgaacccgcactttgaccgctgtccatgatgccatgctggaggatgttgtgtatcctgcagagattgttggcaaacgggccagatatagaattgatgggctaaaaaatatgaaggttttctttgaacccaaagagcgcaaca

SEQ ID NO: 18758 - DNA, 444 bp, Glycine max
  Clone ID: LIB3106-089-Q1-K1-H8
tcggaacaccaatcaggatctgaaaagtgacttgaaagatctctacataaaccaagctattcagatggatgtggctggtaatcgcaaggctgtagtcatctatgtgcctttcagattgaggaacgcattccgcaagattcatcttcgacttgtcagagagttggagaagaagtttagtgggaaggatgttgtcttgattgccacaaggaggatcgtgctaccgccaaagaaaggctctgctgatcagcgacccctaacccgtactttgaccgctgtccatgatgccatgctggatgatgacgtgtatcctgcagagattgttggcgaacaggccagatatacaatcgatggctcaaaaataatgaaggttttcttggaccctaaggagcgcaacaacactgagtacacgctggagaccttttctggagtttacaggaagcttac

SEQ ID NO: 18759 - DNA, 402 bp, Glycine max
  Clone ID: LIB3106-089-Q1-K1-H9
gttgatcgagataactagaaacagtgtgatgaaaatgaaggtccttgttttcttcgttgctacaattttggtagcatggcaatgccatgcgtacgatatgttccctctccgaatgaacactggctatggtgcccgtactccggaggtgaaatgcgcaagttggaggcttgctgtggaagcacacaacatctttggctttgagaccattcctgaagagtgcgttgaagcaacataggaatacatccatggcgaacaatatagatcagactccaaaacagttaaccaacaagcttacttttatgccagagacctcgaagtccatcccaaggacacatttgtgttcagtatagatggcaccgtactctctaatattccatactacataaaacatggatatggggt

SEQ ID NO: 18760 - DNA, 385 bp, Glycine max
  unsure at all n locations
  Clone ID: LIB3106-090-Q1-K1-A1
ctacactgtagataatccaacgaaaaattggagaggaggtgcaggttacatatcaaaggatgtggttgcgaaaggcttacccagtcctagtgatgatactctaatacttgtgtgtggacccccgggtatgatgaaagcaatatctggagaaaaggccaaggactggacacaaggagaggtttctggcatcctaaaagaggctggatacactgaacaaatggtatacaaattctgagaaatttagttttcttgcatctgaattccaagcacttgtccgctgcagaaatcgtgtactgaaatggctttctgataacaacagttangtgcggttgaaaattccaacatgaaataaatcttgaattacagagcatagagaattattaat

SEQ ID NO: 18761 - DNA, 437 bp, Glycine max
  Clone ID: LIB3106-090-Q1-K1-A10
cccacgcgtccgcccacgcgtccggaaaaaagagaaacaaatggcagcactgggtggctttaccgacatcaccggagcacagaacagcatcgatatcgaaaatctcgctcgctttgctgttgatgaacacaacaaaaaagagaatgcagttctggagtttgtgagggtgattagtgcaaagaaacaagtggtttctggcaccttgtactatatcactttggaggcaaatgatggtgtgacgaaaaaggtttatgaaactaaggtgttggagaaaccacggttgaacatcaaggaggttcaggaattcaagcccatcactgttgctgttaatcctctttcggtgacggtctagcacatagctaggttatggaagtgactagcttggccgcaagagtaataatatgtatgaactgaataaatgtacctattaactctac

SEQ ID NO: 18762 - DNA, 433 bp, Glycine max
  Clone ID: LIB3106-090-Q1-K1-A11
cacaaaaaccacttaattagtccttctcacatccaaaatcttgtgccagcaaatcaaacatggcatccatgactatgcttcagaccatgattcctaagaatgcaccgaacctccctcctcgtgttggtgcttcttccaacaacactactaagatctcatttggtggctcaggtagggtactgtggaccgggattcagaggaacaggaataatacgtcttcttcgattgtagttgctgcagttggagatgtttcatctgatggcactgcgtaccttgttgctggtgccattgctgtggctctagttggaacggccttccccatcttcttctctcgcaaagacacatgccctgaatgtgatggagcagggtttgtgcggaaagctaatgtgacattgagagcaaatgcagcaagaaaggatcatacccaaatcgt

SEQ ID NO: 18763 - DNA, 457 bp, Glycine max
  Clone ID: LIB3106-090-Q1-K1-A12
tccacgcgttcggtggaaggtgagagggaggtgaagatgagaaagatggaagaggcgcacaggagcgggaagctggtgttctgctgcggggaggtgcagagttacacgctggagatgctgatgagggcttaggcggagttgttagggagggggagtgtggggaccacctacaaggcggtgatggattcacggctgattgtgacggtgaagaggttggatgggaaaagtgcagcggcagtgagtgatggagaagggtttgagaggcacatggaggttgtggggaggctgagacacctgaatttggtgcctatgaggtgctattttgatgccaagggtgaaaggcttgctattgatgactatgagcccaatgtgagactgttcaatctaggtcatggttcatgatcagcgtgggcaaaaccattgcattggacatcatgtttgaaaattgcagaagatg

SEQ ID NO: 18764 - DNA, 342 bp, Glycine max
  Clone ID: LIB3106-090-Q1-K1-A2
ctcgattaaggaagaaagagatcgggaggtttagaagaagatttaggtatgtaacacttttgttcctttgttccctctctttatatttttttgatggtacgcacttagtttctacatatcatgctttgtacagtagtgtcaaaggcatcatgcccttgcttgtgtaattaaagactaaccatcaacctgtacaaacatgacttttaccttaataagtcttgatcgaactaaaaaaaaaaaaaaaaaatatagataataaattacaaaaaattatacaatacaaaaatcatatactaaaaataaaattatgataacaacatttaatttcacatgaaaattaca

SEQ ID NO: 18765 - DNA, 431 bp, Glycine max
  Clone ID: LIB3106-090-Q1-K1-A4
gttctagatcgcgagcggccgacctcgtgtttcgctcttctcttcgaataaaccacatacggacaagcgagaagaggagtgagagaagatggggttgtcgttcacgaagctgttcagcaggttgtttgcgaagaaggaaatgaggattctgatggtaggtctcgatgctgctggtaagacaaccatcttgtacaagctcaagcttggagaaatcgtcaccaccatccccaccatcggatttaatgttgagactgtggagtacaagaacatcagcttcactgtgtgggatgttggtggtcaggacaagatccgtcctctgtggaggcattatttccagaacactcagggtctcatttttgtggttgatagcaatgatagggatcgagtggttgacgcaagggatgagttgcacatgatgttgaatgatgatg

SEQ ID NO: 18766 - DNA, 291 bp, Glycine max
  Clone ID: LIB3106-090-Q1-K1-A5
cccacgcgttcgcacgagcctcgaagtggatccttcgcaacatgggtgctagagaaccacgcaattcacctgaaccctgctcactacatcagtgagattattagagaaggcacaaaaaatggcactgctttctttaagtgccatggacatgagcaatttgagatgacgggtttggatcctgagtataataggttgttcaatgagggcatggtgtgcactgctagggttgtgtccaaggctgtgatcactggctacaaagatgggttcaaccagattaagtccttggtgatg

SEQ ID NO: 18767 - DNA, 262 bp, Glycine max
  Clone ID: LIB3106-089-Q1-K1-H12
gtcggacgtccgtatacctcgtggatgctatctacgctgagccttggattgacaaagcaggtgtcgagtgatactggctcttggcatactacttaactcaatgcctggggctcccgtaacattgccacacaacttcaatgtaggctccggtcacatatagaacgttgtgcactaatcttacacagtcatgggaagtgcataacctaaacctgttccggagactggtagaagctcatatacctaatctcgctcatgattcact

SEQ ID NO: 18768 - DNA, 447 bp, Glycine max
  unsure at all n locations
  Clone ID: LIB3106-090-Q1-K1-A6
cagagatttgcctaaggaccttcctggaaccaacatcaagaagcatgtttctcagctcattgggaggactccactggtttatcttaacaaagtcaccgaaggatgtggagcttatgttgctgtcaagcaagagatgatgcaacctactgccagcatcaaagacagaccagcatatgcaatgatcacagatgctgaggaaaagaatctgataactcctggaaagacaactttgatagagcctacatcaggcaatatgggtatcagcatggcatttatggccgccatgaagggatataagatggttttgaccatgccctcttacacaagcttggaaagaagggtgaccatgagagcgtttggagctgaattaatcctcactgatccagccaaaggaatgggaggaacagtaaagaaggcttatgaactnttggaaaacacaccaaatgc

SEQ ID NO: 18769 - DNA, 448 bp, Glycine max
  Clone ID: LIB3106-089-Q1-K1-F4
cccacgcgtccgggaaaaccatcgagaaaccaaaaaccaaaatcaatttagaggaaaaagggggaagaagcatggattctaggcggcgtggtaaaaacgcatctatgcaacgcaagttgcaacaacttcgatcggttacaaattccagtgctgtgaacaaagcctcaattattgtggatgccaccagatacatagaggagctgaagcaaaaagtggatggattgaactcagagctaggaaccgcggaatcatcaatctcccaagacgaactacccatggtcactgtagaaaccctagaaaggggattcctcattaatgtgttttcagaaaggaattgtcccggtatgcttggggcaatactcgatgcatttgaagaactgggacttgatgtgcttgatgctaaggtttcttgcgaagacactttccagcttgaagcagtcggaggaga

SEQ ID NO: 18770 - DNA, 274 bp, Glycine max
  Clone ID: LIB3106-089-Q1-K1-F5
tcggctggatgagctgaggggctcaggccctagttggcgtgcgacactgacaattcaggccttggttgatttgagccgtactgagcttattgatctaatttcgatctgagttgtataatgtctatttaacgcaatcttgatgatgagacttatatctacattttcatattatcatgctgcttatgttgatggaccgactctgattgcttagactattaaaggaacaagctatgggcagatgctttagtgcattcaagcagacgtaatcggtcgt

SEQ ID NO: 18771 - DNA, 249 bp, Glycine max
  Clone ID: LIB3106-089-Q1-K1-F6
gccatttgtcttggaaaaacaaattgtattgtaagtgcttggtgactagtttattggaatgttagtttgttcaaaaaaaaaaaaaaaaaaaaaaaaaaaaaaaaaaaaaaaaaaaaaaaaaaaaaaaaaaaaaaaaaaaaaaaaaaaaaaaaaaaaaacaaaaaaaaaaaagaataaaactatatacattcaaatactactaggattacatagacatgtacaaaaaccagatataaaccaacgcataaa

SEQ ID NO: 18772 - DNA, 286 bp, Glycine max
  unsure at all n locations
  Clone ID: LIB3106-089-Q1-K1-F7
ataagcactgtctcgttatcgctgtcacccttatatccatcatcttccacacccatggagcgttctctgagcaatcaataatcaagttacccacagaccaaccaagggtagagaaactgacccacttgcatttttttctaccacgacatcttagagggcaagaacatcacggtggtgaaaatcatcgagccatcagcgagcgaggttcgtgaagcaactgggtttggaaccactttcatgatggacaatgttttgaccganggtccagagctgagctcgaagcacg

SEQ ID NO: 18773 - DNA, 315 bp, Glycine max
  Clone ID: LIB3106-089-Q1-K1-F9
cagacgccttcgggagatatgcagctactccttggatgacgaatgggtttacaaggtccaggcacctgacctgaccgagacttttaagacttactacaagctggtgcagctggacttcaagaatataatcgtgtcaggatgaacactggacttacacgtcgatgcagaggcaaactctatgaacgctggctactacacatggtaaaggttcattatcaaggatccagatgatatctgcacacaaaatgcatgttcatacaaaacagcgcatgagagacaaactgatcacgcatggattcaacattgccgatatca

SEQ ID NO: 18774 - DNA, 432 bp, Glycine max
  Clone ID: LIB3106-089-Q1-K1-G10
cccacgcgtccgaatcaattaaaactgagaatattgattcacgaataatcaaatcaatatgcgaaagaaaaaaaagattattaattttaagatatgagaaaggctccattgtcgaattcagacctaaccattaatcgagaagcgatgggaacgactaatcctgctaatacttaagactttattaaaagcaaatcttaatgattcattaggtgggatggcggaagaaaccaaaaagcaatcctttttttaggagttgcgccctacattacatgtgaatttgattgataataaaagagtaaatattcgcccgcgataatgatgattttattgaatttgccattattattgccaattctatatattctttctaataataaaaaatattctaataactgataataaaaaggaaaattaagatcattaagatcctat

SEQ ID NO: 18775 - DNA, 247 bp, Glycine max
  Clone ID: LIB3106-089-Q1-K1-G11
aactggcgttcgattccatcggcagcgcgcttaacgtatgagtccagaacgagagagatggtacggtaaatctctcgcctgggatcacatctgactcagaatcgagtgccgcagttcacggtgccatctaacgtatatgtgagcgcttgtactaccaatgtctatacctactatgcttacgacgtctgcggaagttcttaatctgaacctgaagacgatgctatagatagtgctaggatctacactc

SEQ ID NO: 18776 - DNA, 361 bp, Glycine max
  Clone ID: LIB3106-089-Q1-K1-G2
aaatactattattcaatcatttacttgagcatcagtatcatctgatgaagtgtccaatgcgtgcaaaggttccattggctccaatacagaatggaatccatccaatgcctgtgcagccaacaacctacctatgggatatccagtgctacagcagccttccatgccagcaacaggtcaacctcatattgactccatgggttgtggtatatcaagttgtcatgtagttaacggagtccctgccccatgaaactttcaccccattcggatgaattctgggaatgatatggtggtggaccacagtgctcccgatatggctcctgttattccaccaaatggtacaacgtcgtctggctcaaaaatg

SEQ ID NO: 18777 - DNA, 372 bp, Glycine max
  Clone ID: LIB3106-089-Q1-K1-G3
ggcatattaccttctgctccacaatttctgcatttatcatattagtccacctgggcatgagttgggagctgctgcaatcgatcaagatcacccaattctttctgtagatgatttagctgatcaaatagccgaggttctcaacttttttggtcttagtgcagtcatgtgtatgggagtaactgctggggcttacattcttaccttatttgctatgaagtatagacaacgtgttcttggtttgatacttgcttctcctctatgtaaagaaccgtcttggactgaatggttgtacaacaaggtcatgtcaaatttactatacttttatggcatgtgtggggtgggtaaggaaatattgctgaagcggtactttag

SEQ ID NO: 18778 - DNA, 445 bp, Glycine max
  Clone ID: LIB3106-089-Q1-K1-G4
ggcatattaccttctgcttcacaatttctgtatttatcatattagtccacctgggcatgagttgggagctgctgcaatcgatcaagatcacccaattctttctgtagatgatttagctgatcaaatagccgaggttctcaacttttttggtcttagtgcagtcatgtgtatgggagtaactgctggggcttacattcttaccttatttgctatgaagtatagacaacgtgttcttggtttgatacttgtttctcctctatgtaaagaaccgtcttggactgaatggttgtacaacaaggtcatgtcaaatttactatacttttatggcatgtgtggggtggttaaggaaatattgctgaagcggtactttagcaaggaaattcgaggtggcactcaattgccggagtcagatatagttaaatcttgtcgaaagttgttggatgag

SEQ ID NO: 18779 - DNA, 359 bp, Glycine max
  unsure at all n locations
  Clone ID: LIB3106-089-Q1-K1-G5
ctttaacaacctctccggccccataccaagctcgcttggtaaactgcctaaactcgcgtatctagatttgagccgcaacaagctcacgggctcaattccggcctcatttggatccttccaaaagcccgggccggctattatgctctctaaaaaccagctttcagggcgccttcctgcttctttggccaacttagactcggacaggatagacttgtcaaggaacaagctcgaaggcgatgcctncatgcttttcgggagcaataaaaggacgtggtctcttgacctttcaaggaacaatttcgcgtttgatctatctcgcgtggagattccccacaagacccttggcagggtgggatcta

SEQ ID NO: 18780 - DNA, 455 bp, Glycine max
  Clone ID: LIB3106-089-Q1-K1-G6
gtggtctgcaactatgagcaaggattatctaatcatactttctctccttctttccacggtgcttgcaactgcaagttcttcttcttcttcttcctccctctatcttgggaagggcttctcccatcgcaaattgtctcccagttatcacattcacaaaaccattgacgaatcctatgcagttatcttcgatgctggtagcacgggaagccgtgtacatgtctatccgtttaaccaacaattagatctccttcgcattggccaagacctttgagttgttgtcaagactatgccaagtttaagtgcttacgctgagaatccaccagatgcttcagaatctcttaatccacttttggaggaagcagaagctgctgttcctcaagagtttcaccccaggacgccagttaaacttggagcaactgcaggtttaaggcaattggaaggggatgcttctgata

SEQ ID NO: 18781 - DNA, 367 bp, Glycine max
  Clone ID: LIB3106-089-Q1-K1-G7
cactcactttctctctctataactctttctcacccgctagggtttccttttcatcgcatcgtgagtttgcaacctcgtcttgtgatttccatggagggtgctgggatggaagagaataatattattaatgatgatgataataataacaagtctgaggcgcatttgacttctgccgctgcttttgtggagggtggaattcaggacgcttgtgatgatgcttgcagtatatgccttgaagctttctgtgatagtgatccttccacggtgacgagctgcaagcatgagtttcatcttcagtgcattctcgaatggtgtcaaagaagctcccagtgccccaatgtgtggcaggctatcagtcttaaaagat

SEQ ID NO: 18782 - DNA, 313 bp, Glycine max
  Clone ID: LIB3106-089-Q1-K1-F3
cccacgcgtccggttgagttgatttctgatcccaaattgagtttgagtttcagccatggtatctgttgctctgctcttattcctatctttctttgccttctttgcaccctctgaatctcacgacaaagtctcgttggaattgtactacgaaagcttatgcccctacagcgccaacttcatcgtgaatcacctcccaaaaatcttcaccccagatcttgccccaatcgttcacctcaaactcgttccttggggcaatgccaaactccgtgccaacgccacctttgactgccagcatgggccatatgagtgcttg

SEQ ID NO: 18783 - DNA, 406 bp, Glycine max
  unsure at all n locations
  Clone ID: LIB3106-089-Q1-K1-H1
ggaactgaggatgctcatttcgttaaagaggtcgcaagtgaaataagtggtgtctttgaggtgagaaataacacaggcccgtcttcggtttgaatatttatccatttgatttgcaatgattcttttttctcaaaatttcccattcttccatggttttctacattctcttggatttgggttcattcattaaaactgatgaatccattgttattttgtgtataaaaggttctcgaatggggcttatttgtttgtgtgtgattctatttttattttctgaggggtggaaagtggggcgaggtttggggctcacaagtatttgntatgtaaaattgtaaatgtcttcagacatccacgtttgaaattgaaacttgtttaagttatgaaatattagcccagttggttgaag

SEQ ID NO: 18784 - DNA, 126 bp, Glycine max
  Clone ID: LIB3106-089-Q1-K1-H10
tcccactcgttcgcaatttttgaaataaaattttaaaattaaaaacaaaaaaaaaaaaaagggacaaaggaaaaaaaaaaaaaattaaaaaacatacaaaaaaataaaaggtcgtcctttttataa

SEQ ID NO: 18785 - DNA, 365 bp, Glycine max
  Clone ID: LIB3106-089-Q1-K1-H11
tgccttggatcacatctgactcagaatcaggtgccgcagttcacggtgcctcccaacgtctgggttggctcttttactaccaaggactatacctactctgcggacggcgtattcggaagtgctgaatctgaagctgaagctgaagctagagatagtgacaggaactacactcttgtaagatgcacttgtgcccctgcgttacagtactcagacttcgagctcgctaagccttcttatctccgtggtcgttttactgaattccagcctgtcgtcactgctctgacattccccgagtgactcacactatctatctgcactgatttttcgcgttctaataatcatatagactccttccttctatttct

SEQ ID NO: 18786 - DNA, 211 bp, Glycine max
  unsure at all n locations
  Clone ID: LIB3106-089-Q1-K1-D9
taaaaaaaaaaaaaaaaaataaaaaaaaaaatttaaaatttaaaaaaaaaaaaaaaaaaaaaagaaaaaggtaaaaataaaaaaaaaaaaaaaaaaaaaaaaaggacattacattgttagattcctatatgggcgtccgttttaatgatcccaagtttccttccccttgcttgccactttttagctcttttttaggngaacttaaattaat

SEQ ID NO: 18787 - DNA, 345 bp, Glycine max
  Clone ID: LIB3106-089-Q1-K1-E1
aatcaccaattcaaaacccttcttcccttggaacaaattgagagatcgtgatggcaccaaaggcggagaagaagcccgcagaggagaagaagtccacggtgggagacaaggctccggcggagaagaagccaaaggccggaaagaagcttccgaaggagggaggcgccggcggagaagggaagaagaagaagaggaacaagaagagcgtggagacatacaagatctacatcttcaaggttctgaagcaggttcaccctgacattggtatctcaagcaaggccatgggaatcatgaacagcttcatcaacgacatcttcgagaagcttgcccaggaatcttctagac

SEQ ID NO: 18788 - DNA, 83 bp, Glycine max
  Clone ID: LIB3106-089-Q1-K1-E10
ataacattccgttatttttgctggtgtttgtctttgttttgtatggatatcatcattgttgcgaaattacttgtgttaattct

SEQ ID NO: 18789 - DNA, 439 bp, Glycine max
  unsure at all n locations
  Clone ID: LIB3106-089-Q1-K1-E11
gagacattgtggttacccatagtctcatatagtgtcatacagcaaaaaatttcagcaacacaaaacaatgggttctcttatggcaggatggtattctacccacatggatcctcaatcagccacacttaaaaggaaccgctcactcactaaggatgaaattgatgcttactggaaatcaaagaagaagatagaggaagaacaccttagagctatttccaatgtgtcagagactattcaggctagtaaaaacacagagcctgaaaagaagttgcagaagtcaatgaccatgccagttacccgtgcacgggactacttaaatatggtggacattgacacaagtttggagcaacttattaagcgaaatggctggtggaccaagagtagctgggcgtttctgaatgagcctncagtgactgaagctgcgtncaataagtatgca

SEQ ID NO: 18790 - DNA, 425 bp, Glycine max
  Clone ID: LIB3106-089-Q1-K1-E12
atttacatttctctctccagtatggcttctactcacaatgagttttatgcacttatgctagtggtggtggttggctccatggtggcttcctgtggtgctaacttcaaccaagactttgatctaacatggggtgatcaccgtgctaagatattcaatggtggtcagcttctatctctttctctggacaaagtctctggctccggcttgcaatccaagaaagagtacctatttgggaggatcgatatgcaactcaagctcgttgctgtcaactctgccggcactgtcactgcttactacttgtcgtctcaagggccatctcatgatgagattgattttgaattcttgggaaacgtgagcggtgacccttacattcttcacactaacgtgtttaccaaaggccaagggaacagagagcaacagttcta

SEQ ID NO: 18791 - DNA, 457 bp, Glycine max
  Clone ID: LIB3106-089-Q1-K1-E2
cccacgcgtccgccaagaaatctgaaattgaaagattggtgaagcagatagaatctctgaatccaactccatgcccaactctagaactggagaaggtggctgggtgctggaggcttgtttacagtacgatctcaattttgggatcaaagaggaccaaattaggcctcagagacttcatctcattggatgatttttttcagacgattgacatatccaagagcaaagcagttaatgtgataaagttcagtgcaatgggattgagtttgttgtctggacagcttaatattgaagcctctttcaggattgcttcctcaacaagggttgacattaatttcgaaaactcaacgatcactcctgaccggttgatgaatgtatttcggaaaaattatgatcttttgttgggcatcttcaatccagagggatggctggaaatcacatatgttgatgataccttgag

SEQ ID NO: 18792 - DNA, 324 bp, Glycine max
  Clone ID: LIB3106-089-Q1-K1-E4
gtccatcttaaagggtgaaacattgtactgcgataaaaatttacagtatatgttgatgttgatctgtgaaataagtttggaattgggatgttcattctccttgagctgaatcacattacaaaatcgtactgtaaatcatttgtcacatagaggtatcatagaaattataaactgtgttatgctccccaatctctagcaatgtaaggatagcgtgctgtgtaaaatctgcgcacacttgagttatcatcagtcccaatggagtaaagtttatttggttaacaaaaagagtggacaatatggtaatgtcaaatatactaagctgat

SEQ ID NO: 18793 - DNA, 431 bp, Glycine max
  Clone ID: LIB3106-089-Q1-K1-E5
cagccatggaaacaggcatagcatgctacactcgcgggcctttcttgcctagtgtttcttgcaagcactctccaccctccatctctccatcttttggcttgaggagtctgaaatcgagctctttatttggagaatctctaagagtggcatccaaatcaacactaaaggtttcaaagacaaagaatacttcactcgtgaccagatgtgaaattggtgacagtctggaagaattcctcacaaaagcaacaccagataaggtgttgatcaggtcgctggcgtccatgggagaagcattaagaacaatttccttcaaagtgaacacggcttcttgtgggggaacacaatgtgttaatactattggggacgagcaacttgcaatggatacgctagctaatcaacttccttttggggccctaaattacctctaattc

SEQ ID NO: 18794 - DNA, 418 bp, Glycine max
  Clone ID: LIB3106-089-Q1-K1-E6
aataaaacttcttaggaatgagttggggcttgaagtttatccagccaaaaccagattagcggtaagtgacacagcaaagttagagtaccccaacttttcaaatctgagcatagaagcacaacctggagagaatgcattggggtttcagacaaggaggcctggagttctagtaaggttgaaggtcaccaaataatcattataccgttggttgcacaggaagtaagcgttaaatagttctattataacttacagaaattttgtacaaatattataagatatgccattttttttctcccaaccctgtatatattgcatttgggtatagctgcctatgtatctgcaataaaataggtgttacataatgaatgatacctagtaccgtggaatcaaatcatgtgcttaaatgaacagattcact

SEQ ID NO: 18795 - DNA, 442 bp, Glycine max
  Clone ID: LIB3106-089-Q1-K1-E7
agaaaatacacattacattactaagtctttgttcatttgagtagtagtgatggctagcctgaaggttgcatgtgtggttgctgtgatgtgcatggttgtggtggccatgagtgctgcacccatggcacaggccgcaatcacgtgcgggcaggtcgccggcgacatgtctccgtgcttcagttatcttcgaagcggcggaaaaccgtcgcaggcctgctgcaacggagtgaagtccctcagcagcgcggcgaagaccaccgcggaccgccagggggcgtgcagttgcctgaaaaaccttgccaataatatgggacagagtttgaatgccggcaacgcagcctctctccctggcaaatgtggcgtcaacatcccttacaagatcagcaccttcaccaactgcgccaccatcaagttctgaagggcaatttttcagtcgcagaat

SEQ ID NO: 18796 - DNA, 453 bp, Glycine max
  Clone ID: LIB3106-089-Q1-K1-E8
aaaacatctccagtgggttcttcttcttctattacaacaacgtcgtccaagaccatgaccatggccatggccacgatcctgctcctgttcacggtcttcgcggtttcatcggccctagacatgtcgataatctcgtacgacaacgcccacgccgccacgtcgcgcagcgacgaggagctgatgtccatgtacgagcagtggctagtaaagcacggcaaggtgtacaacgcgctcggagagaaggagaagaggttccagatcttcaaggacaacctgcgattcatcgacgaccacaactcccaagaggaccgaacctacaagctcggactgaaccggttcgcggatctcaccaacgaggagtacagggccaagtacttgggaaccaagatcgatcccaaccggaggctcggcaagaccccgagcaaccgatacgcgccacgtgtcggcgacaaa

SEQ ID NO: 18797 - DNA, 360 bp, Glycine max
  unsure at all n locations
  Clone ID: LIB3106-089-Q1-K1-E9
cccaacacaagaaatacgcgtggcgccatatatagcagcagagactcagaatcagaatctaaaggcaaaagggtttgaaggtgtgccttgttaaggtttcgtctgatccaaagagagaagaagaaatactggaagaagaactacattttcccgataacgagccacttattgtgagagacgggaacagaaggctaatgcaagacatagattgtggtgggttgtgcaagacgaggtgcagtgcacattcgagacccaacttgtgcactatggcgtgtggcacgtgctgtgtgaggtgtaagtgtgtcccacctggcacatctggnaatagggaactatgtggaacttgctacactgatatga

SEQ ID NO: 18798 - DNA, 266 bp, Glycine max
  Clone ID: LIB3106-089-Q1-K1-F1
cccacgcgtccgaaaaaaaaaaaaaaaaaattataaaaaaaaaaaaaaaaaaaaaaaaaaaaagaaaaaaaaaaaaaaaaaaaaaaaaaaaaaaaaaaaaaaaaaaaaaaaaaaaaaaaaaaaaaataaaaaaaaaaaaatataaagaaattaaatacatacatttttatcttctacattatttcatgcttaatttattttctaatcggtttaaaaaaaaattatttcttctaaaacttaaagatatttccatattaaaaacttta

SEQ ID NO: 18799 - DNA, 459 bp, Glycine max
  unsure at all n locations
  Clone ID: LIB3106-089-Q1-K1-F10
cccacgcgtccgagcaacaccccaaatggcttcagcttctgttcccatggcgttgtcactgagctctgttaccaacaacaacaagccttcatccgaagccttcttcaggccactacccctacgccaaccaaagaggaccctcttcaccacgaaggcagtgtcaaactccaagcctcaaatcaatgcatctttgaaggagaaggcagttgccggactcacagcagcttctgtgacagcatctatggtggttccggaggtggctcatgctgctggatatgagttctccccttccctaaagaactttctactcagcatctttgctggtggggttgttctagcagccatatttggagccgttattggggtttccaactttgatccggttaagagaacttaaatcatgcatgctccaatgctnttcattttctctctctccttttcactcttcttctagcttct

SEQ ID NO: 18800 - DNA, 369 bp, Glycine max
  Clone ID: LIB3106-089-Q1-K1-F11
gggccgacccactcgtccgaactggccataaaaccctaaaatagagtgctatacgatagataccagttttgtagttacaggtctaggttaatctcaaccatggtaatgcagacgacactgatgagtttgattctgttgctcgcgttatatactatagatgtgagtgcttggaccggtgatatccatcgaagagtagtttgacacgtttgtggagaatcttctcttggacctgaataccatattctagaatgtgctgacgtagctgttctctgcatcaccaaatctggtgaaactctaaattatcacgcattcactgatgctaaagggatatacacggttgccgaaacaattctctacagtgatcactgg

SEQ ID NO: 18801 - DNA, 318 bp, Glycine max
  Clone ID: LIB3106-089-Q1-K1-D8
gtgacgtctgcttctttagctgctatacctttcctcagttatctttaaaatgctcttatctgttgagatagtgtggttttattgggtatataccatagtttgggttcttatcatagcgttttgctttcggcctatataatgggcgtagctgtggttagtgtccaagtttgaatgtgacgccgcatgcatggagagtgttttttagtttttccttttagattttgctgttgcctcttgcaatgtttgcatattgtagcaatgaagacactagacagtgggcaggtccaattctttcattttatcaagtttgtattttat

SEQ ID NO: 18802 - DNA, 302 bp, Glycine max
  Clone ID: LIB3106-089-Q1-K1-F12
aactagcgttcgatcccatcggtagcagcgctttacgtaagataccagttttgtagatgtgggatctgctcaatctcttgcatggaatcgcatatgactctgatgcgtgtgactctgttgatggtgccatctactttgtatgtgagcgcttgtactaccaaagtccatggatgatctgcttgcgacgtatgcggaaatgcttctgttgaacctgaagaccatactcttgaaggtgctagggactgcagtctttgcataagcacttgtggggaagttctaaattatcaggcattcactgatgc

SEQ ID NO: 18803 - DNA, 458 bp, Glycine max
  Clone ID: LIB3106-089-Q1-K1-F2
cccacgcgtccgggaagagtttgtggaatctagtgagagagagcagaggaaaaggggaagagaaatgttgagtgcgacggcgatcggcgcgttattgggtttgggaacccagatgtactccaatgctctccgcaaactcccctacatgcgccatccgtgggagcacgtggtcggaatggggttgggcgcggtgtttgtgaaccagcttctgaaatgggaggcccaagtggagcaagacctcgacaagatgctcgaaaaggccaaggccgccaacgaaagacgttatatagatggagatgatgattaatgcatgtcttcatggattgtggcagttggtgaaaataatcatgaaatatgttgaacttgttgcctttgttttctgatttgatgatgttatgtttgtaaagctgttaaaactttttcgtgctaatcagcctattttttgcacaagtttttgc

SEQ ID NO: 18804 - DNA, 234 bp, Glycine max
  Clone ID: LIB3106-089-Q1-K1-C11
aaaaaaaaaaaaaaaaaaaaaaaaaaaaaatttaaaaaaaaaaaaaaaaaaaaagaaaaagagaaaagtggaactaaaaaagagggaaatgcctatagtaatagaaagctagctggtactaaagattatgcgttcttgggtttccatccaagtcagctgaatccctgctggctgtgtcgtgccagtcctgtgcaagtaaggcgaattgtaaatccgtgtttcttacttttgaat

SEQ ID NO: 18805 - DNA, 242 bp, Glycine max
  unsure at all n locations
  Clone ID: LIB3106-089-Q1-K1-C12
cccacgcgtccgcccacgcgtccgttctctctcacaccgctttagaaactttcctaaaccgtgctctgcattttcccttgtctcttcctttctctctctacaaagagtgtgtgtgagagagagaaggatntggaattttggataactagagcgaaagcgtgacaccaccaaaaaccgaactggtcccagaactctctctctctctctctccttccaccaatcaaattccaattccaaaccct

SEQ ID NO: 18806 - DNA, 124 bp, Glycine max
  Clone ID: LIB3106-089-Q1-K1-C2
ctagatcgcgagcggcggcccttttttttttttttttttttattacaattacatacactaagtttcagaaaagacaatgctatcctataaacaatattggaatcgcgaacacacatatacctca

SEQ ID NO: 18807 - DNA, 451 bp, Glycine max
  Clone ID: LIB3106-089-Q1-K1-C3
aaaaaattgaatggccatggaaaataaaaaaattatagagtattgggttgtgtctatactgtgcatgcttttgtcgggtcattggatctctgttcaagctgcccctgcaccctctctcatcacacaactccctggctttaacgccaatttcccatccaagcactattccggatatataagtattgatggaaatactgaaagtgggaagaacctgttctactacttcgttagttcagaaagaagtccagagaaggacccagttgtgctatggctgaatggtggacctgggtgctccagctttgatggctttgtttatgagcatggaccattcaactttgaggctgcaaattcgaaagggaatctacccactttgcatatcaatccttacagctggtctaaggtttccagcgttatatatttggattcccctgctgggggtgggttctcttac

SEQ ID NO: 18808 - DNA, 408 bp, Glycine max
  Clone ID: LIB3106-089-Q1-K1-C4
gtggtagtggagttgggtgagaatgggaatagcaggtaaggttggggattatgctttcaaggcattcaccgccactcttggagtcgccactatttacctcactgcaaccttctctgtcaacgtttacagaggcctctcttggcacaatgctcaaaccaaacttgacaaacaagatgctgatgagcaagcaccgtgacttgatctcataagcccaccatcttaaatttcaaatcatgttgtgtagaaatataatgtgagtttctttcttacaatttttcacttaattagccaataattaaatggaaaatcacgagtaataacctagtaaattggcaaaagtagattgtggtttttgatagattgtacttatacattattatttgtttacgtgttatatggacttcctgg

SEQ ID NO: 18809 - DNA, 427 bp, Glycine max
  Clone ID: LIB3106-089-Q1-K1-C5
tcttcctgcattacagctgttgatttcttcaatcaggtgaatctgctttatggtacccttacagagttctgtactcctgagaattgtcggacaatgtctgcaggacccaagtatgaatatagatgggcagatggtgtacaaattaagaaacctattgagttttctgctccaaaatatgtagaatatctaatggactggattgaagcacagcttgatgatgaatccatattcccacagaagcttggttcaccatttcctcccaactttaaggaagttgtgaagacaatattcaagcggttgttccgtgtatatgctcacatataccattctcactttcagaaaattgtgagcctcaaagaagaggcccacttaaacacttgcttcaagcattttatactcttcacctgtgagttcgggctgattgaca

SEQ ID NO: 18810 - DNA, 447 bp, Glycine max
  Clone ID: LIB3106-089-Q1-K1-C6
atgggataaggagatgaagtgtggttcaaaagaagaagagcaggatagtgtttagttggtcatctgtggatggcatattgcattccaaactcaccatcactccagggttggaagacaggtccatgttgtttattcggctggaacataggcaagaatagagttaatggcaaacctcagattaagtaccatgatattgatcttacattcccaacttctctggtcgacaaaacatttttgagagggaaggagctcaaatgctgctatagggctacaattgatggattcagtgcaaccaatttccacgaatgttgtgacttcaagggcccatgtgtgataatcggctatacaaacaagtctttcaagtttggtgcatttaaccctgaagggtatagaagcacagatgactactacgacacatttgatgcctttctattttactggatagac

SEQ ID NO: 18811 - DNA, 208 bp, Glycine max
  Clone ID: LIB3106-089-Q1-K1-C7
aaaaaaaaaaaaaaaaaaaaaaaataaaaaattaaaaaaaaaaaaaaaaaaaaacaggaaagggacaataaaaaaaaacactaataccacaactaacttgcaattatacccccaattttaaatagccactcttgaataaacttaactggtcggcaacccaaaatgccctaggctgaaaaaccccttgggagctccatcttactccctt

SEQ ID NO: 18812 - DNA, 448 bp, Glycine max
  Clone ID: LIB3106-089-Q1-K1-C8
cacaaaatggtttcacattcaataatgctagttcagtagtttcattgtgagattcagcattgcagctgtttgatttgttcttctctacactacttttgttgaggttgttgttacttgtgaacagtgcttcaaaccttcacattgcctaaactaagagcaatgcatcacaaaatggtttccatttcattaatgcttgttttttttttttttttattcgtaggaatcaaatatagtataagtggatttacaacactcacacgctgccaatgagctggatccccttggtattaatgctagtttcactgtgagattcagctgtttgatttgttcttctcaactacttttgttgaggttgttacttgtgaaaagagtgcttcaaaccttcacaatgccaaatacatatttcccactaaggtgggagagcactggggaccaatggtggtatgca

SEQ ID NO: 18813 - DNA, 175 bp, Glycine max
  Clone ID: LIB3106-089-Q1-K1-C9
ctcacacgttcgctctttctctctctgtcttagctatgcaaacctagagactctactctgggcctatgactatccctaaggcatcctcctacatgaccatcggcggttaacgtggccgcctcatcaccatcgagctgtatacccacgtgactgatagcaccttcgagaactttcg

SEQ ID NO: 18814 - DNA, 411 bp, Glycine max
  Clone ID: LIB3106-089-Q1-K1-D1
cccacgcgtccggagagcaaaacatattattttcattttcatctttatttgagtatcaacaaatggcaaccactgtgatgaccactctcccccaattcagtggtcttagaccccaattctcagctgcccctgtgaagaacttggttgctgtgcaacccatgagtcgcaaggggaagggtgcattgggagctcgatgtgactacattggttcatccactaatctgattatggtggcttctacaaccctgatgctgattgctggaaggtttggattggctccatcagcaaacaggaaagccactgcagggctaaagctggaggtgagggactcatgcttgcagactggtgaccctgctggcttcacccttgctgacaccttggcctgtggatctgctggccacatcattgggg

SEQ ID NO: 18815 - DNA, 356 bp, Glycine max
  unsure at all n locations
  Clone ID: LIB3106-089-Q1-K1-D10
ataaaataacttcattatatataaaactaaaaaaagtacaatgacaaagatgattgactaattagtagaacacccctctcatacctgtttaggaaagggagtaacatataggtttcttcatgaaattaataattgaactaatttcatggtagagaacaagatggtattagtctagtgacaacccaactgtagtaggtgctgcccaaaacatagaaatggccatatatatatatatatatatatagtttatagttccactttgagtagtatatatgaaattgtaggtgaaattatgcttatattttcaattttcaggggcatttgggtcctncacgcttggtcttncagttattgta

SEQ ID NO: 18816 - DNA, 365 bp, Glycine max
  Clone ID: LIB3106-089-Q1-K1-D12
ctaggatttcggccgtttgctccccaaggatagaagcagagtgtttcttttgaaatcagctagaaaagatgtcaggtgaagaggtagctgttgcagctgaggcacctgctgcttcaattccaggtgagccaatggacatcatgactgctctacagcttgtgctgagaaaatctctggcctatggtggtcttgcacgaggtcttcatgaaggtgctaaggtgatcgagaagcatgctgcacagctctgcgttctagcagaagattgtgaccaacctgattatgtgaaactggtgaaggctctttgtgcagagcacaatgttagccttttgacagttccaagtgcaaagacccttggagaatgggct

SEQ ID NO: 18817 - DNA, 417 bp, Glycine max
  Clone ID: LIB3106-089-Q1-K1-D2
gaattttccaggagtgccagtgtctggaatattttgtggtggagaaatggtgcgtccttgtaccactgtgattggtcaatgtgaaggagcaagccccattagttgctgtctgcatgtgtacagcactgtctacttagcaatgtcgtatactcccccctctgtggaagattagctgctggtcatatatatatttttttttcaaggtgtaaatttcttatttcactaggatgcctttttattctctgccgtggacatggatctgactatcttttggcgtatcagatagtttatagtatttaatggttatgaaatttatgctatgctatatgcagtttttggttattattaaagaaaaagtgacttcacaccttctgaagccgaagttctagaaataagaagctcaagaggatgtaattt

SEQ ID NO: 18818 - DNA, 412 bp, Glycine max
  Clone ID: LIB3106-089-Q1-K1-C1
cccacgcgtccgcccacgcgtccgcccacgcgtccgaacacaacacaattacacacacgaatgttccttagttaggcattgctttgcgatggaaaaaatggaactggcagagacacctctacctttgctttcactaaaccacgtttcttttgtatgtaagagtgtgagtgagtcagtgaaattctatgaggatgtccttggatttttgctcatcaagaggccatcttctttcaaatttgaaggggcctggttattcaattatggcattggcattcacctgttggagtcagaaaaggttccggtgaaaaaaagagagatcaacccaaaagaaaatcatatatcgtttcaatgctcagacatgaaagttataatgcagaaactggatgcaatgaagattgagtatgtgacagca

SEQ ID NO: 18819 - DNA, 375 bp, Glycine max
  Clone ID: LIB3106-089-Q1-K1-D3
tgcgtgctgagtgaaaatggtgcgacccttgttctccaagaggatcgtgcagaagctcttcaagaaggtcatacgcccccacagtgatcgcaagatctgcgtcaagccaagctggcgcatacccaagggtcttgattctcgcgtaacgagaaagatcaaaggatgcactttgatgcccaacattggatatggttcaaacacgaaaacccgccattatttaccaaatggtttcaagaaatttgtcgtgcacaatgtgaaagacctggaacttctcatggtgcataacatgacatactgtgctaagcatgctcacactgtatgcacttagattaggaacgacgtatttgatagagctgctcagcttgatgttgtctt

SEQ ID NO: 18820 - DNA, 84 bp, Glycine max
  Clone ID: LIB3106-089-Q1-K1-D4
gggtaagtcacctaagacactccacgtacctacgttgttgactcttaccggctttaataaatcttctgcccttgttccatattt

SEQ ID NO: 18821 - DNA, 450 bp, Glycine max
  Clone ID: LIB3106-089-Q1-K1-D6
ctggaatgaaggctttggatatgaatgctgtagttagttagctatgtgggcacgatggaccttttggcgccaccggggttaagaggttgaagagtattggcatgattgatagcgttcctggaatgaaggctttggatatgaatgctgcagaggatgctattgtgaggctcacgagggagattgtgcccggcatgattgtcaccggcatggaggtggcagaaattgatggctccccaaggatgggtccgacgtttggggcgatgatgatatcagggcagaaggcggctcatttggcgttgaaggcgttggggaggaacaatgcaattgatggaacgtgtggagttggaagggaagaaccccagcttattttcgcttctgcagacactgaggaaattgttgatgcttaaacttactttcaaattagctagatatatagcttttcttttcttt

SEQ ID NO: 18822 - DNA, 326 bp, Glycine max
  Clone ID: LIB3106-089-Q1-K1-D7
gttggcgaccatatttacactgatgtcagtctatcaaaagtccatctgcgatggcgaacaggattgatttgtcgagaactggaagaagagtacgatgccttgattggtagccgcagttatagagaatcattggtggagcttattaatcaaaaggagattgtaggggatctctttaatcaacttcggctggctctgcagaggcgaagcaaagaccgttctgctcaaaccctagcagcaactaacttgaatgatgaagacctcactgatagcatgcaaaagctacttattgttatgcaaagactggatgagaaaattgctccaatgct

SEQ ID NO: 18823 - DNA, 432 bp, Glycine max
  unsure at all n locations
  Clone ID: LIB3106-089-Q1-K1-A5
gtagttgagaactaagaaggagaagcaaatggcttcctcaatgatctcttccccagctgttaccactgtcaaccgtgccggtgccggcatggttgctccattcactggcctcaagtccatggctggcttccccaccagaaagaccaacaatgacattacctccattgctagcaacggtggaagagtgcaatgcatgcaggtgtggccaccagttggcaagaagaagtttgagactctttcctacctgccagaccttgatgatgcacaattggcaaaggaagtagaataccttcttaggaagggatggattccttgcttggaattcgagttggagcacggtttcgtgtaccgtgagcacaacaggtcaccaggatactacgatggacgctactggaccatgtggaagctgnctatgttttgcactgatgcttc

SEQ ID NO: 18824 - DNA, 434 bp, Glycine max
  Clone ID: LIB3106-089-Q1-K1-A6
gaagagcgatggaaggtgggtacggaaaccgtggttcctctttctcccaatcacgtcgtggtcgaggtcgcggtcgcggtcaaagatttccttcgaatcaatccaaagtttcaagttttgccggaaggggcactccttcttctagtagtgccaacagagcttctgcctctgttatcagtaacacgcaagaagacgacgcacaaccatcttccaattttgttggaacatgtccttacatgtgcccagaaagagagaggatccagcgtgaaaaactgcgagatttggcaatttttgagaggctacatggaaatcctggaaaatcatccccagctcttgctgtcaagaagttttgcagaactatatccaccaaatatgttcaagcatcagatatgcggcctattacttgtttggaagacactttaaattaccttttg

SEQ ID NO: 18825 - DNA, 420 bp, Glycine max
  Clone ID: LIB3106-089-Q1-K1-A7
gaagagcgatggaaggtgggctcggaaaccgtggttactctttctcccaatcacgtcgcggcctacgtcgcggtcgcgcacaaagatttgcttcgaatcaatccacagtttcaagttttgccggaaggggcactccttcttctagctactgccaacagagcttgatgcctctggtatcagtaacacgcaagaagacgacgcacaaccatcttccaattttggtggctcatggccttacatgtgcccagaaagagagaggatccagcctgcactactgcgagatttggcaattattgagaggctacatggaaatcctggacaagtataccccgctcttgctgtcgagatgatttgcagaactatatccaccagatatgctcaagcatgagatatgcgagctattactgttatggaagacac

SEQ ID NO: 18826 - DNA, 449 bp, Glycine max
  Clone ID: LIB3106-089-Q1-K1-A8
gattccactcagtgaattatgaagtgatctgaaatcacccgcgaagccgttaggataaggcaaagagagagaaacaaagcggcttccaatggcgactctgcggctcaccttctccgactcaaccaccttgttcaggccttctctaccttccacgcgaaccttctctcgaaaccgaagcctcattgtcaaagcctcttcttctgaagacgatttctccagaagcagcagaagacgcttcatcgccgaaaccgccgcactctcggtctcgctccctcagttaacggcgcgttctgaagacgcgctttcggagtgggagagagtgtacctccctatcgaccccggcgtcgtgcttctcgacatcgcttttgtccccgacgaccccaaccacggttttcttctcgggacgaggcaaaccattctggaaacgaaagatggaagaaacacttggg

SEQ ID NO: 18827 - DNA, 325 bp, Glycine max
  unsure at all n locations
  Clone ID: LIB3106-089-Q1-K1-A9
gcacgccatcatgaggaggacgggactccccgcgcgtgacctgcgtatattggaccctctgttgtcatacccttctacccttctgggtcgtgagagggccatcgtcatcaacttggagcacatcaaggccatcatcaccgnccacgaggtcctcctcctaaactcccgccaccaccaccagactctggccgatgccaaccccaaccctgacgacgccatcaagattctccccttcgagttcgaagcccttgaggcctgtctgaaggccgctggaaccgccttgaaaaacgaggctaaaactttgaaccaggaggctaatccggcc

SEQ ID NO: 18828 - DNA, 375 bp, Glycine max
  unsure at all n locations
  Clone ID: LIB3106-089-Q1-K1-B1
cccacgcgtccgatcgaccactcccaaaccctagccttcacgcgcgcgctcctcaatgccgccggcaccgtcttcttcaccggcgtcggaaaatccggcttcgtcgcgcacaagatctcgcagacgctcgtctctctgggcgttcgctccgcgttcctctcgccggtggacgctctccacggcgacattggaatcctcaccaatcgcgatgtgctcatcctcctcagcaagtccggcgccaccgaggagctcctccgccttgtgccgtgtgcgagggccaaaggcgcgctcctcatcgcgctcacctncgttgaaggcaacgcgctcgccgcggcgtgcgacatgtccgtgcatttgccgctccagagagagctc

SEQ ID NO: 18829 - DNA, 308 bp, Glycine max
  unsure at all n locations
  Clone ID: LIB3106-089-Q1-K1-B10
cccacgcgtccgcgagataactagaaacagtgtgatgaaaatgaaggtccttgttttcttcgttgctacaattttggtagcatggcaatgccatgcgtacgatatgttccctctccgaatgaacactggctatggtgcccgtactccggaggtgaaatgcgcaagttggaggcttgctgtggaagcacacaacatctttggctttgagaccattcctgaagagtgcgttgaagcatcanaggaatacatccatggcgaacaatatagatcagactccaaaacagttaaccaacaagcttacttttatg

SEQ ID NO: 18830 - DNA, 139 bp, Glycine max
  Clone ID: LIB3106-089-Q1-K1-B11
acggccactcgtccgtacatcgttggtgaatgttataaagcctgacaagatgtttggccctcggtagagttgacaaaggtccaagacgtacataatgctacataatgccgtgaccagtgactaagctgacctatctatc

SEQ ID NO: 18831 - DNA, 256 bp, Glycine max
  Clone ID: LIB3106-089-Q1-K1-B12
ttcatccatagacatggccaccgtcacttctgcagccgttgctattccctcattcactgggctcaaggcaagcgcaggcaaagtgagtgccgcagttaaagtctcagctccccaagccacaaggttgggcatcaaggcttcgctgaaagacgttggagtcgctgttgtggccactgccgcaagtgcagtgctggctagcaacgccatggccattgaagtgttgctgggtggtgatgacgggtctctggctttcgtt

SEQ ID NO: 18832 - DNA, 454 bp, Glycine max
  Clone ID: LIB3106-089-Q1-K1-B2
ccagaggttacttctgttgatctccatcaacattttcattctcttaatgccggaactattgaagatgttagggtgcaacgagacaaaggttttgggtttgtgagatacagtacccatgctgaagcagctcttgctatacagatgggtaatgctcgaattctatttggcaaacctatcaagtgttcatggggtagcaagcctactcctccagggactgcctcaactcctctcccaccacctacttctgcgaatgtgtcgggattttctcttgctagtcttgcagcttatgaacgccaaatggctttgagtaaaatgggtggtgcacatgcccttatgcatcaacaaggtcaacatgccctaaaacaagtagccatgggaatgggtgctcctggggctggttatgatgcaagattccagaatgttgcgaccacccaacacctaatgtactatcagt

SEQ ID NO: 18833 - DNA, 399 bp, Glycine max
  Clone ID: LIB3106-089-Q1-K1-B3
agaacacgtacgagagcactaagatggaaactcagatggataagtaaatgatttcttcaacgattgctaccactgctaacagcactggcaaccgcatgggtgctggattgactggtctaaagactatggttaacttcatgactaggatgaccaacagtgacactacctatgtcgttagctacattggtagaaaccaatgcatacagcagtggacaccagtttggacaacaaatgtcgagactatgttctacattctatactatgtggatgaacaagatgatgcagaagtggaatacgttgttaagaacctattgatgactggatggaaatcttacttggaacacgagttcgagcaccgttagcactaccgggcacacagatagtaaccaggacactact

SEQ ID NO: 18834 - DNA, 457 bp, Glycine max
  Clone ID: LIB3106-089-Q1-K1-B4
agcacaccacaggaactagaaaatccatacaatcttcaccaccaaaaagaaaataatggcaatggccagtgcaacaactctagccacaatcactgttgtggcggctagccccagtgttggcagcagaaggagtgggaagaggaatgtgaacttcatcagagggttgaattcttttggagggttgaaggctcagaacaatgtgacattactaggccttcctgtgtgcactgagcagtgctttgcaaaggtggtgagctcattgaaatatccatcatcatcatcacgtaaggggagaggtggaggtgctgccttttcaacatgcaatgctgctggtgagattttccagattgcagccatcatgaatggccttgtgcttgttggggtggcaataaggtttggccttcttcgagtcgaagcgtttgtggaagagtctgaatgagaattgcatcaactttta

SEQ ID NO: 18835 - DNA, 445 bp, Glycine max
  Clone ID: LIB3106-089-Q1-K1-B5
ctcctatttccccactaatcacgcaggttttacctggcgtgggttggattgaaacatgtcaggtttgaactggttagtggaatttaatattttaaggtaaaccccatctctttgcggctatttgggggcttgtttccttggggagaaaggtcatccatgtcataggtggcatcccaggtttccaaattttttttaaagtttgattatttttaagaatatcttaagagattatgtctccaatcaggaaatgggttgttggaagatatgtatttcactcctttcatttgatcacatatttcatcctctgtaattgaaaaaaaaaacgagcttttttaggtggggtttgtactttgtactgtggcattgtcaggagtatcttgagagtgaacaattcgttaatggatcaacatagaggtgacgtattggatccggatcatgataggaa

SEQ ID NO: 18836 - DNA, 414 bp, Glycine max
  Clone ID: LIB3106-089-Q1-K1-B6
gaaactggatcccatagactggcttacgtatgagccatatctctgggagaatgagagacagtcttacctacgacatgctgttctctttggtttctttgtgcaactcaaccgtatgtacacagatactgttcagaaactgcctactaattcagaatctaatattctgaggtgttctacagttccccgatttaaatacctccccatcagtgctccagcattgtcctctagagggacaaagaaggcatttactccatcatcaaatgaaatcgctttgagaagttcatggaattcaattacaaatggagatctttctcaaaagataaatttggatgacagttcaagtctgggggtggcagcacccttactgaagtcttttatgccaggtggaaaccaggtccgggaaaagtcctttaa

SEQ ID NO: 18837 - DNA, 346 bp, Glycine max
  Clone ID: LIB3106-089-Q1-K1-B7
gtgagctataagctattctatcgggaggataatcttagatgaagaggtgcgcatgatcttgagcaagttctacaagaacggccatgccatgatctagggctaccaagctgaacgatgatgataatgaaaactggcattcaagacactcttaggagtgaacccacgagcagactggtcggaacccacggatccttgacctgaaagacattcctgagtagcattggaaccaacgcaacactacgtatctgccgaacgcgttagatctgaccctactgcacatgaccggcctgatctcttttatggtactgcactccaagatgctcacgacgacgtagatatgctccct

SEQ ID NO: 18838 - DNA, 435 bp, Glycine max
  unsure at all n locations
  Clone ID: LIB3106-089-Q1-K1-B8
cccacgcgtccgcccacgcgtccggtcttcattgcacaatgtcgacctcttccattaacgggtggtgcctctcttccatctccccagccaaaacctctctcaagaaggccacattaggcccttctgtcttcgcaaccgttagcactccttcttctccttcttcttcttcttcttcttccttcccttctctcattcaagacaggcctgtctttgctgcccctgcccccatcatcaccccaactgtgagagaggatatggcaaaggaatacgagcaagctattgaagaactccagaaattgttgagggagaagagtgaactcaaagccacagctgctgaaaaaaggtgagcagattacagcttctcttggaacatcatcatctgatggcatnccatcatcagaagccttaaacaggatcaaagctgggttcattcac

SEQ ID NO: 18839 - DNA, 321 bp, Glycine max
  Clone ID: LIB3106-089-Q1-K1-A4
cacatgtgtcatgacacgcatcctgacacgctgtccaacgacatgatctaccgctgcagtgcttatgctgacgtatcagggtgaattccacggactagtgatcgcgatggaggtcacgctcggtgactcttaatcataacacaagtggtacacttgtgtaccttacacccaaggagattatgatactgagagattcatgctttattgacatggccataatattgactatgacgcgaaggtattatccgcttcggatcattacacctgcagaatgtactgattagatggacacgacgagagactcatgccagaagatctata

SEQ ID NO: 18840 - DNA, 399 bp, Glycine max
  Clone ID: LIB3106-088-Q1-K1-G7
tctcacacacagtttgtgtcactcttttttttaattttaattttttttcatttatttttttgcattttcttgtgttcttcaccttgagagggtcctctgttctgggctctgttttctaattggagcttgggcaccgaaacaacatgggttggttttgttgcccagggaaatcaagcaaaaaatcggttaccgaagactacagcgacaccctcaaccagaaacccatcaatttcactgccacagatagtgtcaaagttgatttcagagtgaatgggaataaggaagatggttctaaaggtgatcaacttgctctggacgtaaagagtttaaatttgaaagaggaggcttctcaggatagaaaagataatggtaatcgggcacagacattcagttttaatg

SEQ ID NO: 18841 - DNA, 416 bp, Glycine max
  unsure at all n locations
  Clone ID: LIB3106-088-Q1-K1-G8
cccacgcgtccgcggacgcgtgggccgccgcaactcactgtcttccttctctagggtttttagctcccccaatttcttcgctcaacatggttcttcaaaatgatattgatttgctaaatcctccggttgagcttgagaagaggaaacacaagctcaagcgtcttgttcagtcaccaaactctttcttcatggatgttaagtgccagggttgcttcaacataaccactgtctttagccactctcagactgttgttgtatgcggaaactgccagactgtcttgtgtcaaccaaccggtggccgggcaaggctaaccgagggatgctcctttaggaagaagggagactgagtggatngccatctttttttggttgtgattggagagtttcagtaatgcccttctttgttttggtatgat

SEQ ID NO: 18842 - DNA, 456 bp, Glycine max
  Clone ID: LIB3106-088-Q1-K1-H1
ggtcgaaggaaaacagaagcaaatcaaaagtggataatggctacgttatcgctttgcatagccatgacaggacccactccctcaggttatctcattctcactgacccaaaaccatcttcgttctctttgaaccttacccgcacttgctccaccggtcgctctccgcttctccattgctacttcctctcttctccttccattctctctcccccttcctccatttcaggcttgtcacttggattggatttgacatctaattttgggaccagaagaggaaaaggttctggccttgatgtgagggcaggcaaggctgctctttgcctgactaagagaagcagatcaagaaaatcattggcacgcactcatggcttccgcaaaagaatgagcacaccacgtggaagagcttgtttaaggcgaccactcgccaagggactgagagtcctatgcaccaagacg

SEQ ID NO: 18843 - DNA, 388 bp, Glycine max
  unsure at all n locations
  Clone ID: LIB3106-088-Q1-K1-H10
cccacgcgtccgaagagaagggctacacaaacacaatctctaatggcactcaggatgtgggcttcttccactgccaatgcactcaaactctcttctgtctccagacctcatctcttgcctcctttttctttctccagatgcttatcttccgtcttggatggacttaagtacgctgattcacatgaatgggtcaagcacgaaggctcagtcgccaccattggtatcactgaccatgcccaggaccatcttggagaggttgtgtatgtggagctgccagaaccaggtggcacagtttccaagaagtctggcttcggagccgttgaaagtgttaaagcaacaagtgatataaactctccaaatctcgnggagatcgttgagggttacaaaa

SEQ ID NO: 18844 - DNA, 326 bp, Glycine max
  Clone ID: LIB3106-088-Q1-K1-H2
tgatgctaacaatttaaaaatggaacacatcaccgtcttggaacaagctgttgatgtctatggcatggagttggaaaggttttggacatttatcagtgaggtctttgcaaatgcacctttctttatttcagcagaggttgctggtgcattggaagcaaggaaaaatgatgactacaaagagataaatgttccagctgggaaaacttatgaaggtttactttctggtgatgctggaaactcatacattgcgtgggatttttcattggtacaaggcaagattaatatggatattggatttagcttggagtttgtaagtcctactgggg

SEQ ID NO: 18845 - DNA, 418 bp, Glycine max
  Clone ID: LIB3106-088-Q1-K1-H3
cccacgcgtccgctctttttcttctctctcaacaacttcaccttcttcctcctcgatcatgtgtcacttcaagggcaagtaccatgatgagcttatcgccaatgctgcgtacattggcactcctggaaagggtattcttgctgctgatgagtcaacagggacaattggcaagcgtttggccagcatcagtgtagagaacattgaatccaacaggcgagctcttagggagctgcttttcactgctcctggtgttcttcaatatctcagtggtgtcatcctctttgaggaaaccctctaccagagcacagctgcaggcaagccctttgtgaatgtcttgaagggaagctggtgtgcttcctggcatcaagggtgacaagggcacaatcgagcttgctggaactaatggagaaaccaccac

SEQ ID NO: 18846 - DNA, 429 bp, Glycine max
  Clone ID: LIB3106-088-Q1-K1-H4
aatttcattttgactctctctctctctctgattgcttccttttcccttttattttgctctcgtctctgcacaacaattccttctcattccagatattccaaccatcgaccgatctcaattctcaaccttaacctctcagaatgtcttacgcttatctcttcaaatacatcatcatcggtgacaccggagttgggaaggcttggcttctactttaattcacagaccagcgctttcaagccgttcattacttgaccattggtggtgaatttggtgccaggatgatcacaattgattacaagccaatcaagttgcaaatattggataccgctggtcaagaatcattcagatctattacaaggtcttattatagaagggctgcacgtgcacttgcttgttatgatataaccaggagggagacatttaatcact

SEQ ID NO: 18847 - DNA, 319 bp, Glycine max
  unsure at all n locations
  Clone ID: LIB3106-088-Q1-K1-H5
atcctgaggcactgaaagtgtgatatggcaagagtcatttcctcttcctgcgcacgcctcggaatgcgcctcttctgcaccaccaccacagccaccgcgttcgccgtcactttacccaaaccctcatcactctccctctcatcgcgtcgattcctcttccctctctcccatgccatcgtccctccctccacccgcgtcgccggaatccggtgccgcgttaaccgcgccggagactcggcgtactcaccgctgaactcggggtcgtcgtcttcgtcgttcagcgaccgnnccccccacgagatggcgccgctctttcccg

SEQ ID NO: 18848 - DNA, 443 bp, Glycine max
  Clone ID: LIB3106-088-Q1-K1-H6
cccacgcgtccgcccacgcgtccgcccacgcgtccgcccacgcgtccgaaaagggctgtacgtacctccaaagggcaagcacttgctgatgagtatggtatcaagttctttgaaactagtgcaaaaaccaacatgaatgtggaagaggttttcttttcaatagcaagagatatcaagcaaaggcttgcagacacagattcaagagctgagcctcagactatcaagattaaccaaccagaccaggcagccagtggtggtcaacctgcacaaaagtcggcttgctgcggttcatgaaaagaatcagtatctgtagcaagaggtgcaggtttctgcaatagcactcttctgggtgctaatgttattctgatgacattagaaagtgggagcatgtatttgtccctctgtatcttccaactgcaaatgtcgtgttttaaaattaatat

SEQ ID NO: 18849 - DNA, 339 bp, Glycine max
  Clone ID: LIB3106-088-Q1-K1-H7
gcagctgatgaatctgtggtaatctcggatgatctagatgtcatgaaagaggggtgcgccaaatcctttgctccctttccaccagggtgtatgtttcacagtgaaggaggattgatgagctttgagcatccaatgaacaagttgaaagcaatgcctagaatagacagtgaaggggccatatgtggagccaacttcaaggttgacaagtacgcaagggtcaacagcatacctcgagtaggaagccaggctaattggatggaatggacccagcattagcccaaaaaataaaatagtttaaatgtggatttagtttttataaatataataaattttctgttt

SEQ ID NO: 18850 - DNA, 282 bp, Glycine max
  Clone ID: LIB3106-088-Q1-K1-H8
gcagtaccttggtcaaaatgaggcctctctagcatgccctcatgggtgttgccctacttccttattgttcaacccttcgccaccccactttgtttgtttgtacttaaactacattcccatttgtttttgctttttgagatttcatcatcctgtatttttggtttctgttttcggacttcaatggaaattaatggatgagaactaatgaataaaaaaaaaaaaacttaaaatttaaacataaataaaacaattaaaaaaaaaaataaaaaaaaaagggcggcc

SEQ ID NO: 18851 - DNA, 405 bp, Glycine max
  unsure at all n locations
  Clone ID: LIB3106-088-Q1-K1-H9
cccacgcgtccgagcgccgcttcctgcatgttgtgtatcgtgttggtgatcttgatcgcgccattaagttttatactgaatgttttgggatgaagcttttgaggaaaagagatattccagaggagaaatatgccaatgcttttcttggatttggccctgaacaatcccattttgttgtggaattaacatacaattatggggtgacctcatatgatattggaactggatttggacattttgctatcgcaactccagatgtttacaaattggttgaagacatccgggctaagggtggaaatgtcaccagggagcctggtccagttaagggtgggaaatctgntattgccttcgtgaaagatcctgatggttatgcttttgagctcattcaaagaccttcaacccctg

SEQ ID NO: 18852 - DNA, 448 bp, Glycine max
  unsure at all n locations
  Clone ID: LIB3106-089-Q1-K1-A1
ccacaccgcatcgctcgtggttccatcctttgtgtctgtctctctcttcggacacaaagcaacactttccatgtccatgtctctgtctcttcttcgtatcttctcttcgccccacctttccacctctctcttctttccaactccaactctttcttccctctgcccttctttcctttccaaattaccaaatgccccctctcccctcattgttttatgccacagggacgcctcagcttcgaagcaaggtcacctcggagtccctgaaggtgcagaacgtgacagtgggagcgaagaagatgatgatgctgttgaacaacccatgagggccagttacgacgacgacgaagacgaagaagaaggagctcttagctccttagtttttcctgaaagatgggatgtattgggtctcggtcaagccatggtagacttctctggcatggntgatgat

SEQ ID NO: 18853 - DNA, 446 bp, Glycine max
  Clone ID: LIB3106-089-Q1-K1-A12
cccacgcgtccgcttgagttcaaacactctcatcttcttattcttctgctttcactctctgactcaatcgttctaatccacaaaaaatgaccttaaattacaacattgccctcgccttctctgcggtgctcacgctgctcctctttcccctactgaccgtaggggagctcgtggaggagcagccactagtcctcaagtaccacaacggccagctcctgaagggccgcatcaccgtcaatctcatctggtacggcaccttcaccccgatccaacggtccataatcgtggacttcataaactcgttaagcagcgcgccaaacgcgcctctcccctcgaccgccacgtggtggaaaaccacggagaagtacaaggtgggaggaggatcccctgcgctcgtcgtaaggatgcagttcctacacccggcttacacgctagggaaaaatctc

SEQ ID NO: 18854 - DNA, 444 bp, Glycine max
  Clone ID: LIB3106-088-Q1-K1-G5
agacattatgctccaaatgtgcctatagtgctggtgggaacaaaactagatttgcgagatgacaagcaatttctgattgatcatccgggatccgcacgaataacaactgctcagggtgaagaattgaagaaaatgattggtgcagtcacttatattgagtgcagctccaaaacacagctgaatgtgaagacagtttttgatgctgcaataaaggttgcattgaagccaccaaagccaaagaagaaaccacgcaagaaaaggacctgtactttcctctgatatttcatattcagttttctttcaccccaaatcatttatagaacagaagtgaagtccagtatttttagtttttttgtgatctatatatataaagagcctatggatttatggataatttctgttaagaacattagattcctctcaaattgtataccgatagtgttg

SEQ ID NO: 18855 - DNA, 405 bp, Glycine max
  Clone ID: LIB3106-089-Q1-K1-A2
gagacctcgaagtccatcccaaggacacatttgtgttcagtatagatggcaccgtactctctaatattccatactacaaaaaacatggatatggggtggagaaatttaactcgaccttgtatgatgaatgggttaacaagggcaatgcaccggcactgcccgagactcttaagaattacaacaagctggtgtctcttggcttcaagattatattcttgtcaggaagaacactggacaaacaggccgtaacagaagcaaacttaaagaaggctggctaccacacatgggaaaaattaattctcaaggatccacaagatccttccactccaaatgcagtttcatacaaaacagcagcgagagagaaactgataaggcagggatacaacattgttgggatcattggag

SEQ ID NO: 18856 - DNA, 61 bp, Glycine max
  Clone ID: LIB3106-088-Q1-K1-E7
tcgcaagctgacattcaatgtcacaaatttgaatatccatcaaaaaaaaaataacagaggt

SEQ ID NO: 18857 - DNA, 421 bp, Glycine max
  Clone ID: LIB3106-088-Q1-K1-E8
gttgtgactcgttcttcttcgtcgttatcttcttcttttgttgcttgtgtgtgggtttttgctctcacctgaaaatgtcttgctgcggtggtaactgtggttgcggaagcgcctgcaagtgcggcaacggctgcggaggctgcaagatgtacccagacttgagctacaccgagtcaaccaccaccgagaccttggtcatgggagtggcaccagttaaggctcaattcgagagtgctgaaatgggtgttcccgctgagaacgatggctgcaaatgtggagctaactgcacctgcaacccctgcacttgcaagtgaagtgttggagagctaaagcttcaagcagagatggcccttagaaataattgataaaactatatgtagtttcaaaacttcaaaattatgtagtatgtattatggtgcac

SEQ ID NO: 18858 - DNA, 433 bp, Glycine max
  unsure at all n locations
  Clone ID: LIB3106-088-Q1-K1-F1
gaagaacgctcgctcgcactgtccagatcttaatcaagaggagtgagttttgtttttccaggcatgacgccgctgatcctgcatgctgggaaaaccaacaaaaattcttacaagacactcattgcagccgagtatgctggcgtccaagttgattttgcccctaattttgagatgggtgtctccaataaaactcctgaatttctcaagatcaatcctattggcaaggttcctgtgctggaaacccccgatggtccaatattcgagagcaatgccattgctcgctatgttacccggctgaaaggtgataacactntgtatggatcttccttgattgaatatgcccacattgaacagtggattgatttttcatcattggagattgatgctaatattatcaagtggtatgccccaagagttggacgaggaccatatc

SEQ ID NO: 18859 - DNA, 405 bp, Glycine max
  Clone ID: LIB3106-088-Q1-K1-F10
cccacgcgtccggtcccgagtgctaaacctgagttgtgtctcaagttgctcttgttcttggtttcttttctttcaccctcaaaatttctcactctctttatcttcaccttttcagtttaaagcttcagatcacaacagatccaccattcacctcaccactttctcttcacaaggcaaatctaacaagaaaaagtagtctctgaagccgatccagtgtcttgtgaatttggaattggtggtgaatttagatctaaaaagccatagcaatgtcttttatcggtacccagcagaagtgcaaggcttgtgagaaaacggtttatccagttgatcagctttctgctgatggcactgcttatcacaaagcttgcttcagatgttctcactgcataggaacattaaagctga

SEQ ID NO: 18860 - DNA, 405 bp, Glycine max
  Clone ID: LIB3106-088-Q1-K1-F11
ctgattcgtacattctttattggtcctcttgctcctagtctcacgtgaacaaagaacatggtcattatggtgatggtcggattgggactattggacttactcgttgccggtgtttcattaatcattggtttggccttcattaccttgattgcttccattctctgctgccacagcgttattcaacaacaccaaggatgtcttgtactgagtgctgaatcctcaaatcgatgcacaggagacattcgtgtatatcattgatgcaaacttggaaggaaaatggagatggagacaaggcttcgaatacatgagtaacattgaccaactatgctacacctagagacaccattttggaatacacttgatacctatttcagtttgaatatttccatagggcatcatgcatat

SEQ ID NO: 18861 - DNA, 414 bp, Glycine max
  Clone ID: LIB3106-088-Q1-K1-F2
caattctgaatttgcgggttttggatttggacttggtcgtcaacacagtctaattaatatggttttgctccttcgcttatgaatcttcttcttcttcttcttcttgttcctgcaacgcactgaattcgatcaatcaatccatcttcaattgctttgtttcgatcggaggaaaatggccgatcagttatcgaagggagaggaattcgagaaaaaggctgagaagaagctcagcggttggggcttgtttggctccaagtatgaagatgccgccgatctcttcgataaagccgccaattgcttcaagctcgccaaatcatgggacaaggctggagcgacatacctgaagttggcaagttgtcatttgaagttggaaagcaagcatgaagctgcacaggcccatgtcgatgctgcaca

SEQ ID NO: 18862 - DNA, 443 bp, Glycine max
  Clone ID: LIB3106-088-Q1-K1-F3
caaactaacgtttatttatttggacattttatttcacttcaagttcatatcgggtctacacagagacataactcaggttgctagagtggttttctcacaaccatcgtgcacacaggccaaaacatctctgtagtctcttgaaatggtaaaggaatcatagacctttccatcactacttctcttgtactcaaacaagagatatgaatgattgaatgccagtcaatttgccaaacccatagtcgagagatccctgtaaagactccaaatagggggtgttggtgtgaagtctgacaagtgacttcccccaccaccaacaaccacatgaattgttccgttcacagtgccagagtaattgatgcttttcttgattcacacattgattctgataaatggggcacattctttcatagttatggacgtgaccataaaaatggaatttctac

SEQ ID NO: 18863 - DNA, 448 bp, Glycine max
  Clone ID: LIB3106-088-Q1-K1-F4
ggctcttgtaagcatttcctctgttttcaactgcaaaattataactgaatcttttaactgtgtgcgtgtgtgtgtttgtgtatacgggatgcaatgctagcaacaccctgatctgaaaggtgcaataaggttatgaatgaaaccagtgacaaaagctgtagatgattgtgttaagctatgagatctgagggcttcaaattccttttctccttccggatttcatccttgtgtctctttacttttgttgtctttaaattatatgtacatcaatgtttcttttattcttttttattttatttgtttattgttggctgtgttaattatttttcatatttagtggttggccttagcagttttaactgtactattgattgacctgcaaatctgcaatcatgcccaatgatgtatagagacttttgaatgaatggcttcatgggtttgtaatttt

SEQ ID NO: 18864 - DNA, 454 bp, Glycine max
  unsure at all n locations
  Clone ID: LIB3106-088-Q1-K1-F5
cccacgcgtccggatcgagataactagaaacagtgtgatgaaaatgaaggtccttgttttcgtcgttgctacaattttggtagcatggcaatgccatgcgtacgatatgttccctctccgaatgaacactggctatggtgcccgtactccggaggtgaaatgcgcaagttggaggcttgctgtggaagcacacaacatctttggctttgagaccattcctgaagagtgcgttgaagcaacaaaggaatacatccatggcgaacaatatagatcagactccaaaacagttaaccaacaagcttacttttatgccagagacctcgaagtccatcccaaggacacatttgtgttcagtatagatggcaccgtactctctaatattccatactacanaaaacatggatatggggtgggagacaattaactcgancttgtatgatgaatggggtaacaa

SEQ ID NO: 18865 - DNA, 203 bp, Glycine max
  Clone ID: LIB3106-088-Q1-K1-F8
ctcaagcgagccaccacacgagccggtacggtgcgaacacgcgatccaacaatcactgccgggtcatattgtaactggagaacggctccgtctttctgatccttaggtccttctcatcgaatcatcatcaatgatactattacatcggaataggaccatgatgtgtccgtagagactgggcaatcacattcaaggatctagga

SEQ ID NO: 18866 - DNA, 272 bp, Glycine max
  Clone ID: LIB3106-088-Q1-K1-F9
atatgccatcaactatttcgctataaggttataatgtggttatgcaaaaaaaacaaacggggacaaaaaaaaaaaaaaaagagaaaaacctaaaaaaaaaaacaaaaggccgaccgcttctaaggttccaacccttcaatacccttgctttacccgtcctaaatcttttgcagcacaacctacatttaggccactggccttaatgcttacaacgtcctgaccggtaaatccttgccaccactttacttactcgatttgcaacgcaacccccc

SEQ ID NO: 18867 - DNA, 445 bp, Glycine max
  Clone ID: LIB3106-088-Q1-K1-G1
gatcgagataactagaaacagtgtgatgaaaatgaaggtccttgttttcttcgttgctacaggtttggtagcatggcaatgccatgcgtacgatatgttccctctccgaatgaacactggctatggtgcccgtactccggaggtgaaatgcgcaagttggaggcttgctgtggaagcacacaacatctttggctttgagaccattcctgaagagtgcgttgaagcaacaaaggaatacatccatggcgaacaatatagatcagactccaaaacagttaaccaacaagcttacttttatgccagagacctcgaagtccatcccaaggacacatttgtgttcagtatagatggcaccgtactctctaatattccatactacaaaaaacatggatatggggtggagaaattaactcgacctgtatgatgaatggttaacaagggcaat

SEQ ID NO: 18868 - DNA, 294 bp, Glycine max
  Clone ID: LIB3106-088-Q1-K1-G11
caacttagtagtggtaagaaggatgaacgcgcgcacactcacatgcacatagacagcgtcggtggtgttgaattttcctcaaagaggatgtgtaaacttgtgcgatatgccgtcgtcttcaaccttgcccgatcgcggcggttctacgacgggattcctggtccgtgcattgttcacaagcgcggtgccgacatacttcatgacccctggttcaacaaggatacaaggtttactttgactgaaagggatatgtaggggctttagggcctcttatcttctcgtgttttatccttt

SEQ ID NO: 18869 - DNA, 330 bp, Glycine max
  Clone ID: LIB3106-088-Q1-K1-G12
cccacgcgtacgtacttaataggaaaagatgaaaggagtcacacagtaagcccagctctggtctgctacaattctctaacaatggcgacggctttcaaaatggcgactactgtgatgtgagtgacggatgagtgcacgaactcattcatgggaatgaaacgtaagatggtgcacagatacatagtctgcaacatcgatcagaagacagggctcggcaccgttgataaggtcgatggccccggcgagagctatggagatctcccatgcctgttgctcaacgatgattggatcaaggctgcggtcgactttgaattggtgaccgctgataac

SEQ ID NO: 18870 - DNA, 469 bp, Glycine max
  Clone ID: LIB3106-088-Q1-K1-G2
cccacgcgtccggcaagcaaaaagaaagaatcccaggcgaggagaaagatggaggggaaggggcaggatgtgtcgttgggagcgaacaagttccccgagagacagccaattgggacggcggcgcagagccaagacgacggcaaggactaccaggagccggcgccggcgccgctggttgacccgacggagtttacgtcatggtcgttttacagagcagggatagcagagtttgtggccacttttctgtttctctacatcactgtcttaaccgttatgggagtcgccggggctaagtctaagtgtagtaccgttgggattcaaggaatcgcttgggccttcggtggcatgatcttcgccctcgtttactgcaccggtggcatctcagggggacacataaacccggcggtgacatttgggctgtttttggcgaggaagtttgcgttgcccagggcgattttctacatcgtga

SEQ ID NO: 18871 - DNA, 428 bp, Glycine max
  Clone ID: LIB3106-088-Q1-K1-G3
cagagacagagacgcagccatggggcggagacctgcgaggtgttataggcaaattaagaacgagccataccccaagtcacgtttctgccgtggtgttcctgatcccaagatcaggatttatgatgttggtatgaagaagaagggtgttgatgagtttcctttctgtgtccatctggttagttgggagaaggaaaatgtttcaagtgaggccctggaagctgctcgcattgcttgcaacaagtacatggccaaatttgctggaaaggatgctttccacttgagagtcagggtgcacccattccatgttcttaggatcaacaagatgctttcgtgtgctggtgctgataggctccaaactggaatgagaggtgcttttggaaagccacagggtacttgtgctagagtggctattggacaggtgcttcttt

SEQ ID NO: 18872 - DNA, 449 bp, Glycine max
  Clone ID: LIB3106-088-Q1-K1-E6
cccacgcgtccggtagtatgttgagggggctgtttgtgtttggtggcacgtgctgcaggagattgacgttggcacgacagtcgacgcagaaacagaaacagtggtgggatcatcttcatcatcatcttcgctccaaaaaccttcattgggcaggtctcatggagagtaatgggaactcggtgaaggatgctgagaaacaaatcacccgtgttttgttttgtggaccccgtttccctgcttctcatgaatatacaattgagtatttgcaaaatcattcacatatcaaggttgatgttctccctttagaagatgtgccaaaggatattgccaactatcatgtctgcatagtaaaaaacatgaggctagattcagaaataatttctcgtgcagttcagatgcagcttataatgcagtatggcgtttggctggaaggtgttgatattgatgct

SEQ ID NO: 18873 - DNA, 289 bp, Glycine max
  Clone ID: LIB3106-088-Q1-K1-G4
gtggtataggaggaggagttggtagtggtggaggtgctggaggaggcattggaggtggtgtaggaggaggaattggaggtggacatggtggtggagtaggaggaggaattggaggtggtggaggagcgggaggaggctttggaggtggagcaggtggaggagctggtggtggctttggaggtggtgcacgtggaggagctggtggtggctttggaggttgtgcatgtgggggtgctggtggtggttttagtagtggctggggtttttgaacttaaatatagttttaatt

SEQ ID NO: 18874 - DNA, 462 bp, Glycine max
  Clone ID: LIB3106-088-Q1-K1-D1
gtggaaaactcatggagcctattggaaactcttatgagtcttctttttccaaagatgaaagagtggaagctgcacatcttcttgtggaggagttctggttctttgataacttattaaagataacaccaaggatgacaaggtgtcactctgagccttacccttcttccactggcctaatcagccccccagattttttggtgaaggactcaaactcaaactcatcatcaccaagtaaaccactaaacaatggtgctattgtccatcctaagatccagagagcaccatacatgccaccattgagactgagagaagaagaagaagaccaaaaaggaagcagttctacaagaagcaaattggttcaccaaccaacagatcctgttgtgtctcatgcagcaagtaaacctcattgtgcacatatgaaaggacgtcataacagtgattgcggtagaaggaaaagcaaac

SEQ ID NO: 18875 - DNA, 341 bp, Glycine max
  Clone ID: LIB3106-088-Q1-K1-D10
gtcacaaatatttgtggcataacaccgttcttttcatgttcaaagggttcaacatgacgggggtgatatggcgctgacattcacgaagcttgttagccggctcttcgcgaagaaggaaatgcgacttctgatggatggtcttgatgctgctggttagaccactattctttacaagctcaagctcgtagagatcgttactacaagtcctaccattgggttcaatgtttacactgtggaaatcaggaacattatcttcactggtttgagatgtttgtggccaagacaagattcttccttggggatgcactacttccatatctctcagggttttatttttgttg

SEQ ID NO: 18876 - DNA, 437 bp, Glycine max
  Clone ID: LIB3106-088-Q1-K1-D11
ctctctctttgcgctttctgcaaaccgaacatttcatctccaaagggatcaacaggtcgaaggagaaatggggctgacattcacgaagcttttcagccggcttttcgcgaagaaggaaatgcgaattctgatggttggtcttgatgctgctggtaagaccactatcctctacaagctcaagctcggagagatcgttactacaattcctaccattgggttcaatgttgagactgtggaatacaagaacattagcttcactgtttgggatgttggtggccaggacaagattcgtcccttgtggaggcactacttccagaacactcagggtcttatttttgttgtagacagcaatgatagggacagagttgttgaggccagagatgagttacataggatgttgaatgaggatgaactgagagatgccgtattgcttgtgt

SEQ ID NO: 18877 - DNA, 433 bp, Glycine max
  Clone ID: LIB3106-088-Q1-K1-D12
agtagttgagaactaagaaggagaagcaaatggcttcctcaatgatctcttgcccagctgttaccactgtcaaccgtgccggtgccggcatggttgctccattcactggcctcaagtccatggctggcttccccaccagaaagaccaacaatgacattacctccattgctagcaacggtggaagagtgcaatgcatgcaggtgtggccaccagttggcaagaagaagtttgagactctttcctacctgccagaccttgatgatgcacaattggcaaaggaagtagaataccttcttaggaagggatggattccttgcttggaattcgagttggagcacggcttcgtgtaccgtgagcacaacaggtcaccaggatactacgatggacgctactggaccatgtggaagctgcctatgtttggttgcactgatgc

SEQ ID NO: 18878 - DNA, 239 bp, Glycine max
  Clone ID: LIB3106-088-Q1-K1-D2
gctgcagcaacctttaaggagctcttgacaagacataaatctactgtagctgaattcctatgcaagaattatgaatggttttttgcagaatataacactaagctgttggaatcttccaattatattacaaggcgccaagctgtcaagttgttgggagatatgttacttgatcgttcaaattcagctgtaatgacacgatatgtgagctcaagagacaacttgaggatttaaatgaatct

SEQ ID NO: 18879 - DNA, 94 bp, Glycine max
  Clone ID: LIB3106-088-Q1-K1-D4
tttctttatatgggttgtgacaatgtaatcttattgtgatttgtttggttccctggtttggctcgcatttatggttaagctgtagcttgaattt

SEQ ID NO: 18880 - DNA, 436 bp, Glycine max
  Clone ID: LIB3106-088-Q1-K1-D5
gttcaggctatctacgaaggtgtgcacagtttggacattgtggacgcaaattggagataggcgtcccttgtatgacttgcagaccattacaacgggaagcattgcttgaagtagacactttgatgcacacatactaccttgaattgcaaatatctgtctttagaaacgatgtcgtaaagagttgttatctatatgtatgatcaatcatagtatctattaggacattaatcatcggtagtactaagtgtagtcttggcaccatttaattctcaatatagggatcgagttaattttgtgatgttgaatgttgataacacatagtgggagcaagagcttgacgagtttggcgtggagggtattccacactttgcatttctggatatataaagaaatgaggagggcaattgtgtcggtatgctaccaatacaggtcttgc

SEQ ID NO: 18881 - DNA, 300 bp, Glycine max
  Clone ID: LIB3106-088-Q1-K1-D6
cccacgcgtccgcccacgcgtccggttctagtgcagaagcgccatccattgttgtcttccgtttttcattcttactctttttgttttttgcctttttcttcctttggtccttcccatctcatcccccccccccacaccaattcatatgcatatttttctcatgtctccttacatactgttcaatcattttcagttttataggatttgaattgaatgagtccaatatgatttttcttttactcccctgtaattaattaactattggtttggtaagttaatattccaggcaaaaaaggcttg

SEQ ID NO: 18882 - DNA, 261 bp, Glycine max
  Clone ID: LIB3106-088-Q1-K1-D7
ctcttttctttttcttactacttggttttctttcttaccaatctaaatctttgcttcgtgctcttcctcttaccagggaacctttttcaaggacaattcttggttccccaagtgcctaaattcctggggtataactcctggtctaatcttccttaacggacttcttctcttaaaaggtgccaacttgctttttgacccgaaccggtggggggacaaaccataaaccggaccccgggacacgttttcccacacaagctttta

SEQ ID NO: 18883 - DNA, 282 bp, Glycine max
  Clone ID: LIB3106-088-Q1-K1-D8
ccctagcctcttgttgtttgattgagatgacgatggcgttgttagcgggtcagagctccatgtccgcgcttccctttgttaagccaacttccttgagcttcaaacctctcgcctttaccaaatccctagctctcccttcagcacagaggccaacttcgctgaggctgaaatgcaggatggagagcgacggcgacattctgcgggggagcactcgcacggggacgacgctgatgggactcgccgtgttgctgatgaagaaggcggccattccagtgttgaaca

SEQ ID NO: 18884 - DNA, 448 bp, Glycine max
  Clone ID: LIB3106-088-Q1-K1-D9
tggagtttcaagggttaccggaaggttgcattgctagtatactctctcgcactacgccggcggacgtgtgtaggttttccgtcgtatcaaagattttccgttcggccgctgaatcggacgctgtgtggaaacgttttctcccttccgattaccattccatcatttcccagtctccttcgcctctcaactatccttccaagaaggagctctatctcgctctctcggatcgccctatcatcatcgatcagggtaaaaagagctttcaattggagaaaaagagtgggaagaagtgttacatgcttgctgctagagctctcagcattatttggggtgacactgagcaatactggaactggacaaccgataccaattccagggtcccggaagttgctgaacttagagatgtgtagtggcttgaaattcgtgtggtgctaaatacccttggttt

SEQ ID NO: 18885 - DNA, 285 bp, Glycine max
  unsure at all n locations
  Clone ID: LIB3106-088-Q1-K1-E1
cgagttgttacagagaacgttgagagagagtatcttgaatacgatgatcctaaaacggtatgtanaggagaggcttgtgatgatcttggaggaactttttgtgagaccgagtatcagaagggtgtctactagagaaaaaagaaaaccctttttattgccatggctactgcgtttttaatgtctaccagtaatgattgtagtggtgaatgtacataggtataggctatggatctcagtttatattgagtttcattttcgctataaactttacaataattatatact

SEQ ID NO: 18886 - DNA, 357 bp, Glycine max
  Clone ID: LIB3106-088-Q1-K1-E11
ttccactcactacccagaaactagggtttagcgccacactccaatcgtagccgtcgcactctgtgttttctgcgccgtctccgatctccgacaatggcgacccaaatgagcaagaagagaaagttcgtagctgatggagtgttcttcgctgaactgaacgaggttctgacaagagagttggtcgaggacggttactccggcgcggaagttagggttacgccgatgcgcaccgaaatcataattagagccaccagaacccaagctgttctcggtgagaagggaatgagaataagggaacttacctctgtggctcagaagacgttcaagtttcccgagaacagagttgaactttatgct

SEQ ID NO: 18887 - DNA, 360 bp, Glycine max
  Clone ID: LIB3106-088-Q1-K1-E12
gcggtgatttcagtgagtgatcggtggtcacttgatctcatcataatcgtcagcggcaattgaggaagatgccgatgggaaacattgccgtcggaaggcctgaataggctactcacctcgacacgttgaaagctgttctggctgagttcatctcaaccttcatcttcgcgttcgccggctcaggctccggcatcgcctacaacaagctcaccgacaacggcgctgccacccctgccggcctcatctccgccttcatcggccatgcattcgccctcttcgtcgccgtctccgtcggcgccaacatcttctgcggtcacgtcaaccccgtcgtcacctttggcgccttcgtcggcggcaaca

SEQ ID NO: 18888 - DNA, 386 bp, Glycine max
  Clone ID: LIB3106-088-Q1-K1-C9
tttgacactgcggtgtttctgagctgggtagggattactccttctcgcgccagcccagttgcgagcttggaggagaagatccttgccgtggccaacgagtataaggccgtgaaggcctttctggtcgcttacagcaccgttgctgaggattgggctaatttttcgccacctatcttctttatcactctccatggacttctgggtaactctgcggttaagggagcgcccattaaggggattagtgacgccaccgcctacttttccgccaagtggatccctgaaattttatcgttggctgcctctaaatgaatgaagtatgacatgaagggtgaacacgtatctgacaagtgctatgtgatatgtgtgatgcgtgaatcttgaaatag

SEQ ID NO: 18889 - DNA, 361 bp, Glycine max
  unsure at all n locations
  Clone ID: LIB3106-088-Q1-K1-E2
cccacgcgtccggattgaccccatttgtgcccttcaggctctcatggaaggccttcagggtgtgaccttggaggatgttgttgctgaggctgatatctttgtcaccaccacgggtaacaaggacatcatcatggttgaccacatgaagaaaatgaagaacaatgccattgtttgcaacattggtcactttgacaatgagatcgacatgctggggctggagaactaccccggcgtgaagcgcatcaccatcaagccccaaaccgacagatgggtcttccccgagaccaatgtcggcatcattgtcttggccganggtcgtttgatgaacttgggatgcgccacaggacaccctagttttggg

SEQ ID NO: 18890 - DNA, 269 bp, Glycine max
  Clone ID: LIB3106-088-Q1-K1-E4
gcaagctcatcctagagttttaaaaatggcagcagcctcctccatggctctctcttccccagccttggctggcaaggccgtgaagctgggcccatcagcccccgaagtcgggagggtcagcatgaggaagaccgtcaccaagcaagccttctccggaagcccatggtacgggccagaccgcgtcaagtacttgggcccattctctggcgagcccccgtcctacctcactggcgagttcccaggtgactaccgctgggacactgctgggc

SEQ ID NO: 18891 - DNA, 459 bp, Glycine max
  unsure at all n locations
  Clone ID: LIB3106-088-Q1-K1-E5
atgaaaatgaaggtccttgttttcttcgttgctacaattttggtagcatggcaatgccatgcgtacgatatgttccctctccgaatgaacactggctatggtgcccgtactccggaggtgaaatgcgcaagttggaggcttgctgtggaagcacacaacatctttggctttgagaccattcctgaagagtgcgttgaagcaacaaaggaatacatccatggcgaacaatatagatcagactccaaaacagttaaccaacaagcttacttttatgccagagacctcgaagtccatcccaaggacacatttgtgttcagtatagatggcaccgtactctctaatattccatactacaaaaaacatggatatggggtggagaaatttaactcgaccttgtatgatgaatgggttaacaagggcaatgcaccggcactgnccgagactcttaagaattacaac

SEQ ID NO: 18892 - DNA, 372 bp, Glycine max
  unsure at all n locations
  Clone ID: LIB3106-088-Q1-K1-B4
tccatgtcgtttttgtcgttgatgagcgttttggtctgaaactcgacgccaatggtggctggagaatcgacgttgaattgggtcttggcgaagcgcgcgaggagctgggtcttccccacggcggagtctccgaccagcaccaccttgaacacgtagtcgatcttgtggttgtattcgccgtacaggttcgacatcatccccgcggaagaagaattcaatcgccgatcgtcgtcgtcgtcgtcgtcgtcgatcactacgcgagatggaggaaggtggcggtgctgctgccgtcgttgtcgttgtcgctttgatgaaccatcgccttcttatcttctgtctagctaaaaaaaaaaaaatnaaatattaatttat

SEQ ID NO: 18893 - DNA, 215 bp, Glycine max
  Clone ID: LIB3106-088-Q1-K1-B5
agagaaacaaaaacaatgaaggtttccattgccaagttccactcccttcccctatgtttttggcttctcttggccttcaacacgaaacccctcctagcagcagaaccagagccagtggttgataagcaagggaaccctttggagccaggagtagggtactacgtgtggccactttgggctgatgaaggaggcctcacactagttctagatcgcga

SEQ ID NO: 18894 - DNA, 411 bp, Glycine max
  unsure at all n locations
  Clone ID: LIB3106-088-Q1-K1-B6
cccacgcgtccgggaaatggtgttttctgataacgcggcgtcaacgacgacggagagcgattgcggtgagttggagctgattttcggcggggaaatgtcgccggagactgagtgcggccaggtaaagtcggcgacgacgccggcggtgaagccgaagagtgttgagagagggactaaggttgtgaccggattagcctctcttctcaaggacaaaccatagaacaaaaaaaattgtttttttttaattctggatttttaaaaaattaaaatatanagagaaaatatcggatgaggcttctctttttttttctttttttttcccttattaagaatttttgttttcccttctttggttcgcaaggggaaatttgtaggaagtaacttttttctttctttctttaaattttgggt

SEQ ID NO: 18895 - DNA, 307 bp, Glycine max
  Clone ID: LIB3106-088-Q1-K1-B7
tcgggaaatgctaacgaggatgctattaacaggggaactttcttccaatcttgaattggaggcagagcaaacttggcaagtaaatatttctgttcctgaaggttgtgctgatccaagtgctagaagttgtgatgggacttgcgtgtaacattcttagaattctcaatgtcttaggtgcaaagagaagatgccaagtttgagatgattttactatatttttcatattggactgtcttcctctataattttgagttaaagtgtccacttaaattgaaaaaaaaaaaattaaaaatattaattaataatt

SEQ ID NO: 18896 - DNA, 394 bp, Glycine max
  Clone ID: LIB3106-088-Q1-K1-B8
gttcagtctttcttggaactttgttactctcacacatgtctcgctccgtgcctgtggtttgaaccatttttgtcttgcttctgcttctggtggccactgagatgatggggccaacaatggtggcagaagcaagaacttgtgagtctcagagccaccgtttcaaggggccatgtttgagtgacaccaactgtggctctgtttgccgaaccgaacgtttcactggaggacactgccgtggcttccgtcgcagatgcttctgcaccaaacattgttaattttaaaaaattaattaagagtgctttgatagaagatgatagatctatcatcttttaactcgggttgttaattaaccactttgggtttgaaaataagggttacccattctactatgggt

SEQ ID NO: 18897 - DNA, 322 bp, Glycine max
  Clone ID: LIB3106-088-Q1-K1-B9
agtccccacaaggtgtctgtgggaactgacaataaattcagattcctcggctcggagtagaggcacatctagtgttgatgaaggtttttcagttacatttactttgatctcacgccctccaagatcagtgccgctaagtttttcaatcacagcagttgcgtcctcaacagttttcatggtaacgaatgcacagcgacggctccttccacagtatttgtcatacattacctcagctttctgaacagcgccatgctcctgaacaatcttggcaagctcgacattggtgacagtgcagggaatgttgccaacgtagagcctgctc

SEQ ID NO: 18898 - DNA, 458 bp, Glycine max
  Clone ID: LIB3106-088-Q1-K1-C1
cccacgcgtccgcgttgctccaactccagaaggacctcggcaacccttatcacatcatatggtggaacgcaaaggaggattgctgcgagtggttctgctgcgttaagtgtgacgagaaaacaaaccgcgtcattagcgttgccttatcatccccttttccagacaccaatctctcggcccaaatacctccctctgtgggtgacctcccttacctcgagtccctcgtcttccacaaattccccaaactcgtgggcccaatccagcccgcaatcgccaaactcaccaaactcaagtaccttgatctctccaacaacaatctctctggcccaatacccgattttttcgcgcaactcaagaacctcgacgatatcgacctttcctttaacaacctctccggccccataccaagctcgcttggtaaactgcctaaactcgcgtatctagaattgagccgcaac

SEQ ID NO: 18899 - DNA, 122 bp, Glycine max
  Clone ID: LIB3106-088-Q1-K1-C10
gcgttcgatgataaccaggaaagtaaggttaaaatcatgtatgtagatgccaggcttacgtgttacaacgttcaggatatagtatgccgggcttgcttaatctagcatgctgggtgacatga

SEQ ID NO: 18900 - DNA, 450 bp, Glycine max
  unsure at all n locations
  Clone ID: LIB3106-088-Q1-K1-C11
ctcaaaagctgaagactttgcaatatcatccaaaattgatgccattgcatcttctggaacattcactgataactctgttgtgaaaacatcatccaccttgcaagctggtttgaaaaaatctctggtcagccgaccttctaggcaccttggacctcctcctggtttcagtcatgttcctcctaaacaaggttcacccactgtttctgattcaattagtgggaatccaattatggatgattacagttggttggatggatatcagttgcctgcatcaaccaacgatttaggccctgatggtcctcttacttactctcagtcaaatcctcatcaaattggtttgagtgggacagccagttttccctttcctggataacanattccatctacactgcatgtggagaaacagaatggttggcgagatttttagactttggagcttttaaaacacac

SEQ ID NO: 18901 - DNA, 454 bp, Glycine max
  unsure at all n locations
  Clone ID: LIB3106-088-Q1-K1-C12
agagtttgcagactgagtggctcggtgagttagtgagcgaaaacgatagatagcattaccatgttggttggataactgaagtgagtgatgatttcaacttcaagcatggctttgctttctttactacccaaaacggcaccgcatgccctttccctcacaaacccttcctcttccactcccctcatcttacctttcagtttccaatgtttgcctcaccctcttccttctcctctctcttccctcaaagctactttttccgacggtggcgacaatttgcgcggcaagcccctggttcctcaggcctttgaagaagaagacgacgacgacgacaacaaatgggttgactgggaggacctgattntggaggacaccgttcctctcgttggcttcgtcagaatgattcttcattctggacaatatgacaatggagataaactaagtccagagcatgaga

SEQ ID NO: 18902 - DNA, 406 bp, Glycine max
  Clone ID: LIB3106-088-Q1-K1-C2
agaaggggtacaccgactcaaccggagcatacacaatgtacgtggatgaggatcacgcagagcagatctgcagtgccaagcttgtaagcagccctcaccctcaatgcaaggaagtcaccccaggccgcgacgaagccgtcgtgattctcacccgctacaacggcattgcctccgacgataggttcgccaatgccatgggcttcatgtctcaggaggttgcttctggctgtgctgagatcctcaggcaataccaggagttcgacaatgagaattaattacgtaattaatttcagtatattattaatctacttcctaatgtctcttgatgtggagtgttatctcgacattttcatattatcatgttatatatggtgatggaacgacccttgttaaatttaataattcc

SEQ ID NO: 18903 - DNA, 457 bp, Glycine max
  Clone ID: LIB3106-088-Q1-K1-C3
atggcgaacgccggtcccggaaccaacggatctcagttcttcatctgcacgacgaagacggagtggctcgacggaaagcacgtggtgttcggacaggtcgtcgaggggatggacgtcgtcaaggagatagagaaggtcggatccagctccggcaggaccgccaagcctgtcgtcgtcgccgactgtggtcaactctcttagatagacgacgttgaccctaggcttttatctctgtgtcggtggctctgaatgtgtcgtttctttcggtgtcgtttttgcctttttttctctttcccatgtcgtttaggggattgcggtgttatggatatcatttcgaaacccttcccctttgaatccttcctttcctttctaaaatatcagtatcatgtggttcgttcatagagtgaatggagtctgttatgagaaacataaaaaaatatgatgagctaccttcaat

SEQ ID NO: 18904 - DNA, 394 bp, Glycine max
  unsure at all n locations
  Clone ID: LIB3106-088-Q1-K1-C4
gaacaagggtttctctttctctttctctgtctgcttcttcactttctctcgtttcaatcgaggaaaatcatgggcagaaaatgcttcgtcggtggcaactggaaatgcaatgggaccactgaggaggtgaagaagattgttactactttaaatgaagctaaagtccctggagaagatgttgtagaagttgttgtgagccctccttttgtgttccttccttttgtaaaaagtttgctgcgccctgatttccatgtctcggcccaaaattgttgggttcgcaaaggtggtgcttatactggagaggttagtgctgaaatgcttgttaatttgggaattcccttgggttattattggtcactctgaacggangcagcttttgaatgaatcaaatgag

SEQ ID NO: 18905 - DNA, 424 bp, Glycine max
  Clone ID: LIB3106-088-Q1-K1-C5
agcaagcgtacggcaacacgtctcacattgtcacagtatcagcatctggactttgatccttgccgtactcgagagactagctactctatgcacatgcagttatgatatacacacctagttcatttatatatctgaaatcacccatttcttagagcttactattcatagccataatgaaagtcaacccttaattgacacttggtaatgttccaagaaagaagttacttgggtatggcccttattcatcatgcgttctgagacaactaggttgcacgatgaagcgtggctggaagcaaaccatgggatggcgcaagagaggtccacaatacagctatgattttatcagttatcggcttaacttcactgatggtccttcaaacgaccatattcatatgcctccttatcttgcatgaatatatatctt

SEQ ID NO: 18906 - DNA, 359 bp, Glycine max
  Clone ID: LIB3106-088-Q1-K1-C6
cccacgcgtccgataattagtattcatattggacaagctggaattcaggtggggaattcatgctgggagttgtattgccttgagcatggaattaaccctgatggcaccatgcctagtgatacctcagttggtgtagcacatgatgctttcaacaccttcttcagcgagacgggatccggcaagcatgtgccaagggctttatttgttgatctggaacctagtgttattgatgaagtaagaactggtccttacagacaactctttcaccctgagcaattaatttctggcaaggaagatgctgctaataacttcgcaaggggacactacactgtttggaagagaaattgttgaactatgcc

SEQ ID NO: 18907 - DNA, 235 bp, Glycine max
  Clone ID: LIB3106-088-Q1-K1-B3
aaaaaaaaaaaaaaaaaaaaaacaaaaaaaagaaaacaataacaaaaaacaataacttaaaaaaggaaaagtggttataataaacgtggacaggaaaccacttctagcaagtgaaccataaccagtcattgataatcaagggataccctctgcatccaatagtaaggtactacgtgtgtacacttaataactgttgaaggaggcctaacactagttatatatcaaaacccgactt

SEQ ID NO: 18908 - DNA, 412 bp, Glycine max
  Clone ID: LIB3106-088-Q1-K1-C7
ccggatcttcacgattaggagatggctaagtcgaagaaccacaccgctcacaacgcagtcctacaaggcccacaagaatggcatcaaaaagccaaagaggcaccgccacacttccaccaaagggatggatccaaagtttctgaggaaccaaaggtacgcgaggaagcataacaagaagagcggtgaaacagccacggaagaagagtaaagtgtcactctcaaatggggctattaggatttgatttgctattcaagtcccatatgttttgtgtcaaatctatatttagtagtatagtcattttgatgagttaatttaatccagagagaatgcagtacttactcttatagcatcgttgctggtttttgtttgttaaagacccttcaaattttatcgatgggatattattcagtt

SEQ ID NO: 18909 - DNA, 300 bp, Glycine max
  Clone ID: LIB3106-088-Q1-K1-C8
ttgtgcattatttaatggccaccacagcagctctatccggaaccatggtgagcacctgcttcatgaggaagcaacgtatgacgaccagaagcctaaagacatgccacaacgctctatgaggcctgaaaggttgacgaagaggtcgtgtaacttgcatggactcgtacaaggggaagcttataacccgagaaggagaagctgagctcgaatgcccatatgatggtctcattgtggacaaggctgaagaagaaggcatagaacttacatactcgtgcagggctgcttcttgcgtttcatgtg

SEQ ID NO: 18910 - DNA, 455 bp, Glycine max
  unsure at all n locations
  Clone ID: LIB3106-088-Q1-K1-A10
aggaaatgagggaaagaggttgtccacctgatggaaggacctacaacgctttgataaaactgatgactagccaacatatgccagatgatgcagtgagaatatacaagaagatgattcaaagtggcatcaaaccaacaattcacacttacaacatgataatgaaatcctattttgtgacaaaaaattatgaaatgggtcatgagatttgggatgagatgcatcagaaggggtgctgtcctgatgataattcctacattgtatacattggtgggcttataagacaggacaggtctggtgaggcatgcaaatatttagaggaaatgttagagaagggaatgaaagctccgaagcttgattataacaagtttgcttctgatatttctaagactgggaatgctgtcattcttgaggagttagctcgaaagatgaattttgntggtaagtttgaagtgtct

SEQ ID NO: 18911 - DNA, 446 bp, Glycine max
  Clone ID: LIB3106-088-Q1-K1-A11
aattaacaacatggcacaagggatacaaacccttaatcccaattccaatttccataaacgccaagttcctaaatcttcaagttttcttgtttttggatctaaaaaactgaaaaattcagcaaattctatgttggttttgaaaaaagattcaatttttatgcaaaagttttgttcctttaggatttcagcatcagtggctacagcctgcatgcttcacggtgcaagcagccggcccgcaaccgcccgcaaatcctctggcctttccggaaccgtccgcattcccggcgacaagtcgatctcccaccggtccttcatgttcggcggtctcgcgagcggtgaaacgcgcatcaccggccttctggaatgcgaagacgtcatcaatacgggcaatgccatgcaggccatgggcgccaggatccgtaaagaaagcgacacctggatcatcg

SEQ ID NO: 18912 - DNA, 425 bp, Glycine max
  unsure at all n locations
  Clone ID: LIB3106-088-Q1-K1-A2
accacgaccatttgagcctctatatataggtgtctcgtatgctcaaacatgacaagccagtgatagtagctttcagataactgatagttgtgtgcaattatttgaattcaagaatgtctcaacccgactcgttggtggctgagattgaggtgaaaacctctgctgatcacttttacgacaccttgaagggtaagaaacagcatcgtattcatgatgttgcccctcatcatatccataaggtggaagttcatgaaggtgagtgggataaatctggcaatatcaaggtgcttacattcgctgatggggacactgttgagaccttaaaggagagagttgattttgatgatgaanacaagaagataacctacaccatattggagggtgtcatgttgaagtactataagagctacaagggtatcggtcat

SEQ ID NO: 18913 - DNA, 366 bp, Glycine max
  Clone ID: LIB3106-088-Q1-K1-A3
gcttggtttgtctataatttcgttgacccgtgtgtgtgaaattgaaaattggaaagggagttaggtctgtgatttgcagagcatatttttacgacatgactgctttgtgtttaggcaactcctcatattgatcgagtggtgtttaaagccctaaccttaaatcattggggtttgggttacgcacacctccatactccaattgtaactcctcagatgtatttttttttttattgcggagttgaaatgaggttcagtcatgttttggaggatcacatattttttttaagaagtgatcaaattattttgttcacccttaaattgaaaacagaacctaatgagattactcccttttttaaaaaataaatt

SEQ ID NO: 18914 - DNA, 463 bp, Glycine max
  unsure at all n locations
  Clone ID: LIB3106-088-Q1-K1-A4
aggacattgatgttattccaaatgaagagatgatattggcacttagtgaaaaaggttatatgaaacggatgaagccaagcactgttaacctacaaaatcgtggaacaattggaaaatctgtaggaaaattaaaagtgaacgattcaatgtctgattttctcgtttgtcatgcacacgatcatgtcctatatttcagtgataagggaacagtttactcagctcgtgcctacaaaattcctgaatgtagccgcactgctgctggcacaccacttgttcagatcttatctttatctgatggtgaaagaataacatctattattcctgtgagtgagtttgctgaggatcagtttttgctgatgcttacaatgcaaggctatatcaagagagtatccttgaatttggtttcatcaatcangtcgatcggaatcattgctattcaattggttcctggtgatgagctgaa

SEQ ID NO: 18915 - DNA, 457 bp, Glycine max
  unsure at all n locations
  Clone ID: LIB3106-088-Q1-K1-A5
atttctctgaagtctttccaatttattccctgcacgagcttctttatatagtaggattgtggcttccttcatcacactaaacaggttaaaagaagagcatcactgaactaacaaagcaaccctatgtcgaaggtggtttgtgtcaccggagccagcggcgccatcggatcatgggtggtcctcctcctcctccagcgtggttacaccgtccatgccaccgtccaagatatcaaggatgaaaatgagacgaaacatttggaggaaatggaaggagcaaagagtcatctccatttttttgaaatggatcttcttgacatcgactccattgccgctgccataaagggttgttccggcgtaatccaccttgcatgtnctaacatcattggtcaagtcgaagatcccgagaaacagatattggaaccggcgataaaaggaaccggtaatgtgttgaaggccg

SEQ ID NO: 18916 - DNA, 421 bp, Glycine max
  Clone ID: LIB3106-088-Q1-K1-A6
ctttgtttcaacaccaagttcagacaaaaagcagcgaggtttttcataacaaaggagaatgagggctttttcagttaaagttgaggaaggaagggaaggtaaaaatggtaacctttctgttggtccagtataccgtaacctcctctcagaaaatgaatttcctccaatggatcctgatttcagtaccacttgggatattttctgtgtgtctgtcaaaaatcatcccaataaccggatgctgggaaagcgtaaaattgttgatggaaagattggaccatatgtctggaagacatataaagaagtctatgatgaagttctgcatatgagttctgctttacgagcatctggttccgaacctggcactaacattgaaattatggatctaatttgcctgaatggatgtggcaatggaagttggtct

SEQ ID NO: 18917 - DNA, 429 bp, Glycine max
  unsure at all n locations
  Clone ID: LIB3106-088-Q1-K1-A7
atgtcgttggtttcaagcatgttcgggtgtggagtggtgatggcggcgtcgcaagcaatgggaattggaaggagaagcgatggtggattgacgatagtgtgttcgtctaggccgcagaagaaagcgacggcgcatcacatgaagactcggcctcggaagacgcaggcatgggatagaaaccgcaagcccaccgtctacgatccactccctcctcttcctcctgattggaccctcgttattcccgctgacgcttcttctgctcccgttacgccttcgccttcaactccctctgcctagtcactctctcggtactctctctcgttntcatgtagtcttatctttaattccagcagcttttctttcatgttttcatctcaaatcaaaccttcatcatttggtttggatcaataaatgtttctgaattctttc

SEQ ID NO: 18918 - DNA, 445 bp, Glycine max
  Clone ID: LIB3106-088-Q1-K1-A8
tctgaatggaaattaacattcttcaatttcaaggagagatgattctggctcttgggtaatcagcccaccttttggggtaaatgtttagtcctatttagagtaacagatacagttttagaaggttcacaaaactgagtcttttcattttaagttatcatgatggtttttcaaatgttgacaccatgactggtgaataattagctcttggtacatgttggggttgcaatcacctttttcataagttcaattgaagtgttgcagaattgtaactggtctcagtttttgtctttttttttttttttgctttctgttacccctttttaaatatgtattctaattgtcttcagatcttcccaaaccctgtttgtgttgcctgttattccccttttcctccctaagttgcagaaaaaaatgagacataaggaataaccttttcttttttcat

SEQ ID NO: 18919 - DNA, 428 bp, Glycine max
  Clone ID: LIB3106-088-Q1-K1-A9
tccacgcgtccgccaaaaccttttttcgaagtctctgattttcctaatggctgcggcaaaggcagagaagaagccggcggagaagaagccagcggcggagaaggcaccggcggagaagaagccgaaggcggagaagaagatctcgaaggaaggagggagcgagaagaagaagaagcgcacgaagaagagcgtggagacctacaagatctacatcttcaaggtcctcaagcaggttcaccccgacattggtatttccagcaaggccatgggcatcatgaacagcttcatcaacgacatcttcgagaagctcgcccaggaagcgtcgcgtttggctcgctacaacaagaagcccaccatcacctcgagggagatccagaccgtcgtgcgtctcgtgctccctggtgaattggccaaacacgccggttctg

SEQ ID NO: 18920 - DNA, 418 bp, Glycine max
  Clone ID: LIB3106-088-Q1-K1-B10
acgcccacgcgtccggtgtatttccctacctctcccttcaagatgcagatcttcggcaagaccctcaccggcaagaccatcacccttgaggtggaaagctctgacaccatcgacaacgtcaaggccaagatccaggacaaggaaggaatccccccggaccagcaacgtctcattttcgccggaaagcaacttgaggacggccgtacccttgctgactacaacattcagaaggagagtactcttcacctcgtcctccgtctccgtggtggcatgcagatcttcgttaagacactcaccggcaagaccataaccctagaggttgaaagctccgacaccatcgataacgtcaaggccaagatccaggacaaggagggtatccccccggaccagcaacgtctcatcttcgccggaaagcagc

SEQ ID NO: 18921 - DNA, 433 bp, Glycine max
  Clone ID: LIB3106-088-Q1-K1-B11
agaaactcaattctcactgaaagaaagttgctaacacttggcaccacttatcaacttatcatagttgataacatcaaaggcacaacattgagggaatgagggttgttatatcagcagtatgtgctattgtgctattctcttatgctgctgcgtacgatcctttggatccaaacggaaacataacgatcaaatgggatgttgtgtcatggacaccagatggctatgtagctgtggtaacaatgagcaatttccaaatgtttcggcacatcatgaatcctggatggaccttgggatggacatgggcaaagaaggaagttatatggtccatggtaggagctcaaaccacagaacaaggagactgttctaagttcaaaggcaatgtacctcactgctgcaagaaaactcccacagttgtagactttgctcctggtgt

SEQ ID NO: 18922 - DNA, 375 bp, Glycine max
  Clone ID: LIB3106-088-Q1-K1-B12
tcgatcctgcttatattctaaccttcaaaattaacgttgtcaaatgctggtgcagggacaggggaaccaaatccacctgagtgggcgcaccagttccacgcgtttatgttcatgaacgaaagcggaattcttcagaaactggacttgtggtacgaatggaccaacggccgaaacttcaacatcattcagaatcagctggaccacgtcggctcctacgacctcgaatggaccaacggcacctacttcgtctacaccctctaccctttcgacccgacatgcaaagttgtggactttggagtgcgtattttacgacccaattggcttgaccgtgcaacctatttgggtcagctacacgatgataactggctctgcaac

SEQ ID NO: 18923 - DNA, 414 bp, Glycine max
  Clone ID: LIB3106-088-Q1-K1-B2
gaaaacaagagatatcgaagatggctctgcccaaagctaaggagatcgtgtcgtccaattgcgtcgtcgttttcagcaaaacctattgccctttctgcgtcgatgtgaagaagctcttcggtgacctcggtgccaattacaaggccatcgaactcgacactgaatccgatggaaaagagctccaagcagcattagttgagtggacggaccagcgaaccgtgcctaatgtgtttattggtggaaaccacattggtggctgtgactcaacaactgccctgcacactcaggggaagctggttcctctgctgatatctgctggagctgttgccaaatcaactgcttaaaggatctcccatttctagggtatgcagttaaataaaaattaaaaacccaagtagttgggtccgttatata

SEQ ID NO: 18924 - DNA, 322 bp, Glycine max
  Clone ID: LIB3106-088-Q1-K1-A1
agtccccacaaggtgtatgtgggaactgtcaataaattcagattcctcggcttggagtaaaggcaaatctagtgttgataaagggttttcagttacatttactttgatctcacgccctccaagttcagtgccgttaagtttctcaatcacagcagttgcgtcctcaacagttttcatggtaacgaatgcaaagcgacggctccttccagagtatttgtcatacattacctcagctttctcaacagcgccatgctcctgaacaatcttggcaagctcgtcattggtgacagtgcggggaatgttgccaacgtagagccttctc

SEQ ID NO: 18925 - DNA, 403 bp, Glycine max
  Clone ID: LIB3106-087-Q1-K1-G6
cccacgcgtccgtctactctcttcctcagctctcaaaccttatcacctaaggcttatcctggcaaaccagaagaccatgtctacctccgcagcttccctcgcactcccagccctcactctccgaacccgacaaccgctatgttctccccaatgcttcagctcgtcgcctctccctcacacgcaacaacacacccatttccatttatgctgttgttgtcaaaccaacagctatgtcgacgtctcgcttcattccccacgtcgtggtgttcaccgatcatggggcaggaggaggacaccttcagtgacggagacggccccagcttctgccccgaccttaagctctgggccgggaagcttccgttcaacggctacagcgcgcagctcgcggagctctttgagagtg

SEQ ID NO: 18926 - DNA, 449 bp, Glycine max
  Clone ID: LIB3106-087-Q1-K1-G7
caggagtgagaaatggacctcccatggcgcccccatttaatcccctcacctggcactctcgttaccctcaacccgcactctgtcttccttctccttctcttctctgcttctcttttcatctccgaaaacaatgaagctcattagcagcattaaccccaaaaacctcaaactcagtcccaaacgcttctttcgcaaaaaggaacgatctttagtctcacgctccgacccaccttcattcggatccggatcttcctccgacgactccaccacaaatcacaagccttccgctggtaaccaaactccgaccagcgtcctcccgggcgtctccggagactggtccgacgtcgccgacgtcgacgtgcggtgggacctcgcccaggccttccgcctcatcgaccgcgacaacgacggcgtcgtcacgcgccaggacctcgaggccctcctcacgt

SEQ ID NO: 18927 - DNA, 454 bp, Glycine max
  Clone ID: LIB3106-087-Q1-K1-G8
tgataatcatagctatggcaacggcgaggtccaagttgtgcggtatcatttagaaacagcggtctgtgtgagtaaaccctcggatcttgggttcttgagctctcgtctgaacggcctcagaatctgcttccccaaattgccacccacacccttcactgcttctcccttccccacacccttcctatcgctgccaagaaaaggtgtcccttcactggaaagaaatcaaaccaggccaacaaagtatcattttcaaaccacaagactaagaaactgcagcttgggaaccttcaggacaagagaatttggtgggaagcatggaagcgctacgtaaagcttcgtttggcaactaaggcattgaagaccattgagaagaatggacttgatgcacgtgcaaagaacggtggaattgatctcacgaagaaataagcctatctaataattattgtaatttgga

SEQ ID NO: 18928 - DNA, 442 bp, Glycine max
  unsure at all n locations
  Clone ID: LIB3106-087-Q1-K1-G9
gcgtcctgttgggaaagagccgcttcgccggcgtcgacatgcgcatccgcgtcaagggcggcggggacacctnccacatctacgccattcgccagagcatcgccaaggcgctcgtcgcgttctaccagaagtacgttgatgaacagagtaagaaggagatcaaggacattctggtgaggtacgatcgtaccttgctcgtcgcggatcccaggcgctgcgagcccaagaagtttggtgggcgtggcgcacgtgcgaggttccagaagtcttaccgttgaaggagaatggtggtgtttttgtgtttttttgtttttggttcggttcatgctttatgctgtggaaaaaatgaaaacttttgttggtggttttggtagttttataattttgatcgttctttttataatggttggattatggattcttgctttgattcaactttttc

SEQ ID NO: 18929 - DNA, 459 bp, Glycine max
  Clone ID: LIB3106-087-Q1-K1-H1
cccacgcgtccgccgttccttcagagtggaaccctagttgtctctatccttaaggttccggcaccgcaccaagtctcagcacccaacctggtcttctttcattcatggcggaggaacttatttctcaattaaacaatatgctagaagaaaatggaacaccaagtcatgtagaaagggctgctgatgctgatgctgatgctgagctttcttcaacatcacaaaaaggagatgacacttaagaagtttcaaagaagaaaaagaagaaatctaaaagcaagaaaaagaaagaactcttgcaacagactgatccaccatcaatttctgttattgaccttttcccatctggagattttcctgaaggtgaaattcagcagtacaaagacgataacctatggagaactacatcagaggagaagagagaactggagcgcctgcagaagccattatataattcagttc

SEQ ID NO: 18930 - DNA, 230 bp, Glycine max
  Clone ID: LIB3106-087-Q1-K1-H10
cccacgcgttcgcccacgcgtccgcccacgcgtccggcaaagggttgctgagaggagcttcggtaactgcaaacgcagtttggcatagaagcagtttcttcccaaaggtaacggttagcgtccaccccaagttggtgaaatttcagagcttctcatcaaccaccgcttgctcctctcttccacccccggatttgcctcgtttggcaaaaactgctcaaatttcacttacc

SEQ ID NO: 18931 - DNA, 414 bp, Glycine max
  Clone ID: LIB3106-087-Q1-K1-H11
atggcattgagtgttcctgctcttcccctgacatacgtggctgacgttctggcacttgttggcagcatcttggtcgtgctctgggtcctcaattctaagggaggctcggcttgggattctgataacaaggccctcatcttcaatcttcatccagctcttattgtcattggcttactagtccttgggggtgaagctattatcagctacacatgattacccctgaagaacgaagtgaagaaatcgatacaccttgccttccatgccatcgcattaatacttgggacagttggaatttatactgccgttacgtatcacaatgaaagggggattgccaatctatacagcttgcattcatggcttggaagtggggatattgtcctttatggcattcagtggatatatcggtttgtgatc

SEQ ID NO: 18932 - DNA, 190 bp, Glycine max
  Clone ID: LIB3106-087-Q1-K1-H12
attcgtgtgtttccttcggcgcttgcttccgtgacttgagaaaaagaaatttagggtcttaagggtttcattctgcggcatcagacatgggaggaggcaatgggcaaaaggcaaagatggcacgcgagaagaacctcgagaagcagaaggccgcctcaaagggaaaccaactggattcaaacaagaaagc

SEQ ID NO: 18933 - DNA, 313 bp, Glycine max
  Clone ID: LIB3106-087-Q1-K1-H2
cccacgcgtccggttggtttcgtttcgtgttcctgaggttatcgtttttgacctacaatggtagctgtgtttatagaccatcgaatgaaatgatagtaagaaattatcgcatcaaaaaaaaaaaaaaatcagcaaataaaaaaaaaacaaaaaaaaacaccacagcatagtacatagggacactgatgcttatgcgtgatccagagattgctccaccattacataaagaatacaacactaaacaactaccaaacatctttaaacctcattacatagacatcagcaacaagtgaaccttcactacaacagaacc

SEQ ID NO: 18934 - DNA, 455 bp, Glycine max
  Clone ID: LIB3106-087-Q1-K1-H3
attaacatatacaaattctctgtgttgtgttgtgtacttgtgttaattgtgttgttgttggaggaaatttaagtgaagagagaatgatgatgaagtctgctatgtgtgcattggtgcttgtggcactggttgtggttgaagtggggcccatggctgaggctgcggtgacttgcaacccaacacagttgactccttgtcttccggcaattaattcaggttctgcaccttcgagtgcttgttgccagaagctgaaagagcaaaagccatgcttctgtggctacctcaaaaaccctagcttgaagcagtatgttaactctcctaatgccaaaaaaacccgtagttcttgtggtattggctatccaacttgttaagcacctcttatatatatatataaaacgtgtgaacaatatatatatattgattaaaaaatatagtttaatttatatacacacttt

SEQ ID NO: 18935 - DNA, 231 bp, Glycine max
  Clone ID: LIB3106-087-Q1-K1-H4
cggccgctcgcgatctagaactctccttctcaacagtttcactccagattcaaactcacacgcacgcacgcacactctttttttttatcatcgcgttgtaagcgagatcttggagagctacgagctcgttcgttcgtttgccttatttatttttcgcggttgatctctctcgttgttccgagagagttctttgttgtggaaacatgggtagcggcaacatttttcattgag

SEQ ID NO: 18936 - DNA, 451 bp, Glycine max
  Clone ID: LIB3106-087-Q1-K1-H5
cccacgcgtccgcccacgcgttcgcccacgcgtccgcccacgcgtccgtgcagaaatggcgtcattcaccatgacggcttgcatccttggcagcccagccgtcaccaaccggtcggcagtagcaacgcagaggagatcactcgtagtgaatgctgccaaagctgttgaagcagaaaaggtcagttatgacaatgacatggatggtagcaatggaaggaggaacttgatgttcgccgcggcggcggctgctgcttgctctgttgctgggatggcagtggcagatgagcctaaaccaggaaccccagaagccaagaaaaagtatgctccgatttgtgtcaccatgccaactgctaggatttgtcgcaattgagggactttggtttttattttacttctgatgattggaaatgtacaatggggttgttgtaatgctttgatgatttcatttgat

SEQ ID NO: 18937 - DNA, 343 bp, Glycine max
  Clone ID: LIB3106-087-Q1-K1-H6
tcggtttgaggaacatatataaagggtctggaatagggttgagagggatcaaaacgcacaccagaacacggtactgagttattagtaattgtgttgcgatgtgttgagcaagatagaaggatcaagaaaggataagacgaaagagggaatagggttagggctaggtttagggttaggtagaggatgcctgagaacaaacgtgaggtagcggagaacatgatgattggaaagaacgatgctgaccaccagaagcgagtgctggtgttcacggatgacaggcaggagtacacgcaagtgctgcggatgcttgataacgctcggagcaaagcgatgtgcatccacg

SEQ ID NO: 18938 - DNA, 453 bp, Glycine max
  unsure at all n locations
  Clone ID: LIB3106-087-Q1-K1-H7
cccacgcgtccgcccacgcgtccgaatccctctttcttcctcttcctcagtagggcgatggtcgattctcttctgtgcaacgatgcctaaccctaaggtcttcttcgacatgaccatcggcggtcaacctgccggccgcatcgtgatggagctctatgccgacgtgactcccagcaccgccgagaacttccgcgcgctctgcaccggcgagaagggcgccgggcggagcggcaagcccctccactacaaaggctcgtccttccaccgcgtgatcccgaacttcatgtgccagggcggcgacttcaccgccggaaacggcaccggaggcgagtcgatctacggcgccaagttcgccgacgagaacttcgtgaagaagcacactggtcccggcatcctctccatggcgaacgccggtcccggaaccaacggatctcagntcttcatctgcacgac

SEQ ID NO: 18939 - DNA, 448 bp, Glycine max
  Clone ID: LIB3106-087-Q1-K1-H8
tcgcccacgcgtccggttcgatacaaccccatctcataatcagtgtgcatgcattgcactcgctcccaaaatcttttgtaattcggtcataactcagtaattctcatcatgggctccttgattgttccaggtgaacatgatcacaaactaaagcttgattctcttccctttgtatcaaccagtcacctcattcccgtactagacatacctaggctctttgccattcatggtgttgatgtcaccataatcaccaccacagccactgccgacattgtccaaagctctatcgatcgcgaccgtgaccgcggccacgctattagaacccacattgtcaagtttccatgtgaacaagttgggttgccagaacgagtagagagcttcaactccaacactcctcgggatttggtcacaaaatctaccatggccttaccattttccaagaccatta

SEQ ID NO: 18940 - DNA, 420 bp, Glycine max
  Clone ID: LIB3106-087-Q1-K1-G5
gagaaaacaacaacaaacctcatcaccacacagagtagtagagagagagagaggaaaaaaaagagagtccgttaggtaatttcagtttatttattttatatttttaaaaagaagagaaaaagcaatggtgacagaggaagaaatatctgaagcggttcagtctctgctgcgggaatcaaaccctagtagattcacgacgctaaaccaggtggtggaggagctccaggccaagctcggccacgacctcactcacaaaatcgatttcatcaccgcgcagatcaacctcctcttcggatcccgacaaccgccgcaaaacccgcataggcagttacaacagcctaaggaccattttgcccctccgccaaaccctaattttcactctgcccctgtcagtgttggctttcagttgcagaatttctc

SEQ ID NO: 18941 - DNA, 444 bp, Glycine max
  Clone ID: LIB3106-087-Q1-K1-H9
cccacgcgtccgcacaagccaagtgaaagtgagaaaaaataaaaatcaaagagcataatgtgagggatcattcacaagattggggagacccttcatgtgggagggcacaagaaggaggaggagcataagggtgagcaccatgctggagaatacaaaggggagcaccatggtgaacacagtagtgagtacaaaggagagcatcatggtgaacacaaagctggagagtaccatggtgagcacaagccagagcacaaagaggggttcctagacaaagtcaaggacaagatccatggtgagggcggcgccgtcgagggcgagaagaagaagaaggagaagaagaagaaggagcatggccatgagcatggccatgacagcagcagcagcagtgacagtgattaaactgctgcatcacctatatatttaaaaggtttatgggaccatagt

SEQ ID NO: 18942 - DNA, 401 bp, Glycine max
  Clone ID: LIB3106-087-Q1-K1-F12
ctttcggaattttcttcactgctatttaccattgccacactctcattctcgatggcggcggggattgcattggcaattggtttgagaactctcttcactgttttgggacttctcatgcttgctgtctttctttacactgccttcaccgatggtctacgtgttcgctttctcaaagaacttgtcagaccgtggatggttgcaactttggtttgggtctatatcaacattgtagctcttgctgtctggattgcttacaaggaatcaaacttgatcagctcaattctagggattggtttgattgccttgttagggagtatctctacatatggctatattgacgggcaatttctgaagttggcatctcaagaatcttgacaggatcctatgtattatgttctggt

SEQ ID NO: 18943 - DNA, 418 bp, Glycine max
  Clone ID: LIB3106-087-Q1-K1-F2
aactcgcctaagcagaaatggcctcttcatttatggcatctgtggccctcaaacctgccggtttcactggtgagaagtcctcagttagaggccttccctccctctcaaggaactcctcttcattcagagtcgtggccagtggtggcaagatgatcaagactgacaagccttatggaattaatggtggcatggctttgagggaaggagttgatgcatctggcatgaaaggaaagggaaagggcgtttaccagtttgtagacaaatacggtgctaatgtcgatgggtacagtcctatctacgacaccaaggactggtcttcaaccggtgatgtctacgctggcgggactactgacttggctatctgaactgtgactttacttgaaattcttgctggtagtacacttcttgtctacaacac

SEQ ID NO: 18944 - DNA, 458 bp, Glycine max
  Clone ID: LIB3106-087-Q1-K1-F3
cccacgcgtccggagataactagaaacagtgtgatgaaaatgaaggtccttgttttcttcgttgctacaattttggtagcatggcaatgccatgcgtacgatatgttccctctccgaatgaacactggctatggtgcccgtactccggaggtgaaatgcgcaagttggaggcttgctgtggaagcacacaacatctttggctttgagaccattcctgaagagtgcgttgaagcaacaaaggaatacatccatggcgaacaatatacatcagactccaaaacagttaaccaacaagcttacttttatgccagagacctcgaagtccatcccaaggacacatttgtgttcagtatagatggcaccgtactctctaatattccatactacaaaaaacatggatatggcgtggagaaatttaactcgaccttgtatgatgaatgggttaacaagggcaatgc

SEQ ID NO: 18945 - DNA, 464 bp, Glycine max
  Clone ID: LIB3106-087-Q1-K1-F4
cccacgcgtccggtgaaactgtgatgtcctcctaaaaaactctatccatgtctatgatgtctctcacaaccgtggctgcattcaagtccctcacaatggcggaatcgtgccttctatccctcccttccctcttctacgccaaaaacaataccctttctctctcaattcccaccaagcccctcaacctccatcttccatgctccaactcttcgctctttcccctcaccaccaaaacaacgcgccactcttctctcctcacattcgtggctcagacatcggattgggccaaagaagaagaggaagaagaaacctcgtgggagaaccaaagcgacaccgcgtggggaactgaagaaggtggccacgaagaaaggggtttcgctgaaaaagctgaggaagataagatcttcggtgggaacttgcctttcgacatcgacagcgagaatttggcgtcgctcttcgggcag

SEQ ID NO: 18946 - DNA, 448 bp, Glycine max
  Clone ID: LIB3106-087-Q1-K1-F5
ctgttgctgaatcagctattccttcaatcatgtatttctcttcttgctttttccattctgcattgacactcaaggctatgaaaccttgtggttctgatgggaaggggaaaaattttgctttccctatcagaagtaatggtgctgagctttgtgacggacacattgtgagaagtagagtcaacttaagcggagattggagtttcataggaggatccagaattattgtgaaaccaaaagctacaagattgcttcttcattatccaaaaaggggtcacatgcacgcttcatgcttcataggatctcaactcgctagcactgtatttacagtaggaacaatagcagtgctcccattttacacactcatggttctagctccaaaatctgaactaaccaagaagtccatggagagtagtataccttatgtagtgcttagcattctatatgcata

SEQ ID NO: 18947 - DNA, 401 bp, Glycine max
  Clone ID: LIB3106-087-Q1-K1-F6
tgaaattttaaaaatgactgggataaacttaagaattcaattattgaaattgaataagtaaacaatttaattggattggtcgaatggtatcaaaaaaatggagtactaactcccatttcttatttattattgaattaaccgatcaacttgctttgttatcgaacatttctttttgatttcaaaaattttccggaaaaaatttgaatctatttttatatgcgaatcaatcctactacttctggtcctgaagtttctgcgcttgaaaaaaaaaatctgggacgtatctgccaaataattggtccggtactagatgtagcttttcccccaagtaagatgcctaatatttacaacgctctgatagttaaaggtcgagatactgttggtcaacaaattaatgtgac

SEQ ID NO: 18948 - DNA, 438 bp, Glycine max
  Clone ID: LIB3106-087-Q1-K1-F7
gtttgttgatcgagataactagaaacagtgtgatgaaaatgaaggtccttggtttcttcggtgctacaattttggtagcatggcaatgccatgcgtacgatatgttccctctccgaatgaacactggctatggtgcccgtactccggaggtgaaatgcgcaagttggaggcttgctgtggaagcacacaacatctttggctttgagaccattcctgaagagtgcgttgaagcaacaaaggaatacatccatggcgaacaatatacatcagactccaaaacagttaaccaacaagcttacttttatgccagagacctcgaagtccatcccaaggacacatttgtgttcagtatacatggcaccgtactctctaatattccatactacaaaaaacatggatatggcgtggagaaaattaactcgaccttgtatgatgaat

SEQ ID NO: 18949 - DNA, 131 bp, Glycine max
  Clone ID: LIB3106-087-Q1-K1-F8
accaaataaaagaaaatagtgtttctgcgttaaaaaacaaaaatagaactagggatctaaggtcaaactaaataggtagaaaaggacaagatatacaaacaaaactgtctatctttccatatgatcactat

SEQ ID NO: 18950 - DNA, 445 bp, Glycine max
  unsure at all n locations
  Clone ID: LIB3106-087-Q1-K1-F9
gcgtccacgcgtncgtccacgcgtccgcaaaatgtgggtaaaaccacattctcccttcaccgacttgcccaagctgccggtgtacacaatccaccgttgatcccccttccggtgatggtccttcttcctccataacaatacacttaacaggactgatgaaagagattataactttggattgcgaggtttttgcggngaaacatactttgccaaccatgtagcacatcaagtagtagaagaggagggtcacttggctttgggcgaggagcatatcttgaactggatcgacatggaggagcacgcttgcagtcgttgttgaaggagcagatttgtatcgcggcgtttgctgatttgcatttggattggcttcaggtgaggaacagatctggatatggatcgatcgatgatcatgtgtttcttgcaaataaaattgttctgaagctat

SEQ ID NO: 18951 - DNA, 442 bp, Glycine max
  Clone ID: LIB3106-087-Q1-K1-G1
gagaacaatgcaaatttctcttagcaatttagccttcaagacccctcaactcttcccaatgcaccaccccattttccctccaaagccaccactgaaccaccaagtttcaacgcagaggccatgtcaacaatgtcctgaaaggttcgtcggggtatttgtccgaaatcagcaaagtgattgatcacgaagaacagtaccgggtagcccggtcgcaggttagccgtaaagttttggacttggaaggttattccatagagggtctttcagttggaggccaagagacatgcatcataatccctgagttcaagtgttcttttgatattgggaggtgccctagtagggctattcaacaaaacttcctttttattactcatgctcatcttgatcacattggagggctgccaatgtatgtagctagccgtggtttgttcaatttgaaacc

SEQ ID NO: 18952 - DNA, 418 bp, Glycine max
  Clone ID: LIB3106-087-Q1-K1-G10
ttgagtccaaatggaagcaattgggagaattagccatgtctactggaaagttagaaatggcgtgaagagtgtttaaaacacgcagcagatttgagtgtgttattgctgctatattcttctttaggagatgctgaaggaatatcaaaacttgcaactcttgctaaagagcaagggaagaataatgttgcattcctttgcttattcatgttgggtaaacttgaggactgccttcaactcttggtagaaagcaatcggattccagaggctgctttaatggctcgatcctatctcccaagcaaggtctcaaagatagtggcaattatgagaaaagatctcagtaaggttaatccataagctggtgaatcattggctgatcctgaggaatatcctaatttgattgatgattggcaagttgcac

SEQ ID NO: 18953 - DNA, 445 bp, Glycine max
  Clone ID: LIB3106-087-Q1-K1-G11
caaatgcaagcttgggagacagagaaagagattgagaatggacgccattgattctgtgttcggtccgctgagagaattcgcaaaggacagcgtgaggctcgtgaagcgctgccacaaacccgatcgcaaagaattctccaaggttgccgtccgtactgcaattggtttcgtcgtgatgggattcgtcggcttcttcgtgaagctcattttcattccaattaacaacatcatcgtcggatctggttagattaagggaactactatcgccaaagtaattcaagttgtcaagcaaaaggaggcagacagatttccctcatcaatagatcattctatgccaccaatcttagttcttttttcatttttggttttttcttgtctcacgaatctttacttcctttagatgtaaaattttatttatcctctgttgcaccttgacacattgttt

SEQ ID NO: 18954 - DNA, 188 bp, Glycine max
  Clone ID: LIB3106-087-Q1-K1-G12
tcgcccacgcgtccggaagctatgaggtattcattccttgccaaaggtgccaagcgagccccacctgttggggtattgtatgcagttgtggatgatattatagaagagagattgaaagttgagggagatggtgacaggaaaaacaagggtaagagttatgctgaattctatttttcatgaattgccct

SEQ ID NO: 18955 - DNA, 460 bp, Glycine max
  Clone ID: LIB3106-087-Q1-K1-G2
gcattgagacctttgttgctgatattaatagtggaaggtgggatgcaatattgcctcaagtttctcaactcaagcttcccaggaataagttggaggatttgtacgagcagattgtattagaaatgattgaacttcgagaactggatactgcacgtgctattttaaggcaaacacaggtgatgggtgtaatgaaacaagagcagcctgaaagatatttgcgtcttgaacatctcctagttagaacttattttgatccaaatgaggcttatcaagactcaacaaaagagaagcgacgtgcacaaatagcccaagctcttgcagcagaagttactgtagtgccaccatcccgattgatggctttaattggtcaagctttaaagtggcagcagcatcaagggttactttcttcaggaaccgcagtttgatttgttcgtggaacagctgctatgaaacaagatgt

SEQ ID NO: 18956 - DNA, 413 bp, Glycine max
  Clone ID: LIB3106-087-Q1-K1-G3
attaattctcaaggatccacaagatccttccactccaaatgcagtttcatacaaaacaggagcgagagagaaactgataaggcgagggatacaacattgttgggatcattggagaccaatggagcgatctcctcggaggccacagaggcgaaagcaggacctttaagcttcctaataccctgtactacattcagtacttcctttacctgtcaacaatctagcttgctcctatctatctatatgtaataagatgcgttcaaataggggcactagcttcactttatgttgttatagctgtgtgttaacaagtcatgttagagacttcactattgcggtttctctttcgtggctataattaattatgcgcccttgatgcatataataaaaacatttttgatggttgtcattgtttc

SEQ ID NO: 18957 - DNA, 318 bp, Glycine max
  Clone ID: LIB3106-087-Q1-K1-F10
gtggtttcagtgagtgatcggtgttcactggatccttcataagtcgtcatcatcatcatcagcatcaccgttgattgaagaagatgccgatcagaaacatcgtcatcggaaggcctgaagaggctactcaccccgacacgttgaaggcggcgttggctgagttcatctccaccttgatcttcgtgttcgccggttcatgttccggcatcgcctacaacaagctcaccgacaacggcgccggcactcccgccggcctcatctacgcttacatcgcccatgctttcggcctcttcgtcggcgtctccgtcggggccaaca

SEQ ID NO: 18958 - DNA, 336 bp, Glycine max
  Clone ID: LIB3106-087-Q1-K1-G4
cccacgcgtccgcccacgcgtccgtttcttttgcacgttttctagaagtttttgactcactttggtggtgttgatttcatggccacctcttagtcccagcatcgctgcgtttttgtggaattttgcaatttggattaatgggtttcgacatttgcgttctgaatggttcgtgcactcacgaatacgtgaccacttgcagctaaaacattgacctcctgtgatcatttgaaggaatgtgtagtcgtgaatcaattgtgttgctgtttgctggaaagtggtcactctgagttttagatgctattgtctttgctgggaagtattttatttgggccctga

SEQ ID NO: 18959 - DNA, 411 bp, Glycine max
  Clone ID: LIB3106-087-Q1-K1-D9
acaatttctctctcctctctctctctaaaaatccttctttctttcttctcttcgctgctcactgtagccatggctttcagagtaggaggagcgggagggggaaatgcctcttctggcatgggtgttgctgagcatagtgtaaacaccttcctggaattgcagaggaagaaagttcatcgctatgtgatttttaaaattgatgagaaaaagaaagaggttatcgttgaaaaaactggaggccctgctgagagctatgatgatttcactgcatccttgcctgaaaatgattgccgatacgctgtctttgactttgattttgtgacatctgagaactgccaaaagagcaaaatcttttttattgcatggtctccttcagtggcccgcattcgcccgaagatgctatatgcaaca

SEQ ID NO: 18960 - DNA, 456 bp, Glycine max
  Clone ID: LIB3106-087-Q1-K1-E1
accaagacgaagaagaagaaacaagagcagcgagaaactgagtgaggaaaggatgaagaaagcagagtgagtcccgttccattccgtatcgttcatcacattatattgattcctctccaaaaaaccctctcaattgcacgttcctcaatctcacttatgggcgaacagacgctaggtcaagcacaatccctaatcgaacctcaacctctccccgccccctcctcaactgccgtccccgacggtgccacggtggactccgaactaaacaatgtccctcggccgacaacatccccagccacgaaaatccccctccgtccccgcaagatccggaaggtctctccggacccctccacctccgaatcccaaaccgaaacccccaaacccgccaaaaccgggggccgcaacaccaccaaggctgctccgccgcgagcccttacggtggtccctcgtatagtg

SEQ ID NO: 18961 - DNA, 452 bp, Glycine max
  Clone ID: LIB3106-087-Q1-K1-E10
tcgaaaaccctcatccccaacctcaaccttaacctctcctcactttcttttcaaccagaactatgattaagctttttaaagtaaaggaaaaacagagagaactggcagaaaatgcgagtggcggaccacccgttaagaagcaaagtgcctgctagttgcgtcttcacaaagatataagcgagctgaatctaccaaaatcatgtaccatgcaattccccaatggcaaagatgacctgatgaactttgaagtttcaattcgacctgatgatggatattacttaggtggcacatttttgttttcctttcaagtgtctcccatctatccacatgaagcaccaaaagttaaatgcaagacaaaggtctatcatccaaatatttgacttgaaggaaatgtttgtctcaacatcttacgaggagattggaaacctgtccttaatataaacactgtcatc

SEQ ID NO: 18962 - DNA, 440 bp, Glycine max
  unsure at all n locations
  Clone ID: LIB3106-087-Q1-K1-E11
gccgggttacgccgattcttaccggaaggagctcgggagaagagcgtggcatttgggaccgggttgtttgagcaatatggacgccgaggaaaaagcatgcagaggaagagaagctgctattgatgaacacgagtgtctgaagtggcttgactcaaaggaaccaaattcagttgtgtatttgtgtttcggtagcatgacagcgttctccgacgcgcaactcanagaaatcgctttaggtttggaggcttcagggcagaatttcatatgggttgtcaaaaaagggttgaatgaaaaattggaatggttaccagaagggtttgaggagagaattttaggtcaaggaaagggtttgatcataagaggttgggcaccccaagtgatgattntggaccatgaatccgttggagggtttgtgacacattgtgggtggaactcagtat

SEQ ID NO: 18963 - DNA, 376 bp, Glycine max
  Clone ID: LIB3106-087-Q1-K1-E12
tcggtggaccagtcagatggtagcttccttgatgatgaacaaatagaaagtggatgggttctcagctgtgttgctctacctaggtgagacgttgtcattgagacacacaaggatggagagatcgaatgatcgatatatatcataatggaatcttgtccattgctcttctaatgccatctatctatgtcgtgttttgattttgttagagtgatttggcattggctagttagctagctgaaatcatcgcgaggttattaattacttttgtcatgtttgtggaaacaagtgaaattgttgcactttaattaattagtttggtaatgcttactggttatgcacatgttgtctaagacaataatagttcttctttatcttt

SEQ ID NO: 18964 - DNA, 446 bp, Glycine max
  Clone ID: LIB3106-087-Q1-K1-E2
gttttgctactaataatgacaacaacagtgacgacggcgacaaggacagtaacaacgttggtgccgccggagaggaaagtggtggcgacgattcgaaatccaacgttacgacgacgatgcccgaagaagagagaggattcacttcgcagaaatcgacgcctccttccacttctcagaggtcgtctttgtcatcgcttggaccagcatacaacacttttcaagttgattctttcaaacttattgagctccttgggcctgagaaggttgatcctgctgatgtaaagctgattaaggataagctttttgggtattcgaccttctgggtgacgaaagaggagccttttggagacttgggagaaggcattcttttcattgggaatttaagggggaagagagaggatggttttgccaaactccagaatcagctagttgaagtcacgggtgat

SEQ ID NO: 18965 - DNA, 449 bp, Glycine max
  Clone ID: LIB3106-087-Q1-K1-E3
ctttacaaggccttccaatattttgacaaatatggcagcgggtatatcacaagagatgaactggaaatagccatgaaggagtatggtatgggtgacgaggccacaatcagggaaattatatctgaagttgacacagataatgatggtagaatcaactatgaagaattttgtacaatgatgaggagtggaacccaacaacaaggcaagctattctgatgtctctagattgagtgtcctgcagccaagacggggtgcttgcttcagagaaaggctttcaagagttaatatttatcttacgcatgtaaagcttgtagtttcgatttgttttgagttacatgctccgcgtgacttgttgtcaactcttatttctctttttggattccttttcactctgaagtttattattgagtccaaatgtaatttattatgcacactaataataaatggac

SEQ ID NO: 18966 - DNA, 451 bp, Glycine max
  Clone ID: LIB3106-087-Q1-K1-E4
cccacgcgtccggctttatctgctgctttgacaatatgtggggaagaaaaaactgcaaatttgttgcttgacaagttcaaatggggccatgcttttatgtctcttaaatggggaattactgagggcctactccaaatgccaaaatagtgctgaaattatatctgttcaaaatgcttggctgtcacaagagagtcagattccaagggctcctactgacagtgaagttacgacacctgaaagtgaggataaaatccagaactcttccgattctgaagatgggcttccacctcttgaaaagaacatgaatcatttgagcatagtcaacagtgatgaagagagtgaatagattcattttacatctttaaggctgcggtactggaagtgatttgaagatgtgtgcaatgcagaatcgcttagtggcaaatcgttttggtaacaaaatatatgcgtt

SEQ ID NO: 18967 - DNA, 453 bp, Glycine max
  Clone ID: LIB3106-087-Q1-K1-E5
cccacgcgtccgcccacgcgtccgattgcaatcaaattagttcattctctttgcgcagttgcctacctctcctttcaagatgcacatcttcgtcaagaccctcaccggaaagaccatcacccttgaggtggaaagctctgacaccatcgacaacgtcaaggccaagatccaggacaaggaaggaattcccccggatcagcaacgtctcatcttcgccggaaagcagctcgaggacggccgtaccctcgccgactacaacatccagaaggagtcaacccttcaccttgtccttcgtctccgtggtggcatgcacatcttcgtcaagactctcactggcaaaaccataaccctagaggtcgaaagctctgacaccattgacaacgtcaaggccaagatccaggacaaggagggaatccccccagaccagcaacgtctcatcttcgccggaaagca

SEQ ID NO: 18968 - DNA, 406 bp, Glycine max
  Clone ID: LIB3106-087-Q1-K1-E6
cttcttcttctccttgctcgcctccacttttcactgaacacttattactcactccttcatggccacttcgctctctttctccatttctcccaaaaccactgccacaacctcagccttccgattcaaagtctccgccatggctaccaccatcgccgccccttctaccaaggtggctcccgccgtcattgtcggcggcggaagagtgggtagggccttgcaggacatgggcaccggtcaagacctcctcgttcgccgaggagagtccgtacctcccaattttgagggtcccatctttgtgtgcacaaggaacgatgatcttgaatccgtgcttcaatctacaccttcttctagatggcgtgattcggtgttcttccagaacggaatgatggagccgtgccttgagagc

SEQ ID NO: 18969 - DNA, 450 bp, Glycine max
  Clone ID: LIB3106-087-Q1-K1-E7
aaaaaaattataaatggggataggggtactatttggtgggtttatcttgctatcttgtgttgtgtgtgtgaagggtgtgtagccaaaagcctcacccacttgtacattttcggcagtttacaactttggggactcaaactcagacactgtaggcatatcagcttcatttgtgccaattgctgcaccttatggcgagggcttctttcacaagccttctggaagggactgtgatggccgtctcattgtagatttcatagctgagaagctaaacttgccatacttaagtgcttatctgaattcccttggaaccaattaccggcatggggcatattttgtcactgggggatccaccattaggaagcagaatgaaaccatatttcaatatggaatacgtcctttgtctcttgacattcagattgtgcaatttaaccagtttaaagcacgcaccaa

SEQ ID NO: 18970 - DNA, 442 bp, Glycine max
  unsure at all n locations
  Clone ID: LIB3106-087-Q1-K1-E8
cccacgcgtccgcttagctactaaggatcaaagagaatggctcaagcaatggcatcaatggctggcttgcgtgggtcctctcaggctgtgttggaaggtagccttcacgtgagtggctccacacgcttgaatgtggggagtggaagcagggtggcctcagtcacacgtgcagggttcacagttagagcacaacaacaacaagtgagtggtgaggtacaaagcagccgtagggcagcgctttcacttgttgctgctggtttggccactggctcttttgttcaagctgtgcttgctgatgccaaatctatcaaagttggaccacctcccccaccttctggtggattgcctggaacgttgaactcagatgaagcaagagaccttcagctggcattgaaagataggntctttctttaaccattgtctcctactgaggctgcacaaa

SEQ ID NO: 18971 - DNA, 406 bp, Glycine max
  Clone ID: LIB3106-087-Q1-K1-E9
ttgaagcttttgaaaagtaaaggtgtgacagctattggggctgctggattttgttgggggggtaaagtcgtggttgaacttgcaaaatccagactaatccaagctgatgtgctattacatccagcatttgtctctgtggatgatatcaagggtgttgatattccaacagctgtgcttggagctgagattgacaaaatgtcacctccagagcttgtaaaacagtttgaacaagtcctaactgctaaacctggggttgattgttttgttaaaatatttcctaaagtttcacacggttggactgttagatacaaccctgaagatgcagaagctgtaaaggctgcagaggaggcccatcaggacatgctaaactggtttgctaaacatcttaagtagaaatcttgttatg

SEQ ID NO: 18972 - DNA, 457 bp, Glycine max
  unsure at all n locations
  Clone ID: LIB3106-087-Q1-K1-F1
aactagtctaagcagaaatggcctcttcagtgatggcatctgtggccctcaaacctgcccctttcactgttgagaagtcctcagttagaggccttccctccctctcaaggaactcctcttcattcagagttgtggccagtggtggcaagaagatcaagactgacaagccttatggaattaatggtggcatggctttgagggaaggagttgatgcatctggcaggaaaggaaagggaaagggcgtttaccagtttgtagacaaatacggtgctaatgtcgatggttacagtcctatctacgacaccaaggactggtctccaaccggtgatgtctacgctggcggtacgactggcttggctatctgggctgtgactctacttggtcttcttgctggtggtgcacttcttgtctacaacacaagtgctttggcgcaataaactntgcanatcgatgtttt

SEQ ID NO: 18973 - DNA, 449 bp, Glycine max
  Clone ID: LIB3106-087-Q1-K1-D8
cccacgcgtccgacttttttgagattctggcaacatctgaggatagagatggaaagactttcgtttccacagcacgtggtaggaaatatcccgtgactgtcaacctatggcaaccagagaaaaatgcttttgaatgggctacatctttgaaagcccctcacacagaggatgcaattcgggttactcagtccacagcaaactttttcatatgtgaagctaggaaatccacaaacacacctgatgctcaaaaagtgcgagataatctcatctacaattacaaacctacttttggtggaacggctgggaaaggatatgatcaagcgtatctctttgaataattctatctgtaggacgtgtccttgaatttgattatatgcacaataaattatgaactgaggatgtactttgaagaacataactttttgcacagtgatgtttgtaagacgctt

SEQ ID NO: 18974 - DNA, 299 bp, Glycine max
  Clone ID: LIB3106-087-Q1-K1-C5
cggacgcgtgggcaggattgttggaacatgttgatcgatactttggcaccgatgattgaggcctgctgtttgtgtgtcttaaggtgcagacacctcttgagtacgcagctgccttgattaagagtatgacaatcagctaactacattgtattcagatattaaggattctgcaaaaatcagcatgattgtgatttgaggcaggccgattacaattatcaatgcaaacctactccaaggttgatatgcacgaataaatattaaatgtacagatcattcttagcatagagcaacctaaattc

SEQ ID NO: 18975 - DNA, 407 bp, Glycine max
  Clone ID: LIB3106-087-Q1-K1-C6
cccacgcgtccgaacatattattttcattgtcatctttttttgagtatcaacaagatggcagccactgtgatgaccactctcccccaattcagtggtcttagaccccaattctcagctgcccctgtgaagaacttggttgctgtgcaacccatgagtcgcaaggggaagggtgcattgggagctcgatgtgactacattggttcatccactaatctgattatggtggcttctacaaccctgatgctgtttgctggaaggtttggattggctccatcagcaaacaggaaagccactgcaaggctaaagctggaggtgagggactcaggcttgcagactggtgaccctgctggcttcacccttgctgacaccttggcctgtggatctgttggccacatcattggggttg

SEQ ID NO: 18976 - DNA, 448 bp, Glycine max
  Clone ID: LIB3106-087-Q1-K1-C7
cccacgcgtccgagaatggctcccaagggtttaacctttctggctgtgttaatatgcgtttcagcactgtcactgagtccttctgttgcgggggaagggcaaaataatggccttgttatgaacttctacaaggaatcatgccctcaggctgaagacatcatcacagaacaagtcaagcttctctacaagcgccacaagaacactgctttctcctggctcaggaacatcttccatgactgtgctgttcagagttgtgatgcttcactgttgctggactccacaagaaggagcttgtctgagaaggaaacagatagaagctttgggttgagaaatttcaggtacattgagaccatcaaagaagctttggaaagagaatgccctggagttgtttcatgtgctgatatcctcgttctctctgccagagatggcattgcttcgctaggaggtc

SEQ ID NO: 18977 - DNA, 451 bp, Glycine max
  Clone ID: LIB3106-087-Q1-K1-C8
aaccaacttcagtgcacaacacaactacacaagagggtttcaactatctactactcttctgcacactctctgtgtgggataaagcaatctcaatctcttcataatggaaataagtattgcaaggtctcatctcgaaacacagggaatattcttttcaaatatttcaagaacaataggatgggaaagcattaggaaacttccatgtaatgtggctgcccagggttcaagacgggactttcacagattggcctcttcctgtcaagcttttactgcagcgtatcctagaaggtcttttatctgtagagcaaattctatgccaattagtttacaggaatctgcatcatatggagataattctattgaggatgaggatccatatacagacttggaagaggaagctttggcaaaaccacctaccagtgaacagataatgacattgcttgctgacaca

SEQ ID NO: 18978 - DNA, 388 bp, Glycine max
  Clone ID: LIB3106-087-Q1-K1-C9
atgtctgtgggagatggcgccgtatgcggccggaccgacgtggtcactccattcaccggcctgaaatgcatgcctggcttccacacgaggaagaccatcaatgacatcacctccattgctagcaacgatggaagagtacaatgcatgcacgtgtggccaccaattggcaagaagaagttcgagactctttcctacttgccagacctcgatgatgcccaattggcaaaggaagtcgaataccttctaaggaaaggatggattccttgcttggaattcgagttggagcacggtttcgtgtaccgtgagcacaacaggtcacctggatactatgatggacgctactggaccatgtggaagctgcctatgcttggctgcactgatgcttctc

SEQ ID NO: 18979 - DNA, 458 bp, Glycine max
  Clone ID: LIB3106-087-Q1-K1-D1
cccacgcgtccggtgatcctaccaaactactcaaagtccatctagtcacctgcaccgactcggccgagttcgcgctcctgagctcggcgctgactcggacctcggtggtgggcctggacgcggagtggaagcccgtccgaagattgttcccgagggtggcggtgctccaaatcgcgtgcggcgactcggcggtgttcttgctcgacttgctgtcccttcccctctcttccctgtgggcccccttgcgcgaattgctgctctcccctgacatcctcaaactcggattcggattcaagcaggatttggtctacttgtcatccactttcgcctcccatggcggtttcgataaggttgagccatatttggatatcaagagtgtctacaatcatctacagcataataagaaacatgtacccaagcaaagtaagagtttgtcaaccatatgtgcagaagtattg

SEQ ID NO: 18980 - DNA, 444 bp, Glycine max
  Clone ID: LIB3106-087-Q1-K1-D10
gggagaactaaccaagtccatggaaaaaattggcctggatatgcgcgttgctgctctagttagtgataccattggaacattagctggaggcagattctacaatcaggatgtcattgctgctgtgattcttggtactgggacaaatgcagcatatgtagaacgagcacatgctattccaaaatggcatgggcttataccaaaatcaggagatatggttataaacatggagtggggtaatttccgatcatcacatcttcctctaacagaatatgatctagctctggatgctcagagcttaaaccctggagaacagatttttgagaaattgatttctggcatgtatttgggggaagttgtaaggagagctttattgaagatggccgaagaagctgactcttttggcgatactgttccccccaaattgaaagttcctttcatacttag

SEQ ID NO: 18981 - DNA, 92 bp, Glycine max
  unsure at all n locations
  Clone ID: LIB3106-087-Q1-K1-D11
aaaaaaaanacnaaaacacttacgaatacgttctaattacacataaacatacaaaccaatcatcgaaaaggtataaaaagaaaacagggagc

SEQ ID NO: 18982 - DNA, 435 bp, Glycine max
  Clone ID: LIB3106-087-Q1-K1-D12
gcggtttactactcaactaagatggactcgaagaggaagatagcattacttatttcaggccttcgggccatgctcattttaatctgctcagatgtggcagccagagaattgaaagaggtcactggtgctggcttgtctggtggtcgtggggtcaactatggtggctttggtggtggctcccctggctttggtggtggcttccctggctttggtgttggtagcttccctggctttggtggtggcggctgcttccctggctttggtggtggctgcggcttccctggctttggtggcggcggcttccctggctttggtggcggcggcttccctggctttggtggtggcggcggctttcctggctttggtggctgcagcttccctggctttggtggcagcagcttccctggctttcgtggcagtgggcttaacaaccct

SEQ ID NO: 18983 - DNA, 439 bp, Glycine max
  Clone ID: LIB3106-087-Q1-K1-D2
cttgaagtctccacttatggggctatttgaaaaacgccgagcacgcaagttgttcattagggtccaaatttccaatgaaagggtccccagaaccctggacggaatggcctggccagaatgaattcttaagaagtggttggaaaattccggcttggtggttacccttttaaattcattgggcattctttggcgcttcattggtaagaacgctacttgggttaaccagtacttgacacttggaatagaatgaaggtatatgcagagtctcttgcacgctttcaaggagggtgaccttacatatatcctttggatgggttatgagagcttccccaaggatatgcacggcttagtgctgcctattgtgggacatatatgtttgataaacctgagtgcgaagtataatttgatgaggaacgaaaggttgttgatgtcacatctg

SEQ ID NO: 18984 - DNA, 457 bp, Glycine max
  unsure at all n locations
  Clone ID: LIB3106-087-Q1-K1-D3
ctcgttcagattttggtttttgcttccctatccgctctctcttcttcacttcagtatggcggtggtaccttacaccaccggttctgcacctcttctttctcctccttctacttctagtgttgccacaaagctctactccggattgaaacttcaagctgcgagtcctttcggagctgcaaaacctaacgtaaccgctgagttttatggaaaagttcacaacactcttcactgtcggtatgctaaccacaatacatcaatggcacgtattcgaatgatgccaatagggactcctaaagtcccctataggacacctggtgaaggaacttggcaatgggttgatgtatggaacgccctttatcgagaacgtgttatcttcattggacaagagatagatgaagaatttagtaaccaaatattggctactatgctntatcttgacagtatagaaaactccaag

SEQ ID NO: 18985 - DNA, 411 bp, Glycine max
  Clone ID: LIB3106-087-Q1-K1-D4
cccacgcgtccgcccacgcgtccggcaagcaatggctattactacaccttccaattcttcagattctcctctccctttctctattgctcatctccctctccctcgctgagtcgcaatctttcatcggagtaaactacggccaggtcgccgacaaccttccggcgccggaggacacggccaacctcctcaaatccacaaccatcggaaaagtccgtctctacggtgccgatcccgccatcatcaaggccctcgccaattccggcatcggaatcgtcatcggcgccgccaacggcgacattccgagtctcgccgccgatcccaacgcggccactcagtgggtgaacgcgaacgtcttgccctactacccggcgagcaacatcactctcatcaccgtcggaaacgagattttga

SEQ ID NO: 18986 - DNA, 435 bp, Glycine max
  Clone ID: LIB3106-087-Q1-K1-D5
ctagatcgcgagcggtcgccctttgttttttttttttttaaatatggtacaggggcagaagatttattaaagccggtcagagacaacaacgtatgtacgtggagtgtcttaggtgacttacccacataacataaagtgacattaacaaacatagctaatgctcctatttgaatagtgcatatcatcataccttattacatatagataggagcaaactctaactagattgttgagagaggtgaatgtactactcaacgtagtacatgggattaggaagcttaaaggtcctgctttcgtctatgaggtcttcaagcaaatcgctccattggtctccaatgattccaacaattctgaatccctgcctcaacagattctctctcattgctgatttgtatgaaagtgcatttgtagtgataagatctggatccttgagaa

SEQ ID NO: 18987 - DNA, 394 bp, Glycine max
  Clone ID: LIB3106-087-Q1-K1-D6
cccacgcgtccgtgggcattcgccgtaaacagaagagagagagagagagagagagagtcctgaaacttgggtgcgattccttgactcacaacatcaacacatcactatggctcttctgagtcgagcctcttcacgcttgcctcagctggtttcccctcaaagggcactttcactccacacaacgctcccatctttgaacgcatccccatccacagccacgcctacaccatatgccccgccaccgcctacgtccgcttcctctcccgccggcgtttcgaaggcggcggcgttcgtgatctcgaaggtggaccatctgatgaactgcgcccgtcgacgctgcatctgggccatgaccttcggcctggactgctgcgccgtctaaatgatgcacacc

SEQ ID NO: 18988 - DNA, 450 bp, Glycine max
  Clone ID: LIB3106-087-Q1-K1-D7
cccacgcgtccgcccacgcgtccgcccacgcgtccgctgaactgaattgagtctcaacaacccagttgagtaactaagatggcgcacgtgaggaacaagcaagtgcttctaaaggactatgttaccggttttcccaaagaatccgacatgaatattgtcgaaagtaccataacattgaagcttccacaaggttccaatgatgtcttgctcaaaaatttgtatttgtcttgtgatccgtatatgaggaatctcatgaacaggcccgaaggccctcccaatagtcgtgcttacactcctggctctccattaataggatatggtgtgtctaaagtcctggaatctgggcacccagattataaggaaggtgatttagtgtggggctttaccaaatgggaagagtatagcttgttaccctcagctcacatactcttcaaaattgagcacactgat

SEQ ID NO: 18989 - DNA, 431 bp, Glycine max
  Clone ID: LIB3106-087-Q1-K1-C4
gctcactgaacttttccgaccagtagatgttcattcaggcttgcagcctgttcgctcccctccacgagcaataattcatgatagggatgctcttgatggtgttaggggatcatggtcccatttgcacagggaaagggatccccaaattgaacggcaagaggaaattccccgtgatttatttcttactgagaggagttaccgagcttatggtctccaaggagatagaaggaatgtcataccagcctctcaagttaatcctacactggatccttatgagaaggattatgaaagagagcaccttcatcacgtggacactctctaccatacaaaccgtccttcatacagagaaagtcttcatggccatcttcatcatttgaatgagagtgaacaccagacctatttgcatggcggaatctccacacatgcaaaca

SEQ ID NO: 18990 - DNA, 414 bp, Glycine max
  unsure at all n locations
  Clone ID: LIB3106-087-Q1-K1-B10
tcgtccacgcgttcgtccacgcgttcggttnttcttctgcttcacacttctgatctcatctatacgtgagaatatctctaatagaatatcaagatttataatctttaataatattttggtggatcctgtgatatcactggaaagatttttctttttcttttcaatcaaaaatcaatgattttaaattacttcttggagatctcaaaaggacttactttctaatatttagagtgacccccatggaaggttgggttaatttttcttttttctgattctcatgatgatcttgtaatgggtttctacaaaaacagttttactatcctggagatcaaaccccttcctccaagagtagatctttaaaaaatctgtgtttgcatctaagataaggtgtaagaaagaggtgctatcagtctc

SEQ ID NO: 18991 - DNA, 103 bp, Glycine max
  Clone ID: LIB3106-087-Q1-K1-B11
aaaaaaaaaaataaaaatttaaaattaaaaaaaaaaaaaataaaaaaacgggaaggttttaaccataatgaaaaaacgggactacactttaaaaagaataaaa

SEQ ID NO: 18992 - DNA, 339 bp, Glycine max
  unsure at all n locations
  Clone ID: LIB3106-087-Q1-K1-B12
cgggtgaggtagaacccttccactgtggtgactctgcgatgggtgcctacaagtatgtttcagagctatggcgcaagaagcagtctgatgtcatgcgcttcttgcagcgggtgaggtgctgggagtataggcagcaaccttccattgttcgtttgacaaggtctaccctgcctgacaaggctcgtcgcttgggcttcaaagctancanggctatgtatttaccgtgtcgtgtangagggtggcgaagaaccagtcaaggtatgtatggaagcacaacaggagtccactgaatacgacagagcagtgcagacactgacgactggtgctaggtctatctat

SEQ ID NO: 18993 - DNA, 454 bp, Glycine max
  unsure at all n locations
  Clone ID: LIB3106-087-Q1-K1-B3
ggcagagacagatcagccagcaattgaactaaaacctggaattgaccttctaggacctgtggatgagatattttttgatatctatgacagatatgaaccggtcaatgaacccactttggacaactgctttgtatcaacaagttatgatgctactactcactttgagtcgaccgtggatgatgttctcaacatgtatacattgataactggaaaggttattgacctgagtgtggatcttagtgctgctagtgctgcagaagagtaaagaaaactcggtgatgtccttccttcatgatttgttgctgatgggatccgtaatggacttgataatgaatgttattaacgtttataataaattgatataaaatatttcttttttttttaaacaagatttgtgtggctggngaactttttcccgttcagaagctctgttgtgcgtaacatttttatatgt

SEQ ID NO: 18994 - DNA, 431 bp, Glycine max
  Clone ID: LIB3106-087-Q1-K1-B4
gtctgggatgcttccgggagttgaatgtgctcgaaggagacgcttgcataacagtgctggtgatgattccaccagcaaccgctctttctgtttgtatactaccaggaacctccaatcctcttcctctttactggaaagaagcatgttaaatcgggcatacccagatgaaaatctcggaggagcggcacgcgaagccaaacggagacttgatcagaagttcatggcacatatcaaatcagaaagccacaaaagaaaaggcctttttcatggtttgtggcgccaactcagatcttagtcttagggaatctagaagaagatcaaaatgataaatcctagaacagtaactggccttttattcttttttcttggtctgtaacgaaattatttattttcattagtcaaaagaaacagagatatgtgaaaactaaaca

SEQ ID NO: 18995 - DNA, 439 bp, Glycine max
  Clone ID: LIB3106-087-Q1-K1-B5
cttcaggggtttgaaaaaggttgatattgaagccatggttcttgactccattctgacttctcctcgtctcaagtctccatctttcaggaggcagtttacaaaggatgaactgggtagttggtccacactttttcagaggcatcgcttcctcttatctgctcttgttctgctaactctcctctgcactgtttatctttactttgctgtcactttaggggccagtggcacctgttccgggttgactggagcccagaaagcttcatgccatatggagcttgttaaggattctgtggccaagggtaaactgaagattctttgatatttcaaaatattattacaagaaaatttttgtctttattttgtgcctgagtataggtgacatgaaatccaaatatagtctctggctacaggatcaatgtgactgtgatttgtatacata

SEQ ID NO: 18996 - DNA, 359 bp, Glycine max
  Clone ID: LIB3106-087-Q1-K1-B6
ctacacgctaatttaggatggtaagagaattaacaacttgattgtggcgaagatgactaggaggcagctgagggtaatgatagtgatgaagaatgggacgaagagcatgctttggctggagatcatgaaatgcctctggcatctgattcctacatcaactttgagaatctttcatggactcatttacaggatcttttagttaactgccattctaatgacattgatcgtgacaatgtgcaatcaaatgagagcgaagagcaatatcacatatacagcgaagataggaaggacaattactctgatgaatgattactggcatttgcagtcatcaaatacaccggaaatgtaatattctgtag

SEQ ID NO: 18997 - DNA, 346 bp, Glycine max
  Clone ID: LIB3106-087-Q1-K1-B7
cttcatgcggcgtcgcagtctgtcaagacttgaggaaaatgagaatcttggggtaaccccgtttgagaaaaatgttgatatctggagacaggtttggcgggttggttttcgccaagatttgcttgttaagggtgtttgattccgagaaccaattttctatcgctggccttaacttgaagcatatgcacgagatggttattagcataaactctcattggtcttgggtaattagggagatcttttaccagcttgtgtgacagagaaatgggtagaggcttttcatgctcataatatcctatatatctcctggtcagcttaagctggttcagcatttgtcgaaggtaaa

SEQ ID NO: 18998 - DNA, 451 bp, Glycine max
  Clone ID: LIB3106-087-Q1-K1-B8
ctaaacaccaagcttccctcacgagtttgatggcttagcaccactctcttttccttaattgctttcgtcgcagtggatgttgtcgacacccacagcaacaaaaatcatcatcaccttgtgttcttgtctcttagccatggaccctttaacaccaaaagcttgatctttcttcccgttactcaaggtgagaaggatcataggaaggccacagtggtagggcagatggttgttaattaaacacaacaaccgagggttgtgtgctattatatgttttgcttgtgttatgttttgttttgtatagtgtatttgtgggagctaatggcctaggcctatttcctaatccccttgttgtaaatatttgtgacttgttatagtgggtattctcatcccttctttttttgaaaaacttatgtctcccaaatttgtatagttgatgttcttagtacccaca

SEQ ID NO: 18999 - DNA, 458 bp, Glycine max
  Clone ID: LIB3106-087-Q1-K1-C1
tccatttccacatcatccaacccgattacctgtcactgagttacaatctagagagagagaagatatccaccgacctaattcttcagatatgtgttccagtcactatgtcccgccacttaattcagagttgaactgtaagaaaaactcgttcgttgaacagaatcaatgtgaccgagtctggaatcacaatggaaatggggtggtttctctgaaagaaggttcacatcatatctcaccaagttccagccaaccaacaatgaggttgatgggtaaagatgttccaattggtagaagcagccaagagatgcaacaatttgcgggagatgtttggcctgatgaggaatccagaagaaggaattattctgaatatgctgctttagatcattctttattggaaagaagttctaagcaggattgggtatctggttcacctttacaaatatcagctgacaatgtat

SEQ ID NO: 19000 - DNA, 440 bp, Glycine max
  unsure at all n locations
  Clone ID: LIB3106-087-Q1-K1-C10
cccacgcgttcgcccacgcgttcgctcgttctaatctctgtctatctttctctgtgtctgtggcttttttcgtttccctccacagatctctgaaattccatcccatcaaaccctaagtccgggttgatcctatcggcttcgttaactatccatctccgaagccatttttttttcccaatttctgttgtttattcaaactccataatcttcactcattgatgatcctggaaccttcgcgagtctcccttttcttcatgggcctgcgccacccttacgatgcctgagctgcgttcccggccacacataagccgccttgtagacagcgcaaacgccaatccgaccactcagccagcctcgccgncggccgtcggagcctgtcgaaggaagccagccgtcgccgncgctccgaccgggaggaatcgcangctgaacaacgcgat

SEQ ID NO: 19001 - DNA, 286 bp, Glycine max
  Clone ID: LIB3106-087-Q1-K1-C11
cactgtttttggacacatgaaccctgaagagatcccatgggggtcaactggagctgatatcattgttgagtccaccggagttttcaccgataaggacaaggccgtcgcacatttgaagggtggtgcgaagaagttattatttctgcccccagtaaggatgcccccatgtttgttgttggtgttaacgagcacgagtacaagccagagcttgatattatttccaatgctagctgcacaaccaactgccttgctccacttgctaaggttattaatgacaggtttggca

SEQ ID NO: 19002 - DNA, 445 bp, Glycine max
  unsure at all n locations
  Clone ID: LIB3106-087-Q1-K1-C12
gcgcccacgcgtccgaaaagatgctgcanggctttggcgccaaccttaccgtcgagacggatgcggacggcgtgcgcaccatccgcctggaaggccgcggcaagctcaccggccaagtcatcgacgtgccgggcgacccgtcctcgacggccttcccgctggttgcggccctgcttgttccgggctccgacgtcaccatcctcaacgtgctgatgaaccccacccgcaccggcctcatcctgacgctgcangaaatgggcgccgacatcgaagtcatcaacccgcgccttgccggcggcgaagacgtggcggacctgcgcgttcgctccttcacgctgaagggcgtcacggtgccggaagaccgcgcgccttcgatgatcgacgaatatccgattctcgctgtcgccgccgccttcgcggaaggggcgaccgtgatgaacggtct

SEQ ID NO: 19003 - DNA, 446 bp, Glycine max
  unsure at all n locations
  Clone ID: LIB3106-087-Q1-K1-C2
cggacgcgtgggcgcgctcagcgtaagggtgctgggtcggtgttcaagtctcacactcaccaccgcaagggtccggcgaggttccgcagcctcgacttcggcgagcgcaacggctacctcaagggcgtcgtcaccgacatcatccacgaccccggtcgcggcgcccctctcgccaaggtggcattccgccaccccttccgctacaagaagcaaacggagctcttcgtcgccgccgagggcctctacaccgggcagttcgtctactgcggcaagaaggccaccctcgtggtcggcaacgtgttgcccatccgatccatccccgaaggtgccgtcatctgcaacgtcgagcaccacgtcggcgaccgcggcgttttcgccagagcctncggtgactatgctattgttataagccacaaccctgataacgacacctctaggatcaagct

SEQ ID NO: 19004 - DNA, 411 bp, Glycine max
  Clone ID: LIB3106-087-Q1-K1-C3
gttgttcctcttccactggtggcaccactgtcaaatttgcctgttactctccctccagtgcctgaactacctgcagtacctaaagtaccaattcctgaagtaatagttaataacgccaaaataatcccttgagtacctatgatctatccagtcactactacttattttgtcacttgctaaattaacttgttgttgccatcccagggtggttctggttctgttggggtttaatttctgtcattcaattacatgctatgttcagtttatatgttgcttcagtcagttgaacttcagcaaaaaaaaaagcaacaataagaaaaaaatgttaggactgatgaaaaaattaacaataaagaattattctgaatatgctgctttagaatattctttattgtaaataaattaataaaa

SEQ ID NO: 19005 - DNA, 451 bp, Glycine max
  Clone ID: LIB3106-087-Q1-K1-B1
gttctttcctcacttcaaacttgccaaaaatggcaacagaattggcatcatctcccaattgggttccaagcgcagccacatgtttggcagcctttgccgccctccttctcctcttcctccgcggtctccgccgccgccgatacaacctccccccaggcccaaagccctggcccatcataggcaacctaaacttaattgggtcccttccacatcggtcgatccacacgcttggcaaaaaatacgggcccatcatgcacgtatggttcgggtcgagctccgtggtggtgggctcgtccgttgaaattgccaaggccgtcctcaaaacccacgacgccaccctcgccggcaggccgaagttcgcggcgggcaaatacacaacctacaactactcggacatcacttggtcccagtacgggccatactggcgccaggcccgtagaatgtgcctaat

SEQ ID NO: 19006 - DNA, 339 bp, Glycine max
  Clone ID: LIB3106-086-Q1-K1-H6
cccacgcgtccgcccacgcgtccgcccacgcgtccggtgaaggacttggaactgctcatgatgcacaacaggacttactgtgctgagattgcccacaatatatccacaagaaagaggaaagatatagttgagagagccgcgcagcttgatgttgttgtgacaaacaaaacagccagattacgcagccaggaggatgaatagtctaaatgactaaaaaagtcacttatctgtagtgattcagtagttcaatatcaaatttgcagtttaattttaaattgaattctgcttcaatgtattttgcttattgagaaccaagtttgattttgttgtgtctcttgc

SEQ ID NO: 19007 - DNA, 406 bp, Glycine max
  Clone ID: LIB3106-086-Q1-K1-H7
gataactagaaacagtgtgatgaaaatgaaggtccttggtttcttcgttgctacaattggggtagcatggcaatgccatgcgtacgatatgttccctctccgaatgaacactggctatggtgcccgtactccggaggtgaaatgcgcaagttggaggcttgctgtggaagcacacaacatctttggctttgagaccattcctgaagagtgcgttgaagcaacaaaggaatacatccatggcgaacaatatagatcagactccaaaacagttaaccaacaagcttacttttatgccagagacctcgaagtccatcccaaggacacatttgtgttcagtatagatggcaccgtactctctaatattccatactacaaaaaacatggatatggggtggagaaatttaac

SEQ ID NO: 19008 - DNA, 366 bp, Glycine max
  Clone ID: LIB3106-086-Q1-K1-H9
cccacgcgtccgcccacgcgtccgcccacgcgtccggcgagcgagcagtttcaaagagaggatttgggattgggaaggcgagggattgcgctgcgtctcttcctcttctctttcgattcatccctcattcataatcttccaatccaacaacctcagcctcacactcacacatacacacatctgaacgcgtatcgtccctcccatggcttcaaagcgcatcctcaaggagctcaaggacttgcagaaagacccaccaacttcttgcagcgctggtccagtagctgaagacatgttccattggcaagcaacgattatgggtcctgctgatagtccttatgctggaagtgtattcctagtcactattca

SEQ ID NO: 19009 - DNA, 458 bp, Glycine max
  Clone ID: LIB3106-087-Q1-K1-A1
atagctagttgaagctgatgctccatcccttgcgttaatggtggattgttagatttgatttgattttaggaacaacttatcgatccctcaatctggtatgaacagatcgagggcgtggtctatttgatttgaactgaatttcggattgaaggatctcattttcttggagcattaaagcagaaattttcttgcatcctattctgttttacctaaaacatgtggagatttaagccattcagtcacaaagagcagactggtcttgaaggccgcactatagatgttggcaatcttaaaatacatgtcattaaggccattgccgaaggagggttctcttgtgtctacctagctcgagatgctgtacatatgtcaaagcaatatgctttgaagcacatgatatgcaatgacgaagaatcacttggattggtaaagaaggagatatctgtgatgaaggtgctggc

SEQ ID NO: 19010 - DNA, 430 bp, Glycine max
  unsure at all n locations
  Clone ID: LIB3106-087-Q1-K1-A10
tgcaaatcttccaactccaccatgttcggttccgcacgaatcctctccgacgtcactctccggctccgtcaaaacctttcggttcacggtgtgcgcgtgcagaacataaacatcggatgcggtgtgggaggcgagatcccggacaacaagcgtctggtgtacgctcttcagaacctncacggaataggccgttccaaggcgcaacacatcgtcgccgagctcggcgtcgagaacaaattcgtcaaggaccttagcaagagagaactctattccattcgtgaattgctctccaagtatctcatcggaaatgatttgaaaaagtgtgttgagagagatgtgggaaggttggtgggcattcagtgctaccgagggattagacatgttgatagcttgccatgccgcggacagaggactcatacaaatgcacgca

SEQ ID NO: 19011 - DNA, 449 bp, Glycine max
  Clone ID: LIB3106-087-Q1-K1-A11
tcgcccacgcgtccgctgaatcatggctttagcatgtggcatcatattccttcctctgggttgatgcctgcaagtgatgttcttattcgtgcaaaggaggtgataattaacagggacaatctggttaaactacttgccaaacacacgggaaattcagaggaaacagttgctaatgtgatgaagagaccgtattatatggatgcaacaagggcaaaggaatttggggtcattgacagaattctttggcgtggccaggaaaaggttatggcagatgttgcttctccagatgactgggacaagggagctggtatcaaaattgtagatggattctagttcctcttttgtggatacgtttctctttgtcaatgtgacatgtttcggtaggattttttttttcatggtataccggtccagaaatgttccacagctattcacagaaaactagagct

SEQ ID NO: 19012 - DNA, 364 bp, Glycine max
  Clone ID: LIB3106-087-Q1-K1-A12
cccacgcgttcgctgactcatgggcggacgcttgggccaatatagcccaagccctatacaaggaaaccctatcacacacccatgtgattcaagttccatggctagcctcaaggctgcatttttggctgcattgctctgcatgcttgaggtgagtgcacccatggcacatgcagctatcacgtgcgggcaggtgacgagtagcctggccaattgcatcggttacctccagaagggaggaacgccgtcgtccggatgctgcaacggagtgaagagcctcaatgccgtcaccaagaccaccgactaccgccaaacggcgtgcaactgcctaaagtcggccgccagccaaatttccggctttaacgcc

SEQ ID NO: 19013 - DNA, 417 bp, Glycine max
  Clone ID: LIB3106-087-Q1-K1-A2
ctctttgtattggttgcaggttacttgcctttcgacgaccctaatcttatgaacctgtataaaaagatctcacctgctgaatttacttgccccccatggctttctttcactgccaggaaattgattacacgaatcttggatccagatcccaccactcgtatcactatacctgagattttggatgatgaatggcttaagaaagaatataagcctcccatttttgaggagaatggggaaatcaacctcgatgatgttgaagctgtctttaaagactctgaagagcaccatgtgacagagaataaagaagagcagcctacagccatgaatgcatttgagttaatctccatgtccaaaggactgaaccttgaaaactcgtttgatactgaacagggatttataagggaaacaagattcacc

SEQ ID NO: 19014 - DNA, 458 bp, Glycine max
  Clone ID: LIB3106-087-Q1-K1-A3
cttttcttctatttttttattcctttttggtgaaatataagttttcctctttagttgttgacttcttgtttatttttctgattaatgagaaaaatccactttggttgttcactcgtatatgtatctcagtctcaggtggtggtgcatcgctgagttgtgtgagagtgagaaagagagagtgtgtgtgtgtgcagaagatgtggccattcagcagaaaaggggcttctggtttttcatcatcatccacggcagagcaagtcactgaaggaattgatggaactggtctcactgccattgtcacaggagcatccagtggtattggcactgagactacacgtgtcctttcattgcgtggtgtccatgtgattatcggtgtgagaaatatgcttgctgctaaagatgtcaaagagacattacttaaggagattccctccgctaaagtgatgccatggagttag

SEQ ID NO: 19015 - DNA, 352 bp, Glycine max
  Clone ID: LIB3106-087-Q1-K1-A4
gttcaaggttgtttggatgaagcatgcagtttttacaatcggatgattcagtagggtgggtaccaaccccgacttagcatacatacttgcgtcttcaaagctcttgtaagcaatccggggatcttgtcaaagaattaccttaagcaagctgagattatatatcatcatttggttacaactggacttgatgtgcataaagaaatttatgggggcctaatttgggtgcatagctatcaggattccataaatgaagaaaggatagcagaattgaaggaagcaatgctccgtgctggatttgaggaggatagagaggtgctattatcaatcttgagggcttgtgcacgggaatggg

SEQ ID NO: 19016 - DNA, 381 bp, Glycine max
  Clone ID: LIB3106-087-Q1-K1-A5
tcggagcatttggggctggatttttgaaacagtcgaagtggaatgatgcatgactagagatgggtcataatgaatatataggcactgctccatatatatcctgctctccttcactacgtcaccatagattatgccagagagatcagttcctgatcctctcatctgatggtttatatcaatatctaagcaatgaagaagtggcttctcatgttgagagcttcatggaaaaatttccagaaggggatccagcccaacatttaatagaagagctgctcctgcatgcaactaataaggctggaatggattttcatgaattgctagatatcccacaaggagatcggatgacgtatcacgatgatgttactggcatggtgatatcac

SEQ ID NO: 19017 - DNA, 453 bp, Glycine max
  Clone ID: LIB3106-087-Q1-K1-A6
ggcttttcatttactaggtggattacattcttggggacaatccattgggaatgtcgtacatggttggatatggtgcacgctacccgcagagaatacaccaccgggccagctcgcttccctcagtggcagcccacccggcccacattggttgtaaagctggatctcggtattactttagcccaaatcccaacccaaatgtgttggttggggccgtggtgggtgggcccaccaataacacagattccttccctgattccaggcctttctttcagcagtctgagcccactacatatatcaatgccccgctggtgggccttctttctttcttttcagctcactgttgactttgcaagaagtgtatctatgatttccatgtggtgcgcaaaattggtcaccctgcattgctcctaaggggaaaaaaaatggagacgagtgtcgctaatagtagtattc

SEQ ID NO: 19018 - DNA, 449 bp, Glycine max
  Clone ID: LIB3106-087-Q1-K1-A7
atcatttactgaactaggagtaccacacttttacacacgatacggagtcaatgaatctcagggaagtaccagaggcacatcaaaccttggacttgcacatgccaagggcatcgcattcttgatgatgggtgaacgttggacatgtatcataactaacactgatgggcctgacgctggcacagattccgatcaatgtggtgaaaatggcacctgtaccattgagggcgaaccagagacacaagaattgaatgatcacactgatgttgtgagcaacactgacaccgcagcatactgcaagtgtgctgaagggtggcgtcgtgtcatcttcaggactgactgccctgatgcaagctctggcaaggactatgctgaatgcgctcgacagagtgcttgcactatagatgatccatcgagctaagatatgcgatcaatgcatctatgatataatc

SEQ ID NO: 19019 - DNA, 225 bp, Glycine max
  Clone ID: LIB3106-087-Q1-K1-A8
ggaactatggtaattggatttcctggattataaggttcatttaattttatgccttaaaagtgtaaatttaggttgttcttcatacggtcatgtatcccttgaagcctgttcctccttgtgctttatttttaccgcgtttgatattttgggggaatatggtcggggtaagacataaatgttgttgagttcccttttcttcatagatagacatctcagttttgcttc

SEQ ID NO: 19020 - DNA, 454 bp, Glycine max
  Clone ID: LIB3106-087-Q1-K1-A9
cccacgcgttcgcattaattaaaacactggagaaagagggatggaggaaaaaagatttggggaaggaaagaaattagaaatatttattcattgtcaccaaatcttgttccctgcaagagaaagaaagaagggagagaagaagttgttgggttgagttggattggatttctaatctaatctatacctttcttttttcctatgcttttaaggcacaaacccttctttcttccctcttctttcttcttcttattgttattccttgcctttaccctttagggaaggaagaaggaacaactatactactattatccttattattgttattattggaattaatctttttattatagttattgctggtgttattattcctcaaatatggattcgttgtgcctctccaacgactcagttgtttctggattcaaagacaaggagtcaatggttgacccctttt

SEQ ID NO: 19021 - DNA, 426 bp, Glycine max
  Clone ID: LIB3106-086-Q1-K1-H5
cgcacactttcttcacaccattccgtttctccatttcccagcaatgtcacaacacattggaattcttccgcatccaccactctcctcaataaccccatcaaccaaacccgattcactacccctctgcttcagcttcggcttcaggttcgggttccattcctccgcctctccactgatttccctctcctgtggctgcgcacaccaaacccctccggttcggttgagtccacaacaagggtcatcgcaagaggaggaagagtctgttttcctttaccttcaacctatttccagcgaaaaccacttcgaccgtgtcctcgccaaggctcaaacgctcgacgaaggtgtcgttgtcgtttggatggcaaattggtgtagaaaatgtatatatttaaaaccaaaattggaaaagctggcaacagaatatta

SEQ ID NO: 19022 - DNA, 449 bp, Glycine max
  Clone ID: LIB3106-086-Q1-K1-G11
cccacgcgtccgcgcagtgttagggtttctgtagcctccaaccagaaagagagggaaatggctccgaaacatcctagtacgggtttgtttgttggattgaacaagggtcacgttgtcaccaagaaggagttgcctccacgcccttcagatcgtaaggggaaaacaagcaagcgagtgcactttgtgaggaacctcattcgagaggttgccggctttgcaccttatgaaaagcgaataactgagttgctcaaggttggaaaagataagagggcactgaaaggtgccaagaaaaaagctggaacccataagcgcgcaaagaagaagagagaggagatgtccaatgttcttcggaagatgagggctggtggagctggagacaagaagaaataagtcttggttactttttctagtttcactagactgtttcgatgtacgagttgtcttatttt

SEQ ID NO: 19023 - DNA, 458 bp, Glycine max
  Clone ID: LIB3106-086-Q1-K1-G12
cacaaaccctcccctcacactctccaaaccctagcggcactacacacgttatctctctctctctgtctctctctccctctctccttccccaagatgtcgagcgccgatcccgagcaccgagaagaggaggaggcacccgccgtcggcgacgacgaggacaccggagcacacgtcgctcccatcgtcaagctcgaggaggttgctgtcaccaccggcgaggaggacgaagatgcaatcctagatctcaaatcgaagctttaccggttcgacaaggatgggaaccagtggaaggagcgaggcgcgggcaccgtgaagttcctgaagcataaggctacgggcaaggttaggcttctcatgaggcaatccaagacgctcaagatctgcgccaatcatctcattttgcctactatgagtgtgcaagagcacgctgggaacgagaaatcttgcgtttggcacgc

SEQ ID NO: 19024 - DNA, 367 bp, Glycine max
  Clone ID: LIB3106-086-Q1-K1-G2
ctttggttgcgaaatttcagaagttacatgaggacctgactaatggtttccgcaaccttgaggacgaaacccgatgattgatgattgaagatttggtagtttgctcaaatattgtgttatttccaattgtaagacgcagtctagcatcgcagggttgcaacgtcccgagtgttctcatatttgactgttcgattcattcatatcacatttatttcctttcttggtgctggtttggcttttgatctagtctcatgtgtagctataatcatgtgtttcagtcatcctcagtttgtttattgagaataagaaacgagacttgctctttcaatatgtatttaggagaataaaattatcttaggacatgaag

SEQ ID NO: 19025 - DNA, 414 bp, Glycine max
  Clone ID: LIB3106-086-Q1-K1-G3
cccacgcgtccgcagaaacaggtgcaatataaagaggctgaaggttcctcctttcgtggtgggtcatatggtgaaacacgtggcacaccaaagcatttacatcgtggtggggatcaggatcgaacatttattccagattcaatgaatttcggagtggaaagggtaggcaaaaaggaccaaaagcgcaaggcacctggagctccatcagctcataaaagacctagaaaactaaaggcctcagatctttagtttctcaggtggcaaccgggaaaggtgtttcaattcacagaattctttcaatcaaaattatgaatgttgtggaaggtgtggctgtgaactcaacacctgaaaattcggattgtggtatatctaggccaactgaaattcgggtcacttcggtctaaaattttaaac

SEQ ID NO: 19026 - DNA, 340 bp, Glycine max
  Clone ID: LIB3106-086-Q1-K1-G4
aagagaatccgaggcgaagagaagagaaaaattaagatggaggggaaggagcaggatgtgtcgctgggagcgaacaagttcccggagagacagccgattgggacggcggcgcagagccaagacgacggcaaggactaccaggagccggcgccggcgccactggttgacccgacggagtttacgtcatggtccttttacagagcagggatagcagagtttgtggccacttttctgtttctatacatcactgtcttaaccgtcatgggagtcgccggggctaagtctaagtgcagtaccgttgggattcaaggaatcgcttgggccttcggtggcatgatct

SEQ ID NO: 19027 - DNA, 55 bp, Glycine max
  Clone ID: LIB3106-086-Q1-K1-G5
cccacgcgtccgcccacgcgtccgaagaaaactaaggaaggaaagaagagtgagc

SEQ ID NO: 19028 - DNA, 318 bp, Glycine max
  Clone ID: LIB3106-086-Q1-K1-G6
ctcacgcgttctctctgcttgggttgcagctcagcttctagtacatctaatgatggagggaaaggaaaagggtcacgtcaaggttgacattattgtccatgttaacggtcataaggactctaccactggcaatatcacttaccacctgatctacattctcaaacgcattatcgagagagttattgagagatctgataagatgaacactaagactaacaagaatgccttcaagcatgactagctgcttgctaagcttaaagcaggactcacaagaggtatcaccttggataatgcctagaccaccattgactattgcac

SEQ ID NO: 19029 - DNA, 385 bp, Glycine max
  Clone ID: LIB3106-086-Q1-K1-G7
cccacgcgtccgcccacgcgtccgcacctccttagtttcgaaagcatggcttccctggcggcttccaccgtggctatgtcagaaatccttggaaaccccgttaacctcagatgcgcaaccaggtctgctccatcaccaactacacctgccaccttcaagaccgacgcacttttctccaagaagaagccagctccacctccaaagaaaaagcctgccgctgtatcccccgccaatgaggaactcgccaagcggtatggtcctgacagaaggatcttcttgcctgagggtctcttggaccgatctgagatccccgagtacttgaccggagaagtgcctggagattatggttatgatccgcttggtcttagcaagaagccagaggact

SEQ ID NO: 19030 - DNA, 424 bp, Glycine max
  Clone ID: LIB3106-086-Q1-K1-G8
cttctattctcttttgaaacacttagaaaagaaaaaaaaaatgtctgcgttccttttgcttttcctagttttttcttctcagttgatcggtggactcaatacacctctaccatctccaatctatggaaacctcgtaaccattctcagcatagatggaggtggtataaggggtatcattccagctgtagttcttgaccacttcgaaaaggctcttcaggcatgggataaaagtgcatcactagcaagttattttgatgtcatagcagggactagcacaggaggactcatgactgctatgctcactactcctcacccagacgaccgcactcaccctctgtttactcccagcggaatcatagacttttataaagaatacggtccttctatattcaatgaaactagtgcttgggataatgcattcccg

SEQ ID NO: 19031 - DNA, 442 bp, Glycine max
  Clone ID: LIB3106-086-Q1-K1-G9
cccacgcgtgcgatggtccttctgaagaggagattgcaagtgcttcattcaagatgtggtttgttggacatggtttcagcaatgagagtcttgctgcacagggaaacacaaaacctgacatggagattataacaagagtaatgggacctgaaatgggttatgtaaccaccccaataattatggttcagtgcgctctcgttcttcacggccaaagaaagaatctaccaaagggaggtgtttacactccagggattgtatttggtccaactgatctccaagaaagacttcaacaaaatggaatatcttttgatgtcatctcgaaaaggtctatttcttcttgactctaaacagttcatccatttttggttggaagtgaaaaaactgacttgtcggagtgcagaaggtataataaagtattgagaaaatcttttttggtttatat

SEQ ID NO: 19032 - DNA, 386 bp, Glycine max
  Clone ID: LIB3106-086-Q1-K1-H1
cggacgcgtgggatggaaatgacgataccacggtgattgttgtgtatcttgactcaaatctcgtgagtagggccagcactgtgaagttccctggcatttctgttagagggggtggtattaacctgcctcataacacactggcaccttgtaccacaccaacagagattggtggcacctgatctaagtcgtatcttttattttcttctttgtcgtatcatattctcgtgtgaataccagttatcttcaaaatagcactgacaggagcagcacttcaattctttgaatgtgaactgtaacttactacgatactaatactcatgtgtacggtttacatctttcatggtatcccttgacctgaaaaccaacagaacagaacacaacttctg

SEQ ID NO: 19033 - DNA, 445 bp, Glycine max
  Clone ID: LIB3106-086-Q1-K1-H10
gcaccatgaagctctacaggaggcccttccaggtgacaatgtaagatttaatgtgaagaatgttggggtcaaggatctcaagcgtgggtttgttgcctcaaactctaaggatgatcctgccaaggaggctgccaacttcacatcccaagtcattataatgaaccatcctggccaaattggaaatggttatgctcctgtgcttgactgccacacttctcacattgccgtcaagtttgccgaacttgtgaccaagattgacaggcgatctggtaaggagattgagaaggagcccaaattcttgaaaaatggagatgcaggttatgttaagatgattcccaccaaacctatggtggtcgaaactttctccgagtatcctcctcttggtcgatttgccgtgaaggacatgcgacaaactgtggctgttggagtcatcaagagtgtggag

SEQ ID NO: 19034 - DNA, 395 bp, Glycine max
  Clone ID: LIB3106-086-Q1-K1-H11
cccacgcgtccggccaatcgagctcacagtgttataggtaccgatgagttcatggccacagatctgtatgaagaggaatacaacgtgcttgatgacatctatgcatgtggcatgtgcttgctagagttggtaaccgttgagtacccgtatattgaatgcaccaatgctgctcaaatatacaagaaagtgacatctggaataaagccagcatcattggcaaaggtggctgatcttgaagttaaagcatttatcgaaaagtgtattgctgatgtgtcggaacgattgtctgcgaaagacctcttgatcgatcccttccttcagtcagattatgataatgatagtgtaggtcgatcttcaagatctcaaacccatcattcaggaaataattctcataa

SEQ ID NO: 19035 - DNA, 458 bp, Glycine max
  Clone ID: LIB3106-086-Q1-K1-H12
cccacgcgtccgtgagttttggctttcctcaagtaagtactaatggtttattctacatgaaatatgctttcatttaaatttgacaatggttacaggaattgaagcgctttccaactcttcaagctgaaatagcagaagcagctaatgaggggttagagagattccatgatgacggtaagaagacaacgttgcggctggtggaaatggaatcttcctatatcaccgttgatttcttcgggaaactccctcaggaagttgacaagggaaagaattcagcttcctccttgttagatgatcagtatgccaagggacacttccagaggatcggttcaaatgtttcatcttatgttgggatggtgtcacaaacgttgaagaacaccattccaaaggctgtggttcattgccaagtgatggaggctaagcgatctttattagacccgttttatgcacaactgggc

SEQ ID NO: 19036 - DNA, 386 bp, Glycine max
  unsure at all n locations
  Clone ID: LIB3106-086-Q1-K1-H2
aacctttcaatccaggaatgttgtccatgtctcaccatttaaattcagcttccttcacgagcatgtatgatacagatgttagtcaaggcatgcacgtggagactgtgcttccccctgctgatgctagggtcccttgtgggcctagatcgcctctgtattatagaaccaactatacttttcgcatgaaacatggttctactaaaggtcaaacctctatcagagaaagaagtggatttgggtctccaagaataatgaatccacatgcgcctgagtttgttcccagaaatgcttctcanatagaaaccaatgatgccaattcaaatgtttccatgagcataactctttgtctgacatangcatgtcagaagaaacaagctagatgaaaa

SEQ ID NO: 19037 - DNA, 246 bp, Glycine max
  Clone ID: LIB3106-086-Q1-K1-G10
gccagtccacagatcttctcagagggaggcctagactacttgctcaacccaagcctgatccatgctcagagcattcttgctatctgggctgttcaggtcacgctcatggagtttgttgaatgttacggattcggtgaaggaccactcgttgaatggctagacccaatctaccatggtggtgctttagacccttttggtctgtctgatgaccctgatgcatttactaagttgaagttcttggacttc

SEQ ID NO: 19038 - DNA, 363 bp, Glycine max
  Clone ID: LIB3106-086-Q1-K1-E4
gcttatcaatggcctgcggcattccattacgtctctccgctttaccaagcaccacaatgagggctacacttgcccatttacacgcgccttctatctccagccggccgagtcctctcagctccaactcaatgagtcaacccgccacaacgaatcacgcggatgttgtagtgcagtacgtggtgctccgccgagaccttatcgacacgtggccgctagggagcgtggtcactcaaggttgccacgcttctgtttccgccgtttgggtcaacatagacgatcctgtcaccgtcgattattgcagccccgattaacatgattctatgcacaaaggtacacttgaagtaaagggggaaccccagatca

SEQ ID NO: 19039 - DNA, 433 bp, Glycine max
  unsure at all n locations
  Clone ID: LIB3106-086-Q1-K1-E5
ctcactcacaactcagtgaaagagaattcgaggcgaagagaagagaaaaattaagatggaggggaaggagcaggatgtgtcgctgggagcgaacaagttcccggagagacagccgattgggacggcggcgcagagccaagacgacggcaaggactaccaggagccggcgccggcgccactggttgacccgacggagtttacgtcatggtccttttacagagcagggatagcagagtttgtggccacttttctgtttctatacatcactgtcttaaccgtcatgggagtcgccggggctaagtctaagtgcagtaccgttgggattcaaggaatcgcttgggccttcggtggcatgatcttcggcctcgtttactgcaccgctggcatctcnaggggacacataaacccggcggtgacatttgggctgcttttg

SEQ ID NO: 19040 - DNA, 441 bp, Glycine max
  Clone ID: LIB3106-086-Q1-K1-E6
gagagactctaaaacctttcgttcttttttccctttatttttcccgttttgccattttgcttttctccttccttcatggctgcttggcttattcttcttctcctttgcatggcaatgattcaatccacgtttgcgtcttcttcttcctcttcgtgccttcccgagctgccttcatttcgctacaatcttcaatcacaatgcccaatctccatcccatcgaatccacctcttcaggtggatggaaattttgttgaaggaattttctctgacataaagaggacagagtatacgtctatactcttttatgcatcttggtgcccattctctcgtaaaatgcttcctcaatttgaaattctaagttccacgtttctccaagtagaacatttggttcttgagaaatcatcagctttgccaagcttcttttcaaaatatggaattcac

SEQ ID NO: 19041 - DNA, 237 bp, Glycine max
  Clone ID: LIB3106-086-Q1-K1-E7
ctcactctttcgtccacgccagcgtcttctcggtctataaaaaacaaaaattaagatggacaataagcagcattaatcgctactaaaaacaattctacttctgctttagacagacaattattcctttcactcaaacctcttcctactcctataactaccataagcctctaccttcatcactatatgatcttacataacttacgtcattttcctttccattgcatccacctcttcact

SEQ ID NO: 19042 - DNA, 351 bp, Glycine max
  Clone ID: LIB3106-086-Q1-K1-E9
cccacgcgtgcgcttgaatccggagaatttgacactgaggggctcttggctaaggcaaagtttcgggtaagctacaatggtaaagcaatctccaagcctctccagcaggttcttgctaacagcttgagatatttcttgaggcgtccgacaactgaggaatctagtttttgagtggtacttcttggaaagtagtgcaggacattgtattctcttttgaagtacaccatgggattgtacaatgtttgcattcgttttgtcatttgaaggacaaatgaagaatatggctaaccgatagccacaacacaatgcattaaatcataaaattgaatcaacatggacggatacttatat

SEQ ID NO: 19043 - DNA, 402 bp, Glycine max
  unsure at all n locations
  Clone ID: LIB3106-086-Q1-K1-F1
aaaaaaggaaaggaacttgagccacattttgtccctggtggactcaagaagagtctttgataggacagttaattaaaattatagcctgaaataagggttcactagcaatggcctcaacctcttctgctctcactatatcctcttcttccacccttcatgattgcaaggctccaagacagtcaccagctgcttcaccacaatgtgtgagccttccctctccccttttgcactctcagaactgttcatggaagaccactgcttattgtcgcagtattgctcgaaatgttatggcaatggccacaggagaggcaccagctgaagctgccccgactgaggtgccagagattgtcaagactcttcaagaaacttggacanagttgatgataagtatgcagtgagttc

SEQ ID NO: 19044 - DNA, 452 bp, Glycine max
  unsure at all n locations
  Clone ID: LIB3106-086-Q1-K1-F10
cactgcgtgttgttcttgttcaatggcacgcctatttcgttccctcagaaaaaccctaaccctaggcctaaccctaacacaccaatttcagcatcaaccatgcatttctcgaagaagttacatatccgacatgcgcaaatcagctttcgagggaaacatcttgagactcctccgcaacgagattcaatacgagcttcagtcctctcctcccaacaaccctgttaccaagtttaattcctttattgtggatggtcgagctggggagcgatggattacgttgaaaagacaatacgctgatgaagacattaaacttgaagtcaccatgtttgatggagctgttcctgctccaactccaactccaaatggtggtgtagttaattctgatgaaatgcagatgcacattactggaattgtcaacatctncaagggagaaggtcgtgtgttggaaatca

SEQ ID NO: 19045 - DNA, 444 bp, Glycine max
  Clone ID: LIB3106-086-Q1-K1-F12
cccggtcgaccgcgcgtccgaacgctcctcacttgcagaattcaaagaaggcgtcttcataaacgcctttattctccgtttccgggtccttcccggaattcgatttttcatctatgaaaatgagagagtgcatctcgatccacattggtcaggccggtatccacgtcggaaatgcttgctgggagctctactgtcttgagcacggcatcgggcccgatgggcaaatgccaagtgacaaaacagttggcggacgtgatgatgctttcaacactttcttcagtgagactggtgctggaaagcacgtgccacgtgccgtctttgtacatcttgagcccactgttattgatgaagtgaggaccggaacttaccgtcagcttttccacccagagcagctcatcagcggcaaagaagatgccgccaacaactgtgcccgtggtcattata

SEQ ID NO: 19046 - DNA, 364 bp, Glycine max
  Clone ID: LIB3106-086-Q1-K1-F2
aacacttactatgcaagtatcaccctcaccgttggcccggaatattgagtaagagatcagattgctgataaagatcggtctgaacacttcaaaatctgataagaacatttggtattcactgtgggatcgagataaattttcttcgacacaaccaacataatcgattaactaacttaacagtgtcatcagcaagaaatcaagggggagtattttatctaccttcaaagtagttgttcgcaatacattcttttattaaattttatcttggcatcaattgtcgaccttaatattttcgttcaaattcatagtttacaagcaggaaccttaattcagacttgcatagtagagatgctaatcacgcctg

SEQ ID NO: 19047 - DNA, 364 bp, Glycine max
  Clone ID: LIB3106-086-Q1-K1-F3
cccacgcgtccggctagttttcgtttacaccactaacttcaagaagaggcttttgggcgagtcaaggttctttcttctttgctcggttcccttccctccaagggaagaacctctttagataccctttttgctctgagaacacatacgaccacactctcttccatttcatccataaaacttggagtgcagtcaaagagtcaaagattcacaacatgtttccgaggggcagaaggagtgacattggtggccatggcaacacaaacgtggctgaatgggaattacggccaggaggaatgctcgtgcagaaacgtaacttggatttgaatcaaaattctgcatctaaatctaccatcaaagtcaagtg

SEQ ID NO: 19048 - DNA, 338 bp, Glycine max
  unsure at all n locations
  Clone ID: LIB3106-086-Q1-K1-F4
gtttgtgatggctatcttgctgttgttagaggcattaggagagctattatgacagggagggcagtgagggtgaattcacaattgaaatctcacaaaagatttgctaatgcatttccaagattttgcaaacttgttgatgatgccaggctctattgcacaaatgatgtgggtggtccaccacagctcanatggcggaaggatgatgatcagaatctgccatatcccagagatataaaatgcttggaaaggataggcagtgtaaatgttgaagctgattccatctacgaactttacaaggaacccagncntatcatggaaccaggttctgtttggaaaga

SEQ ID NO: 19049 - DNA, 414 bp, Glycine max
  Clone ID: LIB3106-086-Q1-K1-F5
ggacaaggagggtatccccccggaccagcaacgtctcatcttcgccggaaagcagctcgaggacggacgcacccttgctgactacaacatccagaaggagtcaactctccacttggtgttgcgtcttcgtggtggtatgcagattttcgtgaagactcttacgggtaagactattaccctcgaggtggagagctctgacaccattgacaatgtgaaggccaagattcaggacaaggaaggcatcccaccggaccagcagaggctgatttttgctggcaagcagctcgaggatggaaggaccctcgctgactacaacatccagaaggaatcaacccttcaccttgtcctccgtctccgtggggggttttaagctccgtgtgtaatggtggatgtgttcccaaaacatttgaagaa

SEQ ID NO: 19050 - DNA, 186 bp, Glycine max
  Clone ID: LIB3106-086-Q1-K1-F6
ctttgataaataaaatattatttcttaataaaaaaaaaaaataaaaaaaaaaaaggaaaaaaaaaaaacaaaaaaaaaatgactacaacaaaaaaataaaaataaaatataaactaaaatacacaaacttcaaaataatatacaaaactaaataacaaaactctaacaaataaaaaatattaccct

SEQ ID NO: 19051 - DNA, 372 bp, Glycine max
  Clone ID: LIB3106-086-Q1-K1-F7
ggatctctgtccggccattcaaggcaagtgaagatgttgacgatgtattgttatggttgggagatgctagagtgactcagaacacacgattaaagacctgtgggtccaggtcagaggctttgacattcctgaaagatgagtgtgttcaccccttacgccggtcaatatgccttgatgatcgttccatagggattgtttgggtgcttccttattcgggtgatgaaaggtacaaagctgacttgggatatgccttagggttcaactgttggggcaatgggatagccactaaggcagtgaagattgttttgtcccaagtcttccatgatttccctcacttgagaaggttgcaagcttatacttatttgcgccaca

SEQ ID NO: 19052 - DNA, 353 bp, Glycine max
  unsure at all n locations
  Clone ID: LIB3106-086-Q1-K1-F8
aaagggttagaaggcactgccatagatttacctactaaccgccgtgtcaacctggaaagcgctaccagcgacgacgactgcaccaacattcttgcacacatcaaatcctccaaaacccccgctgtcatcaaatatggcgctccttggtgtcccgtttgtatccaaattctcccagcattctgtagactgagcaataattttccaaagcttacctttgtatacacagacatcgatgaatgcccagaaacaactcaacacattcggtacactcccaccttgcaattntaccggaatggtgaaaaggtagatgagatgtatggtgctggtggngaagagaggctccatgatcgtct

SEQ ID NO: 19053 - DNA, 280 bp, Glycine max
  Clone ID: LIB3106-086-Q1-K1-F9
tctcacgaaactcagaatccatggcgtcaccagctacttttaagcgaaaaccggtgttcgtgaaggttggtcagtttaaacctggcaccgacggccacacactgacggtgaaggtggtcagttccaagccggtgaagacggtgagcacccgctgcggtcgaccgacagtgctagccgcgcgcccgtcgcgcattgccgagtgcctcgtctgcgacgaaaccggtaccataatcttcaccgttcgcaactaacacgtggaccatattaatgctggcgcatc

SEQ ID NO: 19054 - DNA, 396 bp, Glycine max
  Clone ID: LIB3106-086-Q1-K1-G1
cccacgcgtccgcccacgcgtccgcccacgcgtccgcccacgcgtacggttactcatggggaacgcggcgcttcggaacgtgaaggtgctcccgaactcggcaaatatggaggaagctcgtcaccgagtcttccaattcttcagaacggcttgcagatcgttaccctacgtcatggaaatctacaacctctacgacgtcgtttccgtctccgaactccggtcctctgtctgctaccagatccgttagaacatccacgtcaccgatcccaaagtgatcgatatgctgcttttcaaggggatggaagagctgaagaacgtcgtggaccattcaaagcagacgcatcatatcattggtcagtatgtagttggtcaacaagtacaggattcaaccacaaa

SEQ ID NO: 19055 - DNA, 252 bp, Glycine max
  Clone ID: LIB3106-086-Q1-K1-E2
cggacgcgtggggcgcccgacacgcacctgatacgtgttggacacgcactcgctgtgtgcagggtgttgccggtggcatattgggatgcattatagcatttttgatgagaagatcaagttaagatgccatgtgatgtgactgatactaatcctctaccttgtctcaaatgtctgtgcatgaccgaaatgagagcatcatggaaagggcaaataagccttctgttgcaagtatgcaagtttgtaaagtgcgtt

SEQ ID NO: 19056 - DNA, 411 bp, Glycine max
  Clone ID: LIB3106-086-Q1-K1-C6
caagccaagtgaaagtgagaaaaaataaaaatcaaagagcataatgtcagggatcattgacaagattggggagacccttcatgtgggagggcacaagaaggaggaggagcataagggtgagcaccatgctggagaatacaaaggggagcaccatggtgaacacagtagtgagtacaaaggagagcatcatggtgaacacaaagctggagagtaccatggtgagcacaagccagagcacaaagaggggttcctagacaaagtcaaggacaagatccatggtgagggcggcgccgccgagggcgagaagaagaagaaggagaagaagaagaaggagcatggccatgagcatggccatgacagcagcagcagcagtgacagtgattaaactggtggatcaactatatatttaaa

SEQ ID NO: 19057 - DNA, 362 bp, Glycine max
  Clone ID: LIB3106-086-Q1-K1-C7
aaggctgcttagcctcaacttcctccatctatctcttcggcaccacaggcgtcacgacccgtatactagcgaccttaactgccttaactgcgcctgcacccaactccatgccgcattcgcgccatcaccctcacccagacgacctcagagactcgacgcgacagggacgatgattgcgaaaacagcggcatggacctcggcctagggaccagctccactgatgcctacgtcgtcgtcaagcttggcgccctaatcacctgcggccaactctacgacatcgtcggcgagcacaactgcaaacgcacggaggagcatgcccgttcccttagcatgcccctttccgcactcgacgacaacccccg

SEQ ID NO: 19058 - DNA, 425 bp, Glycine max
  Clone ID: LIB3106-086-Q1-K1-C8
atggattccttgcttggaattcgagttggagcacggtttcgtgtaccgtgagcacaacaggtcaccaggatactacgatggacgctactggaccatgtggaagctgcctatgtttggttgcactgatgcttctcaggtgttgaaggagcttcaagaggctaagactgcataccccaacggcttcatccgtatcatcggattcgacaacgttcgccaagtgcagtgcatcagcttcatcgcctacaagcccccaggcttctaagtgtgaaaaatttgcaaagcatttgtagccgccaccccactttgtttgtttgtacttaaactacattcccatttggttttgctttttgagatttcatcatcctgtatttttggcttctggtttcggacttcaatggaaattaatggatgagaacttatgaatt

SEQ ID NO: 19059 - DNA, 366 bp, Glycine max
  Clone ID: LIB3106-086-Q1-K1-D1
gaacagagaagcaatcagttgccaaactatttttctctctcctttttttgacttttctgtctttctgcaactccaaaatgtcttccataggggcaaaaaatctagcactctcctcagcctttttgctccttttggtcggttttgcaacctcagacatcaaccaagacaaagcagaatgtaccgacaaacttcttggtctagctggttgtcttccctatgttggtggtgaagccaaagtccccgccatggattgttgctctggtatcagagaggttattgacaagagcaagaggtgcctctgcatcctcatcaaggatcgtgatgaccctaatcttggcctcaagatcaacgtcacccttgctctaa

SEQ ID NO: 19060 - DNA, 275 bp, Glycine max
  Clone ID: LIB3106-086-Q1-K1-D10
cggacgcgtgggtaagcctcgccgactcggttgctatcagcgagtgagagtgagtgagtggttcggttgcatcaacaaggtttagtgacaccaaacagactggaaatgggtcgtggggtcagtgctggtggtggacagagttccttggattatctctttggcagtggggtacctgccagcagtgcatatggtgctcgcactcaaaatgcaagtgctccttcaccaccggttgataagcaaagttcagcaccagcagcagcatcagcacctgcacc

SEQ ID NO: 19061 - DNA, 430 bp, Glycine max
  Clone ID: LIB3106-086-Q1-K1-D11
tgctcccaaacgacatggccgcggaattagcgcggacgtctgtttaagaacaaaaagaaaaaacaaattatggcgtgccttaaatataaacgggcgaccctatttaaggatccaatcttactgctcaatcacacaaactaatgacatcttatatcattaagctaaatttaatatactggcctgcaatataacaataccactgctgctaaaacctctgcatatgccaaacttactcagacttaatcgcattcggctttttcactttgtactcatagatattaggccctaacgcacacccatatgaaacatcttaattcacatatggactaaagcaaatctacctatgacaaggacctaatatctatgactagctctattatactactcatgacctctacacttggtctagccctatcttccattactttag

SEQ ID NO: 19062 - DNA, 410 bp, Glycine max
  Clone ID: LIB3106-086-Q1-K1-D12
cccacgcgtccgtggtcatgacaggattgagcgtgataaatgcagctataacgactcagcttctggtgagtttattcacggtagaaggagtggtgcattacggcattgctggaaatgcaaacccgtccttgcatattggagatgtagctattccccaatactgggctcatctagcactatggagctggcagaggtatgggctagggcctgatgacacattacccttggaagacaatggagactacaccagggaattagggcacttaaattttgcaaatttcacctcaaacgtaactgctgatagtccatttgataaccaactcaacaatatatggtaccaaccagaagagattttttccattgatggcgttccggaagtaaagcaacatgtcttttgggtttccggtgat

SEQ ID NO: 19063 - DNA, 174 bp, Glycine max
  Clone ID: LIB3106-086-Q1-K1-D2
aacgagcgaaccattgacacagccctctacagtgaactatccattgcttgaccgaaagggctgtcatttctgccagcatggaacatagagtggaacaaagtctcaacctttactcatccgagcaagtaactgagcgtgtgagcgatcactgatacctgcgccattatttccgac

SEQ ID NO: 19064 - DNA, 405 bp, Glycine max
  unsure at all n locations
  Clone ID: LIB3106-086-Q1-K1-D3
ctctgttctttctctctcaaaggaaagaaaaggaaagaaaagaaaagaaaaagaagagagtgtacgtaaacagaagcacacactacacagttaccaaaatcaggttcaaacgcacagatctgggagaagagaagaagaagaagaagaagatgggacaggatcagaaccagagatcgctgatctacgcgttcgtgtctcgcggcacggtgattctcgccgagtacactgaattcagtggcaacttcaacacaatcgcgttccagtgcctccagaagctccctgcctccaacaacaagttcacctacaactgtgacggccacaccttcaactacctcgtcgacaacggattcacttattgggttgntgcggatgaatcgattgggagacaggtgccttgggcttttc

SEQ ID NO: 19065 - DNA, 157 bp, Glycine max
  Clone ID: LIB3106-086-Q1-K1-D4
gatggatccagacgcgtcggcaaaggcatccgtggagcactactacagcaccttcgacagcaacctgaacgggttagcggattagtatcatgagggtttcatgctgaccttcgtagggctgaagatccagtgcgcttgcagcatcagtcagtaaact

SEQ ID NO: 19066 - DNA, 407 bp, Glycine max
  Clone ID: LIB3106-086-Q1-K1-D6
cggacgcgtgggtcatggcgtgcacaatcgactttcgctgcctcgacgagggttgcgggggcaaaacctacaagcgcaagagagagcagcagtcgcagcctcagcacgacgacaacgccatcgacggcgcctctctgatggacaccgacgacgcactccctccgccagcgaagcgatcggcggtgccgtcgtcggagaatccggacaagccggtgttcgggcaggcgagctacgacggcgtgatcgccgggagggtgtcggggcggaagtggaagcaggtgcggcagcatagggcgtcggcggcgcaggtgagccggaaggggacgacgttcgagcagagggagagggagaaggtgataaagaaggcgtacaaggagaggatgatggagctgaaggaagagattcga

SEQ ID NO: 19067 - DNA, 276 bp, Glycine max
  Clone ID: LIB3106-086-Q1-K1-D7
tctttctgcatcttttattttaaatttcttatctctttcttgtaaattggatttgctttaatctaaatataacaaagttctcgtaaaaaaaaaaaaaaaaaaaaaaaaaaaaaaaaaaaaaaaaaaaaaaaaaaaaaaaaaaaaaaaaaaaaaaaacaaaaagcaaacaaacaacaaaaacacaatcttaatcgtcacacaaagaaaaaattaaacggcttcagtcgggtaacctacaacctcaacaacgccctgtggttacccacctcagaaact

SEQ ID NO: 19068 - DNA, 172 bp, Glycine max
  Clone ID: LIB3106-086-Q1-K1-D8
aaaaaataaatattttataataaataaaataaaaaaaaaattaaaaataaaataaagatagaatataaatataaaaaaaaaaataataaaaaaaaaaaaaaaatttaataaaataaaaaaaaaataaaaaaaaaaatacataaaaaaaatcaatttttaattttaatttaat

SEQ ID NO: 19069 - DNA, 316 bp, Glycine max
  Clone ID: LIB3106-086-Q1-K1-D9
ctaaacattcactcatgccactatcccaccacgcactctaaatgccgcaccacccactccaaagactacaccatcaactgcgaagcccacaccatccacgccaaaatccacaccaactactgcaaagtgctagtgatcatcttcgtctcctgcttaaccaccatgaaacaaagcctcatgccctaatgacacattaaagctaggctcttgtgctcatctattaggacttgcttacattattgatggaactcctccttccaacccgtgatatgcattgatcaaagctttggcggattatgaaacttcacttttccta

SEQ ID NO: 19070 - DNA, 423 bp, Glycine max
  Clone ID: LIB3106-086-Q1-K1-E1
cggacgcgtggggcgcccgacacgcaccggatacgtgttggacacgcactcgctgtgtgcaggttgttgccggtggcatattgggatgcattatagcatttttgatgagaagatcaagttaagatgccatgtgatgtgactgatactaatcctctaccttgtctcaaatgtcggtgcatgaccgaaatgagagcatcatggaaagggcaaaaaagccttctgttgcaagtatgcaagtaagtaaagtgcgttgaaggttcacctggaagatcctgtgtcctgacttttggaaattcagatttctcttgtacacagtaattaatcggtttgttgattctgcttaattgattgttcaaaacaatttgagatcacactggctattctttgacttattttttcacctattggtgcaaatcaaaactt

SEQ ID NO: 19071 - DNA, 428 bp, Glycine max
  unsure at all n locations
  Clone ID: LIB3106-086-Q1-K1-E10
ctcttcctcaccgattgctagaatggaatttcgatgctcagtcatctcttttaccattctcttcgctcttgctcttgcaggagagagccatgtccatgcatcgctacctgaggaagattattgggaagctgtttggccaaacactcccattcccactgcactgcgagagcttctaaagcctctccctgcaggtgttgaaatcgatgaactccctaagcaaattgatgatacacagtacccaaaaacattcttctataaagaagaccttcatccaggcaaaacaatgaaagtacaattcaccaagcgtccctatgcacaaccttatggtgtatatacatggttaacggatattaaagacacctctaaagaaagatatagttttgaagagatatgcatcaagaaaggagcgtttgnaggagaagagaaag

SEQ ID NO: 19072 - DNA, 281 bp, Glycine max
  Clone ID: LIB3106-086-Q1-K1-E11
ttccccatcgacccgcgcgtccgataaaccataaccaggggtattatgaatctttagttttggatcgagcctctgaggaacaaatcgggtccaattccaatatgcctaagcaaattcacaagattaatgacttcctactaactgctaggacgaatgatgcacgctctgcgaaaatcaagcggatcaacgacgtcgtgaagctcaaggtcctctgcttcaagtaccttaacaccctctgtgagaacaaatctcagaatgcataataacatcatgcatcactt

SEQ ID NO: 19073 - DNA, 451 bp, Glycine max
  Clone ID: LIB3106-086-Q1-K1-E12
tcgcgaaatcggaggaatcaaagccctgctgaatggctccaccggcaccacccaagtcaagtcaggggcaggtgatgaataatgcaaggattcacttcttttccattctcctcgctctccaatacggtgctcaacctttgatctccaaacgcttcatcagacgtgaagttattgtgacttcatctgttttgacttgtgagcttgcaaaggttatatgtgcagtgctttttatggcaaaagatggtagtctgaggaaattgtataaagagtggactttgcttggtgcgttgactgcatcaggacttcctgcagctatatatgcattgcaaaatagtttgctgcaaatttcttacaagaatcttgattcactcacattctcaatgctgaatcaaaccaaaatatttttcaccgcgctctttgcatatttcatattgaggcaaaaacaatcgat

SEQ ID NO: 19074 - DNA, 404 bp, Glycine max
  Clone ID: LIB3106-086-Q1-K1-C5
cacctgaggcttccaaagcaatggctttccttgcagcatccactgctgctgctggcctgggcatgtcagaaatgctgggaaaccccatcaacttcagtggtgccacaaggccagctccatctgcttctagtcctgcctccttcaagactgtggctcttttctccaaaaagaaggctacaccaacacctccaaaaaaagctgctgctgctgctcctgccaatgatgagcttgccaagtggtatggtcctgacagaaggatcttcttgcctgatggtctcttggaccgatccgaaatcccatagtacttgaccggagaagtccctggagactatggttatgacccatttggtcttagcaagaagccagaagactttgtcaaatatccagcatttgagttgattcat

SEQ ID NO: 19075 - DNA, 317 bp, Glycine max
  Clone ID: LIB3106-086-Q1-K1-B11
tccctttctaaacaaatggaaatggcaatattacttttcacacacaaacacaaacaacattactttgtacattttacatatcacacttgacatacatctcaacaacctcactcaacgcctacaacagctaatactgccactcataacattgcctcatcacctacacgtatttacaaccatagttctactaccaatcccacgtctccagaatgctctactatgtgcaccaatctcaaactttcataacacacaataaatataacaaaacttcaacactaccacacaatcaaagctacctaaccttctttacttacaaa

SEQ ID NO: 19076 - DNA, 435 bp, Glycine max
  Clone ID: LIB3106-086-Q1-K1-B12
cccacgcgtgcgcacacgcatacgttcctttattgtccttcggaaggaagaaaagtatgctgccggtcgatccatactgcctgtgctacaggctgaagaggatgagagatttgttaaagagtggcataaatatctcgagtatgaggcagacgtgatgaaggatgtgcctggttggaaagttgctgaaagtgtgtatcactctgagagatgggtgcccccagcaagtggtgagttgcgtcctgatgtatggtgatgttatttcagccatctctatctgcttctttcattacatgctgctggtacttttgtccagtctctaaattacatgctggtacttttgtgcaggctcttaaataaatttatatcaaaaggttgcaaccctttggaatataatattcatttttaaaaatgttatatgaaggaatcttatttatg

SEQ ID NO: 19077 - DNA, 332 bp, Glycine max
  Clone ID: LIB3106-086-Q1-K1-B2
cccacgcgtccgcttaaaagctgtaatcagaagtgaagaggaagttaggtggatgtgccaagagagttatttagcctgtagagcctgtaattggttgcagttgattgtgaaactgttgcttaaaggaaataagtagcatttgatattcaaaaaaaaactaagtttaaaaagaatgaagagatgacaaagacaaacctaaatgggcatgatgaataagcaaaattcggattttttcatcataaaccaatattcaagaaacatattgcaattccagtatataaacctgtaccaaaaccattttcagtgtataaacctataccaaatccaatttc

SEQ ID NO: 19078 - DNA, 412 bp, Glycine max
  Clone ID: LIB3106-086-Q1-K1-B3
cccacgcgtccggaagaatcagagaatggcaactatgactggtgtgagcctttcatgcgcccagggttttcttcaacgcatcagcctcaccgcaaaacgcgcatgctgtaaagttctcacttccacccagccaagcagtgcgaccgggtagtatcaagttgggtcgcgtgatgaggatccgacccgttcgcgctgcgcctgagcgcatatcggagaaggtggaggagagcataaagaacgcgcaggaggcgtgcgccggcgatccgacgagcggcgagtgcgtggcggcgtgggacgaggtggaggagctgagcgcggcggcgagccacgccagggacaagcaaaaggaaaaggactccgacccgctcgagaattactgcaaggacaacccggagaccattgagtgcaaaac

SEQ ID NO: 19079 - DNA, 371 bp, Glycine max
  Clone ID: LIB3106-086-Q1-K1-B4
gcagaaccgcactcttctaaggaattgttacattggttatacttgagtgtttatcgtgatgagcttcaatggaaatgtgttgcacagtgcttggttttcccttttaccattgttgtgagctcaactttattattatgtcttagtatacccaaaagttatgacttctgtgtatgtagctaaagcttttctttattgctgctttcaacatgtgctcaactcaactgcaggaacatcgacctcttgtcatttggttcataattatttactcctttacttaattatgtgtctcctcatcattggggatcagcgaccagaatctgtgaacattgatgcacctgatatcaatggaacaaggtttttcagtcaacttg

SEQ ID NO: 19080 - DNA, 120 bp, Glycine max
  Clone ID: LIB3106-086-Q1-K1-B5
cccacgcgtccgcccacgcgtccgcaggaaactcatttcatttcagataaaactagaaagtttactaataaaaaaggcaactaatggggttatccggtacttacaacacaacttaaatat

SEQ ID NO: 19081 - DNA, 402 bp, Glycine max
  Clone ID: LIB3106-086-Q1-K1-B6
tgcttttgctgctatattcaccgtgcctggtggggatgatgatgatggctctgcagtggtagcagcttatgctgcttttaaaatcttctttgtctttaatgctatcgcactttttacatctttggctgttgatgttgttcaaattactttggttagaggtgaaactaaagcagagaaaagggtggtagaggtgatcaacaagctcatgtggttggcttctgtctgtacttcggcggcgtatattgcttcttcttacattgttgtgggtaggaagaatacgtgggctgcaattttggttacattagttggaggggtgataatatctggagttattggcactatgacttactatgtagtgaggtctaagagaagctgatcaatgaggaagaacgagaagcaagc

SEQ ID NO: 19082 - DNA, 419 bp, Glycine max
  Clone ID: LIB3106-086-Q1-K1-B7
cccacgcgtccgctctcatctttcaatttcaatcaacggttatacccttttctatttgagcatcatcatgtccaccgcagcgcagcccaaggccaagaaaacggcgtcgtccaagaagcccctctcccatcctaccttcgccgtgatgatagcggaggcgatagcgagtctgaaggagagaaccggttcgagccaatacgcgataaccaaattcatcgaaggcaagcacaaggagttgcctccaacctacaagaagcttgttctcgttcatctcaagaagtctgttgctgctggcaagctcgttaaggtcaaaaactctttcaagctcgcaccgactaagtctgctcctgttaaagccgctgctgctcccaagaagcccaccaaagcttgggctaagcccgccggcaagcccggtttca

SEQ ID NO: 19083 - DNA, 410 bp, Glycine max
  Clone ID: LIB3106-086-Q1-K1-B8
cccacgcgtccgctcacgcgtccggcatcaaggcctacaatgtattgacagtggagggagaacttaaaacaaatgtgagaaacagcttcaagtcgatcaagaacaagttcagcgacattcgctacggtgtgtgaactaggatcaaccataagagttgcttgccttggggctagcatgtgttgttcagtaatatcaactttaaaggtcaggcctttataaaggaaaatattgcaatggtgtatcgtgaggcaagatgctatgcataaaacatatatgagagtactatctggcttggaatatgtatatgctctgcaaacaagggtatcttggccggctaatggtaagactgatagcagcaaactagcatgctttgtgttaaacatgcctgaatttaaaaatgtttttgaaaa

SEQ ID NO: 19084 - DNA, 443 bp, Glycine max
  Clone ID: LIB3106-086-Q1-K1-B9
tccacgcgtgcgaaaaaaaagataaaagaattaagttaagcactaaaaaaaaatgaagaagggtttgtcccttgtgctgctgattcttctgatccagtacaacaacgttgtcaacgcctacaacaacaaaaactgtgtcacagaggattgcctcatcggcaacaaggatttggaatcagagttctactttggatcccatgtggccagaatgctctacgatgtgagccaatctgtgagtggcaaaacaggcaataaaaataacaaagctgttaattgtccaaataagcaaggctaccgaagctgcttgccttccaaaaacggtggtggccctaagcaaagttgtggcgattacaccagggtttgctaagaactcgttccaacccttgtgatttcatttctgatttttaagattgtgatatgatggaatcttatttatgtcaatt

SEQ ID NO: 19085 - DNA, 355 bp, Glycine max
  Clone ID: LIB3106-086-Q1-K1-C1
gcaagatgcgagtctctatcttcttcctacgacaaccgtttcctctcgccggaaaaccggcgttcatctctatgtgcgtgcgatccgtgcgccatgagttccggcgagctcctccacatacaaccccaggagctgcagcttccctttgaattgaggaagcacatctcatgctctttgcagccgtctaacaagactgacaactatgtggctttcaaggttaatactacacatactaacaaatatcgtgttagacctaacactggagttgtgatgcctaggtctacttgcgatagcatagtaacaatgcaagcccaaaatgaggcaccttctgacatgcaatgcaaggataagattc

SEQ ID NO: 19086 - DNA, 162 bp, Glycine max
  Clone ID: LIB3106-086-Q1-K1-C10
gagctattgaaactattaaaaaaaaaaaaaataatttaaaaaaaaaaaaaaaaaaaaaaaaaataagagaacctatattaacatacccgtccatacaacacaaacatacaacatataaatacacactatattaaaatcatttaccatcaccttacatcattt

SEQ ID NO: 19087 - DNA, 367 bp, Glycine max
  Clone ID: LIB3106-086-Q1-K1-C11
ggtcgtccgcccacgcgtgcgcccacgcgtgcgcggcaaggcatttctgcattgcgatggcgcctccgaagctggtcgtctttgcgctttctgtagccctaattttcgccatcgttggggccgaagccgatatttccatcgaaggaagcactccagagcctgatacctccgccatcaggatccaattagatcaactcaattccaagatccaaattctcgagtctcaaatcagcgaaaagttggaagaagtgaagaagaaggacgaaattatagcagaaaaagaaaagtccattgaagataaatcaattaccatacaatccttgcagaatgagattgcttctctccagaaaaaagggtcactggatgc

SEQ ID NO: 19088 - DNA, 347 bp, Glycine max
  Clone ID: LIB3106-086-Q1-K1-C12
cacgaaaatattcacagggtttggtttattccaatttttatttttagtttttccctttattggacggtagagtgtgtaagagagagagagagaaatgggaagaggaagagtggagttgaagagaattgagaacaagatcaacaggcaagtgacctttgcaaaacgaaggaacgggcttttgaagaaagcttacgagctttccgttctttgtgatgccgaggttgctctcatcatcttctccaatagaggaaaactgtacgagttctgcagcagttcaagcatgctcaaaacgctagagaggtaccagaaatgtaactatggtgcgcctgaggctaatgtgtctacac

SEQ ID NO: 19089 - DNA, 372 bp, Glycine max
  Clone ID: LIB3106-086-Q1-K1-C2
cccacgcgtccgcaagaagagtgggattgacgttcagtgtcagattccattatatgtgggaaccaagatggcatcaatcaggaaatcttcattctttgtaccatcaacagatggctatgccaaagcaggtgtgaaatggataggctatgagcctcgttgcacaccatactggccgcatactcttctttgggctgtggcattctcattgcccgagtttgatgatgatgcttggcgcctgtggttttgcttgggtattcgaaagaggggacagcgcaaagagtccatgaagaacgaataaaaggatgcttggttctgatgtgtaagccaatagacgctactcatctgataatatatatgcagattgttagctga

SEQ ID NO: 19090 - DNA, 399 bp, Glycine max
  Clone ID: LIB3106-086-Q1-K1-C3
cccacgcgtccgttttctcattctctgtttcgctttcaccgagtaacttcactttcccgaactccacctgagaaaaagatacccataattcgcacgcacgcacgcacgcacttgttctgactcagtgcttgtgttggacgcagaagaaccagaaaagaaaaacaagcacgaggagatgattaacttcgaagaaaccgagttgcgactcggcctccctggcgggtctgcgagtgatcacaacgagtcaacaacggtcaagggcagtggtggaaagagaggcttctctgaaactgcttctgttgatttgaagcttaatctttcttccagtgatgactctgcctcagattcaccttcatctgcgtctacagagaagactaccactgctgcaccttcttcttc

SEQ ID NO: 19091 - DNA, 355 bp, Glycine max
  Clone ID: LIB3106-086-Q1-K1-B10
gaaaaaaaagggggggaaatttcaatggcgtcaagggtttctctgaaggcgaagggtaagagttgagagggatcgaaggccgcggaagatcgatctgcgagcgagtgcctgaaggagtggacgacatgggcaatgcgaaaagcgaaggtcatcactcactatggtttcatccctttggtcatcatcatcggtatgaactctgaccccaagcccccactttcccagcttctcagccgcgtctgatctacctcttcatttcttccaccatcaacgcgacctcgtttttttcttttcttttgccccctttctacatttgtaagtttctttatggatcaattttcactttgacatctca

SEQ ID NO: 19092 - DNA, 409 bp, Glycine max
  Clone ID: LIB3106-086-Q1-K1-C4
gaggaagaggaagatgggtaggtcttcagcaacagcatgtgcgtcgctctcctctccggtgcctcgacttccaccgtctcgcactcgcactcgcacgtccattcccagttcgtgttcattctcatggcttgcttcatttaccactttaactctaagtgcttctcgctattgctcctacggtataaaccctgccaatgcctcacgcttccatgattctgtcattcgagctggctggacccgaagatctcgaggtgaagctgcgaagagacctaacaggaaatccgtgaagcaggagacagacatgtacatgagaccgtgcttattacatgtgaccctcttcaaaagatttattcatgccaaagtggtacaccgatgaacatgccaagtgatatgtgttgctaccacaaac

SEQ ID NO: 19093 - DNA, 268 bp, Glycine max
  unsure at all n locations
  Clone ID: LIB3106-085-Q1-K1-H4
gaataagtgatttatnctgatagtgatgatgaattggatggcgtcatgcggaatagtgaatgatttttatctagaaagtgtaagcaggcacatcttttgtactttaaataggtgttgtggtatcagggctaaatctcagattattatgttctatggttagaaatcttagttatggttctctttgtgtgacaatgtgaacaataagattgcttatgcatgaataatcaacaaaataatactatggtggagagccttttaattacacaag

SEQ ID NO: 19094 - DNA, 261 bp, Glycine max
  Clone ID: LIB3106-085-Q1-K1-H5
ggacccacgcgtccgacacaatgtgcgagactggctcaaagtgattgtttcaaacaaggatagaagtgtttacgaactgaggtacttcaacattgccgagaatgagggagaggaagaagattagttgtctgataatcttatttgcttgtgttttgtttacccttttcctatacctagctttctttttggcaaatattgcttgagatacgatgctttgtttttatcagttgcaatttaacggttttgatcatttaagaattg

SEQ ID NO: 19095 - DNA, 407 bp, Glycine max
  Clone ID: LIB3106-085-Q1-K1-H6
cccacgcgtgcggtgactcgatcttcttcgtcgctatcttcttctttgaagtagagcgtgcgtttttctctcacctgaaaatgtcttgctgcggtggtaactgcggttgcggaagcgcctgcaagtgcgggaacggctgtggaggctgcaagacgtacccagacttgagctacaccgagtcaaccaccaccgagaccttggtcatgggagtggcaccagctaacgctcaattcgagagtgctgaaatgggggttaccgctgagaacgatggctgcaaatgtggagctaactgcacctgcaacccctgcacttgcaagtgaggtgttggagagctaaagcttcaagcagagatggcccttacgaataatgataaaaactatatgtagtgtcaaaacttcaaaaatatg

SEQ ID NO: 19096 - DNA, 343 bp, Glycine max
  Clone ID: LIB3106-085-Q1-K1-H7
cccacgcgtccggtggtggtgtagtggcatactcagaatcacaatcaggagctgaacgtgctagtattgaagctaatgagcctgccaaaaagaaagtggtggttcttggaacaggatgggctgctaccagtttccttaaggatctggatgcttcattatatgatgttcaagttgtttcacctcgtaactactttgcatttactcccttattacccagtgtcacttgtgggacagttgaagcacggagcattgtagagccggtccgaaacatcattaaaaagagaaaaggagaagtgaatttttgttcgaataatcaatcttgacacattctgccatttttatt

SEQ ID NO: 19097 - DNA, 370 bp, Glycine max
  Clone ID: LIB3106-085-Q1-K1-H8
agaggcttgagtctggattgtacagtagaagttaccttgaaaatcagatggctgttgccttgggtggaagggttgccgaagaggttatttttggccaggaaaatgtcaccaccggagcatcaaatgacttcatgcaagtttcacgagtggcaaggcagatggttgagagatttggattcagcaaaaaaattggacaagttgccattggtggacctggtggaaatccattcttgggtcaacagatgtcatcgcaaaaggattactccatggcaactgcggatgtagtggatgcggaagtgagggaactggtagagagagcatattctagggcaacacatattatcacaactcacattgacatccttcacaa

SEQ ID NO: 19098 - DNA, 419 bp, Glycine max
  unsure at all n locations
  Clone ID: LIB3106-085-Q1-K1-H9
cccacgcgtccgggctggtccctctgagcccggcactggcttcctcggacgaggaatacatgaaggagaccgaggaagtgatcaacaaagtgaggacaacaatcgtgatggacaagaatgaccccaacgtggcaaccgcggtggcggagttgagagaaacctcgaactcgtgggtggcaaagtacaggagggaaaaagcgcttctgggacgcgtttcctttatggacatgtattccgcgctcaacgctgtttctggtcactacattagcttcggaccaaccgctcccattcccgccaaacgaagggcaaggatcttggaggaggtcgacactgctgaaaaggcgcttctaaggggaagataattgagcaaaaaggttttttttttttccttctttcgcttcgntcttcttggttcttaa

SEQ ID NO: 19099 - DNA, 302 bp, Glycine max
  Clone ID: LIB3106-086-Q1-K1-A1
gaacaatccaactcttttcttattgcttgttgcgttctccctcgttttcgcggacgaggggggctgtcgctacagaggagccaagctataccgatgatcatgcacgaggtcaatggtcttgactagcggctgctaacatgacaccactggccggagtttaacaacatgttcactagggaaaaccagtcctaagacaactacaattactggtacaacgtgctcattgctaacatgcgccgaacacggaagaagcacagtctggacccttttgccaataacggcgcaacgcgcttgtccaatgg

SEQ ID NO: 19100 - DNA, 367 bp, Glycine max
  Clone ID: LIB3106-086-Q1-K1-A10
cccacgcgtccggaaagttttatggttaaaccacaatatctttttttttttttttcttcttgttcgtctttctcgtagcgtatggaaaaccaccaaaatcacaaggtagaatcagaaccggacatagagaagaaccaccatcaccgccaccaacagcagcagcagcaacaacaccgtaacgaagtgtggggcacgtgggaggagctgttgctagcgtgcgccgtgaaccgccatggcttcaaggactgggacgccgtcgccatggaggtccagtcgcgcaccacgcgccttctcggcaccgggcaccactgcgagcagaaatttgacgatctcagccgccgattcggcgaccaatgcaacgacgacg

SEQ ID NO: 19101 - DNA, 338 bp, Glycine max
  Clone ID: LIB3106-086-Q1-K1-A11
ctcctactggcctttggagccatcaagttaccattttacagcccttttcttgatgatctgctcatgtgagcttaagacaaacaccagacccctcattcttgatgatctgctcatttgagctgtccatttatttatatttaataacataacattctcaagttcttgtttttgttacgtccatacatgcagatggtccaaaagccaaaatttaacatgtccgacttcaatgagttagcatcccctctagtgattggaaaacactagtagaaaagagaacaatacaaacaatttgtgggtcccaccatgttggtgggtcccacattgttcgtgtctcctac

SEQ ID NO: 19102 - DNA, 324 bp, Glycine max
  Clone ID: LIB3106-086-Q1-K1-A12
agccaagtgaaagtgagaaaaaataaaaatcaaagagcataatgtcagggatcattcacaagattggggagacccttcatgtgggagggcacaagaaggaggaggagcataagggtgagcaccatgctggagaatacaaaggggagcaccatggtgaacacagtagtgagtacaaaggagagcatcatggtgaacacaaagctggagagtaccatggtgagcacaagccagagcacaaagaggggttcctagacaaagtcaaggacaagatccatggtgagggcggcgccgccgaaggcgagaagaagaagaaggagaagaaga

SEQ ID NO: 19103 - DNA, 348 bp, Glycine max
  Clone ID: LIB3106-086-Q1-K1-A2
ctaggtgtccggaaatcgttcctatcatcacttctcaaatctcgaaccctctcgttcgtgccgatcactaggtcacactgcatcaatggcgggtagaggcaaaaccctaggatccagcgccgctaagaaggccacctcaaggagcagcaaagccggcctccaattccccgtcggtcgtatcgccaggttcctcaaggccggaaagtacgccgagcgcgtcggcgccggagcccccgtctacctcgccgccgttctcgaatatctcgctgctgaggttttggaattggctggaaacgctgcgagagataacaagaagactcgaattgttccacgccacatccaattggc

SEQ ID NO: 19104 - DNA, 307 bp, Glycine max
  Clone ID: LIB3106-086-Q1-K1-A3
gtcgaaaagctatggtctctcataccccaagacgcgaaggaaaaagccctaaaatcgagggacactgcccctctaatcgacgtcacacagcacgggtacttcaaggtcctcggaaaaggtgttctgccccaaaatcagccttttgttgttaaggccaagcttatttccaagatcgccgagaagaagattaaggaagccggtggcgctgttcttctcaccgcttacgtttaaaaactggtttttaattgggttgctttgtttcggataacttttttgattatatattgcaagtgatacattgtgtttt

SEQ ID NO: 19105 - DNA, 166 bp, Glycine max
  Clone ID: LIB3106-086-Q1-K1-A4
gtttgctttgaagaagtgaggggtgttctttgttggtgaatacacccactcacgcgttggtggttgcaggctctaatcagatcccaaatgatcaactttgtgcttctcattagtcgccaagggaaggtgagactgacaaaatggtactcaccttattctcagaaag

SEQ ID NO: 19106 - DNA, 398 bp, Glycine max
  unsure at all n locations
  Clone ID: LIB3106-086-Q1-K1-A5
caggccttcagacatcatcaggatgcgatacgaccgacttagaagcattgctgggagggtacagactgtggttggggatttggccactcaaggggagaggctgcagtctttgctcagcttgagagatccaagagccactgccctctttgtgattttctgtctggttgctgccattgtactctatgtcactcctttccaaattgtcgcacttttcactggaatctatgtgttgagacacccgaggttccgccacaagcttccttcggtgcctatgaatttcttcacgaggctgcctgcaagaactgattgcatgctttgagtcatggctagtgcacatactacaaaaagagcagcttgctttgctttcattgntcaacaccagattttgtggatttgca

SEQ ID NO: 19107 - DNA, 428 bp, Glycine max
  Clone ID: LIB3106-086-Q1-K1-A6
cccacgcgtacgcttagttctagatcgcgagcggtcgcccttttttttttttttgctagtgaaattgtatgttaaaatacaatttataaaataattaaaaaaaacatgttgaaatcgtatggtaaaatataatttccaaaatattaaaaaaatattaaaattgtatgtgtagtatacgatttcaaattttaataaaaaaattaaaaaattaaaattgtatgtgcatatagtgtaataatttttttaaaaacaaaatcgtgctttgaagtattattatggtaatttttttaaaaaaacaatatctcattatggtgcaagagtagactatattagtatcaagatggttagtttggcaatagaaactctcacatgatgaattaatgcttggataattttttttcttatttgaatcattggtaaaaggtaaa

SEQ ID NO: 19108 - DNA, 131 bp, Glycine max
  Clone ID: LIB3106-086-Q1-K1-A7
cacacgcgtccgcttactcctccgaccgctccagctggctgtgctaaccattcagacgtaggaacctgagggctgggaagcgatgaagatcatgcactggactcggcgaacgttggcaaatccgacccacg

SEQ ID NO: 19109 - DNA, 408 bp, Glycine max
  Clone ID: LIB3106-086-Q1-K1-A8
attttatccaattgaaattttaaaaatgactgggataaacttaagaattcaattattggaattgaataagtaaacaatttaattggattggtcgaatggtatcaaaaaaatggagtactaactcccatttcttatttattattgaattaaccgatcaacttgctttgttatcgaacatttctttttgatttcaaaaattttccggaaaaaatttgaatctatttttatatgcgaatcaatcctactacttctggtcctgaggtttctgcgcttgaaaaaaaaaatctgggacgtatcgcccaaataattggtccggtactagatgtagcttttcccccatgtaagatgcctaatatttacaacgctctgatagttaagggtcgagatactggtggtcaacaaattaat

SEQ ID NO: 19110 - DNA, 409 bp, Glycine max
  Clone ID: LIB3106-086-Q1-K1-A9
cgacccgcgcgtcctctcctactggcctttggagccatcaagttaccatttatacagcccttttcttgatgatctgctcatggcagcatatgacaaacaccaggccccttaatcttgatcatctgctcatttgagctgtccatttatttatatttaataacataacattctcaagttcttgtttttattacgtccatacatgcacatggtccaaaagccaaaatttaacatgtccgacttcaatgagttagcatcccatctagtgattgtaaaacactattagaaaatagaaaaatacaaacaatttgtggatcccaccatgtttgtgggttccacattgtttggtgacttctactggtattttatactatcaaaatataattttttttcttatttcaattaccttaac

SEQ ID NO: 19111 - DNA, 351 bp, Glycine max
  Clone ID: LIB3106-086-Q1-K1-B1
cccacgcgtccgcccttttcagctttcattggtgtggcctagctgttttctcaatgagaaagccttcatctctgcaaagcgcacttttgcgctttggggttcccttgttgcttgttatcaccttctgttatgctacttctactgctgcagcaacaactcaagtttcagggaatgaagagctgccaaagacaaacctaaatgggcatgatgaagaagcaaaattcggattttttcatcataaaccaatattcaagaaacatattccaattccagtatataaacctgtaccaaagccatttccagtgtataaacctataccaaagccagttccagttccagtgtacaagccta

SEQ ID NO: 19112 - DNA, 95 bp, Glycine max
  unsure at all n locations
  Clone ID: LIB3106-085-Q1-K1-H3
agcnaagagagggtttgtgcgcgtcgcgcgtccgtcgattccggtggcacgcgtcgccgctcgccacctcgccaccgtcgccacgcgtcgccacc

SEQ ID NO: 19113 - DNA, 408 bp, Glycine max
  Clone ID: LIB3106-085-Q1-K1-G1
ttcccggggggctcagcgtttcatgaaagtccccatggaaattactcggcaggctcttgacactcactggtgtgtatggcttctggaagcacgtgaccaatcttgaacgccgtgagagcaaacgttacctcgagatgttctatgctctcaagtaccgcaaattggctgagtctgtgccccttgctattgaagagtaaattcatgtttgaagagaacatcaatggagaaaccggcttttggtcgtttgaagtcttatggagctttcataaataacgccattgattttgattgtgatcagcttttggatttaaagagtctaaaaaaaagtgtcgcttgtttttatattttgcttacgttttgggtaaaaaaagtaaaaaaagaaagtctttttttttttttaaattcttt

SEQ ID NO: 19114 - DNA, 408 bp, Glycine max
  Clone ID: LIB3106-085-Q1-K1-G10
aaagaaagatggtgaaagtggcgacgtacttcgcgatgacgcttggagccttcgggttctggcagtccatggacaaactccatgtctggatcgctcttcgtcaagacgaaaagaaagagaggttggagaaggaagcggagatcagaagggttagagaagaattattgcagcagcaggccagtcagaaggattctctttcttgaattcgaattatgttgtaattttgctttgtaatttccccttgcttctgtttttccaatgcaatgtcttgtgctcaaataaaatctgctactcccgagcacttcaaatttaattgcgtggatttctattgtgttcctctacacatgcacttgtttcattaactgctatgtgtccagaattgttggaacacttctatcggcgtatgaa

SEQ ID NO: 19115 - DNA, 351 bp, Glycine max
  Clone ID: LIB3106-085-Q1-K1-G11
ggtttccatgtccatgccttgggggacactaccaatggttgcctttcaactggatcacatttcaatcctaataacaaggagcatggtgcccctgacgatgagaatcgtcatgctggtgatcttgggaatgttaatgtcggcgatgatggtactggcagcttcactattactgacagccagattcctctcactggaccaaacaacatcatatgaagggcgggtgctgtccatgctgatcctgatgatcttgggaaaggtggtcatgagcttagcaaaactactggaaatgctggtggcagagttgctcgtggtatcattggactgcaacgataaacttatcacatgaagttg

SEQ ID NO: 19116 - DNA, 425 bp, Glycine max
  Clone ID: LIB3106-085-Q1-K1-G12
cccacgcgtccgggcagatggatcatcaacaccagcaacaccttcagccaaagtttcagccatcttcatataccctattaaatcatgccgtgcaatttctgtttctcgtgctcctctcactcctactggatttcgatgggatagacaatggatggtggtgaattcccaagggaggatgtacactcaaagagttgaaccaaggcttgctttggttgaggttgaattgccatctgaggcatttcttgaaaactgggaacctacacaagactcctacatggtggtgaatgcacctgggatgcaacctctcaaaatatgtttgagccaacaagggaaggaggtagcaaatgctgtctcagtatgggaatggactgcatctgccttggatgagggagctgaagcatcacagtggttctcagattatttag

SEQ ID NO: 19117 - DNA, 109 bp, Glycine max
  unsure at all n locations
  Clone ID: LIB3106-085-Q1-K1-G2
gctttgtgttatgaattgattgccgtagatggtaacactgtgatctggaaaaagccagcagtggagatgtgtctccccaaccaaaatgaatgctatcctgtatgatntc

SEQ ID NO: 19118 - DNA, 383 bp, Glycine max
  Clone ID: LIB3106-085-Q1-K1-G3
tacaatgtcactcctaatcaaccaactccaaaggatccttcatggctatccgatagtgaccaaatcggtgtcctaggtcatgtagccattgtctacatatacgaagcaaatcccaacagcaacaccattgagagattgaggaactctcttagcaagcttttggtgtactactatccattcgctggcagattcagcttgacaaaaagtggtcgcatagaagtggattgtaacgcaaagggagtgacattgattgaagctaaaacctcacacacacttgatgattatggagacttttcaccttcaaagttgaccgaggaacttgttccagatattgattatactccacccatagaggagattcccctattactacttcaattcac

SEQ ID NO: 19119 - DNA, 427 bp, Glycine max
  Clone ID: LIB3106-085-Q1-K1-G4
aaagaaaccaatgcattcttctatcttcattccttccctattactctttctctgctaaattatttaaattttctctctttctctaattaattccctttgttatcaaaatggctgtggctatggctgcttgcagtcttggacttcacttgagtgctgacaacaccttgagaccttttgaaaaaaccactatcttgaaggccctctctatctctgatgctactaaaccatgttacatttctcacaaaacaagattatcatcttcatcttcaggaataacaatgatcccacgagcaacaacagttattggtactgtggaggatggaaatcaaggagaggctgataccattccaactccggtagttattattgatcaagactctgatccagatgcaacttgggtcgagataacctttggtgatcgccttgg

SEQ ID NO: 19120 - DNA, 428 bp, Glycine max
  unsure at all n locations
  Clone ID: LIB3106-085-Q1-K1-G5
gttccggtcgcccagaatccgagatcaaccctgacccctaaggccaggggtttttctcggcttcttcacattcctgaaatggcgtctgtttcagctttagccaagtacaagctcgtcttcttgggtgaccaatccgtgggcaaaaccagcatcatcactcgcttcatgtacgataaattcgataacacctatcaggctacaattggtattgattttctatcaaaaactatgtatctcgaagatcgaactgttcgactgcagttgtgggatacagctggccaggaaagatttagaagtcttattccaagctacattagggactcatctgtagctggtattgtatatgatgttgcaagccggcagactttcctaaatactgcaaagtggattgaagaggtgcgaacagagagaggcagngatgtcattat

SEQ ID NO: 19121 - DNA, 409 bp, Glycine max
  Clone ID: LIB3106-085-Q1-K1-G6
cggacgcgtgggcggacgcgtgggcggacgcgtgggtgttgctggaaaagaaagaaaaaaacaattttagtgtaacggcgtgtgtttggtgcaatgactttgaggtttgaatcagtagtgtgggctttaaaccctaagctaagtcaccaccgtttctccatccccaatcttcgtcggaatccccactctctattcgcacctcctcctcctcctcgcattcgcacttccttcctcgcattctaagaaggaggaggaggagaaatctaaccggctaaaaacgaatacaacaacgattaccgtaccggtgccgaagaatcgtggaagcaagctctggacacgttccgagaacaggcctcgaagattcgagatgcttctcaagaagcgtacgagctgtactccgagaaggcga

SEQ ID NO: 19122 - DNA, 419 bp, Glycine max
  Clone ID: LIB3106-085-Q1-K1-G7
cttgattccctttaacattttgataatcatacatcttggattctacaaattctcatcatcttaaccatgttacattagaacacccgaaattaaagcatgcagttgcttcaagaataatttggagggactagtgtggaaagtagacacagaaagaaatgccatcaacagtgagggatcacgggattgttcgaaggatggcaagtcttcctcgaagcataatgggagggatttcaagagcaatgggggatggaatgggctttataggaagaggaagaagaagaaatcagcacacaaatattcctttgcagcctcaagaccatcatgttccacaaccacatggtcaagtagtagttcaagatgaatggagttttctagagagttttgagtagcaatttggcaccaaacaccctttcttctat

SEQ ID NO: 19123 - DNA, 371 bp, Glycine max
  Clone ID: LIB3106-085-Q1-K1-G8
gaaggattggaccttggaaagatggacaaagctgatgactctggacttgcttcatatgttgccggtcaaattgatcgtactcttagctggaaggatgtgaagtggcttcaaacaatcaccaaactgccaattctggtgaagggtgtgctgactgctgaggacacaaggatagctgtacaaagtggtgcagctggaattatagtgtccaatcacggagctagacaacttgattatgttccagccactatatcagccttagaagaggttgtcaaagctgctgaaggtcgtgttcctgtatttttggatggtggtgttcgccgcggaactgatgtcttcaaggcattggcactaggtgcctctggcatatttat

SEQ ID NO: 19124 - DNA, 235 bp, Glycine max
  Clone ID: LIB3106-085-Q1-K1-G9
cttatgattcagaaactgtgaggcattacacattctcaaccgcgaaccctactagcagggcgaacatgacatccaccttgcgcaccgtcagaagactcggagggacattactgtcatccacctcatctcgactcacctgagggttagtgaaatccacagtgattgctatgaattcattgagggaggctgtggcaatgggagatgggaagatcacatgctttgataggaattgggt

SEQ ID NO: 19125 - DNA, 421 bp, Glycine max
  Clone ID: LIB3106-085-Q1-K1-H1
caattggccttgatcaactactatagatgtattcatttgttctgttgcgatttttatggtgcaatccatgttttgtgatgcaggcatgagatagataaagtcactgctgggcagcgattagatttgaaccttgaaagggggagaataagggaggaattgtctaatcagaatgctgaaactaacaacctgacaaacaaacttgatagagtaagcaattatggatctgtctgggtaagctcatccaaaagcggagaagaaaacaagaaaaaaaaaataaaatgagtttcttcgtaagctcataagctaatttgtagaattctcgatgttttagagatactatatgtgagaacttctacaaattagcttatgcataattgaattttagctcatgtacaaacttatttcattttttacttattat

SEQ ID NO: 19126 - DNA, 304 bp, Glycine max
  Clone ID: LIB3106-085-Q1-K1-H10
ctctgctcgcagggtttctccaccaagagggaaatggctcccaaaccgcctagtacgggtctgtttgttggactgaacaagggtcacgtcgtcaccaagaaggaattgcctccacgcccctcacatcgtaaggggaaaacaagcaagagggtgcactttgtgaggaacctcataagagaggtagccggctttgcaccctatgaaaagcgtataactgagttgctgaaggttgggaaggataaaagggcactgaaggttgcaaagagaaagctcggaacacacaaacgcgcaaagaagaagcgtg

SEQ ID NO: 19127 - DNA, 417 bp, Glycine max
  unsure at all n locations
  Clone ID: LIB3106-085-Q1-K1-H11
cccacgcgtccgaatccatagccgaagaagagaaaaaagagacaaggaccgtcttgagttaatttgattcagtgtagcagccagcagccataagcaacgcaacaattccatttccagtttctgattcgtcacgtcagacaaaggaaggggttagggtgtgacctgagatcaaaatgttgcggaggcttctctcttctcacctcaaaaccctagcctcctccgccgccgccgccgccaccgccactccccgatctgcttccgcctccgccagattcgccgctctctctcgctcctgcctctacttctcaacccaatccgaggatgctactgcgatcaaaaagaaggttgaggacataatgccaatcgctactggccacgagcgcgaggagcttcangctgagctcgagggaaggaata

SEQ ID NO: 19128 - DNA, 286 bp, Glycine max
  Clone ID: LIB3106-085-Q1-K1-H12
cccacgcgtccgaccacgcgtccgaaatataaaaaaaagagacaaagaccgtcgggagggaatttgattcagcgtagcagggcaacaaccataagcaacacaacaatatccatttaacagattctgattcgacaacgtcagacaaaggaaggggttaaggtgtgacggggggtcctttttaaagagaaaaattttcttttctcaccttagaaccctaatatcttttttttgggggcgccaaaatcaacactccgggcgctgctttcaaatccgccagatgggaaaa

SEQ ID NO: 19129 - DNA, 420 bp, Glycine max
  Clone ID: LIB3106-085-Q1-K1-F9
cccacgcgtccgctgctcatcactccaaccttgctttccatagataacatcttcggcatcagacaatagacaaaaacatgcattccttaacatgcacaccactttcttcttcttattcttctcatcacaccactctaaagccaaacctcaaccctctgctgggtgctgatgcaacttttaggccatgttctctacccttgaaaagaagaacatgctttactaccagagccattctctcatccaccagagaagatgtcttgaagcatttcagcgagcgaagagctctcaagattatctcaggcctgcagaatttcaataaagacaatgttgcctcggttgtcactgctgctgacaagggtggagcaactcacgtggatatagcatgtgaccctgagttggtaaagctggccattggcttaa

SEQ ID NO: 19130 - DNA, 404 bp, Glycine max
  unsure at all n locations
  Clone ID: LIB3106-085-Q1-K1-H2
ggcacaggtatttcgaacaaacacagcactgaggaacagaggaagtgtgtgtgtgggtgtgtctgaggaagtgtaccctaatttgaatttgaatgcaatttcactattagcaattagcaaagcgagaagtggaagttgagaattcacagcgagagagagaaagaaatatggcagaagccagcgaagggacgacgaagaaggaggagattttagagtctcacattgaaacggctatgcgttctcgcgtctctcacttcaaggaacaatctgactccttgacgttcgagggtgttcgtcgattgctcgagaaagacttgggattggaggagtatgctttggatgtgcacaagagatttatcaagcaatgcttgctcaagtgcttagaangggtaggagatgatgat

SEQ ID NO: 19131 - DNA, 399 bp, Glycine max
  Clone ID: LIB3106-085-Q1-K1-E2
cattgttgttatattgtattgtagccggagaagaagagaagagatagcggcgaagaaagaaagatgacggaggcatatataaggaagaagcccgggatggcgagcgtgaaggacatgccggttctccaggacggtccaccaccaggcgggttcgctccggtccggttcgcccggcgcatccccaacaagggccccagcgccgttgccatcttcctcactgctttcggcgctttctcttggggcatgtaccacgtcggccagggcaacaagatccgaagggcactgaaggaagaaaagtatgctgcccgccgatccatactgcctgtgctacaggctgaagaggatgagagatttgttaaagagtggcataaatatctcgagtatgaggcagaagtgatg

SEQ ID NO: 19132 - DNA, 423 bp, Glycine max
  Clone ID: LIB3106-085-Q1-K1-E3
tggaaacgaaggacgacagtgctgaaaaagattaagcttggtcttctcatgaagacgaaattcttttgaactatgttcaagtccgtggagaaggaaattggagaaaccttcctaaaagagctggcttgaaacgatgtggtgagagttgcaaacaacgatggttgaactatcttaagccaaccatatctagaggaaacatttctttagatgaacatgaactcataatcagactgcataagctcttggggaatagatggtctatcattgctggacgattaccaggacgcaccgaagaagagatcaagaactactggaatacctatttgagaaaggaggcagaagagaaccaaaacaataagaacgaatttccaagcacaagtatgacaacaactagcatgtctagtgttcaatctccatggtact

SEQ ID NO: 19133 - DNA, 302 bp, Glycine max
  Clone ID: LIB3106-085-Q1-K1-E5
tgcatggacaatgtcagatcatgtattatagaatcctgccaatttgcaccaagttgttgtcaacacaacgtataagttgtagatatctgaattggttactatcacaaggatttgttaaactagcttcaatttcaaaaaaaaaaaacaaaaaagaaccactgcttaatctaaaaaacggtctacaaaaagaatggctgtacaacatatgctgaacttcaaatgcaccagcgctcgctgccagatgacggaaaacctgcactccagatcgcgcggtcacatgattacctctcccagagagtcac

SEQ ID NO: 19134 - DNA, 416 bp, Glycine max
  Clone ID: LIB3106-085-Q1-K1-E6
cccacgcgtccggactagttctagatcgcccgcagtttcactgattccatcttcttctgcttcttcactctctcgctctcagagtctcagactacttttctgaaagcatttcaaatggttgatagcaatccttcctctggatcacctgaagaaacacaaaatcccaacccagatgggaatgcacctgttgaaagtgatcttgcattggagaatctagcccaaaaagttcaagaatctctctctctggaaaaaagacacaaattctgggaaacccaacctgttgggcagttcaaggatataggggactccagtttgccagaaggcccgattgaacttccaatccccttatctgaggtcaaacaagaaccatacaaccttcctgaccactatgaatgggttacttgtgacatcaactc

SEQ ID NO: 19135 - DNA, 384 bp, Glycine max
  Clone ID: LIB3106-085-Q1-K1-E7
gcaagcgcttctcctctttgtgttctggctatgcttcttggcaagagttagatcggacgaggattgcgtgtacacggtgtacgttcggacgggttcgatcatcaagggaggcaccgattcagtaattggtctgaagctatacgacaagtccggctacggcatatacatcaccaacctcgaggcatggggcgggttaatggatccgggtcacaactactacgagcggggcaacctcgacatattcagtggtagaggcccttgcttggaagcacccgtttgcgaggccaacctaacttctgacgggtcggggccccatcacggctggtacgttaattacgtcgaggtcaccaccactggggtccacgcgccttgttctcagcagca

SEQ ID NO: 19136 - DNA, 309 bp, Glycine max
  Clone ID: LIB3106-085-Q1-K1-E8
cccacgcgtccgcccacgcgtccgggagttcattggggaaattctcaggtaccaaggtggtcgtgtcacttattaattttcttactacacatacttatttctacttctattaagttcagctcaacaaacacatgtttactaaactttctgagaaaggaacttgctttgctttatagtcaacccctggatgcgtaatattattttgtgttattttcaattaacttccgcttaattaagcttaaaaaaaaaaaaaaaaaaaaaaaaaaaaaaaaaaaaaaaaaaaaaaaaaaaaaaattataataaaaagg

SEQ ID NO: 19137 - DNA, 419 bp, Glycine max
  Clone ID: LIB3106-085-Q1-K1-E9
acacattctcatgggccaccactgtcttcatcttctgcaggttgtcttagaactgttaaatgggcatctttaatgcttatagtactcgtgttacatgtataacatagtactggaattgtatcactcggccaagacaaaactagagttccactacaaatgtgagctacgcaaaaggcaagctgcacattcatctgagtggatataagctgtgtcatcatgtgtgtaaatagttgattaaaaagatccagacggtgtatgtatgtgttttcaggtcaaattccccaagtggcaggccttgatcacacacattgccgctgtttgtgatgtaagatgaaaaaagaaaatgaaagaaagaaaaacagaagaaagtaacaatttccttttttggttctcaccatcccttgcaataaaatcattat

SEQ ID NO: 19138 - DNA, 383 bp, Glycine max
  Clone ID: LIB3106-085-Q1-K1-F10
cggacgcgtgggcggacgcgtgggcggacgcgtgggcggacgcgtgggcggacgcgtgggccatggtgagcacctccttcatgaggaagcaacctatgacgaccaagagcctaaagacattccccaacgctctttttggtctgaaaggtggacgaggtggtcgtgtaacttgcatggcctcgtacaaggtgaagctcataaccccagaaggagaagtggagtttgaatgcccagatgatgttttcattgttgacaaggctgaggaagaaggcattgaacttccctactcgtgcagggctggttcttgcgtttcatgtgttgggaaaattgtgaaaggtgacgtggaccagtcagatggtagcttccttgatgatgaacaaata

SEQ ID NO: 19139 - DNA, 282 bp, Glycine max
  Clone ID: LIB3106-085-Q1-K1-F11
cccacgcgtccgcccacgcgtcctttttttttaaaaaaaaaaaaaaaaaaaaatggaaggaaaaaaaaaaaaaaaatggtgaataaaaaaaaaaaaaaaaaaaaaaaaaaaaaaaaaaaaaaaataaaaaaaactatatttaaaaaaaaaaaaaattataataaaatgtatttaatttatgggggggccttttttaagaatcctattttttttcccggttttttggcagttttttttttttttttttggcccctttatttattttctggggcgctcttttta

SEQ ID NO: 19140 - DNA, 419 bp, Glycine max
  Clone ID: LIB3106-085-Q1-K1-F12
cccacgcgtccgcccacgcgtccgctataagctagtttatcgtgaggagaatatgaagttgtttgttttctttgttgctgcagtagttttggtagcatggccatgccatggcgcaggctaccaaaggttccctctccgaatgaaaactggctatggtgagcgttcttcggaggtaaaatgcgcaagttttaggcttgctgtggaagcacacaacatccgagcctttaaaaccattcctgaagagtgcgttgaaccaacaaaggactacattaatggcgaacaatttagatcagactctaaaacagttaaccaacaagctttcttttatgctagtgaacgcgaagtccatcacaacgacatatttatattcggcatagataacaccgtactctctaatatcccatactatgaaaaacatg

SEQ ID NO: 19141 - DNA, 422 bp, Glycine max
  Clone ID: LIB3106-085-Q1-K1-F2
cccacgcgtccgtgagtctgcacgagtggacgtaatgaagctcgacctttgctcagtgaattctattacatcatttgtggacaacttcatagctcttgatcttcctctcaacattttaataaacaatgctggagtaatgttctgcccattcaagctctcagaggatggcattgagatgcaatttgcaacaaaccatcttggtcatttccacttgacaaacctgcttcttgacaaaatgcaacaaactgcaaaagccactggaatagagggcaggatcataaatctgtcatcaattgcccataactacacttatagaaaggggattagatttaataagatcaatgaacgaaaaggttatggtaacaagaaggcgtatgggcagtccaagttagcaaacatattacatacaaatgagctttctc

SEQ ID NO: 19142 - DNA, 382 bp, Glycine max
  Clone ID: LIB3106-085-Q1-K1-F3
tcagaagatcaaggacttgagaactaaggagatcaagaatggcagactggccatgcttgctgtcatgggtgcatggttccagcacatctacactgccaccggtcctattgacaacctctttgcccaccttgcagatcctggccatgctaccatttttgctgctttcacccctaagtgaaaaggctaagatcaacaatcagattaccagctgtttgggatgagaggagtgtttatatatgtctgtagaaattaagcttgtaatatggctacttctatgtcatatatgcacataatatcataatccaacgtgccgacacctatttaagttttagatgccatggatgtaagttcaggtaataatcccatttgtgcataagatcat

SEQ ID NO: 19143 - DNA, 346 bp, Glycine max
  unsure at all n locations
  Clone ID: LIB3106-085-Q1-K1-F4
tcgagatgtgaaaaatgtgaaaccaattgagacacaccaacatgatagcttaattggtgtggctcaattccaagttaccctatacactttgcatatttgaattgtaaaatggttttgtttattcaggtggtggtggtggtggtttttgtgatggacccatttgctaagtataattgcaagagtagttgagcgtccaagcccccgttcaagccactccaatgattggaatgtttttgttgtttatgtaatttgtgttgtagtattgtttgggtcctataatactgttcaaataaattgattcagatgctttcctcaaaaaaaaaaaaaaaaaaaaaaaaaanannng

SEQ ID NO: 19144 - DNA, 293 bp, Glycine max
  Clone ID: LIB3106-085-Q1-K1-F5
gccacacgtgcggctgaaagagactccttcttgtcaatcactgtgacaaaaaaaactgtacactgactctgctatagctgtgactccactcaccctgtacaagtcgttatatcgaacatggaaactgttacttctaatgatccacaggctgatgaattcaaactgcttgtcgatgaagcattgaccgttggcgaattctacctagccattgatctatatacacatgccattctcctgctcagtcgaaacgccattgactcttctattctggcctttgctcatctttaccttga

SEQ ID NO: 19145 - DNA, 364 bp, Glycine max
  Clone ID: LIB3106-085-Q1-K1-F6
attctccattctcacttctcaaattgaatcgaacgaattcacaaaccctagttttcgaggatgggtcacatccagtactccgagaagtacttccatgacacttacgaatatagacatgtggatcttcctcctgaagtcgcaaaactgcttcccaagaatcgtcttctctccgaaaatgagtggcgggcaattggggttcagcagaaccgtggctgggttcattatgcaattcatcgccctgagccacacataatgctctttatgaggcctttgtattatcagcagcagcaggaaaaccatgcccagcaaaacatgcttggcaaaagagcactatctatgcaaatctgaaagtgggattacaatg

SEQ ID NO: 19146 - DNA, 346 bp, Glycine max
  Clone ID: LIB3106-085-Q1-K1-F8
cccacgcgtccgcccacgcgttcgtcttttcgtccgcccacgcgttcggaaaaaagaaaaaaaaaaaaaataaaaaaaaaaaaaaaaaaaaaaaaaaaaaaaaaaaaaaaaaaaaaaaattaaaaaaaaaagtaaaaaaataatttaataaaaaaaaaaataaaaaaatttaaatataattttttatgctataaaacgaaaatattcctaatcaaaaataaaagaatttccctccctaacttttataattaattcaagaagctcgtgctttaaaaaaaaattatggtttttttttttatttaggagataaaaaaatttcttgatatgattcttattccgaatttat

SEQ ID NO: 19147 - DNA, 426 bp, Glycine max
  Clone ID: LIB3106-085-Q1-K1-E12
cccacgcgtccgcccacgcgtccgctactactttgttcggtagctacttcgcttctaccctccattccattctctgaagtgcaggaacaatgtctgagaaaatcacagctgaaaaccttttaaacacccttgtggaaacacttactgagaagcaaaaatctggatcattttttgaagaagacaagtcaagctcagtgagctaccaattcaacagactgtttggacgccagaaacctgtgcaccatattttagggggtggaaaatctgctgatgtcttgttatggaggaacaagaagatctctgctagcgttttatcggcagcaacagctatatgggtgctttttgaatggcttaattataatttcataactattttattctttgttgtggctctcggtatgcttggacagtttctttggacaaatg

SEQ ID NO: 19148 - DNA, 418 bp, Glycine max
  Clone ID: LIB3106-085-Q1-K1-C7
gaaattttcttaaattattgtagggaatgaaattgaaagggaaaaaaaaaatcaaaattatcttgagcggtaacacagagcagagcacggaaaggaaaaacctcggtagagttgagggtttagcggcagcatagagaatagagatagagcgaattgaaactctctaatggcactctacacccatctcatctctttctcttcttcttcttttcttcattcaccttcgcctctatgtcttccaaagcctctcttcccttcttttactttgacagtgggcaattcaacctcccacaccaccagtctcgccgttcgctcctcttattccgaaatgggctcttcccctgagcccatcaatttcaggaagccagggattccgtccatgtctcacttgagactctcaatgaacgaaagtagcaag

SEQ ID NO: 19149 - DNA, 417 bp, Glycine max
  Clone ID: LIB3106-085-Q1-K1-C8
cccacgcgtccgcacatcctaatcacaaaagcggtgaccatggcaaacatgattatggcttccacaaaacctctggttccagtctgcaccagttcccgttcccccacaccaaaactccccattctccaaatttcactccccaaagccccaaccttgaaactgaaactcccaatttcaaagccccagatgctgtccctcctgggagggatagcaccactggtcttggccagaccctccctagcagaagaatttgagaaagcagcactctttgacttcaacctcaccctgcccataataatggtggagtttctgctgctgatggttgccttggacaagatatggttcaccccacttgggaaattcatggacgagagggacgcggcgatcagggagaagctgagcagcgtgaaggacacg

SEQ ID NO: 19150 - DNA, 418 bp, Glycine max
  Clone ID: LIB3106-085-Q1-K1-C9
ctcttactctgattcgttagtgaagaaaaatggcaacaatcatcgccggcaccccaactacatcaatcactcgcacaggtcatgtgctcaaacgacctgttggggcctcatcctctaccgttcttggattgccagcaatggccaaggcggggagagtgaggtgctccatggaggaaaagccttcaagcagctcaaacctagggatgggggcatccttgttagcagctgcagctgccgcaaccatgtcaagcccagcagccatggctttggttgatgagagactcagcactgaaggaactgggcttccctttgggcttagcaacaaccttcttggttggatcctgtttggtgtctttggtctcatatgggctctcttctttgtctacacttccacccttgaagaggatgaagagtctgg

SEQ ID NO: 19151 - DNA, 416 bp, Glycine max
  Clone ID: LIB3106-085-Q1-K1-D1
gaagcaaatggcttcctcaatgatctcttccccagctgttaccactgtcaaccgtgccggtgccggcatggttgctccattcactggcctcaagtccatggctggcttccccaccaggaagaccaacaatgacattacctccattgctagcaacggtggaagagtgcaatgcatgcaggtgtggccaccagttggcaagaagaagtttgagactctttcctacctgccagaccttgatgatgcacaattggcaaaggaagtagaataccttcttaggaagggatggattccttgcttggaattcgagttggagcacggtttcgtgtaccgtgagcacaacaggtcaccaggatactacgatggacgctactggaccatgtggaagctgcctatgtttggttgcactgatgcttctc

SEQ ID NO: 19152 - DNA, 410 bp, Glycine max
  Clone ID: LIB3106-085-Q1-K1-D10
gtgatttcagtgagtgatcggtgttcacttgatctcatcataatcgtcagcgtcaattgaagaagatgccgatcagaaacatcgccgtcggaaggcctgaagaggcgactcaccccgacacgttgaaggcggctttggctgagttcatctcaaccttcatcttcgtgttcgccggctcaggctccggcatcgcctacaacaagctcaccgacaacggcgctgccacccctgccggcctcatctccgcctccatcgcccatgcattcgccctcttcgtcgccgtctccgtcggcgccaacatctccggcggccacgtcaaccccgccgtcaccttcggcgccttcgtcggcggcaacatcaccttcctccgcggcatcgtctacgtcatcgcccagctcctcggctccatc

SEQ ID NO: 19153 - DNA, 188 bp, Glycine max
  Clone ID: LIB3106-085-Q1-K1-D11
cccacgcgtccgtagaaacagaagagggtcactgctgataattgttcaggggcaattagtctattccttagaccttgagacacacatccttatacaacttccaattgcagaggggggtttatggactctataccctgcttattacgctgagagcctgtttctacttgacaaaatgttctacatcgcga

SEQ ID NO: 19154 - DNA, 181 bp, Glycine max
  unsure at all n locations
  Clone ID: LIB3106-085-Q1-K1-D12
cccacgcgtccggtctctttccaatcagatagggtgggagatttcagtgaccccaccacccctatgagcagctcaagtgtgacatttnattaatanagaaaggggtcacattggcttttttttggttttatacttttctttttactctttatttttttgtttttttttttttctttatttt

SEQ ID NO: 19155 - DNA, 359 bp, Glycine max
  Clone ID: LIB3106-085-Q1-K1-D2
atatatctgccactacaatgttcacagcatagacaatgaacttgaggactcctcacagatgcgaggggtagtacaaaccgcccttgttctatgctcttcagtgtacgtaatgataagcttctttgggttcctcctatttggcgaaggaactcttgatgatgtgctggccaatttcgataccaatcttggaattcctttcggttctgtgctcaatgatgctgttcgtataagctacgccgcacacctgatgcttgtatttccagttgtcttctttccattgcgtctcaacatagatggcctcctcttctctaaatcaaggcctctggttctggataacttcagatttgcatcactcacta

SEQ ID NO: 19156 - DNA, 415 bp, Glycine max
  Clone ID: LIB3106-085-Q1-K1-D3
atcagttataacacactattccgatttgatttctgactcaactcgcccgagtcacgccgttcttttatcgccccaagcatctcttcttaatcacaacaacaatttcttgttcccaaaccctctccctccccaattctccaccaaaacctccgccaccgcccgccgcctaacacaccctctctccgcccggctatggacgcgcaaccgccggaatccgccgcgccggcagcctcgaccgaggacttcgtccacgtcgcggatctgaagatggagagcctctctgagagcatcgttcgaatcgacgagccttccgaagccgacgccgccgcttcctccgctccggcggaatccgatcgccgtccggccacgctcccgccggaactctcaagaaacgtgagagtcctgtcgtgcgagt

SEQ ID NO: 19157 - DNA, 281 bp, Glycine max
  Clone ID: LIB3106-085-Q1-K1-D4
aaaaaaaaaaaattaatgagaaaaagttttcttgtaaaaaaaaaaaaagggttaacattcgtggcgaaaacaagcttcagtgcgcgctcttgcaacgtacaatgctctccgattgagacagcccaaccttctttacgggcccatggctgacaacatctcaactgggaattccctagctttaccgaactgacctgccttgaaaaacatccgctctgcgacaactgtggtaatagccaatacggccgcattgcccactttttccaattggagggcagtctgaa

SEQ ID NO: 19158 - DNA, 426 bp, Glycine max
  Clone ID: LIB3106-085-Q1-K1-D5
cccacgcgtccggctgaaagagactcctactcgtcaatcattgtgaagaaaagaagtgagcactgactctgttattggtctgaatttcctcaccctatacaactagttttaacgaacatggaaactgaaaagtctaatgtttcaaaggctgaagaatttaaactccttgccaatgaagcattcaatgctcgaaaattctcccaagccattgatctatatacacaagcaattgagctgaacagtcaaaatgcagcttacttttctaatcgtgcctttgcccatcttcggcttgaggaatatggtagcgcaatacaagatgccacaaaggctattgaaattgatcctaaatattcaaagggttattacaggcgaggtgctgctcatcttgggctggggaaattcaaggaagctctgaaagattttcag

SEQ ID NO: 19159 - DNA, 365 bp, Glycine max
  Clone ID: LIB3106-085-Q1-K1-D7
cccactcgttcgcccacgcgtccgtaaattaaggtttttgccgttgcaggaataagcaggaatggcgtcgaagataacacgcttggtcaacaaaaaccccgaattgataaggggaatcggaaagtactcgacgtcgcagatgtaccacaagaggggcatttgggctatcaaggtcaaaaacggtggcgttttacctcgccacgaccccgaacccaaacctgaaactgccactgaaaaaccacccttattttaccccgctgatgatgtcaagaaaccccttgtgaacaagcacaaacccaaaccatctaagctcagggctagcattacccccggaacagtgttgattcttcttgctggtagattta

SEQ ID NO: 19160 - DNA, 415 bp, Glycine max
  Clone ID: LIB3106-085-Q1-K1-D8
catttcgaaacccctggttccagtaccctaaccgaaacccctagcgctgctgctgctggtcacgtccccaattctaaaagccagggattcttcccgagggaattgaacttttcgaattcattgaaacctgaatccggtgaaattctgagctttggggagagcaagaagagctcttacaatggggctttctttcccggtgttgttgcggttgaggagaacaacaacaataacaagaacaagaagaagaggtccccggtggtttctcggagcagcattgacgatggaatgctttccttcacttccctgccggctgcaaatataaaatcagttaacggtgcttgtgtcggtgccggtgattcggatcactcggatctggaagcttccgtggcgaaacaggtgggggagcccgagaaac

SEQ ID NO: 19161 - DNA, 418 bp, Glycine max
  Clone ID: LIB3106-085-Q1-K1-D9
cccacgcgtccgcccacgcgtccgctttctctgtcccgatttcgctctggtgcgtctcgttcctgtgcttttgaatcatattcgtcgatctgttcttcaacatattctctgctttcaaccgttcgcgtcgtgactcagcttcgaaattgttcagtataagtataatctcttcagcgtaattccttgtcttgtgaaagttggaacttggaacttggaacatgtatgggagtaaagctagccaacttgtgaaagaatttgcaagtggagaaaaaggtcagcttaccacatacaataatgacttgattcgagaagtagttgcagagtgtactcaacatcaccttgattttcagtccttgataaggaagatgcaggaagaacgtttggatatccaaacggcaaaaaatgcagatcactacgg

SEQ ID NO: 19162 - DNA, 421 bp, Glycine max
  Clone ID: LIB3106-085-Q1-K1-E1
cggtggaccacgcgtccgttagcttccaaccctacactttttttctttttcgatattaacctttccacatggccggcgaagttcgaccccttcccagatagtcgacgtcttcgtccgcgttaccggcggcgaagtcggcgcggcgagttccctggccccgaagatcggtcccctcggtctctcccccaagaagatcggagaagacatcgccaaagaaaccgccaaggactggaagggcctccgcgtcaccgtcaagctcaccgttcagaatcgtcaggcgaaggtcacggtggtcccctccgccgccgccctcgttatcaaggccctcaaggagcccgagcgcgaccgcaagaagaccaagaacatcaagcacaacggcaacatctcgctcgatgacgtcatcgagatcgctagggttatg

SEQ ID NO: 19163 - DNA, 313 bp, Glycine max
  Clone ID: LIB3106-085-Q1-K1-E10
gcgggcacgcgtgcaaacacgcgtcctcccacgccatccgagaccctctaacttatatgtgactattcttagacgcttgtgacactgctactaatatgagtgtccccggcctaactattatgctatactctatggtgagccggaactccctgagcccctgcttaatgtacatcgctatctacaaaacgatgactgtacacgatatgctgaagttcaaatgcaacagcgctccgtgtgagattacggacaacgtggatatcagagcgggcggtctgatgattacctctcccagcgagtcacacaggatcgagat

SEQ ID NO: 19164 - DNA, 401 bp, Glycine max
  Clone ID: LIB3106-085-Q1-K1-E11
cccacgcgtccgcccacgcgtccgctgcttcatacctgtggcttacctctagaagatgtagacttcataaattctgatgggaagacaatgaacaagctgttgctggagggaaatccacgaatgactctttttactggtagttcaagagtggcagagaagttggctgttgatttgaagggccgtgttaaattggaagatgctggatttgactggaaaatactgggccctgatgtgcatcaggaagattacgtagcatgggtctgtgatcaggatgcatacgcatgcagtggtcagaaatgctcagcacaatcattgttatttatgcatgagaactggtctaaaacttccttgctatctaagttgaaagatcttgctgagagaagaaagttggcaaacttgac

SEQ ID NO: 19165 - DNA, 259 bp, Glycine max
  unsure at all n locations
  Clone ID: LIB3106-085-Q1-K1-C6
gagggccaagaaagcaaggtagtcccttcttccctcaagtcctcaaacaaggttgaatctagagcatccccgcgaaagctctttttttagttgcatggatctttttaccctttttcatttttccaattattattattatattatattgggcggacaaaaaaaaaaattattatattatattggaggacacaatgatcttgatgcttaattaaatgagatattattctcttgatggttccntaaaaaaaccgctcattct

SEQ ID NO: 19166 - DNA, 394 bp, Glycine max
  Clone ID: LIB3106-085-Q1-K1-A7
attttgataattatttttctagttgataagccatggctactcgaggaaagcttgagggtgacgttgatctcaagtctaacgcagacaagtactggcaaacccttaggaactccactgaaatattccccaaggccttccccaatgattacaaaagcattgaggttcttgagggtgatggcaaatcacctggttctatccgccacataagttatggtgaaggttcaccacttgtgaagtcatcctttgagaagattgaggctgttgatgaagaaaagaaggtagtgtcgtacactatcattgatggagaactcctccagcactacaaaacattcaagggagacatttctgtgactccagttggcgatggatgcgacgtgaagtggagtgctgtgta

SEQ ID NO: 19167 - DNA, 399 bp, Glycine max
  unsure at all n locations
  Clone ID: LIB3106-085-Q1-K1-A8
aactggtgctagaggtattgtaatatctggaagttcctcctttatggggcctaatctagtcacagaagtaccagaaggtgaagatgacagaaaatttagttctccacagctactgcattcatattctgacaagagaagttatgatcatgtccataaaagggacaagtcatataaaggtaaagtcaatcaagatggttttgaatcttttgattgtgatacggaagaacatacttctgttttcagcaatccacatggtttaggaattggtttgtttgatgttacaagtgatcctatgcgtcaaacacgatctataaggatgaagacaacttctgaggagccaagcacttcanacagaagaattaacattcgacagggtcaaagctncaggggcaaacctga

SEQ ID NO: 19168 - DNA, 367 bp, Glycine max
  Clone ID: LIB3106-085-Q1-K1-A9
cccacgcgtccgcccacgcgtccggccgatcagttatcgaagggagaggaattcgagaaaaaggctgagaagaagctcagcggttggggcttgtttggctccaagtatgaagatgccgccgatctcttcgataaagccgccaattgcttcaagctcgccaaatcatgggacaaggctggagcgacatacctgaagttggcaagttgtcatttgaagttggaaagcaagcatgaagctgcacaggcccatgtcgatgctgcacattgctacaaaaagactaatataaacgagtctggatcttgcttagaccgagctcggaatcttttctgtgacattggaagactctctatggctgctagatatttaa

SEQ ID NO: 19169 - DNA, 380 bp, Glycine max
  Clone ID: LIB3106-085-Q1-K1-B10
ctcctcaatcatccatagacatggccaccgacacttctgcagcagcttctattccctcattcactggcctaaaggcaggcgcaagcgaagggagtgccgacgcaagtaacgtctcagctccccaagccacaaggttctgcggaatgaaggcttgcctcaaagacgttggaatcgatgttgtggccactgctgcgagcgcagttctaactagcaacgccatggccatcgacgtgttactggacactgatgacgggactgtggatttctctcccaactctttttccaaggcccctggggaaaacatcgtggtcaagaacaacgcaagtttccaccacaacgttgcgttcgacgaggacgacattcctaacgacatggatgca

SEQ ID NO: 19170 - DNA, 419 bp, Glycine max
  Clone ID: LIB3106-085-Q1-K1-B3
cgtttcttagagccaacttctcagctcctgacaaggccagtcttagacagccatgggtgggatcatgattgtggttatgatggtgtaaacattgaacagagtctagccatcatcaataaattcccagcagctgttactgttcacgtaacaaaggataagaaagacttcagcatgcacttggattcctcagttgctgcaaaacttggagagaacggatcagccatggcaggctttgacattcaaaacattggaaagcagctagcttacattgttagaggagagaccaaattaaaaaatttcaaaagaaataaaacttctgctggtgtgtctgtgacattttttggtgaaaatgtgtctactgggctgaaagttgaggatcagattgctgttgggaaacgcgtggtattagtaggtagcac

SEQ ID NO: 19171 - DNA, 325 bp, Glycine max
  Clone ID: LIB3106-085-Q1-K1-B4
gtttgttagaagtacaatcatcacttttttttggacattggacctctcattggtggtggtttggctggccttatctatggcaatgtcttcattcgctctgaccatgcacctctttccagtgaattttgatttggttcaagtcatggcatgtgtaattcatgtttcttgatgataaaaggaggaaaaagcagttcttggttttctttctttttctatctatctccttttttttcttcttcttttaatttatttgtaaagtgtgctactactgtttaatttggtgagaaaaacaaaaaaagaaaagatcgggtaaaaaactttgagc

SEQ ID NO: 19172 - DNA, 417 bp, Glycine max
  unsure at all n locations
  Clone ID: LIB3106-085-Q1-K1-B5
cccacgcgtccgggaagagaacgggttttgaagaagaagcagttcaattgatcaactcagatttcagggacctaagtctagctgctaatagactcgcccatcatgccatcaaacttggtggcattggctttggagcctcttttttcggattgtttgctgccattgctgctatttatctgttgattttggatcgtacaaactggaaaacaaatattctcacagcactactcattccatacattttcttcagcttgccttcattaattttcgacgtcttcaggggagagcttggaaaatggattgctgcagttgctgttgtattacgccttttccttccaagacacttccctgattggctggaattgcctggtgctctgattcttcttatcgntgtagctccttctctaattgcaagca

SEQ ID NO: 19173 - DNA, 425 bp, Glycine max
  Clone ID: LIB3106-085-Q1-K1-B6
cccacgcgtccgatggagcagaaaaattggaaccttctcgatgaagctttagggcttaacaacaacaatgcgaagccatggcctctgtgtggtcgcttcgtgcttgtggaagattgtgttgacacaagcgccgctttcgttcttcaccaaatcctcaaacgctccttctcttctcacccttcttccgccgtcgtcttcctcgctttctctcaccctttttcccactatgatcgcgtcctcagaaagcttggttgcaacttagctgctcaaagagataatggaagattgtttttccttgacatgcttatgttgcagtgtccagatgaaggaaaagccaatcatgatgggcttgcttctgtatttgagcaaattgaaagagtgatcactgcattacatcaagacaagaaattcatctctatcatgat

SEQ ID NO: 19174 - DNA, 392 bp, Glycine max
  unsure at all n locations
  Clone ID: LIB3106-085-Q1-K1-B7
cccacgcgtccgcccacgcgtccgtatttagggtttttgtcgtagcangaagaagcagcaatggcgccgaagataacacgcaaggtcagcagaaaccccgaattgataaggggaatcggaaagtactcgaggtcgcagatgtaccacaagaggggcatttgggctatcaaggccaaaaacggtggcgttttacctcgccacgaccccaaacccaaacctgaaactcccactgaaaaaccacccaaattttaccccgctgatgatgtcaagaaaccccttgtcaacaagcacaaacccaaaccagctaagctcaaggctagcattacccccggaacagtgttgattcttcttgctggtagatttaagggaaagagggtagtgtttttgaagca

SEQ ID NO: 19175 - DNA, 410 bp, Glycine max
  Clone ID: LIB3106-085-Q1-K1-B8
cgacccttggctttatatttctgtacatttatattctcactggggaggaactcacaaagctagctagagactatatcaagtatctatttgggggaagccagagtgtccgactgaaaaatgccatgtatcaatggggacaactctatgaaagcatgacagctcagaaagaagaggaagacgagtattggttgcagaaggccattctggatacaccaacttggtggcacgaccctgctgattaccgtgaagcccttaaaaactacttgctatcacgtacagatgaggccattgccgccaggaattacttagaattagattcagatgcagacgttaggtatggctgggactcatgtgccgaaaaatatgaagatgaagatcaatatcaatataaagatgattatgaagaaaag

SEQ ID NO: 19176 - DNA, 409 bp, Glycine max
  Clone ID: LIB3106-085-Q1-K1-B9
cccacgcgtccgcccacgcgtccggtttgaagaaaaatgaatctaaaggattcaaaggtgatttgctctttcatactgcttaattttcttttcttcagttgttttgcagctgataatctcccgtgccctccaaaatctactatcccaccttcctcttcaccgcagaaatgccccaaagacacgctcaagtttggtgtgtgtggaagttggttaggcttggttaaagaagtaattgggacaaaaccaagtgaagagtgctgcatccttttgaaaggtctcgctgatcttgaagcagcactgtgtttgtgcacagctattaaagccaatgtgttgggagctgtcaaggtcaaagtgcatgttgctgttagtttgcttgttaatgcttgtggaaagaaggttccatctggat

SEQ ID NO: 19177 - DNA, 144 bp, Glycine max
  Clone ID: LIB3106-085-Q1-K1-C1
tttgaatgtgccaaaaaaacacttggtacctttattaaccgcgtccctacttggtctatctctctctcacggtatgggcacacacaccctggcttggacatgttctttggcgaaagaggattggcaggggctttctatatcttt

SEQ ID NO: 19178 - DNA, 219 bp, Glycine max
  Clone ID: LIB3106-085-Q1-K1-C10
gtttcgtgtaccgtgagcacaacaggtcaccaggatactacgatggacgctactggaccatgtggaagctgcctatgtttggttgcactgatgcttctcaggtgttgaaggagcttcaagaggctaagactgcataccccaccggcttcatccgtataatcggattcgacaacgttggcaagggccagggattaaccttattggcttcacaaccccaag

SEQ ID NO: 19179 - DNA, 334 bp, Glycine max
  Clone ID: LIB3106-085-Q1-K1-C12
cccacgcgtccgggagacaatgttaacggatggcatctacctcctgttcacctacttcaccaagcctgaatcaattacccctcttgaggagacaatgttaacggatgataatgttatccgatcaatgagttccaaaattaggaagaggaaatattagtttcttttcaagtctccagtaactctcctttaaggagatgcttatagagcaatgttatatttatcatttgttattatgtatttttccccctttcatttggattcaaggatttttgtaacatgattgaatttaattaaaagatagatgtaggtgctatcacttgcagtctacagagtt

SEQ ID NO: 19180 - DNA, 113 bp, Glycine max
  Clone ID: LIB3106-085-Q1-K1-C3
ttcccggtggccgacggcatccgaaaaaaaaaaaaaaaaataaatagtgaataataaaaaaaaaaaaaaaaaaacaacacccgggggacataaaaaaaaaggaagaagggaac

SEQ ID NO: 19181 - DNA, 423 bp, Glycine max
  Clone ID: LIB3106-085-Q1-K1-C4
ggttgcttctggaagtttgattcctgaagaggatctatctactgtaaatccaataattgaagaagttactcagacagatgtcacaaacgatttgaaaactgacacacctgttgaaatagctaatgaaaatgtaatagaaactggagttgatcaaattgttacggaagatgagaaacaatcacaaactcctgatgcaattgaagagtttgcagctgcagtactaacagacagtgatgtggttgaacctagccctgataaaaatgatacaataacagaatcagatattacatcgagtgcaccagctctccaagaaagtgcagatgatgatgttggagctattactgaaaacattgacagcgatactagtttgggtggacaaagtgacgagttgtctcctgtgggaagcttgactacagatgcaac

SEQ ID NO: 19182 - DNA, 350 bp, Glycine max
  Clone ID: LIB3106-085-Q1-K1-A6
cccacgcgtccggtgatatgcaaaccatgtcgctaatagctgcactctcctccacaacttcacaactcacttcccttccttccctcccttcttcctcctctccactttctcgcaaattgcccctcactctccgggaaaaaaacagaactccaatcacacctcacaagctccctttttcagcaaggcctaccaccaccagagtggtgttggtgaagtctcaggccacagcacctgcttcttctgaggctgtggcagtgacacctgtgtcttctgagatgaaggcatgggtctatggggaatatgggggtgtggatgttctgaagctggactccaatgttactgtgcctgat

SEQ ID NO: 19183 - DNA, 186 bp, Glycine max
  unsure at all n locations
  Clone ID: LIB3106-085-Q1-K1-C5
cccacgcgtncgcccacgcgtncggcgtttaattggaaaaaaaaaatcagaaacgcaaagggcaagaatcacccaattccgagctctactactccgcggcaccaccaaccagcgctcccctctccgccgccccgccgtcgccgattcttcatttgcatcaaaaccctcattctctagtgccgccgc

SEQ ID NO: 19184 - DNA, 434 bp, Glycine max
  Clone ID: LIB3106-080-P1-K1-F10
ggaacaaacagggaatagaagagaggagaagatgggtttcataatggaatttgcggagaacttggtattaaagttgatggaagatccgaaggaaagggatcggaggttcagggagcacgtttatagagtgaaggacaggtgcgagaagacgaaggagatgtggagctaccctatgcgaccctatgggttttggacattcgaacgccacaattctcagcttgcttgggatgcacagattagccaagtggccgggaggagggacccttatgatgatctcctccaacatttctctaccccacctaagtgagtgttgctgaacttgccacatgcattatcggtgaaaaggatgaatttgtcgtaatttccccttgtaatatcctgtcttgttgcatgttgcagagattacaactggatttgtgctgtatttcaaaaat

SEQ ID NO: 19185 - DNA, 448 bp, Glycine max
  Clone ID: LIB3106-080-P1-K1-F11
acgcccacgcgtacgctgagaggaagtgagagggagattctttgtttgctaccttctgtcggaaaaatggttacgttcaggtttcaccagtaccaggtggttgggagggctcttcccacggaagcagatcagcaccccaagatctaccgaatgaagctctgggccaccaacgaggttcgcgccaagtccaagttctggtattttctgaggaaactgaaaaaggtgaagaagagcaatggccaagtgcttgccatcaacgagatttttgagaagaacccaaccaaaattaagaactatggtatatggttgcggtatcagagtacgactggttaccacaacatgtacaaggagtaccgtgacaccactctaaacggtgcagttgaggcaatgtacaatgaaatggcttctcgtcacagggtcaggagcccttgcatccaaattatcaaga

SEQ ID NO: 19186 - DNA, 438 bp, Glycine max
  Clone ID: LIB3106-080-P1-K1-F12
ataaatctaacaataatatatataaggtacaaatagtaaatcgaggtacccattgtatgagaaactttccttccatttttgttcctctagtaggcctagtatttccggcaattgcaatggcttctttatttctttatgttcaaaaaaacaagattttttagatacagaaaacatagtacaattctggggttctttattccccaattataatactaaattcaaaaaaaggacagtaatgagtataatctttcgctcagacgatgtactgatatattctatggcggaggttcgaagaacaagcaattcattttgagccgatttcactttgctaggttcattgcagttattgctcgttgcactttccagtcatctcggtatggatttggtctttatttctgagaaaattagtgattgttcttttattccggactctattta

SEQ ID NO: 19187 - DNA, 454 bp, Glycine max
  Clone ID: LIB3106-080-P1-K1-F9
acgggactactctagaaggagagagtatccctgaagaattcacttacaaagatgttggattgccaaagtcagtggattggagaaagaaaggtgctgtaacccaagtcaagaaccaaggttcatgtcgtagctgctgggcattttctactgttgcagcagttgagggaataaaccagattgtgaccggaaatttaacatcattgtctgagcaagaattgattgactgtgacagaacttacaacaatggttgcaatgggggtctcatggactatgcattctcctttatagtagaaaacgatggactccataaagaggaagactatccttacattatggaggaaggcacctgcgagatggcaaaggaagaaactgaagttgtgactattagcgggtaccatgacgtaccacagaacaatgaacagagcctattgaaagcacttgcaaaccaacccct

SEQ ID NO: 19188 - DNA, 441 bp, Glycine max
  Clone ID: LIB3106-080-P1-K1-G10
gcaccacgtacgaatagttgcagagctataatctaacatatcgtgaggagaatgtggactggttagaaatctttagggctgcagtagtcttgatggcatggccatgccatggcgcatgctaccaaaggttacctctccgaatgaaaactggctatggtgagccttcttcagaggtaaaatgcgcaaggtttaggcttgctgtggacgcacacaacatccgagcctttaaaaccattcctgaagagtgcgatgaaccaaccaaggactacattgatggcgaacaatttagatcagactctaagaccgttaaccaacaagctctcttctatgctagtgaacgctaaggccatcacagcgacatctgtatattcgacatcgataacagcgtactctctaatgtccgatactatgcataacacggatatggagaggaggaattta

SEQ ID NO: 19189 - DNA, 76 bp, Glycine max
  Clone ID: LIB3106-080-P1-K1-G11
aaaaaaaataaaaaaaaaaaaaaaataaaaataaaaaaaaaaaaaaaaaaaaaaaaaggaagggaaggacatacga

SEQ ID NO: 19190 - DNA, 457 bp, Glycine max
  Clone ID: LIB3106-080-P1-K1-G12
cccacgcgtccggttgatcgagattactataaacagcgtgatgaaaatgaaggtgcttgggttcttcgttgctacaattttggtagcatggcaatgccatgcgtacgatatgttccctctccgaatgaacactggctatggtgcccgtactccggaggtgaaatgcgcaagttggaggcttgctgtggaagcacacaacatctttggctttgagaccattcctgaagagtgcgttgaagcaacaaaggaatacatccatggcgaacaatatagatcagactccaaaacagttaaccaacaagcttacttttatgccagagacctcgaagtccatcccaaggacacatttgcgttcagtatagatggcaccgtactctctaatattccatactacaaaaaacatggatatggagtggagaaatctaactcgaccttgtatgatgaatgggttaacaag

SEQ ID NO: 19191 - DNA, 367 bp, Glycine max
  Clone ID: LIB3106-080-P1-K1-G9
acgcttcaatttatcagcatggcctacgtccagtgccacagaacctgcaaagtgagctgccaacaggaaaaccagcacgcctcgtttgggcagaaagtttctgacttgttcaaagggcatcaacataatgaccacagctccaattatgccacccaaaccaaagtgctttcccagtcagggtcagggttaggccccttcaccaccaaaactcaaacacaatgcggttgcccccaaacacatctcagtaccactcatggctccaacacaaaaggccatggccatggccaagggagaattaagagggagcacaagagagggatgctgcagaacatcaaagatcgcttatcaggtgacaccagcagcgaca

SEQ ID NO: 19192 - DNA, 308 bp, Glycine max
  Clone ID: LIB3106-080-P1-K1-H11
gggaattgagtccaaagaagtttgaggttgatgggtatttgagaacccctttgtcaaggatgaagctgtttagcactgatgagagttgagaaatagtaataataaatttgcggcaattggaataaggatgcaaaaaccgagttaaattcttttgcattagctatctatgctatattgctatgccactcttgaaaagatgggtgggtgtaaaagttgtttgtattaatagagagaatgatagagaaataatgattattgttgagttctggtgaattgaactcagtaacagtggggctgcttttgccttt

SEQ ID NO: 19193 - DNA, 404 bp, Glycine max
  Clone ID: LIB3106-080-P1-K1-H12
agtggctataacactacttgcattcagttagactttgatagtgagattagctctaataagggtaaggaccagagagagaaagagaaataggaagaaaaacacaagatgggttattggaagtctaaggttctttccaagatcaagaaggttttcgagaagaatagcaccaagaaagctgctgctgctgatgccaccaagtcctttgatgagtcaaaggaggaatacaacaaagcctttgaagaaaagaagactgaacttcaaaccaaagttgttgaaatatatgaggcttcatcaacagaaatcaagagtttggttaaagaacccaaggaagctggcttgaagactaactccacagaagtccagacgttcctagaagagctagttaaaattgatttcccttgatc

SEQ ID NO: 19194 - DNA, 326 bp, Glycine max
  unsure at all n locations
  Clone ID: LIB3106-085-Q1-K1-A1
ccaacccgtccaaccaggatcaaaacttgtttttccaggctttaatgttttcaactgtaaagtggtacctggttaaaggggcagggaataaggtttttgggatggttgttaaatggttactcttaaatattctaacatggtctgtaatgcaaactcaattcattgcactgcttctgagttgaatgaaaggtgttttaagaaaaaaaacataaannataannaaaaannaccacttcnaaattcatcctttcaaaataattgagcttgtgatgaacaaaaaaaaggtgtggcggacacaaaaaaaaataaaaaaactgcccaggctt

SEQ ID NO: 19195 - DNA, 404 bp, Glycine max
  Clone ID: LIB3106-085-Q1-K1-A10
cttttattgtttctttcttgatcatgtcgcttgttggtaaaattagtactgaaattggggttcatgcaactgctgcaaagtggttcaacctctttgcaacgcagctccatcatgttcaaaaccttactgatagagtgcatgaaaccaagctgcatcatggtgatgactggcatcacaacgagtcgatcaaacactggacttgtacaatagatggtaagattacaacatgtctggagagtattgaatccgttgatgaaccgaacaaaacaatcacctacaagctcttcggaggagatattggtcataagtataaagtctttaagctcatttttcaagctattgacaccgatcatgggggtgttattatcaaatggaccgttgaatatgagaagattgatgagaat

SEQ ID NO: 19196 - DNA, 421 bp, Glycine max
  Clone ID: LIB3106-085-Q1-K1-A11
cttaaaagtagacgagcttcccctcttgctttactctgtttctcttcacttcttttggtaatcattctatagcgtgtgtgttgtgagcacatgaagattctctcaagggctcaagctctgaagtttcggtctcttcccaatcttacatcctacaatattttaattgacatgctttgtaaggcaggagaacttgaagctgctctgaaagttcaggactccatgaaagaggctggcttattccctaatatcattaccgtaaatattatgatcgatcgactgtgtaaagctcaaagacttgatgaagcttgctccatatttttaggattggatcataaagtttgcacccctgactcagtaacattttgttcactcattgatggcttgggcagacacggcaaggtgaatgatgcctatatgcttt

SEQ ID NO: 19197 - DNA, 419 bp, Glycine max
  Clone ID: LIB3106-085-Q1-K1-A12
cagaaatcaagcattgggtcgaactcttctttgatgtcaaagtaatagctatgaatagtcatcgactcccggtaaagggtagaagagtacgacctattatgggacatacaatgcattacagacgtatgattattacgcttcaaccgggttattctattccacctcttagaaagaaaaaaacttaaatcaaaatacttaatagcatggcgatacatttatacaaaacttctaccccaagcacacgcaatggagccgtagacagtcaagtaaaatccaatccacgaaatcatttgatctatggacagcatcgttgtggtaaaggccgtaatgccagaggaatcattaccgcagggcatagagggggaggtcataagcgtctataccgtaaaattgattttcgacggaatgaaaaaaacata

SEQ ID NO: 19198 - DNA, 192 bp, Glycine max
  Clone ID: LIB3106-085-Q1-K1-A2
cgaatcagtttcattggaccaattagcagaattgggtgtgttatactggaagctcaatccaactatctatgagaacgatcaagagttgaccaagattagacaagataggggatacaactacatggacctgcttgatttatgcccagaaaaggtggaaaattatgaacagaagttgaaggaacttctacactg

SEQ ID NO: 19199 - DNA, 278 bp, Glycine max
  unsure at all n locations
  Clone ID: LIB3106-085-Q1-K1-A3
cccacgcgtccggattgtgcgtgacacatgcaggaacattggttttgtctctgatgatgttggtcttgatgctgacaactgcaaggtcctcgtcaacattgagcaacagagtcctgatattgctcaaggtgtgcacggccacctcacanagaggcctgaggagattggtgctggtgaccaaggtcatatgttcggctatgccactaacgagactcccgagctcatgcccttgagccatgtccttgccacgaagcttcgtgccaagctcaccgaggttc

SEQ ID NO: 19200 - DNA, 402 bp, Glycine max
  Clone ID: LIB3106-085-Q1-K1-A5
cttttattgttgcttcattgatcatgaaaacgagggggctagattactactgaactacgggttcatgcagctggtgatgccatgcttaccatatgtgccctctacgaacgaacactgactatggtgcccgtactccggaggtgaaatgcgcacgttggaggcttgctggggaagcacacaacatctttggctttgagaccattcctgaagagtgcgttgaagcaacaaaggaatacatccatggcgaacaatatagatcagactccaaaacagttaaccaacaagcttacttttatgccagagacctcgaagtccatcccaaggacacatttgtgttcagtatagatggcaccgtactctctaatattccatactacaaaaaacatggatatggggtggaga

SEQ ID NO: 19201 - DNA, 433 bp, Glycine max
  Clone ID: LIB3106-080-P1-K1-E9
cccacgcgtccgcttgttcacccttccccttctccttacttctcactctctttccggaacactccctttctctttccccttacccttcttctgtgtgtgatgatgtagatagagaataaaaagagaccagtgtgcagtgagaaagaggttggtcacttcttgtgtggctttgttttgttctttgtgttggaatttgttgatgggtgaagagggagaagaggtgtcaagagataaggaacagcaacacatgggagtttatggaaatgagtggttgtttagtagtttctgtgcaaattggcgccgtttaagacaccagaattcctgttctatgcctccttttgagtgaaaaaaaaaaaacaatcaaacaaaaacctggtctctcttaacttttcatcttcccgtcctaatatacattgactataaagaaaaataa

SEQ ID NO: 19202 - DNA, 419 bp, Glycine max
  unsure at all n locations
  Clone ID: LIB3106-080-P1-K1-A10
ggactcgcaagcttaatcaagacgccaatagagagagggtggggtaatgggttgcgctgtttcaactcttcttcttcggtgttgaagggcgtcaccacccccactctgcttcagcccagagtgcttctctacgacgccgtttctcacctctgccaccgaggagtaaaatgggtaatcagagcagacaaggacagaaagatcaaattttgttgcgttcagtctgatactgctgagctctatctgagagcttgtggtcttgaacgagaggatgtcttgcaccgcattctgtttgttgaaggcctgaatgtttactctcagggatccactgctgcattgcgagtactgtcgcacttgccactaccttactctgcttttagtgcgctctgcgtgattccatctncactcagagatggtgtcta

SEQ ID NO: 19203 - DNA, 267 bp, Glycine max
  Clone ID: LIB3106-080-P1-K1-A11
gcactcgatggcgatcactggacttctagttcaaggggaggttggactgggctgagcagtctaaagtcatcacagtggcaggccaaggacatgaagaaaaacaatctggaatactcgagagccctgctgtactaccacttgtgtgacctctgccaaccaaggactgaatgggttagctacagcaaactctgactgaaagatcaaatcctgtgcagttcagctgatgctggtgaactatatctaatagcatgctggacatgatacgag

SEQ ID NO: 19204 - DNA, 187 bp, Glycine max
  Clone ID: LIB3106-080-P1-K1-A12
tcgagactttgacactcagctcagaaaactctcgttcaagtaagcgttcacctgttaagtgcagtgacagctacgtacactggcactgctcttatgttagcaatgtctggctgttaaagctaagcacgatcacgcatttccatgacggtagccttactattcctgacctgcacgaagctcgacagaa

SEQ ID NO: 19205 - DNA, 259 bp, Glycine max
  Clone ID: LIB3106-080-P1-K1-A9
tcgcccacgcgtcctgtaaaatggaagtaatctgaatatggaggtggacagtctgttgctgggttgatattgcatacggcatcactgaaccatccagcttagctgatatggccgccaatccttcccatgcactggtctatcttgtggttatgctctcagctagagccctgttcacaaacacatggatcgaactctgtggctcatctgctagagatttcgccaagcagcttaaggaacatcatataggcatgcccttaca

SEQ ID NO: 19206 - DNA, 439 bp, Glycine max
  Clone ID: LIB3106-080-P1-K1-B12
gtttttgtgatcatataactattgtaattatgattgtatatataaactatattatgtgtctgtaatttcatacaacatcaaagatttcagctagtcattgaagttccgtaatcatgtttgtctatacttgtttgtaatatcgattatcgtgacaaaatcgagactgtaactacaatttaaaaaatcttgatttcagccacaattttaaggtatttgaggtcttctttacaatcacacatgactgtaattgtaattacgccaattgaatttatctataattttatgtgatatcaattatcgtgacaaaagtgagactgtaactacaatttaaaatcttgatctcgacgaaattgcaaacgcgaccacgtttgcaatttataaccctcctatccactctctttaattgttctgccatttggtacactgtttcacccttttc

SEQ ID NO: 19207 - DNA, 353 bp, Glycine max
  Clone ID: LIB3106-080-P1-K1-B9
ctggacattaattccgagatatattcgttaaaggttggtcagaagtttgctctggggctggtttcaacacttaatcctgatggaactccagacactggatattatacccagatcagtcgacaatcactggccaacaattttgaatatgtcatgtatgggaagctctacaggataacagagggttcagggcgtgaaaaagcggagatgaatatttcatttggtgggcttctgatgatgctgaagggagatacctctcattgcaacaagtttgagctggatcagaggttgtatcttctgataaggaaagtctgaaaattgtatgtaaaaaataaatatgaagatgtgaaaccttg

SEQ ID NO: 19208 - DNA, 210 bp, Glycine max
  Clone ID: LIB3106-080-P1-K1-C10
accaagcttcctattgatggacgattctattatattaatgcttaggatcaatcagtgcacgtcaacatttggtttgagaaatgtgtttcgcttaactaagtcatgattaatggaagatagctagcattgtattaaaacaacttataacaaacatagcaactgcgaaaactgtgacattacacaacttaaaaacctttcaggacatccccc

SEQ ID NO: 19209 - DNA, 424 bp, Glycine max
  Clone ID: LIB3106-080-P1-K1-C11
ctcgtcttcaatcctttcgttattctcttattcatccttctcttctgaataatccagatgtctttctgcccttttctccgtcacgcttttcgtgaccggatctgtatggatttgatccagatctacacgccgatggtggttttggccgggtctttcatagatctggtgcgtagaggctcagatctacggtaccgaggtacaacagagaatcgatgacaagaacgcagatccgacggtagatccagccgattccgcttgttcgatcgctacagacccctgtatcggatcattaagcagcgtgtctcgcgcgttctacacgtgttgccgatctcggatgttgtaaaattagcttatgatgtgaagctatggagtggaaaatatgtggatgtaagagatttcgggatgaatggcctcaaaacgcttt

SEQ ID NO: 19210 - DNA, 424 bp, Glycine max
  unsure at all n locations
  Clone ID: LIB3106-080-P1-K1-C12
cccacgcgtccgcccacgcgtccgagcaagctcatcctagagttttaaaaatggcagcaggctccttcatggctctctcttccccatccttggctggcaaggccgtgaagctgggcccatcagcccccgaagtcgggagggtcagcatgaggaagaccgtcaccaagcaggcctactccggaagcccatggtacggcccagaccgcgtcaagtacttgggcccattctctggcgagcccccgtcctacctcactggcgagttcccaggtgactacggctgggacactgctgggctttcggccgacccagaaaccttcgccagaaaccgtgagctcgaagtgatccactccaggtgggccatgctncgggcccttgggctgcgtcttgcccgaactattgtncccgaacggngtcaagtttggag

SEQ ID NO: 19211 - DNA, 439 bp, Glycine max
  Clone ID: LIB3106-080-P1-K1-C9
gtttggtgggatacctcttataatccaatgtttatcaagcccagttaggaacactgtaaattatgcacttggggcactttattatatctgtaacgaatctaacaaggaggagattttaaggcccgaagttgttgatgtcattaggaggtatgcagccgctgaagaagttagtgtgagcttcagtaatctggctaaagcttttctgagtaaacatctggccgagaactactgagagacacagcttacctttccatactcattataagaccatatgtcttgagtaaggcaacaagtaattagaaagaactattattattgttattattattcttggttgatcaaatattattattcttgttattggtatcacactattcatgtctagaaaggattagaccatacaagatactatttgacaaaaaaaaaatttttattatat

SEQ ID NO: 19212 - DNA, 450 bp, Glycine max
  Clone ID: LIB3106-080-P1-K1-D10
cccacgcgtccgctaagctttgctttcaatcttctccttacaaaaaaaaatcctggccctctcttgtcccaataattagcagaagaagccaacagaaaactattccatatagctttcaattcaaacttgttttgattttcattttaactcaatggagaacagaacaagctctgtactcccacctggcttcacgtttcatcccactgatgaagaactaattgtttactatctttgcaaccaagccacatcaagaccatgccctgcatcaatcatcccagaagtggatatctataagtttgatccatgggaattacctgaaaaaacagactttggaaaaaaaggacggtacttctttagtccacgagagaggaagtatccaaatggggtgaggcctaatagagcaaccgtgtctgggtattggaaggccactggcacagattaagcaatcta

SEQ ID NO: 19213 - DNA, 115 bp, Glycine max
  Clone ID: LIB3106-080-P1-K1-D11
tcccacgcgtccgaaaaaaaaaaattttaatttaaaaaaaaaaaaaaaaaaaaaaatgaaataataataaaaaaaataaataaaaaaataaaaataaaaaaaaactttactatat

SEQ ID NO: 19214 - DNA, 447 bp, Glycine max
  Clone ID: LIB3106-080-P1-K1-D12
gcagactcggcttccaatgccactcaacatgtggaggcaggagttgccactattgatctcaatgcccctccttttgatccctttttagctcagttcacttgtgaaaataaggctccactttcatcagaagctcctaatggtcatggcaagaagggtaaaatgccgactgtcgatagttctgctggtaagggtgacagtagtgggatatcctcaagttttgctgctcctaataattcaacccagactacatcattgacttctggtgctttcattgaatgcccatttgctgggacatatattaattcttggacaccacttcctggaaactctcaaatgcccccatttaaaaagagccatagtcacactgatgcaatgtctggtatgttccataagggggtccggtgtgatgggctgggtgtctatcccataactggacctcgtttcaaa

SEQ ID NO: 19215 - DNA, 455 bp, Glycine max
  unsure at all n locations
  Clone ID: LIB3106-080-P1-K1-D9
ggcaagccccactcaaccaccacacctctcctcgttcacgctacccctttctgctgttcttctacctttcaagttttaaaagtataaagatggcagagacattcctatttacctcagagtcggtgaacgagggacaccctgacaagctctgcgaccaaatctccgatgctgtcctcgacgcttgcctcgagcaggacccagacagcaaagttgcctgcgaaacatgcaccaaaaccaacttggtcatggtcttcggagaaatcacgaccaaggccaacgttgactacgagaagatagtgcgtgacacctgcaggaacatncgcttcgtctcaaatgatgtgggactggatgccgacaactgcaaggtcctcgtcaacattgagcagcagagccctgatattgctcanggtgtacacgggcacccttaccaaaaaacctgaagaaattggtgctgg

SEQ ID NO: 19216 - DNA, 425 bp, Glycine max
  Clone ID: LIB3106-080-P1-K1-E10
catggccaccgtcacttctgcagccgttgctattccctcattcactggcctcaaggcaagcgcaggcaaagtgagtgccgcagttaaagtctcagctccccaagccacaaggttgggcatcaaggcttcgctgaaagacgttggagtcgctgttgtggccactgccgcgagtgcagtgctggctagcaacgccatggccattgaagtgttgctgggtggtgatgacgggtctctggctttcgttcccaacaatttctccgtggcctctggggagaagatcgtgttcaagaacaacgcaggtttcccccacaacgttgtgttcgacgaggacgagattcctagcggcgtggatgcagggaaaatcttcatgagcgatgagaactttctcaatgcgcctggtgagacttacagcgttactttggatg

SEQ ID NO: 19217 - DNA, 453 bp, Glycine max
  Clone ID: LIB3106-080-P1-K1-E11
cccaatcgtgcacagaaattttaggatcgtgcaaccatatgtgaagacgtgataagggagactcgactaggttcaaatgaatatgctggttataaaccagtgatgtgtaaacaccacagaccaactcgtcaaggatttagaaaattatgacatatgatttccacataggagacatgccttatgcaaatggatacatctcacaatgggaccaattcacagctcaagtgcaagaaatttcgtcaacagtaccatacatgattgcaagtggaaatcatgaacgtgactggccaaacacaggatcattctatgatactccagattcaagtggagaatgtggagtccctgcagaaaccatgtattattttcctgctgagaatagagccaaattctggtataaagcagattatggccttgttcgcttctgcatagcagatagtgaacatgactggagag

SEQ ID NO: 19218 - DNA, 340 bp, Glycine max
  Clone ID: LIB3106-080-P1-K1-E12
cccacgcgtccggacggccttccagagactccagaagctttgattgaagatgtaattcatgacaaagaagctcaattcagcagcccaaacctgaatattgcttacaaaatgagtgtccgcgagtaccaaaatttgactccctatgccacagcactggaggagaattggggaaaaccccctggcaatctgaatgcagatggagagaatcttttggtatatgggaaacagtatggtaatgtctttataggtgttcagcctacatttggctatgaaggggatccaatgaggctgcttttctccaaatctgccagccctcatcatggatttgcagcatattatt

SEQ ID NO: 19219 - DNA, 209 bp, Glycine max
  Clone ID: LIB3106-079-P1-K1-H8
gacttttcagatttgaggtagaagaagtttagctttttttatttttaatttccgtagaatttctgttcgagtgggtgggacgggtaaggaggaagacatcctgttggtttctgtgatatgaaaccaatttgggttgaataagcatgttttgtttggggaatgtgtgtgcattttgcttttgctttattaaatactaaattatgtgtttc

SEQ ID NO: 19220 - DNA, 422 bp, Glycine max
  Clone ID: LIB3106-079-P1-K1-F9
cccacgcgtccggagctttttcatttctgtgcaagcattctggaacttgtaatcccagtttacaaaagcaggagggcttatggacagttggctaaatgtcacacattacttaccagtatctatgaatcaattcttgaacaggaatctagtccaattcctttcacagatgcaacttactacagggttggattttatggtgatagatttgggaaacttgataaaaaggagtatgtatatcgtgagcctcgtgatgtacgtctaggtgacataatggaaaaacttagtcacacatatgagtctagaaatggatgacaatcacactttgcatattattccagattctagacaagtgaaggcagaggagttgcagcttggtgtctggtaccttcagattactgccggtgatccagtaatggaagatg

SEQ ID NO: 19221 - DNA, 460 bp, Glycine max
  unsure at all n locations
  Clone ID: LIB3106-079-P1-K1-G10
cccacgcgtccgcccacgcgtccgtccaactgcaaaacaacaactcaattaagaaattattctccggagccatggcagatctcaagtctacattcttgaacgtctattccgttctcaaatctgaactcctccacgaccccgccttcgagttctccgatgatgctcgccattgggtcgaccggatgctagactacaatgtgcctggaggaaagttgaaccggggactgtcagtcattgacagctacagattgttgaaagaaggacaggcattaaatgatgacgaaattttccttgctagtgctcttgggtggggtattgaatggcttcaggcatnatttcttggtcttgatgacattatggataactctnacacacgccgngggcaagcatgctggtttagagtgcccaggttggaatgatngcagccaatgatgggagtctactaagaaaccatatttca

SEQ ID NO: 19222 - DNA, 271 bp, Glycine max
  unsure at all n locations
  Clone ID: LIB3106-079-P1-K1-G11
gacccacgcgtacgntcatcaatcaattattcttccgtttattgtaaaacaacaacncaatnaaaaaagccgcctttttatccaagtcactatctcaattctacattcttgtacatctattccattctcaaatttcaactccttcactacccctccttaaactacttcgattatccttcccattttttctacctaatactatactacatatcttccttaattaaactttaactctttacctctcatacatatacactctacccttattttt

SEQ ID NO: 19223 - DNA, 475 bp, Glycine max
  unsure at all n locations
  Clone ID: LIB3106-079-P1-K1-G12
acccacgcgtncggacataatataanancataaaacttttgattttgtgcaaaaattatccataattgcccgcatattttcaccctgaatctaagatatctacgtacatttgtagtttctggtaaacgttttactgattctgatcatactcattagaaacagataggatgtattgtaatatgcttcttccaatggaatgtttgacactgtaccaagttgagtttgtattatgaacttttgtatactttaaactcaccaagtcagtacggtggtttcatttttagacaacttttgcggtctccttatagcaagcattttcagtgcaagcattttccctatacttttcttgattcttccaagtttgttgcccagagtttttcaatgaataagaattattgtttttttaagaccaaacttttcattattaatataaaaataaatcctctacaggttaaatttgtccaggctttcattt

SEQ ID NO: 19224 - DNA, 371 bp, Glycine max
  Clone ID: LIB3106-079-P1-K1-G2
gaaaatgaaggtccttgttttcttcgttgctacaattttggtagcatggcaatgccatgcgtacgatatgttccctctccgaatgaacactggctatggtgcccgtactccggaggtgaaatgcgcaagttggaggcttgctgtggaagcacacaacatctttggctttgagaccattcctgaagagtgcgttgaagcaacaaaagaatacatccatggcgaacaatatagatcagactccaaaacagttaaccaacaaggcttacttttatgccagagacctcgaagtccatcccaaggacacatttgtgttcagtatagatggcaccgtactctctaatattccatactacaaaaaacatggatatggg

SEQ ID NO: 19225 - DNA, 408 bp, Glycine max
  Clone ID: LIB3106-079-P1-K1-G3
gaaatggcttcctcaatgatctcctccccagctgttaccaccgtcaaccgtgccggtgccggcatggttgctccattcaccggcctcaaatccatggctggcttccccacgaggaagaccaacaatgacattacctccattgctagcaacggtggaagagtacaatgcatgcaggtgtggccaccaattggcaagaagaagttcgagactctttcctacttgccagacctcgatgatgcccaattggcaaaggaagtcgaataccttctaaggaaaggatggattccttgcttggaattcgagttggagcacggtttcgtgtaccgtgagcacaacaggtcacctggatactatgatggacgctactggaccatgtggaagctgcctatgtttggctgcactgatgct

SEQ ID NO: 19226 - DNA, 404 bp, Glycine max
  unsure at all n locations
  Clone ID: LIB3106-079-P1-K1-G4
cacactctngtcttggngatnntcttcttcttcaaattctccctcttttttggccctaagattacgatcccctttcnttcttccannatcattacattacattacgactttgactttgatttggatttaaaccttaatccttcgtctggctttttnccttccctcnnaactccaccattcctgatttttctgcatcagtctattcaagttcattgtagggtgtatatccttgattttgtgtgggtttgagttagggtgcatgtgaatgaaaaggagatttgctggaggtgatgcatttgcatagatgaaggcagaaaaagtttggcgtttaggcagcatgggtgatatgcagatactgcctgggtctcgccaccgtcctcccatgaaagagccgatgtggatta

SEQ ID NO: 19227 - DNA, 159 bp, Glycine max
  Clone ID: LIB3106-079-P1-K1-G5
cgaaatacccgggccgaccaacccgtccgaaaaaaaaaaatttaaattaataaaaaaatttttataaaaaaaaaagacctactattttaaggggggcaatttaaacaaaaccaagcttcaaacttcatttcttttgttttacgttatctaaattcaatt

SEQ ID NO: 19228 - DNA, 160 bp, Glycine max
  unsure at all n locations
  Clone ID: LIB3106-079-P1-K1-G6
ttccgaaaaaaaaaaaaaaatttttttnnnnanttttttttggcccgccgttttaaaggttccaagcgggactttctcgagcattcaacgttttccttctcttataggggcccctaaatttaatgaactggccgtcctttttcaacttcgcgactggaaa

SEQ ID NO: 19229 - DNA, 454 bp, Glycine max
  Clone ID: LIB3106-079-P1-K1-G7
cccacgcgtccgggacctcaaggcctcggaggagagggaaaaatccgacaagaggttgaaggaagagaaggaacccaaagccgaagacaccagcaaagacgaaagcacctccaaagttccaaacaaaggtaatggcttagatttagataaatactcttggactcaatcacttcaagaggttaatgttaatgttccggtgccaaatggaaccaaatcaagatttgttactgttgagataaagaagaaccatctaaaagttggactcaaaggccagcctccaattattgagggggagttttataagtctgtcaagcctgatgattgctattggagtatagaggatcagaatgcaatttctattcttttgaccaagcatgatcaaatggaatggtggaaatgtctagtgaaaggtgatcctgagattgatacccaaaaggttgaacctgaaaacagc

SEQ ID NO: 19230 - DNA, 463 bp, Glycine max
  Clone ID: LIB3106-079-P1-K1-G8
actatcgcgcccaaccgcgtccacctcaacgctcttcttactctcttcgaagctcacacgacccaaacctgcttcgcttccttctcgattcttccattgccgatcgaaacgcctcgtcttgacgcctcgattcgccgtgaaagcctgcgcggtgaacgtcgaggagaagaatgtcgctgcaatatcgggagagtggggtaaggtttccgcggtgttgttcgacatggacggcgtgctttgcaacagcgaagagccttctagaagagctggcgttgatttgttcgccgagatgggcgtcgatgtcaccgtcgacgatttcgtaccgtttatgggaactggagaagcaaattttttgggaggtgttgcttctgttaagggagttaaggggatttgatccagaagctgcaaaaaaaaaggcttttggaaatatatttggataagtatgcaaaaaccagattctgga

SEQ ID NO: 19231 - DNA, 419 bp, Glycine max
  Clone ID: LIB3106-079-P1-K1-G9
ggctatctataaacaaaaggggattaaataaaaataaaagtaagtgtgttgaagaaataataaggtgtggttggggttgggagttagggtagaatcaattgagaatggggatccgattcgtactgatggtgaacaagcaaggccaaactcgtcttgctcaatattacgaatacctcactctcgaagagcgacgtgccctcgaaggcgaaatcgttcgcaaatgcctcgcccgcaacgaacagcagtgttcctttgttgagcatcgcaactacaaaattgtttatcggcgctacgcctctttgtttttcctcgttggagtcgacgatgatgagaatgagctggcaattttggaatttatacatctcttggttgaaactatggatcgtcatttcggcaatgtgtgcgagctagatattatg

SEQ ID NO: 19232 - DNA, 257 bp, Glycine max
  Clone ID: LIB3106-079-P1-K1-H1
aaagaatgctcgtgaagctgtgaagcactttggtcctgctcctggtgtgcctcacagccacaccaagccttatgttcgagcaaagggaaggaagtttgagagggctagaggaaggaggaacagcagaggatttagggtttgatgtgataaatagtgttctattctctgaaattcaaaatttccttatatcttagacggttgaagcagttttcttgttatttgtgttctgataatatgattttcagtttgaagttgtc

SEQ ID NO: 19233 - DNA, 338 bp, Glycine max
  unsure at all n locations
  Clone ID: LIB3106-079-P1-K1-H4
tcattccacatccaaaaaaggttaacacacgtggngaagatgctttctttgtgagcaactataatgggggagttattgctgttgccgatggtgtctctggttgggctgaagaggacgtggatccttcgttgttccctcgtgaattgcttgctaatgcttccaattttgtaggagatgaggaggtgaactatgatcctcagattcttattaggaaagcacatgccgccactttctccacaggctcagctactgtcatcgttgctatgctggagaagaatggaactctgaagattgctaatgttggagaatgtggataagactcatncgtatggtcatgt

SEQ ID NO: 19234 - DNA, 312 bp, Glycine max
  Clone ID: LIB3106-079-P1-K1-H5
tcagcatcagtggctacagcctgcatgcttcacggtgcaagcagccggcccgcaaccgcccgcagatcctctggcctttccggaaccgtccgcattcccggcgacaagtcgatctcccaccggtccttcatgttcggcggtctcgcgagcggtgaaacgcgcatcaccggccttctggaaggcgaggacgtcatcaatacgggcaaggccatgcaggccatgggcgccaggatccgtaaggaaggcgacacctggatcatcgatggcgtcggcaatggcggcctcctggcgcctgaggcgccgctcgatttc

SEQ ID NO: 19235 - DNA, 382 bp, Glycine max
  Clone ID: LIB3106-079-P1-K1-H7
cggggataagattaaagattcaacaatggcctctgcttctgctactcttctcaagggaggtcctgttcttgacaagtgcgagtgggtcaaaggccagacccttcgccaacctctcgtgagatgtaacccttcctcagcatcagctctcaccatcaaagctgcttcctatgctgacgagctcgtcaaaaccgccaaaacagtggcctcaccggggcgtggtattttggcgatggatgagtcaaatgcaacctgcgggaagcgtttggcatctattgggttagagaacacagaagctaatcggcaggcataccgtaccctacttgtgacagtacctggtcttggtgaatacatctttggtgccattctctttgaggaaaacttt

SEQ ID NO: 19236 - DNA, 374 bp, Glycine max
  unsure at all n locations
  Clone ID: LIB3106-079-P1-K1-F8
agaaacagtgtgatgtttatgaaggtncttgtttttttagttgctcgacttttggtagcatggcaatgccatgcctacgatatgttccctcttcgaatgaacactggctatggtgcccgtactccggaggtgaaatgcgcaagttggaggcttgctgtggaagcacacaacatctttggctttgagaccattcctgaagagtgcgttgaagcaacaaaggaatacattcatggcgaacaatatacattcagacttcaaaacagttaaccaacaagcttacttttatgccagagacctcgaagttcattccaaggacacatcttgcgttcagtatagatggaaccgtactctctaatattccatactaccaaaaa

SEQ ID NO: 19237 - DNA, 428 bp, Glycine max
  Clone ID: LIB3106-079-P1-K1-D8
acaaaatacacaaggaggaaagatcattaatgggaaaatgggatctgcaatctatgattaaagcttcctcagaattatatggacctgaaaagtcaggaacagagcataaagtgcctagacacgtaaagtttcccttcacgaactctgttcagtgccgcataatttggataagtttacgccttcagcgacctggttcaagttctataaatattggaaatgacttcaatctgttgtctctagatgagaacccttttgcacaagaaactcaacgggcctcattcggaggatctgctgagagcgaaccctgtcttcatgccaagaggattttagttgttggaagccccattagaaaggaatttgatcttaagccacaacaaagctctgaccagttgaccctgacagggtggttggaaagagctccacagctt

SEQ ID NO: 19238 - DNA, 402 bp, Glycine max
  Clone ID: LIB3106-079-P1-K1-E1
ctcttttaccattctcttctctcttgctcttgcaggagagagccatgtccatgcatcgctacctgaggaagattattgggaagctgtttggccaaacactcccattcccactgcactgcgagagcttctaaagcctctccctgcaggtgttgaaatcgatgaactccctaagcaaattgatgatacacagtacccaaaaacattcttctataaagaagaccttcatccaggcaaaacaatgaaagtacaattcaccaagcgtccctatgcacaaccttatggtgtatatacatggttaacggatattaaagacacctctaaagaaggatatagttttgaagagatatgcatcaagaaagaagcgtttgaaggagaagagaagttttgtgcaaaatccttggg

SEQ ID NO: 19239 - DNA, 472 bp, Glycine max
  Clone ID: LIB3106-079-P1-K1-E11
atgaagttgaagcagcagaaaatgagagtagtagtagggtcagtgtggctgtgcctctttctgttggctgtcggggagtcggagggagcggatttggcggcgaagtgcaacctgctggttcagaaagtgctgccgtgcctgaacttcgcgacggggcaggcggcggttccgaccaaggactgctgcgaggcgacgtcggagataaagaagagcgacccggagtgcctgtgctttgcgatccaacagactcacaagggtagtccggaggtgaaaaatatgggcatacaagaggctaggctgcttcagctaccttctgcttgtaacttgaagaatgccagcaccaccaactgtcttaagcttctgggtctatctccaaactccgctgacgctgctatcttcagaaatggttcgttgaaaacgaattcagcttcaacagtctcagaagaaatccacaagggctcttatggaaaca

SEQ ID NO: 19240 - DNA, 87 bp, Glycine max
  Clone ID: LIB3106-079-P1-K1-E12
gtattttatcaaatgaatatcgcaatctctaaaaaaaaaaaaaaaaaaaaaaaaggggggaaaaataaaaaaagggggcgggcggtt

SEQ ID NO: 19241 - DNA, 300 bp, Glycine max
  Clone ID: LIB3106-079-P1-K1-E2
tgtttggagggtctcatggtctttgacaggaaacatactggctgtggctgatgggaacaacaatgtgacattgtggaaggaagcagtagacggggaatggcaacaggtgacaacagtggagccttagaatgtgatttgaaaatggttagaattttcgttttgaaatatagttgatatcttgttctttgcatattatacagttgattaattgtgcttcataatgcactagttccttgacgtttgtgatccattaagtattccgtgcttggaagaatgaagttgattagtttgagttgcttt

SEQ ID NO: 19242 - DNA, 422 bp, Glycine max
  Clone ID: LIB3106-079-P1-K1-E3
gaccacacacatagaaccccaccaacaggaatgaagaagatgattctaaccctcttcttcaatatcattttatctttcctctccctttcccccgccttcgtggtggatttctgcgtagcagactacacaggccccaatggccccgcagggtactcatgcaagagcccagcaaaggtcacggtggacgacttcgtctactccggccttggcaccgccggcaacacctcaaacatcatcaaagccgcggtgacgccggcgttcgacgcgcaattccccggcgtcaacgggcttggaatctccattgcacgcctagacctagcagccggtggagtcatccctcttcacacgcaccctggtgcctcagagctgctggtggttgtgcagggaacaatctgcaccggcttcgttgcttcggacaacac

SEQ ID NO: 19243 - DNA, 260 bp, Glycine max
  Clone ID: LIB3106-079-P1-K1-E5
ccgataagtcatacgcagcacaccgcgcgtgtatcaacgtccacgagctcatgccggggacgaggagcggatcattgagatttcctacacgcgccgtcgcgacccggaggggtgaatgctgttctttttctctcttctatatacttttgttctgtttttatttgctgtttttattttagttcttttctttttttatttttttaatttaattattttttgtttttcttatttttttttgttgttttgaatttatatttttt

SEQ ID NO: 19244 - DNA, 461 bp, Glycine max
  unsure at all n locations
  Clone ID: LIB3106-079-P1-K1-E7
cacacactgtgtttgtgaaactctctctcacacacaagtcacaaaaacaacttgtgttgttccaatggcatcagcaacaccccttttgaaagatgagctcgacatcgtgatccccacgatcaggaatctggatttcttggagatgtggaggccattctttgagccttaccatctcataattgtgcaagatggtgacccttcaaagaccatcaaggtccctgaaggctttgactatgagctctacaaccgcaatgacatcaacaggatccttggccccaaggccaattgcatctccttcaaggactctgcatgccgttgctttggctacatggtctccaaaaagaagtacatctacaccattgatgatgactgctttgttgccactgatccatctggacacaagattaatgcacttaaacagcatatagaaaacctnctctgtccatccacacncttttttt

SEQ ID NO: 19245 - DNA, 478 bp, Glycine max
  unsure at all n locations
  Clone ID: LIB3106-079-P1-K1-F1
cccacgcgttcgatttgtcggcggtgacgaaaggaaagaagaagaagaagcgttctttcggagagttcgaagatgtcgggcgttaccaacaacaacgaggaagacaagaagccaaccgaacagggagcacacatcaaccttaaggttaaggggcaggatgggaatgaagtttttttcaggatcaagagaagcactcaattgaagaagcttatgaatgcttactgtgaccgacagtcggtggatttcaactccattgcttttctgtttgatggacgccgcctccgagctgagcagactccagatgagttggaaatggaggacggngacgagattgatgccatgcttcaccagacaggaggttctgttgtctgaaggatgtgattactttgctcctcattataagtaggaattagttaacttagagctatgtatggcataagatacaatatttaatatctgctattatatacagcttttg

SEQ ID NO: 19246 - DNA, 440 bp, Glycine max
  Clone ID: LIB3106-079-P1-K1-F10
ccaaaccctatcccttattcgcctttgtccaccctcaatggcctctgtttcagccacttctctcaggttccaaccctttctcaagttgtctacaaggactactacccaggggtgttacaaaacttcaagtttgggggcagtttctgtgggatggaataggagaacctttccctctttgagatcctcccgtttacgcatttgtgcagtcaaggcacaaccggagacagtgcagaaggtctgcgatattgtgaggaaacaacttgctctgcctgctgaatctgagcttaccccagacaccaaattttcagcacttggtgctgattcccttgacacggtggaaatagtgatgggtttagaggaagagtttggcataactgttgaggaggatggctctcaaaacatctcaaccgttcaagaagcagctgatttaatagagaaac

SEQ ID NO: 19247 - DNA, 200 bp, Glycine max
  Clone ID: LIB3106-079-P1-K1-F11
gtttaagagtctttgggtatttctgtttgatgttctttttcgttattcttcaatgggtctgttagctggagttttgcttgtaaggaaataagaattaaaacaaagagagcaagcttttgtattttctttgtattccttgctgataagaattggcttaaaaataacctttcctttttatacatcctatcaatggccggtct

SEQ ID NO: 19248 - DNA, 410 bp, Glycine max
  unsure at all n locations
  Clone ID: LIB3106-079-P1-K1-F2
ccaaactcactctatcttctcccttttccttcaaaacttcatttctgccaaaatcaccatcattttctctaggtttatactcccccagaactaatgttaccggtgtcaaagttcatgctaaattaggtggtggagatgaacaagccaagaaaggaggaaagaagaaattcataaccagagaggaagaaccacaacagtattggcagacagcaggagaaagggaaggagagaatcccatgaagacccctcttccttacattatcatatttggtatgtcaactccttttgtaatcttggcaattgcttttgcaaatggttggattaaggtacctgttcgatgagacagcacttcgntgtctactctactcctcgatcttcacatgttaattcacgaattttaagcactttac

SEQ ID NO: 19249 - DNA, 282 bp, Glycine max
  Clone ID: LIB3106-079-P1-K1-F3
taagtaaacaatttaattggattggtcgaatggtatcaaaaaaatggagtactaactcccatttcttatttattattgaattaaccgatcaacttgctttgttatcgaacatttctttttgatttcaaaaattttccggaaaaaatttgaatctatttttatatgcgaatcaatcctactacttctggtcctgaggtttctgcgcttgaaaaaaaaaatctgggacgtattggccaaataattggtccggtactagatgtagcttttcccccaagtaagatg

SEQ ID NO: 19250 - DNA, 345 bp, Glycine max
  unsure at all n locations
  Clone ID: LIB3106-079-P1-K1-F4
acaaaggcttcaagatgtgtcaagagcttggtcttgtggataagattccaaggcttgtttgttgcccaggctgccaatgctgatcctttgtatttgtactttaaatccggctggaaggagtttaagcctgtgaagtcaagcactacctttgcctctgccattcaaattggtgatcctgtttccatcgacagggcggttcacgccctaaagagttgcgatgggatcgtggaggaagccaccgaggaggagttgatggatgctactgcgcaggcagattccactgggatgtttatctgcccacacactggggttgctttgactgctttgtttaagctcangaacagt

SEQ ID NO: 19251 - DNA, 364 bp, Glycine max
  Clone ID: LIB3106-079-P1-K1-D7
caagaatggcacaaattaacaacatggcacaagggatacaaacccttaatcccaattccaatttccataaaccccaagttcctaaatcttcaagttttcttgtttttggatctaaaaaactgaaaaattcagcaaattctatgttggttttgaaaaaagattcaatttttatgcaaaagttttgttcctttaggatttcagcatcagtggctacagcctgcatgcttcacggtgcaagcagccggcccgcaaccgccggcaaatcctctggcctttccggaaccgtccgcattcccggcgacaagtcgatctcccaccggtccttcatgttcggcggtctcgcgagcggtgaaacgcgcatcac

SEQ ID NO: 19252 - DNA, 93 bp, Glycine max
  unsure at all n locations
  Clone ID: LIB3106-079-P1-K1-F5
aaaaaaaaaaaaaaaaaaaataaagtngttttttttaaaaaaaagaaaaataaattaaaggggggggtaatttaggnngggggggtgtataag

SEQ ID NO: 19253 - DNA, 424 bp, Glycine max
  Clone ID: LIB3106-079-P1-K1-C12
gttattatttgcttcacttcatctggaagtgctgcaagattgattgctaagtacagaccaaccatgcctgtgatatctgttgtcattcctcaattgaagacaaatcaactccgatggacgttcaccggtgcttttgaggctaggcaatctcttattgtgagaggtctttttcctatgctggcagatccacgacacccagctgagtccagaagtggaacaaatgaatcaattttgaaggttgctttagaccatggcaaggcttttggcatcataaagccacatgaccgagttgttgtctgccagaaagtagctgactcgtcagttgtgaagattcttgagctcgaagattgaatgattacaacttatgcgttatttgatgcataataataaagattcttgggcttgtgtttgataatcggagcga

SEQ ID NO: 19254 - DNA, 461 bp, Glycine max
  Clone ID: LIB3106-079-P1-K1-C2
ccggaatccggtcgaccacgcgtccgcccacccgtccgccaacccgtccgcccacgcgttcgcccacgcgtccgcccacgcgtgcgctcattaattgcaagaatggcacttcgttgcttggtgatgtccctttctgttctcttcactcttggtcttgcgagagaaagccatgccagagacgaagatttttggcatgctgtttggccaaacactcccattccaagttcattgcgagatcttctaaagcctggccctgcaagtgttgaaatcgatgatcaccctatgcaaattgaagaaacacagtacccgaaaaccttcttctataaagaagaccttcatccaggcaaaacaatgaaagtacaattcagcaagcctccctttcaacaaccatggggtgttggtacatggttaaaggaaattaaagacactactaaagaaggatatagttttgaagagctatg

SEQ ID NO: 19255 - DNA, 380 bp, Glycine max
  unsure at all n locations
  Clone ID: LIB3106-079-P1-K1-C3
agggatctctggggccactttccatctgatgttgcnaatggagctcagtaatgtccttaacaatctgaatggtacanaagaatccatcaaaggtgcanaactttggttcatgcagagatctccatttgcaccagccctagcagaggctcttagagatagagtctttgcattggatgaagttgagagacagttacacataatatacctcgccaatgacatactttttgacagcttaaatcgaaggacaagcaatagtgaccttgacaatgaagctcttgcctttaaacctgttttaggctccatgcttgcaagaatttatcataatccacaaagcaatgagggatacaggaaaagaatgcaacaaatggtggaattctggt

SEQ ID NO: 19256 - DNA, 79 bp, Glycine max
  unsure at all n locations
  Clone ID: LIB3106-079-P1-K1-C4
aaaaaaaaaaaaaaaatttttatatnnttttttttaaanaaaaaaaaaaaaaaaaaaaggggggggccggccgtttaaa

SEQ ID NO: 19257 - DNA, 257 bp, Glycine max
  unsure at all n locations
  Clone ID: LIB3106-079-P1-K1-C5
attaaagcattgattctggttggggggtttggaacaaggctgaggccactgacactcagttttcctaagcctcttgttgattttgctaacaaacctatgattctgcatcagatagaggccctnnnngnncntgngagtactgaggtggtgcttgtcatcaactaccaaccagaggttatgttgaatttcttgaaagattttgaaacaaagctcggcatcaagatcacatgttctcaggaaactgaaccattgggaac

SEQ ID NO: 19258 - DNA, 396 bp, Glycine max
  Clone ID: LIB3106-079-P1-K1-C6
tttaaccttaacctttaagaggtcttacgcttatctcttcaaatacatcatcatcggggacaccggagttggaaagtcttgtcttctacttcaattcacggacaagcgctttcagcccgtccatgacttaaccatcggtgttgaatttggtgccaggatgatcacaattgataacaagccaatcaagttgcaaatatgggatacggctggtcaagaatcattcagatctattacaaggtcttattacagaggggctgcaggtgcattgcttgtttatgatataaccaggagggagacatttaatcatttggctagctggttggaagatgcaagacagcatgcaaatgcaaatatgactattatgctgattggcaacaagtgtgatcttgctcataa

SEQ ID NO: 19259 - DNA, 169 bp, Glycine max
  Clone ID: LIB3106-079-P1-K1-C7
tcctgatgcatatgaaagtttctgaaacataacccataacccatcctcctgaacctcaaaagtcatatatgtactttcacgtagtgagagacatgagtgagactaaataaatgcttcatgctgtattcaattattgcaagtctaaataaaataatcgaagtttatgtct

SEQ ID NO: 19260 - DNA, 459 bp, Glycine max
  Clone ID: LIB3106-079-P1-K1-C9
gtgagctataagctagtttatcgtgaggagaatatgaagttgtttgttttctttgttgctgcagtagttttggtagcatggccatgccatggcgcaggctaccaaaggttccctctccgaatgaaaactggctatggtgagcgttcttcggaggtaaaatgcgcaagttttaggcttgctgtggaagcacacaacatccgagcctttaaaaccattcctgaagagtgcgttgaaccaacaaaggactacattaatggcgaacaatttagatcagactctaaaacagttaaccaacaagctttcttttatgctagtgaacgcgaagtccatcacaacgacatatttatattcggcatagataacaccgtactctctaatatcccatactatgaaaaacatggatatggggtggaggaatttaatgaaaccttatatgatgaatgggttaacaagggcgac

SEQ ID NO: 19261 - DNA, 466 bp, Glycine max
  Clone ID: LIB3106-079-P1-K1-D1
gtcttcgcaccttagaggacctgccaaaaggtgcatttgtgtgcgagtttgttggagaaattttatccatgaaagagttgcatgagaggaacttgaaatgcactgaaaatgggaaatatacatgcccagttttactggatgctaattgggattcaggatatgtgaaggacgaagaagctctatgcttagatgcagcttcctttggcaacactgccaggtttatcaatcacagatgttctgatgcaaacttgattgaaatcccagtcgaagttgaggatcctggtcattattactatcattttgcctttttcacttccagaaaaatatcagcacaggaagagctaacatgggactatggcattgactttgatgaccacgatcatcctgtcaagctgttccagtgcagatgtggcagtaaattctgcaggaacatgaagagatatagcagatctcttagatatgcgtc

SEQ ID NO: 19262 - DNA, 390 bp, Glycine max
  unsure at all n locations
  Clone ID: LIB3106-079-P1-K1-D10
gttaaaacgaaagttagaaatggtaatccttttcccagatgcatgtattgacctgggtgattctggttgctcatagattatgattattattttcttatatttggatggtggattctcttatgaggattgctatatacataaattatatactttcatttatgactctgttggctctcctgttagccttggtagcttcctcttgtccccttggggccaacttcaattttttgcaatattctagaaaataaacttataatactttctttgtttaaccattgacattaattgattccttatactcaaaggttgaggctcttgctgaaattgacgttgccacaaagctcttgaaagatgacgcanaaatgcagggagatcctctgaatactcatt

SEQ ID NO: 19263 - DNA, 418 bp, Glycine max
  Clone ID: LIB3106-079-P1-K1-D11
cccacgcgtccgcctcgctctatttctcagtctctgtgtttgcggctgaggattccgaacgagtgaccttcttcgtttctcgcaaagtttaagtaatcatgggtaaggaaaaggttcacatcaacattgtcgtcattggacatgtcgactctgggaagtcaactaccactggtcacttgatctacaagcttggaggtattgacaagcgtgtgattgagaggttcgagaaggaggctgccgagatgaacaagaggtcattcaagtatgcctgggtgctcgacaagctcaaagctgagcgtgaaagaggaattaccattgatattgctttgtggaagtttgaaaccaccaagtactactgcacggtcattgatgctcctggacatcgtgactttatcaaagacatgattactggtaccct

SEQ ID NO: 19264 - DNA, 418 bp, Glycine max
  Clone ID: LIB3106-079-P1-K1-D12
gcgacaggagcaataacaatggctgcctcactactttctgcagctaccttcatgcaacccaccggggggggcatggccactcgcaacctcaaatctacacaatgcatttgtaaggcttttggcttggaacccgctgcagctaaactcatttgctcccttaagcccgatctcaaagattttgctcaaaaatgtgtcgacgccaccaaaattgcaggattcgcccttgccacctcagctctcgttgattctggagcgagtgcagaacgtgttacaaagaggctaacctttgacgaaatccagagcaagacatacttggaagtgaaaggaactggaactgctaatcagtgcccaaccattgaaggtggagtggactcatttgccttcaaggcagggaaatacaacgcccaaaagttgtgcc

SEQ ID NO: 19265 - DNA, 476 bp, Glycine max
  Clone ID: LIB3106-079-P1-K1-D2
cccacgcgtccggaaagggcttcctcaatgatctcctccccagctgttaccaccgtcaaccgtgccggtgccggcatggttgctccattcaccggcctcaaatccatggctggcttccccacgaggaagaccaacaatgacattacctccattgctagcaacggtggaagagtacaatgcatgcaggtgtggccaccaattggcaagaagaagttcgagactctttcctacttgccagacctcgatgatgcccaattggcaaaggaagtcgaataccttctaaggaaaggatggattccttgcttggaattcgagttggagcacggtttcgtgtaccgtgagcacaacaggtcacctggatactatgatggacgctactggaccatgtggaagctgcctatgtttggctgcactgatgcttctcaggtgttgaaggagcttcaagaggctaagactgcataccccaatggcttcat

SEQ ID NO: 19266 - DNA, 457 bp, Glycine max
  unsure at all n locations
  Clone ID: LIB3106-079-P1-K1-D3
gtccgcccacccgtccgttccttctttccatctttttcccttttaacgtcattatcctaaactggcagattttcacatccaaagcaacatgaaggggaggttcatgtttctgtcggtgctcctttgtgccacctttcatgtctccttctccattactgacggcttagtagcaaacggcaacttcgagctgggtccgaagccctccgccctgaaaggaactgtggtgattggtggcagccactcgatcccagaatgggagatctctggcttcgtggagtacataaagtccggccagaagcagggcgacatgctgctcgtggtccccgagggggcctacgcggtgcgcctcgggaacgaggcctncatcaagcagaggatcaaggtgatcaagggcacgtactactccatcaccttcatggtggcccgcacctgcgcgcaggaggagaggctcaacata

SEQ ID NO: 19267 - DNA, 362 bp, Glycine max
  Clone ID: LIB3106-079-P1-K1-D4
aaacatgtcagcggtgcgtgctggttcctcctcttcattctctgccaccttcacccccataaggagcccctccttaaaaaactctcaactctctcattccaaggcactcacttcacctcaatgccagaaaacatctttacaagggctctcacttcatgaagccaaaaggggtgtttcagaatccttcctagttgagaacaacaatggttcctccattgctggaaggagacttgagatcacagcacgaactgctggggcttcaaagacaattgaggtggaggttgacaagccacttggcctcaccttaggccaaaagtctggtggtggtgttgtcatcactgctgttgatggtggtgggaatg

SEQ ID NO: 19268 - DNA, 152 bp, Glycine max
  Clone ID: LIB3106-079-P1-K1-D5
tgaccttcttcgtgtgtggcaaagtttaagtaatcatgggttaagaaaaggttcacattaacattgtcgtcattggacatgtcgactcttggaagtcaactaccactggtcacttgatctacaagcttggaggtatttacaagcgtgtgatt

SEQ ID NO: 19269 - DNA, 448 bp, Glycine max
  unsure at all n locations
  Clone ID: LIB3106-079-P1-K1-A3
tccccttcaattttcgttttttccttaatcgaatctccaatggtggtcgtcggggattaattctccctaatcaaaaccctaaacgcgtcttaaattgaactcaatcagagacaaaacanagctgttgattctgttgctaaacatagcacggtggacaaacgttaaaaaaggctacagatctttgattcagttgaaagcagattgaaggggagtaaaacaggaacagagcaacctgcagaattactcaatcgaggtgtcataaacttgatgtatttgtgtctccaatctctttgaactgtgagagaacagccatggacagacgcacgaacacctncaggccagtggcattgtcttccccttctatcactgccaccaccaccaccaccataacaatnttgaactctgagccatcatcctcttcatcccagcaggaacaacagcaaccaga

SEQ ID NO: 19270 - DNA, 410 bp, Glycine max
  Clone ID: LIB3106-079-P1-K1-A4
tctcattccctattccggtgtcttaaggcttaaggatattttcttttctactcaaaacaaaacatgtctcacaccccacccagctaatctcccccttcaacacaacaacataatggttgcaactgccgccacatttttcaatccactatttcttcacacgcatggtagggttaacatatgggcactaagcaggattagctacttaagtggaaatgtgaagtctaggttccctatttatagatcagaaattcatcatcaggttcattacttttcacaccttgcacctatatgtgcaacctttaaggaacccaaggggtttggtcctaccccaaagaaaaaagaagaagagccaggaagatgagaagggattatgaagaagaagatgatgaagaagaagaggagggagaaga

SEQ ID NO: 19271 - DNA, 326 bp, Glycine max
  Clone ID: LIB3106-079-P1-K1-A6
gccagctgtaccactgtcaaccgtgccggtgccggcatggttgctccattcactggcctcaagtccatggctggcttccccaccagaaagaccaacaatgacattacctccattgctagcaacggtggaagagtgcaatgcatgcaggtgtggccaccagttggcaagaagaagtttgagactctttcctacctgccagaccttgatgatgcacaattggcaaaggaagtagaataccttcttaggaagggatggattccttgcttggaattcgagttggagcacggtttcgtgtaccgtgagcacaacaggtcaccaagatacta

SEQ ID NO: 19272 - DNA, 313 bp, Glycine max
  Clone ID: LIB3106-079-P1-K1-A7
ccctgtctttacgctgctgctaacagtgaatctttaactcactatcataatttagggcggcttgactctattatcagtgacctgatatttggatctgactaatactcatccactggaaccgaaattgagttaacactttctattacccatctaaagaaagtcgcggacactctctacatcgttcaaaccaagtcttacggaggaagtgaatcaggagatcgtgactgctacaccactgtgattacgtgtgataccatcgccggagactcgtgaaaaggaagcgatgcgtaactattaaaggcctactgatgct

SEQ ID NO: 19273 - DNA, 444 bp, Glycine max
  Clone ID: LIB3106-079-P1-K1-A9
caaaaatggcatcattcaccatgacagcttccatccttggctgcccagccgtcaccaaccggtcggcagcggcgacgcagaggagatcagtggtagtgaatgcagccagcaaatctgttgaaggggaaaaggtcagttatgacaacaatggtagcaatgcaaggaggaacttgatgttcgccacggcggcggctgctgtttgctcttttgctgcagggatggcattggcagatgagcctaaaccaggaacctcagaagccaagaaaaagtatgccccggtttgtgtcaccaatcctacagctaggatttgtcgcaattgaggaacttttttgtttcacttttggaatttggaaatgtacaatgaatttgttgtaaggctttgatgatttcatttcatcctcactgtactagatgttcataaaagtatcgactttgcttcgtcgt

SEQ ID NO: 19274 - DNA, 330 bp, Glycine max
  Clone ID: LIB3106-079-P1-K1-B1
cccacgcgtccgcccacgcgtccgcccacgcgttcgtacatatgcaagtggggtgattggatgatgctttgctctacggagggtccaccagtgaacttcaaacatccaataaataaattgaatccagagaaaaatggggtggcaaagggacctactaagttttataacccagagatccatgctgctgcattctgtctgccttcttttgtggacaaggttgattgatccaacagacattcataaatgactcggtagcattaaggaattgctgttagttaccctttgtttttgctgtgtcgttctgcatatttatgatattatccttttatt

SEQ ID NO: 19275 - DNA, 443 bp, Glycine max
  Clone ID: LIB3106-079-P1-K1-B10
ggagaggataaggctttgcatttcatttgagagagagagcgtcttacctttccattatcaaaatggctgtttcggctatcacaggagcgaggctaaccctagggatagggttggcgatacctctttcctctcccacgcgctctcgaaccgtcgcaatggccgtatccgtcgaccccaagaccgacaacaaactcactcttaccaagtccgaggaagctttcgctgctgccaaggagctgatgcctggaggtgtcaactccccagttcgtgccttcaaatccgtgggtggtcaaccaattgtgattgattcagtcaaagggtctcgtatgtgggacatcgacggcaatgagtacattgactacgtcggttcttggggtcccgcaatcattggtcacgctgatgatcaagtgctttcagctctggttgaaccatgaagaaaggac

SEQ ID NO: 19276 - DNA, 453 bp, Glycine max
  Clone ID: LIB3106-079-P1-K1-B12
agagagagagagaggaaggactcagattgcagaaacgcagcagcatcgtgttggagagtgagacggaatgcattagtgaagaccgaggtttctcagaatctcaataacccccttcgttgaaaccaaaacgacgacgcgtcacttcactttgatgtgtctcgtcgtttctactttctgttgattagcctcattcactctctcgctcgcttgcaaccacacccttggatttaatttcattcatggcttcgaccaccacctcctccctctgcacgtggctcgttgctgcttgcatgtcagtcacgtgccacgccgaccgcaccaaaacccctcacgcaatgttccgctccttcaaaaagtctcgctactctcaattcaacgtttgtcgatccactcattctggtaaaacaatggctgtagctttgcaacctacccaagagatcacgacaataaaaa

SEQ ID NO: 19277 - DNA, 481 bp, Glycine max
  Clone ID: LIB3106-079-P1-K1-B2
ctgcaaccgtgacaaaagttgcgtagcaatagcatcctcttactctgattcgttagtgaagaaaaatggcaacaatcatcgccggcaccccaactacatcaatcactcgcacaggtcatgtgctcaaacgacctgttggggcctcatcctctaccgttcttggattgccagcaatggccaaggcggggagagtgaggtgctccatggaggaaaagccttcaagcagctcaaacctagggatgggggcatccttgttagcagctgcagctgccgcaaccatgtcaagcccagcagccatggctttggttgatgagagactcagcactgaaggaactgggcttccctttgggcttagcaacaaccttcttggttggatcctgtttggtgtctttggtctcatatgggctctcttctttgtctacacttccacccttgaagaggatgaagagtctggattgtccctctaaacccccatgtgatg

SEQ ID NO: 19278 - DNA, 147 bp, Glycine max
  unsure at all n locations
  Clone ID: LIB3106-079-P1-K1-B3
gtaagtactgtttgtgaatgtctttggtttaagaactccgtcttatgtaaacttgtattctgttatacagttctcagcaataaactgctctggcaatctagtttcatgtnnaanaaannnnnnnnnnnnnnnnnnnnnnnnnnnnnn

SEQ ID NO: 19279 - DNA, 310 bp, Glycine max
  Clone ID: LIB3106-079-P1-K1-B4
tggcttcccttgcagcatccactgctgctgcttcccttggcatgtcagaaatgcttggaaaccccatcaacttcaagggtgccacaaggccagctccatctgcttctagtcctgcctccttcaagactgtggctcttttctccaaaaagaaggctacaccaacacctccaaaaaaagctgctgctgctgctcctgccaatgatgagcttgccaagtggtatggtcctgacagaaggatcttcttgcctgagggtctcttggaccgatccgaaatcccagagtacttgaccggagaagtccctggagacta

SEQ ID NO: 19280 - DNA, 404 bp, Glycine max
  Clone ID: LIB3106-079-P1-K1-B5
ccacaaccgaggcagtctttaatttaatatagtataattcattctgtcatatatatctgcgtgtgtaacaatggcagtctttatttgcaaggaagaatatggtgttcccttgagcaatggctgggctgcaacacatgaatttggccacaagttttgcatctcaaatgaaggtgatgatgacgatgatgataatggcgtcatcgatgtggccccagctgcatagaagaatttggcagaaaaacatgcatagatgaggaggagggatatagtagctagcttagtagtcactgtaagcttcattctgtcgtcttgcttagttacatttgtgtttactcttggaatatataggttatagtgttatgcttgtgtgacataatagaatttatattagtaattatggcttt

SEQ ID NO: 19281 - DNA, 250 bp, Glycine max
  Clone ID: LIB3106-079-P1-K1-B6
ttcccttgaccaatggctgagctacaacacatcaatttgctcacattttatgcatctcaaatgaagttcattatgacgattatcctaattgcgtcatctatttggccccagctgcatagaagaatttgtcataaaaacatgcatatatcacgaggatgtatctattagctagcttattagtcactgtaaagcttcattcctgtcgccttagcttaccttaccatttatgcttacatctctgtatatttat

SEQ ID NO: 19282 - DNA, 465 bp, Glycine max
  Clone ID: LIB3106-079-P1-K1-B7
ctagcttccaaaccctaacacttctcttcctcttcgatcatcacctctccacaatgccgccgaagttcgacccctcccagatagtcgacgtcttcgtccgcgttaccggcggcgaagtcggcgcggcgagttccctggccccgaagatcggtcccctcggtctctcccccaagaagatcggagaagacatcgccaaagaaaccgccaaggactggaagggcctccgcgtcaccgtcaagctcaccgttcagaatcgtcaggcgaaggtcacggtggtcccctccgccgccgccctcgttatcaaggccctcaaggagcccgagcgcgaccgcaagaagaccaagaacatcaagcacaacggcaacatctcgctcgatgacgtcatcgagatcgctagggttatgaggccgaggtccatggccaaggacctcagcggctccattaaggagattctcggaacatgcg

SEQ ID NO: 19283 - DNA, 475 bp, Glycine max
  unsure at all n locations
  Clone ID: LIB3106-079-P1-K1-B8
cccacgcgtccgatataactaatattctttagaataatcaaaaagaatattaaattcaaataaattttagatagaaaaaagacttaaaaaggaggatttgaaatgcgagatctaaaaacatatctttccgtggcaccagtagtaagtactctatggttcggggctttggcgggtctcttgatagagatcaatcgtttttttccagatgcattgatattcccttttttttcattctagttattgacacggaaaggggtgaagaagattatagatccaattaagtattaaatatatgtaattaatatgtaattaatctcctcttctttatttcgncttttatttcttcttttttttacaattgtaatagaataagttaggaaagagaaagaataagggttaatttggcctaattgaaattcggagtgaaactcgggatctcgtccaggcttncatggaaatgaataataattcaatt

SEQ ID NO: 19284 - DNA, 149 bp, Glycine max
  Clone ID: LIB3106-079-P1-K1-B9
cttttagtagcagtatttgataattttaatttcatattaatagctctgtgcccaaatggggagaaattttaaactgaattgcttgtaaactttgaaacagcgataagttttccggttagattgattaatgttattaatgttatatattg

SEQ ID NO: 19285 - DNA, 336 bp, Glycine max
  Clone ID: LIB3106-079-P1-K1-A2
tatgccatatctggtgcagcatcctccgagctcaatgggaaggtcacttccgtggcctctgttgcatcctctggctacaagttgccattgatcaatgtgaggccagagttcccaaagccaaagaatctgaaggaaggagaggtgcccttgttctcttggcagctacccttttcatctctgcagcctccaattcttctgccaatgctgggatcattgatgattaccttgagaggagcaaggctaacaaggaattgaatgacaagaagaggttagctactactggagcaaactttgcaagagcatacaccgtggaattcggtagttgcaaagtccctg

SEQ ID NO: 19286 - DNA, 453 bp, Glycine max
  Clone ID: LIB3106-078-P1-K1-G6
ggaaaagctccatgcttctgtgctcgcccttgtattccttcttgtcatactattgcaggaaggattggtaacatgtatgaagaatgaagacggatcagaagaatggggatatgtgcaagttagaccaaaagcccacttgttctggtggctttacagaagtccatacagagtggagaatccctccaagccttggccaatcattctctggcttcagggaggaccaggctcttcaggagttgggtttggaaattttggagaggttggtcctttggatgctaatttgaagccacgaaatttcacatggttgagaaaagcagatctcttgtttgtggacaacccagttggaaccgggtacagttacgtggaggattccaatctctatgccaaaacagacgaagaggcaaccacagacttgacaacattgttagttgaattattcaacaatgatgcaag

SEQ ID NO: 19287 - DNA, 377 bp, Glycine max
  Clone ID: LIB3106-078-P1-K1-G7
tgttggtgcagattgattttgatacttccatggtgggattcagtccttcgcttcggacgaagcatgctacttgctctcatttcaaaccctagttttctggtgaatcgtgatgattatagtttattattatccataccacatagtttttctttagattaagaagagttttgaggagtttaacacgttctgtaataacccttttattttttttttctttcttttttgctctcctgcggtattatctgtataaactgcttaagtggcctatgttaaatggcgatggcatttttgatggcatttttatttgaaattgaaatacttcttcagtaaggaaaatttggttgagttaaaaaaaaaaataataaatttattataat

SEQ ID NO: 19288 - DNA, 416 bp, Glycine max
  Clone ID: LIB3106-078-P1-K1-G8
tgttgatcgagataactagaaacagtgtgatgaaaatgaaggtccttgttttctgcgttgctacaattttggtagcatggcaatgccatgcgtacgatatgttccctctccgaatgaacactggctatggtgcccgtactccggaggtgaaatgcgcaagttggaggcttgctgtggaagcacacaacatctttggctttgagaccattcctgaagagtgcgttgaagcaacaaaggaatacatccatggcgaacaatatagatcagactccaaaacagttaaccaacaagcttacttttatgccagagacctcgaagtccatcccaaggacacatttgtgttcaagatagatggcaccgtactctctaatattccatactacaaaaaacatggatatggggtggaagaatttaac

SEQ ID NO: 19289 - DNA, 392 bp, Glycine max
  Clone ID: LIB3106-078-P1-K1-H1
agttggtgcagattgattttgatacttccatggtgggattcagtccttcgcttcggacggagcatgctacttgctctcatttcaaaccctagttttctggtgaatcgtgatgattatagtttattattatccataccacatagttgttctttagattaagaagagttttgaggagtttaacacgttctgtaataacccttttattttttttttctttcttttttgctctcctgcggcattatctgtataaactgcttaagtggcctatgttaaatggcgatggcatttttgatggcatttttatttgaaattgaaatacttctccagtaaggaaaaattggttgagtttaaaacctattttttttccttctttttgaaatttatataagggc

SEQ ID NO: 19290 - DNA, 439 bp, Glycine max
  unsure at all n locations
  Clone ID: LIB3106-078-P1-K1-H10
aaaacatattattttcattttcatctttttttgagtatcaacaaatggcaaccactgtgaggacgcactctcccccaattcagtggtcttagaccccaattctcagctgcccctgtgaagaacttggttgctgtgcaacccatgagtcgcaaggggaagggtgcattgggagctcgatgtgactacattggttcatccactaatctgattatggtggcttctacaaccctgatgctgtttgctggaaggtttggattggctccatcagcaaacaggaaagccactgcagggctaaagctggaggtgagggactcaggcttgcagactggtgaccctgctggcttcacccttgctgacaccttggcctgtggatctgttggccacatcattggggttggngttgttcttggtctcaagaacattggtgccctgtaaaaag

SEQ ID NO: 19291 - DNA, 210 bp, Glycine max
  Clone ID: LIB3106-078-P1-K1-H11
caacccacttttgggacgtgaatctgcctagcactgatgagaattcacaaatactcatcatacattttcaacaacttgaatactgatccacccaccaatctaaattcttatgcatcaactatctactctatattactacaccactcatacactaatcttattattaaaacttatacagcttaatagctacaatcattaataaataaagat

SEQ ID NO: 19292 - DNA, 359 bp, Glycine max
  Clone ID: LIB3106-078-P1-K1-H12
gaattccgggctaggcgtacgcgaggctatgaaggctaatttcaatgacatatatgacgagtacagaaagaaatggggtggtggaagcatgggatccaaatctcaagcgaaaaccagagcaaaggagaagcttcttgccaaggaagctgctcagaggatgaattaggaggagtttcttatatcttgttgctttgcgaatgctattaagtttgttttttaatgtactcttttaattattgtcttcataaaaacatttgttattcacatgagctagagtatttcgctaaaatctcctgccgactgttccaattcctgaacccttggattactttaattttggtagtggacttttttcgggt

SEQ ID NO: 19293 - DNA, 371 bp, Glycine max
  Clone ID: LIB3106-078-P1-K1-H2
cgagatcactcgaaacatcctttttaaaatgaaggtacttcttaacggccaggttacaaacatggtaggatggcaatgccatgcgtacgatatgttccctctcctaatgaacactgtctattgtgcccgcactcctgaggtgaaatgcgcaagttgtaggcttgctgtggaatcacacaacatctttggtctctataccattcctgaagagtgcgttgtagcaacaaatgtatacatccatttcgaacaatatatatcatactccataacagttaaccaacaagcttactcttatgccagatacctctaatttcattctaatgacacatatttgttcatttaatattcactcttctctttaatattttatt

SEQ ID NO: 19294 - DNA, 472 bp, Glycine max
  Clone ID: LIB3106-078-P1-K1-H3
cagagcgacgcgtcggctcactcctgctgacacacgtacttgaatttcagcccacatagactgacactttggaggcgagttcagcttcctcggtttgactctcgtagacatcacaaaccttccctgcattcatcccacgcatggctgccatgaactctagcgaattggcctgcaactatgccatatcaggtgcaacgtgttcggagctcaatgggaaggtcacttgcgtggcctatgttgcatgctctggctacaagttgccattgatcaaagctgacgccagagttcctaaagccaaagaatctgaaggaggaaggagaggtgcccttgatctcttggcagctacccttttcacctctgcagcttccaattcttctgccaatgctgggatcattgaagattaccttgagaggagcaaggccaacaaggaattgaatgacaagaagaggttagctactactggaacaaactt

SEQ ID NO: 19295 - DNA, 420 bp, Glycine max
  Clone ID: LIB3106-078-P1-K1-H5
cccacgcgtccgaaaagacagaacagaagaggttctgaaagactgaaactttcatggaggtcgtctatccaatccaatctgttatagttccactttctcccacactacacattaacacatggggctcgactcaaatgataaatgttgcattttacaattgcaagagaccctgagctgaacaacacatgtctgtccctgtctctgtttctgtctctggttcagggttacttagttttccttcaattcagcgaccacattccaaccctccacccaaacacgccgtacttccttccacttcccgtgaacccgacactgatactaaatacttgtgtctatgagcccatttcaaatcatagctagccaagagctaccttaccaaactttccctttccgaggcttaagtcaccgactcaacggaca

SEQ ID NO: 19296 - DNA, 328 bp, Glycine max
  Clone ID: LIB3106-078-P1-K1-H6
ggcccacgcgtccgaaaagacagaacattacgtgtttctgaaagactgaaactttcaggcagggctactatccaagccggtctggtataccttcactttctcccacactacacattaacacatgcaactcgactcacatgatcaatgtagcattttacaactgcaagataccctgatctgtacaacacatgtatatccctgtctctgactctgtctcttgatcacggttacttagttatacttcaattcatcgaccacataccatccttacacccaaacacaccgaactatcattcactttcctttaaccccatactcatactaaatt

SEQ ID NO: 19297 - DNA, 395 bp, Glycine max
  Clone ID: LIB3106-078-P1-K1-H7
cccacgcgtccgcccacgcgtccgtgaattacaacccacaaaacttgggtcttgcggattaagttcattttcctccctttcactctcgtagacatcacaaaccttccctccattcatcccacgcatggctgccatgaactctagcgtattggcctgtagctatgccatatcaggtgcagcgtgttcggagctcaatgggaaggtcacttccgtggcctatgttgcatgctctggctacaagttgccattgatcaaagctgaggccagagttcctaaagccaaagaatctgaaggaggaaggagaggtgcccttgttctcttggcagctacccttttcacctctgcagcttccaattcttctgccaatgctgggatcattggagattaccttgaga

SEQ ID NO: 19298 - DNA, 206 bp, Glycine max
  Clone ID: LIB3106-078-P1-K1-H8
caatttacaagttataatgtcattagagcattctgtttcagatgtaactgaactggttattacaaatcaaagtgccgtttttattcattgccgtcgatcgcaccattttttaaaccctcctaatttgagtactcgttgggagcaagcaacatacaatgtatgaatttcttgattatggtaaaacatcagagttattttttgctgtc

SEQ ID NO: 19299 - DNA, 334 bp, Glycine max
  unsure at all n locations
  Clone ID: LIB3106-078-P1-K1-H9
ctcatttctctctctttctctgtttccacatgccatggttcgttcttccttgctctactggtactctcaacgccgtcttgcaggctctntcaggggcttcttcttcattcccacaaccttagctctcttcacctctttcttcattctcttctacatttactccactttaaacatcttcacccatcacaaccaccacccttccacttcacatttcaaaccacaccctcccttttccactaccccttttattgctaccactcctcacttcgtccctgtcttcaaccacaatgcttccgagtccacaaaatcttctncgactttccaattggggtat

SEQ ID NO: 19300 - DNA, 405 bp, Glycine max
  unsure at all n locations
  Clone ID: LIB3106-079-P1-K1-A1
cccacgcgtncgatcgagataactagaaacagtgtgatgaaaatgaaggtccttgttttcttcgttgctacaattttggtagcatggcaatgccatgcgtacgatatgttccctctccgaatgaacactggctatggtgcccgtactccggaggtgaaatgcgcaagttggaggcttgctgtggaagcacacaacatctttggctttgagaccattcctgaagagtgcgttgaagcaacaaaggaatacatccatggcgaacaatatagatcagactccaaaacagttaaccaacaagcttacttttatgccagagacctcgaagtccatcccaaggacacatttgtgttcagtatagatggcaccgtactctctaatattccatactacaaaaaacatggatat

SEQ ID NO: 19301 - DNA, 234 bp, Glycine max
  Clone ID: LIB3106-079-P1-K1-A10
gacccacaacgaccgctttaccttatcctacataaacacctttctatacctcacctaacactcatctatcaccgccatttttacacattaggagcgcctaacctacaactaccttcaatacattctcccccaacaaagccttcatttctacctcttcactccctcgaaccttcttatccattcccttattggcttaacaaccttcatcaaaacaatactcctttattccaacca

SEQ ID NO: 19302 - DNA, 307 bp, Glycine max
  Clone ID: LIB3106-079-P1-K1-A11
cacctttgttcactcttcttctcttgcggctagggttttagcgcagcttcttctagatggaaggaagatgggtaaggaaaaggttcacatcagtattgtggtcattggccatgtcgactctgggaaatccactaccactggtcacctgatttacaagcttggaggcattgacaagcgtgttattgagaggtttgagaaggaagctgctgagatgaacaagaggtctttcaagtatgcctgggtgctggacaaacttaaggctgagcgtgaaagaggaatcaccattgatattgctttgtggaagttt

SEQ ID NO: 19303 - DNA, 294 bp, Glycine max
  Clone ID: LIB3106-078-P1-K1-G5
ctgatcaatgagaagcctcaagtgatccatgagtacgagtcagggaaggccattcgcaaagcagcagataattgggaagttggaaagggctcttggagcaaaattgcgtggcaagaaataaattaaactaatgctatggttttgcatgtagcttggtttacatatcactaactcactatgggagtgttatgtgtttgctcgctaattgtgtaatatgtaagacaattaaatggttgtgaggacctgtggctttcacctgtcacctgttcgactaaataaagttgcaattagtat

SEQ ID NO: 19304 - DNA, 218 bp, Glycine max
  unsure at all n locations
  Clone ID: LIB3106-079-P1-K1-A12
gcaacatngnngcttccatnncatcactgtcactttgctttccagcaacctcggtagagtctttttgcagccaccagcggcaaagcggtgcctggtgtgaagccaaagaagagaaacggtccttcttcgattgcgatcccttggaagggttgcaagaagggaagaccccagctgctagagactcgatcccaatcctcaaagaagggtggagggagaag

SEQ ID NO: 19305 - DNA, 421 bp, Glycine max
  Clone ID: LIB3106-078-P1-K1-E6
caacccctctttcttcttcttcttctctctccctctttgcaagaaggaagattcagatgtgagatcactgttttccttcttctccttctttctttctgcaactctattgttattcattcaatcaacacaatatggctgccactaataacattcatgggaacactgaatctgctcaatccaacattgctcctcccactaagcagcctctacatccttctaagactgttgattctcaatctgtactcaaaaggctgcaatctgaattgatggctttgatgatgagtggagattctgggatatctgcgtttcctgaggaggacaacatattcttttggaagggaacaataacatgaagcatagatactgtgtttgaaggcacagagtataagctatcactctcctttcccaatgactacccttt

SEQ ID NO: 19306 - DNA, 413 bp, Glycine max
  Clone ID: LIB3106-078-P1-K1-E7
aatcaaagccatggccacctccaacttctttattgttctctccgtctccctagccgtcggtttggtgctacttaccaaggcacactcgaccgataccgtttctttcaccttccacaagttcaacccagtccaaccaaacattatgctccaaaaagatgctagtatttcatcctctggggtgttacaactcaccaaagttggcagcaacggcgtgcccacctcgggatctctcggtcgtgccctttacgctgccccaatccagatttgggacagcgaaaccggcaaggtagccagctgggctacatcctttaaattcaacattttcgcacccaacaaatcaaactcagctgacgggcttgccttcttcttggcacccgttgggtcttaaccccaattcgaccattgatttcttg

SEQ ID NO: 19307 - DNA, 409 bp, Glycine max
  Clone ID: LIB3106-078-P1-K1-E8
cccacgcgtccgaatttgtcatctttcagttctccaatttgtttctcttcaacatgagcgtcaaatcccccctgcaattgctcatcatccttctggttttttcatttgttctctcttctgctgctctccaaacaacaagtaagaatgaaattaaataaattacttttcctatgattaacatggaactatttcatctcaattttttatattcaaaattaattttcatgctatatgttgaaatttcatggtctgcaggaaggctttttccaaacaaagaaaaaacccctacccaaattacatcatataatgttatatataatttatacccccacacttacataatttaatcttatatatatatagtcctttgcaatatatttcataattcaagagttcctctatcttcatt

SEQ ID NO: 19308 - DNA, 370 bp, Glycine max
  Clone ID: LIB3106-078-P1-K1-F11
gagttccggggtagacgtacgcgtacgcgtacgcgtcacgctgagaggaagtgtagagggtgattctctgactgctaccttgtggcggaaaagtggttacgttcaggtgtgaccagtactacacggtagggagggctcttgcgacgggatctgatcagctccgcaagatctaccgaatgaggctctgtgccactatcaaggattgtgacacgatcacgttctggtatgatgtgaggaaactggactatgtgtagtagagcagtggccaattgcttgacatcaactgagaatggagtgaagatcccaactaactatgaagagctctggtatctggttgcggcatcagagtacgactagatactagaacatg

SEQ ID NO: 19309 - DNA, 309 bp, Glycine max
  Clone ID: LIB3106-078-P1-K1-F3
cctagtcctccgtatgggtcgccaagcgggttgttaagagccatggtgcacgtcactttgtacggaaactattaccgaacgtataggaagccttttaatacgtaccagaaggagtgcttgaacgcccagttgaacctcgtctgtaagttcggccttcagtgcaggatggagttatggagggaccagtgcacgctgaaccgcatccttaacaacatccgaaacctcttgacactcgttgtgacgaacgctgagcagatctctgagggtgtagtccttgttcaaagaatgttccgatacatactccgttac

SEQ ID NO: 19310 - DNA, 448 bp, Glycine max
  Clone ID: LIB3106-078-P1-K1-F4
gcgttgttgcattgtagaaggcgatggccgcgcgagctctgttgaccagaaaaaccctagccaccgtgctccgcaacgacgcgaagcccataatcggagttggcataacagcagcggctactcattcacgcgggttgcacgtgtacacgctacccgatctggattacgactatggcgcactggagccagccatcagcggcgacatcatgcagctgcaccaccagaagcaccaccagacttacatcaccaactacaacaaggccctcgagcagctccaagacgccatcgccaagaaagattcctccgccgtcgttaagctccagggcgccatcaagttcaacggcggaagtcatgtcaaccattctattttctggaaaaatctagctcctgttcgtgaaagacgtggtgaaccacccaagggttcactgggatgggctattgacacaca

SEQ ID NO: 19311 - DNA, 383 bp, Glycine max
  Clone ID: LIB3106-078-P1-K1-F5
cggacgcgtgggcggtctccgacctccgtcgcagcctccaggcgcgtggctccgatctcgtcgtgcgcgtcgggaagcccgagacggtgctggtagagctcgccaaggccgtcggtgccgacgccgtgtacgcccaccgcgaggtctcgcacgacgaggcgaaggcggaggagaaggtggaggcggcgatgaaggaggagaatgtggaggtgaagtacttctggggaagcacgttgtatcacgtggacgatttgccttttcaattggaggacatgccttccaattacggagggtttagggatagggttcagaaattggaggtaaggaagacaattgaagctttagatcatcttaagggaatgccttctcgcggtgaatttgag

SEQ ID NO: 19312 - DNA, 457 bp, Glycine max
  unsure at all n locations
  Clone ID: LIB3106-078-P1-K1-F6
cccacgcgtccggatggttcatggtgatgtcaagggattggtactacctcctaaagtagcatcagtacaagttattgtgattcctgtgccttacaaagatgccgatactcaaggaatctttgatgcctgttctgcaactgtgaatacattgaatgaagcaggtattcgcgctgagtcagattctagagataattattctcctggatggaagtattccaactgggaaatgaaaggggttcctctaagaattgaaattgggccaaaggatttagcaaataagcaggttcgcgctgttcgacgtgataatggtgcaaagatagacattgctagtgctgatttggttgtggaaataaaaaangtgctcgatactattcaacagaacctgtttgatgttgcaaaacaaaaacgagatgaatgcattcagatcatacacacttgggatgaatttgtgcaagct

SEQ ID NO: 19313 - DNA, 334 bp, Glycine max
  Clone ID: LIB3106-078-P1-K1-F7
accgagataactagaaacagtgtgatgattttgaaggaccttgtatttcttcaatggtacgagtttcttagcatggcaatgccatgcgtacgatatggccaatttcataatgaacacttgctattgaaccctaactccggatgagaaatgctcaagttgcaagcttgctgtggaatcacacaacatcacaggctttgagaccattcctgaatagtgcattgaagcaacaaaggaatacattcatggcgaacaatatatatcagactccaaaacagtttaccaacaagcttacttttatgccagagaccttaaagtccattccaaggacacattt

SEQ ID NO: 19314 - DNA, 458 bp, Glycine max
  Clone ID: LIB3106-078-P1-K1-F8
cccacgcgtccgggccaaagggctagttctgtcatttatgactgacttctttaaggagtatctgattgacaacagccttgatgatcttatttcaattctaaaacggggaaaagtagaggaggatcttttggacattttcccccctacaaaaagatccattgaagctttctctgagcatttcaccttcaacaagttcaacccagtccaaccaaacattatgctccaaaaagatgctagtatttcatcctctggggtgttacaactcaccaaagttggcagcaacggcgtgcccacctcgggatctctcggtcgtgccctttacgctgccccaatccagatttgggacagcgaaaccggcaaggtagccagctgggctacatcctttaaattcaacattttcgcacccaacaaatcaaactcagctgacgggcttgccttcttcttggcacccgtcgggt

SEQ ID NO: 19315 - DNA, 394 bp, Glycine max
  Clone ID: LIB3106-078-P1-K1-G1
cccacgcgtccgggcatttggcgttggtgtttttttttggtgaggtatatgtttgaagggcacgtgggacgaaaatgaagaccattctccggttttgattcccaatttcattttgattctctgaagttgaataatatttttgtattattcccattatgtaaacaaattttgttgttgatggtttgatttcacaaaatttgattgattttgttcatggtttatgcactgcatctggtttaccctctctatctgtgtccaatgtcgatggcagtggagatataactgatgcaaagattcataaaggttgacttaccagcccattgcaccgattttgaaatttggcatgggtcaaatgggacctcccgaaatccccaaatatttacgttttaatgca

SEQ ID NO: 19316 - DNA, 381 bp, Glycine max
  Clone ID: LIB3106-078-P1-K1-G10
ctaaaactaaatacccattggatgagttacatttcttccgaggttgctcctctaatatgcctaatattttctgcaatatcaattgctacattatttctttatgttcaaaaaaacaatattttttacatacaaaaaacataataaaactctagtgttttttattccccaattataattctaaattcaaaaaaaggacactaatgagtataatcttatcatcatactatgtactaatatattccattacatatgttctaataacaagcaatttattttttacacttaacactttatcaagtccattttaattaatgttcatttcaatttccatttttcttattaatacatttgttctttatttttaacaaaattatttatttt

SEQ ID NO: 19317 - DNA, 389 bp, Glycine max
  Clone ID: LIB3106-078-P1-K1-G12
acggcaaacagagggttattacacctagcaccttatggtaacaagttaaggaaatacttggggattgtgggcgagctgccatccaaacacactgctcggcaagtaacccctttggttctactcttgtatatggttatcaaaatattgcctttgaggtcatgaagaatggttatattgcaacaataactctcttccaatcatgatgattgcgcttttggttactcaatcttctgcatattgttccaagatttcccaaggttgagtatggaaattcaggggtaacaggtagggttgtacgggcactgtgtataaatattgcagctatccatcatcatcattgtcgagtcaaggtgctatgaaaattgtacagctgtgtaacacattgtaca

SEQ ID NO: 19318 - DNA, 426 bp, Glycine max
  Clone ID: LIB3106-078-P1-K1-G2
gttgtgagctataagctagtttatcgtgaggagaatatgaagttgtttgttttctttggggctgcagtagttttggtagcatggccatgccatggcgcaggctaccaaaggttccctctccgaatgaaaactggctatggtgagcgttcttcggaggtaaaatgcgcaagttttaggcttgctgtggaagcacacaacatccgagcctttaaaaccattcctgaagagtgcgttgaaccaacaaaggactacattaatggcgaacaatttagatcagactctaaaacagttaaccaacaagctttcttttatgctagtgaacgcgaagtccatcacaacgacatatttatattcggcatagataacaccgtactctctaatatcccatactatgaaaaacatggatatggggtggaaggatttaat

SEQ ID NO: 19319 - DNA, 225 bp, Glycine max
  Clone ID: LIB3106-078-P1-K1-G3
gcaataccaaataaaaaataatataaaaatttaatttaaaaaaataaaaaaaattaaaataagaaaaaaaaataataaatccatataataaaaaaaaataattttataaaaaaataaaataattataaaatattattaataaataacaaataatttttaatttaggttcaccctttttttgaggcccaatttaactttccctaatatccctcttattaatttttt

SEQ ID NO: 19320 - DNA, 395 bp, Glycine max
  Clone ID: LIB3106-078-P1-K1-G4
attcaacactcatatccttatcctgtttctttcaatggaagtcatttctgcttctagcgggaatcccaacgctccgatgttcgtgccactcgcctatcggacggtggaggatttctccgaccagtggtgggacctcgttcactcctccccctggttccgcgactactggctccgcgagtgcttccaagatccccagttccaaaacgacgacgctttcgacttcgactttgacctagatctccaagatgaagatgaaagggaacgaaaggaagggaaggaggtggtgtcgttggggctgctgaaatggcgaagctgtggaggaggatgggcccaggcgccgaggtatgtggaaaaggcccccaagtttgtgaagcccaaggtgagcccacgggcta

SEQ ID NO: 19321 - DNA, 372 bp, Glycine max
  Clone ID: LIB3106-078-P1-K1-E5
cccacgcgtccgcccacgcgtccgttggaagcctggaaaccccagttacatccagccctttgatcgcatggtacttgtccaacctgcccgcatacagaaccgcagtgagcccactactaagagggatcgaggtgggcctggcccacggataccttctggtgggcccattcgtgaaggccgggcctcttaggaacaccgagatcgccgggcaagcgggctctctggccgccggtgggcttgtggtgatcctcagcctttgcctcacaatctatgggatttcatccttcaacgaaggagccccatccactgctccgtcgctgaccttgacgggccgcaagaaggagcccgatcagctccaaactgctgatgggt

SEQ ID NO: 19322 - DNA, 332 bp, Glycine max
  unsure at all n locations
  Clone ID: LIB3106-078-P1-K1-D11
cccacgcgtccgagaattcatttatcatatcttttttaaaatttttatgattaaatttggataaacttttcaaactctcacactttttggactatttatcgtttctacgtctgtgtgagaaagattgttgtattattagaagtgtgagagataacagcgatggcgaggcgaggcgagactcggaacgagtcgttattgactcgggcggttgcggcggtcttcgccttcgtgagacacgccgagtttgagatcctcttctntcttttctttttcatcgcttatcttctattcaaagacatcacatcaaggcctgactataatcaaatgttcgt

SEQ ID NO: 19323 - DNA, 335 bp, Glycine max
  Clone ID: LIB3106-078-P1-K1-D12
cccacgcgtccgcttctcttcccaaactctcttcttctattccaaagacccttttgaagtggtcgatggagtttcagtctctttccagattctaccttcttctttccttaaccattctcttccttgcaccctttcacgctcaagctaaaattaaagtcacttactgcgataagaaggcacactatcctgtgaaggtgtctggagttgaaatatcaccagaccctgtggagagtggcaagcctgctacctttaagatctcggctacttctagtaaagctatttatggtggagaagttgtaattggagtttcatacgttggggtgcctgtccatact

SEQ ID NO: 19324 - DNA, 415 bp, Glycine max
  Clone ID: LIB3106-078-P1-K1-D2
ctctctttctccggcgacgatctcagattccggtcactcctctcgccggcgatcccttagtcctccgtcctccgtcgagtcctttccgattcgaatcgttcccagccttgtgccaccatgaatcccgaatacgattatttgttcaagcttttgctgattggagattctggtgtaggcaagtcatgtcttctcctgaggtttgctgatgattcataccttgacagctatatcagtaccattggagtggactttaaaatccgcactgtggagcaggatgggaagactattaaacttcaaattatttttctgcatttttttaccatatagtgggacactgcgggtcaggaacgtttccggacaatcactagcagctactatcgtggggctcatggcattattggtgttatgatgtcac

SEQ ID NO: 19325 - DNA, 380 bp, Glycine max
  Clone ID: LIB3106-078-P1-K1-D3
atttaatgaaaccttatatgatgaatgggttaacatgggcgacgcaccggcattgccagagacgcttaaaaattacaacatgctgcagtctcttggcttcaagattgcatactcgtcaggaagatatcttgacacaatggtcgtcaccgatgcaaacctaaagatggctggattgcacacatgggagcagttaattctcaaggatccacatcttatcactccggacgcactttcatacaaatcagcagtgaaagagaatctgttgctgcagggatacagaagtgttggaatcattggagaccaatggagcgatctgcttggagaccacacatgctaaagccggaccttcaagcttcctaatcccatgtactacattgcgt

SEQ ID NO: 19326 - DNA, 296 bp, Glycine max
  Clone ID: LIB3106-078-P1-K1-D4
cacatcatctcactcgttagcttggtccgatgatggctgctgacatgagggctggacgctatttaaacttcaccctgacgacctgtctgacgagctggatctagctcattgcaccgcatagagtgatgagcaagaaggcttcgttgcgctacagatgtgtaagtagcagagggcagagagatagcatcagagcttgtggaaccactggggcgcctgaccaggtgatctgccaggtgaccatacaggatgtatgggagaataaagacacggtgcaacttatgaccctgtacatatgc

SEQ ID NO: 19327 - DNA, 354 bp, Glycine max
  Clone ID: LIB3106-078-P1-K1-D5
cggacgcgtgggcggacgcgtgggtgcacttcatgattgatgagaatgttcactgcagggacactgcaagacttatcaatgcacttgtggcagctggaaaaccgtatgagttaatagttttcccagatgaacgtcacatgccaaggcgtcatagcgatcgagtttacatggaagggaggatgtgggacttcattcagaggaatctgtaaaataacttgttattccatctttggttgaatggccagagtagtttctcaaaaaaaaaagaaaatcataatagatacaattaatataaaaaatatttaacgtttatatttataaaaaattaaaattaaaaaaaaaaagtttgtaatt

SEQ ID NO: 19328 - DNA, 408 bp, Glycine max
  Clone ID: LIB3106-078-P1-K1-D6
cccacgcgtccggaaggatgttgtatctatactatttgaactttggaatttgatggactgatcaaaagaagagagaaactgttttatgaagattacttctattgttggaacctcagaatcagaaatcactgaacgaggtgttctttcaacagaaatgatagagaaggcttcggcagaagtggacaggcttgccaaactaaaagcaagcagaatgaaagaacttgtttttaagaagaggtcagagttagaggaaatatgtaaattgactcatactgaaccagatacaagtactacagccgagaaagctagtgcattaatagattctggactggtggatccttctgagctattagccaacattgaagcacagattataaaggcaaaagatgaagctttgagcagaaaaga

SEQ ID NO: 19329 - DNA, 385 bp, Glycine max
  Clone ID: LIB3106-078-P1-K1-D7
cgcatggccactctctcacccttctcacccttcaattccaaacccctctttgctgttctaccaaacccctctttcttaactcatcatcaacaacaacaacatccttatcctctcaccaaaaccacaaccactgacctcaacaacaataggcctctttcactctccacactgcccagaaagttgctctgcaaaccaccccaggggaaatatgtcagagaggactatctagtgaaaaagttgtcagctcaggaaatccaggagctggtgaagggagaaagaaaagtccctcttatcattgatttctttgcaacttggtgtggaccatgcatcttaatggcacaagaacttgaaacacttgcagttgagtaccaaaacaaggcactga

SEQ ID NO: 19330 - DNA, 407 bp, Glycine max
  Clone ID: LIB3106-078-P1-K1-D8
aggctgaggaatttggcattgaccttccctactcatgcaaggctggtgcttgctcttcgtgtgccggcaaagttgtttctggcaaagtcgaccaatctgatggtagttaccttgatgatacccaaatcggtaacggatttgttctcacctgtgttgcttatcccaccttagatgttggtattcagacccaccaggaggatgagctattctaggtctatatctcatgtgtctttctatcttgcattttcatttatatgcttggttatcatattaccaactctaactgtagtacctacgtaccatgtgatcttcattcttgaatatcactattcttaaattataaaaaaaaaaatttatatatataattctttaatttatattttatttttattttttttatattaaaa

SEQ ID NO: 19331 - DNA, 388 bp, Glycine max
  unsure at all n locations
  Clone ID: LIB3106-078-P1-K1-D9
cccacgcgtccgtccacgcgtccgccttgactcgcctttatgcaatgcacatacaacaggagcagatatactatgggcaggtttgccaatggttactctgcctcttgagaaaatggctactagggttgctgggtcactctgtcttgccactggactaggggaggagatgattgttagcagcatggaagagtatgaagatagagcagtctcattggctctgaatcggccgaagcttcaggctcttactaataagcttaaagctgtacgcatgacttgccctctatttgacacggcccgttgggtgaggaatcttgagagatcatattttaaaatgtggaatctgcattgctctggtcaacgtncacagcattttaaggtcacttgaaat

SEQ ID NO: 19332 - DNA, 377 bp, Glycine max
  Clone ID: LIB3106-078-P1-K1-E1
ctctctcaccctatttacttttcaaatacaaacccctctttgctgttctgaccaaacccttctttcttaactcatcatcaacaacaacaacatccttatcctctcaccaaaaccacaaccactgacctcaacaacaataggcctctttcactctccacactgcccataaagttgctctgcaaaccaccccatgggaaatatgtcagagaggactatctagtgaaaaagttgtcagctcacgaaatccactagctggtgaaggtagaaagaaaagtccctcttatcattgatttctttgcaactttttgtggaccatgcatcttaatggcacaagaacttgaaacacttgcagttgaataccaaaacaaggcacttat

SEQ ID NO: 19333 - DNA, 228 bp, Glycine max
  Clone ID: LIB3106-078-P1-K1-E10
tattacctcattcactggcctcaaggcaagctcatacaaatttagtgccgcatttaaagtctcaactccccaagccacaaagtctttcatcaaagcttctctgaaagacattgaagtctctattgttgccactgtcgctattgcattgctcactatcaacgccatgaccattgaaatgttgctgtgtccttataacacttctcttagctttccttcccaacaatttct

SEQ ID NO: 19334 - DNA, 363 bp, Glycine max
  Clone ID: LIB3106-078-P1-K1-E11
cccacgcgtccgcccacgcgtccgcatgaacggcacgtgtagcggagtactaggccgccgttacacgctactgctgtccgtcgtcaccgtttgaattacccaccgctactttgtcgtcattcttcttcttcttcccttttcattgaccttttccttccttcgtcctccaatggcgactgttccgcacccattatccctcgcaagtgtaggttttgctaaccgaacctcctccatctccagatccactctcaaatgctgcgctcaatctccttctccttcactagttgacaacgcccagaagtttctcgaagcttccaagaaagggaacgtcattcctctcttccgctgcatattttccgatca

SEQ ID NO: 19335 - DNA, 354 bp, Glycine max
  Clone ID: LIB3106-078-P1-K1-E12
atcaccgcaagtccacaacatggctgccactgccgctgcaggcatagcttccttgttttggtcttctattaacagtgtcaaatgtcttcgttcctccaagaactgctccattatagacccccttataaccacagtgccctcaaaccgtggcatgtttgtgtcacacttggtggaacctttgtccattgggggtgccattaattcgcacaagttgtgggggcctagaatttctgctgctgttgcacaagaagaggctgttgttgtggctgatgatgaggtagatgatggtgctggtttagttgaagaagagaaagtggaggagaatgaaagagaagtagttgcagaacaagactc

SEQ ID NO: 19336 - DNA, 291 bp, Glycine max
  Clone ID: LIB3106-078-P1-K1-E2
cccacgcgtccgcttgtactttaattgaattctgcattaaaaaaaaaaaaaaaaaaaaagaaaaggaaaaaaaaaaaaaaaaaaaaaaaaaaaaaaaaaaaaaaaaaaaaaaaaaaaaaaaaaaaaaaaaaaaaaacaaaataaaaaatcaaaaaaaaaaaaaatcttacatccaacaaaaaaaatatattataaaggtcacctaaataaaaaaaactaaccctacatataaaaaataataaaactgtaaaaaccatttctaatacctaactaaattaatttaaataaaaa

SEQ ID NO: 19337 - DNA, 403 bp, Glycine max
  Clone ID: LIB3106-078-P1-K1-E3
ggaaggcacaaccttagccaacaacaaagctaagctaagcatgggtttactgtggtggcgaaaggggaataaaccccaaccgcaactccaagctaagtcatcgtcaattccgaagtcgaacggcacagacgcaacgaaacccctcaccgaggccccagggatgaacggcgccatggaggttccccgtacaccgaacaccaccgtctcgatttttgagttcggctctgtcaccgtctccaacgaccaggtcacgctcgccggctattgccccgtctccgaagacctcgagccctgccgctgtgagattcatcccgacgatcagactaacgccccccagtttcgcgtactcttttgatacccaactttttatctcatcgacgcttatggaatgtaccttatgcta

SEQ ID NO: 19338 - DNA, 257 bp, Glycine max
  Clone ID: LIB3106-078-P1-K1-D10
tcatcacattgcaaagaaaatacacattacattactaagtctttgttcatttgagtagtagtgatggctagcctcaaggttgcatgtgtggttgctgtgatgtgcatggttgtggtggccatgagtgctgcacccatggcacaggccgcaatcacgtgcggtcatgtcatcggcgacatgtctacgtgcttcaggtatctactaagcggcatgaaaaccgtcgcaggccttgattcttcggactgaagtcctatcac

SEQ ID NO: 19339 - DNA, 379 bp, Glycine max
  Clone ID: LIB3106-078-P1-K1-E4
cccacgcgtccgaaggaataccctttcaaaatggcttcttctgtgtcatccatggtttctaccagcctcctcctaattaccatctgcacactgtcctcacttctgtcagttgcatctgcagcaacagaggagggacgaacaaggccattcaaaagggtctatgcctttggagactctttcacagacactggcaacacccaaaatgcagaaggtccaagtggctttggccatgtttcaaactctccctatggaaccactttctttaaccactccaccaataggtactcagatggtaggcttgtgattgattttgtggctgaagcactttcactgccttacttgcccccctaccgtcatagcaaaggcaatgacacttttg

SEQ ID NO: 19340 - DNA, 142 bp, Glycine max
  Clone ID: LIB3106-078-P1-K1-A9
aacaactataacaacatctgtctctgtcctttttgatcacactttggccacctcaatcgccaaatcagtccatgatttcaccgttaaagatgccaaggcaaatgacattaatctttttaaccacaaacgaaatgcccttatc

SEQ ID NO: 19341 - DNA, 407 bp, Glycine max
  Clone ID: LIB3106-078-P1-K1-B1
gcatcgcatccctcttgatttgtagtttgttttgttctgtagataaaagttctgccaaaggaagaggggtgctaagatcatagtgggtgttgtgcaacaatacctatgatctatgctgctatgatcctggcacattctgccatttccatacttgaaactgtcgtagactctgatattgaacaatgaggcctcttgtatgtctaccagatcacatctcttggtagacgtgtacagagtaactagacgcctaactcttacactggaggagttctaatccagccacctactgtagcggcctgtttatgtgaatgtttcataatagcatctatgcatatcggcgtgtatgcttggacattttacagaatcaatggagccctatttattacgtaacttgggattcttacctt

SEQ ID NO: 19342 - DNA, 256 bp, Glycine max
  Clone ID: LIB3106-078-P1-K1-B11
cggacgcgtgggcggacgcgtgggtgcacttcatgattgatgagaatgttcacttcagggacactgcaagacttatcaatgcacttgtggcagctggaaaaccgtatgagttaatagttttcccagatgaacgtcacatgccaaggcgtcatagcgatcgagtttacatggaagggaggatgtgggacttcattcagaggaatctgtaaaataacttgttattccatctttggttgaatggccagagtagtttctc

SEQ ID NO: 19343 - DNA, 328 bp, Glycine max
  Clone ID: LIB3106-078-P1-K1-B12
cccacgcgtccgcctacacgtacgattttatttgaaagataaaacacatctagactggcgagcatgatttttcatttacactggactcatactatccacacctatgtaacatcatagctgtacacattgtagtatggtactatgatgctggaaccattaaatcagccataatttaatgaattagttgaactctacattggtatttttacacattgagtttatggaaaatttatgtttcagtaatctcagtatctaatgttgttatcaatgtgaattgggacctattaatttattaattcatgattttttgtaaagtgttttacttttt

SEQ ID NO: 19344 - DNA, 187 bp, Glycine max
  Clone ID: LIB3106-078-P1-K1-B4
cccacgcgtccgatctccttgtcctacaattaattaacatggttccagccccctcattcgagtatgttctcttcttttgttgtacttttggctttaacttggtatccaatcctggtcctgccctcaacataagaacttgaaccaattgaagtggttgcttttgtggccaagagtgccattgaccatg

SEQ ID NO: 19345 - DNA, 456 bp, Glycine max
  Clone ID: LIB3106-078-P1-K1-B6
cccacgcgtccggcctgttcggttaaataaaggagttgtggagcttgtttcggattttgttgtttgtgaggaaggaaagcctttgtcacccgaggcttctcgtatactgcgtttaatgggaatcaagatggctacatttcgacttagcttaatttgcagatggagtcccgatgagtttgaactttacatcgatggaccagatgaatcagatatcgaatgctcgtaggacctcttttaaaacgtagaagattctggagccccatcctccaaagaaaaaagattacacaagatatgactgacgcatatgtaatttacatcttcagtgctatagactgtgtagcgttttttggattatgtattcttagaagagtttatttgtggaaatgcagagagatttctgtgaactaagccaagcctgaactttataaaaagttcaaattactgtgatacaatttt

SEQ ID NO: 19346 - DNA, 56 bp, Glycine max
  Clone ID: LIB3106-078-P1-K1-B8
ctaaaacttcgttatccactctcagtccgttccctcaacatatgagctgtaaccac

SEQ ID NO: 19347 - DNA, 340 bp, Glycine max
  Clone ID: LIB3106-078-P1-K1-C1
attctgccgtcctgaacacacatgacgtgtgtggtgaaacagaaaccttatgggagttggcaaggaaaagctacacagcctttgtaaatgctatgaactgcaacaagcatttcacagacatgtctgacctgaactacctcatgtgcaaggctattgagaaccccggtttgacgccatcgtcatcacttaggacagccttgatctctgtgtttgaagatcctgtcttcgacgactcggccgaaatgcatggagagattggattggaagactatgtacgttgtgcttctgctcatggtgttggtccatccattgccgtattcgacaccatacggaatggaaa

SEQ ID NO: 19348 - DNA, 382 bp, Glycine max
  Clone ID: LIB3106-078-P1-K1-C10
aaccgtggctataccctgctccaacctatctaactatagaaaccttctgggtcaccgatggagacgcacccggccctcgctgtggccacaccctcaccgccgttgccgccaccaagactcaaggcccccgcttgatcctattcggcggcgcaaccgccattgaaggaggatcttcctctgcccccggcattcggttagcgggagtcactaataccgtccattcctatgacgttcaaagtagaaaatggactagtatcaaacccgccggagagccgccgtctcctcgggctgctcatgctgctgctgcagttggtaccatggttgtttttcagggtgggataagtccagcggggcattctaccgatgatctctatgtgcttga

SEQ ID NO: 19349 - DNA, 340 bp, Glycine max
  Clone ID: LIB3106-078-P1-K1-C11
cccacgcgttcgctggagagagaaacactttttcagttctctctctctctctctaagatggccgactatccaatgcccacgcgctggtctttccaggacttcaaattgtgttatgatgctaagtttggtagaaagaaagtcgcggagaacggagatgatgctgccggtaaagcggtcagcaatggaaatggaaattcagtgacagtggccattgtgtccaatggcaacaaatggtcatcggaaatggctagctatgagcagtttctaagcgagcgtcagaatcagattcagacacatgtctttgtgccgacccttacatattaaaagtcgcagaagtctt

SEQ ID NO: 19350 - DNA, 356 bp, Glycine max
  Clone ID: LIB3106-078-P1-K1-C12
ctgaaacttgggtgcgattccttcactcacaacaacaacacatcactatggctcttctgagtcgagcctcttcacgcttccctcagctggtttcccctcaaagggtagtttcactccacacaacgctcccatctctgaacgcatccccatccacagccacgcctacaccatatgccccgccaccgcctccgtccgcttcctctcccgccggcgtttcgaaggcggcggagttcgtgatctcgaaggtggacgatctgatgaactgggcccgccgcggctccatctggcccatgaccttcggcctcgcctgctgcgccgtcgaaatgatgcacaccggcgccggccgctaccatctc

SEQ ID NO: 19351 - DNA, 57 bp, Glycine max
  Clone ID: LIB3106-078-P1-K1-C3
tcgaataaaagaaagaaaaataaatataataaaagaaaaaatataaatttataataa

SEQ ID NO: 19352 - DNA, 386 bp, Glycine max
  Clone ID: LIB3106-078-P1-K1-C4
caaatcaaagccatggccacctccaacttctctattgttctctccgtctccctagccttgtttgtggtgctacttaccaaggcacactcgaccgataccgtttctttcaccttcaacaagttcaacccagtccaaccaaacattatgctccaaaaagatgctagtatttcatcctctggggtgttacaactcaccaaagttggcagcaacggcgtgcccacctcgggatctctcggtcgtgccctttacgctgccccaatccagatttgggacagcgaaaccggcaaggtagccagctgggctacatcctttaaattcaacattttcgcacccaacaaatcaaactcagctgacgggcttgccttcttcttggcacccgtcgggtc

SEQ ID NO: 19353 - DNA, 379 bp, Glycine max
  Clone ID: LIB3106-078-P1-K1-C5
cccacgcgtccggaaaggggggaaatgggttatgtgatgagagtgagattggcgtggttcttcaccggggctgcagtggcgtcgtttctggggctctacaccctccacaaggattacaaggtcgcgcaccaatcctttactcaacagatgaatgacctccacaaatcgctggaaggtcgaatttcttccttggaaaaaatgaaacaaacggaaacgtctgaacaggttgaagcaactgaataagagttcagaccgaagcatccattgtggggaaaaattgattcaatgtacttactatgaaaagtaactttttggtttggtttcctgatgaataagttcaatttgactcattttatggcaccttatttgactgaacttt

SEQ ID NO: 19354 - DNA, 408 bp, Glycine max
  Clone ID: LIB3106-078-P1-K1-C6
cccacgcgtccgctcaaatatggccaaaatgaaagtgtccgaatctctggaccccatgggtgccccaaccgatgactcctcctcagctctgcagattcagaacctcaaaaacctcaacgccctccttctcaaggagaccacccaacgccgccaccagattcactctctccagtccgccctccaccgctccgccgtcacattcgacaccaacctcgccttccacctccaaaacgccgtcgtttccgtcttcttcaagaaccagctccaggaaatgaacctccgcttcgacaccctgctcggagatagggacttcgaggtttccgctctcaagcaccagctcagcgacctcgtcgcgcgtctcgagaacgaaacgactgctctcgccgaggatcgtgacgggctcgttcg

SEQ ID NO: 19355 - DNA, 369 bp, Glycine max
  unsure at all n locations
  Clone ID: LIB3106-078-P1-K1-A7
cccacgcgtccgcttttctctcttctgccctctgcacctcccctcacacccttccgcattcgcaggaggtgaagatgtcgaccccggcaaggaagagactgatgagggattttaaaagattgcaacaagatcctcctgctggcatcagtggggctccccaagacaataatattatgctttggaatgctgttatctttggaccagatgacaccccttgggatggaggtacgtttaagttgacacttcagtttacagaggattatcctaataaaccacctactgtgcgttttgtttctcgaatgtntcatcctaacatttatgcggatggcaaaatatgctttgacattttacagaatcagtggagcccta

SEQ ID NO: 19356 - DNA, 388 bp, Glycine max
  Clone ID: LIB3106-078-P1-K1-C7
gaaaaaaaagattctaaagaaatataactatatattctttagaataatcaaaaagaatatgaaattcaaataaattttagatagaaaaaagacttaaaaaggaggatttgaaatgcgagatctaaaaacatatctttccgtggcaccagtagtaagtactctatggttcggggctttggcgggtctcttgatagagatcaatcgtttttttccagatgcattgatattcccttttttttcattctagttattgacacggaaaggggtgaagaagattatagatccaattaagtattaaatatatgtaattaatatgtaattaatctcctcttctttatttcgtcttttatttcttcttttttttacaattgtaatagaataagttagg

SEQ ID NO: 19357 - DNA, 171 bp, Glycine max
  Clone ID: LIB3106-078-P1-K1-C8
cccacgcgtccgcgtccacctctctctctctctctctctcactcacagattcagcctttcgcagtttctctctctagaaaaaccaaacctcgctactctcttctccctttttttttgtagttctttccttatttggccttcacactccgaactgcgaaatccttttttagc

SEQ ID NO: 19358 - DNA, 358 bp, Glycine max
  Clone ID: LIB3106-078-P1-K1-C9
ggtgcttgttttcttcgttgctacaaattttgtagcatggcaatgccatgcgtacgataggttgcctctacgaatgaacactggctatagtgcccgtactccggaggtgaaatgcgcaagttggaggcttgctctggaagcacacaacatctgtgtctttgagaccatgcctgaagagtgcgttgaagcaacaaaggaatacatccatggcgaacaatatatgatcagactccaaaacagttaaccaacaagcttacttttatgccagagacctcgaagtccatcccaaggacacatttgtgttcagtataaatggcaccgtacttcttaataattcatacttcaaaaaacatggata

SEQ ID NO: 19359 - DNA, 422 bp, Glycine max
  unsure at all n locations
  Clone ID: LIB3106-078-P1-K1-D1
caaccaaaagaccactctcgacgagcttcccaaaacaagaagcaccaatggcagtcgcggatctgcagagactgtcctcgcaagcgcaccgcctcccctccctctcgttcttctccaaatccctgatctaccgccgcacctcctcttccacgaagaaggtcgccgaccgcatcgtacggctctcggcgatcgacttcgtgggaaagaagcacgaggtggtgggcctggccggccagaccttgctgaaggccctgatcaacacgggcctggtcgacccggagtcccaccgcctcgaggagatcgacgcctgcgcggcccactgcgaggtcaacattgcccaggagtggctcgacaagctcccccctcgctcctacgacgaggagtacgtncttgtccgcaattcccgagccagagcccttaac

SEQ ID NO: 19360 - DNA, 243 bp, Glycine max
  Clone ID: LIB3106-077-P1-K1-H1
cccacgcgttcgcagactgagcccctgtgagtgctctctctctgtaactaacttgctccctggatgaccctaagcatcaactgaagcagtggacggacctgtggaccgacgagatctcctccgtgatggaggcctttatgtcgtcctccgatctgtcctcaatctggccctcgccggcgccggcggaattcactgcggtcttcaatcaggacaccctgcaggacctgctggaaggcctgatcg

SEQ ID NO: 19361 - DNA, 393 bp, Glycine max
  unsure at all n locations
  Clone ID: LIB3106-077-P1-K1-H3
cccacgcgtccgcacttttctactttgagtcttcttgatccttctttttctccttgaactcaaacatggcagatgaggtggttctgctagatttctggccaagtccatttgggatgagggtcaggattgcacttgctgaaaagggtatcaaatatgagtacaaagaagaggacttgaggaacaagagtcctcttctcctccaaatgaacccggttcacaagaagattccggttctcatccacaatggcaaacccatttgtgaatccctcattgctgttcagtacattgaggaggtttggaatgacagaaatcccttgttgccttctgacccttaccagagagctcangctagattctgggctgattatgttgataagaagatatatgatcttg

SEQ ID NO: 19362 - DNA, 414 bp, Glycine max
  Clone ID: LIB3106-077-P1-K1-H5
gctttagaaggggagagtttggtctacacacaccaccacatgaagagcatggtgacgccagtgacgagggtcttaccctttcgtcacccaaatggccataatacccttccattttctcttacacgctacccttcttcaccaaacttctccttctcccctctcactctcactctttccatggctgcttcaccccaatcctccgctccaactgtgtcgcctggtgatgttaacatcgacaaagatggcgtatttcaattgattcaagctcatcaggaaaaagctgctagacttccaccagttgaggagattcgaactgtccttgatcgtagcgtgcgcgggatgctctctacattctcaaagaagtttgatggttatccatcatggtctatggttgactttgcatgtgaatcaaat

SEQ ID NO: 19363 - DNA, 282 bp, Glycine max
  Clone ID: LIB3106-077-P1-K1-H6
tcgggacaacacccatgcctaaagcaagcaatgaggtctattatctacttaataaataagaggaactgctttgtgttttctagcattgtgatttacaacttcgtagcaatgcatattcttgactcttgcatgcacttcaatccttcgtagcattaatgatgtggccaagtcatcatgagcatcatacttatttctttgtgaatgtaaatcaaaattataagagagaaaatggtgcttttgtactacagattactataaataaaaaacttttatggttttcaa

SEQ ID NO: 19364 - DNA, 414 bp, Glycine max
  Clone ID: LIB3106-077-P1-K1-H7
ctcaaactcactctttctaagttttttctatctctttctctctctctgtctgccatgggtctctccaaaaccacctccgaatccgacgtctctgtccactcaaccttcgcttctcgatatgtcagaacttcgcttcccaggtttaagatgccggaggagtcgataccaaaggaggcagcgtatcaaataataaacgatgagttgatgttggatgggaacccaaggttgaacttggcatcatttgtgacaacctggatggagccagagtgtgataaactcatcatggctgccattaataagaactatgttgacatggacgagtatcctgtcaccactgagttacagaatcgatgtgttaacatgatagctcatcttttcaatgcaccactagaagagactgaggctgcagttggt

SEQ ID NO: 19365 - DNA, 339 bp, Glycine max
  Clone ID: LIB3106-078-P1-K1-A1
ctcagactcttctttgatctgaaccaaaaacaaaaaccaccaactttgtttaaccctgcggagttttttctgttcctttccctgctgctgcttttgcagtctctgggggattttgctttgcatttttttatgtgtcaattggtggtggctttcaagcggtggcggctattattattgtgttgagttttcatttttccaagaatcatatatagggtatcctcagattctgaagctctaaaattttcttgcatttaaagttttctctgccacaatccatcaacaagggattcatatacatcactactactccatcactggcagtgttgtactaagttcgac

SEQ ID NO: 19366 - DNA, 422 bp, Glycine max
  Clone ID: LIB3106-078-P1-K1-A10
acgctgtgatattctcagatcttccttcagtattatatgctggctcgaaaaacgcttcactggcaaggtcaacaaatgtgtcaaccacagaacctgttaatcttgatgacaatgacaaactgcttgggggattgttaacttctggatttgatgaagcatcatgcaaaagtaggatgcagtcccatttgtaccgcaaagcttctcctcataaaccttctccatatttgatatctaaactacgtaaatacgaagaaattcatagaaggtgcggaccaaatactaaagattacgacaaaagcatgaaaaagattgtaagctccaagaacaatggtgctgctaccaaatgtaagtacattatctggaatactgccaaatggtttggggaatcaaatgattagcatagctgcaacatttctttatgc

SEQ ID NO: 19367 - DNA, 393 bp, Glycine max
  Clone ID: LIB3106-078-P1-K1-A11
cccacgcgtccgctcgcatcttgttccttttctcaacaactataataacatctttctctcgtccgaacagatcacactatggccacctcaagcgccaaatcagtccatgatttcaccgttaaagatgccaagggaaatgatattaatcttggtgactacaaaggaaaggtccttatcattgtcaatgttgcctcacaatgtggcttgactaattcaaattacactgagctcagtcagttgtatgagaaatacaaacagaaaggtctggaaattctggcatttccatgcaatcagtttggggcacaggagcctggatctaatgaacagatacaagagtttgtttgtactcgcttcaaagctgagtttccccgttttgacaaggttgatgtgaat

SEQ ID NO: 19368 - DNA, 343 bp, Glycine max
  unsure at all n locations
  Clone ID: LIB3106-078-P1-K1-A12
aatagaactctcacactcagttcagaaaactccggtgaagtaagcgttcacgtgttaagtgaagtgactgtgacgtgcactttcactgttcttctgtttgttatgtatggctttgaaagctaggcagcaacacgcatttcgatgacggtggtcggactcttcctcaccgccacgaagctcgccggagctcttttcactctcaccgtcgccgtcaacgccttctcctactcccgctttcgcaagaagaaccttcgccgtttccgctcccccatcgacgaatcccaagacactctcgcacactttaacatcgncgaaggggaaagatgagcttttcttttggttt

SEQ ID NO: 19369 - DNA, 448 bp, Glycine max
  unsure at all n locations
  Clone ID: LIB3106-078-P1-K1-A2
cttagtgtgcgtccaccccaacgtctatataaaggattacggatgggaaatattgaaactgtcctttccagcagtattgctgctgtcttttttgcagcttttgtcgttgctggaactatgtggtatggttcagcaacaacccctattgaattattcggtcctactcgttatcaatgggatcagggatactttcagcaagaaatatatcgaagagttggtgctggactagccgaaaatcaaagtttatcagaagcttggtctaaaattcccgaaaaattagctttttatgattatatcggaaataatccagcaaaaggggggttatttagagcaggttcaatggacaatggagatggaatagccgtcggttggttaggacatcctgtctttagagatnaagaggggcatgaactttttgtacgtcgtatgcctacttttttttgaaaca

SEQ ID NO: 19370 - DNA, 398 bp, Glycine max
  Clone ID: LIB3106-078-P1-K1-A3
gcgcccacgcgtacgctaacgtgtcttttgatttatacacctacagtcacactctttgtcatggtcaagatgtgaagatgtcgaccctgtcaaggaagagactgatgagggattttaaaagattgcgacaagatcctgctgctggcatcagaggggctccccaagacaataatattatgctttggaatgctgttatctttggaccagatgacaccccttgatatggtggtacgtttaagttgacactttagtttacagaggatgatcctaataaaccacctactgtgcgacatgttattcgaatgtttcatcctagcatttatgctgatggcagtatatgcttggacattttacagaatcaccggagccctatttatgacgtatctgcaattcttacc

SEQ ID NO: 19371 - DNA, 224 bp, Glycine max
  Clone ID: LIB3106-078-P1-K1-A5
cccacgcgtccgcccacgcgtccgctcatttacacattcacagttatactctctctgtctgtgtcgcttgcatcactgatctcatctcaattttcagatatgtcgacatctgataagccagaagtggtggaaaggggtagcaaggatgaaaaacacaaggaagatgatcaagaagacgggaagggtggattcattgagaaagtgaaggatttcattcatgacct

SEQ ID NO: 19372 - DNA, 410 bp, Glycine max
  Clone ID: LIB3106-078-P1-K1-A6
gtgagctataagctagtttatcgtgaggagaatatgaagttgtttgttttctttggtgctgcagtagttttggtagcatggccatgccatggcgcaggctaccaaaggttccctctccgaatgaaaactggctatggtgagcgttcttcggaggtaaaatgcgcaagttttaggcttgctgtggaagcacacaacatccgagcctttaaaaccattcctgaagagtgcgttgaaccaacaaaggactacattaatggcgaacaatttagatcagactctaaaacagttaaccaacaagctttcttttatgctagtgaacgcgaagtccatcacaacgacatatttatattcggcatagataacaccgtactctctaatatcccatactatgaaaaacatggatatggggt

SEQ ID NO: 19373 - DNA, 300 bp, Glycine max
  Clone ID: LIB3106-077-P1-K1-F1
cgcgttcgtgaacaaatactaattcaagaaagatctctgaaaaaagatatggcttccactttctgggtgttattgttattcctggtacttattccatccagaatagagtggtgcctatctctgatgcattcttcaagccactcacactactgtcctccaaggtagtggcggcatcaaattccaatggaaggtttcaggtgaggacctccatgaatgagaaagttgtaacatggctcacagcagcttcattgacagcttcaatgatggttcctgatgtggctgaagcttacgtcttaacct

SEQ ID NO: 19374 - DNA, 363 bp, Glycine max
  Clone ID: LIB3106-077-P1-K1-F2
atgtggatccagatcaaagtaccgagagcttaggtgtattttggtacaacaataagttgtgatgattaatgtagccgaggcttctttgaactttcccttgtgactgtttagtatcatggttgcttattgggaataattttgttgaaccctgatgttggtagtaagtatctagacagttgcatagcggttttgtttacagaataagatatagcctctctgaacagtttgattattgcaccatggtttgcaatcggtgcatgtcgaccaagtttctcaagactgtggagaagcttattcttgttccagttcttgaatccaagttgttaccgtattctgtttttaaaaaaaaaaaaatttttattc

SEQ ID NO: 19375 - DNA, 381 bp, Glycine max
  Clone ID: LIB3106-077-P1-K1-F3
cgggaatgtgactggcttatgcattaccctgcaccttccaaacacactagctactaatgcgtttcctgtctcacttattctacaaaaacaatggcatcatttccaatcccacagctcctaccatctcacaccaaccactccttaacttgtttcagtagtaacactaacactctgccgttgtcatcctcactgttgcgccgtcgccggactctcgactctcttcgatgctcgggcgtcgtcggaaaacagcccacgacgacccccctgaacctccttcttttccttttcctttggtcctttttcccggtgccatccttccccttcagatctttgaggttcggttccggattatgatgcacacgcttcttcataccgaccttc

SEQ ID NO: 19376 - DNA, 106 bp, Glycine max
  unsure at all n locations
  Clone ID: LIB3106-077-P1-K1-F4
naaaaaaaaaaaaaaaaaaaaaaaaaaaaataaaaaaaaaaaaaaaaaaaaaaaaaaaaagggagaaaaaaaaaaaaaaaaaaaaaaaaaaaaaaaaaaaaaaatg

SEQ ID NO: 19377 - DNA, 276 bp, Glycine max
  Clone ID: LIB3106-077-P1-K1-F5
caaacaactactagggcaagaaagaaactagagaaaaagatatggcttccacttctgcagggtcaatggttatgccggtaacttatgccagccagaagagagtggtgcctagctctgatgcattcttcaagccactcacactacggtcctccaaggtagtggcggcatcaaattccaatggaaggtttcaggtgaggacctccatgaaggagaaagttgtaacagggctcacagcagctgcattgacagcttcaatgatggttcctgatgtggctg

SEQ ID NO: 19378 - DNA, 178 bp, Glycine max
  Clone ID: LIB3106-077-P1-K1-F6
ttctccaatcaaattagaattctactttgataatctatgttgactcttaaagcagacgtcttattacaaagattactgggttaaaattccaattctgattagagacaagacaacactaaaatcacctaagatactgcatctaagccctgtccataatataatgtttaagcgcgacgat

SEQ ID NO: 19379 - DNA, 412 bp, Glycine max
  Clone ID: LIB3106-077-P1-K1-F7
aaaaggaatggtgggtttatctcttggagaaacgcatttcatccaaggtggcattgctcaagatcttcgttgtgatggtagaaagagattgacatatcgaccaatctctgttgaaactggagtgattccccagaccaatggttcagcaagagtcagaatgggtgccacagatgttattgccagcgttaaggctgaacttggaaagccaagctcgttgcaacctgacaaaggaaaagtctctatatatattgattgcagttcaacagcagagccagcttttgagggtagagggggtgatgagttggcagcagaactgtcaaatgctcttcaacactgtctcttgggtggtaaaagtggagaaggtgctggaattgacctctcatcgcttattgttgtcgaaggaaaaatttgt

SEQ ID NO: 19380 - DNA, 86 bp, Glycine max
  Clone ID: LIB3106-077-P1-K1-F8
ttgtatgacagatgtggttcctaaatatggtcaacattcatttcaaaaaattattgggggtttgttattttttgagttatttcttc

SEQ ID NO: 19381 - DNA, 207 bp, Glycine max
  Clone ID: LIB3106-077-P1-K1-G1
cgccgagaaaaccctaattcgctcgcagtcacccaagaggcgaatccttaccattgctcgagatgggtgaagaagtgaaggccgtggttccagagtctgttttgaagaagcagaagagagaggaggaatgggcgttggccaagaagcaagacctcgaggctgcgaagaagaagagagccgagagccgcatactcatctacaacagag

SEQ ID NO: 19382 - DNA, 89 bp, Glycine max
  Clone ID: LIB3106-077-P1-K1-G2
ggtttgtctgacagatgtggttcctaaatatggtcaacattcatttcaaaaaattatttggtatttgttattttttgagttatttcttc

SEQ ID NO: 19383 - DNA, 405 bp, Glycine max
  Clone ID: LIB3106-077-P1-K1-G3
aacaacaacaagccttcatccgaagccttcttcaggccactacccctacggcaaccaaagaggaccctcttcaccacaaaggcagtgtcaaactccaaggctcaaatcaatgcatctttgaaggagaaggcagttgcaggactcacagcagcttctgtgacagcatctatagtggttccggaggtggctcatgctgcttgatatgagttctcccctttcctcaagaactttctgctaagcatctttgctggtgggtttgttctagtagccatatttggagccgatattggggtttacaactttgatccggttaagagaacttaaatgccgcatgctccaatgctttttaatttcatatgtctttttcactactcttatatcttcttctttcatgtatgttatatg

SEQ ID NO: 19384 - DNA, 411 bp, Glycine max
  Clone ID: LIB3106-077-P1-K1-G5
cccacgcgtccgcccacgcgtgcgaaaacagctagatagttttggcttattatatacccccgtgaggccccataggccataccactctcaattctggtctcacatttactatatatatgtgccactctttctgtgagcttctcaacagaaagacacaatgggcaaagaaagtagtacttgagttcttctatcccttatcattctttcactctttgcggctgaaatatatggaaatagacaagtgcaagctcttaacaaactgcacaagtccaccaagttgagaggaaattcacaaatcgataggagtgagtttgaggtagaggagcttgcttatgatggcatcgatcactctcaagagggtgtcaaagagaaagatagaattgagagtcttccatgacaaccgcctgtgag

SEQ ID NO: 19385 - DNA, 375 bp, Glycine max
  Clone ID: LIB3106-077-P1-K1-G6
tgcaaccgtgacaaaagttgcgtagcaatagcatactcttactctgattcgttagtgaggaaaaatggcaacaatcatcgccggcaccccaactacatcaatcactcgcacaggtcatgtgctcaaacgacctgctggggcctcattctctaccgttcttggattgccagcaatggccaaggccgagagagtgaggtgctccatggaagaaaagccttcaagcatctcaaacctatggatggtggcatccctgttagcagctgcagctttcgcaaccatgtcaagcccagcagccatggctttggttgatgagagactcaacactgaaggaactggtcttgcctttgggcttagcaacaaccttcttggttggat

SEQ ID NO: 19386 - DNA, 410 bp, Glycine max
  Clone ID: LIB3106-077-P1-K1-D3
cccacgcgtccggccaaagagagtgagtgagtagggtttcaaattccaatcggaagaaatcggaatcggaaaaaatgggaggtggcggcggcgatcacggccatggacacggacacggtgatttcaggaacaaggtctggagtatgagcggtggcccttactgtcgcccaaagcactggaagcgcaacaccgccattgccatgttcggcgttgtcctcatctgcatccccatcgctatgaaatccgctgaactcgagcaacgaccacatcaccctgttcgccccatcccttctcaactctggtgcaagaaccttggaactaaagactataatgataatgatccatgattcatcaattgcatcactggtgttcacatcatgtcaagcaacatttatttgttaaatgctgag

SEQ ID NO: 19387 - DNA, 416 bp, Glycine max
  unsure at all n locations
  Clone ID: LIB3106-077-P1-K1-D4
cccacgcgtccgttcactttctccttattcttcattagatcctcagtgggatcgaccctcatttctgtgaactgagatggctggaggtgttattcggcagttatttaggaggaaactccaatctcattctcctaattcttcttttaagtcatccattatcacaaagaaagatggtgctgactctactggcagcaactccttaagagtgcttgcttttgttggagctggtgtgtcagggtttttaggttttgcaacaacagcatttgctgatgaagctgagcatggcctggcatgtccaagctatccatggcctcacaagggcatccttagttcatatgatcatgcntcgattcgtcgtggtcatcaagtttatcaagaagtctgtgcctcttgtcattctatggccttgatatcat

SEQ ID NO: 19388 - DNA, 415 bp, Glycine max
  Clone ID: LIB3106-077-P1-K1-D5
ctctgccactgccataactcactcactagcttcttctctgttctcaccaatggcatcaacggtatcagcaatggccatgatcaacgccaaatgcgtcaacccaaagttccccaatcccaccaagctcgcaccatcaaaaccctcccttcagatcaaccttccaaagggcctcatagcctcacccgaaagcactaaactttcccccgcgacagcaatcgcgggagcaatattcacaaccctcggaacctgcgacgccgcattcgctgttcaacaaatagccgacatagcagaaggcgacaaccgcggactggcactgttgctgcccataatcccagcaatagggtgggttctgttcaacattctgcagccggcgctgaaccagctgaaccgaatgcgcagcaccaaaggcgtgatc

SEQ ID NO: 19389 - DNA, 394 bp, Glycine max
  Clone ID: LIB3106-077-P1-K1-D6
accactcgttcgtccacgcgtgcgagctctcaaccaaagatgcagaacgaggaaggacagatcactgagctttacattcctaggaagtgctccgccacaaacagattgattaccgctaaggaccatgcttcggttcacatcaacattgggcatgtggatgagaatggcgtctacaatggccatttctccacttttgccctctgcggattcatccgtgctcagggtgatgctgacagtgctctagaccgcttgtggcagaagaagaaagttgaagttaagcaacagtagacacccatgatagtttggtacttcgttatgtattaatttctactcttgctagagatatttgagtactatgattgtcgctttgagcacaaatactcattctgaattt

SEQ ID NO: 19390 - DNA, 185 bp, Glycine max
  Clone ID: LIB3106-077-P1-K1-D7
attgtctcaagcaaccatggcaatggcaacccaagcctctctcttaaccccacccctctgcggtctcaaagccagcgaccgcgcctccgtgccatggaagcaaaactccagcctctccttcttcagcccgaagcccctcaagttctccagaacaatcagagcagcagccgccgacgagaccacag

SEQ ID NO: 19391 - DNA, 416 bp, Glycine max
  Clone ID: LIB3106-077-P1-K1-D8
ctcctcctagaatataaattcacgagagaaacacgaaaatctttcgattccggcgagaaaaaaacttggacggtgaaattggaaggttttccgggatcccaaggccgaatcttggttcaatttacgaaaagagaagagagaggaacaacaacacccgttgttgaatcttcaagctgaatcaaatcatatagagagagaaagagagagacccggataggaaaatagcgtttagagagagaaaggtgaagtgaggttgtttaaagtttgggtcttggtgggtgaaagggaaagatgacggatgtggtactgcatatatacgatgtgacgaatagtggatccgagaaaaccatacaacaccattgttcagatcaacaagatcttcaaggatgggattggtcttggtggcattttccaca

SEQ ID NO: 19392 - DNA, 322 bp, Glycine max
  Clone ID: LIB3106-077-P1-K1-E4
caacattaagctctatgtccgccgtgtctttattatggacaactgtgaggagttgattcgtgagtatttgggctttgtcaagggtattgttgattctgaagatctcccactcaacatttcaagagaaatgttgcaacagaacaagatcttgaaggtcatccgtaagaacttggtcaagaagtgccttgagctcttctttgaaattgcagagaacaaggaggattacaacaagttctatgaggctttctctaagaacttaaagcttggtatccatgaggattcccagaacaagggaaagattgctgaattgctcacgtaccac

SEQ ID NO: 19393 - DNA, 106 bp, Glycine max
  Clone ID: LIB3106-077-P1-K1-E5
acgcgtccgggccttctctagtttggttgaatcttattatcatgtgcacttcaatttgaatgaattcgaataatagtttcctcgctttgtaaaatacataattaaa

SEQ ID NO: 19394 - DNA, 419 bp, Glycine max
  Clone ID: LIB3106-077-P1-K1-E6
cttaatccaaatatcatcatctgaaacgatggctgccatggcaaccacaaccctctgtgggaacccgaaactctcatttttccacggaaagcccgttacatattcttcccgcgtcgcacccaccaccaagttattctcatccaaacaaggcacaatctccatgtgcctaacccaacccccatacgacctccaatccttcaaattccaacccatcaaagaatccatcgtctcacgcgaaatgattgtcaccggcatggaggtggcagaaattgatggctccccaaggatgggtccgacgtttggggcgatgatgatatcagggcagaaggcggctcatttggcgttgaaggcgttggggaggaacaatgcaattgatggaacgtgtggagttggaagggaagaaccccaccttattttcg

SEQ ID NO: 19395 - DNA, 306 bp, Glycine max
  Clone ID: LIB3106-077-P1-K1-E7
gctgttcctgcgcgtgaacaagcctcaggtaagccaaagccatggttaagcataacaatgttatccccaacggacacttccgtaagcactggcagaactatgtgaagacctggttcaatcagccagcacggaagacaagaagacggttggctcgtcagaagaaagctgtgaagattttccccagacctacagctggacctcttagacccattgtacatggtcaaactttgaaatacaacatgaaagtgagagctggaaggggattttcccttgaagaactcaaggcagcagggattcccaaaaagc

SEQ ID NO: 19396 - DNA, 379 bp, Glycine max
  Clone ID: LIB3106-077-P1-K1-D1
attcaaggtggttcgatatcattcactggttatagattctgaatcacttcctgcagagctgattccaatagcatggacctcttccactagcacacttccatttattgggtccaaagattttggcaagtccaatactcatgaagctcagccagatcaaagcatttccattgatcctcttttagctaaagtaggaaatggaagttcaaaccattttgattatggaaaaactagaagtgcaagagttcttatgggaatcaggcattctacaagaccacactatggtgtgcacgtgtcaagtgcataagtgatctgcttataatatttcccttgggcttatatttatttattaagttggtaaatatgttcaactcaacaattt

SEQ ID NO: 19397 - DNA, 408 bp, Glycine max
  Clone ID: LIB3106-077-P1-K1-E8
cctgagaaggagtttttgaagactattactggcaagaaggagaccctcattgaccttacagttatagaaatcttgtcaaggcacgcatctgatgagttctaccttgggcagagagatggtggtgactactggacttctgatgccggtccattagaggcatttaagaggttcggaaagaagcttgaagagattgaaaagaagcttatagagaagaacaaagatgagacattgagaaaccgctatgggccagctaaaatgccttacactctgctctatacttctagtgaggagggattgactttcagaggaattcccaacagtatctctatctaaggaccctatggttgcttaagtactgttcctggttttaaataaatgtgaaattgaaggaaccaaattccttaatca

SEQ ID NO: 19398 - DNA, 349 bp, Glycine max
  Clone ID: LIB3106-077-P1-K1-B2
cccacgcgtccggcaaattctatgttggttttgaaaaaagattcaatttttatgcaaaagtgttgttcctttaggatttcagcatcagtggctacagcctgcatgcttcacggtgcaagcagccggcccgcaaccgcccgcaaatcctctggcctttccggaaccgtccgcattcccggcgacaagtcgatctcccaccggtccttcatgttcggcggtctcgcgagcggtgaaacgcgcatcaccggccttctggaaggcgaggacgtcatcaatacgggcaaggccatgcaagccatgggcgccaggatccgtaaggaaagcgacacctggatcatcgatggcgtcg

SEQ ID NO: 19399 - DNA, 110 bp, Glycine max
  Clone ID: LIB3106-077-P1-K1-B3
agtgtcaattgtctgttcagtttttacaacaaggtcaacctctctgtgcactataagctggagcaattgattctaatctgaaacttatccttggccccacacacattcca

SEQ ID NO: 19400 - DNA, 401 bp, Glycine max
  Clone ID: LIB3106-077-P1-K1-B4
taatttatctaacccaccacctacacaactttctcttacaacaacaaccactcctcttctgtgtggacccaaaaacacgctttccttacaccccctttttatcttccttatacaaactcattaaaatgtttcgagataaaaacaaaacataaaaaaaattcacttaattattaaatttttttatgactttccactaccatcttcatcacaagataaccttccctcctttcaccgatgatcaaaatcttaaccataatagatacattcaacatatgcttccaccttctacatttctctacaactttaacgtttacccctctttaacataaatttccttctcaatctaaaaaatcttttttttttatccctaacccagaaccaattttcaaatcccatttttt

SEQ ID NO: 19401 - DNA, 226 bp, Glycine max
  Clone ID: LIB3106-077-P1-K1-B6
ctcctccgaaacatacaaaaaattctatgttggttttgaaaaaaagaatcaattcttatgcaaaaggggggttcctttaagatttcagcattagtggctacagcctgcatgcttcacggtgcaagcagccggtccgtaaccgtccgcaaatcctctggcctttgcggaaccgttcgcattcccggcgacaagtcgatctcccaccggtccttcatgttcagcggtc

SEQ ID NO: 19402 - DNA, 203 bp, Glycine max
  unsure at all n locations
  Clone ID: LIB3106-077-P1-K1-B7
ccacgcgtncgtgagctataactagtttttgtgaggagaatatgaaactgtttgttgctttgttgctgcagtagttttggtagcatggccatgccatggcgcatgctaccaaaggttccctctccgaatgaaaactggctatggtgagcgttcttcggaggtaaaatgcgcaagttttatgcttgctgtggaagcacacaaca

SEQ ID NO: 19403 - DNA, 416 bp, Glycine max
  Clone ID: LIB3106-077-P1-K1-B8
ctttctcccccactccctagtcagctagctcctgcaacaacaaccactcctcttcttttgctgacccaaatccacgcttcccttacaccgcgtttggatctccgttatacaaactcattaaaatgtcgcgagagaaaaacaaaacagaaaaaaaattcagttgattattaaattttgttatggctttccacgaccatctccagcacgagatagcgttccagcgtttcacggaggagcaagagttgaacgagaatagagacatgcaacagaggctcccacctccgtcatggctcaacaacgttaacgtcaacgcgcgtcaacagaatttactcgacagcgagaagagcgtggatcggaaccgaagcgagagcaattgcgaatccgaggatttgagggaatacaaagcggacattcta

SEQ ID NO: 19404 - DNA, 108 bp, Glycine max
  unsure at all n locations
  Clone ID: LIB3106-077-P1-K1-C1
tcgcccacgcgtncggtgagctataagctagtttatcgtgaggagaatatgaagttgtttgttgtctttgttgctgcagtagttttggtagcatggccatgccatggc

SEQ ID NO: 19405 - DNA, 218 bp, Glycine max
  Clone ID: LIB3106-077-P1-K1-C2
cattattcaatggccaccacagcagctctattcggaaccatggcgagcacctccttcatgaggaagcaacctatgacgaccaagagccttatgacattccccaacgctctttttggtctgaaaggtggacgaggaggccgtgcatcttgcatgggctcgcacaaggtgaacctcataaccccataacgagaactggagtttgcaaacccagatgatgt

SEQ ID NO: 19406 - DNA, 303 bp, Glycine max
  Clone ID: LIB3106-077-P1-K1-C3
gaacaagaacataagggaaccacagcggcgtgttacagaagaacaagcagagaatgggtcgagtgagaacgaagacggtgaagaaatcctctcggcaggtgatagagcgtcactactcgcgcatgaccctggacttccacacgaacaagaagcttctggaggaagtggcgataatcccgtcgaagaggctaaagaacaagatcgcggggttctcgacgcacctgatgaagcgcattcaaaaaggccctgtgcgcggcatctccctcaagctccaagaagaggagcgcgagcgccgcatggact

SEQ ID NO: 19407 - DNA, 151 bp, Glycine max
  Clone ID: LIB3106-077-P1-K1-C4
gctgaaacgattgtgggcaatttcatgaatcgtataactacctacaaatttaattatgaaactgaatttgcgtgatttatatactgtatattaaaactattcagtggttgctaaatgagtttatgaagcagaactttctgttgctcattct

SEQ ID NO: 19408 - DNA, 403 bp, Glycine max
  Clone ID: LIB3106-077-P1-K1-C5
cccacgcgtccgtccacgcgtccggtggaccactctctggtcaagatcaaaccatacagcgtctctctcaatctaaatcgtcaagggaccatgcaaacatctttaaccagaaggcctgtaacaattcaagctacgtatagtgatggtggaaggcccagcagtgctagtgtattcgttggtggggttctcttgggaggattaatagttggtactcttggttgcgtgtatgcacctcagatcagcaaggccctagctggagctgacaggaaggagttaatgagaaaattgccaaagtttatatatgatgaagaaaaggctttagagaaaacccggaaagtactggctgagaagattgaacaactgaatgctgccatagatgatgtttctgctcagctaaggtcag

SEQ ID NO: 19409 - DNA, 238 bp, Glycine max
  Clone ID: LIB3106-077-P1-K1-A8
acgcgtccggcaaattctatgttggttttgaaaaaagattcaatttttatgcaaaagtgtggttcctttaggatttcagcatcagtggctacagcctgcatgcttcacggtgcaagcagccggtccgcaaccgcccgcaaatgctctggcctttccggaaccgtccgcattcccggcgacaagtcgatctcccaccggtccttcatgttcggcggtctcgcgagcggtgaaacgcgca

SEQ ID NO: 19410 - DNA, 224 bp, Glycine max
  Clone ID: LIB3106-077-P1-K1-C7
tcgcccacgcgtccgactctctctcaccaaattcttcctagaacgaaaaaaaaaaaagaagagcggttttccctcaccaaagaagaagatgcaaacaatggccgatcaacttaccgatgaacagatctccgagttcaaggaagccttcagcttgttcgacaaggacggcgatggttgcatcacaaccaaggagcttggaaccggtatgccttcattggggcaaa

SEQ ID NO: 19411 - DNA, 421 bp, Glycine max
  Clone ID: LIB3106-077-P1-K1-C8
ctctgcgcagcaccctacctgtgctttatgatgcatatctccgcatgacccttaccggcctgaccatcacccttgaggtggtaagctctgacaaccatcgacatcgttaaggccaagatccaggacaaggaaggaattccccctgatcagcatcgtctgatcttacgcggaaagcagctcgaggacggccgtaccctcgccgactacaacatccagaaggagtcaacccttcaccttgtccttcgtctgcgttgtggcatgcagatcttcgtcaagactctgactggcaaaaccatatccctagaggtcgaaagctctgacaccattgacaacgtctaggccaagatccacgacaaggagggaatccccccagaccatcaacgtctgatcttcgacggaaagcaacttgaggacggtcgca

SEQ ID NO: 19412 - DNA, 441 bp, Glycine max
  Clone ID: LIB3106-076-Q1-K1-H2
gcgatttcgatctcgcatagcattctacaatggccactattccagttaaccccaagccttggttgaacaatttgactgggaagcccgtaattgtgaaactcaagtggggaatggagtacaagggctatctcgtttccgttgattcctacatgaacttgcagctggccaacactgaagagtacattgagggacagtttactggaaatttgggagagattttaatcagatgtaacaatgttctctaccttcgaggagtaccggaggatgaggaaatcgaagatgttgcagaagactagatagtgataaaagctgctaatggctatgacataaaatgaactcgaattttctactgtttttgtatcttaacttaaatgtaggtttttttgtagttgtgtagagatttgaaatgatgcactcgcttgtgtatagggtgcctatgtt

SEQ ID NO: 19413 - DNA, 450 bp, Glycine max
  Clone ID: LIB3106-076-Q1-K1-H3
cccacgcgtccgttttaattatactcatagtaatcaatctgggagtattgatcagtgttccagaccttcagaaggagtaatagagagcggatcatctgcttctgctgtctattccaatttaaagtctgatatttcaatgtcagatggagaaatatgcttggacaagctatcaatcagagaactgcatgaactgtttaaggtaacgtttggtcgggaaactactgtgaaagacaaacagtggctgaaaaggaggattgccatgagtttaaccaactcatgtgatgtttcagctacaactttcattattaaagataacaaaatagttagaaaatttgaagaagacagttctggaaatatgaatgctggatctttaatctcttcggaaaatatgactgaagaagatgtcaactttaaggattcatctgctgtagatgcttgtggaattgatga

SEQ ID NO: 19414 - DNA, 442 bp, Glycine max
  Clone ID: LIB3106-076-Q1-K1-H4
cttctcagcagcttcggctagggttcagaaacgaaaaagggttcggtgttctgttcgcgatgagagcgcaagtggaagaagaagcgtatgaggaggttgaagaggaagcgccgaaagatgagacagagatccaagtagtgcgttaaacctagtttgtttctgttgcttttacaattgcttatgttgtcgaatgggacacccagttgttagtggcactggtttctcctttttgatgtttgatacattttgttggattcaagtagtttatgttcgtcttatgttattagctcaaaacaatgttgttactgcttttgctaatcaacatgatctcctatttgcatctctgattttcttagggttattataatttcacattatatctgcttcaattttttatgatctaattgatattcttaattccaaaaaaaaaaataaaagggcg

SEQ ID NO: 19415 - DNA, 446 bp, Glycine max
  Clone ID: LIB3106-076-Q1-K1-H5
gtccacgggcggggatgatcttttaccggatgggcccgaagccgccgaagaaggggcagggggagaacgcggtttatgatttcgaggacaagatcaactttgcggtgttcccttcgctgcagggtgggccccacaaccaccagatcggggctcttgccgtggcgctgaagcaggccgcgtcgcccgggtttaaggcctacgccaagcaggttaaggccaacgccgttgcgcttgggaattacttgatggggaaagggtacagtcttgtcactggaggcacggagaaccatcttgtcttgtgggatctcagacctcttggattgactgggaataaggtggagaaactctgtgatctctgcaacattactgttaataagaacgcagtttttggtgatagcagtgccttggcccccggtggagtgcgaattgcggcccctgccatgact

SEQ ID NO: 19416 - DNA, 450 bp, Glycine max
  Clone ID: LIB3106-076-Q1-K1-H6
gattgacattatcagggccttaagaactttacaaagtctgcccgggaactcatgacccgggtgcagaagattgatggtgacaattaccctgagactctttgccaaatgtttattataaatgctgggcctggatttaggctgttgtggagcactgtcaagtcttttctcgatcccaaaacaacttctaagattcatgttcttggaaacaagtatcaaagcaaattgcttgaagttatagatgccagtgagttgccagaatttctgggaggtacctgcacttgtgaagatcagggaggttgccttagatctgataaagggccctggaaaaaccctgatatattcaagatggttctcaatggtggagcatggcggtcaaagcaagttgtaaaagttcttaacaatgaaagaaaggttattgtgtatgccaagccaggatacccaacggtaaaa

SEQ ID NO: 19417 - DNA, 446 bp, Glycine max
  Clone ID: LIB3106-076-Q1-K1-H7
tgggaatcgatcttaaggctgggggtaagagcaaaaagaccaaaagaacagcaccaaaatgcaatgacatctacctcaaattacttgtcaagctttatcggttccttgttcgaaggactggcagcaatttcaatgctgttatactcaagcgcttgttcatgagcaaggttaacaagcctccaatttctttgtcaaggttaattaagtatacaaaggggaaggaggataaaattgctgtaatagtggggactgtaactgatgatatcagagtatatgaagttccagcattgaaaattacagcactcaagtttactgagagagcacgtgcaagaatagaaaaggctggtggtgaatgcttgacatttgatgagcttgcccttagggctcctttgggacagaatacggtccttcttagaggccccaagaatgctcgggaagctgtgaaa

SEQ ID NO: 19418 - DNA, 452 bp, Glycine max
  Clone ID: LIB3106-076-Q1-K1-H8
ataggcccaagagcaaactaagaagattttgagcacaatggcatccacacaatgcttcttgcaccaccatgccctcaccactccaaccagagcttcatcacagcgcttagttgtgagcaccaaaccaaaccacattgtttgcaaggcacaaaagcaggttgtccaagagggtgaggacactactaacattgtctctcgcaggttggccctcactgttctcattggtgctgctgctgttggctctaaggttgcacctgctgatgctgcctatggagaagctgccaatgtgtttggaaagccaaagacaaacactgacttccttccatacaatggggatggattcaaactctcaattccctcaaagtggaacccaagcaaagaggttgagtacccaggtcaggttcttagatatgaggacaattttgactcaaccagcaatgttgctgtcatgg

SEQ ID NO: 19419 - DNA, 406 bp, Glycine max
  Clone ID: LIB3106-076-Q1-K1-H9
tcgatttgctcccagtacagagcttaaccgagcttcacaaagatgaatcgggaaaagttgatgaagatggccggttcggttagaactgggggaaagggtaccatgagaagaaagaagaaggctgtccacaagacaacaaccacagatgacaaaaggcttcagagcaccctgaagagaataggggtgaatgccatcccggctattgaggaggtcaatatctttaaggatgacgtagttatccagtttctaaatcccaaagttcaagcatccattgctgctaatacttgggttgtcagtggttctccacaaacaaagaagttgcaagatatactccctagcattatccaccaattaggaccagataacttagaaaacctgaagaagctagccgagcaattccagaagc

SEQ ID NO: 19420 - DNA, 254 bp, Glycine max
  Clone ID: LIB3106-077-P1-K1-A1
gctctgcatggttgtggtgagtgcacccatggcacatgcagctatcacgtgcgggcaggtgacgagtagcctggccaattgcatcggttacctccagaagggaggaacgccgtcgtcgggatgctgcaacggagtgaagagcctcaatgccgccgtcaagaccaccgtcgaccgccagacggcgtgcaactgccttaagtcggccgccagccaaatctccggctttaacgccaacaacgccgccttgctccccg

SEQ ID NO: 19421 - DNA, 230 bp, Glycine max
  Clone ID: LIB3106-077-P1-K1-A3
cccacgcgttcgcacaaacacctcgtccctctcaatgcatctagcaatggcggccaacgctgtcgtttcaccgtcgccgttccgacctcatccctttctccggtcatccttctccggcgtcttcgtcaagctcactccccaatccatatcgctttcacgctccaagcccctcaccgtcttcgccgccaccaataaggccgtctccgtcctcaaggtgacctccgccgtct

SEQ ID NO: 19422 - DNA, 391 bp, Glycine max
  Clone ID: LIB3106-077-P1-K1-A4
atgagatacaaattcatgtgtaatctccgttgatttgaatgagcatcattgatgaaaggtggttgctttgttgcagaccataaaactgaataatttctgcatgagaattgctgtggcaacttgggttgtaatattagttccttggtctcgttccacaaatgactgtgattataagaaactcacctctagtggcagactagataaagaaactaattagtaatcaattgttttttatattcctttcccgggaaagaattttatctaaaatatttcacttattttcccggtataatttttaagggaataacctcctaaactcgcgccactattttaacccttgcgatttgtgaaagcttttgatattatatattaaacccctgttatggtagtt

SEQ ID NO: 19423 - DNA, 231 bp, Glycine max
  Clone ID: LIB3106-077-P1-K1-A5
tcgtccactcgttcgctacaagaaggaaacgttatcacaaattggattgttcctccgaacagtgaaccctcacctaacaatcagaacccaggatttggtgaaacgatgaacagtgataggaaaattggggttgccttggacttttccaaaggaagcaaaatcgctctgaaatgggctattgacaatcttatcagcaacggtgacactctctacatcgtccacaccaagcct

SEQ ID NO: 19424 - DNA, 410 bp, Glycine max
  Clone ID: LIB3106-077-P1-K1-A6
cccacgcgtccgatttcagtgagtgatcggtgttcacttgatctcatcataatcgtcggcgtcaattgaagaagatgccgatcagaaacatcgccgtcggaaggcctgaagaggcgactcaccccgacacgttgaaggcggctttggctgagttcatctcaaccttcatcttcgtgttcgccggctcaggctccggcatcgcctacaacaagctcaccgacaacggcgctgccacccctgccggcctcatctccgccttcatcgcccatgcattcgccctcttcgtcgccgtctccgtcggcgccaacatcttcggcggccacgtcaaccccgccgtcaccttcggcgccttcgtcggcggcaacatcaccttcctccgcggcatcgtctacgtcatcggccagctcctc

SEQ ID NO: 19425 - DNA, 257 bp, Glycine max
  Clone ID: LIB3106-077-P1-K1-A7
cccacgcgttcgcccacgcgttcgcactacaataacataacccttcgaagtcgtcgtggatctctcctcgttcgcatcttcaccctttccctgtctctcagaaagatgaaggtggtcgctgcgtatctgctcgccgtcctcggtggcaacaacaccccctccgccgatgacatcaaggaaatcctcggctccgttggaatagaggcagatgaagataggattgaatcgttcttgtctgaagttaagggtaaggatat

SEQ ID NO: 19426 - DNA, 417 bp, Glycine max
  unsure at all n locations
  Clone ID: LIB3106-076-Q1-K1-H12
attaatttcaggtcaggatcagtttgtctggatgttatcaatcaaacctggagccccatgttcgatcttgttaatgtgtttgaggtgtttctacctcaacttctgctgtatcccaatccatcagaccccttgaatggagaagctgccgctttaatgatgcgtgaccgaccaagttacgaacaaagggttaaagagtactgtgagaagtatgctaaacccgaagacatatgggaagccacagaagagaaatccagtgatgaggagatgagtgaagatgaatatgattctagtgatgaacagggttgtggtaaagcagacccctagctttcatgcatgntcctgtctaactntgcatttatctgtacatgatgttctctctagttctgtaatcacctaccacatgtgagcttatatgga

SEQ ID NO: 19427 - DNA, 297 bp, Glycine max
  Clone ID: LIB3106-076-Q1-K1-F8
tcctcaattttccccagaaaaaggttctattttacattgggccttgggctgaaataagaacctttaattctgtgagggaattgcatgcccagattatcaaaatgccaaaaaagaggaacttggttacaattgattgaagcattattagaaactactttcaatttggagactttgaatcaacaacaaaagtattttttgtgggttttgcaaagaactaccttctattgaactcttttcttgaagagtttgcaagtttttgaagtgaattcacattaaattcttgccgtcttaaagaat

SEQ ID NO: 19428 - DNA, 377 bp, Glycine max
  Clone ID: LIB3106-076-Q1-K1-F9
cccacgcgtccgctggataatctactggtgtatctattcgagctctatatggtgctagacgagtcgtacagctagcgactcagctagctacacacgctataggagcttcaacagtcgctgccacttcacgtcctacaaatctggacctattgaataacttggcaactgactaggctattgactactcagaagataaccctgaagatttgccagaaacatatgatgccgtttatgatgccatcaggccatgtgacacggctgataacgctatcaaagacggctgaagcaccgtggctcttacacgagctaggacaacagctggcttcacattcgaagttactagcaatggagctcttctgacgaaactaaacacttac

SEQ ID NO: 19429 - DNA, 450 bp, Glycine max
  Clone ID: LIB3106-076-Q1-K1-G1
cccacgcgtccgcccacgcgtccgctccaaatacctaatatggagtttcacattcttcccgtcattacttttctcatgcttgttgtggcaactaatgctgatgctgcattacctcctgcattttactggaagtccaagcttcctaccacaccaatgccgaaagccatcactgatttgctacaacctgattggaaggaagagaaagacacctctgtggatgtagggaaaggtggagtaaatgttggtgtagaaaagggaaaccaaggaccaggagatggcactgatgttaatgttggtggtggagacggtggagtgaatgtgcacacaggaccaaagggtaagccagttcacgttggagtgggcccacattctccatttgattacaactatgcagccagcgagacccaattacatgatgaccccaatgtggcactcttcttcttggaaaag

SEQ ID NO: 19430 - DNA, 310 bp, Glycine max
  unsure at all n locations
  Clone ID: LIB3106-076-Q1-K1-G10
ccaaagttatggataccctctctcagcttatccttctttgcctttgcctttccttctttcgccttttcgcttcccgtgctttgctgtttcaggggttcaactgggaatcaagtaagaaaggtggttggtacaactcgctgaagaacactattcctgaccttgcaaatgctggaattacacatgtttggctcccttctncctctcaatctgtttcacctgaaggttatcttccaggaaggctatatgatctngatgcatcaaagtatggaacaaaggatcaattgaagtccttaatgctgctttcatgaca

SEQ ID NO: 19431 - DNA, 435 bp, Glycine max
  Clone ID: LIB3106-076-Q1-K1-G11
ttgatcgagataactagaaacagtgtgatgaaaatgaaggtccttgttttcttcgttgctgcaattttggtagcatggcaatgccatgcgtacgatatgttccctctccgaatgaacactggctatggtgcccgtactccggaggtgaaatgcgcaagttggaagcttgctgtggaagcacacaacatctttggctttgagaccattcctgaagagtgcgttgaagcaacaaaggaatacatccatggcgaacaatatagatcagactccaaaacagttaaccaacaagcttacttttatgccagagacctcgaagtccatcccaaggacacatttgtgttcagtatagatggcaccgtactctctaatattccatactacataaaacatggatatggcgtggagaaatttaactcgaccctgtatgatgaatgg

SEQ ID NO: 19432 - DNA, 322 bp, Glycine max
  Clone ID: LIB3106-076-Q1-K1-G12
cctaagcaatttaaaaccgagtcttttggcaatcatgaactgtgaatgggttttggccagttaataatgcattaccatgcattgtgcctgaagatttaatgcatctaatcactagcatttccttgattaatacagttctatggcatttccaaattgaatttgatctattgtactgcattatcctttgaggaagacactgttatgggttatcctttggttgaaaccgttggattgggcacaaaacagacggttccttcagaatccaatcgattaaccagttgtctacaatttggcacttgccatttcatttacattggaatgc

SEQ ID NO: 19433 - DNA, 448 bp, Glycine max
  Clone ID: LIB3106-076-Q1-K1-G2
cccacgcgtccgcttggaatgtcagaagctcagcttgtttcttctcctcaattttccccacgaaaaatgttctccattctttcacccttttggtgagataagaaccttgaattctgtgagggaattgcatgcccagattatcaaaatgccaaaaaagaggaacttggttacaatggatggaagcatgatgagaaactacttgcaatttggagactttgagtcagcaacaaaggtattttttgtgggttttgcaaggaactaccttctatggaactcttttcttgaggagtttgcaagttttggaggtgattcacatgagattctggcggtcttcaaggaattgcatgataaaggagtgaaatttgacagtaaagctctcactgttgttctgaaaatttgtctggctttaatggagttgtggcttgggatggaagttcatgcttgtctg

SEQ ID NO: 19434 - DNA, 187 bp, Glycine max
  Clone ID: LIB3106-076-Q1-K1-G3
ccctacaaccagccggagaagttgcaactgcgaacagaacaacttcaaaatgccaaaatcgaagagaaatagacaagttacgctttcaaagacgaagaaaaaggggagagaccacaaagagaccatagtgaacggaataaaagatgctgcaaaaaagtacgggcacgtgtacctgttctcgttcgag

SEQ ID NO: 19435 - DNA, 390 bp, Glycine max
  Clone ID: LIB3106-076-Q1-K1-G4
ctagctcgcactctctctacgcacgcctcatcatcccttctctgctccattcattatgtcgccgtcgttggatcttccccccaagggtggcttcagttttgatctatgccgaagaaacgcaatgcttcaaaacaagggcctcaaagccccaacctttctcaaaactggcaccactattgtcggtttagttttccaggatggtgtcattcttggggctgatactagggcaactgaaggacctatagtggctgataaaaactgtgagaaaattcattatatggcacccaacatatattgctgtggagcaagctcagctgctgatacagaggctgttacagacatggttagctcacagcttcaactacatctttaccatactggtttgtaatc

SEQ ID NO: 19436 - DNA, 370 bp, Glycine max
  Clone ID: LIB3106-076-Q1-K1-G5
agaaatataactaatattctttagtataatcaaaaagaatattaaattcaaatagattttggatagaaaaaagacttaaaaaggaggatttgaaatgcgagatctaaaaacatatctttccgtggcaccagtagtaagtactctatggttcggggctttggcgggtctcttgatagagatcaatcgtttttttccagatgcattgatattcccttttttttcattctagttattgacacggaaaggggtgaagaagattatagatccaattaagtattaaatatatgtaattaatatgtaattaatctcctcttctttatttcgtcttttatttcttcttttttttacaattgtaatagaataagttagg

SEQ ID NO: 19437 - DNA, 440 bp, Glycine max
  Clone ID: LIB3106-076-Q1-K1-G6
aatactctcaattagaaaacatccttgatataatagtataattattaaaaaaggtaacaatctttctcctgtttgtgattggataagcaatatatggaatacatgcaagtactattatttatatccacgttggtcggtaacttgtttttcaatttcaggtggtcgtgtggtgcaacgcagtcctttttctatttgtatgtttgtatgagactgagaaagatagagagatagtgtgtgcagaagatgtggctattcggcagaaaaggggcttctgggttttcatcatcatccactgcagagcaagtcactgaaggaattgatggaactggtttcactgccattgtcacaggggcatccagtggtattggcactgagactacgcgtgttcttgctttgcgtggtgtccatgtgattatgggtgtgagaaatatgcttgctgc

SEQ ID NO: 19438 - DNA, 437 bp, Glycine max
  Clone ID: LIB3106-076-Q1-K1-G7
atcacgcgatcggctcaacaacacaacagcttacatctcataccttacccttccagaaagccctcattatcgtatctaattgtgagaatctacaattcttgtctaaatcattcgaccactataaatgtatctaagccgtagaaattgaataaaggcccaaatacaaatatatcagacgctattactgagactactgcgtaatctgaagatccaaaaaaactcttatcaactgacacataaatttgcaccacaaggaagagtattaagaagcaagagctgttatagatcccgaagcacatgcattgaaatccaacactttcaaggaatgtggggccacttttaaaatacacgcctatttggtgcatcacatgcaaaggcatctactagatgaaagtaatctataagtttctaaaatcattgtaaaattatgggtcaat

SEQ ID NO: 19439 - DNA, 443 bp, Glycine max
  Clone ID: LIB3106-076-Q1-K1-G8
ctctaatcactctagctgttgcaaatttctactatttttcaatggcttctgcagatgttgagttccgttgctttgttggtgggcttgcttgggtcaccggcaacgatgccctcgagaaagccttttcaatctacggcgacatcgttgaatcgaaggttatcaacgaccgtgagactggaaggtccagaggattcggatttgtgaccttcgcctcagagcagtcaatgaaagatgcgatcgcaggaatgaacggccaggaccttgacggccgtaacatcactgtcaacgaagctcagacccgcgccagccgtggtggtggtggaggctgtggtttcggaagtggtggtggatacaaccgcggtagcggtggatatggtggtggtggtggcggctgctgatacggtggtcgtcgtgaaggttgatacaaccgtaatggtgggggt

SEQ ID NO: 19440 - DNA, 450 bp, Glycine max
  Clone ID: LIB3106-076-Q1-K1-H1
cgatgctattcgtggaaaggttgtccaactaatgaggctagattgcaagcgcgctgttccgttgttaatccagaatagggacttaataagtccacctgaagttgtgaatcaacttctaaatgcagatgataagagtgattgtagatattttttacatttatatctccactcattatttgaagtaaatcctcatgctgggaaagacttccatgatatgcaggtagaactctatgcggactatgatccaaagatgctgctaccttttctccgtagcagtcaacactacacccttgagaaggcttacgaaatttgcattaaaagagacctattgagggagcaagtcttcatcctaggaaggatgggaaactcgaaacaagccctagctgttattataaacaaattgggggatatagaggaggccgtagagtttgtcaccatgcagcatgatga

SEQ ID NO: 19441 - DNA, 376 bp, Glycine max
  unsure at all n locations
  Clone ID: LIB3106-076-Q1-K1-H10
ctctatgaaactataagggtcaacaactggtttagtggctggaactatctggggtactgtagttgccacctggtatgatgtcccccgtgtcgagagaaatgttgctcttccagggctgattaagactatcaggatgatgggcaactatggtttgacctttgctgccataggaggagtctacataggtgtagagcagttggtgcagaactataggatgaagagggatttagtcaatggagctgttggcggatttgttgcaagtgcaactattctgggttacagaggaaggagcatcaaaactgcactttctgctggatcagcattggcattcacatctgcattccntgatttcngtgatcagacattataacatgat

SEQ ID NO: 19442 - DNA, 392 bp, Glycine max
  unsure at all n locations
  Clone ID: LIB3106-076-Q1-K1-H11
ccgaagtgaacagacactaactcttttctttgcagttgcagttgctgcaatgcctacaaagctattctcccaactacatcttctccatcccctcctccccatgaagccccgcactctcccccttctctccagacccttcttcttcccttcctccaagttcctccgaacctcaccgtttaaggttcgcgccttctcctnccgggagaaggttcccctccgaccctccaagagcctcatcgacgacgaggccgacctcatcaactgggttgacgaattgcgctccggcgggcccgatgaaatgcggtctggccggggcaatgaagtgcggaccggtcggagagaccggtttgccgattctggccggttcagccgcgatgacagggaacgcgaat

SEQ ID NO: 19443 - DNA, 260 bp, Glycine max
  Clone ID: LIB3106-076-Q1-K1-E3
cccacgcgtccgaaaaaaaaaaaataaaaattaaaaaataaaaaaaaaaaaaaaaaaaaagaggactggataaaaatttcctagagtccttgcaaatacatataaacaatacaatattatatataatgatacctaaattatggatcatccattttaatggatctaactttccttactgttaaaacccctacattactcactttaatagctttcaaacctaaatccctttcccctactttcaaaaatctctaacctggaaa

SEQ ID NO: 19444 - DNA, 451 bp, Glycine max
  Clone ID: LIB3106-076-Q1-K1-E4
cccacgcgtccgcttgggagaagaggtcgagtttcacagcagcaatggtgtacgtcaagggtcagaagatcaaaagcctacttcaagagatatcaagtcaagttcaagagaagaagagagggaaaaaccgattaccgtgccaggattcggttgattaatcaggacaagaacaaatataacactccgaaataccgatttgttgttcgctttagcaacaaggacattgttgcacaaataatatctgctagcattgctggcgatattgttcttgctgcagcatatgcacatgagctgccacgatatggtcttgaagtagggcttacaaattatgctgcagcttattgcactggtctcctgttggcccgaagagtcctcaaaacacttgaaatggatgaggagtatgaaggaaatgttgaggctactggagaggattattccgtggaacctgctg

SEQ ID NO: 19445 - DNA, 444 bp, Glycine max
  Clone ID: LIB3106-076-Q1-K1-E5
cccacgcgtccgcccacgcgtccgtccacgcgtccgtgttgttgtaactcgttcttcttcgtttgttgttctgtgtttgtgtttgttttttctctcacctgaaaatgtcttgctgcggtggtaactgtggttgcggaagctcctgcaagtgcggcaacggctgcggaggctgcaagatgtacccagacttgagctacactgagtcaaccaccaccgagaccttggtcatgggagtggcacctgttaaggctcaatttgagggtgctgaaatgggtgtgcccgctgagaacgatggctgcaaatgtggaccaaactgctcctgcaacccctgcacttgcaagtgaggtgttgggagagcaagcttcaagcagagatagcccttaattaggaataatgataaactattaatgtgtagctaaaaacttatgtattatgtctgtgatg

SEQ ID NO: 19446 - DNA, 135 bp, Glycine max
  Clone ID: LIB3106-076-Q1-K1-E6
gtgagaaattgtgcgtgtatctggttgctaattcgagtgctattagtctgtgggttggggggtttgtaaccccgctacttgggttatgtttgattgtatattatcctagagaaataaaaattttaaattatcagt

SEQ ID NO: 19447 - DNA, 408 bp, Glycine max
  Clone ID: LIB3106-076-Q1-K1-E7
accaggcgtccgacctctcttccttaaagattcagatagaaaaaaagagcgactgttgaggtcaaaatatgactaactttggggtgatcaacttggagaagctcagtggtgaggaaagaaacgataccatgtaagaaattaaagatgcttgtgaaaactggtgattctttgatctggtgaatcatggcattgttcatgacatattggacactgtggagaggttgaccaaagagcactacaggaaatgcatggaacagagtgtcatggaattagtggcaagtataggtctagatgctgtccaaactgatgtcaaggatatggactgggagagcacctttcagttgcgtcacctccctgattcaaacatcttacagatccgtgatctcattgatgagtacaggaaggtga

SEQ ID NO: 19448 - DNA, 441 bp, Glycine max
  Clone ID: LIB3106-076-Q1-K1-E8
cacattgcaaagaaaatacacattacattactaagtctttgttcatttgagtagtagtgatggctagcctcaaggttgcatgtgtggttgctgtgatgtgcatggttgtggtggccatgagtgctgcacccatggcacaggccgtaatcacgtgcgggcaggtcgccggcgacatgtctacgtgcttcagttatcttcgaagcggcagaaaaccgtcgcatgcctgctgcaacggagtgaagtccctcagcagcacggctaagaccaccgcggaccgacagggggcgtgcagttgcctgaaaaaccttgccaataatatgggacagagtttgaatgcctgcaacgcaacctctctccctggcaaatgtggcgtcaacatcccttacaagatcagcacctgcaccaactgcgccaccatcaagttctgaagggcaaattttc

SEQ ID NO: 19449 - DNA, 348 bp, Glycine max
  Clone ID: LIB3106-076-Q1-K1-F1
gatagtcactcagttttgaatatataaatattcctagtttgacacttcactttcttacatgcacatgaccatgtcttatcagactggagatctaaaagttgctaatgtactgtcaaaggcgtgctggagcaccgtacatggaagtgataaaaatggaactgtgaaagtcatataacattgatatggatgaacacaaagtgacacagaacggaaatgtggagactgatgaaggtgtggaagccgtttgaaaatgtgtgaagaaaactgtattcataatggatgaagctgcactatctataaacaagcctatagaaagtggcactctgacgtctcagaggacaaaccttc

SEQ ID NO: 19450 - DNA, 465 bp, Glycine max
  unsure at all n locations
  Clone ID: LIB3106-076-Q1-K1-F10
gagtttgttgtgagctataagctagtttatcgtgaggagaatatgaagttgtttgttttctttgttgctgcagtagttttggtagcatggccatgccatggcgcaggctaccaaaggttccctctccgaatgaaaactggctatggtgagcgttcttcggaggtaaaatgcgcaagttttaggcttgctgtggaagcacacaacatccgagcctttaaaaccattcctgaagagtgcgttgaaccaacaaaggactacattaatggcgaacaatttagatcagactctaaaacagttaaccaacaagctttcttttatgctagtgaacgcgaagtccatcacaacgacatatttatattcggcatagataacaccgtactctctaatatcccatactatgaaaaacatggatatggngtggaggaatttaatgaaaccttatatgatgaatgggttaacaagggc

SEQ ID NO: 19451 - DNA, 412 bp, Glycine max
  Clone ID: LIB3106-076-Q1-K1-F11
agaatatgattttttatccccctcgaggctgctacaaaggggttcgtagcatggccataccatgtcgcacgctaccaaaggctccctctccgaatgaaaactggctatgctgatcgttcttcgaaggtaaaatgcgcacgttttacgcttgctgtgaaagcacacaacatccgagcctttaaaaccattcctgaaaagagcgttgaaccaacaaaggactacattaatggcgaacaatttacatcagactctaaaacagttaaccaacaagctttcttttatgctagcgaacgcaaagtccatcacaacgacatatctatattcggcatacataacaccgtactctctaatatcccatactatgcaaaacatggatatggagtggaggaaattaatgaaaccttatatgatg

SEQ ID NO: 19452 - DNA, 410 bp, Glycine max
  Clone ID: LIB3106-076-Q1-K1-F12
cttcagataaacacctatattgagacaaccttttacaagaactgtgacttgtaaccccataagagatccattaacgagggagctctatcaagaacatcccctatcccatcataacactcgttacgacttctaagaactacttgctttacctaacacacttcaaagataatacccacacgctgtacgactcctatggaatcacacaacattcgaccctctaaaaccattcctgaatacagcctataacctacaaaagactacattaatggccaacaatttacatcatactctaaaacagataaccaacaagctctcctttatgctagtgaactcaaagtccatcacatcgacatatctatactcagcatactatacacctcactctctaatatcccattctattaaaaaca

SEQ ID NO: 19453 - DNA, 455 bp, Glycine max
  Clone ID: LIB3106-076-Q1-K1-F2
agagaacgaggtctgaaacttatagcactagcacgcataattgttggagctcctaaccagacgggacgtcctccctagctccgtccacgcgccgccgtacgctctgaaatcttccgtcgtctccgccatctccgctgccagcctttcgatctgtcataccaaatggccaacagagttcaaattcctaccaacaattcagccctcattgctatgattgcagatgaggatactgtagttggatttctgttggctggagtgggaaatgttgacatacgtaggaagacaaattacctcattgtggattcaaaaacaactgtcaaacaaattgaggatgcattcaaagaatttacaacaagggaggatgttgcaattgtgctgattagccaatatgttgcaaatatgataaggtttttggttgatagctataacaagcctgttcctgcaatacttgaaat

SEQ ID NO: 19454 - DNA, 318 bp, Glycine max
  Clone ID: LIB3106-076-Q1-K1-F3
ggcagatgagactatgtggctagatcagctgtcaaccgcatttgtgaacagacatgatcagggatacagccttatttgtaaacgcaggtaggtggttacttacacatagtttgccccgactggtatgctgcctgagatcaatgcgatgaacactatgtacggaaaagtgtggagcttcacgatcgacaagacagtagcaatggtcgtagaaccggtgtccgctgagcctgagatcaataatcacgtgcgtaagaagacgaaatgccatgctgaccatgctgataaccaagacaatgtcatcgacaattgccagctaca

SEQ ID NO: 19455 - DNA, 450 bp, Glycine max
  Clone ID: LIB3106-076-Q1-K1-F4
cccacgcgtccgcccacgcgtccgcccactcgtccgttcacgcgtccgaacaaccgcaaagacaaacgcagacccttcccttgcttcctccctccctcattcccttcttcaatttcatcaacacaaccatcaatttcatcaaccatcgcataataatagtattatcatgatagccgtggcccgaaaggacatggaccggatcaagggcccgtggagcccggaggaggacgaggcccttcagaagcttgtggagcggcacgggcccagaaactggtcgctcatcagcaggtccattccgggccggtctgggaagtcatgcatgcttcggtggtgcaaccagctgtcgccccaggtcgagcaccgggccttcacaccggaagaggacgagaccattattcgggcccatgcccggtttggtaacaagtgggccaccattgcgcgccttctctc

SEQ ID NO: 19456 - DNA, 437 bp, Glycine max
  Clone ID: LIB3106-076-Q1-K1-F5
gcgcacatgggataaagtatggtcaggaagcttattgcgacaaaatgaagcgaggtgggcatgtgttaacaaaatgctgcaagacagagatctcttttgtgtgaacagaatctaagcagcaattcctcactgttttagctgcttccaagtatttcgctatatgtttcctttacctttcgtagaaaagcttccctgtgatgtaatctagcctgataataaatgtaactcttttaataatcaatctacttcaagaagatttcatttcttcaattatccctttgtggtttcaaagttaagaaaaaacatctaatgcatggatgacttcatgaatttgaaggaaaccttatcattgtataaaaaaaataagtaaacctaaatacaaaagttaaaaaactacaatagataatgtatgtcaaccttaaaaaatccatttatat

SEQ ID NO: 19457 - DNA, 440 bp, Glycine max
  Clone ID: LIB3106-076-Q1-K1-F6
gtttgatttgttctccaagcaacgccttcctctaccttttctttgccgtttaaaccctaggagagggtttaagctcgcgccacacgaagcttctccatgatccatttggaaggcgcattctaagccatggctgcttcaaggttaacctcatgcgtggcggtaacttccgctgcggtggtttccatgtccaccttctccgatcgtgcctacgccgattcttactttcgactcccgttcttctcttctaaatcttccagtgagccctcgccgccgaatcagccctctgactccaattccgagcctccgccgcccgatgaacctaacaaatcgggtttcgacccggaatcgttagaaagaggagccaaagctctccgcgaaatcaatagttctccctactccaagcagctgtttgatttaatgcgaaaacaggaggaaactcg

SEQ ID NO: 19458 - DNA, 453 bp, Glycine max
  Clone ID: LIB3106-076-Q1-K1-E2
tgaaattttgtgaacaagagaaattcgggaccagaagttcgatgagaaggaaaacattgtgttcatgacagtggtgtgttgtagccccgagaagataagagacaagctttgctacaaaggtggaggctctatcaagagcattgagatactggaactgcccaagcccaaggccgagaagcctaaagcagacccttccaaagctgagaagcccaaggccgagcccgagaaaaagaaggacggtggcggcgagaagcccaaggccgagcccgagaaaaagaaggacggtggcggcgagaaacccaaggccgagcccgagaaaaagaaggatggtggggagaagcccaaaggggatgctccgaaaaaggaagccgagaagcccaagcccgggcccgagaagcccaaggacaagcccgcgccagctcccttacccgtgcagccacatatggctgcacc

SEQ ID NO: 19459 - DNA, 386 bp, Glycine max
  Clone ID: LIB3106-076-Q1-K1-D11
accacgcgtacgcagagataccgctgaagttatacccctccacggctatatatggagactgagccgctatacttaagatcttggcgtcacacacactcgaatcaactctccatggaccaagatcatctacaccaatccaagctagctgccatacactatgacatgctgatgaccgagagcaaacgatgaatcaacttgaagagttcttgaacaccaacgttgcccccaaagaacttgctgatgaaataaaggatattggaaaggctcttctaccatcctctaccgataataaggctctccctgctcctgcagagaaaagttcagagcttgctacagctgatagcactgtacagagagcagtagctactcccgagtccaaagctgaa

SEQ ID NO: 19460 - DNA, 475 bp, Glycine max
  unsure at all n locations
  Clone ID: LIB3106-076-Q1-K1-D12
tcgcccacgcgttcgctcgaatctcttatctgctttgtagattgagtcaaatcaaagtaagcgaagcccagattaagcaccaccgtttctgtcacagtcaagtgtcgtcggtattgcctcctccatctaatttgcaacaccaacagacacagtgtgatccttctcacaccgcagttcccaggaattatattggggaaaatgtatctagaaaagataagaacaaatatctttacactacgcttcttgaactcaacgacagtaaggaggctgtttatggtgctcttgatgcctgggttgcatgggagcaaaacttccccatcgcctcattgaaaacaatattgatttctcttgagaaggaccagcagtggcatanggttgtgcaggtaattaaatggatgctgagcaaaggacaggngatgacaatgggcacatatggtcaactgatacgagccttagatatggaccatagagtcga

SEQ ID NO: 19461 - DNA, 447 bp, Glycine max
  Clone ID: LIB3106-076-Q1-K1-D2
ctttgcttcaacgtttccatcatacacagatcccaatcctctctcaagccctaatttcccctgattgggatggccacagaagagcccactgtcgcggtggaacccgctcccgaacctgcctccgccgatcctcccccggaggagaaggaggagaccaaacctgaagccaaggctaagaaaaccaaggagcccaaacctaaaaaggtttccagacctcgcaaccctgccactcatccttcctacgaagagatggttaaagatgcaattacctcgctgaaggagaaaaccggttcgagccaatacgcgattgcgaagttcatcgaggagaagcacaagcagctttcaccgaacttcaagaagcttcttctctaccatttgaagaagctcgtcgccgccggaaaactcgtcaaagtcaaaggctcgttcaagctcccacctaccagacct

SEQ ID NO: 19462 - DNA, 446 bp, Glycine max
  Clone ID: LIB3106-076-Q1-K1-D3
gtttacttccatggcggcgccttcataatctaaacaccgttttctccgaactaccacaacgtcctcgacaacattgtttcaaaggctaatgtgattggtgtttccgtacactacaggagggcaccggagcacccggttcccgtcgcccacgaagattcgtggagtgccctcaaatgggtcgcttctcacgtgggcgaaaacggtgttgaagagtggctgaagaaccatgcagattttgaaaaagtgttcttcgccggcgacagcgccggcgccaacattgcgagctatttgggcattcgggtcgggttagaagggttacccgggttgaagctcgaaggggttgttttggtgcatccttatttctggggtacggagccgctcgagtgtgacgtggagcatgctgaaggcgctgccaaggtgcaccagctgtggcggtttacgtgccc

SEQ ID NO: 19463 - DNA, 450 bp, Glycine max
  Clone ID: LIB3106-076-Q1-K1-D4
cccacgcgtccgcccacgcgttcgaaagaattataaatagaaaaaggagcatgttgattatgtataaggtaaagggcaacaatcatttttgtttaccatgggtaaggacaccatcgctgacataataacctatataagaaatgctgacatgaataaaaaaggaatggttcaaataccatttactaacataacagaaaacattgtaaaaatacttttacgcgagggttttgttgaaaacgtcagaaaacatagagaaaacgacaaatattttttagttttaactctacggtatagaagaaatagaaaaggatcatataaaagttttttaaatttaaaacggatcagtacacccggtctacgaatatattctaattatcaacgaatccctcgaattttacggggcatggggattgtaattctttcaacttctagaggtataatgacagatcg

SEQ ID NO: 19464 - DNA, 432 bp, Glycine max
  Clone ID: LIB3106-076-Q1-K1-D5
aatagttattttatcttatgcaatatttatttaatgagatgttttggtgcaagggttgatgcttgttttaatttatgttccatcgcttataacttaagatgttgagtacattgaacaattttgagaactcgtgttttactttaaaaagcaccaaaaccaatgtaacttcgagatcatcccagcttttgttttgtcacatgccaacattatcgtatcttctagaccaacatcaacatccttcattgtcttttcactcatacaatcaacattgttagactccatctgatatttattttacttttcaagctcatagtttagttttttcttgtgttattttttctttagggttgtgattgattttcaatttttaggttttggactgtttggattttttttgatattttgtttatttaagttcatattatccttgtt

SEQ ID NO: 19465 - DNA, 442 bp, Glycine max
  Clone ID: LIB3106-076-Q1-K1-D7
cccacgcgtccgcccacgcgtccttaaagaggcagatagaaaaaaagagcgactgtttgagtgtaaaagatgactaacttcccattgatcaacttggagaagctcagtggtgaggaaagaaacgataccatggaaaaaattaaagatgcttgtgaaaactggggattctttgagctggtgaatcatggcattcctcatgacatattggacactgtggagaggttgaccaaagagcactacaggaaatgcatggaatagaggttcaaggaattagtggcaagcaaaggattagatgctgtccaaactgatgtcaaggatattgactgggagagcaccttccacttgcgtcacctgcctgaatcaaacatctcatagatccctgatctcattgatgagtacatgaaggtgatgaaggattatgctctgaggttagagaaactag

SEQ ID NO: 19466 - DNA, 348 bp, Glycine max
  Clone ID: LIB3106-076-Q1-K1-D8
cccacgcgtccgtatttttttcctccttcataagtctttaaagaatgttcttgggtcaaagaaaaaaaaaaaaaaaaaaaagaaaaaaaaaaaaaaaaaaaaaaaaaaaaaaaaaaaaaaaaaaaaaaaaaactaaaaaacaaaaaaaaaaatacaacaccccaattttctataagcacatcacattaccctcattaatctaccaaatataaacactatccttagtttaaaaaaaaatcaatacctgaaaaacataaaccagagccacaagtaaaacattttcaataacatgccatatatccatagccaacccatataaaaattattaactttttcataatcttaaac

SEQ ID NO: 19467 - DNA, 455 bp, Glycine max
  Clone ID: LIB3106-076-Q1-K1-D9
atctgaagcaataggagataccactgatggcgtggcagttactcttggggttgctgcagctgctgctggacttagtctattagctttttctgagatagaatcaatcctccaggttgttggatcagctgcgctcattcagtttgcaagcaagaagcttttgtttgctgaggaccgagagcaaactgtgaaacaacttggtgagttcttgaacaccaaggttgcccccaaagaacttgttgatgaaataaaggatattggaaaggctcttctaccatcctctaccgataataaggctcttcctgctccggcagagaaaagttcagagcttgctacagctgatagcactgtacagagagcagtagctactcccgagtccaaagctgaagcagtagcaactcccgagcccaaagtggatgcagtagctcctgaagtaaactctgtgcccaaactgaagt

SEQ ID NO: 19468 - DNA, 443 bp, Glycine max
  Clone ID: LIB3106-076-Q1-K1-E1
cccacgcgtccgcttttgtttgttcttcagtactttagtgtgtgatttaattccaagattgtgagaatgtctagctgtgggtgtggaagtagctgcaactgtggcagcaactgcggttgcaacaagtactcttttgacttgagctatgttgagaagacaaccacagagactcttgttttgggtgttgggtctgtgaaggcccaattggagggtgctgaaatgggtgttgcagctgagaacggtggctgcaactgtggatcaagctgcacctgcgacccatgcaactgcaagtgaggtcaagatttataaccttgaagcagagataactgtaatatatgtatcaacaaataataagaattacgtgttgtgtttaataaagtgatcatggctcgaatttgcaaattcaaatgttctaggatatttgttgcgagtgtttgaagtat

SEQ ID NO: 19469 - DNA, 468 bp, Glycine max
  unsure at all n locations
  Clone ID: LIB3106-076-Q1-K1-E10
tccacgcgtgcgcttcctcttcttctcaacttaaaggggttcaattctagctagttctatgacgtcgtccgcgaccatgaacatggcgatcgcgcttctgttcatggttttcgcagtttcatcagctttagacatgtcaataatatcacacgacaacgctcatgcggatagggccacgaggcgcaccgacgaggaggtgatgtcaatgttcgaggagtggctggtgaaacacgacaaggtgtacaacgcgctcggtgagaaggagaagaggtttcaaatcttcaagcacaatctgcgcattatcgatgaacgaaactctctgaaccgaacctacaagttgggactcaacgtgttcgctgatctcaccaatgcggagtacagagccatgtacctgcgaaccttggacgagggtccgagggtgggctttgatacgccgncagaaaccactacgtgccacgtgttggagat

SEQ ID NO: 19470 - DNA, 458 bp, Glycine max
  Clone ID: LIB3106-076-Q1-K1-E11
cccacgcgtccgcgtacataacggggtcgcatcttctctctctcagacgccatccaagcatcgccgtcgtcgatgtaagggacgatgagaggagctacgacggacacatatcggggtctcttcattacgcaagcgacactttctccgataacatctcaaatctcattcaggcagttaaaggcaaagacactctcgtcttccactgcgctctaagtcaggttcgtggcccaacttgtgctaggaggcttgtcaattatcttgaggagaacaaggaagatactgggataaagaacattatggtcttggaacgtggcttcaatgggtgggaagcttctggtagacccgtttgccgctggaccaatattccttgcaaaggagagttgtctccttaatcaaagacgtatttgtggttggatggaattatggaggcatatcatccttcgtgtgatatgtgcacg

SEQ ID NO: 19471 - DNA, 454 bp, Glycine max
  Clone ID: LIB3106-076-Q1-K1-E12
gtttggaaagccaaagacaaacactgactttcttccatacaatggttatggattcaaactgtcaattccctcaaagtggaacccaagcaaagaggttgagtacccaggtcaggttcttagatatgaggacaattttgactcaaccagcaatgttgctgtcatggtcactgcaactgacaagaagtccatcactgactatggttcacctgaggagttcctatctcaggtggattacttgcttggaaaacaagccttctttggccaaactgatgctgaaggtggttttgattccaatgctgtggcaactgcaaacatcttggagagttcaacgcctgtcattgatgggaaacagtactacagtttgactgtgttgacaaggacagctgatggagatgaaggtggcaagcaccagctgattgcagcaactgtgaaagatggcatactatacatttgc

SEQ ID NO: 19472 - DNA, 296 bp, Glycine max
  unsure at all n locations
  Clone ID: LIB3106-076-Q1-K1-D10
gtccgatctgaagctctatgagatacgactgagagtgngacaaaaactctttttgcggctgcaccggctgctttacatacgctattatctgaccctgagatggaatcaatcctgcatgtagcttgatcagctgcgctcattcaatttgcaagcaagaagcttttgtttgctgaggaccgagagcaaactgtgaaacaacttggcgagttcttgaacaccaacgttgcccccaaagaactggttgatgaactaaaggacattgaaaaggctcttttaccatcctctaccgataataa

SEQ ID NO: 19473 - DNA, 419 bp, Glycine max
  Clone ID: LIB3106-076-Q1-K1-B5
catagatattccgttttgcgtttctctgcctaaaaggattgaaagatgggtcaagcactaggttgctatcaagttgatcagtcaaatgtggctatcaaggagcattttggaaaatttgatgatgtcctagaacctggatgtcattgcctgccttggtgtcttgggtaccagattgctggtagtttgtcactgcgtgtgcagcaacttgatgttcgatgtgagacgaaaaccaaggacaatgtctttgtcactgtggttgcatctgtgcaataccgagctgtgtctgagaaagcatctgatgcattctataggcttaccaacacaagggagcagatccaatcatatgtttttgatgtcatcagggccagtgtaccaaagttggagttggattctgtctttgagcagaagaatgatatagc

SEQ ID NO: 19474 - DNA, 447 bp, Glycine max
  Clone ID: LIB3106-076-Q1-K1-B6
gcaaagtaatcgcaaaatctagggtttgttcgttcgctcgttcgcaacaatggcgctgaggagattctacaacgagatcaaggggaagagggtgagcgaggtccctgagcacgtgaagccgatgctgtccctgagctacatcaagaaagcgattcagagaggcttcgacaattaccatgccaagtacattgaaaccagttcccctgatcccatcttccatgtctgctacggcggcatgatcttctcctacctcgtcgctctcccccacgagcgccgccacctcctccacgcccaggagcacgctcagcagcatcactgattccatccaccttcaggatcctggttgaattggaggtggttggcttgcttgatctttgttttaaaatctgaaaaatcaaggcagaaagatactgtcagcttctgtgtatttcatcatttggatgataa

SEQ ID NO: 19475 - DNA, 419 bp, Glycine max
  Clone ID: LIB3106-076-Q1-K1-B7
cccacgcgtccgaaatggcttcctcaatgatctcttccccagctgttaccactgtcaaccgggccggtgccggcatggttgctccattcactggcctcaagtccatggctggcttccccaccagaaagaccaacaatgacattacctccattgctagcaacggtggaagagtgcaatgcatgcaggtgtggccaccagttggcaagaagaagtttgagactctttcctacctgccagaccttgatgatgcacaattggcaaaggaagtagaataccttcttaggaagggatggattccttgcttggaattcgagttggagcacggtttcgtgtaccgtgagcacaacatgtcaccaggatactacgatggacgctactggaccatgtggaagctgcctatgtttggttgcactgatgct

SEQ ID NO: 19476 - DNA, 337 bp, Glycine max
  Clone ID: LIB3106-076-Q1-K1-B9
cgtgaactctctgcgttgatcgagctcgagttgttggcttgcttccgggagctctgaaccggaccgacatcggtgggacatcaaaaccctgcaacggaaaaatggcgttcttgttgaaccaaactagtatcgcttacacattttcgagctaactctcagaagaatgaagattaggcttcttttactagccgacgattccacgtcaaaccattggctcgcgagaaatctctgttggcagatgaagcaactctgaaaccgttcaaatcgtacaagaagagcgttaaaaagcttagaaaaactgggaatgcccttacaattgctgttgctgcacgatgct

SEQ ID NO: 19477 - DNA, 278 bp, Glycine max
  Clone ID: LIB3106-076-Q1-K1-C1
cccacgcgtccgcccacgcgtccgaaatttgatcaatgtataattcgattctttaaaaaagaaaaaagaaaaaaaaaaaaaaaaaaaaaaaaaaaaaaaaaaaaaaaaaaaaaaaaaaaaaaaaaaaaaaaaaaaaaaaaaaggaaaaccaaactaaaagaaccaaggcttacttcctctatgcataccaagttataattctcttatagggtaaccaaaatttaattcattggccaaccttttacaaaatcccaactggtaaaaccacagcgataccc

SEQ ID NO: 19478 - DNA, 418 bp, Glycine max
  Clone ID: LIB3106-076-Q1-K1-C10
cccactcgtccgctcactcgtacaagtacctttttacaaagtccaaattttatagctccgcgaaaccataccaaacctaattggcaacatcctaagcctcatccatgatatcaacaccggccttatctgcatccatccaaaagctccatcatttgaagccatccaacgtgtgctttcaaggtcttagacccctctcaagggtcacctaagccttctcaaccatagtgagcaccaccacctaaagggtcattccaaagcggtggtgttagagctgaactcatactcacaccttgctgataagcctcagcactggcctatgcctctacttgggaaggtgcgtgttacttaacttgcatagggagaacgtggcaaatcatgttcctgatcagaacggcctcacacacttagaggctggtga

SEQ ID NO: 19479 - DNA, 351 bp, Glycine max
  unsure at all n locations
  Clone ID: LIB3106-076-Q1-K1-C11
gtgccggcatgggtgctccattcactggcctcaagtccatggctggcttccccaccaggaagaccaacaatgacattacctncattgctagcaacggtggaagagtgcaatgcatgcatgtgtggccaccagttggcaagaagaagtttgagactctntcctacctgccagaccttgatgatgcacaattggcaaaggaagtagaataccttcttaggaagggatggattccttgcttggaattcgagttggagcacggtttcgtgtaccgtgagcacaacaggtcaccaggatactacgatggacgctactggaccatgtggaagctgcctatgtttggttgcactgatg

SEQ ID NO: 19480 - DNA, 414 bp, Glycine max
  Clone ID: LIB3106-076-Q1-K1-C12
cccaagccctatacaaccaaaccctatcactcacccatttgattcagtttccatggctagcgctaaggttgcatttgtggctgcagtgctctgcatggttgtggtgagtgcacccatggcacatgcagctatcacgtgcggtcaggtgacgagtagcctggccaattgcatcggttacctccagaagggaggaacgccgtcgtcgggatgctgcaacggagtgaagagcctcaatgccgacgtcaagaccaccgtcgaccgtcagactgcgtgctactgcctcaagtcggccgtcagccaaatctccggcttcaacgccaacaacgccgtctagctccccggcaaatgcggagtctccatcccctacaagatcagcaccttcaccaactgcgctaccatcaaggtctgaagaga

SEQ ID NO: 19481 - DNA, 451 bp, Glycine max
  Clone ID: LIB3106-076-Q1-K1-C2
cccacgcgtccgcccacgcgtccgattaaatcttaaagcagtaagtcatcatggataaatgagagcggactcaacagcagcagcagcaacaacagcatgtgatgggagttgccgcaggggctagccaaatggcctattcttctcactacccgactgcttccatggtggcttctggcacgcccgctgtaactgctccttccccaactcaggctccagctgccttctctagttctgctcaccagcttgcataccagcaagcacagcatttccaccaccaacagcagcaacaccaacaacagcagcttcaaatgttctggtcaaaccaaatgcaagaaattgagcaaacaattgactttaaaaaccatagccttcctcttgctcggataaaaaagataatgaaagctgatgaagatgtccggatgatttcagcagaagctccggtcatatttgc

SEQ ID NO: 19482 - DNA, 444 bp, Glycine max
  Clone ID: LIB3106-076-Q1-K1-C4
cccacgcgtccgcccacgcgtccgcccacgcgtccgctcaggcaagccttctccttcaagagcagctgaaagatctttgcaaaaaccccgtcgacggcttctctgccggtttggtcgatgaaaccaacattttcgaatggagtgtcaccataattggaccgcccgatactctttacgaggggggatttttcaatgctattatgagtttcccatccaattacccaaatagtccaccttcagttaagttcacttcagagatatggcatcccaatgtatatcccgatggccgggtttgcatatcaattcttcatcctcctggtgaggatccaaatggttacgagcttgcgagtgagcgctggacacctgttcatacggtagagagtatagtattgagtatcatatcgatgctttccagccctaatgatgaatctcctgcaaatgttg

SEQ ID NO: 19483 - DNA, 54 bp, Glycine max
  Clone ID: LIB3106-076-Q1-K1-C5
cgtcaagataatccttctttgaaacactttggtagtgctcttagattgtaatcc

SEQ ID NO: 19484 - DNA, 130 bp, Glycine max
  Clone ID: LIB3106-076-Q1-K1-C6
cccacgcgtccgaaaaaaaaaaaaaaaaaattaaaaaaaaaaaaaaaaaaaaaacgatatgggagaatacaaaaaaacaaacacgtacatacaacaaaaataaaatataatataaaaaaacctaaaataa

SEQ ID NO: 19485 - DNA, 425 bp, Glycine max
  Clone ID: LIB3106-076-Q1-K1-C7
actcggtcttgaattcccggacccacgcatccgtaattttttataaaaaaaaaataaaaaaaaaaaattaaaaaaaaaaaaaaaaaaaaaaaagaaaagaaaaaataaaaaaaaaaaaaaaaaaaaaaaaaaaaaaaaaaaaaaaaaaaaaaaaaaaaaaaaaaaaaaaataaaaggggggccctttttaaagattcaaaatttacaactcagtctatcaaattctaaatatcttttaagaataccaaaattttaataactttgccatccttttaaaaaattttaacttggaaaacacttgtgtaatcaaaattaattgcctttaaataaaaaccttttttcgcaagatgcttatatcttaaaaagtccttatcgtatggcctttataaaaattgactcaatttaaactgtaaaggataccccct

SEQ ID NO: 19486 - DNA, 443 bp, Glycine max
  Clone ID: LIB3106-076-Q1-K1-C8
cccacgcgtccgcactaggcactctctattcccattcattgcagaagaagatggaggctcggctcctacgtcccacgcgatttgcacttacccggctacgctccctgcttcctttccatgtccaacattctttccgtcttcgcctcctcctcattgctcatcgtcactctcgtctggatcttctctggacgctttaagaaaaccaaagttgatagagtgctgatgtgctggtgggccttcacaggtctcacacacattattcttgagggttattttgttttctctcctgagtttttcaaggataaaactggcttctacctggctgaagtttggaaggaatatagcaaaggggattcaaggtatgcaggaagggatgcaggggtagttactgttgaaggaataacagcggttttggagggtccagctagccttctagcagtata

SEQ ID NO: 19487 - DNA, 451 bp, Glycine max
  Clone ID: LIB3106-076-Q1-K1-B4
gccatggcaactctaaccccaatgtgttgctcatgttcaacacccagattcagtggtcaagaccatgagcatggctatcaactaaaactaaaaccctcagttttgaatttcagacctcagaagcaaaatagaagcatcagaatccgatcaccctctgcctccaacccgaaccagaatgagtcttcttctcccggattatactctgccaagaaattcgacctcaccgcattcaacgtcgacctcgttctcgacgatgttcgcccttacctcatcgccgacggcggcaacgtggacgtggtgtccgtggaagacggcgtggtatctctccgtctcgaaggagcatgcgagagctgccccagctccaccaccaccatgaccatggggatcgagcgcgttcttaaggaaaaattcggagacgctgttaaggacatacgccaagtctaccttaccg

SEQ ID NO: 19488 - DNA, 436 bp, Glycine max
  Clone ID: LIB3106-076-Q1-K1-C9
gttggcctttctggaaatgaaataaagaatttgaagtcatctggcgtggagataacgtacactttgacagaaccagaaattgctttcacgggagataccatgtcagatttcatagttgatgaaaataacacagatgtcttacgggctagaattcttgtattggagtgcacctttgttaacaattcaatcactgtggaacatgccagagattatggacacactcatctgtccgagataataagttatgctgagagtttacagaacagagcaatccttttgattcacttttcggctcgttacacagtagaggaaattcaacacgctgtaagtgcattgccttccagtttatctggtcgaacttttgcgcttaccgaaggtttctgagtccctgacaagttgggagtttggttgatacataaaaatgactatggagctg

SEQ ID NO: 19489 - DNA, 451 bp, Glycine max
  Clone ID: LIB3106-076-Q1-K1-D1
cccacgcgtccgcaccacttgctctcatttttcatcatcattataccttcctgtctacgtgaaatatcaataataatagactaaaccaaaccaatgtcggagtggtactttttctacccttttcctttttctccctaaattcatcttcttttcaaattttcttttgctttgcttaccctaacaaagtcctcttgtcttgccagatcccaacattatcgcacctccacgaccaacaacaacaaccttctcgtacttttcactcctccaatgaacatcgtcagcctcgatctcacatttttttcccgtttcacgctcatagcttagtttctccttctgttattttttctttagggttgggattgatttcgaatttgggggtgtaggattgttggtattttctttcaaattttgttaatttaagttgtgatgattcttgttatgcacttggatt

SEQ ID NO: 19490 - DNA, 463 bp, Glycine max
  Clone ID: LIB3106-075-Q1-K2-H8
ccgtatcttaattgctcgactcgacccactcgtccgcccacgcgtccgaaaagtaagagtctggataaatatgtaatttatatttttccgttcttgtcaaggataaaagagtaattttttataattctttatcttaaaaaggaaataatttcccactcataattttaaggctaatattgtaattttaacttttttgctctttttaaggataaaagtgtaattgtaaaattattattcatattataaccgtaataaaagaaaaattaaactcacgaaagtaaaatgctcacttcttatgtgagaaagtttttgtgggaaattaattaagaaaaaaaaataactaaatttttcaatctatgattctcaaaaaaaaaaaaaaaaaattctcctactaaacgttttcttatatagatcgttcaattttattatgtaactatacatgttaaatattatgtattaattt

SEQ ID NO: 19491 - DNA, 378 bp, Glycine max
  unsure at all n locations
  Clone ID: LIB3106-075-Q1-K2-H9
cccacgcgttcgcccacgcgtncgcttgagaagaaggtcaaggaatggggagaaccaaaggttgcttctgcgaaacaggagctagccgagatgatcctccaatctgttctgtagaaagtagaatctagccgtgtgtggtggctatttttcgtctattatattaggaacaattcggtataattaggtttactaataaaaggaaattaagattgacttatgcctgcttcgttttccttgggaaaatataagtgtgaagctgttatctgctaggtggatacgaagcctggtgaagtgcatgttagcttatgtataaaactacgtgatgcatagcttccctggctttgagcatgcttgagttaattaattgtagtttcactc

SEQ ID NO: 19492 - DNA, 118 bp, Glycine max
  Clone ID: LIB3106-076-Q1-K1-A1
ccgaccccttggttttggtcccagacttttttggggaaaggacctaatggaagtcaaaccgagggtggtggtgggcacctttttttaaaagtattttggaattctttgcgtttgggtt

SEQ ID NO: 19493 - DNA, 446 bp, Glycine max
  Clone ID: LIB3106-076-Q1-K1-A10
ctctccaatcttaaaaatgataaacgcctgtattaatccaacaaaaaatggggcttcgaagctaagcatgcacaaagtgagattggcccagactgaagaaatacagaaaaatggcttgagatcaagcctaaccacgaataaagaagaaagaaaaaatgaccaggggcttttatggcggttcacatcagattcaccaaaccagaaactaaatgagtgatatccatcttcatggatatgtcaccacatctctatacatctaaccctgcctgccccgagtttaatgttgtataagaattgtgatacataagtcatagagttagagaccaatccaagaagtatgtttgcaaatgcagcatctaatgtcctcactgatctctcctccattgattaaggaaaaaaaatcaagcttggatattacacatgatatatagatgtctcttgaattc

SEQ ID NO: 19494 - DNA, 416 bp, Glycine max
  Clone ID: LIB3106-076-Q1-K1-A11
cccacgcgtacgcacgctcatacgaggattcataccgtgacttttgcatgagtgcaaaagaagccaaggaatatggactcatagatggtgtcattatgaatcctctcaaagctctccagccattagaggctgcagcagaaggtaaagaccgggctagtgtttgaacatgagaatgttgcactttaatttccaaggtataaaaaatcatagtgttagactgtaagatgtttttggttgctgagtccaacttaatttttttttacggatgttgatacctgtgcccatgtaccaaaaatgaggcgaaattgatactatttatttaatattcactgcttcagagtttatactgacagaaagttctttaatggaaccctgatgtgattttaacttcaagcattcttttgtgatgaactgat

SEQ ID NO: 19495 - DNA, 433 bp, Glycine max
  Clone ID: LIB3106-076-Q1-K1-A12
gttgagaactaagtttgagaagcaaatggcttcctcaatgatctcttccccagctgttaccactgtcaaccgtgccggtgccggcatggttgctccattcactggcctcaagtccatggctggcttccccaccaggaagaccaacaatgacattacctccattgctagcaacggtggaagagtgcaatgcatgcaggtgtggccaccagttggcaagaagaagtttgagactctttcctacctgccagaccttgatgatgcacaattggcaaaggaagtagaataccttcttaggaagggatggattccttgcttggaattcgagttggagcacggtttcgtgtaccgtgagcacaacaggtcaccaggatactacgatggacgctactggaccatgtggaagctgcctatgtttggttgcactgatgcttct

SEQ ID NO: 19496 - DNA, 287 bp, Glycine max
  Clone ID: LIB3106-076-Q1-K1-A3
cccacgcgtccgcccacgcgtccgcccacgcgtccgctcaaagctattatttttctcctttgttgcagggaaacaccaccccatgttgtctaaatggcttcttttcatctttctcacgtactactcaacctatctcactgtatcacattcgttgaaaattccaaggttgagtcccattgctgaatgggaaacaactttacacaaccgtgcaactgtggttgcaactgatacagatacagagaacctcattacattttactaccaacaagttcttgatcactttaact

SEQ ID NO: 19497 - DNA, 452 bp, Glycine max
  Clone ID: LIB3106-076-Q1-K1-A4
cccacgcgtccgaccaccttccctctcttctgttaccaatggctccctcatcaaactacatgtctttgcttttcctcaccacccttttgtttgctcttcaaatcagtgcaagagacagccagttcttcagcaaagtcacccattttgacaaaaacagtgtcaaagagacagaacttcccaacaaagaagcaccagaagtgaacaagccagagcaacaaccacctttcattccggagactgaaaacagctatggcctatatggtcatcatgatgagtataaccaagtcccttccaccaccaccaaccccactttttaccacccctacaagaccgagtttgagaactccaacaacaagtattacaacaatgatgcctattacacaaggttctccgaaaccggttacaacaacaacaaggattcttatgagggttaccaatatgagttaagtgac

SEQ ID NO: 19498 - DNA, 243 bp, Glycine max
  Clone ID: LIB3106-076-Q1-K1-A5
cccacgcgtccgcccacgcgtccgggcaattggaaaaattgacaaaaaaaaaaagaaaaaagaaaaaaaaaaaaaaaaaaaaaaaaaaaaaaaaaaaaaaaaaaaaaaaaaaaaaaaaaaaaaaaaaaaaaaaaaaaaaaaaaaaaaaaaataaaaaaataaaaaataaaaaaaaaaaaaaaaaaaaaaaaaaaacaacaatgaaaaaaaaaaaaaaaaaaaaaagaaaggtacatataaaat

SEQ ID NO: 19499 - DNA, 445 bp, Glycine max
  Clone ID: LIB3106-076-Q1-K1-A6
tgcaattagacaaattattctgaactctgatcctcaactagaaatatttgtgaggcttctaaaaagcactagtctgtttctaaaagctgcagttcttctttatctgtcaaaaccaaaggcaaagcagatgttatcttcggaatgggtgccattaatacttcgagtgttggaatttggtgacaaattgcagaccctcttcacagtacaatgcagtcctcaagtggcagcattttatgttttggaccaaattcttacaggttttgatgaagacaagaacttagaaaatgcccggcaagttctttcacttgggggattgacactgctaatgagaagaattgatggagaggtccatgagagaaacaatgctgctatgataatttcatgttgcattcgtgccgaaggaagctgtagaagttttttagctgacaacataaataagacttct

SEQ ID NO: 19500 - DNA, 62 bp, Glycine max
  Clone ID: LIB3106-076-Q1-K1-A7
tccacgcgtacgcccactcgtcctaaaaaatataaaaataaaaaaaaaaaaaaaggataatg

SEQ ID NO: 19501 - DNA, 447 bp, Glycine max
  Clone ID: LIB3106-076-Q1-K1-A8
cagagggttatcaaaatgatcttgccaacccatcactttctataacatccggatgtgcctgtggataaccagcgactgtaatgccaaagtagtcaccatatttagctctgatatgttgcaccaagtcgcgtgcacaggcaaagccgccttcgacctggacgaatttgtcctgaccatgcggtggatcacctcgaagtgcaagcacggggcgatgatgatatcagggcagaaggcggctcatttggcgttgaaggcgttggggaggaacaatgcaattgatggaacgtgtggagttggaagggaagaaccccagcttattttcgcttctgcagacactgaggaaattgttgatgcttaaacttactttcaaattagctagatatatagcttttcttttcttttctttctgtttggtccctacttaattatgattttaattttggaata

SEQ ID NO: 19502 - DNA, 125 bp, Glycine max
  Clone ID: LIB3106-076-Q1-K1-A9
tcgatctggtgcaaatgttcatatcagtagttttggagaatccatggtaagcagccacttatttgtgtacccttttagaaaatatagcatatggtacaatgcaagtaccaaggttcttcttgtct

SEQ ID NO: 19503 - DNA, 162 bp, Glycine max
  Clone ID: LIB3106-076-Q1-K1-B1
ttcacaacttagtgccactgaataagttctggttatcatgtagtcgttcatatggagttggaataatggtgagttgaatatgtattaagtaatggcctgccactgaattgaacgacaaagtggaatgaatcaagtgaataaattggctatcctgcctcgaat

SEQ ID NO: 19504 - DNA, 275 bp, Glycine max
  Clone ID: LIB3106-076-Q1-K1-B10
cccacgcgttcggaccaatggagcgatctcctcggaggccacagaggcgaaagcaggacctgtaagcttcctaatcgcctgtactacattcagtagttccttcacctctcaacaatctagcttgctcctatctatctatatgtaataagatgcgttcaaataggggcactagcttcactttatgttgcttcagctgtgtgtcaacaagtcatgtaagagacttcactatgttagtttctctttcgtggctttaataaattatgcgcccttgttcc

SEQ ID NO: 19505 - DNA, 170 bp, Glycine max
  Clone ID: LIB3106-076-Q1-K1-B11
aatagtcattttatcttatgcaagatttatagaatgagatgctttggtgcaagtgttgatgcttgctttaatttatgttccatcgcttataacttaagatgttgagtacattgaacaattttgagaactcgtgttttactttaaaaagcaccaataccaatgtaaccttg

SEQ ID NO: 19506 - DNA, 388 bp, Glycine max
  Clone ID: LIB3106-075-Q1-K2-H7
cccacgcgtccgctccaccagatcaacaacagcaccaccctcgtctcctccatgttccaggccaccggctccgcctccggcaccgccggctacgtcaacatcaccaacctcaaggccggcaaggtcggcttcgccgccgaagacaacgacggctccctccactccttctacgtcaaatccgtcaaggaaatgccctactacatctccgtcctccaaatcagcgccgccattagctccgccgacgccgaggcacccaccgccgccccctccgccatcgacctgatctccattatgtccaaacaaggctgcaaggccttcgcggaccttctaagaggctccaaggcccttccatctttcaaggaaaacgttgacggcggcttaacggttt

SEQ ID NO: 19507 - DNA, 398 bp, Glycine max
  Clone ID: LIB3106-076-Q1-K1-B12
atggagtcctcaaagatctatgcttacctcttcctttgcatgctcttcctctgcttcgtcgctcccattctcgggtgtggctactgtggcaaaccccccataaagcacaagcctggtaaaacaccaaagacacccacagtacccgttgttaagccaccagtcacaatccctcccattgttaagccaccagtcacaatccctcccattgttaatccaccagtcacaatccctcccattgttaatccaccagtcacaatccctcccattgttaatccaccagtgacagttccacccgttgtgcttccaccaatagtgaagcccccgggttttctccctccaattcttaacccaccaagtacaccaacaccgtcgccggggaagggagggaacactccatg

SEQ ID NO: 19508 - DNA, 454 bp, Glycine max
  Clone ID: LIB3106-076-Q1-K1-B2
gtcccttcctaaataaccctcaaacaaaagccaccttaacatctcttctctgaaaattctctttagagagatagagagatagagagagagagagaaagaaattaagaaaaaatggcagcctgcactgtctactcaacacaatctctgagcacaaattgctccatctcaaccccatcaaagacacagctgagtttcttccaccaaaagcaggtagttttctggaggaacagcaacaggggcaacagcagcagcagaagaagctatgtgataacatgtgcagcaggtgactcacagacagtggtgattggtcttgctgcagactcagggtgtgggaagagcaccttcatgaggaggctgacaagtgtgtttggaggagcagcagagccaccgaagggtggcaaccctgactcaaacacactcatcagtgacaccaccactgtcatatgcttggatg

SEQ ID NO: 19509 - DNA, 417 bp, Glycine max
  Clone ID: LIB3106-076-Q1-K1-B3
cccacgcgttcgcccacgcgtccgcagaatcgcgtttgggagaagaagagcaaaatcgctgtgaaaaggagcggaacggtgaagaaagttagcgatgtagcattcaaggtgggaaggaacatcgattgggatggaatggcgaagcttctggtctccgatgaggctcgcagggagttctccaatctccgtcgcgctttcgacgaggttaactcccaacttcaaaccaagtttagccaggaacctgagcccattgattgggattactatagaaagggaattggcactcgtttggtggatatgtacaaggagcattatgagagcattgagatccccaagtttgttgatacagtaacttcctcaatataagcctaaatttgatgcccttttgattgagcttaaagaagcagaggagaaatc

SEQ ID NO: 19510 - DNA, 135 bp, Glycine max
  Clone ID: LIB3106-075-Q1-K2-G12
attagttcatctttcacttttacattttatggcaactagaaattgctgctgatcgcaagtgatgttaaatgtatgttacaattatgaaccggtattaactttagaaactatagttaaatttcttaacaggccctt

SEQ ID NO: 19511 - DNA, 396 bp, Glycine max
  unsure at all n locations
  Clone ID: LIB3106-075-Q1-K2-G2
tcgcccacgcgttcggaacgaacacatgcttagtttttgtctgtgactcactcactcaactctgttgttcattagtgctgcaaaaggggaggaaaaaacaaatagagaaaaaccctaatcttctggttcctctcaaattggttgaattggagcacttttatggcctcaacggagtgatgcanagtagagtggtgtgagtctgttgtagaagagcaagacaaccgatggcaatggcgtctaccgatacagagttggaagaacaactcctggaagccggtaacaagctcctcctagatcctctctcctcggtggaggacctcctcccactcctcgaccaagtagagaagtgcctatcaaggggttgacagtcacctaatgactctatgcgaaatgcac

SEQ ID NO: 19512 - DNA, 402 bp, Glycine max
  Clone ID: LIB3106-075-Q1-K2-G3
cccacgcgtccgatggcttccgaaaggcaagcgttaatgcttattctcttaacaacattcgtcgtcaccataaagccttcacaggccagtactactggtggcataacaatctactggggccaaaacattgacgacggcaccttgacttgcacatgcgacactggaaacttctagatcgtcaacctagctttcctcaatgcgtttggttgcggcataactccatcatggaacttcgctggccactgtggggactggaacccttgttccatactagaaccccaaatacaatactgccagcataaaggtgtgaaagccttcctttacctcggtggtgctaaaggaacctactacctctgctcacccgaggacgcaaaagatgttgccaattacctctatcaaaac

SEQ ID NO: 19513 - DNA, 366 bp, Glycine max
  Clone ID: LIB3106-075-Q1-K2-G4
cgcacacgctgaaccaatggaggcaacttatgttgctacaccccaagagcaagatcgtgacatgcaccatagattttgcttgttgatccctttcaattttggcacatttctcatcaagttgtatctgcttgatagtgaatttagtacagccttcggacacccaacgtcaataggaatttgattccatgggctattgatcctgacctgaatgctgaactcctgattaatcataaatatgctataatgtgggaaaatatatcaaatttaaaaccccaatgttgtgtttgaaaatgtgtgtcactgtgcctacgtggattcttgccctaatggaccgtaactgctggatctatcatatttataggttcg

SEQ ID NO: 19514 - DNA, 430 bp, Glycine max
  Clone ID: LIB3106-075-Q1-K2-G5
gttctttcaaaatgcaaacagccttaaccttcgctgcccccaacgttgtgccattggcacccacaaagagtgtctcccatattaccatctttcccaccaaattgaaagccccgcgctcctcacctcgttactctccgattagggttgcaaccgtggagcccgacacttcaactgtcgactacaactctgcgttctcagtgtttcctgcagaagcatgcgaaactgtaggaggggaagcctgcatggcggagatgtaccctgaaacgaagctacagccagaggctaagactccacgagtcgttacagagaacgttgagagagagtatcttgaatacgatgatcctaaaacggtatttcgaggagaggcttgtgatgatcttggaggaactttctgtgagaccgagtatcagagggtgtctactagagaaat

SEQ ID NO: 19515 - DNA, 425 bp, Glycine max
  Clone ID: LIB3106-075-Q1-K2-G6
gttaagggagcgtccattaaggtcattagtgacgccaccgcctcctttcccgccaagtggatccctgaaattttattgttggctgcctctaaatgaatgaggtatgacatgaagggtgaacacgtatctcacaagtgttatgtgatatgtatgatgtgtgaatcttgaaataatatcttaagggcaagaagttattagttaaaattattagaggtagttttatgaatgggtcataataataaatgctagctatatgtaccactatggaataagattgggtcataataataaagctagcttgctagctatatgtactatacgtaactatggaataagacccatactagtgctataggggcttgctatatgtatgtgtttcatctgcaaattaagagctgagacgcttgccatgcaaggcagacaac

SEQ ID NO: 19516 - DNA, 389 bp, Glycine max
  Clone ID: LIB3106-075-Q1-K2-G7
aataaaaaaacatacattaaagaaattattttaaaaaaccaaataaaaaaaaaaaaaaggggggacataaaataaaattagaaaggatgcctctaaatgaaatgaaagtatgacatgaaaggtcgtacacgtatctcacaagtgttatgtgatatgtatgatgtgtgaatcttgaaataatatcttaagggcacgaagttattagttaaaattattagaggtagctttatgaatgggtcataataataaatgctagctatatgtaccactatggaataagattgggtcataataataaagctagcttgctagctatatgtactatacgttactatggaataagacccatactagtgctataggggcttgctatatgcatgtgtttcatc

SEQ ID NO: 19517 - DNA, 419 bp, Glycine max
  Clone ID: LIB3106-075-Q1-K2-G8
cccacgcgtccggaccaaggtagttcaattgccatggatattggtggtggagtggaagagccagtgagagagttgaggcaatacttcaaaactggaaaaaccaagagtgtaacatggaggaaaaaccagctcacatctctcatagaccttgttcatgagaatgaagatgctatatttaaggccctccataaagatcttgggaagcaccctgttgaggcttaccgtgatgaggttggaggggtagaaaaatcagccagcaaagctttgagctgcgttgagaaatggatggcccctaaaaagagtgatatcccttttcttttcttcccagctaaaggagaagtgttgtcagaaccacttggtgtggttctcataatttcttcttggaacttcccaatcatactggcattggatccaataat

SEQ ID NO: 19518 - DNA, 252 bp, Glycine max
  Clone ID: LIB3106-075-Q1-K2-G9
ggaaccatatagacaataggttttaaattgaatagagtcatataaatctacttggaatatcggatagtccttttgttttacttttctcctccttggaaactacagttctcgactatttcctgattattatatatatcagctatgaaattaaataccttgttggcaaggtttctgcttaaaaaaaaaaaataaaatcttattttattcttccaaaaattaaatattacaaaaaaaaaaactaaaagggcggcc

SEQ ID NO: 19519 - DNA, 417 bp, Glycine max
  Clone ID: LIB3106-075-Q1-K2-H1
ctccttcaattctcaacgaaacccgtcgtcaaagtgggtttccggcagagatcatatatcttgtagggtgtccacctttgaaattcaatctccaattgagcatcacaaaccctagaaaatcgttccagatgaatacaaaatcgctccaaatcctggtgcactcaccggacctcggaatttcccttcaatccacaaccaaccacgaaaccctttccgatctcaaaaactctcttttccctcaatcacaccaatccttctacttcaccttcaatggcaaacccctccccgacaaaacccctctttcccaattcccccctctctccaccctctctctccgctcccgcctccttggcggcggcggagacggcggcgccaccggagccgagtcccgcgactgctacctcaacatgtacgccg

SEQ ID NO: 19520 - DNA, 73 bp, Glycine max
  unsure at all n locations
  Clone ID: LIB3106-075-Q1-K2-H10
cccacgcgtccgnaaaaataaaaaaaaaatttttatattttaaaaaaaaaaaaaaaaaaaaagggggaattat

SEQ ID NO: 19521 - DNA, 431 bp, Glycine max
  unsure at all n locations
  Clone ID: LIB3106-075-Q1-K2-H11
cccacgcgtncgtctctgtctggtccattgtacgacttgcacgcagaggcaagactcgcaggcgggattatataagacaatgagtggtgcgcaactgcaaagtgcttcccctgccttgaccatacaagggtcacagaaaaatgtaagttcggtggctgtggcaactgctgcagaatcaaagccaaagaagaaaatctgctgtgcttgcccagacactaaaaggttgcgagatgaatgcatagtagagcatggtgaatcagcctgtacaaaatggattgaggctcatcgactgtgcctccgtgctgagggattcaatgtttgaggttgatagtgaggaaaagacattagtagattaactcacgtgattttatgaaattgatagaagattttgggttgcaattttcaggttgacagtttaaattttgaataaa

SEQ ID NO: 19522 - DNA, 59 bp, Glycine max
  unsure at all n locations
  Clone ID: LIB3106-075-Q1-K2-H12
cccacgcgtncgcccacgcgtncggaacatgtttggtatctacgcattagtcagaactc

SEQ ID NO: 19523 - DNA, 421 bp, Glycine max
  Clone ID: LIB3106-075-Q1-K2-H2
gaagctattgatcttgcatcccggcttttgcaatactccccaagtctccggtgcactgcgcttgaagcatgtgcacatcctttctttgatgaacttcgtgaacctaatgctcgcttgccaaatggtcgtccatttccccctctatttaacttcaaacaggaattatctggagcatcttccgagcttgttaataagttgatacctgaccatgtgaagcggcaaatggggatacagtttatgcatctgggaggatcgtgacgataaagcttaggggacatagtgtatactagctgataagttaaaaaaaagtggcaccattattttttgtcttaataccatgttctgtgacctggcgaatgtagtttcaagctgaaccgagactgagattcgcgatgccggatggccgcagttgatccgtcag

SEQ ID NO: 19524 - DNA, 437 bp, Glycine max
  Clone ID: LIB3106-075-Q1-K2-H3
cgttgtcaataccacttctcacatcatggggttgaaaatgagtacgctggtggcgcaacggttgaattatattcacgacgggcctaacaggaacttcgtggacgtaatgctacctaggcacatggtaagtgatttctcactctatctaacttctaagacgacatatgaactagaaggatacgagcttgataatgaaatgatacactgagcatactgaagcggtaaatggggttacagtttatgcatctgggaggatcgtgacgataaagcttaggggacatagtgtatactagctgataagttaaaaaaaagtggcaccattattttttgtcttaataccatgttctgtgacctggcgaatgtagcttcaagctgaaccgagactgagattcgcgatgccggatggccgcagttgatccgtcagtatatgtaccttt

SEQ ID NO: 19525 - DNA, 407 bp, Glycine max
  Clone ID: LIB3106-075-Q1-K2-H5
cccacgcgtccgatctcgttgtggttttccaatgctgcgaagtcgaagatctagctagaggcagagaacgttctccctaatcttctgccgatggcgatcttctacgctttggtggccagaggcacggtcgtcctggcggagttcagcgccgtcaccggcaacaccggcgccgtctcccgccgcatcctcgagaagcttccggcggagtccgactccaggctctgcttctctcaggatcgctacatcttccacatactccgatcggatggcatcacctacgtctgtatggccaacgacaccttcggaaggagaattcctttctcgtacttggaagatatccaaatgaggtttatgaaaaactacagtagagttgccaattatgcaccagcttatgcaatgaatgatga

SEQ ID NO: 19526 - DNA, 55 bp, Glycine max
  Clone ID: LIB3106-075-Q1-K2-G10
cccacgcgttcgcccacgcgtccgaaaacaagaggaattaaagttcattcatttg

SEQ ID NO: 19527 - DNA, 392 bp, Glycine max
  Clone ID: LIB3106-075-Q1-K2-H6
caagcattgcatccctcttgatttgtagtttgttctgagctttacataaaagttctgccagatcaagaggggttctaagatcatagtgtgtgttttgcaacaatggctaagttctttgctgctatgatcttggcactctttgccatttccatacttcaaacagcggtaatggctgctaatgaacaaggaggccacttgtatgacaacaagagcaaatatggcagtggaagtgtcaagagttaccaatgcccatcacaatgctcgaggagatgtagccagacccaataccacaagccctgcatgtttttctgtcataagtgctgcaagaaatgcctgtgtgtgcccccggggtattatgggaataaagctgtgtgcccttgctacaacaactg

SEQ ID NO: 19528 - DNA, 419 bp, Glycine max
  Clone ID: LIB3106-075-Q1-K2-E6
gggaggtgtaagaaactgggaagagaaggtggtggtcttgttgccattctgatctaaagcttgtgtctttctgcttcgtttgcatcttctgctgcgtaaagttgattcttttctgattcttccgtagatttcatctctgaaactagttctaatactttatctacagatctctatattctaggtgaaggtttgcttttgatccggcttgggagttttgatagacttgattttaactctttaagagccatatgctcacagtggtcggatatagtacatcagaagttcacacaagagatatatataattattcttgggtaccacctgcagaatgtcattccgcagcatagttcgtgatgtaagggatagtttcgggagcttatctaggcgtagttttgatgtcagacttactgggcatcata

SEQ ID NO: 19529 - DNA, 397 bp, Glycine max
  Clone ID: LIB3106-075-Q1-K2-E7
gggaggtgtaagaaactgggaagagtatgttgtcgccctgtagccattctgatctagggcgttgctctttctgcttcggatgcatcttctgctgcctaaagtttattcttttctgattcttccgtagatttcatctctgaaactagttctaatactttctctacagatctctatattctaggtgaaggcttgctcttcatccagctcgcgagttctgatagactcgcttatcactcttcaagagccatacgctcacagtggtcctatctagtacatcataggtccacacaagagatctatatacttattcttgcctaccacctgcagaacatcataacacagcataattcgtgctgtacgggatcgttcctagagcttacctagacttatttttgat

SEQ ID NO: 19530 - DNA, 423 bp, Glycine max
  Clone ID: LIB3106-075-Q1-K2-E8
cccacgcgtccgcccacgcgtccgaagaatccacttccacctcttcctccactccctaagttgcctccactcaagccacttccacctcttcccaaacttcctccaaagcactttttccatcaccccaaatggttcccagtaccaccttcttcctctcatccttaggctttatatattaatattgcagaggtagatgattactcttgttgggtctgcaaaatatgcatgcattttttctgtcttcttttttgtgctttccgtatgatcaagtatattgaggaagtctatttgttgctaataaagccttggaaggatagggcatgtgatgagcctggggtgagaatataaataaaatttaaactaaaatagagcgatatgattaagaagtttaaagtgatgtgaagtatgagtgtgatcaatatt

SEQ ID NO: 19531 - DNA, 475 bp, Glycine max
  Clone ID: LIB3106-075-Q1-K2-E9
gtttggcagcaaattatggattcccatgatgaggagcatgctgccaaactacttagagctcaaacccacatatggaatcacatatttagcttcataaactccatgtcccttaaatgtgtggttgacttaggcataccagatatcatacacaactatggccaacccatgccactctcaaacctcattgcttcactaccaatccacccatccaaaacttgctttgtccatcgcttgatgcgaatcatgatccattctggcttcttctctcaacaaaatcatgacatggagaatcagctagatgccaagtatgtgcttaccgatgcatctgtactattgcttaagaaccatccgatgagtgtgacacctttcttgcatgccatgcttgatccaattttgacaaatccatggaatcaattttctacttggttcaaaaatggtgacactacaccatttgaaacggcacatgggatgatgc

SEQ ID NO: 19532 - DNA, 422 bp, Glycine max
  Clone ID: LIB3106-075-Q1-K2-F1
ggaggaaacaatcgtgcacatggtttctttaagcaacatggttggactgatggtggtaagggagaggctaaatacacatctagagctgcagatttgtataggcaaattctttcaaaggaagtagcaaaaagtatggctgaggatggaggcttgccttcatcacctgttgcttctcagtctgcccagggggttaatgggcttccagaagtcaagaccaatgaagtgccaaaagaaaacactctggagaagccagaaaagcctgagagcacttcttcacctagagcttcacattcagtaatttcaggtactgttaagaaacctatcggtgctaaaaaagcagtgaagagtggggggcttggtgctcgtaaactcactaaaaagccaagtgagtctctctatgagcagaagcctgaggaaccccc

SEQ ID NO: 19533 - DNA, 59 bp, Glycine max
  Clone ID: LIB3106-075-Q1-K2-F10
gacacgcgtatgccacactcatggaccgacttttacatacatgtggataataaggcaat

SEQ ID NO: 19534 - DNA, 448 bp, Glycine max
  Clone ID: LIB3106-075-Q1-K2-F11
cagaagaacaagtagttgagaactaagaaggagaagcaaatggcttcctcaatgatctcttgcccagctgttaccactgtcaaccgtgccggtgccggcatggttgctccattcactggcctcaagtccatggctggcttccccaccaggaagaccaacaatgacattacctccattgctagcaacggtggaagagtgcaatgcatgcaggtgtggccaccagttggcaagaagaagtttgagactctttcctacctgccagaccttgatgatgcacaattggcaaaggaagtagaataccttcttaggaagggatggattccttgcttggaattcgagttggagcacggtttcgtgtaccgtgagcacaacaggtcaccaggatactacgatggacgctactggaccatgtggaagctgcctatgtttggttgcactgatgcttctc

SEQ ID NO: 19535 - DNA, 355 bp, Glycine max
  Clone ID: LIB3106-075-Q1-K2-F12
gagacgcgttctgagactagatctcattgcagaaaacatagcatacaccacgacatctacgatgacaggttgtatatttggctgcacacctgtgaccaaaccggcgcaaaggacattactcaggagaagacttgtcaaaagtgctggcgaaaatgtaagggataacgacaatgatgacaacggtgagaggaactggatgatgaacttgactgttgctgcggctgtttctgctgctgggattgcagctgggaatgaacctgcacctgaaacttaaccaggcacctaaaaagctgccacaaagtgtgtcaccaattgtgcaactaagactacaggtaagagatgatgtactggatga

SEQ ID NO: 19536 - DNA, 360 bp, Glycine max
  Clone ID: LIB3106-075-Q1-K2-F2
aaagaaaacaattatcagcaataataaaattataggcacgattctggcatgtccaattctcaacagaatgagcttcattattcaaccgccaacggggacgagaggtcaaacccttgtttagccaacacgcgctgcagcttctgctttccctgttgcttctgttcccgtcgcgactcggccaccctcgggttcgggtggtgggagcgcgtgcgagccacgtcgtcatggtccgagtcgcgctccgaggcgcaaccggtgaccgggagtcccggtgggcggtggtggtctggcggcgtgagggcctttatgaaggtgcgcgagtggtcagagctcgcggcggggcctcggtggaagactttc

SEQ ID NO: 19537 - DNA, 429 bp, Glycine max
  Clone ID: LIB3106-075-Q1-K2-F3
cccacgcgtacgaccgaaacccttcttccattaccggccaacgaagtcgtttgcaaaaaaggaacaacctcgcattcccaaatcgtaaaatcccatgaccaccggtgcaagacccacattggcacctgctcaaggtggcaattaacaaggctgttctcgaattttccgtccctaacaaaagtactcttctagggacatcgcatagcacaccactatcaagcccatgaaggaagggcaggacactcaagatgcattaaagagaagaaacctacgtgatgaactggaagatcgtgaacgaaagcatctctcatcaaaaaataaatcttatgatgacaggcatcacggaaagggtagccatctgtttttggaaggttccaagagagacattgaagatcgcattgttgctcgtagtgttgatgcacatgattc

SEQ ID NO: 19538 - DNA, 151 bp, Glycine max
  unsure at all n locations
  Clone ID: LIB3106-075-Q1-K2-F4
cccacgcgtccgaggaaagagtgttttgaggctgctcaagctggggaaaatggtactggaagtgcagaccaaatggagaatggtggcgacgatgaagataaagatgatccactttcggatgagcattatggttatncaaaagctgaatctg

SEQ ID NO: 19539 - DNA, 432 bp, Glycine max
  Clone ID: LIB3106-075-Q1-K2-F5
cttaaaaggatcatgtctttgccagatgatacaagtatttactgtggtcatgaatataccttgaacaattcaaagtttgccttgtctatagaacctgaaaacaaggaacttcaatcctatgctacccatgtatctaaccttagaaataaaggcttgcccacgattccaactacgctgaaagtggaaaaggcttgcaatccattccttcgcacatggagcatagaaatccggcaaaaactaaatattgcagccacggcagatgatgcagaagccctgggtgttatccggcaagcaaaggataatttttagaattttttaattaaaatttaaaattctaaagatacttattctgtatagattaggttaatgaatccatcaaatggaataatatttacttggtgatatcgtaatataatttttcaattttctttg

SEQ ID NO: 19540 - DNA, 418 bp, Glycine max
  Clone ID: LIB3106-075-Q1-K2-F6
ctcacatccacatgcaaatgcaagaggtggttcccttaatgatccattgcttctgggaaagaatcctttggtttctctctctaccgacattatctccctttatatcagttgtcctaggcagagtttctaaagcaaaagaaaaaaaaaagaaagcaaagggtaggcattgacccctttgcacaaaggaaaagaggggtggtgttgtgttaaaaaaatattgaacttggttggttctaagtagaaacaaaaattgtcattttcccatttctgcatttttggtttgggagaggagaaaccaagaattaagaaatgggttgctccgtaagagtttgttgtgtcttatttttggtgttgttggtggcatgtgttagaggggaggacccttatagattctacacttggaatgtcacatatggag

SEQ ID NO: 19541 - DNA, 415 bp, Glycine max
  Clone ID: LIB3106-075-Q1-K2-F7
cccacgcgtccgacttctgattcagaaactcttaggcattccacattctcaaccccgaacgctaagagcagagcgaaaatgacaaccaccttcgcgaccgtcgcaggactcggtggcgcattactgtcatccacctcatctcgtctcacctcagggtttgtgaaatccccagtgattgctaggaatcccttgaggcaagctgtggcaatgggaaatgggaggattacatgctttgagaggaattggctgcgggcagattacagtgtgattgggtttgggttgattggttggctagcaccctcaagcataccggctatcaacggtaaaagtctgactggcctcttctttgagagcattggtgctgagcttgctcactttcccagccctcctgcccttacttcgtccttttggttat

SEQ ID NO: 19542 - DNA, 216 bp, Glycine max
  Clone ID: LIB3106-075-Q1-K2-F8
cccacgcgtccgaaaatatattggcagatatcatgtgtttcactgcctaaacttgatttgtaagaacaatgctaaaagtccttttgtttgctttccctttctgtcttcattaaattagtttatccctgatttcctgttattgcttagatatttgtatatcatatacaatgttatgtaattcaggtatgccacaaaattttattttattttcctggt

SEQ ID NO: 19543 - DNA, 428 bp, Glycine max
  Clone ID: LIB3106-075-Q1-K2-F9
cccacgcgtccggcagactagtatccgatcctctgtcctctcgaagctttcatcgttcaacagattctcaccatctcagtcatgggcctgctatcttgttttaggtctaccgtcctgagaaaatgttccaaaggaagctctggcatgtcaagattcctgtatacgaacaattttcaacgaaacttgatttcgtctggtggcaatgaatcgtattatgggtattttaacaggagatcatacacttcactttatatgggaactggaactgtgggtgggattacaagtgctagaatcagggtgccaaatgtaggatgtgaaggattcatgtgctcaagtcatctgtcaatcactcaaagaaattcaagattgatccattctactagcaagattgttccaaattctgaaattcagaatataactactgagat

SEQ ID NO: 19544 - DNA, 423 bp, Glycine max
  Clone ID: LIB3106-075-Q1-K2-E5
cattgacttgcccacagtgagaatgaagatgttgcgaacgacaatactgcaattcgctgcgttgcaggttttgtttattctgttgggtgttggtgccgattacataccgccttcgagatttgatggcttcgtctacgggaaggggaacttgaatttgttggatacggttttgatagaagcgttttatgacccagtgtgcccagatagcagggattcctggcctccactcaaacaagctcttcatcactacgcttctcgggtttcgctccttcttcacctcctccctctaccttaccatgacaatgcttttgttacgtctcgtgctctgcacattgtgaacaatttgaacgcatctgcaacgttccccttgctggagtggttcttcaggtatcaggagaatttctatggggctcaaacacggaa

SEQ ID NO: 19545 - DNA, 379 bp, Glycine max
  Clone ID: LIB3106-075-Q1-K2-G1
attaccggcggtcgcacgcgtccggttttttcaaaattcttacagccttttctttttctgcccccaacgttgtgccattgtcagccacattgagtggctcccatattaccatctttcccaccaaattgaaagcccctctctcctcacctctttactctccgattatggttgcaaccgtggagcccgacacttcaactgtctactacaactctgccttctcagtgtttcctgcataagcatgctaaactgtattatgagaagcctgcattgcttatatgtaccctgaaacgaaactacatccataggctaatactccacgaatcgttacagataacgttgaaagagagtatcttgaatacgatcatcctaaaaccgtatt

SEQ ID NO: 19546 - DNA, 407 bp, Glycine max
  unsure at all n locations
  Clone ID: LIB3106-075-Q1-K2-D11
cccacgcgtncgctcaaaaccctgccgtcagtcaccgtcttctctgccgccatgaagctcgggggtttctgatgaagctgaacaacgaaaccgtatcaatcgagctcaagaacggcacagttgttcacggcaccattacaggtgttgatatcagtatgaatacacatttgaaaacagttaaactaactctgaaagggaaaaacccagttactttggatcatctcagtgtgagaggcaacaacattcgatattatatccttcctgacagcttgaatcttgagactttactggttgaagaggctcctaagatcaagcctaagaagccaactgctgggaagcctttggggagagggcggggactaagacgtgggcgtggcccgggtcgtggtcgttaagatgcacatcac

SEQ ID NO: 19547 - DNA, 292 bp, Glycine max
  unsure at all n locations
  Clone ID: LIB3106-075-Q1-K2-D12
tccacgcgtncgctcacacgtacggccacgcgtacggataaagcccgtggaacagatgacgtagaagctgacgcgagccctgcttttgagctccttacttcagtaaaaagtctggtgcgccctgatttccacgtctaggccctaaattggggggctcgcgaagggggtgcttatactgcagaagctattgctgaaatgcttggtaattcgggaacaccgtgcgttatgagaggtcactctgaactgatgcagctgttgaatgtatcaaatgagcctgtgggagataaacatg

SEQ ID NO: 19548 - DNA, 341 bp, Glycine max
  Clone ID: LIB3106-075-Q1-K2-D2
cccacgcgtccgttgatcgagagcggacgtacctttatatatatgctttttcctcaatgaggtgtgcttcatgatccatattgtccttgaaagatgatggaactgagacaccattggccactgagttaattaagccacatcctcaaggagaagaatatagtcctgttagcgaagccttcatgcctgccagcgaatgactggaagctcatatttggctactgacaaaggcttatgttctcgagaatgatgcatgcatccatgctattattagccatttggtaagaactcatgcaattgttgagccattcgtcatatcaacaaacaggcatcttagtgtggtt

SEQ ID NO: 19549 - DNA, 426 bp, Glycine max
  Clone ID: LIB3106-075-Q1-K2-D4
cacactctgccttgttttctctctctgctatgctcacaaatcttccttaaccctacctgcgacagatgacgattcaacccaccaatacctaacaaccgtctcttatggcacccctgttgagtctgcaaaattcgtgcttgatctcggaggctcaatcctctgggctgactgtgcatccataaccaccccatcttccacccttgccccaatcttccaccgctcaattcgttgcctcacggcaaatggtcctggaattgatacacatagatggctctcgagtctcgcaaatgccatagatcaagatcagccgtgtcaaattcctgcacagaacagcatctcggtgaaaagggtcaccgaaggagagcttgtggacgacttagtgattaatcgctctcacgagcttctgttcacttgctcacccactct

SEQ ID NO: 19550 - DNA, 370 bp, Glycine max
  Clone ID: LIB3106-075-Q1-K2-D5
ctttatcgcatgtgatgtaatctagcctgaaaataaatgtaactcttgtaataaaaaagagaaaaaaaaaaaaaaaaaaaaaaaaaaaaaaaaaaaaaaaaaaaaaaaaaaaaaaaaaaaaaaaaaaaaaaaaaaaaaaaaaaaaaaaaaaaaaaaaaaaaaaaaaaaaaaaaaaaaaaaaaaaaaaaaaaaaaaaaaaaagggggggggccttttaaaaaaaacaaagtttccccggcgggaaaaaaaaaaataaagtccttaaaaaagggcccaaaaagaaaaattgggggggccctaaaaaaaacggttgggggggaaaaacccttgtttaccccaattataacgccgaataaacaaaccccttttt

SEQ ID NO: 19551 - DNA, 443 bp, Glycine max
  Clone ID: LIB3106-075-Q1-K2-D6
ccggttggattacgggccgacccagcgtccgtgacttgttggaatggtcaaagcaagattagaacgaatgcttatgtcgctaccggttggtgaccttgatcgcaccatcaaattttcacagaatgtttaggaatgaagcttttgaggcaaagagatatcccagaggagaaatatgctaatgcttttcttggatttggccctgaagaatcccattttgttgttgaattaacatataattatggggttacctcgtatgacattggcgatggctttggacattttgcaattgcaactcaggacatttataaattggttgagcacatcagggccaagggtggaaacatcacaagggaacctggtccagttcaaggtggaactactgttatcgcctttgttaaggatcctgatggttatacttttggacttatccaaagacctacagt

SEQ ID NO: 19552 - DNA, 431 bp, Glycine max
  Clone ID: LIB3106-075-Q1-K2-D7
gatattttaggagctcagacggtatttttttaagaagactgtaagaagagaattttaatttctcactttttagaaagaaattgaaattccagatttttagttgtttaaaattctgttttaaaattccaaattttaaattttttataaaaagcatccaaacaataaattctaaattacagaaatttaaattctctgataaattactttcctcaattaaaattctctatccaaacgcactattaatgaaattgtgatgcaatatataccattaggagcaattgaaaattagttcttaccttaatgtggtgcaggtccgtggcctgccctgtgctcacaattttcatgttgaatgcattgatgagtggcttcggcttaatgtgaattgtcctcggtgccgttgctcagtatttcctaaccttgatcttagtgct

SEQ ID NO: 19553 - DNA, 355 bp, Glycine max
  Clone ID: LIB3106-075-Q1-K2-D8
cacattttgataattattcttctagttgtttagccatggctactcaaggaaagcttgagggagacgttcttctcaagtctaacgcatacaagtactgtcaaacccttatgaactccactgaaatattcaccaaggccttccccaatgattacaaaagcattgaagctcttgagggtgatggcaaatcacctggttctatccaccacataagttatggtgaaggttcaccacttgtgaagtcatcctccgagaagattgaggctgttcatgaagaaaagaatgtagtgtcgtacactatcattgattgagaactcatccagcactacataacattcaagggagacatttctttgac

SEQ ID NO: 19554 - DNA, 472 bp, Glycine max
  unsure at all n locations
  Clone ID: LIB3106-075-Q1-K2-D9
ggcaaagcaattcttacctcaatgggcaaagtctctcttttcaggtcactacaagtgatggcgggactctcactagcaacaacattgtgcctgctaactggcaatttggacaaacatttgaaggggcacagttctaggaaccataataatttttaagttcacattttgtgtgtaatatatgatggcattgttcacttgtttttgttatagatggaaagggtggggaaagaagaagaaaaggtagattaggaggagtttcaggccaacatggcccctaatgctgtggtggctatatggcacccgctaggactaatataatataacgtctttaattttatatctgtcacattgatcgatgccttttgatgaactaaaaggtgttgatgatctcaattgccttgtatttntatcccccaaatggtacaaaaaccaatttggggggccattgatatcaacttgaatatgctttctg

SEQ ID NO: 19555 - DNA, 380 bp, Glycine max
  Clone ID: LIB3106-075-Q1-K2-E1
cccacgcgtacgcccacgcgtccgctcaagtctctcgaagcctctttctctctcttctagaagctatctgtgtttggggttactaaatctccaacaagcaaaatacatggttgatttggaaatccaagtccccaacccattccaaccggttggcgaaggcaaagaaatcggttccccccggggcaaagagtatgtgcttattcgaattcagcagaggaatgggaagaagagtctgaccacagtgcaagggctgaagaatgagttcagctacgagaagatcctcaaggacctcaagaaggagttctgctgcaacggaaccgtggtgcatgacaaggagcttggcaagatcatccaactccaaggcgaccagcgtaagaacg

SEQ ID NO: 19556 - DNA, 460 bp, Glycine max
  Clone ID: LIB3106-075-Q1-K2-E10
cccacgcgtccgctcagccaaggagctcctttccgcatgaattagggatacagtcaatgtggatgaagataaagcaacagaaatcttgaggcctgttgggtcagcaactcaaaggatatacatggctgtctattcattggagaagagtcttggcttggatccaaatgacccaatcattccatttgttgttcttgtaggctcttcagccacattatgggccttttattggttgtggacatatggagggtactcaggaaatttgtcccctaaatcagctttcgagcttttggctgaggacgcaaatgctgcacttattgatgtccgctctgaggaaatgcgagaaaaagatggaattcctgatctccgaccggctgctaggtttcgttatgcaagtataattcctcttgaggttgatggctccatacgcaagttgttgaagagtggtagagagcttgatgat

SEQ ID NO: 19557 - DNA, 242 bp, Glycine max
  Clone ID: LIB3106-075-Q1-K2-E11
cccacgcgtccggcgagagagagagagagattggcatcacttggtggcaatcgtgatgtgggaggaagccagaacagccttgagatcgatggtttagctcgctttgctgttgaagaacacaacaaaaaacagaatgcccttttggagtttgaaaaggtagtaagtgcaaaacagcaagtggtttctggtaccttgtacaccatcactttggaggcaaaagattgttggcaaaagaacgttta

SEQ ID NO: 19558 - DNA, 418 bp, Glycine max
  unsure at all n locations
  Clone ID: LIB3106-075-Q1-K2-E12
acacattgccacttcttaattttcttattttctatggcttccaacaaactccttgccaccggtttggtgctttctctcctcttttactcaacattcactcatgccaattgcccaccacccactccaactccatctccatctccgaagcccacaccacccacaccaccaactccaaaaccaacaccttccactccaaagcccacgccaccaactccaaaaccaacaccacccacacccacacccacacccacaccacccacaccacccacacccaaggctggttgtcctccaccttctcctccttcgccacccaaagcttcatgccccaaggacacattaaagctaggtgtttgtgctgacatcttangacttgttaacgttactgttggaactcctccttcgagcgaatgctgtgcat

SEQ ID NO: 19559 - DNA, 429 bp, Glycine max
  Clone ID: LIB3106-075-Q1-K2-E2
cagaaacaaaagtggcagtattaggtggcatcaccgaagtgcagggagctgccaacagcgtcgagatcaacaatctcgctcgctttgctgtagaggaacaaaacaaaagagagaattcagttctggagtttgtgagggtgattagtgcacagcagcaagtggtttctggagtgaattactacataacattggaagcaaaagatggtgagattaaaaatgagtataaagcgaaggtttgggagagggaatcccaagagttgctagaattcatgccaacattaggtgcatgaggcgagatcgaccatctcgctcgctttgctgtagaggaacaaaacaaaagagagaatgcaaatctggagtttgtgggggtgattagggcaaagcagcaagtggtggaagggttcatatactacatcactttggaagcaa

SEQ ID NO: 19560 - DNA, 403 bp, Glycine max
  Clone ID: LIB3106-075-Q1-K2-E3
cccacgcgtccgtgagaaaggtaaaggtcctttttgttccggtgcgctgctcgaaaatccggtggatgatgtcaattgttccaatcaaccaaagtcacccccaggactctcgggatcaattcatcgattttcctctccctccttccatctacagcttcttccccggcttcgaattcacattccgctcatcggtggataacacacgtgtgtactggagggagactcccatagcccacgtgtggaaggtcgtgcttcctggcttcacaaacgacgacgtgctggttgagctacaagaccagagcgtgctccatgtcatcgtggagagtggcaacttcctgacgaggtttaagatccattacaacggtcaccttgaacaactcacaaccaacatgcgtcacgggat

SEQ ID NO: 19561 - DNA, 326 bp, Glycine max
  Clone ID: LIB3106-075-Q1-K2-E4
aacacacatacgtgattacattaaaggtcttttttaaaccgctgcgctgactccaacatgggggggatgatataacttgttccaatcaaccaatgtcactcccagtactctcggcatcaatttatcgattttcctctccctccttccatctccaacttcttccccagctcctaattctcattcacctcatcggtggttaacacacgtgtgtactggtacgagactcccatagcccacgtgtgaaaggtcctgcttcctatcttcacataccacgacgttctggttgagctacaataccagatcatgctccatgtcatcgtgcagag

SEQ ID NO: 19562 - DNA, 431 bp, Glycine max
  Clone ID: LIB3106-075-Q1-K2-D10
gaagctattgatcttgcatcccggcttttgcaatactccccaagtctccggtgcactgcgcgggaagcatgtgcacatcctttctttgatgaacttcgtgaacctaatgctcgcttgccaaatggtcgtccatttccccctctatttaacttcaaacaggaattatctggagcatcttccgagcttgttaataagttgatacctgaccatgtgaagcggcaaatggggatacagtttatgcatctgggaggatcgtgacgataaagcttaagggacatagtgtatactagctgataagttaaaaaaaagtggcaccattattttttgtcttaataccatgttctgtgacctggcgaatgtagtttcaagctgaaccgagactgagattcgcgatgccggatggcccgcagtgatccgtcagtatatgtacc

SEQ ID NO: 19563 - DNA, 425 bp, Glycine max
  Clone ID: LIB3106-075-Q1-K2-B5
gcggtttggtctacgcgttcctctctgcggtgctcacaaacagcagaaacagagtttcagagtttcagaggttagttgaagatggcgtggcgtcggagaatgatggagggtgctgtagagggattgaaaatttggagctttggggtgcagcagtgaagtggggttccgagttcaaattcaacagttctgaagggtgctgcaacgcgtgcaaatccatgtgttctgggaaagatgggccttgtctgtgtgatacttgggtcttttgtggggatcgtaaggcctgtggatccaagttcggtgagtgttggttgaagaaacagaaggacagcttagcacctgaacggcaagaaggagcgcctcagggggaagtgattggttggacttctggtcttatctttgggaaaggagagggtattattggactg

SEQ ID NO: 19564 - DNA, 426 bp, Glycine max
  Clone ID: LIB3106-075-Q1-K2-B6
ggcggctctttgatcaattatctccggaaacttctggaacctccttatgttgatacccttgaatggtccaaatggcacgtgttttgggtggatgagagagtcgtgcctaagactcacgaagatagcaactacaagcttgctttagatggacttctctccaaggtgccaattcccccgggcaatgtttatgcaatcaatgatgcgctttcagccgagggagcggcagatgattatgagacgtgtctcagacacttggtcaagaacaatgtgatagcttcatcaccagccaatgaatttccaaaatttgatctcatgctgctgggcatgggccctgatggccacatagcttctctgttcccaggccatcctcttgtggaggagaaacaaagatgggttaccttcattaaggactccccaaaaccacca

SEQ ID NO: 19565 - DNA, 424 bp, Glycine max
  Clone ID: LIB3106-075-Q1-K2-B7
cggacgcgtgggcggactcgtgggcggactcgtgggcggacgcgtgggttgatctctgacaaccccaacacttccgaaccttgcattgtatctacccacttctcaaccaacaatggcaatggcaacccaagcctctctcttcaccccacccctctccggtctcaaacccagcgaccgagccaccgcgccatggaaacaatcctccaccctctccttctccacctcgaagcccctcaagttctcgcgaacaatcagagcagcagccaccgaccagaccacagaggcaccggttgggttcaccccaccggaactggacccaaacaccccttccccgatcttcggaggcagcaccggcgggctcctgcgcaaggcccaagtggaggagctttatgtcatcacatgggactccccgaaaagacagatc

SEQ ID NO: 19566 - DNA, 389 bp, Glycine max
  Clone ID: LIB3106-075-Q1-K2-B8
cccacgcgtccgcccacgcgtccggttctatctgtgacgagcatcatggcctcaagagcagtgttattgttggctatgtgtgtgcttccggcgatggttgtggccattcgcccagcaaagaaccctttttgcgtgaagggtcgtgtctactgtgacccttgccgtgctggttttgagacctcagctaccacctacattgctggtgctgagattatgttgcaatgcaagagcagggttagcaacgaggttgtgtacacgaagaaggggtacaccgactcaaccggagcatacacaatgtacgtggatgaggatcacgcagatcagatctgcagtgccaagcttgtaagcagccctcaccctcaatgcatggaagtcaccccaggccgcga

SEQ ID NO: 19567 - DNA, 131 bp, Glycine max
  Clone ID: LIB3106-075-Q1-K2-B9
gtcccattacatgttaaacgtaatggtgcttgtgagtacctatcaccactttttttgttggttggcaacttgccatttaattagtcaggttaatgtcttttttagtgttaatctctcagctttcttgcaag

SEQ ID NO: 19568 - DNA, 427 bp, Glycine max
  Clone ID: LIB3106-075-Q1-K2-C1
acccagccagcgttgttgttttacacacttggtggttgcaaatagcattaccacaaagtggtgacggctccagatccgtgttagtcttgtacgaacgaggatcattggcacgattagtcaatgaagtcccatatccacgttcttgtgaagcacgttttcgagcggttatcaatgccatacttcctagcgactaatgactctaggcacatttttaatatctggcttagactaacggcgtggagaatgatgcaggctaccgtcttgtgattagcctttgagcattctatcatgcgattgatgagccatgcgtgatgccttctaacagccaaatgtgtatggtgcatccatattacaaacgaaaccagtctatctaccttgacaccattaatatggattcacttgcccggaaagccctggtcattgcaga

SEQ ID NO: 19569 - DNA, 480 bp, Glycine max
  Clone ID: LIB3106-075-Q1-K2-C10
cgaacggcaatggcagcctcatcctccttcttcaccctcttctccttcctcctccctccaaagccacaccctcctcccatcactcgcttcccactccagaagctacgcgcccagcagcaggacggccagggccaccaccaccactcgttggcggaggtgtccgccgtggcaaacccgtcccacgcgcacgcgaagacgctgttcttccggtcggcgtacaacgtgcaggtggtggtggaagagaacgagccggaggagaggctgctcaaccgcttccggagagaggtcatgagagccggagtcattcaggagtgcaagaggagacggttcttcgagaacaagcaggaggagaagaagcgcaagacccgcgaagctgccaagcgtaaaagcagaagcaggcgctttcaatcgaaatttcaaccacaaaacaagccggatgttgcagcaaccaagaagggaagaggatgatgataactggga

SEQ ID NO: 19570 - DNA, 253 bp, Glycine max
  unsure at all n locations
  Clone ID: LIB3106-075-Q1-K2-C11
cccacgcgtncgcccacgcgtccgaaatttctcagtcttcggaactcgtttctaccttcactgggcacatctcgaaccctctctttccggcaactaggttaaagttcatcaatggcaggtcgtggcaaaaccctaggatccagcgccgccaagaatgccacctcaaggagcagcaaagccggcctccaattccccgtcggccgtatcgcccgtttcctcaaagccggaaaatacgccgagcgcgtcggcgccg

SEQ ID NO: 19571 - DNA, 434 bp, Glycine max
  Clone ID: LIB3106-075-Q1-K2-C12
tcaagaatgagggtattttgattgcaaaacttcagcatcggaaccttgttagactcacgggcgtattgcattgaaggagatgaaaaaatcctactttatgaatacatgccaaacaagagcttggactcatttatatttgacccgacacgaacttcactactggattggccaatacgatttgagataatcgtatgcattgcgcgaggcatgttgtatcttcaccaacactccacattgagagtgattcatagagacctgaaaaccagctacattcttctagatgaggagatgaatccaaagatatgagactttggtctggccaaaatatttgggggaaaagaaactgaagcatgtacagggagagtaatgggaacctttggatacatgggtccagagtatgccttggacagattcttttcaaccaaatacgacgc

SEQ ID NO: 19572 - DNA, 249 bp, Glycine max
  Clone ID: LIB3106-075-Q1-K2-C2
gtttagatcgcgagcgttcccctctatgtttttttttgaattggggtgattatcaataaggatgaattaataatgcatggggggcgatgtacgtaacaaaaggtgacagtaataacatccatgcgtgtaactttggaacgactgagtccagacatcaactatcataggtgcggcactcataagtctctgcattgaccttgcaataattttcaagcaggtcaaaccgcttctgcttctcaatagcgtggc

SEQ ID NO: 19573 - DNA, 413 bp, Glycine max
  unsure at all n locations
  Clone ID: LIB3106-075-Q1-K2-C3
ctttctgcttagtctccacgctcttgcttgcttttgtgtgagagaacaatggcaatggtggagtgctccaagaagcaagtgaacctcttctattcccttgactgttaagaccttgcccagaacgttgctcttcaatcaccccacatcgttctccagaacatcaaatggaggtcatttgctgatggatttccaaatatatatataaataatgcagaagaacttcgaggtcaacatgttgctttcttggcatctttcagctcccctgcacatgtcattgaacaactttctgtcatatatgcactccctcgtttatttgttgcttccttcacattggtattgcctttctttccaactggatcctttgagcgaatggaggaagaaggagatgtancaactgccttcaccctagcaag

SEQ ID NO: 19574 - DNA, 267 bp, Glycine max
  Clone ID: LIB3106-075-Q1-K2-C4
gcccacgcgtcgtggctaccaaccctttctctccttttgtcgcttctcttcgatgatggcttagaatgccgcggagttcgacccctcccagatcgtcgacgtcttctacgcgtaccggctgtgggtcggcgcggtggtcccttgccctgaatcgccccgttagctatcgcgtgagatcggagatgatatcggcatgggaaccggcacggcctgattgtccttcgtgtcaccgcagctgaccggcaaaccgtaggccatggtcacggt

SEQ ID NO: 19575 - DNA, 390 bp, Glycine max
  Clone ID: LIB3106-075-Q1-K2-C5
cccacgcgtccggatggagggggttgagagcaaagaaagagaagtgatggtggcaaaaccagttgcagtagtaggtgtctgtgatttgcttctgaggctgttggccttcacagttactcttgtcgctgctatagtcattgcggtcgataagcagacaaagcttgttcccatccagctttcagattcttttccacctttgaacgttcctcttactgctaagtggcaccaaatgtctgcctttgtgtactttctggtgaccaatgcaatagcatgcacgtatgcagccatgtctctactccttgccctcgtaaacagaggtaaaagcaaaggcttgtggacattgatcgctgttctcgacacattcatggtggctttgctcttttccggcaa

SEQ ID NO: 19576 - DNA, 385 bp, Glycine max
  Clone ID: LIB3106-075-Q1-K2-C7
cccacgcgtccgcgacgaattacctgatgtggcgcaggagtttcaggtgcaggcgatgccgactttcgtgttgtggaagaaagggaaggaagtcgacaaggttgtgggcgcaaagaaggacgagctcgagaagaagattgagaaacatcgatcgtgatcttagctctgtaatcctattcattcagctatttatctttctttccaaggtgaaaagaatattaaaacagagtttaaatttgttatatttggctgtagtgttatgatgatgatgatgatgatggatggggttgtaaaattttaaactggttgggttgtttcttcaggaagatggtgtctgtttcatattttagcaaaattgttatatagaaattgaaaatactgtctc

SEQ ID NO: 19577 - DNA, 430 bp, Glycine max
  Clone ID: LIB3106-075-Q1-K2-C8
ttcttctcttaaaagagcctttgctttttctttaggcctttccgaattaagtacttgtttcattttctctcgaagcaagaaaaatgttcatcgagagtttcaaggttgagagtcctaacgtgaagtacacagagactgagattcagtccgtgtacaactatgaaaccactgaacttgttcacgagaacaagaatggcacttatcagtgggttgtcaagcccaaaactgtcaaatatgaatttaaaaccaacacccatgtccctaaactaggggtaatgcttgtggggtggggtggaaacaatggctcaaccctcaccggtggtgttattgctaaccgagagggtatttcatgggcaacaaaggacaagattcaacatgccaattactttgggtcgctgacccaggcatcagctattagagttgggtcttt

SEQ ID NO: 19578 - DNA, 242 bp, Glycine max
  unsure at all n locations
  Clone ID: LIB3106-075-Q1-K2-C9
cccacgcgtncgcccacgcgtncgnccacgcgtncgcctctctctctctcctanggttagggttttctctcttcatcactctctgtgtcgctccgtttcaatggctcagcaagacgctcaaaacggcgggtcggagaatgccgctgctgctgctacggtgtcgtttgtcgctgtgaagccgcagctcctcgtcgaagctcccaaagccaacgaccccattctgttcttcaaggctgcgtttg

SEQ ID NO: 19579 - DNA, 375 bp, Glycine max
  unsure at all n locations
  Clone ID: LIB3106-075-Q1-K2-D1
gcctcgcatagcgtgttttggcacgaaggtggtatggccaaatacgtttacgctgctgagcgtggctccttatctgggaaggactaccaagaccctncaccatcacacactcattgatgctgaggagctcacacacgcgtccttttacaggactctcattgctgaattcattgccactctgctcttcctctacatgactgtgctcacagtcatagggtacaatcaccagactgacctcaaggaaaatggcgaaatctgtggtggtgttggcactcttggcattgcatgtgccattggtggcacgatcttcatacttgcctactgcactgctgggatttcagggggtcacatcaacccagcggtgacatttgagct

SEQ ID NO: 19580 - DNA, 426 bp, Glycine max
  Clone ID: LIB3106-075-Q1-K2-B4
cccacgcgtccgcacaattagaaaaaaaaaaaaacaaaaaatgggcgtttctcgttctcaaaagcctcatgttgtttgtgtgccattcccagcacaaggccacgtgaacccttttatgcaactaagcaaactccttctttgcaccggtttccacataacctttgtgaacaccgagttcaaccacaagcgtttggtgaagtctcttggacaagaatttgtcaagggacaacctcattttcgatttgagaccataccagatgggttgcctccatctgacaaagatgcaacacaaagcattgcagcattgtgtgatgcaactagaaaacattgttatgagccactcaaagagcttgtgaagaagctcaatgcttcacatgaagtgcctttggttacctctatcatctatgatgggctaatgggctttgc

SEQ ID NO: 19581 - DNA, 241 bp, Glycine max
  Clone ID: LIB3106-075-Q1-K2-A1
cgaccgacgcgttcgtccacgctttcttccactcgttcgtccactctttctattttaacatgctcatcttccaaacagatgcttccaaataacaagcagagccacaccaaatgtatccaccttctaccccactctttaccggagaggcaagatctaccagtcaccgactcattcctcgtctcaatttaaagtactaacaccaatctaaactgattgtttgctcctgccattaaaatgaaca

SEQ ID NO: 19582 - DNA, 273 bp, Glycine max
  unsure at all n locations
  Clone ID: LIB3106-075-Q1-K2-A10
cggacgcgtgggcggacgcgtgggcggacgcgtgggcggacgcgtgggaaaccctagtctcgatacatcaacttgggaggttaaagagacngcaacgttgtgctgtccgccttgaccgagccaganctttcgtcttggccctcaattttgccctgtaaaactaatcccagtcacaacagaaataatcaatggcaccgaaacagaccaaggctgagaagaagatcgcttacgatgcgaagctgtgcgacctaatggaggagtacggccaaatcc

SEQ ID NO: 19583 - DNA, 408 bp, Glycine max
  unsure at all n locations
  Clone ID: LIB3106-075-Q1-K2-A11
cccacgcgtncgcacagaggcagaagaagcatagagtgagaagtgaagagtgaagaagagtgaggaattgaagagaaaatgggtgctgattggggaccagttattgttgctgtggccttattcatcctcttatctccgggtttgttgttccaatttccctcaaagtatagggtggttgagtttggaaacatgagcactagtgggattgcaattttggttcatgccatcattttcttctgcatacttaccatcttggttgtagcaataggcattcacatacacatcaattgaatcctatgttcaccttataagtcaccacaaatctccatatgtacgtttacaattacttttctttttagctcctttgatgtattaatttcccttttaaaagttttcatcttggttttc

SEQ ID NO: 19584 - DNA, 389 bp, Glycine max
  Clone ID: LIB3106-075-Q1-K2-A12
gggaaataaaaaatagataactcgtttctgcacactcctgctcttctatccgctactctcaggtcttcacttcccttctatcactcttctcacttctgagaggtggaatcgttgggtcttaatgggtcccttttcactatccgttatggttaatgactctgccatttcattaccagatacttgtacgaaaagaaagcagaacttacttctgaaaaattcttttgcatcagttagcatgggagatgaaaagccatttgacttcctacgcattttatttgagggcgttattgcaggaggtacagctggagttgttgttgaaacagctttatacccaatggacacaataaaaacacgtctgcaggctgctcgcggaggagaaaaactaatat

SEQ ID NO: 19585 - DNA, 333 bp, Glycine max
  Clone ID: LIB3106-075-Q1-K2-A2
aaagtggtaggtgaatgtttgaaaacttgattttgaacttgcccctaataaggtggtaggtgaatgtttggatggttgattttgattgaaattgtttttaaagtgaagtgatttataactcttaatagttattaattgtgaaatccaaggattaaattttttgtccaacatataagttaaattgcttccaagtaaataatcgattgtggatccaagactcgtcttttcaacctgagatcaaacaggtgaacaactaaagtcaagttagctgatattttaagggattctgaatcatctaaagtgagcccaaagatgcgatattatgaaattctt

SEQ ID NO: 19586 - DNA, 434 bp, Glycine max
  Clone ID: LIB3106-075-Q1-K2-A3
cccacgcgtccgcgccgtcgtcgctgtttgtgtgtgtatcaggtgcagctaccaacgatggtgaagggtcgtcaaggagagcgcgtcagactctacgtgaggggtacaatccttggatacaaaaggtccaagtccaaccagtacccaaacacatccctgatccaaattgagggagtgaacaccaaagaagaagtaggatggtatgctggcaagaaaatggcctatatctacaaggctaaggtgaaaaaggatggaagccattaccgctgcatatggggcaaggttacgaggcctcacggcaacagtggtgttgtccgtgcaaaattcaagtcaaaccttccacccagatcgatgggagctcgagtaagagtattcatgtatccaagtaatatatgagattcaggtgataagacgctcagaattcgcaagctaat

SEQ ID NO: 19587 - DNA, 428 bp, Glycine max
  Clone ID: LIB3106-075-Q1-K2-A4
cccacgcgtccgctgaagtagtcatatcttccctgagacttggtgatgatcaagggagtaatctgtttacaaactccaactggtttgcattccaagacaacagaattggtgatgcacctgggggtacatcatcctctgagatgatggatgagataaaattgaatgcagctgcaaatggtggtagcaacagtagtgatgatgaggtagtggtcggagaggatgaagaattggtggacagcaaaaatactgtgaatggtacatctagctcaagcacagacttctttagtggattaactggcagtgattccttgaatgggggcactctaaacattgaaagtgagaagacaagtccttcacatgatatgggatttttcaggtttgaggcaccagacaatgaggacttgtttggagatagacctttacctgat

SEQ ID NO: 19588 - DNA, 431 bp, Glycine max
  Clone ID: LIB3106-075-Q1-K2-A5
tcgtccacgcgttcgtccacgcgttcgcccacgcgttcgatttgaacaggctgagctggggaagcatcctgccaaaaaacaagcggggtcacaacaaaagtatccaacttctggcccaagctttactgggaaagggagaaagtgatagtaattgagttagtgggcggcttgtattaaagtactaatcacattctaagctgattgtttgcccttgccatttggtggaacattgatttattgagctgtcgttgtgtatccatcaatttttagttgcactgttctgcgacaaagttggatgtggtatgtaaagttagtactggctgcaggcttgttgtttgaacatgcttgaactatgaatttcacgtggctctttcctgtcttactccgctcccattctccttctcattgtaacggatagaacaatgaataat

SEQ ID NO: 19589 - DNA, 308 bp, Glycine max
  Clone ID: LIB3106-075-Q1-K2-A6
cgcggttcctgcgactactccgactgatcatggatccacgacccctcgaggactccgagggacgacaatacctgcaaggagatcttcaaggtctggaactgcctctccgtccacaaatacaacgccccacatctctccacttggcgctggcaatccctcctctgcgatctcccacagttcgaccccgctgagttcctacgcactcacacccacaccaacatcgatcaggacttgtcggagactcgctcaacaggaacacgttcgcgtccatattctgctctctcaagagtgcctccgatggacagatc

SEQ ID NO: 19590 - DNA, 321 bp, Glycine max
  Clone ID: LIB3106-075-Q1-K2-A7
accgacgcgtccgtttgatcctcattgccgtctcacaaagtgtgtttagacattgaagttttacccaagggtgggctgaagccggcgaaagagccgcgaggctcacttcaccgctgcgtcgagcgtgcgtcgcgttctgatgagcgcagcctctgtcagaccgatgcttcagtcgtagtacagcagcgcggaccattccgggtcgcaaggacaacaaggtgcaggtggtgcagggatcctacatgggccgtgagagcaaactggtgcacgactatcgccacaagtgggtcattcacatggggcgcatgacccgctagaagg

SEQ ID NO: 19591 - DNA, 338 bp, Glycine max
  Clone ID: LIB3106-075-Q1-K2-A8
attttatttttttatgatgtcatttgttagattctgtgtttccaaaccttgtgtttggaggctgttgcttatgtaccatatgagaaggttgcatttggtcggataaaatgccttagattaatgcaattgtagtttaaagttaaaagtgatgcattcatcaccttggacctgccgtactattttttaaagccagccaaacggcagataaaccgcatgtttacagaatttgaagacaaggtggaggactcgaaaaataatttaaatcaaaattatgaatgttgtggaaggtgtggctgtgaactcaacacctgaaaattcgaattgtgaaagggcggccg

SEQ ID NO: 19592 - DNA, 331 bp, Glycine max
  Clone ID: LIB3106-075-Q1-K2-A9
attgaattcaaaaactaagttcatttcttgtgctttgctttattcctcaaaaccaaacatgtggaacacatgcggcaactgtgactgcgctgacaagactaactgcaccaagggaaacagctatggtgttatagtagagactgagaagagctacatcgagactgttgacatggatgttccagcagctgagcatgatgggaagtgcaagtgtggcactaactgcacttgcacggactgcacttgtggccattaaggaatatgtatgaaaatgtaattgccatgtgtttggcaatacaaatctccaaataatgtaatcttcgtatgaataaat

SEQ ID NO: 19593 - DNA, 433 bp, Glycine max
  Clone ID: LIB3106-075-Q1-K2-B1
gctgaaggttcctcctttcgtgatgggtcatatggtgaaacacctggcacaccaaagcatttacatcgtggtggggatcaggatcgaacatttattccagattcaatgaatttcggagtggaaagggtaggcaaaaaggaccaaaagcgcatggcacctggagctccatcagctcataaaagacctagaaaactaaaggcctcagatctttagtttctcaggtggcaaccgggaaaggtgtttcaattcacagaattctttcaatcaaaattatgaatgttgtggaaggtgtggctgtgaactcaacacctgaaaattcggattgtggtatatctagtccaactgaaattcggttcacttcggtctaaaattttaaactaatgccactcttggtattcgatgtaaaaagaaaagtgggatccctgagatgagt

SEQ ID NO: 19594 - DNA, 407 bp, Glycine max
  unsure at all n locations
  Clone ID: LIB3106-075-Q1-K2-B10
gaacccacgccatgtttctataagactgaaatgctgactgaaccacccaatcacacaaagccgaactcatggactctctcttctctctaacacccacactccgaccattcaataattgcatccccctctctctcacacacttcacacccccaacaagagtaaaggtgagtgctttgcagccccgtcgaaaccacagaggcttgggtgtggccctgctcaacgtgaccgcaaacgcgaagcttcggataagtcccttcgttgccacgctggcagccaaccccaccttcgtgtcggggctgctggcgtggctgatagcgcantccatgaacgtctttctgaatttcttcatggagaggaaatgggatttgaggctcttgttcgcgtccgggggaatgctcctcttccac

SEQ ID NO: 19595 - DNA, 308 bp, Glycine max
  unsure at all n locations
  Clone ID: LIB3106-075-Q1-K2-B11
cgaaaatataacaaataatttgtactttcatcaaaacaaaatcccgttgtatttttctcaaatggctcgaacgaagcaaacggcccgcaagtcaaccggcggcaaggcgccgcggaagcagctggcgactaaggcggctcgcaagtcggctccggcgaccggcggcgtgaagaagccgcacagattcaggccgggaaccgtggcgctgcgcgagatccggaagtaccagaagagcacggagctactcatccggaagctttcgttccagcgcttggtccgagagatcgcgcangacttcaagaccgacc

SEQ ID NO: 19596 - DNA, 433 bp, Glycine max
  Clone ID: LIB3106-075-Q1-K2-B12
cccacgcgtccggcactttcttgttttctctctcaccctcatatccatcatcttccacacccatggagcgttctctgagcaatcaataatcaagttacccacagaccaaccaagggtagagaaactgacccacttgcattttttctaccacgacatcttagagggcaagaacatcacggtggtgaaaatcatcgagccatcagcgagcgaggttcgtgaagcaactgggtttggaaccactttcatgatggacaatgttttgaccgagggtccagagctgagctcgaagcacgttgggagggctcaagggctgtttggcttggcctctttggaagaccgtggaatggtgatgctcattaacttggctttcagtgagggtgagtatgctggcagcactctcagcatgcttgggaagaaccctgttcaagacact

SEQ ID NO: 19597 - DNA, 417 bp, Glycine max
  Clone ID: LIB3106-075-Q1-K2-B3
cccacgcgtccggaacaagggtttctctttctctttctctgtctgcttcttcactttctcgcgtttcaatcgaaaaaaatcatgggcagaaaattcttcgtcggtggcaactggaaatgcaatgggaccactgaggaggtgaagaagattgttactactttaaatgaagctaaagtccctggagaagatgttgtagaagttgttgtgagccctccttttgtgttccttccttttgtaaaaagtttgctgcgccctgatttccatgtctcggcccaaaattgttgggttcgcaaaggtggtgcttatactggagaggttagtgctgaaatgcttgttaatttgggaattccttgggttattattggtcactctgaacggaggcagcttttgaatgaatcaaatgagtttgtgggagat

SEQ ID NO: 19598 - DNA, 194 bp, Glycine max
  unsure at all n locations
  Clone ID: LIB3106-075-Q1-K1-H8
tttccccctctattaaacttcaaacaggaattatctggagcatcttncgagcttggtaaaaagttgatacctgaccatgtgaagcggcaaatggggatacagtttatgcatctgggaggatcgtgacgataaagcttaggggacatagtgtatactagctgataagttaaaaaaaagtggcaccattatttttt

SEQ ID NO: 19599 - DNA, 205 bp, Glycine max
  Clone ID: LIB3106-075-Q1-K1-A8
aagtgaagtgatttataactcttaatagttattaattgtgaaatccaaggattaaattttttgtccaacatataagttaaattgcttccaagtaaataatcgattgtggatccaagactcgtctttttaacctgagatcaaacaggtgaacaactaaagtcaagttagctgataattaaagggattctgaatatctaaagtgagc

SEQ ID NO: 19600 - DNA, 212 bp, Glycine max
  unsure at all n locations
  Clone ID: LIB3106-075-Q1-K1-B12
taccaaataaacttccttccattaaaccaaaatcccggggcaactttttcaaagggntngaacgagctccccaaaatccacgnaaccgggggnaaggcgccgcggaagcagctggcgactaaggcggctcgcaagtcggctccggcgaccggcggcgggaagaacccgcacagattcaggccgggaaccggggcgctgcgcgagatccggaa

SEQ ID NO: 19601 - DNA, 325 bp, Glycine max
  unsure at all n locations
  Clone ID: LIB3106-075-Q1-K1-B8
cgcgtccgcccacgcgttcgcattttggcatcgagggagtanctcatcggatagagaaaaaccatagcgatttctttaagaggaaagggaggcacccctctaaacaagggaggagcgaaacgacaccgnaaggggctgagggataacattcagggcataacgaagcccgcaattcgccgtctcgcgagacgtggcggcgtgaagcgtatcagtggtctcatctacgaagaaacccgcggcgttctcaagatcatcctcgagaacgtcattcgcgacgctggcacctacactgagcacgctcgccgcaagaccggcactggcatgg

SEQ ID NO: 19602 - DNA, 157 bp, Glycine max
  Clone ID: LIB3106-075-Q1-K1-C10
gagcgggggccccccaaaaactcaccaagttacccacagaccaaccaagggtagagaaactgacccacttgcattttttctaccacgacatcttagagggcaagaacatcacggtggtgaaaatcatcgagccatcagcgagcgaggttcgtgaagc

SEQ ID NO: 19603 - DNA, 440 bp, Glycine max
  unsure at all n locations
  Clone ID: LIB3106-075-Q1-K1-C11
ccacgcgttcgcgaacggcaagggcagcttttatcnccntttctacccccnncnccnnccgttttcttccaaggccacaccctcggcccatcactcgcttcccactccagaagctacgcgcccagcagcaggacggccagggccaccaccaccactcgttggcggaggtgtccgccgtggcaaacccgtcccacgcgcacgcgaagacgctgttcttccggtcggcgtacaacgtgcaggtggtggtggaagagaacgagccggaggagaggctgctcaaccgcttccggagagaggtcatgagagccggagtcattcaggagtgcaagaggagacggttcttcgagaacaagcaggaggagaagaagcgcaagacccgcgaagctgccaagcgtaaaagcagaagcaggcgctttcaatcgaaatttcaaccacaaaac

SEQ ID NO: 19604 - DNA, 457 bp, Glycine max
  Clone ID: LIB3106-075-Q1-K1-C12
cccacgcgtccgcccacgcgtccgaaatttttcagtctccggaactcgtttctaccttcggttcgcacatctcgaaccctctctttccggcaactaggttaaagttcatcaatggcaggtcgtggcaaaaccctaggatccagcgccgccaagaaggccacctcaaggagcagcaaagccggcctccaattccccgtcggccgtatcgcccgtttcctcaaagccggaaaatacgccgagcgcgtcggcgccggtgctcccgtttacctcgccgctgtcctcgaatatctcgcagccgaggttttggagttggctggaaacgctgcgagagacaataagaagactcgaattgtgccgcgccacattcaattggcggtgaggaacgacgaagaattgagcaagcttcttggtgacgtcaccatcgctaacggtggcgttatgcccaacattcacaatc

SEQ ID NO: 19605 - DNA, 263 bp, Glycine max
  unsure at all n locations
  Clone ID: LIB3106-075-Q1-K1-D11
ggaagcaggggcgcccccaaaccccatgaacttcgtgaacctaatgctcgcttgccaaatggtcgtccatttccccctctatttaacttcaaacaggaattatctggagcatcttccgagcttgttaataagttgatacctgaccatgtgaagcggcaaatggggatacagtttatgcatctgggaggatcgtngacgaaaagcttaggggacatagtgtatactagctgataagttaaaaaaaagtggcaccattatttttt

SEQ ID NO: 19606 - DNA, 248 bp, Glycine max
  unsure at all n locations
  Clone ID: LIB3106-075-Q1-K1-D12
aagaacggcacagnggnncacggcaccannacaggggnnganatcagnatgaatacacattngaaaacagntaaactaactctgaaagggaaaaacccagttactttggatcatctcagtgtgagaggcaacaacattcgatattatatccttcctgacagcttgaatcttgagactttactggttgaagaggctcctaagatcaagcctaagaagccaactgctgggaagcctttggggagagggcg

SEQ ID NO: 19607 - DNA, 217 bp, Glycine max
  unsure at all n locations
  Clone ID: LIB3106-075-Q1-K1-E2
aaagnacaaaatagatttggaaatccaggtacacaccccattctacccatttgccgaggcgagagaatcatatgcccccggaacaaaggagtatgtacatattccaattcaacagaggaatgggaagaagagtcagaccacagaacaagggctaaagaaggagttcagctacaacaaaaacctcaaagaccacaaaaaggagatcagcttcaacgga

SEQ ID NO: 19608 - DNA, 389 bp, Glycine max
  unsure at all n locations
  Clone ID: LIB3106-075-Q1-K1-E8
attgcaggaagctgccaacagcgggaagatcaacaatctcgttcgcttggctctgaaggaccaaaccaaaggagagatttcagttctgaagttggggaggttgataagggcacagcagcaggtggttcctgaagtggaatactacataacatgggaggcaaaagatggtgagataaaaaatgagtataaagcgaaggtttgggagaggaaatcccaagagtggctagaattcatgccaacattangtgcaggaggcgagatcgaccatctngctcgctttgctgtaaaggaacaaaacaaaagagagaatgcaaatctggagtttgtgggggtgattagggcaaagcagcaggtggtggaagggttcatatactacatcactttggaag

SEQ ID NO: 19609 - DNA, 296 bp, Glycine max
  unsure at all n locations
  Clone ID: LIB3106-075-Q1-K1-F10
ttttgccaccggnngggggcgggccccccaaaccaacccaacannaantaatgccaattgcccaccacccactccaactccatctccatctccgaagcccacaccacccacaccaccaactccaaaaccaacacctcccactccaaagcccacgccaccaactccaaaaccaacaccacccacacccacacccacacccacaccacccacaccacccacacccaaggctggttggcctccaccttctcctccttcgccacccaaagcttcatgccccaaggacacattaaagctag

SEQ ID NO: 19610 - DNA, 168 bp, Glycine max
  unsure at all n locations
  Clone ID: LIB3106-075-Q1-K1-F2
ggcaaanncnnncaaaggaagnagcaaaaagnanggcngaggaaggaggcnngccnncaacaccngnngcnncncagncngcccagggggnnaaagggcnnccagaagncaagaccaangaagngccaaaagaaaacacncnggagaagccagaaaagccngagagca

SEQ ID NO: 19611 - DNA, 315 bp, Glycine max
  unsure at all n locations
  Clone ID: LIB3106-075-Q1-K1-F7
acatctagagctccagatttgaataggcaaatcctttcaaaggaagtagcaaaaagtatggctgaggatggaggctggccttcatcacctgttgcttctcagtctgcccagggggttaatggccttccagaagtcaagaccaatgaagtgccaaaggaaaacactctggagaagccagaaaagcctgagagcacttcttcacctagagcttcacattcagtaatttcaggtacctgtaggaaacctatncgtgctaaaaaagcagtgaagagtggngggcttggtgctcgtaaactcactaaaaagccaagtgag

SEQ ID NO: 19612 - DNA, 204 bp, Glycine max
  unsure at all n locations
  Clone ID: LIB3106-075-Q1-K1-G10
gagacgcgnccggataaatgatcaganggcaaaaaaggcagcaaagaggactacagccacgatgacaggggggaccccagaaagcaaacgggcgacaaagggggcgcaaaggacagcacacaggagaagagccgccaagagtgaaggcaaaaaggaaagggaagaggacagtgatgacaacggagagaggaacgggaggaggaa

SEQ ID NO: 19613 - DNA, 201 bp, Glycine max
  unsure at all n locations
  Clone ID: LIB3106-075-Q1-K1-G11
gaaaacaataggaatnaaagnncagttttttaaaaaagaaaaaaaaaaggaacccaaaaaacaaaaaaaaaaaaaaaaaaaaaaaaaaaaaaaaaaaaaaaaaaaaaaaaaaaaaaaaaaaaaangggggggccgcccaaaaggaacaaagcnaacgnacgcgggaaggcaaacgaaaagcccnncaaaaggggaaccaaa

SEQ ID NO: 19614 - DNA, 361 bp, Glycine max
  unsure at all n locations
  Clone ID: LIB3106-075-Q1-K1-G12
gcccacgcgnccggcctaactacatncncntggggccagaaaaaccaggtattcgccgtggcgncggaatgggtgcgcgaaaactacgcgtcgaacgctacaacaattttcttctccaattcaatactagtactataacatagacgattagacggtgcgttcttcttttaaaccctcgtttcactttccgcttcatctttcttttgtgttgctcagcaatccctcccattttttttccttcaatctgcttcaatggaaggtttggcttccctcaaggctccctatccggccaccccatttctctcttccagacccagaacctctattcttccatcccaagccagttttcgtaaaagaagct

SEQ ID NO: 19615 - DNA, 64 bp, Glycine max
  unsure at all n locations
  Clone ID: LIB3106-075-Q1-K1-H1
aaaaaaaaaaaaaaaaaaaaaaaaaaaaanaaaaaanannnnaaaaaaaaaaaaaaaaaaaaaa

SEQ ID NO: 19616 - DNA, 400 bp, Glycine max
  unsure at all n locations
  Clone ID: LIB3106-075-Q1-K1-H11
cgcgtncgnccacgcgtccgtctntgtctggtccattgttctacttgcacgcagaggcaagactcgcagccaggattatataagacaatgagtggtgcgcaactgcaaagtgcttcccctgccttgaccatacaagggtcacagaaaaatgtaggttcggtggctgtggcaactgctgcagaatcaaagccaaagaagaaaatctgctgtgcttgcccagacactaaaaggttgcgagatgaatgcatagtagagcatggtgaatcagcctgtacaaaatggattgaggctcatcgactgtgcctccgtgctgagggattcaatgtttgaggttgatagtgaggaaaagacattagtagattaactcaggtgattttatgaaattgatagaagattttgg

SEQ ID NO: 19617 - DNA, 370 bp, Glycine max
  Clone ID: LIB3106-075-Q1-K1-A7
cgcgtccgcccacgcgtccgcccacgcgtccgcccacgtttccgatttgaacaggctgagctggggaagcatcctgccaaagaacaggcggggtcacaacaaaggtatccaccttctggcccaggctttactggagagggaagatagtgatagtaattgagttagtgggcggcttgtattaaagtactaatcacattctaagctgattgtttgcccttgccatttggtggaacattgatttattgagctgtcgttgtgtatccatcaatttttagttgcactgttctgcgacaaagttggatgtggtatgtaaagttagtactggctgcaggcttgttgtttgaacatgcttgaactatgaatttcacgt

SEQ ID NO: 19618 - DNA, 68 bp, Glycine max
  Clone ID: LIB3106-075-Q1-K1-H12
cccacgcgtccgcccacgcgtccggaacatgtttggtatctacgcattagtcagaactcaagggattt

SEQ ID NO: 19619 - DNA, 141 bp, Glycine max
  unsure at all n locations
  Clone ID: LIB3106-075-Q1-K1-H4
ttttcgattagnncatcnnncatacttacattnnatggcaacnagaaatggctgcttttcgcaagtcatgttaaatgtgtgtcacaaacaccaaccggtattaactttagaaactatagttaaatttcttaacaggccctt

SEQ ID NO: 19620 - DNA, 236 bp, Glycine max
  Clone ID: LIB3106-075-Q1-K1-H5
cgcgtccgcccacgcgttcgaaaaaaaataaaaaaaatatattttttaaaaaaaaaaaaaaaaaaaaaggtttttatttttaaaaaaaaatgggcggcctccaaaaccccgcccggctctttcttccaggtctttcgctttcgtcacgcgttcttcttaaagggacttctttttttttatggtccccccaatttatttcccttggccgccctgttacaaccccgttaatgcccaaa

SEQ ID NO: 19621 - DNA, 248 bp, Glycine max
  unsure at all n locations
  Clone ID: LIB3106-075-Q1-K1-H7
acaaaannggaccagatgaagacaaaatcgctccaaatcctggtgcactcaccggacctcggaatttcccttcaatccacaaccaaccacgaaaccctttccgatctcaaaaactctcttttccctcaatcacaccaatccttctacttcaccttcaatggcaaacccctccccgacaaaacccctctttcccaattcccccctnttttcaacctctctctccgctcccgcctccttggcggcggcgg

SEQ ID NO: 19622 - DNA, 241 bp, Glycine max
  Clone ID: LIB3106-074-Q1-K1-G7
gaagaatatgtgcaacgaattaaagatagcgttggatagcgcttcgcgatgcacgaaagagaagaaatggaagcaaagtttctgagttttgtctttcatataaaatatgttaaattattattttctatgataggattggatacttggcttaagtctcttgtttaagaattttggtgtattttaaccattgtaaagcactttgcgctgtgtctgcatgatcaagtacaactactagcatgct

SEQ ID NO: 19623 - DNA, 438 bp, Glycine max
  Clone ID: LIB3106-074-Q1-K1-G8
gccacgcgtccgcccacgcgtccgtccctctcactcactttcgctctctgacttcacctcaatgcaccacactgcacgtaagtactcactacctttggctcttctttactatggatgaagctgcaagcagccaaccctagcttgcatatcccctcactctccatttcagccgcaagccacgcaccattcttcatctcttatagtcttacttcatctgcgctcatagcatatatattattatgcgtaagtgaaccaaccactcaccttctcatctgcgaccaccaccagcagcctaaccagtcaggacttgcccggcatgaaccaccatacatgcgtgaaccaactgcagtgacttcctctttaaccaacccttgtgaactataggaaccacgtgcagtaacgaatcagcgagggtaattaggcaaattggcaaaaatg

SEQ ID NO: 19624 - DNA, 425 bp, Glycine max
  unsure at all n locations
  Clone ID: LIB3106-074-Q1-K1-G9
gttatagcaaatcattacatgcttcctgatttcttattacttgcagcttgcttcaccactacggtatgcaaatatatattcagagaagattgtacatctaccgcattgctactttgtaaatgattataaacagaaaaatcaggatgtgttagatccaaactgtccacacaaacgatcagattatggtctacctgaggataaatttatatttgcatgcttcaatcaactttacaagatggatcctgaaatatttaatacatggtgtaatattcttaaacgggtacccaacagtgcactctggctcctcagatttcctgcagctggggaaacgagactgagagcatgtatgtgttggcgtttgattatgatttttagactctgatcnggaatatcagggttcatttttatttgttctccaatgggca

SEQ ID NO: 19625 - DNA, 460 bp, Glycine max
  unsure at all n locations
  Clone ID: LIB3106-074-Q1-K1-H1
ctggtatggcattccgtgttcccaccgtggatgtctctgttgttgacctcacagtgaggctggagaaggaagcctcctacgatgaaattaaaaatgctatcaaggaggaatcagagggcaagttgaagggaattcttggttacactgaagatgatgtggtctccaccgactttgtgggcgatagcagatcaagtatttttgatgcaaaggctggaattgcattgaataagaactttgtgaagcttgtctcttggtatgacaacgagtggggatacagctcacgtgtcattgacctgcttgtattcgttgccaagaagtctttttaaggttgtactgaaaaaaaagtagcttgtctagacattatgtgctggtgtctagctgcgatttagtgtcttcttgctcgggcagaaatgagaagtatgaataaatcggtttcgggaaccggtgttgntaccctgtt

SEQ ID NO: 19626 - DNA, 304 bp, Glycine max
  Clone ID: LIB3106-074-Q1-K1-H10
tccacgcgtccgtccacgcgtccgggctggcatagcagagtttgtggccactttcttgttgctctacatcacagtgctgactgtgatgggtgtgttcaaatctaagagcaagtgttccactgtgggtatccaaggcattgcttgggcttttgggggaatgatctttgctcttgtttattccactgctggaatctcagggggtcatattaacccagcagtgacgtttgggctgttcttggcacgcaagctctctctgacaagggcaattttttacataatcatgcagtgcttgggagctatatgt

SEQ ID NO: 19627 - DNA, 437 bp, Glycine max
  Clone ID: LIB3106-074-Q1-K1-H11
agttggagcagatcgagaaggagaaggctcaaggtattgatatatcagtgtatgggtcttccaaagtggtgcagactcaagccccagttcaactaggctcacttcgagcagcagatggcaaagaatgaggtggtcaacatatggctgtagtagtattcacctaaatgtttcaagtgaagagttggattatatatagcaactaaatagcggtatctggttatttttaattagctgctaaggatttcttatgtatctgctggttgttcatgtttggatcggaagccctgatgttcctaatgtattttatatagttttttaaggcacttcgtggtgcttaaggtggtttactgcactagaagctctaaattatttggtttgaattttgatgtctaaataattgattagtaagcaaataatcttttcttcctgtgaatatg

SEQ ID NO: 19628 - DNA, 234 bp, Glycine max
  Clone ID: LIB3106-074-Q1-K1-H12
gacaaggcttttggtattgatatatgagcgtatgcgtctgccaaagtggtgcagactcaagccccagttcaactaggctcacttcgagcaacagatggcaaagaatgacgtggtcaacatatggctgtagtagtattcacctaaatgtttcaagtgaagagttggattatatatagcaactaaatagcggaatctgggtatttttaattaacttctaaggatttcttatgtatc

SEQ ID NO: 19629 - DNA, 455 bp, Glycine max
  unsure at all n locations
  Clone ID: LIB3106-074-Q1-K1-H2
gaagcaattgacgtgagcggccatccatggtttcgcttcatccacatacactaacactagcgtgccctttgtccgtttcctcttcatcctcccgttttctcagatgctccgtaaattctgccccgaagcgaagaagaagcagcttcattactgcttcgtggcaagagctcgcgggagttttactattctccgcgattcctttcactgccgtgaaagctatagctaatagtccgctaggggagtcgcttcagaggaaaatggaggagagaaagacatttgctgtagaaaactcgtctacattcaaggccttagccggcaaggcccgaaaggagagcttttggtatggagaagatcggcctcgttggcttggtcctatttcatatgaatacccatcatatcttactggngaactgccccgggattacggctttgacattgctgggcttggccaggat

SEQ ID NO: 19630 - DNA, 457 bp, Glycine max
  Clone ID: LIB3106-074-Q1-K1-H3
ggccgccctttttttttttttttagtgtacaaaagaaaacaaggagaggctgtccacctcaaaatgcaaatttgtaccagttgaaaacaacggtctacatagttcatgatggtgtttcccttcgtttttacaattccaaaatatcataggagatcaaatggaactctactttccttttcttgcaagtattacaacttcaagaccaagcttaaacttaacttcatacttttgtacccaggaaggactttacgcctgctggagagtttcctggcttagtagtagtagtacttccgaagttgagctttacttttttatcagctggctttaatatttggaaagagcacattagtgtctcatcgacactcatcataacgccagcattgtcaaactttccacaataattaggtgctgaaaatattgttacaagctgccggttagcaaagaactcatacccatc

SEQ ID NO: 19631 - DNA, 126 bp, Glycine max
  Clone ID: LIB3106-074-Q1-K1-H4
aaaaaaaaagaaaatgaaaaaaaaaaagtcttgaatttctcacttctagttctagtattgttgttgttgttgttatatgatgtatggttgaataaatgtgatttggtgtttgtactttgtagagtt

SEQ ID NO: 19632 - DNA, 336 bp, Glycine max
  Clone ID: LIB3106-074-Q1-K1-H5
ccatgaggaagtttggtgcttgaacttgaacccgaacattgcgattcagacatagagaatggccatggcccgaagagtccctcggtatgttttaggatcggtccaaaggaacatgtccttcaaatctttggatcccccttcctgcctcacccacggaatccacgtctttcattgccccgatgcggttggaattgtagccaagctgtccgactgtattgcctctagaggtggaaacattctcgccgctgatgtttttgttcctgaaaataaacaagtcttctactccagaagtgattttggttttgatcctgttaaatggccaccggtgcaaatgga

SEQ ID NO: 19633 - DNA, 270 bp, Glycine max
  Clone ID: LIB3106-074-Q1-K1-H6
cccacgcgtgcgcttttcttctcgcagagcgtaatcccaatcccacacaaatggcatgctcagccacctctgcttctctcttcttcgcaaaccccacacctctcttctcttccaaatccttcctctcccttcctaacaactctctccaccttaaccctcttcccacgcgcccttctctcttccttacgcgccccttgcacactcgccgctccttcgtcgtcaaagccttcttcagcgagctttcgcttgttggaaacaccggaccggatt

SEQ ID NO: 19634 - DNA, 436 bp, Glycine max
  Clone ID: LIB3106-074-Q1-K1-H7
cccacgcgtccgcccacgcgtccgtgaaaacggtatccatcaatcaatcagcagggaagaaaaagaaaggaaggagcgatgtggttaacagcgaaacccattcgacaactatgcttcccactcccaatctcagtcccaaacaagttctgcaattgcagcttatccataacagcaacaaccaacaccaacaccaacgccgaaattactactactctcactcaaactcctaagccaaagccgaaccctaagtcgacgttgaagaagcgaaagaggtaccggaagctatatcccggagagaccaccggcatcaccgaagagatgaggttcgtcgccatgagactccgcaccaacgacaccgtttctcaacaagaacaccaatcgcattccgacgcgtggcaggccttcatggaaggcttcctctcttacctcgtcgaca

SEQ ID NO: 19635 - DNA, 448 bp, Glycine max
  Clone ID: LIB3106-074-Q1-K1-H8
gaagaacttagctacaagctaaggaaggatcaaagagaatggctcaagcaatggcatcaatgactagcttacgtggttcctctcaggctgtgttggaaggtagccttggctccacacgcttgaatgtggggagtggaagcaaggtggcctcagtcacacgtgcagggttcacagttagagcacagcaacaacaagtgaatggtggtgaggtacaaagtagccgtagggcagtgctttcacttgttgctgctggtttgaccactggctcttttgttcaagctgtgcttgctgatgccaaacctatcaaagttggaccaccttccccaccttctggcggattacctggaacattgaactcagatgaaccaagagaccttaagctgccattgaaagataagttcttccttcaaccattgtctccaactgatgctgcacaaagggcaaagga

SEQ ID NO: 19636 - DNA, 396 bp, Glycine max
  Clone ID: LIB3106-075-Q1-K1-A1
cccacgcgttcgccacgcgtccgcccacgttactatttgaacaggcgaaccggggaacgcatctttccaaaaacaaggcggggcaccaccaaaggattcaacttctggcccaagccttaacggaaaaggaagaaagtgatagtaattgagttagtgggcggcttggattaaagtactaatcacattctaagctgattgtttgcccttgccatttggtggaacattgatatatagagagctcgcggtgtgtatccaacaatttatagtcgcactgttctgcaacaaagtgggatgtggtatgaaaagatagcactggctgcaggcttgttgtttgaacatgcttgaactatgaatttaacgtggctctttcctgtcatactccgctcccaatctcct

SEQ ID NO: 19637 - DNA, 243 bp, Glycine max
  unsure at all n locations
  Clone ID: LIB3106-075-Q1-K1-A12
gggaccagnatgggggctggggccttattcatcctcttatctccgggttggtggttccaatttccctcaaagtataggggggttgagttgggaaacatgagcactaggggggattgcaaatttgggttcatgccatcattttccttctgcatacttacccatcttggggtgtagcaatagggattcacatacacatcaattgaatcctatgttcaccttataagtcaccacaaatctccatat

SEQ ID NO: 19638 - DNA, 384 bp, Glycine max
  Clone ID: LIB3106-074-Q1-K1-G6
tcggccacgcgttcgcccacgcgttcggcttcaacttgctccctcagaagcggagaagaagccacagagaactagtctactacttttacccgcaagaaaaaaatggcatctcacatcgttggatacccccgtatgggtcccaagagagagctcaaggtcgctctcgagtctttctgggatggcaagagcagcgccgaggatttgcagaaggtgtcttctgatctcagggcatccatctggaagcagatggctgatgctgggatcaagtacattcccagcaacactttctctcactatgaccaggttctcgacgccaccggcacccttggtgccgttccaccaaggtacggctggaccggctggtagattgggtttgatacctac

SEQ ID NO: 19639 - DNA, 335 bp, Glycine max
  unsure at all n locations
  Clone ID: LIB3106-075-Q1-K1-A2
aacaggcnaagcnggngagggttctttcaaaggacaggtggggacacaacaaacccaaacagcaantggcccaggctttactaggagagggaagatagtgaaagcaatggagtaagtgggcggctcgcattaaagtactaatcacattctaagctgattgcttgccctggccatagggtggaacattgaaccatagagcatgcggggggaaaacatcaatcaagagaggcactgttctgcgacaaacttggatgtggaatgtaaagttaggactggccgcacgcaagtgcttgaacaggcttgaacgatgaatttcacgtggctctaaccggacg

SEQ ID NO: 19640 - DNA, 231 bp, Glycine max
  Clone ID: LIB3106-074-Q1-K1-F1
cccacgcgtccgcccacgcgtccggttcgatatgaactttcactaaaactcttcttgccttgtctaattaatgtcatgactttagattcttgtttatttggccgtttacgtttgtagtagttgatgtaactgaaaataacaaagtacactctgttctttgctgataatgtattaaagttcatatcgaacgttaatcccacgcgtccgcccacgcgtccgtctagatcgcga

SEQ ID NO: 19641 - DNA, 197 bp, Glycine max
  Clone ID: LIB3106-074-Q1-K1-F10
gaggttaagaggttgaagagtattggcatgattgatagcgttcctggaatgaaggctttggatatgaatgctgcacaggatgctattgtgaggctcacgagggagattgtgcccggcatgattgtcaccggcatggatgcggcagaaattgatggctccccaaggatgggtccgacgtttgatgcgatgatgatatc

SEQ ID NO: 19642 - DNA, 461 bp, Glycine max
  Clone ID: LIB3106-074-Q1-K1-F11
ctcgccgactcggttgctatcagcgagtgagagtgagtgagtggttctcttgcagcaacaaggtttagtgacaccaaacagactggaaatgggtcgtggggtcagtgctggtggtggacagagttccttggattatctctttggcagtggggtacctgccagcagtgcaaatggtgctcgcactcaaaatgcaagtgctccttcaccaccggttgataagcaaagtccagcaccagcagcagcagcagcacctgcacctgcagcagcagcagcaccagcacctgcaccagcaccagcaccagcaccagctgataagcaaattccagctggaattcctggaagtctcaaaaacaattaccatcgcgctgatgggcaaaactgtggcaactttctcactgatcggccatctaccaaggttcatgcttgcccgggtggtggatcttccttgcattacctctttg

SEQ ID NO: 19643 - DNA, 63 bp, Glycine max
  Clone ID: LIB3106-074-Q1-K1-F12
ggccacagaggcgaaagcaggacctttaagcttcctaatcccctgtactacattgagtagggg

SEQ ID NO: 19644 - DNA, 250 bp, Glycine max
  Clone ID: LIB3106-074-Q1-K1-F2
gtcgcattgcagttaaaaaaaacaaaaaaatttaaacaaaaaaataaaaatcaaataaactgggataatataagaaaaaaaatagggattcatggtttattcgttccaggggctcctgccttaccttctcttgcatgcgactgtcatagtacttctatggtgtttcctaattttgatttactggccatctttttacaactgtcacacctgtaaaaacactcgtgttacctaatttaatagcccttggctc

SEQ ID NO: 19645 - DNA, 308 bp, Glycine max
  Clone ID: LIB3106-074-Q1-K1-F3
gccacgcgtccggtagtgtggaattggatcatatctggttggttgagagagatgtcaccgggggaaacctgattcggaaggttggttaagggctctctggggggtttcgcactgggctctaagctttgcgcgtgtgtgcccgttctctactggggatttaagaacgcccttactctctgcaacaacaacaacaaactctcttgcgctttctgtctctgtgactgtgctctccctctctcgctcttccaacttgctcctgggctggcgaaaattctctgtctcatattgtggaagtaatgacccccatc

SEQ ID NO: 19646 - DNA, 309 bp, Glycine max
  Clone ID: LIB3106-074-Q1-K1-F4
agcagcggcaacagaggccagaagatgaagttcaatccacgagtgtcgagcagccagcgcaggagccgaaaggctcacttcacggcgccgtcgagcgtgccgagggcgctgatgagcgccactctgtcggcggagctgcggtcgaagtacaacgtgcggtcgatcccagtccgcaaggaggactaggtgcaggtggtgcgcgggacatacaaacgtcgcgaggggaaagtgacacaggtgtaccgtcgcaagtgggtcatacacattgagcgcataaccctgacgaaggcgaatggctccaccgtcaac

SEQ ID NO: 19647 - DNA, 452 bp, Glycine max
  Clone ID: LIB3106-074-Q1-K1-F5
cggacgcgtccgcccacgcgtacgaaaagaatagaacaagcaaatccacaagatactaatataagaaatactagaaataaaggctgtctacatatacatatatcgtccaaaacaacgatttttatcagctgtagcaaagaatgaaacttcatagaagtcaaaatatgaagaaatcaatatgtctagatacccacttttctatggataaaagatctaattgataaaggaagcatcgtaaggatccattaacgcggttttgaaccgatacaataaaaactgcttacttatctcatgatagaaaagtcaggaatccacttatgtaataaagtagatcccccgatattttgagcagcggtgtagtatcaaatcccaaagatagaaagtcttttctctttactgtataaataagaaagaaaagactttttccaagattctatagaaatggatatatt

SEQ ID NO: 19648 - DNA, 401 bp, Glycine max
  Clone ID: LIB3106-074-Q1-K1-F6
ggaaatcgtggtggagcttcttggtggagttattggagcgctggaattaccaacaccattggtactgctatgggaactgaaactttgaaggatactaggtaccctgctcaggtgctggctaaggcccttaaaatgatttcagatatgctgatgggtactctggtatatgctataagatacacttttccagactacctttgagcttatcttggtgctggaagggtatcaacatttgcacttacaaagactcgcttaaagactatcagcaagcctgtacatacaaatgctcatcttggatatgggttgggatatctgaaccttgctcttgatggatctaccaatgcaactaacgattctttaaaagcaaggtatacagcaacaagtgcttgggatattatgct

SEQ ID NO: 19649 - DNA, 448 bp, Glycine max
  Clone ID: LIB3106-074-Q1-K1-F7
cacccacagcagctcctatcacctttggattcaagaatttgttggaaacattcactgttgatgtgcatagagcagagaacaggccactgaatgtgcccttaatagccccttttaccattgctacctctagattggccaaggtggagaacgtggccataagggttgagttgagcaatggttctgtggggtggggcgaggcaccaattttgccttttgttactgcagaggaccagaccactgccatggccaaggcttctgaggcatgtgccttcttgaggagatgtcctgcactcactttgggttccatgttgggggagattgctggtattcttccagggcatcaatttgcttcagttagggctgggatggagatggcaataattgatgctgttgcaaatagtattcgtgtgccattgtggaggctttttggtggggctttaaataccat

SEQ ID NO: 19650 - DNA, 442 bp, Glycine max
  Clone ID: LIB3106-074-Q1-K1-F9
gagagatccatcgatcaattaatttccaatggccgatcagctcaccgacgaacagatctctgagttcaaggaagcctttagcctcttcgacaaggacggcgatggttgtattaccaccaaggaacttgggactgtgatgcggtcgcttgggcagaacccaactgaggctgagctgcaggacatgataaatgaggttgatgctgatgggaatggtaccattgatttcccagaattcctcaatctcatggcgcgcaagatgaaagacactgattcagaggaagagctgaaggaggctttccgtgtgtttgacaaggatcagaatggtttcatctctgcagcagagctccgtcacgtaatgaccaatcttggtgagaagctgaccgatgaggaagtcgacgagatgattcgtgaggctgatgttgatggtaatgggcagatcaac

SEQ ID NO: 19651 - DNA, 464 bp, Glycine max
  Clone ID: LIB3106-074-Q1-K1-G1
ctcctcgcacaacacaaccacaatggccgcttagaagaagaatggcggcggaaacggcaacgacaaggagaacgaagacagcaccatcaccgtcgtcttgaaggtcgaaatgcactgcgacggttgcgcttccaaaatcatcaaacacctccgctgtttccaaggtgtggaaacggtgaaggctgatagcgacgccgggaaggtgaccgtgaccggaaaagtggaccccacgaaagtgagggataacctggcggagaagataaggaagaaggtggaactggtgtctccgcagcccaagaaggagcaggagaacgagaaagagaacaaggatgctaaggcaaacaacaaatccgagaataacaaaacccatgacaaaaaaaccaaggacaaagaggtggtaaccaccgctgttctgaagctggcattgcattgccagggttgcctagacaggattggcaaaactg

SEQ ID NO: 19652 - DNA, 385 bp, Glycine max
  Clone ID: LIB3106-074-Q1-K1-G11
aaatcaaagccatggccacctccaacttctctattgttctctccgtctccctagccttctgtttggtgctacttaccaaggcacactcgaccgataccgtttctttcaccttcaacaagttcaacccagtccaaccaaacattatgctccaaaaagatgctagtatttcatcctctggggtgttacaactcaccaaagttggcagcaacggcgtgcccacctcgggatctctcggtcgtgccctttacgctgccccaatccagatttgggacagcgaaaccggcaaggtagccagctgggctacatcctttaaattcaacattttcgcacccaacaaatcaaactcagctgacgggcttgccttcttcttggcacccgtcgggtc

SEQ ID NO: 19653 - DNA, 187 bp, Glycine max
  Clone ID: LIB3106-074-Q1-K1-G12
gttgggagttagggtagaatcaattgagaatggggatccgattcgtactgatggtgaacaagcaaggccaaactcgtcttgctcaatattacgaatacctcactctcgaagagcgacgtgccctcgaaggcgaaatcgttcgcaaatgcctcgcccgcaacgaacagcagtgttcctttgttgagca

SEQ ID NO: 19654 - DNA, 78 bp, Glycine max
  Clone ID: LIB3106-074-Q1-K1-G2
ggcatgctaccaaacacacgtacaagcttcatctggtgacatcatcatcacttgtgaaatgtgatctgcgaatgcgaa

SEQ ID NO: 19655 - DNA, 451 bp, Glycine max
  Clone ID: LIB3106-074-Q1-K1-G3
gagcgagcgagcgaggtagggttttcgttgttcccccgtctttgaattcagttcgcgacgatggggtccatccccgatccaggcgagttgagcgagttgactcagccgagcttcgacgagttccagcgccaaacttccctatcttggtttacttcaaggagtcacaaacgaagcctgagggacaaattcatttctttcccataatatttaatgggaagcagctttatgatgttatggtggaaagagctggcccttcaaaaactagtggaccaaaagaatcctgaggactgagatgtgtggttagagcctcagttggggtaactcggaaaccattgaagtccactgccggtaaagaggcttcttaagttgggattgatatttgtttgcgtatgagaagagcatgaaaatttcctgtttctcttccacatattgatctctcagtttcaagtag

SEQ ID NO: 19656 - DNA, 406 bp, Glycine max
  unsure at all n locations
  Clone ID: LIB3106-074-Q1-K1-E9
gaagaagctcttcggtgacctcggtgccaattacaaggccatcgaactcgacactgaatccgatggaaaagagctccaagcagcattagttgagtggacggaccagcgaaccgtgcctaatgtgcttattggtggaaaccacattggtggctgtgactcaacaactgccctgcacactcaggggaagctggttcctctgctgatatctgctggagctgttgccaaatcaactgcttaaaggatctcccatttctaggttatgcagttaaataaaaataaaaacccaagtagttgggtcggttatataattcaggtcccagaaactaatgtgtgtattcctgagtgattctctntaaactacaactctgtcaaacaagtctattgctgaatgaagttatttttggtt

SEQ ID NO: 19657 - DNA, 390 bp, Glycine max
  Clone ID: LIB3106-074-Q1-K1-G4
caagtccattcaccacgccagggttctcatctagcagagacatatcagggttgggaggcaagtggtgaacatgccatctttcttggtgagggttgactcacagaagcacattgacttctcacttacaagtccccttggtggcggacgccctggaagagtgaagagaagaaaccaaagggctgctgctaagaaggccgcaggtggagacggagacgaggaagacgaggattagactgttcattatgtctttctctagtgctattagatcttatgccaccttttactttgcctacctaatcgattttggttgttatacattttcatcctttggttcccttggttgagaaaatattaagtggtgacatattatgtttttgtgaaatttggata

SEQ ID NO: 19658 - DNA, 427 bp, Glycine max
  Clone ID: LIB3106-074-Q1-K1-G5
gcattaaaaaaaaaaatcagaaaacaatatatatacgatcttttatcctataattatatcaattatgcacataagaaagactcatatatttatggatatagatccctatttcaagtaaaaaataccaagtgatttcttctaattacaacacgtataaaaaagaattattggatatcatagataatctctttatcaagaattatatatcggaagatgcgattctagatatggaaaaaaatatgtatagaaagtattttgattggatgggaatcaatagagaaatactaaatcagtccatatcgaatccagaattttggttcttttcaaaatttgtgatattttatgacgcatataggggtaactcgcaagttataccaatcaaattactatttttttcttctaatgtaaatcaaaatgttagtgaaaa

SEQ ID NO: 19659 - DNA, 380 bp, Glycine max
  unsure at all n locations
  Clone ID: LIB3106-074-Q1-K1-D5
cggacgcgtgggcggacgcgtgggtgaacacacacatagaaacccaacaacaagaatgaagaagatgattctaaccctcttcttcaatatcattttatctctcctctccctctcccacgcctccgtggtggatttctgcgtagcagactacacaggccccaatggccccgcagggtactcatgcaagagcccagcaaaggtcacggtggacgacttcgtctactccggccttggcaccgncggcaacacctcaaacatcatcaaagccgcggtgacgccggcgttcgacgcgcaattccccggcgtcaacgggcttggaatctccattgcacgcctagacctagcagccggtggagtcatccctcttcacacgcaccctg

SEQ ID NO: 19660 - DNA, 361 bp, Glycine max
  Clone ID: LIB3106-074-Q1-K1-D6
aagggacaaaggcgccttatttattgaaggccccaaagggaaaaccaccatagtgaaagtctcttaccatgaacttggtgacacacaagctggaaacaacattaaggtgaaagctagtgcccctatttgaacgcatcttattacatatagatagataggagcaagctagattgttgagaggtgaaggaactactgaatgtagtacaggggattaggaagcttaaaggtcctgctttcgcctctgtggccttcgaggagatcggtccattggtctccaatgatcccaacaatgtttgatccctgccttatcagtttctctctcgctgctgctttgtatgaaactgcatttggagtggaagga

SEQ ID NO: 19661 - DNA, 383 bp, Glycine max
  Clone ID: LIB3106-074-Q1-K1-D7
cccacgcgtccgcatactctttcccaaatcttactctcaattacaataacagcacactcaactggagaattttccccaaaaatcccaagagctcgcgccatggtttccccggaaaacagcaattggctgatcgattacccgttgatcgacgactactttattcccgtcggcgactcctgctacgtcggatccgcttacaccttctactggcccccagcttccgtcaatgtcagtgtcgaaattgatgcttcgcttggggattctgatggcctaaaaaatcctgctttgaagaaaaggactaaatctgattcaagtactgcttctagctccaaagcgtatcgggtgaagttgaggagggataggcttaatgacaagattgttga

SEQ ID NO: 19662 - DNA, 457 bp, Glycine max
  Clone ID: LIB3106-074-Q1-K1-D9
ctttactcacagagtcactcaaatggcttccgaaaccccaaagccaaaacccgttctaccgtggaaaacccgcgtttcaatttcctttctctctaccctaacggactatgcacgccgttctaacggcaccgttaaccgccgtctcatgaacttcctcgatcgcaaatcccaacctaacgccaaacccgttaacggtgtttccacccaagacgtcaccgtcgacgccaaacggaacctctggttccgaatctttaaccccgcagccgcctccggcggcggccttcccgtcgttattttcttccacggcggcggcttcgcgttcctctcgccggattcgtttgcctacgacgccgtctgccggcggtctgcccgcgagtccccgccgtcgtcgtctccgtcaactaccgcctcgcgccggatcaccggtaccctttgcaatacgacgacggtgaggaca

SEQ ID NO: 19663 - DNA, 441 bp, Glycine max
  unsure at all n locations
  Clone ID: LIB3106-074-Q1-K1-E1
catcgctggaacttccatttccggtgaccggaaaaccccatcaccgtcgccgaaatgggaaccgttaacaacaccgtcgacaccgtgaatgctgcggcctccgccatcgtctacgctgaatccagaatccaacccaccaccaccgtcccgaaaaaacgctggggaagctgctggagcttatgttggtgttttggacctcataaaaacagcaagagagtgggcaatgctgtccttgttcctgaacctgttgaacctataggcccagttggatttcatcctgctactgctgcaccaaatccttcaactgctattgtaatgccattcattgtccctccctcttcacctgcatcttttctccaatctgatcctncatctgctactcaatcaccggttggattattctccctcagttctctcactggtaatgcttctggtggacct

SEQ ID NO: 19664 - DNA, 302 bp, Glycine max
  Clone ID: LIB3106-074-Q1-K1-E10
ggtactactgtacgtgcgagcatactaacggaaagaggcatgcaacttcatttgcacatgtgatccgtgacataagttgggtctacacgaagtcgttatcactatccttccattttgtgctgctcgagtcactttatgtcctactcagagaggcaacccagcgtagtgtctagcgcacatgttggagtacagtgcgatgtagttcgcctatactcattgacacgtggaccaatgcggatcagggttacgtatgagaagcaggcttgtgctgacgcagcatggatcaacaaagacgatccttt

SEQ ID NO: 19665 - DNA, 218 bp, Glycine max
  Clone ID: LIB3106-074-Q1-K1-E11
cggcaagtgagcatgaaagaaaaggatgacttgtggacttttgagagtttttagatttgtgtttggtgaagtatatgttattgcaatgtacttcagataatgtgaattatcttgtgtatccgaatccaacttaatgttacttgctttttacgaaaactcaagtgtcaatttgttctctcattttacacttctatgcttatgacaccaaattgaactct

SEQ ID NO: 19666 - DNA, 324 bp, Glycine max
  Clone ID: LIB3106-074-Q1-K1-E12
cccacgcgtccggtcgaacctaaataccattccttacagtttcaaacacttgttcttcatgttcttcttctcttttatacctttctttctctgtggatctacaccgacttagatgctagccgtattctaaaaatggaaaacaatcaaagtgctgcaggaacacatgatagttctatgatgaagtccgctgatcaaagagcacgatcaaaagggcgcaatgacataatgactcaacgtctgaagaatcgtgagagacaacgtagatatagggcacgtaagcgtctagaatccgtatcatagaagtcatttgttgtggaagagaca

SEQ ID NO: 19667 - DNA, 363 bp, Glycine max
  Clone ID: LIB3106-074-Q1-K1-E2
aaggaggggacatccatattctttaaccttttgaccacatcttcacacaacaaaataataggctcaaacaacaccgtcaacaccgttaatcctccaaactacaccatcttctacactctatccataattcaacccaacaccaccgaaccgaataaacgcacgcaagctgttatatcttatgttcactctttatgaccttataaaaacatcaagagagtctgcaatgctatccatgttcctgaacctgttaaacctatacgcccaattagatttcatcctgctactgctgcaccaaattcttcaactgctattgtaatgcccattattgttcctccctcttcacctgcatcttttatgcaatct

SEQ ID NO: 19668 - DNA, 458 bp, Glycine max
  Clone ID: LIB3106-074-Q1-K1-E3
cggacgcgtgggcggacgcgtgggttttttttttgtttccttttaatatcttcctaactcaaacagagatgtggcttttgcttgtctgttgtaaggaaaggtgagagttgagattctacttgatttggatcagccttgagctgattatgcttatccactcctcatagcgccatacaaccattcataattctgatgtgtacaatgttgtatctaacattgcagattttacagagatcatttcaatctcctgtctgagctttgatgttcctggctgatgaaccacttcaattatttaattattttgaaggtcgacatctatttcttctctttatcttgctctcctaaatggagcagctgacaaagtcagagccaaaattggatctctctagatatgcataatattattttattgagggctgtctaaatttcatatggcaggatctttaaagataatattt

SEQ ID NO: 19669 - DNA, 460 bp, Glycine max
  unsure at all n locations
  Clone ID: LIB3106-074-Q1-K1-E4
cccacgcgtccgcccacgcgtccgcccacgcgtccgcgggaatggaagagggtgacagtgaggccatttttggggctcttaatctgaacccgcaactcttctgtaacgaagttctcaacattgtcgacgatgtgctcgacgaagctttcaatttcttctaccaggacgcatccacgaagctcaacatcgaaggcacccaaaggtcccaggatctgaaaaagggtgttgattgcgttcggctgaatgttcaatctgttttggacaaacaacttgctgcttgngagagttacatcctncgtcactgttttgctcttccccaaagttttcgtatgccaaacaccgatgaatcanatgagaatgccctagatccaggtgctccttttgatccagatatagatgcccagttagattcattgagagaaaaactaattgaggtggggaaggagtctgaaatgcttaa

SEQ ID NO: 19670 - DNA, 445 bp, Glycine max
  Clone ID: LIB3106-074-Q1-K1-E5
caaacccaagagttgaagaagaatcagagttcagaatccatggcaggtgctatagtaaagtacggaatcataggagtaggaatgatgggtagagagcatcttgtgaatttgtaccatcttcgcacccaaggcgtggcagttgttgctattgctgaccctcatcttccctctcaacaactcgctcttgacttagcacactcctttacttggcctctcaaggttttctcaggtcaccaggagctgttggacagtggactatgtgatgttttggtggtatccactcctaacatgacccatcataggattcttatggacattatcaatcattccaaaccccatcatgtactggtagagaagcccttgtgcaccacaatctcacactgcaaagaggttgtcaatgctgctagaaagagacctgatatattggtacaagttggactggaat

SEQ ID NO: 19671 - DNA, 408 bp, Glycine max
  Clone ID: LIB3106-074-Q1-K1-E6
cgcacgcgtccgcccacgcgtacgaccaggtttgaacaagcacagacacggagactaatatggtagcatactagaaataacagctttctacatatacatatatgagcgcaaaacaactatgttacatcagctgtagcagataacgaaagctcataaaaggcaaaatatgcaagaaccacaacggcaacatgcatacgtacactatggataaaagaactagtcgatagaggaagcatgcgcaggatccattaacccagctacgaaccgataccatcaaaactgctaacacatactaagatggaaaaggcacgaatccacttatgtaataaactacatcccacaaactcttgagcaccagggacaacattaaagctccaaagatagaaaggctctcctatgacactgtat

SEQ ID NO: 19672 - DNA, 449 bp, Glycine max
  Clone ID: LIB3106-074-Q1-K1-E7
cagacgcgtgggcggacgcttgggttgagtttttgattgctcttaatatcgtcctaactcaaacagatatttggcttttgcttgtctgttgcaaggataggtgagaggtgagattctacttgacttggatcagccttgagctgagtatgcttatccactccacatagcgtcatacaaccattcataattctgatcgctacaatgttgcatctaacattgcagattttacagagatcatttcaatgtactgtctgagctgtgatgttcccggctgatgaaccacttctattatttaattatttagaaggacgacatctatgtcttctctttatcttgctctcctaaatggagcagctgacaaagtcagagccaaaatcggatctctctagatatgcatactattattatagtgaggcctgtctaaattccatatggcaggacctttaaaa

SEQ ID NO: 19673 - DNA, 338 bp, Glycine max
  Clone ID: LIB3106-074-Q1-K1-E8
catcgattctctcccttctctttctctctgcgacaccagatgatggagacgacggcgaagcgaaacgctgtcgttgcgccaatcgcggcgttgttgttggtggtgctactcgcggcgagtgtggtggtggaggctcaggagaactcggacgtgaagacgctggtgaagcacatgcacgggaagaagtactgcgacaaaggatgggaatgtaagggctggtcaatttactggtgtaacctcactattactgattatttccagacctaccagttcgagaatctcttctccaagcggaactcgccggtggcgcacgccgtcggattttgggactaccactc

SEQ ID NO: 19674 - DNA, 447 bp, Glycine max
  unsure at all n locations
  Clone ID: LIB3106-074-Q1-K1-D4
cccacgcgttcgcccacgcgtccgcagacatatgccaggtctcatagtcagaatatcatgctgtttgaggtttgaatccaatactttcaatcgcatgttgggaatagataaaactgccacatatttggaagaggtagatgcacttcctgctatatatgctactgtgttaaaattctcgtcatctgcaccatatgggtcaattccatcctatcgaataccatttcttcttggtgaaccttacaataaagatcctgcatctcaaaatgcctncctaagtattggtcctgttggtgttggaaatgattccagggaagaggaaaaatatagagctacggttgagattgatttggagcccagggaacccacaccaggtatagttgatgttcacattgaaacaaatgcagaaaatggtcaaatcatccaaggtcaacttcaaggaatcacagt

SEQ ID NO: 19675 - DNA, 457 bp, Glycine max
  unsure at all n locations
  Clone ID: LIB3106-074-Q1-K1-C11
gttgagaactaagaaggagaagcaaatggcttcctcaatgatctcttccccagctgttaccactgtcaaccgtgccggtgccggcatggttgctccattcactggcctcaagtccatggctggcttccccaccaggaagaccaacaatgacattacctccattgctagcaacggtggaagagtgcaatgcatgcaggtgtggccaccagttggcaagaagaagtttgagactctttcctacctgccagaccttgatgatgcacaattggcaaaggaagtagaataccttcttaggaagggatggattccttgcttggaattcgagttggagcacggtttcgtgtaccgtgagcacaacaggtcaccaggatactacgatggacgctactggaccatgtggaagctgnctatgttgggtgcactgatgcttctcagtgttgaaggagctcaagaggct

SEQ ID NO: 19676 - DNA, 460 bp, Glycine max
  Clone ID: LIB3106-074-Q1-K1-C12
ggtcgccttgggaaggtgcagttatatacataagaaatgcaacaattttacatctggagtactgcactaccttggagaggttaggtctagcaaagctttcaagtgatgtctcaaaaactagggctgctgcaatgggattacgtgttacgaaagccgtgaaggactttccaaatggcactcctgttcagatatctatagatgtgaccaggaagaagaaaaaattgaggcttgatgggatcataaaaactgtcatcactcttctttgcaataagtgttgcgcgccatctgctgagagcatattctctgagttctcacttttactcactgatgaacccattgaagaaccagagactattgatatgggtgttatttttggggaagacaaacttacaacctctggaaacagtggtgaggatgacgacgacgatgcacttattgacatggatgatcaactatattt

SEQ ID NO: 19677 - DNA, 455 bp, Glycine max
  Clone ID: LIB3106-074-Q1-K1-C2
cccacgcgtccgcccacgcgtccgcccacgcttccgcaattccaatcaccaattcaaaaccggtcttcccttggaacaaattgagagatcgtgatggcaccaaaggcggagaagaagcccgcagaggagaagaagtccacggtgggagacaaggctccggcggagaagaagccaaaggccggaaagaagcttccgaaggagggaggcgccggcggagaagggaagaagaagaagaggaacaagaagagcgtggagacatacaagatctacatcttcaaggttctgaagcaagttcaccctgacattggtatctcaagcaaggccatgggaatcatgaacagcttcatcaacgacatcttcgagaagcttgcccaggaatcttctagacttgcccgctacaacaagaaacccaccatcacttcgagggaaattcagaccgcggtcaggcttgtgct

SEQ ID NO: 19678 - DNA, 454 bp, Glycine max
  unsure at all n locations
  Clone ID: LIB3106-074-Q1-K1-C3
cgcgtttggctttagcatttagcattttctctctctctctctccacgctgttactttatcagataacctgactcaccccacccaatcctattcccatcccatttgaacctctccttctcgcagagtgagcgagcaagcgaatatcccaatcccacaccaatggcatgctcagccacctctgcttccctcttctccgcaaacccaacacccctcttctctcccaaaccctctctctccctccaccttaaccctctccccacgcgcccttctccctccctcacgcgcccttctctctccctcacgcgcccttctcactctcgccgctccttcgntgtcaaagcctcctccagcgagcttccgctggttggtaacaccgcaccggatttcgaagcagaggctgtgtttgaccaggagtttatcaacgtgaaactatctgattacattgggaagaaat

SEQ ID NO: 19679 - DNA, 465 bp, Glycine max
  unsure at all n locations
  Clone ID: LIB3106-074-Q1-K1-C4
tcggagtgcggtgaagcaacaanagggaatacaatccattggcgaacaatatagatcagactccaaaacgattaaccaacaagcttactcttatgccagagacctcgaagtccatcccaaggacacatttgtgttcagtatagatggcaccgtactctctaatattccatactacaaaaaacatggatatggggtggagaaatttaactcgaccttgtatgatgaatgggttaacaagggcaatgcaccggcactgcccgagactcttaagaattacaacaagctggtgtctcttggcttcaagattatattcttgtcaggaagaacactggacaaacaggccgtaacagaagcaaacttaaagaaggctggctaccacacatgggaaaaattaattctcaaggatccacaagatccttccactccaaatgcagtttcatacaaaacagcagcgagagagaaact

SEQ ID NO: 19680 - DNA, 421 bp, Glycine max
  Clone ID: LIB3106-074-Q1-K1-C5
cccacgcgtgcgatctgaactttgccatgctaaaccgatggttatatttctgacagggcaatgactccaacattagagttagaggagattgattcaccaaaaagaaaatggttagaggagatcaacgaattaagtggcttggtgcctatccgaaaaaaacaatacaacgtggcccaactctatcatatgcgcatgtgtgtgaataaaaaaacaaattggcccacttttatctatatacgctcgtgtgcgaataaaaaaacatattgtgtgcgtggactacacagttagtaggcgaaatacactggtctatactatctatgatgtaatgatgtgtcagtataaagcttaaacgaccttggagattcaaaatgacacgctgaactgtaagttagagccactgatggatgtgcacggaacaatc

SEQ ID NO: 19681 - DNA, 252 bp, Glycine max
  Clone ID: LIB3106-074-Q1-K1-C6
cccacgcgtgcggaaacatatcaataacttaagtcacatacattctgacaccaaaatgaaggaaaggaacttgagccacattctgaacctggtggactcaataagagtcttttataagacagttaaaattatagcttgcaaaacgggctcactagcaaacattgcaatggcctgaacactcatgtgctatcactatatacgtgtacttccacactacttgatggcatgggtccaagacagtgaccagatgct

SEQ ID NO: 19682 - DNA, 224 bp, Glycine max
  Clone ID: LIB3106-074-Q1-K1-C7
cccacgcgtccggtatcgcactggtgggattagacgtaatgtttttgctgcgacactaaagcatctgagcttgaagattattgttactctgaagggctggtgactcttacctatctgaagacttgaaggcccatgactaatggcaacgagactctataagtaatcaatgctacgtctatcacactctatcgtgtagaaatatacgtgtagacacatacctaatc

SEQ ID NO: 19683 - DNA, 371 bp, Glycine max
  Clone ID: LIB3106-074-Q1-K1-C8
aaaaattatttagttattttatataaaaaaaaaaacaaaaaaaaaaaaaaaaataaaaaaaatttataaaacaataaaaactaaaaaaaaatactacaaaaaacaaaaatattaaaaaaaaacaaataaatccacctaatatgatgaattaaaaaacaagaacaatgcacaaaaactgaaaaaaaattttaaaaattacaacaaaaatatattaacttgactagaacaaaatataataaaaaaaaagaacactacacaaaaattccataacaaataaaaacttaaataatttttcaaaaaaaaaaataaaaaaaattaataataaatgatccacaatatccttacactacaaatgaatttttatacaaaac

SEQ ID NO: 19684 - DNA, 324 bp, Glycine max
  Clone ID: LIB3106-074-Q1-K1-C9
cccacgcgtccgctcattacaaaattaatatgaatcctttcccttgttttttttaaaaagggaaaaaaaaaaaaaaaaaaaagaaaaaaaaaaaaaaaaaaaaaaaaaaaaaaaaaaaaaaaaaaaaaaaaaaaaaaaaaaaaaaaaaaaaaaaaaaaaaaaaaaaaaaaaaaaaaaaaaaaaaagggggggccatttaaagggaccaaagtttacgtccccagtattgaaaagtaaaagatcttaaatagggccaccaaactcaatttgatgaggcggactttaaaaaggttgtaccgggaaaaacccgggggttacaaattt

SEQ ID NO: 19685 - DNA, 409 bp, Glycine max
  Clone ID: LIB3106-074-Q1-K1-D1
gtccatcccaaggacacatttgtgttcagtatagatgggaccgtactctctaatattccatactacaaaaaacatggatatggggtggagaaatttaactcgaccttgtatgatgaatgggttaacaagggcaatgcaccggcacttgccgagactcttaagaattacaacaagctggtgtctcttggcttcaagattatattcttgtcaggaagaacactggacaaacaggccgtaacagaagcaaacttaaagaaggctggctaccacacatgggaaaaattaattctcaaggatccacaagatccttccactccaaatgcagtttcatacaaaacagcagcgagagagaaactgataaggcagggatacaacattgttgggatcattggagaccaatggagcgatc

SEQ ID NO: 19686 - DNA, 459 bp, Glycine max
  unsure at all n locations
  Clone ID: LIB3106-074-Q1-K1-D10
ctattctctctctctgaattctgattctgtatccgaaaccaccaacgacgtcgttgcatggacctcttccttgtcgcattcgatttccgcatagttctctattgccgacgacgattcaattccaatggcgactgagcagttaatgtccggcggcggctcccgctacgtccaaatgaaatcgtctccgccgtcgtctccgtcagccgcggcggccgaggagatgtcctcggtcccgtcgttccggcacagcggcgccgaggccaatcggattttcgaggaattgccgaaagccttcatagtctacgtctcccgccccgacgccagcgacatcagccccatgcaactctcttacacaattcaggttcagtacaaacagttcacgtgggagctaacanagaaagcccatcaagtatttattttgcatttctcgctaaagaaacgtgcccttattgaggaaat

SEQ ID NO: 19687 - DNA, 456 bp, Glycine max
  Clone ID: LIB3106-074-Q1-K1-D11
gctctgaaagtcattgagtgggcagagaatagtgggaatggaaagagaaaggtgaattacgggttaagggactggctttttgctcggcaacgttactggggtgaacctatccctgtcatcttcttggatgatagtgatgagactgtcccactgtgtgagactgaactgccccttattctacctgaattggatgatttttctcccactggaacaggggagcctcctctgtctaaggcagtgtcttgggtgaagaccacggatagcttatctggaagaccagctacccgtgaaactaataccatgccacagtgggctggttcatgctggtactatttgagatttatggacccacataattccaaggaattggttgataagacaaaagaaaggtattggggccctgttgatgtgtatgttgggggtgctgagcatgcagttctccatttactgtatgct

SEQ ID NO: 19688 - DNA, 410 bp, Glycine max
  Clone ID: LIB3106-074-Q1-K1-D12
tcgattttctaaagatgatcgaaagacttacatcgtctacatgggcgattatccgaagggtgtgggattcgcagaatcacttcacactagtatggttgagagtgtcctcggcagaaattttccaccagatgctttgctgcatagctacaagagtttgaatggatttgtggcgaggctaacaaaagaagaagcaaacagaatgagaggaatggatagtgtggtctctgttataccagacagaatccataagccacaaacaacaaggtcttgggactttcttggcttccccgaaaatgttcaaagaaacattatagcagagagcaacacaatcgttggagtgatcgatagcggaatttggcctgaatctgatagctctaatgatgctggatttggtccaccaccaaagaaat

SEQ ID NO: 19689 - DNA, 295 bp, Glycine max
  Clone ID: LIB3106-074-Q1-K1-D2
cccacgcgtccgcgagtttggagtggacactcattgttaatttgtgtatagattatattacgttgccatatattttggcttttgatgttttctttctcttgtataatttgaatatattttggtatataatgtatgtatacaattgagtatttgatcattaaggattgcctgaacaattttgttgatgcttgcatgttgtgcatttcacttatcaaatgatacaatgtttcatttggataaaaaaaaacttaaaaaaagctggcttccacacatgggaaaaattaattatcaagga

SEQ ID NO: 19690 - DNA, 441 bp, Glycine max
  unsure at all n locations
  Clone ID: LIB3106-074-Q1-K1-D3
ccacgcgtccgggtcaacctgaagccgagaatgggaaccagcccgctaatgatgcagaccaggcagtcgagaatgaaaatgttgcagaacatggcaatgtcaatggtggtaatcagtggtggggcattgtgaaggagatccagatgattgtctttggatttatcacttcccttctccccgggttccacaaccatatggattgaactatattttgtagcttacaaggtttgtggatctgatatatggtctatatgggaccatgcctgagacatgggacggggtgttctgaaataaaaatgtatagcatcagaagttccaagcgtcataactaatacatacatagttaggtgcaactataatccagcggaagatatggtgcaactatagggtgccggttttgtatcattacttggattggtgataaaacactttntttttgga

SEQ ID NO: 19691 - DNA, 297 bp, Glycine max
  Clone ID: LIB3106-074-Q1-K1-C10
tccacgcgttcgataagaagaaaaaaaacatggaaaaattagggatttttttttgcgaaaaaaagagaaatttaagttgttgttgttgttgtagctgttgttttggttgagatggctcaagttcaagttccgcctcagaatgcgattcccggccccaacggtggtggtgctgctggaaatcagttcgtgacgacgtcgctttacgtcggagatctcgacccgaacgtcacggacgcccagctgtatgatttgttcaaccaattggggcaagtcgtattcgttagggtttgcaaggac

SEQ ID NO: 19692 - DNA, 216 bp, Glycine max
  Clone ID: LIB3106-074-Q1-K1-A5
atttaaacaagttttacatggacttacacaaacagcacgcacggtacaactgcgcaacttataacgcagaagatggcctactgaacggaggaaagcccaagaccgaatctcatagagcccatcccaaacttggtgagaataagaatggagccaccaccaaagccaggaaaccccccggcaaaggggaaacagtctaagacccttacaaggccaaga

SEQ ID NO: 19693 - DNA, 422 bp, Glycine max
  Clone ID: LIB3106-074-Q1-K1-A6
gagaaagagagagagagagtgagaaactgttttaaattcgcaaaccctaagttcggaaaggggggctatggctgtctccaaggatcgcgagaacttcgactacatcgccaagctcgtcgaacaggccgagcgatactaagtgatagtggaatcaatgccgaacgcagcgctactagacgccgcaccaactgtaaagcagcgaaagaccctaacaagccaaagaggcctcctagtgctttcttcgatttcatggatgacttcaagaatgtattcaacatataacatcctgaaaacaaatcatcgtctgctgtgggcaaagctactggagcaaaatgcaagaccatgtctgatgctgaaaaagcaccttatgtggcaaagtctgataaaaggacagtggagcacgagaagatcatgccagccta

SEQ ID NO: 19694 - DNA, 78 bp, Glycine max
  Clone ID: LIB3106-074-Q1-K1-A7
gcgaccctttctgtgacatatcgaaacatgtttcatctcccaactcctgagtaattagggagcctcaaacttaatagt

SEQ ID NO: 19695 - DNA, 450 bp, Glycine max
  Clone ID: LIB3106-074-Q1-K1-A8
gggaggggtcacagtagaagaggcacttagtactcagagattattcatattagattaccaagatgcattcatcccatatttgacgaggataaacagcctacctactgcaaaagcttatgccacaaggacaatcctgttcttgaaagatgatggtactttgaagccacttgctattgaattaagcaaaccacatccagatggagataatttgggtcctgagagtatagtggtgttgcctgcaactgaaggtgttgatagtacaatttggctattggccaaagctcatgttattgtgaatgactctggttatcatcagctcgtgagccattggttaaatactcatgcagtgatggaaccatttgccatagcaaccaataggcatctcagtgtgctccaccctatttataaacttctttatcctcactaccgcgacaccataaatatcaatgg

SEQ ID NO: 19696 - DNA, 429 bp, Glycine max
  unsure at all n locations
  Clone ID: LIB3106-074-Q1-K1-A9
cccacgcgtccgcccacgcgttcgcccactcgttcggtcagtctcgaaaaggattaccctgaccgtggtgatgagggtacatgtgacctaaataagaaaaatgctattgttgctattgatgactacggatggcttcctaccgaaaatgagacaatcttgaaacggagcattgcaagtcggccagtggtcgtaattattgcaacagacgacgatgaatttcaatattatgaatcaggtatattcaaagggaaatgcggtacaaaagtaaatcatgctgtcctgcttgtggggtatggtacagaaaatggtgaagattattggatagcaaagaattcatatagtgataaatggggagataatggctatatcagaatanaaagaanactgagcacttgtaaattggaatcgaggttactatcccatatagag

SEQ ID NO: 19697 - DNA, 460 bp, Glycine max
  Clone ID: LIB3106-074-Q1-K1-B1
cccacgcgtccgaggccatataatttttttttatttgaaataatgtccgggatcatccacaggattgaggagaccctccatgtgggagggcacaagaaagaggagcacaaaggagaacaccatggtgagcacaaaggtgaacacaaaggagaacaccatggtgagcacaaaggtgaacacaaaggagaacaacaccatggggagcacaaggagggacttgtggataagatcaaggacaagatccatggtgatggccatgacaagggtgagaaaaagaagaagaaggacaagaagaagaaggagcatggacatgaccatcatggtcatagcagcagcagtgacagtgattagatcttatatgttaagcaggtgtacggtacgatggtagtgaggagccagaatccctcttcctgctttatgatataatacaaataaaatagcgattccggaaatcatgtct

SEQ ID NO: 19698 - DNA, 445 bp, Glycine max
  Clone ID: LIB3106-074-Q1-K1-B10
gtcgtttcgcccctttccacgttttcatactttgcgcaccaatcttgctctctgctttctgtcgatcagggtttcccctcgtctccgagctcgtttcgttctcgaagaatcgatctgcgataatgactcagcgcacgcggtaaccagagggatcgtgatcgcgaaagggctcaggctagaaccggtggtaaaggcaagcagaaagatgatgggttgacccctgaacagcgcagggaaagagatgcgaaggcgctgcaggagaaggcggcaaagaaagcggcacaggatgcaggagggaataatgcaggtggaaccaaaaaataggcaataattcaatgagtggtttgagttcgacattgttgtttgtagacatggaatttatggaaaatttatgttgcgttattcgtggagtatgatgtgtttattaatgaatttgtgacagatg

SEQ ID NO: 19699 - DNA, 407 bp, Glycine max
  unsure at all n locations
  Clone ID: LIB3106-074-Q1-K1-B11
cccttcacaagattctcacaaacaactcttgagaaagaaagaatggctgccaacacattgaggagttctgccatctcagccttcccatctctcctttcctcctcaaaatccagatttgccgcagcagttcctctttccagctttgttgtcaccaatgcctcttcttctcgcttttccatgagtgctgattggatgcctggccagcctagacccccctaccttgatggttcagcacctggtgactttggattcgaccctcttcgtcttggtgaagtaccagagaatcttgagaggttcaaagagtcagaactcattcactgcagatgggccatgcttgctgttccagggattttggttccagaggcattgggcttaagcaactgggtaaaggctcangaatgggctgc

SEQ ID NO: 19700 - DNA, 185 bp, Glycine max
  Clone ID: LIB3106-074-Q1-K1-B12
cccacgcgtccggtaacagcattttgtagtgttatcttgtatctgggcatattactacttgagtacttgccctttctccaacaataataacgtttatgaactacaagtgcgtttggtaattcgggttaaggtgctttaataaaataatggatggtggtggtagttctacctgttggctttggttt

SEQ ID NO: 19701 - DNA, 452 bp, Glycine max
  Clone ID: LIB3106-074-Q1-K1-B2
gaggcaatgacgcggcctttcggtgtgaagggggggaggaagcgaaagcacgcggaacccaggtacgacgcccatgacgaagaagaagaagaagaaacgcaaccaaagaaaactgtggtggaggtggagcacaaccaagaagaagaagaagaaactccagcaccagcaccagaggatgatggattgagcggtatcccaattgcgcccagtgcgaacaacactaacaaacccaacgtcatcttcattcttgaaaaagcttctttggaagtcgccaaagtcggcaagacatatcagctcttaaactccgacgaccatgccaatttcctccgcaaaaataacaagaatcccggagattacaggcctgacattactcatcagtcccttctatcaattttggatagcccactaaataaagctgggagattgcgatcagtatacataaggactgaaaa

SEQ ID NO: 19702 - DNA, 430 bp, Glycine max
  Clone ID: LIB3106-074-Q1-K1-B3
aagaaaagaccatcaaagtttcacttcagccttatccggtttagggtttcggtttttgaccgaacctttgacgtatcgaaaccttaagtttcggatcaggtctgagcaatctggttggtagaacctttggtcttagagagtcaagttttatgtctgaattagacgatcaaattcctactgccttcgatccttttgctgatgcaaatgctgatgactcgggtgctgggtcaaaggagtatgtgcatattcgcgtacagcagcgaaatggaaggaaaagcctgacaaccgttcagggattgaaaaaagaattcagctataacaagatacttaaagatgttaagaaagagttctgttgcaatggaacagttgttcaggacccagaactaggacaggttattcaactttcaggtgatcagaagaagaatggttc

SEQ ID NO: 19703 - DNA, 436 bp, Glycine max
  Clone ID: LIB3106-074-Q1-K1-B5
gcttcatataaccaaactcttcactctgcttctgcttctttggaaagcacttaaccaaactctctgtttcagcttcctctgttttttgggtacgaacagagtttctctgtttttgacgatggccataaaggcgattgaactgttgaaagggtgcggatcacaagaagaaataatggaagtgcttgctgcggtggcttcggatttgggggatgtgatcgatgatgtgaacaccttgcaggtgattccactgaatggtgcaatgaccaatgaggtttttcagataaactggccaaccaaaaatggtggtgagatcagaaaggttctggttcgtttatatggggaaggtgttgaagttttctttgacagggaagaagaaattcgaaactttgactgtatttcaaagcatggtcagggtccacgccttcttggccgattc

SEQ ID NO: 19704 - DNA, 448 bp, Glycine max
  unsure at all n locations
  Clone ID: LIB3106-074-Q1-K1-B6
cccacgcgtccggctagtttatcgtgaggagaatatgaagttgtttgttttctttgttgctgcagtagttttggtagcatggccatgccatggcgcaggctaccaaaggttccctctccgaatgaaaactggctatggtgagcgttcttcggaggtaaaatgcgcaagttttaggcttgctgtggaagcacacaacatccgagcctttaaaaccattcctgaagagtgcgttgaaccaacaaaggactacattaatggcgaacaatttagatcagactctaaaacagttaaccaacaagctttcttttatgctagtgaacgcgaagtccatcacaacgacatatttatattcggcatagataacaccgtactctctaatatcccatactatgaaaaacatggatatggngtggaggaatttaatgaaaccttatatgatgaatgggtt

SEQ ID NO: 19705 - DNA, 430 bp, Glycine max
  Clone ID: LIB3106-074-Q1-K1-B7
cccacgcgtccgcccacgcttccgcaattcttcaaatacctaatatggagtttcacattctgcccatcattacttttctcatgcttgttgtggcaactaatgctgatgctgcattaccttctgcattttactggaagtccaagcttcctaccacaccaatgccgaaagccatcactgatttgctacaacctgattggaaggaagagaaagacacctctgtggatgtagggaaaggtggagtaaatgttggtgtagaaaagggaaaccaaggaccaggagatggcactgatgttaatgttggtggtggagacggtggaatgaatgtgcacacaagaccaaagggtaagccagttcacgttggagtgggcccacattctccatttgattacaactatgcaaccagcgagacccaattcatgatgaccccaat

SEQ ID NO: 19706 - DNA, 416 bp, Glycine max
  Clone ID: LIB3106-074-Q1-K1-B8
cccacgcgtccgcacgaccgtaggagacgctccatgaggaagcaaaggcaaagatcactcagcagagagggtgtagtgcatgatgcggttcgagaaattcactttgtggaggtcaaaggtgagaccgatttgcatgatctctcccacactcatcacctggggttgtcagcaagagctgcttaaaatttagctgcttctccaaaattgattaatctcgctagctcctaccactttgttatgcactttatttaatttcactgtgatggactctttcgttattatatatatcatgttaattaattactagttgtctcctttgttctgtactcaattcttattttctgtaaccacatatgtggaactttttcttgtactcttactcccatgattaatatattcttcttatgatgttgcat

SEQ ID NO: 19707 - DNA, 463 bp, Glycine max
  unsure at all n locations
  Clone ID: LIB3106-074-Q1-K1-B9
aaaaggggttcaattctagctagttctattacgtcgtccgcgaccatgaacatggcgatggcgcttctgttcatggttttcgcagtttcatcagctttagacatgtcaataatatcacacgacaacgctcatgcggatagggccacgaggcgcaccgacgaggaggtgatgtcaatgttcgaggagtggctggtgaaacacgacaaggtgtacaacgcgctcggtgagaaggagaagaggtttcaaatcttcaagcacaatctgcgcattatcgatgaacgaaactctctgaaccgaacctacaagttgggactcaacgtgttcgctgatctcaccaatgcggagtacagagccatgtacctgcgaaccttggacganggtccgaggttgggcttggatacgccgtcaagaaaccactacgtgccacgtgttggagataacatacccgaatccgttgattgga

SEQ ID NO: 19708 - DNA, 411 bp, Glycine max
  unsure at all n locations
  Clone ID: LIB3106-074-Q1-K1-A4
cccacgcgtccgattcattctcatctttctctcttctctctccacccaaaccctaacntccgaccctgttcccctctcgaatcctcatgaaagaagaaagccaagacgatctaaagagcgatccaaactgctgtgaataagaagggagccgncaccaaggctaggaaacccgtcgcaaggggaaggcagcgaaagaccctaacaagccaaagaggcctccaagtgctttcttcgttttcaaggaggagttcacgaaggtattcaacaaagaacatcctgaaaacaaagcagtgtctgctgtgggcaaagctgctggagcanaatggaagaccatgtctgatgctgaaaaagcaccttatgtggcaaagtctgagaaaaggaaagtggagtacgagaagaacatgagagcct

SEQ ID NO: 19709 - DNA, 473 bp, Glycine max
  Clone ID: LIB3106-073-Q1-K1-H12
gaaactcacggatgggatcatgatgtgggttatgaagggttgaatgtagagagattgttcgttctcaaggaaaagatacctttatctttctctggtcaggttactaaagataaaaaggatgctaatgttcagatggaaatatccagttcagttaagcatgggaaagggaaagcaacttcattaggttttgatttgcaaactgtggggaaggacttggcttatacattacgcagtgagacaagatttactaattttagaagaaataatgcaaccgctggtctctcatttactttacttggtgatgccttatcatctggattgaagattgaagacaaattggttgctagtaagcgattcaagctggttgtcagtggtggcgcaatgacagggcgtggcgacattgcttatggtggcagtttggaggcccaactgagagataaggattaccctcttggtcgtttcttaaccacact

SEQ ID NO: 19710 - DNA, 455 bp, Glycine max
  unsure at all n locations
  Clone ID: LIB3106-073-Q1-K1-H2
ttttgcttcactctacgcagatcgcagcaaaccagagattgaactccgacgatgcctcccgtcgctcctcgatccggcgatgccatattcgccaacgtcgaacgcgtcaatgcggagctgtttactttgacgtatggcgcaattgtgcgtcaattgctcacggatctggaagaggttgaggaggttaacgagcagcttgatcaaatgggttacaatattggaatccgattgattgatgagtttttagctaagtctaatgtctcaagatgcaacgatttcagagagactactgatgtaattgcaaaggttggttttaaaatgttccttggtgttactgcatctgtgaccaattgggatgctgatggaacatgttgtagtattggtttggaggataatccattggtagaattttgtgagcttnctgacaactgccaaggttgtactattgcaacatc

SEQ ID NO: 19711 - DNA, 428 bp, Glycine max
  Clone ID: LIB3106-073-Q1-K1-H3
gtttcagattatattcctttcatgggttggattgataaactcaggggactggatgcacgtcttgaacgcaatttcaaggagatggataagttctaccaagaagccattgatgaacacatgaattctaagaaaaaaactccagaggaagaggatttagttgatgtcttacttcaactgaaagagaacaacacgtttcccatagatctcaccaatgataacatcaaagcagtgctcttgaacttacttgtaggagctacaggtacaactgaagtcacaacaatctgggccatgactgaactaataaaaaatccaagcattatgaagaaagtgcaagaagaaattagaggcttaagtggtaagaaagatttcttggatgaagatgatattcaaaagttttcctacttaagggcaagtgataaagagacact

SEQ ID NO: 19712 - DNA, 375 bp, Glycine max
  Clone ID: LIB3106-073-Q1-K1-H4
cccacgcgtccgcccacgcgtccgctcaaatctatattctgacaaccaatcgtccgaacttattacatttcgaagctcttcatcatctacctttgctctgggggtgtctgtcggttacttcattgctgaccttgggatgatattttggtttttttttctcttggtggatatgagtatgtgattcatcatttgctttctttagtagcagtagcattttcaatgctgagcggggagggtcagctatacacatacatggtcctgatctctgagacaacaactcctgggatcaacttgagatggtatcttgatgcagctggaatgaagaagtcaaaagcttatctcatcaatggggttgtgatattcattgcttggctg

SEQ ID NO: 19713 - DNA, 399 bp, Glycine max
  Clone ID: LIB3106-073-Q1-K1-H5
aagaaagcaagaaagaaaatgggagtggagaagcagttgttgaggcctggcaccggtgccaagccaattcccggtcagaacgtcaccgttcactgcactggtttcgggaagaacggtgacctttctcagaaattctggagcaccaaggatcctggccaggaccctttcactttcaaaatcggccaaggttctgttatcaaaggatgggatgaaggtgtgcttggcatgcaaattggtgaagttgctcgtctccggtgctctccggattatgcttatggtgctggtggctttccttcttgggggatacagcccaactctgtcttggaatttgaaatcgaagtcttgagtgcacaatgaaaaccttggtagtctgtctctgtcctaagaataaaatcatca

SEQ ID NO: 19714 - DNA, 402 bp, Glycine max
  Clone ID: LIB3106-073-Q1-K1-H6
agcaggagcagaaagaaagaaagaacgaaaatggcgagcggcgcctcaccgcaactgcaagtgaggttgaagtcctcttttatcggagatcgtctcttacgctgttcaacttcaaggcaccaacctcttcctcaactattccgttacaaccctggaaccaagcatgtttcgatgcagttatctagaacactttctggcttgaccaatctcttttttaatagaagaaatttggatgaattgcctaacagcaagcgtaaacgtctgagacctgggaaagtttctccgcggcgacaggtgccgaagaatataccgaggccttcgtatgtgaattctatgattcctccagggattgccagtggagctgaagtgcatgacaagaaagggatagaatgcatgagagct

SEQ ID NO: 19715 - DNA, 463 bp, Glycine max
  Clone ID: LIB3106-073-Q1-K1-H7
cccacgcgtccgcccacgcgtccggctaaagtaagtgaagctcagcatctgaaacagagtgtacaatcccagaacaaaataagagtatcaaatatgtacccggatttgtgcttgaagaagcttgatataaagagaagcctcctgaagaactgatgcggtgtcagtctgcaggatattcagaaagccaaggccacactttcttaaaggtgtttattatgctagtaagaaatgaaggatctagtttttgtccattaggggttagcaatgatgactcaccttgccaaaaggtgaaaccaacttttgtagagttgtaattttattgctaagcttctgatttgtcatcataggcacatgcaactgaaggcaaaaaaaggggcatttttttaggcttacggttaaaatgaattacctagtgcctaatttaatcagcaaaacgaaaaaaaagtaactactattattatag

SEQ ID NO: 19716 - DNA, 434 bp, Glycine max
  Clone ID: LIB3106-073-Q1-K1-H8
cccacgcgtccggttttatccgaaagcaagcattatcagaagcagaaagaaagaataagaggttgcagcaacaatggcagccatggctgcgcttcagagctcaatggtcggtctctccctctcctccaactctttcttaggccaacgcctttctcccatcaccctcccctctcttcttccgggtaagtcaacagagaagcaatgtcctattgtaatgaggcttaaacgatgggaacggaaggagtgtaaaccaaacagccttcctatcttgcacaaaatgcatgttaaacttggagatacggtgcaagtcatatctggacgtgaaaggggtaaagttggggagattactaaaatcttcaagcataacagcactgttatagtgaaagatttaaatttgaagacaaagcatgtgaagagtagagaagagggggaac

SEQ ID NO: 19717 - DNA, 332 bp, Glycine max
  Clone ID: LIB3106-073-Q1-K1-H9
tgaatgtcttacgcttatctctttatatacattatcatcggtgacaccgtagtgtgaaagaggtagcttatacttgaattcacggacaagcgctttcagcccgtccatgacttaaccatcggtgttgaatttggtgccaggatgatcacatttgataacaagccaatcaccttgcaaatatgggatacatttggtcaagaatcattcagatctattacaaggtcttattacatatgtgtctcatgtgcattcgcttgtttatgatatatcctttgagtgtgacatttaatcatttggctatcttgtttgaagatgcaagacagcatgcaaat

SEQ ID NO: 19718 - DNA, 337 bp, Glycine max
  Clone ID: LIB3106-074-Q1-K1-A1
ctttccttttccagggagctcattgacaatggctgaaacaaagtgggtcatgaaggacaaaagatggtctctccatggaatgacagctctagtcacaggaggcacccgaggcataaggcatgccattgttgaagagttagctgagtttggagcaactgttcatatatgtgcacgtaatcaagatgatattgataaatgtttagaagagtggaaaaacaagggacttaatgtgactggttcagtatgtgatttactatgttctgaccaacgtaaaagattaatggaaattgttggctccatctttcatggaaagctcaatattctagtgaacaatgct

SEQ ID NO: 19719 - DNA, 429 bp, Glycine max
  Clone ID: LIB3106-074-Q1-K1-A10
gattgtcgtgactcgttcttcttcgtcgttatcttcttcttttgttgtttgtgtgtctgggctttctctcacctgaaaatgtcttgctgcggtggtaactgtggttgcggaatcgcctgcacgtgcggcaacggctgccgaggctgcaagatgtacccagacttgagctacaccgagtcaaccaccaccgagaccttggtcatgggagtggcaccagttaaggctcaattcgagagtgctgaaatgggtgttcccgctgagaacgatggctgcaaatgtggagctaactgcacctgccacccctgcacttgcaagtgaggtgttggagagctaaagcttcaagcagagatggcccttataaataatgataaatactatatgtagtttcaaaacttcaaaattatgtaatatgtattatggtgcactctg

SEQ ID NO: 19720 - DNA, 324 bp, Glycine max
  unsure at all n locations
  Clone ID: LIB3106-074-Q1-K1-A11
tcgccacgcgtncgtgtcgatctttgtccgtccgtcaccaacacagcgttgttccatttcgagttctcggctgccattgccattgccattgccgtttcaattgcacgtaagaagaagagcaaaagggggaaaagtggtaatgagcatggaagcaggtattggagtgatgggcaccaagttgggtatgatgagctatttcgaatccgacggagaggttgttcctgtcactgtcgtgggtttcaaagaaggcaacatcgtcacccagatcaaaactgaggccaccgatggatacgacgccgtccaggttggttaccgaagggtcag

SEQ ID NO: 19721 - DNA, 428 bp, Glycine max
  Clone ID: LIB3106-074-Q1-K1-A12
tcggagaaaatggcggtacctctgctctcgaagaagatcgtgaagaagagggtgaagaagttcaagaggcctcagagtgacaggaaaatttccgtcaagacaaactggcgtagaccaaagggtatagattcccgtgttaggagaaagttcaagggatgcactttgatgccaaacatcggttatggttctgacaagaagacccgccactatctccctaatggttttaagaaatttgttgttcacaatgtgaaggacttggaactgctcatgatgcacaacaggacttactgtgctgagattgctcacaatatatccacaagaaagagaaaagatatagttgagagagctgcgcaacttgatgttgttgtgacaaacaaaacagccagattacgcaaccaggaggatgaatagtctaaatgacggagtca

SEQ ID NO: 19722 - DNA, 452 bp, Glycine max
  unsure at all n locations
  Clone ID: LIB3106-074-Q1-K1-A2
cccacgcgtccggatcgagataactagaaacagtgtgatgaaaatgaaggtccttgttttcttcgttgctacaattttggtagcatggcaatgccatgcgtacgatatgttccctctccgaatgaacactggctatggtgcccgtactccggaggtgaaatgcgcaagttggaggcttgctgtggaagcacacaacatctttggctttgagaccattcctgaagagtgcgttgaagcaacaaaggaatacatccatggcgaacaatatagatcagactccaaaacagttaaccaacaagcttacttttatgccagagacctcgaagtccattccaaggacacatttgtgttcagtatagatggcaccgtactctctaatattncatactacaaaaaacatggatatggggtgggagaaaattaactcgaccctgtatgatgaatgggttaac

SEQ ID NO: 19723 - DNA, 351 bp, Glycine max
  unsure at all n locations
  Clone ID: LIB3106-074-Q1-K1-A3
cacgcgtccggnctcgcttggtggcggcacgaggccagcacgtgaccatcattaccacccccgccaacgctgaactcttcgagcagaacatcgacaaggacaccgcctccggccaccacatccgcgtccacatcatcaagttccccaacgcccacgtagggctaccggaaggcatcgagcacctctccgccggcaccaacaatgaaacactctccaccggacgtcttcatccctgacatactcttcacctggaccaaagacttctcccagaaactctncatctcgcggctagtcttcaaccctatatccatcttcgacgtctgcatgatccacgcccttaaaacccaccct

SEQ ID NO: 19724 - DNA, 321 bp, Glycine max
  Clone ID: LIB3106-073-Q1-K1-H11
gaatgtcttacgcttatgtgtttaaatacattatcatcggtgacaccgtagggggaaaggggtgtcttctacgtgaattcacggacaagcgctttcagcccgtccatgacttaaccatcggtgttgaatttggtgccaggatgatcagctttgataacaagccaatcaagttgcaaatatgggatgctgttggtcaagaatcattcagatctattacaaggtcttattacatatgagctgcaggtgcattgcttgtttatgatataaccattatttatacatttaagcatttggctagctgggtggaagatgcaggacagc

SEQ ID NO: 19725 - DNA, 122 bp, Glycine max
  Clone ID: LIB3106-073-Q1-K1-F3
ctttaacatagtgtggtttgtaatttgtttttggtgtgcatactgtggtttgtagttttggctaatgaaataatcacatggttttttttttaactagtttggtctcaataagtctgtttgat

SEQ ID NO: 19726 - DNA, 362 bp, Glycine max
  Clone ID: LIB3106-073-Q1-K1-F4
gggtatttgccacttcgcttttgattgcaatggggtttgctttaacattatgatcataaggtgagataatttgtatgatctctcccctttggtttagatgcctttgcagtctttgatgtatatgaaaggcttggcctcagctattcttttttcccccttgcttgaatttgtaatttggtaagagattcatggcaattggtttcccaactttcttatttacatattaaatttgtggtattggctcttgcaaaaaaaaaaaatttccttacccaactttatatccttttaaaacatttcccttttttcaaatggtgttaataactaaaaagagcgcaacaaaaaaaaaaggggggcccctttta

SEQ ID NO: 19727 - DNA, 452 bp, Glycine max
  Clone ID: LIB3106-073-Q1-K1-F5
cccacgcgtccgggcattggtttctctctctagcttggacgagtgaattagattcatgatgaagatgtcgtctctgatagcagaagatgtgaagagcagatcagaggtgtaccacggggacgaaatgtgccaagtgaagtccaaggagcttctcaaggaaatcgccctccccaacggccttcttcccctcaaggacatggaggagtgcggctacgacagacaaaccggcttcgtctggctcaaacaaaagaagagttacacccacaagttcgacaagatcggaaagcttgtctcctacgcgcccgaggtaactgctcatgtccaacaaggtaaaattaccaaactcaccggggttaagaccaaggagctcttgctctggatcacgctcagtgatatctatgttgatgacccttccactggcaaaatcaccttcaagacccctggcggcctat

SEQ ID NO: 19728 - DNA, 370 bp, Glycine max
  Clone ID: LIB3106-073-Q1-K1-F6
cccacgcgtccgattcgccgaaaagccaaatggagaacagttgaaagctatgaacgttgatactacaattttgggtcttgatgacgagagagcaaaggaattgccttatattgctagcatgcgtatatatgctgttagcaaaaacgtgatgttagacctgctccgtgagaagtttcctggtgcaaatgactttgacagtgaagtgattcctggcgctacttctattggaatgagggtgcaagcttacttgtatgatggctactgggaagacattggtacaattgaggctttttataatggcaatctgggaatcaccaagaagcctgtgcctgacttcagattctatgatcgttcatatccaatctacacc

SEQ ID NO: 19729 - DNA, 422 bp, Glycine max
  Clone ID: LIB3106-073-Q1-K1-F7
cccacgcgtccgcccaaacctcttcctccactggccaatcactggacgccacggggcaggcaaagatccgttgggtgcaaaagaattacatgatttacaattattgcactgatatcagacgtttccctcaaggccttcctccagaatgctccattgcatgagaatatttaattcaatgttgcatatcattataaaatgatcctcatgaacgtgacacacatgtgttgcctattacgttaatttactttcttgtgtaaattaatgcaactaaaactgttattattgttggtttgtgctttgttgagcactactccattgtttgtggcgaaagataattatagcgtgcaaaattatattcatggcagtgtatatgtgctgaaattgtaaagtattttcattaataaaattgttggagttttatt

SEQ ID NO: 19730 - DNA, 455 bp, Glycine max
  Clone ID: LIB3106-073-Q1-K1-F8
gaacgaatggaatgtataaaaccaaccaatagcttcacaatctttcttgcacgccattggggatcacttccgatagctctcacaatcctatggcggagaacaacaacaaccaccaccttgaaaccgccaccagaaggcttgcctctgtgaccaaccacctcacttccggtgggaacaacagcttccgccgcgtccacggagaagttccatcccacgacgtcgtttggaggatcgtcgcctccgaccacgacaactccggcaaggacttcaccgacattgtctacgagaaggccgtcggggaaggaatagccaagataagtattaataggccagagagaaggaatgcgttccgaccccacacggtgaaggagcttatgcgtgctttcactgatgccagggatgatagctctattggggtcgtcattctcactggcaagggaaccgaagcattttgt

SEQ ID NO: 19731 - DNA, 423 bp, Glycine max
  Clone ID: LIB3106-073-Q1-K1-G10
cacacgcgtgcgcataatctatcttacaaaccctaacacttgtctatctcttggatcatgagctgtccacaatgccgccgaagttcgacgcctaccagatagtccacgtcttcgtccgcgttaccggcggcgaaatctgcgcggcgagttacatggccccgaagatcggttccctcggtctgttcggcaagaacatcggcgaagacatcgccaaagactccgacgaggactggaagggcctgcacgtcaccgttaagctcaccgatgagaatgcgaaggcgaacgtcacggtggtccccttcgtcgtcgacgtcgttatcgaggccctgaacgagcccgagcgcgaccggaagatgacccacaacatcaagctcaacgtcgacatcttgatcgatgacgttatggagatcactacggttatga

SEQ ID NO: 19732 - DNA, 373 bp, Glycine max
  Clone ID: LIB3106-073-Q1-K1-G11
cccacgcgtccggcacgtctggtcctttgattatgaccactgagggtctcttcacatgtcggtgttgagccccatcgtgattctattctcagacacaggagagcggaggccgagaaagccggggaaaaaagtcacctttctttctttttcattttccattttcatttaaaacattaaaaaaaatctatttttgctatatctgtttctccacttcttttctcagtggtttggattggaggtcacatagggagagagaggtttctactttctatacatggaaacttgtttccaatttgcagtttttcccttttcttcttctaagccttcacagaatttataggagttgcctcttcaaactgatggcagtgtttgg

SEQ ID NO: 19733 - DNA, 254 bp, Glycine max
  Clone ID: LIB3106-073-Q1-K1-G12
cccacgcgtccgagaaaagattttgataaaccgtttgctgctgatgcagatggtgtaccgattatatgcaccagtattgcctatagggtttacatgtccgtatccagcaacttaaggtaccaagtactatctctagttatcgaacaacggattcttgaacctttgctgcaccagcacagacttatgctaatctcaatttgctttgctgttagaactggaaacactgtcttgggcttactattatgggtggatta

SEQ ID NO: 19734 - DNA, 250 bp, Glycine max
  Clone ID: LIB3106-073-Q1-K1-G2
cccacgcgtccgaaaaaaacatgtataactttgcttaattaaaatggaaaggtttttcgcggtgggagaagaggatgtcctgggatgaattctggaattgcttctatcgagtatgtgcttgctagtctcctttattggcctgattggaagttgcctgatacactagatgtagatattagcgaggtatttgtacttgttgtcttaaagaaagtgccacttctccttaaaccataaacctttccattttaat

SEQ ID NO: 19735 - DNA, 417 bp, Glycine max
  Clone ID: LIB3106-073-Q1-K1-G6
ggagctgaaccaaaccacttggctttctctgctgctcttggtgttacattgggactatttgctatatgtggtgtcactgtgttcctctgtggaatggctattgcattgcttggatcattttgccatgctccaactgtgatgcttgcaaactttattgctactccaatagagttgagtctggttgtaccctttctacgctttggtgaggttatctctggtggatctcatttccctttaacatctgatgctttaaagaaagttcttactggccaagcttcacgtaaagtcttattaagtgttgcccatgcgttattagggtggctggttgcatcaccatttattttgggaactctatacatagttcttttaccatgcttcaaaattctagttcataaattctcaagtgttcctttaagt

SEQ ID NO: 19736 - DNA, 410 bp, Glycine max
  unsure at all n locations
  Clone ID: LIB3106-073-Q1-K1-G8
tgagaaggagcccaaatttttgaagaatggtgatgcaggtatggttaagatgattcgaacgaagcccatggtggttgaaactttctctgagtatcctccccttggtcgttttgctgtgagggacatgcgtcaaactgtggctgtcggagtcatcaagagtgttgagaagaaagaccccaccggagccaaggtcaccaaggccgctgccaagaagaagtgattgcatttgggcaattttgctagcacatgtgatcatcatcgtggttactcctttatagtagttttatccttgcagagtcttaggtgttttggttaagttatatntttaagtttctgccgatttcatgtagccgtaactttcaaaactaggttcttgatcggccggggtcaattttcattggtgtttgttt

SEQ ID NO: 19737 - DNA, 431 bp, Glycine max
  Clone ID: LIB3106-073-Q1-K1-H1
aaagaaagcagggaggttctgttgtaggtgggtgagtaatagtatcggtcgtgttgtggatagatcggcatggcttcttcttcagcttctcctcgaccgagcgccgccgcggaacattcgaggaagatattagggtttatggcgcacgcgaagcaacggaaggacagcttcatccaattcttcgccatgacgggtatccttctattgagcatgcgatctttgagtcagaagtacaaaatccatggcctccaagaagacatccacgccctcagggtcgaccacggttctctcaccgaccgcatcaacaacatcaagaacgacctccttcgagaagcttctcaagattccaccggcctcttcgcttctcgccttcgccacctctttgcagaacaacactgatccctttccccttcctgttaaattggagagat

SEQ ID NO: 19738 - DNA, 466 bp, Glycine max
  unsure at all n locations
  Clone ID: LIB3106-073-Q1-K1-H10
cccacgcgtccgggcggacctgcgcgttcgctcctccacgctgaagggcgtcacggtgccggaagaccgcgcgccttcgatgatcgacgaatatccgattctcgctgtcgccgccgccttcgcggaaggggcgaccgtgatgaacggtctggaagaactccgcgtcaaggaaagcgaccgcctctcggccgtcgccaatggcctcaagctcaatggcgtggattgcgatgagggcgagacgtcgctcgtcgtgcgtggccgccctgacggcaaggggctcggcaacgcctcgggcgccgtcgtcgccacccatctcgatcaccgcatcgccatgagcttcctcgtcatgggcctcgtgtcggaaaaccctgtcacgggggacgatgccacgatgatcggcacgagcttcccggagttcatggacctgatggccgggctgggcgcgaagatcgaactctncgatacg

SEQ ID NO: 19739 - DNA, 412 bp, Glycine max
  Clone ID: LIB3106-073-Q1-K1-F12
ctcacgcgtccggatagacatttcgagagtctgctatctctatatgaatggtgcgagtctgatgcttgctacgatggtcttagtatggccattcacagcgataccatatgttagcagctttgaatgaatatgtgtcatatctgccaatacaacgttatgagcaaatgcgcaaactgtaacatcgataggaaacacacactatactcttggcttcagaccatgcgatgaaagtcacggtaatcggcttgggctatcataaattccacagttcatatatcagagctcacgatgcttaatcaagatgcttactctgatgtcacagaccatgcagtccatgcacttggcacatctgtgttaaatatatatggctccgtactgtctagtattatatactttaaaatacatgcttttt

SEQ ID NO: 19740 - DNA, 429 bp, Glycine max
  Clone ID: LIB3106-073-Q1-K1-D10
tacgctctgttctcttttcagctactttagccggttattcatgtatcatggctagggttttggcggcattctattaatagatcatgggctattgtgctgagcataggcatggtcagcaaaaggaatcaggaaaattaaaaagatcgaccaaaatgatgagtgctttacgaacaaatggattaagaatgtcaggtttctcattgcatcgtactttcaatcctttggatactatagtgagacctgtaatttagattcattctaaggtattcattgcaacttctttacttttatcatgatctaccagatgcttgcccaaatccatgtttgatcctttcactgataaagcaatcgtatgtattattctattccatgatgaagcaagacgttttggtcacaatttttttggaacagatcaaattctattgggtc

SEQ ID NO: 19741 - DNA, 361 bp, Glycine max
  Clone ID: LIB3106-073-Q1-K1-D2
actatttcgaactccgccatggctgccactttcgtcaccgtcacgtcatacttttttggcgcccgcctcaacaacccgacaaccttaaacaacggaagattccacgcgctcctcaacttctgctaaaagaaggcggcggcgccggcaccgaagaaaaaggaagtgaaagtgaaaccctgcggcgaccggctggtgtggtttcctaatgcggagcctgcggagtggctcgacggatgcatgatcggctaccgcaggttctacccgatcggcttcgcgaagcctgtatagttcctgcagttcgacctggacttgcttgaccagaacctcgctaagaacgttgcctgcgatgttatcggaacca

SEQ ID NO: 19742 - DNA, 417 bp, Glycine max
  Clone ID: LIB3106-073-Q1-K1-D3
ctcaaatatcaagttatgacgagtttgcactttgcagagatggaaaagaaagagagaaagatcatggtggctgtggatgagagccaagagagcatgcatgcactctcctggtgcatcaccaatcttatttccgaaaccaacaagcttgttctgctttatgtcaggccaccttctgctttctactccttggatgccgcagggtataacttttcctccgatgttgttgatgctatggaaaagtacagtatgcacttggctaattcagtcatggaaagagctgaagctgtttgcagagacttgaacgctactaatatcaatatggagagagtggttggtgtaggacatgccaagaatgtaatatgcagtgctgtcaagaaactagaagctgacaccttggtcatgggaactcatgggcta

SEQ ID NO: 19743 - DNA, 250 bp, Glycine max
  Clone ID: LIB3106-073-Q1-K1-D4
gaccgcacgcgtccgctcagaaatcaagatactacgagtcagcactttctcttaccaggaaaataaagatagacacgacagggtctactgaggatttgggccaatacagcatccatgcactctccttttgcatcaccaatcccatcaccgcaaccaacagccgcattctaaatctatttatcccaacctatctcctcatactacatagattccacagcaaataacacgcactcaaatcatcttaatgcta

SEQ ID NO: 19744 - DNA, 301 bp, Glycine max
  Clone ID: LIB3106-073-Q1-K1-D5
ctcatgtctgctctcatacgtccgtgtcattccaatggatactgcgatctacatcaagacggaccgccaagtggcgctcttcagagcgctccacgggcatctgcaccgagctgctaaactcgccttgctacgtcgtaacctaaaatgccgcgttacttactatcacagcagcagcaactgctgccgcatgccgagctctttcggctgcgagccgacgccgatctggcttggatccttccgcggactgctaccgctaacgccgcgctgcataatgagcttcgaggcatacttagctacatct

SEQ ID NO: 19745 - DNA, 206 bp, Glycine max
  Clone ID: LIB3106-073-Q1-K1-D6
gtaaaaaaaaaaaaaaaataaaaaatttttatataaaaaaaaaaaaaaaaaaaaaaaaagaaaaacaaaacaaaaaaaaacataaaaaaaaaactaaaaaaaacataaaaaaaaaaataataaacaataccaacataaatcataacttaaaatgccctcaatactaaaatatcacatcatcatcaacacctaacacatacctaact

SEQ ID NO: 19746 - DNA, 377 bp, Glycine max
  Clone ID: LIB3106-073-Q1-K1-D7
ggagagagtgtggtagggacagtgtgctggattccctgactgctgtatctggggccgacatgggcaatctagctcacagcgggcatgttgagtgcaagcatttgcttcgactggaaaatggtgctgagattgtgaggggcaggactgagtggaggcccaaacctgtgaacaactttggtgttgtgaaccaggttccagcagaaagcacctaagattttgaaatggttaacgattggagttgcatcagtctccttgctatgtttagacttattctggtccctggggagagttttgcttgtgtctatccaatcaatctacatgtctttatatatatacaccttctaatttgtgatactttggtgggtaagggggaaaag

SEQ ID NO: 19747 - DNA, 463 bp, Glycine max
  Clone ID: LIB3106-073-Q1-K1-D8
cggacgcgtgggcggacgcgtgggcatttgtggcctttctaacccattgtggttggagtggtacacttgaaagtatatctgcaggtgtgcctatgatttgttggcctttctttgccgagcaacaaacaaattgcaagtatgtatgcacaacttggggaatcggaatggaaattaaccatgatgttaggagagaagagatagcaaagcttgtgaaggaaatgatgatgggagaaaagggaatggaaatgagacaaaaatccttagagtggaagaagaaagcaataagagctactgatgttggaggatcatcttacaatgatttctataagttaataaaggaggtttttcattacagtgttctttaagtccttattttataatcaggtgtattaaggtttattagttagataaaaatacctttcttaagttataatgggatgacaaacatgatgcaattggtttg

SEQ ID NO: 19748 - DNA, 167 bp, Glycine max
  Clone ID: LIB3106-073-Q1-K1-D9
gaccactattaatcatcgtcttcacattcatattctgaacccgatattgaaacttcatgggaaatcttttaatgtcaatctacgaagcagaaaactgataaattttgtgtaattcacttctaggcttttaagcgacacaggtatagatttttgatcttttgtcctaa

SEQ ID NO: 19749 - DNA, 383 bp, Glycine max
  Clone ID: LIB3106-073-Q1-K1-E1
cttcctctttttctcaacaaaaaggggttcaattctagctagttctattacgtcgtccgcgaccatgaacatggcgatcgcgcttctgttcatggttttcgcagtttcatcagctttagacatgtcaataatatcacacgacaacgctcatgcggatagggccacgaggcgcaccgacgaggaggtgatgtcaatgttcgaggagtggctggtgaaacacgacaaggtgtacaacgcgctcggtgagaaggagaagaggtttcaaatcttcaagcacaatctgcgcattatcgatgaacgaaactctctgaaccgaacctacaagttgggactcaacgtgttcgctgatctcaccaatgcggagtacagagccatgtacctgc

SEQ ID NO: 19750 - DNA, 424 bp, Glycine max
  Clone ID: LIB3106-073-Q1-K1-E10
agtgtttcaaggaatgaagtgctccaaaagtcatgacacatgggctcagaatcctaagccagggactagggttcagaaacatgatgatcggttgttcacgttggcagctattggactcactattgcaattgtggtccttttgctcaaaaaattcctcaaatctacacaacatggggcacttttctcggatggatcttaagacgttttgttgctgatgttggtttctgagattaaaaacttcttggcctttatgcagtaaatagaaatatagagctcttctaaactcaaatctcaaagaagcatttttttttgttttaatttgattgtacttttattacactatttgtaattatggtaatatatatgtgctcctgcaataaaatgaggaggagcatggcctttgttattaaaaaaaaaatttttt

SEQ ID NO: 19751 - DNA, 443 bp, Glycine max
  Clone ID: LIB3106-073-Q1-K1-E2
cttcgaatcgttgatgcagcgtccgatttattctttttctgtgtagtttttgattttcgggttctgactattatttcttaaaaaattacagattctttgcttttggttttggttgattgaaggccttcacggcattcgttgcggcattttaatcgatttatccaagcagatcttggcatgttataaagggtagactgcaaaatggaggcattgaaagcatcttatggggatggatcttctgattcagattctgaatctgcccattcaattccaacttctgctccctcagcagtattcacacccttgccaccacctcctatctcactccttgatcctccaagcattcttgatctgcagataggtcagacaactagacttaggagcttccctcatgtcgatggtaactatgccttacatgtatatataccaatttacatttcatc

SEQ ID NO: 19752 - DNA, 430 bp, Glycine max
  Clone ID: LIB3106-073-Q1-K1-E3
atggctgcctactactcacagccccaaccgtcgggccttctcccttaccagtactaccaacggccgcctccgccacctcctccgccgatgatggcggtagtgccaccgccccccggcgcggttgtcccgccggcgcaccacctgcatccgccttacgtggctcagcatcagcagcaagcggtgttcggttcctacggtgctcctcaatcctccacccacgaggttcgcactctcttcgtcgctggcctccccgaagacgtaaaaccccgcgaaatctacaacctcttccgcgaatttcccggttacgagtcctcgcatcttcggagtccctctaattcgtcgcagccttttgctttcgctgtgttcgcgagtcagaagtcagcaatcttggcaatgcatgctctgaatggactggtgtttgatctcgaaa

SEQ ID NO: 19753 - DNA, 453 bp, Glycine max
  Clone ID: LIB3106-073-Q1-K1-E4
aagaacgttgagaagaaggatcctaccggttccaaggtcaccaaggctgcccagaagaagaagtgaatcgtgcgggctggttcatcaggggatgttggttacaataaatgttggtttcttttctgtactcttgtgtcttcttttctaggtagcttgtttttcggacaaagtttgaagtctccaccatcatctcgcaactgttgttcccagaactgggttcttgatcgactgtggcaaaattgcttttatttatctgcgttttaatgtgttgtgtttgtcggaacccctgattacatttttgttaagcgcagcgagtttcaggactttgctgcgttgtgttgctttggtttattaaatgtcaactttctatttgtagtgttcaaaattgaaaatgcatgctctgaatggactggtgcttgatctcaaaaaggggtccactctttatattgatct

SEQ ID NO: 19754 - DNA, 244 bp, Glycine max
  Clone ID: LIB3106-073-Q1-K1-E5
gtggcaacagagtggtggcaacttatcctgaactcattcatgtgcaaacatatttcaatgatgtttttccttttcatgttatgtttttctcttgtactgcattttcggctgtgctcttcctctttctatgtatgcctggcatgtgcttgattattattactatcaactaatccataaattctttctcgtgattcattagttttttctctgtcatattttatatcactgactaatgtttgattgc

SEQ ID NO: 19755 - DNA, 124 bp, Glycine max
  Clone ID: LIB3106-073-Q1-K1-E6
gccacgctcgccagctcgatataaaaaaaaaaaaaaaaagggaggcggcgtctaagaccagctactacgctcatgcactatacttctataggtacctaatcaatcatgccgcgttacaacgctg

SEQ ID NO: 19756 - DNA, 216 bp, Glycine max
  Clone ID: LIB3106-073-Q1-K1-E7
attcccgggttcgactccacgtcgtctcgtaaaagaaaaataaaaaacaaaataaaacaattataatttataaaaaaaaaaaaaataaaaataaataaaagaaagaataaaaataaaaataaaaataaaataataaaaaataatatataaaaataaatataaaaaataataaaataaaataattaaaaaaaaaataaaataaatattaaaataaaa

SEQ ID NO: 19757 - DNA, 355 bp, Glycine max
  Clone ID: LIB3106-073-Q1-K1-F1
gtggtggtgggttaggtggtcttgcaaacttggctggaggcttcttcaaaaagtagttacgaagcaactaaataagaccttaattgagtccttattctcggtctagtagtggggtttgggtaatatgcaccagatcatagatttaaatcttgttattgtaaaaaaaagaaaatggaaaaaaaaaagtcttgaatttctcacttctagttctagtattgttgttgttgttgttatatgatgtatggttgaataaatgtgatttggtgtttgtactttgtagagttaattagtgacttctgtgtctgttctcttaattctaattccaaacaagagtacttccggccggcttcttttt

SEQ ID NO: 19758 - DNA, 419 bp, Glycine max
  unsure at all n locations
  Clone ID: LIB3106-073-Q1-K1-D1
ctaaaagatggatcttgataaataccacttcttaaactaatatagttccatcctctcaaacttgcattttagcaatggccaaatggatctcatttgctgctctttttgcaatacttttactactcatctctcctgagcttgcaagtgctgcccaacctagtcttattcttcaactcggccgaaaacttttccaatgcggcagcgccgccgtccctgttcgtggaaataccccatccaatggccgctcgtagaggatataccccaccaccaaaacacccactctatggctgaatatttgagatgttagcatccttctttaattntgtgataaaaaaaatacttttaaagatgtataattgtgtgtcattactataatatatgtcatgtatgcttaatttcactgaaccatgtgtactact

SEQ ID NO: 19759 - DNA, 191 bp, Glycine max
  unsure at all n locations
  Clone ID: LIB3106-073-Q1-K1-F11
cgcccacgcgtccgttcactttaggagtgtgttttcagattttttcaactatagctcgatctggcgtgtatgagtatgtnaatgttaatgcatgttttgaatcaatgttcgtcatttcagtttcgtgatgaagggtatggattagccctgtttaaactttacttttattgcaaagaactcctgaaccccgc

SEQ ID NO: 19760 - DNA, 382 bp, Glycine max
  Clone ID: LIB3106-073-Q1-K1-B1
atcgtgcattcaatggccaccacagcagctctatccggaaccatggtgagcacctccttcgtgaggaggcaacctatgaccaccacaagcctaaagacattccccaacgttggtgaagctctttttggtctgaaaagtggacgaggtggtcgtgtcacttgcatggcctcgtacaaggtgaagctcataaccccagaaggagaagtggagtttgaatgcccagatgatgttttcattgttgacaaggcagaggacgaaggcattgaacttccctactcgtgcagggccggttcttgcgtttcctgtgttggcaaaattgtggaaggtaacgtggaccagtcagatggtagcttccttgatgatgagcaaatagatagtggct

SEQ ID NO: 19761 - DNA, 278 bp, Glycine max
  Clone ID: LIB3106-073-Q1-K1-B10
cgggctgctgcttctgttcccatggctaactctttgagctctgttatcaacaacaacaagcctgcatccttagacttctgcatgccactacccctacggcaaccaaagaggaccctcttcaccacaaaggcagtgtcaaactccaaggctcaaatcaaagcatctttgaaggataaggcagttgcaggactcacagaagcttctgtgacagcatctatggaggttccagacgtggctcatgcttatatatatgagttctcccctttcctcaagaactt

SEQ ID NO: 19762 - DNA, 444 bp, Glycine max
  Clone ID: LIB3106-073-Q1-K1-B2
cccacgcgtccggttttcttctccacttcatatcagcgtctcagtttcaaagcaaacatcgacaacaacaaactagaaagaaagaaaggaacacgaaacctcaaaaaagcagaacaccatgaagtttcggtacgcgatggtgtgttcttcgaaccagaaccgaagcatggaggctcatttcctgctcaagaggcagggcttcgacgtgtcctcgtacggcaccggtgcccacgttaagctccctggtccttccctcagagaacccaatgtctacgacttcggaaccccctacaagcacatgatcgaggacctccgcagaaaagaccccgatctctacaaacgaaacggaatctttccaatgcttaaaagaaattcaacagtcaaattagcaccgcaacggtggcaagaaaatgccgctgatggttcctttgatgtggtaagtac

SEQ ID NO: 19763 - DNA, 344 bp, Glycine max
  Clone ID: LIB3106-073-Q1-K1-B3
gcgtccacgcgttcgcccacgcgtccgctcagactcaagggtgtgcccatctcatgtgctagaggtccaaccaggagaggcctttgtggtcataaacgttgctaacattgtaccaccatatgaccagtcaaaatacgctggaactggggcagcagttgagtatgctgatttgcatcttaaggtgtctgagattgtggtcattggacacagtgcttgtggtggtattaaggggcttctgtctttcccatatgatggaacctactctactgattttattgaggagtgggtcaaaattggcttgcctgcaaaggcaaaggtgaagacacaacatggggatgcacctt

SEQ ID NO: 19764 - DNA, 405 bp, Glycine max
  Clone ID: LIB3106-073-Q1-K1-B4
gcaaaagcaagaagaactagtctaagcagaaatggcctcttcagtgatggcatctgtggccctcaaacctgcccctttcactgttgagaagtcctcagttagaggccttccctccctctcaaggaactcctcttcattcagagttgtggccagtggtggcaagaagatcaagactgacaagccttatggaattaatggtggcatggctttgagggaaggagttgatgcatctggcaggaaaggaaagggaaagggcgtttaccagtttgtagacaaatacggtgctaatgtcgatggttacagtcctatctacgacaccaaggactggtctccaaccggtgatgtctacgctggcggtacgactggcttggctatctgggctgtgactctacttggtcttcttgc

SEQ ID NO: 19765 - DNA, 179 bp, Glycine max
  unsure at all n locations
  Clone ID: LIB3106-073-Q1-K1-B5
tttcagagactcgtaacaccctcggaactcccaaagacactcccgacctccgcgaaaactccacaagacaagactacatattgngcaattgggtgaaagatacatcagctaaacttaagcaagccagtgacattgatcaccatgctgaagtgaatgcaagcaagaagattgcagatgct

SEQ ID NO: 19766 - DNA, 444 bp, Glycine max
  Clone ID: LIB3106-073-Q1-K1-B6
caaaatagaaagaaagaagaatgggtgagtgagtgtaaaaactgcgctctcacaattgcggccatggaagaagcttcttcgagcgaatattccattttcaaaaaaagaaaaaccactgcattccatattccgtgcgatcggagaagaggaacagactctgaagtacactttcgcttgaagaattttgttgtgaaggctcactctcgtgttcatcgctcactcactcatgctcgtgttttctgaactccgggatccattctacgatcaatttcgttcatgttccgttctctctttctctcctatgctcgtgttcttctcggaattggtttcactctgactgaactgaaggggttaacattctttgcaagagttctactagagaagcatataagttgtgtctgttctaatttggatgacatagagaagttggtatctaagttagaa

SEQ ID NO: 19767 - DNA, 333 bp, Glycine max
  Clone ID: LIB3106-073-Q1-K1-B7
cccacgcgtccgagaagaacaagtagttgagaactaagaaggagaagcaaatggctgcctgaatgatctcttccccagctgttaccactgtcaaccgtgccggtgccggcatggttgctccattcactggcctcaagtccatggctggcttccccaccagaaagaccaacaatgacattacctacattgctagcaacggtggaagagtgcaatgcatgcaggtgtggccaccagttggcatgaagaagtttgagactctttcgtacctgccagaccttgatgatgcacagtttgcaaaggaagttgaatacctttttaggaagggatggattc

SEQ ID NO: 19768 - DNA, 236 bp, Glycine max
  Clone ID: LIB3106-073-Q1-K1-B8
gttctagatcgcgagcggcgccctttttttttttttttgggggtaattcctctcctgggtgaatattatatatgtgtaaatgattgaatttgtcttcatcttcaattgcaattcaagcaatttagttttgtcatggaacaatattcatattaacacacaaaatgcaatcttatttttgttcttccggaataaaacttccctaaaaaagccattcgtgatcgactaaatcatcaatt

SEQ ID NO: 19769 - DNA, 127 bp, Glycine max
  Clone ID: LIB3106-073-Q1-K1-C1
cccacgcgtccgaggttacctctgtgacatttgtgctgctagttcatatatttgcggctgacaccgagaaggaaagcaggaaaaaaccaaaaaggagcagatgggtagctaaggtttttaatggaaa

SEQ ID NO: 19770 - DNA, 94 bp, Glycine max
  Clone ID: LIB3106-073-Q1-K1-C12
cccctatctctatttaacctttttattatctttatttcatcctttccttaccttcttcttcactttttctttctataattgtaacttttcattc

SEQ ID NO: 19771 - DNA, 427 bp, Glycine max
  Clone ID: LIB3106-073-Q1-K1-C2
cccacgcgtccgcggacgcgtgggcgcccacgcccatggccacgctccttcttcccaaccgtttctccaccaagctccccgcccagcgctactcgcaccggcgcttcacctgctcctccatcaccgcccaatcacgatccgccaaggagcaactcctcgccctcatcgccgaccaggaccgcggcatcaagacccagagcgaccccgcgaagcacgccgcgatcgtcgaagccatcaatgcgatggccgcggcgggcgaaggctccgtgaccaccggggatgcgctgtcggcgacgtggcggctgctgtggacaacggagaaggagcagctcttcatcgtcgagaaggctcccttgttcggaacccaagcgggtgacgtgttgcaggtcatagatgttcggaatcggacgctcaacaacgtcataac

SEQ ID NO: 19772 - DNA, 261 bp, Glycine max
  Clone ID: LIB3106-073-Q1-K1-C3
cccacgcgtccgcccacgcgtccgcccacgtgttcgcccacgcgttcgcccacgcgtccgagaaaaaaaaaaaaaaaaaaaaagaaaaaaaaaaaaaaaaaaaaaaaaaaaaaaaaaaaaaaaaaaaaaaaaaaaaaaaaaaaaaaaaaaaaaaaaaaaaaaaaaaaaaaaaaaaaaaaaaaaaagaaaaataaaaaaaacataaggaaaaagggaaagtaaataaaaaaagataagagatataaaagtgaaagatggagg

SEQ ID NO: 19773 - DNA, 404 bp, Glycine max
  unsure at all n locations
  Clone ID: LIB3106-073-Q1-K1-C4
cccacgcgtccgctcagtctccgatccaatatgacggaggaacggaacgtgcggaagacacgtgtggtcgacgtggtcctcgactgcgtcatcccttacatcgacgaccccaaggaccgcgacgccgtttcccaggtgtgtcgacgctggtacgagctcgactcgctcacccgcaagcacgtcaccatcgcgctctgctacaccaccaccccggctcgcctccgccgccgctttccgcacctcgagtcgctcaagctcaagggcaagccccgagccgcaatgttcaacttgatacccgaggattgtggcggacacgtcactccctgggtcaaagagatttctcagtacttcgattgcctcaagagcctncacttncgccgcatgattgtcaaagattccgatct

SEQ ID NO: 19774 - DNA, 434 bp, Glycine max
  unsure at all n locations
  Clone ID: LIB3106-073-Q1-K1-C5
cttggcttgtgaatcagcaccacattcacctgagctttttgtgaggattccaaagcatggcttcccttgcagcatccactgctgctgcttcccttggcatgtcagaaatgcttggaaaccccatcaacctcagtggtgccacaaggccagctccatctgcctctagccctgcctccttcaagactgtggctcttttctccaaaaagaaggctgcacctccaaaaaaagctgcagctgctgctcctgccaatgatgagcttgccaagtggtatggtcctgacagaaggatcttcttgcctgagggtctcttggaccgatctgagatcccagagtacttgaccggagaagtccccggagactatggttatgacccatttggtcttagcaagaagccagaagatttttccaaatatcangcatttgaattgattcac

SEQ ID NO: 19775 - DNA, 419 bp, Glycine max
  Clone ID: LIB3106-073-Q1-K1-C6
tcgcccacgcgttcgaatttttctctcacaaattccgatttctattatttccaactcaaaatttctccattctttttggttcggtagctcgcgacatcagatcaacatcgacagcctctcgcgattggttcgatattccattccctctttctattatctacgcaaagtgatccttaattgcaataccagatatttcacttttcaagcaaccaccgactcaagcaacggtaatgggtataatcaggagttgcttctctttcattgcagggacggtctttgggatttacgtggctcaaagttatcaagttcctgacgtcaagaaggaagctgacactgccttgttacaggcaaagcaagttgaggaaaaatatcgcaagtccaagtaagaacaagggtggtggtgtgatcatgataatttt

SEQ ID NO: 19776 - DNA, 434 bp, Glycine max
  Clone ID: LIB3106-073-Q1-K1-C7
ctgaagcttacctccaaaatgggaactttgtatgagcagccaaaccctaaatacctgaagaaaacaaagctctttggtaaatacgctttgcctaaatgggagatcaatggtctggttgagtatgtctctgggggtccccaacctggaggcatgttcttcccagtgactcatggaatccatgctgtgaggcttggcaatgatgcctcaatctcccaaagcatcaaggtcaaacccggtcaactgtatgctctaattcttggggcctcaaggacttgtgcgcatgatgaagttttgaggatctctgtgccttcacagactggtgatgttcctttgcagaccctttatagcctcaatggtgacgttattgcttgggggtttaaggccacttctagtgttgtcaaagtgacttttcacaaccctggagttcaggaaga

SEQ ID NO: 19777 - DNA, 456 bp, Glycine max
  Clone ID: LIB3106-073-Q1-K1-C8
gatgaaaatgaaggtccttggtttcttcgttgctacaattttggtagcatggcaatgccatgcgtacgatatgttccctatccgaatgaacactggctatggtgcccgtactccggaagtgaaatgcgcaagttggaggcttgctgtggaagcacacaacatctttggctttgagaccattcctgaagagtgcgttgaagcaacaaaggaatacatccatggcgaacaatatagatcagactccaaaacagttaaccaacaagcttacttttatgccagagacctcgaagtccatcccaaggacacatttgcgttcagtatagatggcaccgtactctctaatattccatactacaaaaaacatggatatggcgtggagaaatttaactcgaccttgtatgatgaatgggttaacaagggcaatgcaccggcacttgccgagactcttagaattac

SEQ ID NO: 19778 - DNA, 342 bp, Glycine max
  Clone ID: LIB3106-073-Q1-K1-A8
acgcgtccacccacgcgtacggacatcgcgagcattcttttcccgtaaaaccgtttcttcatacgcggcgtctcaacactcaaactcttatgtttcaccccttcaccttcaacgcttaaaacctcttgctctcgaatcactcacgtatattcatctcatgaaaaccatggaggtccgtttaatttcaatggaatcaacggccttgcttcttgtactcttacagcttatacacttacttttggttcatttacccttactgctgctacccaaagactttccccattgtcaaccgatccccatatctttgagcctgcctttattgtcaacacaattggtcaaacc

SEQ ID NO: 19779 - DNA, 143 bp, Glycine max
  Clone ID: LIB3106-072-P1-K1-H1
gcgagattatggtaaaacgttaggcatggattataaactatatcgctatatatgtgtcgcgggatcgctttgaacaatacaaacgtcccttatctcaatctaacacattgaatcttttattcatttttttactaactctatta

SEQ ID NO: 19780 - DNA, 387 bp, Glycine max
  Clone ID: LIB3106-072-P1-K1-H10
accaggcgcacgttagcacaaactatcatggccacggcaacagcagctgccacctcgtcctttatggggacgcgtcttctggaggctcactccggagcggcgcgagtgcacgcccgattcggcttcggcaagaaaaaggcttccgtcccaaagaaagcctgcaggggatcgggccgagacaccgacagacccctttggtatccgggcgccaaagcgcacgaatacctcgatgggtgactagcctgagactactggatacatccgagagggctaggcaagcccacctagtacctgaaaggctagctggactcgcttgaccagaaccttgcggaagaacgttgctgaggtcatgattggaaccaggaccggactcgtggacctgaagat

SEQ ID NO: 19781 - DNA, 417 bp, Glycine max
  unsure at all n locations
  Clone ID: LIB3106-072-P1-K1-H11
ccagcttcttgcacaagtatatcccaaattgcaagatcttcaaaagagagaaggtgaggctggaagaaagaaagntctgcagtacactcgatatgcttcagttggatttgccattgtgcangcaattggccaagttcttttcctacgtccctatgtcaatgacttttctacagagtgggttatttcttctgttatcttattgactcttggctctgtgtttacaatgtacatcggagaacgaattacagacctaaaacttgggaatggcacctctcttttgatattcacaaacattatctcgtacttgccagcttcttttggtaggacaattgctcaagcatttaatgatgcaaactacattggacttggtaccattgttttgccttctttttgtggtagttggaatggttatgttca

SEQ ID NO: 19782 - DNA, 214 bp, Glycine max
  Clone ID: LIB3106-072-P1-K1-H12
cagacgcgttgggcgtatagttgtctggatgagttttaatacgatcaacgtaggccgtactcatggtttatctatttggcgcattctgcttatataagaaataagagattcttttatttaggatttcatgattgcgttagcttgaacttaaattgtgtatctctatgatgctattgtgaataggtgggggaattgcaaatcacagtaatgtgaa

SEQ ID NO: 19783 - DNA, 240 bp, Glycine max
  Clone ID: LIB3106-072-P1-K1-H2
acccacgcgtccagcagcgtccaaacaaagtggaaatcggatagagagttttagagcgagacaatcatactgggatgcggggaactaattagggggagttatgatcaacataaatgttgagcataacaacaaaactaacgttggaataaacataaaatgtggtagagaaatacaaaagtggtgaagatatggacacaacattttatataccagcttattgaatttggtaactctaaactg

SEQ ID NO: 19784 - DNA, 381 bp, Glycine max
  Clone ID: LIB3106-072-P1-K1-H4
cattttagcatcaaggttgaatctcagagaaaaacaaacatcgacaagcatgtctggaagaggaaagggaggcaagggtctcggaaagggaggagccaaacgacaccgtaaggttctgagggataacattcagggaatcaccaagcccgcgattcgccgtctggccagacgtggtggcgtcaagcgtatcagtggtcttatctatgaagaaactcgcggtgttctcaagatctttctagagaacgtcattcgcgacgctgtcacctacactgaacacgctcgccgcaagaccgtcactgccatggacgttgtttacgccctcaagaagcaagggaggaccctttacggattcggcgggtagacaattggggatttcttgac

SEQ ID NO: 19785 - DNA, 450 bp, Glycine max
  Clone ID: LIB3106-072-P1-K1-H5
cagaaaccacttttttctttcttttttgttcttttttcatttcaggttgttcaccagtttgagttgttggatctcctccactgcttcttctcctgatcctgttctgtttcaaatttcaacccaaggagcttgggaacaaactcctgctccttcttctccttggtcataggcaatgggaggtgcactgggaaagagtgaatcacctagaaagggatcgatgccagaaactaagctcgaggctaaaatggttgaagcaatgcagcggagggaatctcaaggaagttccgtgaaatcattcaacactataatcttgaaattcccaaagattgatgagagccttagaaaatgcaaagccatatttgagcagtttgatgaggattctaatggggcaatagatcaagaagagttgaaaaagtgtttcaatatgctggaaattttttttccgaggag

SEQ ID NO: 19786 - DNA, 287 bp, Glycine max
  unsure at all n locations
  Clone ID: LIB3106-072-P1-K1-H7
gcaaaaaattgtgaaaaaggtattgaagatttagaaggcaaaagaaaagcaggcgtcaaagagttaagctgttgagttattcgtgagtgaaaaaaagatcttgttaaaatttgtgctaaagaattttgactttgaatggtgttaactatgaatgtggaaaataaatttcaaattaagtttccacattcatagttaacaccattcaaagtggaaacttaatttgaaatttattttatgattcttgtgcccccncaaaaaaaaattattataataactaaaaaaatatt

SEQ ID NO: 19787 - DNA, 388 bp, Glycine max
  Clone ID: LIB3106-072-P1-K1-H8
cccacgcgtccggtttactcttgaataggaggggtaaaacctttggctggcaacatgaagaagaggattacatgcacttaagcagaatgttatcatctcatttcaggagcagatggttgtctgtaaaggtgaagtctaaatctgtggatggcagtagttcctctggcattaagacctctccaaaggttggtgcttgtttggaaaccatatatgaggattcagacacgtcttccgtgacaactccgtgctgtaattctataatgatagaatgggctcaccagaaactaccacttccagttcacttttaccttagtccaatctcaacaattttccatagcaagcgggctggtactaaaaaatgtgatgatgtactacatgatccctctaa

SEQ ID NO: 19788 - DNA, 422 bp, Glycine max
  Clone ID: LIB3106-072-P1-K1-H9
ccacgcgtccgcgctacttgttaagggctgcactataccagaatgtctcagggaagaggcagtgcatctttgcctattgtggtcactgtggtttcactactgtgccttttggaacgtgctaacgcagcaacttactccgttggaggacctgtgggatggaccttcaacactaatgcttggcccaatggaaaaagattcagagctggtgatatcctaatcttcaactatgactcaacgacccacaatgtggttgctgtggacagaagtggatacaacagctgctagacaccagtgggtgctaaagtgttcagttcagggaaggaccaaatcaaactagcatgagggcagaactacttcatatgtaactaccctggtcactgcgaatctgggatgaaagttgccattaatgcgctgtgatttac

SEQ ID NO: 19789 - DNA, 354 bp, Glycine max
  Clone ID: LIB3106-073-Q1-K1-A1
cttgctctgattttctccctagttttttgctgcttcgcttgacattattgatattactagtttcttccaaaacaaagggtttggtgaaactaccagcagatgtgtcggttccagcagtgtttgtgtttggagattcggtggtggatacaggcaacaacaacaacagaacaacatcatttgctcgctccaatttcccaccatatgggagagatttccagggtggcatcccaactggtcgatttagcaatggaaaggttccatcagaccttatagttgaagagttgggcattaaggagcttctgccagcatatttgaaacccaatcttcaatctagtgatttgatcacaggggtct

SEQ ID NO: 19790 - DNA, 346 bp, Glycine max
  Clone ID: LIB3106-073-Q1-K1-A12
cccacgcgtccgcacattttgataattatttttctagttgataagccatggctactcgagggaagcttgaggttgacgttgatctcaagtctaacgcagacaagtactggcaaacccttaggaactccactgaaatattccccaaggccttccccaatgattacaaaagcattgaggttcttgagggtgatggctaatcacctggttctatccgccacataagttatggtgaaggttcaccaacttaggaagtcatcctttgagaagattgaggctgttgatgaagaaaagaaggtattgtcgtacactatcattgatggagaactccttcagcactacaaaacat

SEQ ID NO: 19791 - DNA, 417 bp, Glycine max
  Clone ID: LIB3106-073-Q1-K1-A2
cacccagtctcgattgtgccctcgaactcttcactatccctctctcgaagtctccctctagagcacacccactctcaattgcgtacattattaactcttgcactgtccttcacccactgtccttcgagacgtccctctctctggttgtgtactcagcggcaatagaaagtttgtctccgtggtgtggcccgcccgtacgttgtgcgcccatcctcacacaggtaaaaaccttatcttctttgtcactattttatttattgaaagtgaaatggacttccccttattcttgaaagaacaatctgggagggaggggggagtagacatctcacaaaaaatggaggttaattttatggaatacttctgttgagattttttttattaagttgtaataagaaatttatatgtttttggttttga

SEQ ID NO: 19792 - DNA, 376 bp, Glycine max
  Clone ID: LIB3106-073-Q1-K1-A3
cccacgcgtccggcagattattcttctttgtttctgttcttcttcatcagccgattcagctttgtccatggccaccgaaccaaaagcagccgccgatgacgtcaagatcgatctcttcgaagacgacgacgagttcgaagagttcgaaatcaatgaagagtgggatgacaaggaagaagggaaggaagtgactcaacagtgggaggatgattgggatgatgatgatgttagtgatgatttttctctccagttgagaagggagttggagagcaacaccgagaagaactaaaccacctgctagttattattgcttgatatgacatgcgctatgtcttgggttgggtgttcgagctcttggaaggagatgaaaactatg

SEQ ID NO: 19793 - DNA, 389 bp, Glycine max
  Clone ID: LIB3106-073-Q1-K1-A4
cccacgcgtccgaatgggcaaagtttcaattccagtcccgcaaaacggtttctccatacgcaatttctcaacgtccaaacgctcatgtttcaccccttcaccttcaacgctcagaatttcttgctctggagtagctgagttagatggatctcatgagaataagggaggtttgtttaatttcaatggaatcaagggcgtggcttgtggtattcttgcagcttgtacggttacttctgctgcatttcccgttactgctgctacccagagacttcccccattgtcaactgagccccatcgctgtgagcgtgcatttattggcaacacaattggtcaggcaaatggtgtatatgataaaccattagatctccggcaatgtgatttcacagatg

SEQ ID NO: 19794 - DNA, 373 bp, Glycine max
  unsure at all n locations
  Clone ID: LIB3106-073-Q1-K1-A5
gtgaaggagtgaggtagcaacagcactgccactgccactaccaatagcagaatgggaaccttgtgcagagctttctacgccgtcngattttggatccgcgagaccggccaagccatcgatcgcctcggctctcgtctccaaggcaactacctctntcaagaacagctatctaggcatcgacctctgatgaatctgttcgacaaagctccctcggttcacagggatgcatttgtggcccccagtgcctccctcctcggcgatgtccacgttggcccagcttcctccatttggtatggatgcgttctcagaggtgatgttaacagcattactattggatctggaactaatatacaagacaattctctggttcatg

SEQ ID NO: 19795 - DNA, 300 bp, Glycine max
  Clone ID: LIB3106-073-Q1-K1-A6
attagttcttcagtgtaggctgtgtagctactcagatttggtgtagctcaaccaattgttattcttttgtattttattatacttcatgtacattttactgactgttgtatatgtatgttatacactaagttctgtgcgtgtacaatagaaaaaaaccattttagtgagttcaagatattcgaatcatgcgatgagcaaaccttggccttttttttttcaaaaaaaaaaatatggaaaaaaaaaaaataaaataaaaaaaaaaaaaaaaattaaaaaaattaaaataaaaagataaaagat

SEQ ID NO: 19796 - DNA, 301 bp, Glycine max
  unsure at all n locations
  Clone ID: LIB3106-072-P1-K1-F2
cccacgcgtncgtgcctctagggttatcatttctccatttccattttctctctcacttttgaagaatcgtaagctatgggaaagtcttacccaactgtgagtgctgattaccagaaggccgttgagaaggcgaagaagaagctcagaggcttcatcgctgagaagagatgcgctcctctaatgctccgtttggcatggcactctgctggaacctttgacaagggcacgaagaccggtggacccttcggaaccatcaagcaccctgccgaactggctcacagcgctaacaacggnctgacat

SEQ ID NO: 19797 - DNA, 410 bp, Glycine max
  unsure at all n locations
  Clone ID: LIB3106-072-P1-K1-F4
cccacgcgtccgcttcacagctattagttgaatttttccaaaagagcaaggaggacccaagccattggaagaaaatatctgatggtggtcttcaaagaatttatgaaaggtacacgtggaagatttattccgaaaggcttatgactttggcgggagtttatagtttctggaaatacgtttccaaattagagaggcgtgaaactcgacgatatcttgagatgttctatatcctcaagttccgtgatttggcaaattctgttccgctagctaaggatgatgcaagttaactagctatataatttcaccaaaggcttggcagcagacataataagagtcatttatgtaaatataatagtctgcttctcgtgttttgaaatctagtgaggcgacctanaggagtttcatggaaa

SEQ ID NO: 19798 - DNA, 353 bp, Glycine max
  Clone ID: LIB3106-072-P1-K1-F5
gcgagacgagcgtagttactggatacatgggctggcacaaagggatcgagcagaggtagcggatctactctacgagattgagatatacacaagcgacactgcggaatcacaatttgatcgtgaaaagaagtcacatgctatgcatgccaggacacaaagacaggatatgacgtaggcgattgaactcagagcaatttttacatagattcttctgtatcatcatttctttgtaacatagactagtagcatgtgtggaagcgggctagactatattgaacgaggaattgaaggaagcaggaaatttggtggggttcataccaacaggagctcctggaattcggctcggggtacat

SEQ ID NO: 19799 - DNA, 106 bp, Glycine max
  unsure at all n locations
  Clone ID: LIB3106-072-P1-K1-F6
ntcacgcgttctaatgatatgaattttgcttttgcaactgatggatcaattaatgggacgggtgaactatcataatgtctttctctactatgaatactgatcacca

SEQ ID NO: 19800 - DNA, 361 bp, Glycine max
  Clone ID: LIB3106-072-P1-K1-F7
gccttataataggtaccttagatggagccaatgtggaaatcagggaggagattggtgaggataattttttcctttttggtgccacagcagaagatgtccctcgactgaggaaggaaagagagaatggactgttcaaacccgatcctcgatttgaagaggcaaagaagtttattaggagtggggtgtttggaagctatgactataatccattgcttgagtccttggaaggaaattctggttatggccgtggtgattactttctagttggtcatgactttccaagctacatggatactcaagcaaaagttgatgaagcataccgtgataggaaaagatggctaaaaatgtccatcctaagcac

SEQ ID NO: 19801 - DNA, 266 bp, Glycine max
  Clone ID: LIB3106-072-P1-K1-F8
cccacgcgttcgcaaactttggggaatcgtttaggttccggaaggtcttgcaaggtcaagagattttgggtgttaatactccctttgatggtattaatgctcagagtccccgggtatacgagttagggaggtgctatcctggttcaaactgttcagggattcctccaacaggaaataatatcagaatgccgcattcagcgtctgattttttctgcaatggcataagctttagtgaatcttttcggtttcaaaaagtcttgcaaggt

SEQ ID NO: 19802 - DNA, 355 bp, Glycine max
  Clone ID: LIB3106-072-P1-K1-F9
aataaagctaaggagaaatattgagaagcaggaagaagcaagttatggcgacgaagcagcttccgcagatcgccattctgggagctggtatctttgtgaagactcagtaccttccgagactctccgagatctctcatcttttcattctgaaatccatttggagccgcactcaggaatcagctacagctgccgtagacatagctcgtaagcattttccccaagtagagactaagtggggagataacggttttgatgacatcattcacgatggatcaatcgatgctgttgccgtggtcttggctggacaaaatcaggttgacattctcactcaggttgctaaaggctggtaaacatg

SEQ ID NO: 19803 - DNA, 377 bp, Glycine max
  Clone ID: LIB3106-072-P1-K1-G1
gtgttctctatccacattcgttatctagtgagtgtggtggcacttctggtgttgctcaacagtggcgtccgttgcagttatggctacaagcagcgacagcaggtggtctatggcttccttgcgctctgctttgccctctcattctcctcctgtttcctcttcattgcgcttccctgtattgccatcttcaccgtcttcttcttcaacgaaactccgaatttctcgaaccaaacccaaatcccttctcacctctttcaccggcctcgctcctcttaaccccatcttcctctccgctccttcttcagaatataccggctgtgatcactcttttaccattattgacaatggtggtcgagtcactgccatgagacatggga

SEQ ID NO: 19804 - DNA, 365 bp, Glycine max
  Clone ID: LIB3106-072-P1-K1-G11
ccggtcgcccacgcgtcgctcgacaaacccaccctttgagtcttccagtttcaccatcgaatgggttccgaggatgcagcgtcgtggtcctaggaattcagatattggaagagctgaagaagtagaagggaattggggatggaactgttagctatggaatggatgatgctgatgacatatacatgcaatcttggactgggactatcatcggtccccctagtactgttcatgaaaggcgtatctaccagttgaaattgttttgcagcaaggattatccagacaatccttcatccggtagatttcaaacaaggattaaccatgacattgtgtgcaatcacagaaactggagtggttgaaccacattt

SEQ ID NO: 19805 - DNA, 189 bp, Glycine max
  Clone ID: LIB3106-072-P1-K1-G12
tctatattttggtgctctgtgtctctacgatctggatccaacggtccaaaatgttcggggcttgtgctgcttgttttcccaggttttagagctccaaaccttcagatccacctcattcgtctccagatcttccttccttgataacgttttcgggttcgagaaggcacttgtttgtttgtcgtacgaaat

SEQ ID NO: 19806 - DNA, 352 bp, Glycine max
  Clone ID: LIB3106-072-P1-K1-G2
gcccggaaaacccggacgacccacgcgtccggcctaaaaaaaaaaaaaaaaaaaaataaattttataattatcaaaacaaaaaaaaacaaaaggggcacggtgaattttatattataaaacaaacctaaaaaaaaaaatattacaaacaacggggtctgcccttttaaaggaacaacattttccttccgcagcttccaaagttttcatttttttatagtgaaaccaaaattcaatttattgcccgttattttacaatgtaggaacttgaaaaacctcggcgttttcaaatttaatgggcttcgtaaattacccttttattaagtttgctaaatataaaaaaaacctaaacct

SEQ ID NO: 19807 - DNA, 419 bp, Glycine max
  Clone ID: LIB3106-072-P1-K1-G3
atttccttatctatcttcacctgcatcttttaacagttcccctcgaaacttctgaagatgggtggcattgcattcggacgcttggatgattctttcagtttaacctcaatcaaggcctatattgctgagttccattcaaccttgctctttgtttttgccggtgttggttcagccatagcctatggtaagttgacatcagatgcagcacttgatcctgctgggttactggcagatgctatttgccacggatttgcactctttgttgcagattctgatggtgccaacatctttggtggccatgtcaaccctgctgtgacttttggattggctcttggtggccacatcaccatgctcactggcttcttctactggattgcacagcttcttggctccatcgtggcattgtttctttctaacta

SEQ ID NO: 19808 - DNA, 431 bp, Glycine max
  unsure at all n locations
  Clone ID: LIB3106-072-P1-K1-G4
cccacgcgtccgtgaagatgcgattgagcatgctatccaatggctagatggaaaccaacttgctgaggctgacgaatttgaggataagatgaaggagttggagagcatttgtaatcccatcatagcaaagatgtaccagggtgctggtggtgatgcgggtggagccatggatgaggatggtcctgcagctggcagtggaagcggtgctggacccaaaattgaggaagtcgattaagcagaagattctcatgggttgttcttgattttgtcaaagacccttttgaagtttagataacagcgtgtcattatgtttttattgcgattttatttttctcttttttttttaatgtacttttccccgtttctacttgaacaatgatataagtttttgctaaaaaaaaaaannnnnaaaagatataaaaaaanaataa

SEQ ID NO: 19809 - DNA, 449 bp, Glycine max
  Clone ID: LIB3106-072-P1-K1-G5
cccacgcgtccgcaggtatatcccaagtcatggactgctatatatattgcgcttgacaacgtgggaatgtggaacttgaggtctgaattttgggcacggcagtaccttggccaacagttttacatgcgcgtttatacaacatcgacatcaatccgagatgaatatcctgttccaaagaatgcactactttgtggtagggcaagtgggagacacactcgacccctttgagctagctagcaagaaccttgttgagtatgaaaattaaagcagttaacttatctgcttctgattttgaatttatttcttttctgtttcagtaattatgctatgctccgatggacatgtgtgatttaaactacaaatgaccccagctcgaggtcacattcttttccagaaaaaaagaagaaagaaatttactattattacaaaaaaaaaaaaaaagggcgggc

SEQ ID NO: 19810 - DNA, 406 bp, Glycine max
  Clone ID: LIB3106-072-P1-K1-G6
cgataacaaatggcatcatctcagtcgaggaagagagttgacgccgtcgattctcgcgctgcttccgttctcgttcgcgccaaagatggcagtgcttttgctcgttgcgacgattgcaagaagaatgtgccggttgcactcatcgacatgcacagttgcagccttgaagctaaaattaaaatgaacctagacgctcaagttgtgaaacaggctgctgaagctaagaagccggagaggaagaagcccaaatctaaagagcctatggcaaaaaaagctaaagttgggaaggggaagaaagtcaaggatcctaacatgcctaagcgtcctcccacagctttctttgtcttcttggatgattttagaaaatctttcaaagaagctaatcctgattctaaggatgttaaaa

SEQ ID NO: 19811 - DNA, 396 bp, Glycine max
  Clone ID: LIB3106-072-P1-K1-G7
cccacgcgtccgcccacgcgtccggttcctaagagagagagagagcgatgacggtggcagcgaggaatcggttacgctctggtagcactaggaccctctctctccctcttcgtttccgtcatttccaaaaaacccttcctcattctcacagttctctccagtacgttgttgtggcttattagtttgattgtgctgtctggaatatggaggggggttttgcctctcagcacaacagcttcgtggccttttggaatactcattttctcatctgttgcttttcaagaagccctcagacttttcttctggaaaatatataagaagttagaagacatgttagatgcctttgctgacagaatatcaaaaccacatcttcacctgacagataagatgctgatt

SEQ ID NO: 19812 - DNA, 284 bp, Glycine max
  Clone ID: LIB3106-072-P1-K1-F12
cttacatcaatgggttctggcagaacctggtccttgaaggcttaaccatttggttgttgcctatgatgattaatcaacttatgccctatggggattttcggttgcagcttgttcaaacacgtggaacctatcacattttgtggaaaaactccgggaaagattgtccctccaagaggccctagtgattttggatgggaccctattttagaccctgagggttatcaccaagcttttccacagatccccaaagaagaaaacaccaaattttaccactgttcaaaatt

SEQ ID NO: 19813 - DNA, 451 bp, Glycine max
  unsure at all n locations
  Clone ID: LIB3106-072-P1-K1-G8
ccacgcgtncgcccacgcgtccgcccacgcgtccggggagaacagttgttctctactttgagcaaagccggaggcaaagctttcagtaacatggctgttggttataacaacgtggatgttgatgctgcaaacaagtatggtgttgctgttggaaatactcctggagtgctcactgagacaacagctgagttggcagcttcattgtctttggcagctgctagaaggatagttgaggcagatgagttcatgagggcaggattatatgatggatggctacctcatctatttgttggaaacttgctcaagggacaaactgttggtgtaattggagctggtcgaattggatccgcttatgcaagaatgatggttgaagggttcaagatgaacctaatttactatgatctctaccaagccacacgactagaaaagtttatcacagcctatgctacat

SEQ ID NO: 19814 - DNA, 261 bp, Glycine max
  Clone ID: LIB3106-072-P1-K1-D4
cacgaacaaccccgacgccgacggctccggttccgtttttcgccgacgcctccaactcaggatgtacgggaacatgtaccgtatcatgttctacacggagttcgagggcgaggaggatcccatcttccagaggcttagggccttgaacggacagaggagacgatcggcacatagcttataatataactataacgatttgattacgatcttgagaccctgtttgaagggtaacttggacatttgtaaggaggtgaacgaaac

SEQ ID NO: 19815 - DNA, 381 bp, Glycine max
  Clone ID: LIB3106-072-P1-K1-D6
cgcacgcgtccggccacgcgtccggaatttttgcccattgatcaacagacttgattcaacgaaggacggagaacaaaagtctgccgggtcttattattaccttgatgactgagttcatactttggggctgttctttcaccaacacaaccttgcatgtgtttgagcttttcatgggatctcagatttggttcagttcatgccttgaaatataagattgccatttttgccgatgaaagcatctttctcaatgaatagaggagcctgcatgcaattgcaagccctatgttgggtggtgcattttgtatatttacccttatatttagtgcaggtactcatcaccatgtttgctacgacttgcgtgggtgaatcttgatattacat

SEQ ID NO: 19816 - DNA, 177 bp, Glycine max
  Clone ID: LIB3106-072-P1-K1-D7
gccacgccttcgttcacgcgttcgatcactccttcctatttatcgacataactagatacagggtgaacaaaaacaatgaccttgcatttttccgggctgcaagtgttgatgcatggcaatgccatgcttacactatgttacgtatggctatgaacactgattatgctgccactgctg

SEQ ID NO: 19817 - DNA, 437 bp, Glycine max
  Clone ID: LIB3106-072-P1-K1-D8
ctccatccttatcggagccgccctcactcttcgactcattctcgccgttaaacccagccctagccatggatagtcttcaagccacttacaaagacgaagaagatgaagaagacgagccgcagcctcaaccaccaccaaccaccgccgattcacctgaagcccctcccgccaccaccagcacaccctccgacaccccaaccgaacccccgaacgacgcccgatcggagcccgagccctccgaagatctctccgaggacgaggccgcctccgacggctccaagaaatcccccaaatccggccgcgaagaaggcgacgcctccgacgaggacccaccgccgaagaagcagaagcagctctcctctctgacggaggcaacgaatgaggacttggtagcgccgcatgatggcaccaacaacgcggcggcgacgccggcaaca

SEQ ID NO: 19818 - DNA, 415 bp, Glycine max
  Clone ID: LIB3106-072-P1-K1-D9
tgataaatcaagagagagagagagaatatggtttccagggttcacaagagaacagccatgtacaggaacctacacctgcttcgttcaatcagatactcacactcggtgtcagattacatacaaggtttaaagcaaaaactggaagaattgaaccagttaacagtggcaacggcacgaaaaatcgttgactatgatccaatgcctaagcttgaagttgaaacacaagaagagggttttgtgatcaaggtgctgagtgaaagcagttgccaggggttgctggtgtttatattggaagcctttgaagagctggggcttgatgtgctccaagctagggtttcttgtgcgcacagcttcagtttagaagctctcggaaacaaagagaacaatgaagatactcgcccattggatgcacaac

SEQ ID NO: 19819 - DNA, 423 bp, Glycine max
  unsure at all n locations
  Clone ID: LIB3106-072-P1-K1-E1
cccacgcgtccggggaagcagaagataatgttcgcaatgacctccatcaagggtattggaaggagattcgccaacatcgcttgcaagaaggctgatgttgacatgaacaaaagggctggtgagttgactgctgctgagttggatagtgtgatgactgtggtggcgaaccctaggcagttcaagatcccagactggtttttgaacagaaagaaggattacaaggatggcaaatactctcaagttgtgtctaatgctcttgatatgaagctcanggatgatcttgagagactcaagaaaatcagaaaccaccgtggtttgaggcattactggggccttcgtgtccgtggtcagcacaccaagactactggccgtaggggaaagactgttggtgtctctaagaagcgttaagctattatgtttggc

SEQ ID NO: 19820 - DNA, 389 bp, Glycine max
  unsure at all n locations
  Clone ID: LIB3106-072-P1-K1-E10
agttcattcacagagagatagaatcactgaagagcttcaatggcggtttctctctctgttactcctctttctctctccaattcttctccttctctatcttccaagccaaagtttccatctttgtgctttttctctggcaacaacaccttgagggtcaaatgcccaaaaccttcgcactcaacaactgttgttcatgttgctccagaagcgttggattcttcacttgatcccttagacccacctncagaaacccttgatgatgactctgacgccaccacctttgaggttggtgacttggggactcctagcacttcggcaattagccattggtggcgatgcagatacaatggcaccaaagcagaagatttgaatcaagcctagatcttact

SEQ ID NO: 19821 - DNA, 282 bp, Glycine max
  unsure at all n locations
  Clone ID: LIB3106-072-P1-K1-E11
tggatatgttccctctaatacagaaaagtatccccttggaggcatcatctctgccattgagaatgcttttcatgcatctnctcaaatagtttgctcaaaagattccattgaggaactttacctatgcttttataagaactttcagccacgagattgtgctcttggatctgacattaaaatcgacatggttacttcaaaaaaatcttgtcccaaatatgttagcttgccagaatctgtatcagtggggtacaatggacttcaaagtcgggtctctgatgatgt

SEQ ID NO: 19822 - DNA, 382 bp, Glycine max
  Clone ID: LIB3106-072-P1-K1-E12
cccacgcgtccggtttcttacaaggctctactctactgcttcaccttctgctctagaaaattcagtggtgatacatggcttcggctactctctctgtagccaaaccagcccttcaggcaaatgggaaaggcttctctggattctctggccttcgcaacttatcaagcttcctttccttttctagaaaatcttcagaggatttccattctggcattggctttcagacctatgcagttggaagccgtggaggataccagaaaggtgtgacacaagccaaactgaaagttgccataaacggatttggaaagattggaaaggaacttcttgaggtgcttgcaccgtcgcaaagactcccctcttgatgtcattgccattaacgaca

SEQ ID NO: 19823 - DNA, 402 bp, Glycine max
  Clone ID: LIB3106-072-P1-K1-E2
gaagttgaaaatcaacaaaaacttatcaatctctctttttctctttctctctccggcacctgttgttaaaaaattgttcttttcaccgaaacccgtaaagggtcctgagctagcttcttctccatccatggtcctgatttttttcttcctcttgttttcagcttctatatgcaaaagggggtggaccaaatgctgcaaaatatttataatgtagttactcactaaccacctaagccatgaaaaccaaaatttttcccacttgggtattctgcgaaaattggtgcatttgtttatccctctagtttaagcccgggttggatctgcatttggtgtgcaggaactttggcaaaaaggttgaactttgatggttaattttgagaggcttcaagtgtgagccacatg

SEQ ID NO: 19824 - DNA, 279 bp, Glycine max
  unsure at all n locations
  Clone ID: LIB3106-072-P1-K1-E5
cccacgcgtncgcgcttactccttctctgtttctctcgcacactctgaccctacgtcgttgtttctttttgttttccaaacacacacacaccgcgtactacaactaacacaacggcggggctaatgcttaaaaaaaaccaaccacagccaaccatgttgcattgtcttaacacttcggggaatctaagagccaccttgtcggacatgacagtgttgggaagacaacgggaagcaaccatgaagtggcagctacaccttcagaacaaccaaacaccctta

SEQ ID NO: 19825 - DNA, 453 bp, Glycine max
  Clone ID: LIB3106-072-P1-K1-E6
ctccaacatgccaaacgacagcgttctgagtcttttcttcttcgttaccctcttgacatgcgttctctctgctacttcccacgatgaccatattttcctaccgagtcaactccatgacgatgactcagtgagttgcactgcaaccgacccaagccttaactacaagccggtgatcggaatcctgacccaccccggcgacggtgcctctggccggctcagcaacgccaccggggtttcttacatcgccgcctcctacgttaaattcgtggagtccggtggtgctagagttattccccttatctacaatgagtcacctgagaaccttaacaagaagctcgatttggtcaatggagtgctcttcactggtgggtgggctgtttctggtccatatttggatactcttggaaacatttttaagaaagctttagagaaaaatgatgctggagaccattt

SEQ ID NO: 19826 - DNA, 378 bp, Glycine max
  unsure at all n locations
  Clone ID: LIB3106-072-P1-K1-E8
agaaacaaaagtggcagtattaggtggcattaccgaagtgcagggagctgccaacagcgtggagatcaacaatctcgctcgctttgctgtagaggaacaaaacaaaagagagaattcagttctggagtttgtgagggtgattagtgcacagcagcaagtggtttctggagtgaattactacataacattggaagcaaaagatggtgagattaaaaatgagtataaagcgaaggtttgggagagggaatcccaagagttgctagaattcatgccaacattaggtgcaggaggcgagatcgaccatctcgctcgctttgctgtngaggaacaaaacaaaagagagaatgccaatctggagtttgggggggtgattagggc

SEQ ID NO: 19827 - DNA, 460 bp, Glycine max
  Clone ID: LIB3106-072-P1-K1-E9
cccacgcgtccgggatattttcttcttttttggtggttctagttgttaagggaagatattgtaaccatgaatgttgaagaagaggttcagcgtctcagccaagaaatcaagaggcttggtaaggtccaagcagatggttcttacaaggtaacatttggaacactatttaacgatgatgaatgcgcaaatatatttgaagcacttgttggaacactaagagcagcgaaaaagcgtaaagtactgacatacgagggtgagctactgctgcaaggagtccatgataatgtggaaatcactcttaatcctgcccctgctgaagcagcccgaacatctgccaactgatacaatggttacatgccacactgtatcctgtgcaacttgaaccaccaactagtttttatgatccgtgtaacactattgtattatgcatgaatattatatatatatatatatatatata

SEQ ID NO: 19828 - DNA, 412 bp, Glycine max
  Clone ID: LIB3106-072-P1-K1-F1
cccacgcgtccgccgggcttgcagagttgaagaatgccattgtggtaccccacattgcatctgcctccaagtggactcgtgagggaatggctacactagcagctctaaacgtgctggggaagatcaaagggtacccagtttggtttgatgccaatagggttgaaccattcctcaatgagaatgctcaaccaccagctgcatccccaagcattgttaatgcaaaagccctgcgtttgccaacttcaaagctataaacatacatggttctatcctacaagggccttcaattgcacaaatgaccaatttttgtctgttgagttgggctctgtggctagtctggtcttttttttgtgtatgtggggtgctgatggcactgtgcatataaagactgtcacgttaataatagcatcat

SEQ ID NO: 19829 - DNA, 220 bp, Glycine max
  Clone ID: LIB3106-072-P1-K1-F10
gcgaataaagctaaggagaacttttgagaagcatgtttaagcaagttatggcgacgaaccaccttccgctgatcgtcatatctgtagctgacatctttgtgaagacttagaaccttttaagactattggagatctctcatgttttgatacaaaaatccacttatagccgcactcaggaatcacctacagttgttgaagacatatctcgtaagcatttatc

SEQ ID NO: 19830 - DNA, 453 bp, Glycine max
  Clone ID: LIB3106-072-P1-K1-F11
gttctttcctcacttcaaacttgccaaaaatggcttcagaattggcatcatctgccaattgggtggcaagcgcagccacatgtttggcagcctttgccgccctccttctcctcttcctccgcggtctccgccgccgccgatacaacctccccccaggcccaaagccctggcccatcataggcaacctaaacttaattgggtcccttccacatcggtcgatccacacgcttggcaaaaaatacgggcccatcatgcacgtatggttcgggtcgagctccgtggtggtgggctcgtccgttgaaattgccaaggccgtcctcaaaacccacgacgccaccctcgccggcaggccgaagttcgcggcgggcaaatacacaacctacaactactcggacatcacttggtcccagtacggtccatactggcgccaggcccgtagaatgtgcctaatgg

SEQ ID NO: 19831 - DNA, 442 bp, Glycine max
  Clone ID: LIB3106-072-P1-K1-D3
cccacgcgtccgattaggaatagcaaagggtaaatggtcatgcatatgcaagcacccacaatcagtcttaacactgcaaggtccccatcttcattagctccagctgccaatgctggcctgcgaccacacctcaaccctttggctttaaagtcatctttcttctctggttcccttaacctcttacttcatccaatgcaacagtatcttacttctggagctcccaggatttccatgcgtgtggcctccaagcaagcctatatctgtcgtgattgcgggtatatttacaacgacaggatcccctttgagaaattgcctgataaattcttctgtcctgtttgtggtgctccaaaacgaaggtttaggccctacgctccaactgttgcaagaaatgcaaatgataaagatgttagaaaggcacgaaaatcccgaatcaaagaagaag

SEQ ID NO: 19832 - DNA, 452 bp, Glycine max
  Clone ID: LIB3106-072-P1-K1-B5
cccacgcgtccgatcgaagttccactgtcccgaagctgtcaacaatggcgatttccggcgagctcagagtctcagcaacacttcctctgtatcgctcccactcgcctccactccgaacctcttctcagtcttccccaaaggtagactttcatcgtttcttgaacagagcttgtagcatctctgaattcactccaaaatgcccttacctgacaattgtacgatgcaatatgcgtgggtattgcaagccagttgctgcggtccttggaggtcctaaatttacatcaaattcagttagccaagaaaccgagaactttctccttgatgctgttaaaatgaacttctttgagcggttaaatttggcttggaagataattttcccatcggcaacatctagaaaaaactccaatgctaggattgctaagcaacgcttgaagatgattctgttctctgat

SEQ ID NO: 19833 - DNA, 373 bp, Glycine max
  Clone ID: LIB3106-072-P1-K1-B6
cccacgcgtccgcaaaaaaagagattaggatttggtgttgcgcagccgcaggcagatatggccatggctttggtgagcctcagcaccattctcacaccgccttcttcttcttcttcttcgttttcttctccaaaaccttcttcttcctccatcgttcggtttcgccctctcactccccttcctcgctttcggaggcacctcgttcgtatggctcccgatgaggagaagatgactcgtcgctcccctctcgatttccccatcgagtgggaaaggcctaaacctggacgaaggccggatatattccctcaatttagtcctatgaagacacctttgccgcctccgttgcccgcagatcctccagaagaggatgaag

SEQ ID NO: 19834 - DNA, 335 bp, Glycine max
  Clone ID: LIB3106-072-P1-K1-B7
atttcaaataaaaccattactttgactacatttaaaaaaaaaaaaaaaaaaaaatggaaaggggaaaaaaaaaaaaaaaaaaaaaaaaaaaaaaaaaaaaaaataaaaaaaaaaaaaaaaaatataaaataaaaaaaaaaaaaaaaataataaaaataaaaaaataaaaaaaaataaagggggggggtgtttttaaggtaaaaaagttttttacgggggtttggaaaatgaaatattttttttatggtgaatgaaaaaaaaataagtgggtgggggttttaaaatgggggggatggaaaaaagggggggtaccaaaaataattttttttgaaaaa

SEQ ID NO: 19835 - DNA, 428 bp, Glycine max
  Clone ID: LIB3106-072-P1-K1-B8
gcaaaggaagaatttgatcgacaaaactgttcagaagtatggaaagatagatgttgttgtgtccaatgctgctgcaaatccttctgttgatgccatcttgcaaacaaaagactcggtccttgacaagctatgggagataaatgtcaaagccactatacttcttctgaaggacgcagtgcctcacttgcagaaggtttcttctgttgttatcatttcctcaattgcaggttttaacccgccaccttctctggctatgtatggagtgaccaaaacagcccttcttggacttactaaagccctggctgctgagatggccccaaacactcgtgtaaactgtgttgctcctggttttgtgccaaccaattttgcttcattcattacaagtaacgatgctgtgaagaaagaactggaagagaagacattacttg

SEQ ID NO: 19836 - DNA, 365 bp, Glycine max
  Clone ID: LIB3106-072-P1-K1-C1
cccacgcgtccggttttttatttatagtaatctgtagtacaaaagcaccattttctctcttataattttgatttacattcacaaagaaataagtatgatgctcatgatgacttggccacatcattaatgctacgaaggattgaagtgcatgcaagagtcaagaatatgcattgctacgaagttgtaaatcacaatgctagaaaacacaaagcagttcctcttatttattaagtagataatagacctcattgcttgctttaggcatgggtgttgtcctctactggagggtactttccataaagtggtttcttgtatggtggcttcttatatggtggcttgtaaaccggtggtttcggcttgtaaac

SEQ ID NO: 19837 - DNA, 274 bp, Glycine max
  Clone ID: LIB3106-072-P1-K1-C11
gtggattcacagcagatgatgaggaggagtgtttgcacacaagcttctggacaagttttttattgttgcaatattatttttaaatttgattcttgtcaacatattttattttctgttatttatgaaattctacatcttgtatcaaaaaaaaaaaaaaaaaaataaaaaaaaaaaataaaaaaaaaaaaaaaaaaaaaataaaatataaaattaataaataattactatattaaaaaatattatataatttaaaaataaaaaaaaaggggggtcc

SEQ ID NO: 19838 - DNA, 437 bp, Glycine max
  Clone ID: LIB3106-072-P1-K1-C12
cacaatcctcggaccctcttccatggctactgtttcttctctttgcgctgtttttcccatactcacaccaaccttgtcgaaaccccgcttggctcccctctcttgccgaatcccaaaacgacgtcgtatcagtatcatcacctctgttgccgaggatcgagaaatagttccggtgtctgaaggcagaggaacccgtttgaacgaagttgaggggtttcaaccttcggagcctcacacagagtcggaggttgttgtttcgagcctcacaagcagtagctccgtcaatgccatcatcgttttggggtttgggactttcgctgtcaccaagttgctcaccattgaccatgactactggcatgtccgtatcttcagctttccttatatattttgtctctccttttattataataataataataatttattgttgaactact

SEQ ID NO: 19839 - DNA, 208 bp, Glycine max
  Clone ID: LIB3106-072-P1-K1-C2
ggtttatacaattttcgatggcttcttcagatgttgagtaccgttgctttgtcggtgggctcgcttgggccactgacgaccaaactctcgagagagccttctctcagtacggcgaaatcgttgaaacgaagattatcaacgatcgtgagactggaagatccactggttttggattagagaccttctcctttgagcaatgcatgaaaga

SEQ ID NO: 19840 - DNA, 457 bp, Glycine max
  Clone ID: LIB3106-072-P1-K1-C3
ctgcctttttagcttgcagctgccgtccgtgcacagaggagtcttaggaggaacaactgtagagaaaaggatctgccaaattcgctagaaaattcaccagaaacaccacccgttatccaattaaaccagatttttggatcatttgtgaagttgaattgctatccaactgctattcccatttctaaaccttgttacacgagcatcttgatcaatggtctagaaagggaaatagcagttgagtggtgcttcaacgataagttattggatttagtatttatcttagcctgttttcgtgtactttgttttgccggatggaggtatgtgattttgtctatgattcttaatacaataacctacacttactctcattgatggtttgtgcagatctaatagctatgaagcatcgataccagacacgacacggtcacgtgacacatgtaatgtctaaaatattaaa

SEQ ID NO: 19841 - DNA, 415 bp, Glycine max
  Clone ID: LIB3106-072-P1-K1-C5
cccacgcgttcgaccacgcgtccgcccacgcgtccgcccacgcgtccgcattcggtcacctgctcaacctctgcagcgccttcgatccagaaaacatgactaagagaacaaagaaggctggcattgttggaaaatacggtacccgttatggtgccagtctgcgtaagcagattaagaagatggaagttagtcaacacagcaagtttttctgtgaattttgtggaaagtatgctgtgaagaggaaagctgtgggaatatggggatgcaaggactgtggtaaagtgaaagctggcggtgcttacactttgaataccgcaagtgccgtgactgtacggagcaccatcaggaggttgagggagcaaactgagagttaagcttttttcgtgatgctatcaattactattagactttgcat

SEQ ID NO: 19842 - DNA, 445 bp, Glycine max
  Clone ID: LIB3106-072-P1-K1-C7
ggaaaggacaggtcttagaacccttcttttcttcctcgtgtgcgtgaaaacgaagcaacgccacacgatggtgttctacttcaaagcgcgccctgaagccggcgatttcaccatcttcatgggcctcgacaagttcgagaacgaggaactcatcaaatacggttttcccgaagacatctggttccatgttgataaaatgtcttcagcccatgtctatgtcaggctgcacaaaggccagactctcgatgacctgagtgaggctttactggaagattgtgctcagcttgtcaaagcaaattcaattcaaggaaataaagtgaacaatgttgatgttgtttacactccctggtctaatttaaagaaaactgcttcaatggatgttgggcaagttggttttcacaactcaaaaatggttcgaactgtgagagttgagaagcggataaat

SEQ ID NO: 19843 - DNA, 95 bp, Glycine max
  Clone ID: LIB3106-072-P1-K1-C8
gcgaaaaaaaaaagagtagagtggataatggcttcgatatcgctctgcatagcacatgagagcacgcactcactcagctgctgtcattctcacta

SEQ ID NO: 19844 - DNA, 444 bp, Glycine max
  Clone ID: LIB3106-072-P1-K1-D1
atcaaagccatggccacctccaacttctctattgttctctccgtctccctagccttctttttggtgctacttaccaaggcacactcgaccgataccgtttctttcaccttcaacaagttcaacccagtccaaccaaacattatgctccaaaaagatgctagtatttcatcctctggggtgttacaactcaccaaagttggcagcaacggcgtgcccacctcgggatctctcggtcgtgccctttacgctgccccaatccagatttgggacagcgaaaccggcaaggtagccagctgggctacatcctttaaattcaacattttcgcacccaacaaatcaaactcagctgacgggcttgtcttcttcttggcacccgtcgggtctcagccccaatccgacgatggatttcttggtcttttcaacaagcccttaaaggacaagtct

SEQ ID NO: 19845 - DNA, 421 bp, Glycine max
  Clone ID: LIB3106-072-P1-K1-D10
atcatggcacttgatcttcctcatggtggccatctttctcacggatatcagactgataccaaagagatatctgcagtctcgatattttttgagacaatgccatatcgattgaatgaaagtacaggatacatcgactatgaccagatggagaaatctgctacactcttcaggccaaaattaattgttgctggagctagcgcttatgcacgtctctatgattatgaacgtgtacgcaaggtttgcgataaacagaaagctatactattggcagatatggcacacatcagtggattggttgcagctggtgtcatcccatcacctttttgattatgctgatgtagttactaccacaactcacaagtcacttcgaggaccacgtggagctatgatattctacagaaaaggggttaaagaaattaac

SEQ ID NO: 19846 - DNA, 99 bp, Glycine max
  Clone ID: LIB3106-072-P1-K1-D11
tcgccacgcgtccgtttttggtttctgttttcggacttcaatggaaattaatggatgagaactaatgagataagctattgtgttgtgttgctttgtttc

SEQ ID NO: 19847 - DNA, 420 bp, Glycine max
  Clone ID: LIB3106-072-P1-K1-B4
cccacgcgtccggccaagtgaaagtgagaaaaaataaaaatcaaagagcataatgtcagggatcattcacaagattggggagacccttcatgtgggagggcacaagaaggaggaggagcataagggtgagcaccatgctggagaatacaaaggggagcaccatggtgaacacagtagtgagtacaaaggagagcatcatggtgaacacaaagctggagagtaccatggtgagcacaagccagagcacaaagaggggttcctagacaaagtcaaggacaagatccatggtgagggcggcgccgccgagggcgagaagaagaagaaggagaagaagaagaaagagcatggccatgagcatggccatgacagcagcagcagcagtgacagtgattaaactgctgcatcacctatatatttaaa

SEQ ID NO: 19848 - DNA, 322 bp, Glycine max
  Clone ID: LIB3106-072-P1-K1-D12
cgttcaagcttcaaccaattcttcaacagtgttcaagtaaaatatctgcaaagccttagaatatatctgtgtttgatttaatgttaggttaaaccgacacactagtttccatacacgttttttaagaaataataattcttatcttttaattcaactgactttcaaggttaaaccaatcacacccatagaaagaaagagccgacacgggtcaaaatctgaaacccgaaatccataagcctaaaagactgaatctttgatcgacgccacggatgtcgaacggcataattctcatgcagtcaggtgggtcgactaaccggctaca

SEQ ID NO: 19849 - DNA, 232 bp, Glycine max
  Clone ID: LIB3106-072-P1-K1-D2
cgacggatgggtccacgcatgcgtaaaaaaaaagagtacagaggattatggcatttgataacatactcgtagcaacgagagacagagaacaataagctgccgtgacttataattacctagaagactgagtacatactttggagctgacctgtcatcaatacaacgctcgatctgcgtgagccattgatggcatctcatatttggttcagatcatgctttgaaatataacatt

SEQ ID NO: 19850 - DNA, 444 bp, Glycine max
  Clone ID: LIB3106-071-P1-K1-H8
cccacgcgtccggtacggactgatgctgttctgttggtgacgattgtatccacattgagaggaaatctgacgatgaaacgtggagcattattgtcagtgcttgcgttcgccttcgcggcggcgatctgggcggcgaacggcaacgacaacctcgtcccgcctaggcgggaagtgtacggcaatggccgaatattcgacatcagtcaccggtaccaacccgagatgccggaatgggaatcgaataacggcattgggcagttcctgtggcttcccaagagcatgaagaacggttcccttgccaacaactccgaaatgaaacttccacacacaccggcacgcatgtcgacgcccccgggcacgtgttcgaccactacttcgatgccggcttcgatgtcgacacccttgacttggacattctcaacggacctgctctattagttgatg

SEQ ID NO: 19851 - DNA, 261 bp, Glycine max
  Clone ID: LIB3106-071-P1-K1-H9
gacaaatcatatgatgattaatggcgaagtttatggcgaaggcagatgagacgagaaatggggaatctgctgcattacgaatgacagtaaatcagcactacaaggacatacaccttggtctatagagagacattcagagctaaatataggaagcacacatgagcttgaatactttcaaggacacaatagaacaagcctagctcaatctcagtacagcactcacatactcaacacttctaaatcgatcacgttcaatgcacg

SEQ ID NO: 19852 - DNA, 393 bp, Glycine max
  Clone ID: LIB3106-072-P1-K1-A1
cccacgcgtccgattccattctctctgtgtatttccctacctctcccttcaagatgcacatcttcgtcaagaccctcaccggcaagaccatcacccttgaggtggaaagctctgacaccatcgacaacgtcaaggccaagatccaggacaaggaaggaatccccccggaccagcaacgtctcattttcgccggaaagcaacttgaggacggccgtacccttgctgactacaacattcagaaggagagtactcttcacctcgtcctccgtctccgtggtggcatgcacatcttcgttaagacactcaccggcaagaccataaccctagaagttgaaagctccgacaccatcgataacgtcaaggccaagatccaggacaaggaggggtatcccc

SEQ ID NO: 19853 - DNA, 275 bp, Glycine max
  Clone ID: LIB3106-072-P1-K1-A10
tcgcacacgcgtccgcttcatccatagacatggccaccgacacttctgcagccgggggtacatcctaggcactgaccttaatgcaagcgcaggcaaagtgtgcgccgaagttaaagtatcatctccgcaagccacatggtagtgcataacagcttcgctgaaagacgttagacacgctgttgatgacactgccgcgagtgcagcgctagctagcaacgccatggccattgtactgatgctgagtgttgatgacaggtctttggctttcggaccaa

SEQ ID NO: 19854 - DNA, 240 bp, Glycine max
  Clone ID: LIB3106-072-P1-K1-A11
tccacgcgtacggagagagcttacgactcaagtgtaggaggggatgactgactgcacaccttaccggagcactgtctgagtctaccgaggtgtcccttacgtcactaaatccagtgcgctctcgcatggtgctcgacgcagctgttgggacaccaatgcgaataattgactcgattaactgagacctgcttaaacgcattgacagtcaagacccggctaccgatgaagctcaccacatgc

SEQ ID NO: 19855 - DNA, 129 bp, Glycine max
  Clone ID: LIB3106-072-P1-K1-A12
aaaatgttattattataggatttaattttaatttttaatttataaaaattttaataaatttaaaaaactttttattaaattcactaaaatattttataaaaaattaataaaaaaataaaaattattttt

SEQ ID NO: 19856 - DNA, 120 bp, Glycine max
  Clone ID: LIB3106-072-P1-K1-A2
atagttttatgaacatcttgtacagtgaggatcaaatgaaactatcgagctttgctttgtgtctttggtgtcgccagtttaatgcttaaccaagtaacattatttttccttttgattttc

SEQ ID NO: 19857 - DNA, 120 bp, Glycine max
  Clone ID: LIB3106-072-P1-K1-A3
atagttttatgaacatcttgtacagtgaggatcaaatgaaactatcgagctttgctttgtggctttggtgtcgccagtttaatgcttaaccaagtaacattatttttccttttgattttc

SEQ ID NO: 19858 - DNA, 462 bp, Glycine max
  Clone ID: LIB3106-072-P1-K1-A4
ctctctctcatcactacctctgcatttttctctcgctctctgccttccatcaccctcgccatttcccttcccaagatagtagaagatggcagacgctgaggatattcaacctcttgtttgtgacaatggaacaggaatggttaaggctggttttgctggagatgatgccccacgtgctgtgtttcccagcattgtaggtcgtcctcgtcacactggtgtgatggttggcatgggccaaaaagatgcatatgttggtgatgaggcacagtctaagaggggtattttgactctcaagtaccccattgaacacggaattgtgagcaattgggatgatatggaaaagatttggcatcataccttctataatgagcttcgtgttgccccagaagagcatccagttctcttaactgaggcccctcttaaccctaaggctaatcgtgagaagatgacccacatcatgtt

SEQ ID NO: 19859 - DNA, 437 bp, Glycine max
  unsure at all n locations
  Clone ID: LIB3106-072-P1-K1-A5
cggaaccatggtgagcacctccttcatgaggaggcaacctatgaccaccacaagcctaaagacattccccaacgttggtgaagctctttttggtctgaaaagtggacgaggtggtcgtgtcacttgcatggcctcgtacaaggtgaagctcataaccccagaaggagaagtggagtttgaatgcccagatgatgttttcattgttgacaaggcagaggacgaaggcattgaactttcctactcgtgcagggccggttcttgcgtttcctgtgttggcaaaattgtggaaggtaacgtggaccagtcagatggtagcttccttgatgatgagcaaatagatagtggctgggttctcacctgtgttgctcaacctangtcagacgttgtcattgagacacacaaggaggggagagatcgaatgatcaatatatatatat

SEQ ID NO: 19860 - DNA, 263 bp, Glycine max
  Clone ID: LIB3106-072-P1-K1-A6
ggtacataagattgtgcatggtgatgtccctttttctttgccttcaaaaaaaaaaagtaatggtataaaaaaaaaataaaaaaaggtctctctataaaaatattatactcttttttgtaaaaataccatctataatttggtataatttttatttcttaagaaaatatctttaaacgtctttattttatcttacttttttttttatacacttatttcactttttgtttttaaatttatgaaattttttataaaaacattatttt

SEQ ID NO: 19861 - DNA, 449 bp, Glycine max
  Clone ID: LIB3106-072-P1-K1-A7
gtttccgatcaagggatggaggcattggggaatgggtgtccgaatttggtgaaagtgaagggtaagaagtgtaaaggggttacccctgagggtggtgattggttgaggaggactagagggtcagttgctgttaatttagatactggtgaggcagagcttcaggaagccagtgctagtgatggaggggcacaggacaatggtgtagagttccctcaaatgcctgcccaaatcgctgctgcatcgagcagcactcggtctagttcgtcgaggtttgcgcttatgtctgcgaggatttcagcggctgcattgaggagcactcggtctggttcgtcgaggttagggcttttgcctacgaggatttcagcggctagcacttttaagagatggtctggtggtagcactagtgcacgccatggttagggacagggccaaagcaaaacctgagtctt

SEQ ID NO: 19862 - DNA, 396 bp, Glycine max
  Clone ID: LIB3106-072-P1-K1-A8
tccacgcgtccggaaaattatctattacggttttatctgttggttcaaaaaaaaaaataggtggaaaaaataaaaaaaaaatagaaaaaaataaaaaaaattttaaaatattttttttaaaaaattgaaaaaaaataatttaaaaattttttttatttaaaaattataaaaaaaaaaactatatatggggggcttttttaaagaaaaaaattttactttcgtgtttttttaaattaaaacttttttttttgtgtccccaaaataaaatacagtggccgaggtttaaaaatgttttttttggaaaaattttggatttacaaaattaaattttttttaaaaaataaaattttttgcaattttgttaaattaaaaaaaggcgggaatttatcctttttc

SEQ ID NO: 19863 - DNA, 288 bp, Glycine max
  Clone ID: LIB3106-072-P1-K1-A9
cccacgcgtccgcccacgcgttcgcccacgcgttcgctccgccgcaacaccaccgtcacactcaagccaaaccttcacgcttcaatctgctccttcccaaatttctcactcaaaaaaccacacctaatttccactcgcaaaccctccgctttaacagtcagagcctccgctgcctccataaccccggcgccggctccggtccagccatggcaaggcgctgccataaaaccgctaatagcctccatcgcgacggaggtaatcctttggttttaaccggttccggccggc

SEQ ID NO: 19864 - DNA, 341 bp, Glycine max
  Clone ID: LIB3106-072-P1-K1-B1
agttattatgtactatggagagatcatgaatcaaacattatttactgcgtttttgggcctatatgctcgttgactctaacaaactaagctacgagccactttggatacacttaaaaaaaaaaaaaaaaaaaaaaaaaaaaaaaaaaaaaaaaaaaaaaaaaaaaaaaaaaaaaaaaaaaaaaaaagggggggaataaaaaaaaaaaaaaaataaataagaaaaaaatacaaaagaaaaaaaaatggggggggggcgcttaaaaaaaaaaaaatttacgtacccgtatatcgaaatgaaaagtttttttataagggaaccaaaaaaaaaatacggggggggg

SEQ ID NO: 19865 - DNA, 188 bp, Glycine max
  Clone ID: LIB3106-072-P1-K1-B11
ggcttttggaaggtttgagaatgcagttacagctgctgagaaagctagtcagattgacccccgagatgttgaagttgctgttttgctcaacaatgtgaggatggttgctagagctcgactgcgtggtaatgatctttttaagtcagaaaggttcactgaggcctgctcggcatacggggaaggtttga

SEQ ID NO: 19866 - DNA, 323 bp, Glycine max
  Clone ID: LIB3106-072-P1-K1-B12
tccacgcgtccggtttcttacatcaaggtctcgtctggttggaggtgctggcacgggttctgggggcagtggacgtggcaataagcacaccatagttgttgtggtcattgtcataataaccttgcttgtcatttgtggtctggtctttgggggagttagataccacagaagaaagcaaaggttgcccgagtctcctagagatggttcagaagaggacaatttcttggagaatttaactggtatgccaatccgttacagctacaaggaccttgaaactgccactaataacttctctgtcaagcttgggcaagggggtttttggg

SEQ ID NO: 19867 - DNA, 437 bp, Glycine max
  Clone ID: LIB3106-071-P1-K1-H6
ggtttccagggttcacatgagaacagcagtttataggagaatacaacagcttcgttctagactaactgccatgcgcgccggaaaacctctgtgatattagatgcatcgaagtacatacgtggtttaaagcagaagttgcaagaattgaaccaattagcagttgctgcaactcaaaaagacattgagtatggtccaatgcctatgcttaaagtggaacaacaagaggaggggtatctgatcaaggtgttgagtcaaaggagttgccaggggttgttggcgtttatattggaagcctttgaaaggcttggtcttgtggtgctccaggctagggcttcttgtgtggagagcctttgtttagaagcatttggaatcaaagagagcaatgaagatacccgccttgtggatacacaagtagttgagcaagttgtatttaaagc

SEQ ID NO: 19868 - DNA, 399 bp, Glycine max
  Clone ID: LIB3106-072-P1-K1-B2
gttttgaggaatcagtgtctctgtctcagtgctagtgtgagtgtgagtccgtgacacacttatccacctactttcatttgagccactcttctcagtccaaaacagtttctcgttttctcatctgaaaaatgaggagcatctttgtccttctccttgttctgggtttgtttaagtatgcatttgctgaagaagggttttgctctgctccttcggaatcgaaatcaaagcctctgtattggaaagtggataaccccactctctcacctatccaccttcaagatttgcctggattcacacgcagtgtttataagagtaatcatgctttggtatcaccagaaagtcatgtatatggcccattggcctgatggatcgacacgtcaagcgcatatttaatttcac

SEQ ID NO: 19869 - DNA, 461 bp, Glycine max
  Clone ID: LIB3106-072-P1-K1-B3
caacgcgtcttgcatacctatgatacgacgtgtccagttgcggtgattttcagggagtgtgcgtttcatgttccgttgccgttttctccactgaaattcctcactgccaaacaatcttttgaggccattctctcgccaactgtgagcaagaaaccctctgttcataaacaatgtggaacattgctcggacactaacaggagataatgaagatcaagaagagggtttgttgggtgaggattcaggtggcctctgctccctctctacaacgcagagaatttatggatttgcttcttgtttggttgctggtctggcttgcatgttactgtcaatgattgattttgcaaaacccatcaaatttgcagcattgttcacctttggcaacctgttagcagttggaagtacagcctttcttcttggacctgcacaacaattgggaatgatggttgaccctgttcgggtt

SEQ ID NO: 19870 - DNA, 291 bp, Glycine max
  Clone ID: LIB3106-071-P1-K1-F9
cccacgcgtccggtactgtgttcgtactgcttatagtttggtgaggcttctgtgtgctacggcattcccttccttcactcttcatgcactattttcattttgctaagggatcgatcataacgcggaagaattacaaggtcttgggacctgttctgttggcttataaagagtccacaacaggagccttcttggtgtttcagaaagtaggaggctaggatgaaaaggagtggagatacaagtggtcaaagggacagcgacttattggatactgaatgataacaagtctatggc

SEQ ID NO: 19871 - DNA, 402 bp, Glycine max
  Clone ID: LIB3106-071-P1-K1-G1
cccacgcgtccgaggagaagtaatggctgctatcgcgggagcgcacgtgtttggtgttgtgagttttcagctcaagcaagctgaaatgccctttgcatgttccagcttaatccgcaagcatattggagattctcctcagcgcaatgtggctctaagacgcagagcaaatggaacaattcttccccaaatcagagcccagaacgttcttccagactatgttccaaaatcggagttttataaagtagaagccattctcaggccctggcgagtccctcaggtttcttcggctatgttgaaaatgggaattcgcggtgtcactgtatctgatgtcaagggctttggttctcaaggtggttcaaaagaaagacagggaagctctgaattttctgaagaccaattttg

SEQ ID NO: 19872 - DNA, 422 bp, Glycine max
  Clone ID: LIB3106-071-P1-K1-G11
cccacgcgtccggaagccttgttgtgagtaagagaaaaggcttcctgcaccgagcacaccaacttgatacctctgattctttctttgcttagaattccacagaatatggagactgttcttttcaatcactccccacctttggaattcaagggtttgagcaaggaggaggaagactcattgctagggcaagtggaaatatggaggtacatgacatgcttcacggactccgtggccttgaaagctgtcatagagcttcgtatagcggacatactagaccgttatggtaaaccactatccttgtcgcaaattgtggagaacatagaagacgcaccctccccagatgcctctcttctccagagagtcctgagagtgatggtgcgcagaaagatcttcagtgcacaagaatcagagacaggagaaac

SEQ ID NO: 19873 - DNA, 144 bp, Glycine max
  Clone ID: LIB3106-071-P1-K1-G12
cccacgcgtccgcccactcgttctaaaaaattaaaaaaaaaaaaaaaaaaaaaagaaaaaagaaaaaatacaaaaaaaaaaaaaaaaaaaaaaaaaaaaaaaaaaaaaaaaaaaaaaaaaaaaaagggactgccacttaaaaga

SEQ ID NO: 19874 - DNA, 61 bp, Glycine max
  Clone ID: LIB3106-071-P1-K1-G2
atccttgatatcttacattcccggatatgttattaatcgcatatgaagattaggtaagcag

SEQ ID NO: 19875 - DNA, 372 bp, Glycine max
  Clone ID: LIB3106-071-P1-K1-G3
gtttaatttttatgtttcttaggtgaattactcaagagggctcgacaatcccacaaagtagaaaaagaggttatgttatagcgggcaaaggtgttagttcggtggctaaggcggtagcagaatatcagtatccttggcgtgagaagttggggaaatataaggatgagcttgccaagggtgtgtggggatactgggagctgggggcatggaagccgctgagtatcagtgctcggcatcgtgctagaattcgcaaggaagtcctccttgctggggaagattggccctacgatcctgaaaggaaggagatgaagaccaggaggaaaggacacaaatgtgaataggattttgtccaaaaagcgcgcaaacacagcg

SEQ ID NO: 19876 - DNA, 441 bp, Glycine max
  Clone ID: LIB3106-071-P1-K1-G4
cccacgcgtccgatatagcccatgccctattcaaccaaaccctaacacacacgcatttgatgtcagtttccatggctagcctcaaggttgcatttttggctgcagtgctctgcatggttgtggtgagtgcacccatggcacatgcagctatcacgtgcgggcaggtgacgagtagcctggccaattgcatcggttacctccagaagggaggaacgccgtcatcgggatgctgcaacggagtgaagagcctcaatgccgccgccaagaccaccgacgaccgccagactgcgtgcaactgcttcatgtcggccgccagccaaatctgcggcttcaacgccgacaacgccggctagctctccggcaaatgctgagtctgcataccttacaagatcagcacctgcaccaactgcgctaccatcaaggttttgaagagaaagtcat

SEQ ID NO: 19877 - DNA, 439 bp, Glycine max
  unsure at all n locations
  Clone ID: LIB3106-071-P1-K1-G5
ctcacgcgtacgcattaacagctagaatggctcttaggcgcttgctgacgtccatttactggctctacactcatggtctggcgagagaaaggcatgccagagactaagattttacggcatgctagctgcccaaacaactgtattccaagatcattgcaagatcatctaaagcctgacccttcaagtgatgaaatcgatgatcaccctatgctgattgtagaaacacagtgctgcgtaacctgcttgtataaagaataccgttattcangcataacattgaacgtacaattcagcaagactctctttcaacaaccatggggtgtcggtacatggttaaaggaaattaatgacactactaacgaaggatatactttcgaagacctatgcatcaagaacgaagcccttgagggagaaagaaacgtttcggcataatccttgg

SEQ ID NO: 19878 - DNA, 348 bp, Glycine max
  Clone ID: LIB3106-071-P1-K1-G6
aaagggactagcaaccagagcacttcattattctggcattaccagcttagaggatgctatgagattggatcattgatcatgagaatgacattgatattgatgagatgccattggtagatgtagacattgatatagagtccactgaatcatttcctatcacagaagaaatgagaatgaaagcacagagtttaagggtacaagagcgcaaaaggaaagaggaggaagagaaaagattgtatagagaacgggtgaaggagaggattcaagctgtttagagactccatgaggctaagttgattgcggaagatagtgatagtaaacggtatttagcatagatcttagcattaa

SEQ ID NO: 19879 - DNA, 192 bp, Glycine max
  Clone ID: LIB3106-071-P1-K1-G7
atcaggcgagaataatagtctattgtctatttttcagttcgtttgtattactgggaataggtgattttacatgtggtgcatgagttcataactgatttagagaaagttaaacatggatgtgttatgtgtaaatgaaatagatgcactattcagattgaaacatttcagatgatgaaactagacataagatta

SEQ ID NO: 19880 - DNA, 446 bp, Glycine max
  Clone ID: LIB3106-071-P1-K1-G8
gtgactcaggaggattttgagatggctgtttccaaggtgatgaaaaaggagactgaaaaagacatgtcattgcggaagttgtggaagtgatttttatttcatgtttgtggtgcacattattatcctgcgaagatgggcagcgaacacaccttagggttatttcaatttacagtggcattggatttcattttgcttaagtttaccaagttatgtaccgaatcatatgattctttctttgagtttttccttgtctgtgtcttcggacggcacactacatttatagagtatttttaaaagatttatattcaagaccaaataataaaaaactcatatattatattttttataattttttatctattcttttatcttatacattctattcaatatatttcctttatttttttttttcattttactatatataatttttatttttttataat

SEQ ID NO: 19881 - DNA, 383 bp, Glycine max
  Clone ID: LIB3106-071-P1-K1-H1
gaccaccttccctctcttctgttaccaatgttctccctcatcaaactacatttctttccttgtcctcaccacccttttgtttgctcttcaaatcagtgcaagagacagccagttcttcagcaaagtcacccattttgacaaaaacagtgtcaaagagacagaacttcccaacaaagaagcaccagaagtgaacaagccagagcaacaaccacctttcattccggagactgaaaacagctatggcctatatggtcatcatgatgagtataaccaagtcccttccaccaccaccaaccccacttcttaccacccctacaagaccgagtttgagaactccaacaacaagtattacaacaatgatgcctataacacaaggttcttcg

SEQ ID NO: 19882 - DNA, 324 bp, Glycine max
  Clone ID: LIB3106-071-P1-K1-H10
gtcctactgaggtgtgtgtatacaattactttcacatacacacagttgttaaggatgatcggatagtgatgaagaggacgttcatttcggcggttgttttgcgagcatgctaggtgctgggaatatcccaatacgctgatgctagaaacttggctgaaaaatcaaaggacgaggtcaagaagccagaaaattgcttacatagaaggtccatcgttggtgccagaggaattgaagacgttggtgcagctgatgaatacatccatggcgaacaatatagatcagacttcaaaacaggtaaccaacaagcttacttttatgccagag

SEQ ID NO: 19883 - DNA, 320 bp, Glycine max
  Clone ID: LIB3106-071-P1-K1-H11
gaagcagaaagagaagcattagcaaaagctttaagaactagtctaagcagaaatggcctcggcagtgatggcatctgtggccctcaaacctgcccctttcactgttgagaagtcctcagttagaggccttccctccctctcaaggaactcctcttcattcagagttgtggccagtggtggcaagaagatcaagactgacaagccttatggaattaatggtggcatggctttgagggaaggagttgatgcatctggcaagaagatcaagactgacaagccttatggaattaatggtggcatggctttgagggaaggagttg

SEQ ID NO: 19884 - DNA, 451 bp, Glycine max
  Clone ID: LIB3106-071-P1-K1-H12
cccacgcgtccgcaatactcgaagtgtatctccagatgtcctttcaagcatgagagtactgatggctgaggactctaataatgctcagagtgattctttcttgttggatgacagttccagcatccccttctcagtagatgacttctctacatcactgcaagagaaggatttctccgacatgaaaccagcggatgagctgcttgagaatcccgccttccgatttttaaatgagtaggcaagggaagcttagtgtatgtgtttatcatagtcatatagggaagcatcaaaatcagttgttggtccttgtcaaatgggtgtaatccaattttaatttttattccttttcctttctacctaataattttggttttgggtttaccaaccctacatctttgtttggcctaatccttgcatagtcattcgccctgatgtaaaataatttttcaatcct

SEQ ID NO: 19885 - DNA, 451 bp, Glycine max
  Clone ID: LIB3106-071-P1-K1-H2
aaagaacgtcacaaccaacatttgtcatgttcttatcctctccctccctctttgcagctgtgtactccacatattcagtaccccatttccatgcactgccactttcactttcttcttcttactttctaattaatgttactacccttcacccatcatgtcctcgtctctgatcataatcacaaattgagatcaaatttcttcattatcatctttcttcttgtatcacatatttttagatgccattatcatcaatgtttaactttctttattccattgcaccactttatctaattgcttattcttctttttaattccagatttattgtttttcttttttctctctgattttttttcctttacttttttctttatttactttcttatatttatctttatttttttttattttatgtttctttttttctattaattttttatattattccatttt

SEQ ID NO: 19886 - DNA, 446 bp, Glycine max
  Clone ID: LIB3106-071-P1-K1-H5
gcagaaatggcctcttcagtgatggcatctttggccctcaaacctgcccctttcactgttgagaagtcctcagttagaggccttccctccctctcaaggaactcctcttcattcagagttgtggccagtggtggcaagaagatcaagactgacaagccttatggaattaatggtggcatggctttgagggaaggagttgatgcatctggcaggaaaggaaagggaaagggcgtttaccagtttgtagacaaatacggtgctaatgtcgatggttacagtcctatctacgacaccaaagactggtctccaaccggtgatgtctacgcttgcggtacgactggcttggctatctgggctgtgactctacttggtcttcttgctggtggtgcacttcttgtctacaacacaagtgctttggcgcaataaaccttgcaaatcgatgtttt

SEQ ID NO: 19887 - DNA, 445 bp, Glycine max
  Clone ID: LIB3106-071-P1-K1-F8
cccacgcgtccggtggaaactttggaaagagatcttaagaacacgaggaaatactacgggagtggaaaaacaaaggaagcaccatggagagaatcacagcttaaagggttgcacaattttctcgtggaaaaagaggaagaaattgtgacggccctcaagcatgatttggggaagcattacgtggaggcttttagagacgagcttggaacattaatgaagaccttaaacttggcaaccaagtctttgaaaaattggatggcggggaaagaggcaaagctgccacgaatagcactgctctcaagtgcagaaatagttcctgagccacttggtcttgttctcataatctcatcatggaactttccctttggactttccttggagccactgatcggagcagtagctgctgggaacagtgtggttctaaagccttcagagttgtccccta

SEQ ID NO: 19888 - DNA, 302 bp, Glycine max
  Clone ID: LIB3106-071-P1-K1-E3
accacgcgtccgagtgatttcagtgcgcgtttggtgttcacttgatctcatcataatcgtgagcatcgattgaataacatgccgatcagaaacatcgccgtcggatggcctgaagaggctacttaccctgacacgttgaatgccgctctggctgagttcatctcaaccttcatcttcgtgttcgccggctcaggctccggcatcgcctacaacaagctcaccgacaacggcgctgccacccctgccggcctcatcttcgccttcatcgtccatgcattcgccctcttcgtcgcctacttcgt

SEQ ID NO: 19889 - DNA, 446 bp, Glycine max
  unsure at all n locations
  Clone ID: LIB3106-071-P1-K1-E4
ctctctctctctctctctcatttacacgaatcacactctccacagtgcgattgagttcaccgatggatcgcaacggcgttctctctctcgcattcatctgcattgtagtcgccggcgtcggaggacagtctcccgccgcagcgccgtcaaacactccggcaactcccgccgccgccactcccgcccaagcaccttccacagtaccgaaatcaccagctcccgttgcttctcccaaatcatctccaccagctgcaacccctgcatctactccggcggcatctcccaccaccacccccgccgcgcctgctccggtgaccaagccacctgcagcctctcctcctccggcgactcctccaccggcaactccttctncggcgccggttcccgtgagctctcctcccgctcccgtgccggtgagttcttcacccgctcctgttcccgtggcg

SEQ ID NO: 19890 - DNA, 426 bp, Glycine max
  Clone ID: LIB3106-071-P1-K1-E6
cccacgcgtccgagtgatttcagtgagtgatcggtgttcacttgatctcatcataatcgtgagcgtcaattgaagaagatgccgatcagaaacatcgccgtcggaaggcctgaagaggcgactcaccccgacacgttgaaggcggctttggctgagttcatctcaaccttcatcttcgtgttcgccggctcaggctccggcatcgcctacaacaagctcaccgacaacggcgctgccacccctgccggcctcatctccgcctccatcgcccatgcattcgccctcttcgtcgccgtctccgtcggcgccaacatctccggcggccacgtcaaccccgccgtcaccttcggcgccttcgtcggcggcaacatcaccttcctccgcggcatcgtctacgtcatcgcccagctcctcggctccatcgtc

SEQ ID NO: 19891 - DNA, 303 bp, Glycine max
  unsure at all n locations
  Clone ID: LIB3106-071-P1-K1-E7
gtgattgattccagttccaatggccttgtgcaccagcgccttgatcggaaggaatgttcgggtctcacccccaacccccaaaacaaccaaatcatctactccgctacaattccttttcaagagaagcatcttaaatgctcacaattcacaagctgctctagctgcccttatcttttcctccgcgagcctctctgtgaccccacaagcccttgccgctgataacgtcacccctccccctgtaattgaagcccaacagagccaattaaaccccttcaactcatcctnccctttctcacagaaacc

SEQ ID NO: 19892 - DNA, 437 bp, Glycine max
  Clone ID: LIB3106-071-P1-K1-E8
attgtttgttgttgtaactcgagcttctgctttcggtgctctgtgtttgtgcttgattttggtctcacctgaaaatgtattgctgcggaggtaactgtggttgcggaagctcctgcaagtgccgcaacggctgcggaggctgcaagatgtacccagacttgagctacactgagtcaaccaccaccgataccttgttcatgggagtggcacctgttaaggctcaatttgagggtgctgaaatgggtgtgcccgctgagaacgattgctgcaaatgtggaccaaactgctcctgcaacccctgcacttgcaagtgacgtgtcgggagagcaagcttcaagcagagatagcccttaattatgaataatgataaactattaatgtgtagctaaaaacttatgtattatgtctgcgatggttttagtgcactctggtgatta

SEQ ID NO: 19893 - DNA, 334 bp, Glycine max
  Clone ID: LIB3106-071-P1-K1-E9
cccacgcgtccgcccactctgcctactgaattctccaacttgctcacatgcaggtggcgcgggcgaatacaaaggatgctatggtaacactaccttctgaattgactattcaagtcaagatgtgctaaccttaaccccttcagcgaacccatcatgatgttatgaatatggatgtagtcaatacaatcaatgctggtttggaaagacatcaagaatcataagtatagccaacgacatactctgcatgctagctcaatcagaccaacaaatatggaaatgcctactactataggattcactcatcttttcagagcaaccaagctcttcagtatca

SEQ ID NO: 19894 - DNA, 445 bp, Glycine max
  Clone ID: LIB3106-071-P1-K1-F1
cccacgcgtccggaaattcattcccacatttcactttgatctgatctcatttccattcatggattcgttgttcttctttccaccaacaagaaagaaaacagagagaaactttcatttcatagattttcatcatctcagcaaaggaatcaatcaatcaagccatggcaggcttcagtggcgacgaaaccgctcctttcttcggcttcctcggtgccgctgcggccctcgtcttctcctgtatgggagcggcgtatggaacggcgaagagttggcgtggggtggcgtcgatgggagtgatgaggccggagctggtgatgaagtcgatcgtgccggtggttattggcggagtgttggggatttacgggttgattattgccgttattatcagcactgggataaacccaaaggctaagtcttactatctctttgatggatatgctcattt

SEQ ID NO: 19895 - DNA, 123 bp, Glycine max
  Clone ID: LIB3106-071-P1-K1-F10
gaacgctgctgccgaaacccttccggaaccttaaggtaagtgagtaatcagtggttgagaagggtggataaggcgaatggtagaacggaggaggtgtttacccaagagttcacttttaacgtt

SEQ ID NO: 19896 - DNA, 274 bp, Glycine max
  Clone ID: LIB3106-071-P1-K1-F11
cccacgcgttcgcgctggtgttcttgtctttttccttttgcattagtggtggaatttgatgtgtgtttttggctggtgaatgtgtttgcttgtagaatgtagatttgtttccatgctgctttagacatatgtttgttttgcagtgcatagattagttttagtttctgaaagttatcttttctttaaaaaggtgtggttataggctccatgtgttatggatgttggttgaattttaataattcttatgcatgtgctatatgtgttctattgttgt

SEQ ID NO: 19897 - DNA, 442 bp, Glycine max
  Clone ID: LIB3106-071-P1-K1-F2
ctcagtccatcctgtaataatctccgttttaacaccaaacaccaagcgaaacgggaattgagcctcttcttcttcatcgaatcgaaacaacctcgtccgtgctaaggaaactcaacgacagagactgcaacaatgtacgtagatcacgcgttctcgatttcggacgaggatatcatgatgggaacctcgtacaccgtcaacaacaaaccccccatcaaggagattgccctcgccgtttccctcctcgtttgcggcgtcctcggcatcgtcatcggttctctcatggcctacaaccacgtcggcggcgacactgctcacgggatcttctttgcagtactgggatttatcttgttcataccgggtttctactacacgcggattgcgtattatgcttacaagggatacaaagggttctctttctcaaacataccacccgtgtagc

SEQ ID NO: 19898 - DNA, 439 bp, Glycine max
  unsure at all n locations
  Clone ID: LIB3106-071-P1-K1-F3
tttcttttgaaaccgtggattagaatctggttacagataaacttaatgtcttagatgtttgattttctggatttgatcacagggaatatggattgaattgtgtgcctgtttgttctgcagcggtgggagagtactatttaggttctggtttttattacccttgattatctcatgttcattatggactggctttccttattgtgggttttggatttattgtttttgacagtgtanggttctgtcagagttagacttgacttgatgtttctttttgggaaatgtacgaggataactggttctttataggattggccccgtatgatttggtgatgttggatttaataggtgttagttacttattaacttctcaattgattctctgtgtcatgaattgtggctataagacgttgttattttgacttctcaatggacttctata

SEQ ID NO: 19899 - DNA, 441 bp, Glycine max
  Clone ID: LIB3106-071-P1-K1-F4
cccacgcgtccgcccacgcgtccgtttccctatccttcttccatttgtgtatgtgtcaactccttccatgcatttttggccttttccacttctactctctatgcattattttttcgtcaccttttcacgcctcttcatcactctgaattctgacccttcataccttccttcaaaaaaattccatttttcttcccttcctcgcttgttttctccaaaatatcatctgggtattccctggaatttcgtggggtgcccttgttttcttcattggaaatcgttgttgttgggttccaaacatgggaggctgttgcagccacgatgtttcggttcgagggaaggtggagagcgagatgggtgatagagaatatgagtatgaacatgagaatggtgtgtcttttgaacaaggtggagcattggtaaggttaagaggttcctctaggt

SEQ ID NO: 19900 - DNA, 453 bp, Glycine max
  Clone ID: LIB3106-071-P1-K1-F6
atattgcattctctctgtgtatttccctacttatcccttcaagatgcagatcttcgtcaagaccctcaccggcaagaccatcacccttgaggtggaaagctctgacaccatcgacaacgtcaaggccaagatccaggacaaggaaggaatccccccggaccagcaacgtctcattttcgccggaaagcaacttgaggacggccgtacccttgctgactacaacattcagaaggagagtactcttcacctcgtactgcgtctccgaggtggcatgcagatcttcgttaagacactcaccggcaagaccataaccctagaagttgaaagctccgacaccatcgataacgtcaaggccaagatccaggacaaggagggtatccccccggaccagcaacgtctcatcttcgccggaaagcagcttgaggactgtcgtaccctcgccgactacaacat

SEQ ID NO: 19901 - DNA, 446 bp, Glycine max
  Clone ID: LIB3106-071-P1-K1-F7
gaaatcttaaatcatttgatccagaacaagtatgaatactgtatggaggtgactgccaaagcattggctgatgtaaagggtggcactttgatttcttacgaaggaagggttcagcttttggaaattgcacaagtcccagatgaacatgtcaatgagttcaagtcaatagagaagttcaaaattttcaacacaaataatttgtgggtgaacttaaatgcagtttaaaggcttgttgaagctgatgctcttaagatggaaattattcccaatccaaaggaagttgatggaataaaagttcttcagctggaaactgcagctggtgctgcaataaggttctttgacatggctattgggattaatgttccttgatcacgattccttcctgtgaaggcaacttcagatttgctttttgtccagtctgacttttacactttggaagatggatt

SEQ ID NO: 19902 - DNA, 396 bp, Glycine max
  Clone ID: LIB3106-071-P1-K1-E12
cccacgcgtccggattcttcctgcccagagacgaaaccataatccgtagagcattaataaacatttcccatttgtttggttgctccgaaaacagaggaccaaacaagcccttatcacaactctatctaacaaattacataggacaggcccaaaaccaaaaaaagcttctttgtctctcgtgccgattctccaccactattcccttcaccccaatcacactttccggtagttgttgctattagtgtagaagatgagtacgctggatgcagcaagggctgaacttggtcttcttgttttatatttgggcaaggctgaagcaagggacaaaatatgcagggcaatacaatatggttccaaatttttgagtaatggggaacctggtactgctcagaatgt

SEQ ID NO: 19903 - DNA, 445 bp, Glycine max
  Clone ID: LIB3106-071-P1-K1-C5
caccactctatcccctacaaccccttctcagctatgctcaggaaagagtgggattttcaggccctcacaggcacttcttgtgaagccagtgaagaggcagatgatggggaagagcaagggaatgagaattgcatgccaagccaccagcattcctgctgatagagtccctgacatgggcaaaagacagctcatgaatctgcttcttcttggtgccatttcactcccctctgctggaatgcttattccctacacctacttttttgtccctccaggttcaggttcttcagctggtggtactgttgccaaggatgctgttggaaatgatgtaattgcagagaattggctcaaggcacatggacctggtgaccgaacccttgcacaaggattgaagggagatcctacctatcttgttgtggagaaagacagaacccttgcaacatatgca

SEQ ID NO: 19904 - DNA, 272 bp, Glycine max
  Clone ID: LIB3106-071-P1-K1-C6
gaatacgtacgcctactcagacatccactttacaggttacacgaccataagctagaattggcgaatgttctaattccgacgcgctctaaccaggcttgactatattacaaattccatacattgattactcctaataagcattatctatcacaaacagaatctacatgttattacatcttattatgacaaactccatattatactcacttaaactattcgactatagtataagcttaaattcgtaacaaccttattgcatagataatcacttc

SEQ ID NO: 19905 - DNA, 358 bp, Glycine max
  Clone ID: LIB3106-071-P1-K1-C8
cccacgcgtccgcccactcgtccgctgagtgttctcttattccgtgatgatcgaaggactggaggagaggcctaccgttcccatcgcgattatcaactagagcataaggactcaaaattagataaaaggcagataggtggagagatcactgatcaaagtgaagatgacagtactactagtagtagactgcaccctcaaccccatacatcgagataactgtagtatgataactgaaaagcaatgcgtcatattatcttacttcctagtagtttgccaatatttatctttacttgaatgatgaaagaagcaattagttttacctctcatatgcataacgtcttcagttgtaacctacctt

SEQ ID NO: 19906 - DNA, 410 bp, Glycine max
  Clone ID: LIB3106-071-P1-K1-D1
gatcgagataactagaaacagtgtgatgaaaatgaaggtcctcgttttcttcgttgctacaattttggtagcatggcaatgccatgcgtacgatatgttccctctccgaatgaacactggctatggtgcccgtactccggaggtgaaatgcgcaagttggaggcttgctgtggaagcacacaacatctttggctttgagaccattcctgaagagtgcgttgaagcaacaaaggaatacatgcatggcgaacaatatagatcagactccaaaacagttaaccaacaagcttacttttatgccagagacctcgaagtccatgccaaggacacatttgtgttcagtataaatggcaccgtactctctaatattccatactacaaaaaacatggatatggggtggagaaattta

SEQ ID NO: 19907 - DNA, 423 bp, Glycine max
  Clone ID: LIB3106-071-P1-K1-D10
cccacgcgtccgcccacgcgtccgcccacgcttccggaaaattttaaataggacttgttatgacaaaatacaattgcattgctccttcggcgaattggcactggtctctttgccgaacttcagcgttttggtttgggagggaaaattctaaaacctaaaaaatttcaatctcaatcaactcaacgtctgtgatcccaatcgatcacatttaataccacccttcaggattaggtagtaattccgttcccttgaataaataacatgagcaccacagtgcaaagaactccaagatccagcaggcattctttatttttccaggatttggcttcacctgtttctgcccgtagaggaaaattttcgagtccaggtcaagcagctgcagtatcttcactatggcgtgagaactttggtagttcagacctt

SEQ ID NO: 19908 - DNA, 314 bp, Glycine max
  Clone ID: LIB3106-071-P1-K1-D11
gtgagctataagctagtttatcgtgaggagtatatgaagttgtttgttttctttgttgctgcagtagttttggtagcatggccatgccatggcgcaggctaccaaaggttccctctccgaatgaaaactggctatggtgagcgttcttcggaggtaaaatgcgcaagttttaggcttgctgtggaagcacacaacatccgagcctttaaaaccattcctgaagagtgcgttgaaccaacaaaggactacattaatggcgaacaatttacatcagactctaaaacagttaaccaacaagctttcttttatgctag

SEQ ID NO: 19909 - DNA, 427 bp, Glycine max
  Clone ID: LIB3106-071-P1-K1-D12
cccacgcgtccgagcagctagccatggcttttcactctcatagttgcatcatgggggctggggtcattgctatttccttctcaagcatggacatggcattagcaacacgccatctctcacctttcccaccactgccacctttgccagcaaccccaccattattgccaccattgccacctgtgccaacagtcccaatcccaattacactgccacctttgccaccaactccaccattgccaccaactccacctttgcctaggattacaacctagctcctgagcacttgcagttggatacatacataacatataataagtaaacaaataaaagcactaatctcttctctccatttcgattcagttctgctatcctgcatgcatgccgtttcctgctttcaataagtgatatatacatatacacacacata

SEQ ID NO: 19910 - DNA, 224 bp, Glycine max
  Clone ID: LIB3106-071-P1-K1-D2
gacccacgcatgcgtacaaacacacatgcacttagtttttcagttttctgctcagaaccttgcaaccgacacaggttctatataaattcccgacctcaacctatcaagattgcaggttctgaatttgtccaacaacaacttgcaaagaagtgtgcctaaatacctgataaggtatcctgactctgcatttattgtgaataacatttcctttgtaagttcttcca

SEQ ID NO: 19911 - DNA, 157 bp, Glycine max
  Clone ID: LIB3106-071-P1-K1-D3
aacacgcattcgtcgaagcaaactcttctttacgcatgttctagacttcaaccttgctacgatcatggtagcattacaaaggcacgcactcaatatgttcagattacatatgcacactagcaaacaaactcaggcttcctaggcaagacccacaagt

SEQ ID NO: 19912 - DNA, 444 bp, Glycine max
  Clone ID: LIB3106-071-P1-K1-D4
cccacgcgtccgatggcttgcatgcaattgtgggcttcaagagctgcctcttacctgaggatctctgtgtttcacagaggcttttctaatgttattaaagatttcaagtatgttgattctcatgagtgggtgaaagttgatggaaattacgcaaccatcggcataactgatcatgcccaagatcatttgggtgatgttgtatatgttgaattgccagaagtgggagcagctgtgacacaaggaggtagttttggtgcagttgaaagtgtgaaggctactagtgatattaactctcctatttcaggaaaagttgttgaagtcaatgaagcgcttaacagctctcctgctttggtcaattcaagcccttataaagatggatggataattaaagttgaaataaatgacagtggtgaactaaacaacttgatggattcagaacaatac

SEQ ID NO: 19913 - DNA, 360 bp, Glycine max
  Clone ID: LIB3106-071-P1-K1-D5
tggaagtcacactttcagcgtgcaagtccattagctcgccttctgttcccgtcgcagcttgatttgcggggaaagcaggaactaagagttcgcaatgcagttttttagctggagcaaacaaagtgaggtttcctaggcaagtcggtcaagttagccacgttcgcaaacagcgccaaacgcgtcactgtggtgctctccacgcgacttgcagcggtgacaagatcctgatcgcgaatagaggcgagattgcggttcgcgttattcgaaccgctcatgaattggggattccgtgtgtggctgtgtactccaccattgataaggacgcccttcatgtcaaactggctgatgaagctgtatgca

SEQ ID NO: 19914 - DNA, 381 bp, Glycine max
  Clone ID: LIB3106-071-P1-K1-D6
cccacgcgtccgcccacgcgtccgcaacttgactcagcttgctggtttgaaccttgcaaacaacagtctttctggagaaattcccgacctcaacctgtcaagattgcaggtgctgaatttgtccaacaacagcttgcagggaagtgtgcctaattccctgctaaggtttcctgagtctgcattcattgggaataacatttcctttggaagttttcccacggtttctccagagcctcaaccggctcatgagccatctttcaagtccaggaagcgtggaaggctcagcgaagctgcgctgctgggagttattattgctgctggtgttttaggcctcgtgtgttttgtttctttggtgtttgtgtgctgctcaggaagagttga

SEQ ID NO: 19915 - DNA, 188 bp, Glycine max
  Clone ID: LIB3106-071-P1-K1-D7
cagacgcgttccatcgcttgctttcacatttttgctccaagagctgcctcttggctgattgtctctgtgttacagacaggcttttctaatgttattaaagatttcaagtatgttcattctcatgagtgggtgaaagtcgattgaaattactcaaccatcttcataactgatcatgcacacgatcattt

SEQ ID NO: 19916 - DNA, 440 bp, Glycine max
  Clone ID: LIB3106-071-P1-K1-D8
aaggcagaaagcaagctcatcctagagttttaaaaatggcagcagcctcctccatggctcgctcttccccatccttggctggcaaggccgtgaagctgggcccatcagcccccgaagtcgggagggtcagcatgaggaagaccgtcaccaagcaggcctcctccggaagcccatggtacggcccagaccgcgtcaagtacttgggcccattctctggcgagcccccgtcctacctcactggcgagttcccaggtgactacggctgggacactgctgggctttcggccgacccagaaaccttcgccagaaaccgtgagctcgaagtgatccactccaggtgggccatgctcggggccttgggctgcgtcttccccgaactattgtcccgcaacggggtcaaagttggagaaacttggtggttcaaggcccggtcccaaatc

SEQ ID NO: 19917 - DNA, 340 bp, Glycine max
  Clone ID: LIB3106-071-P1-K1-D9
cgcacgcgttcgtggatttgagccatcacttttccgaactggacagatggttgggattgggaatcagtatagctagatcttcattatgagaaagaacgacaagcaatgaacgttgacaaggcacacatccactcattcagcattgctaaagtcacagatagaacccgggaccacatacatgcaaaatcaggatactagcaatatgacgagcacactgcacaatccaggaaccataaaatcgtcaaactagcgtactgagatcaccgaatattcaagagcaaattaaactactcgttgcaatataccatcaattgcactaccacaatatgtaatagaaaag

SEQ ID NO: 19918 - DNA, 431 bp, Glycine max
  Clone ID: LIB3106-071-P1-K1-E1
gtagttgagaactaagaaggagaagcaaatggcttcctcaatgatctcttccccagctgtggccactgtcaaccgtgccggtgccggcatggttgctccattcactggcctcaagtccatggctggcttccccaccagaaagaccaacaatgacattacctccattgctagcaacggtggaagagtgcaatgcatgcaggtgtggccaccagttggcaagaagaagtttgagactctttcctacctgccagaccttgatgatgcacaattggcaaaggaggtagaataccttcttaggaagggatggattccttgcttggaattcgagttggagcacgggttcgtgtaccgtgagcacaacaagtcaccaggatactacgatggacgctactggaccatgtggaagctgcctatgtttggttgcactgatg

SEQ ID NO: 19919 - DNA, 443 bp, Glycine max
  Clone ID: LIB3106-071-P1-K1-C4
agaaaatgttgaggaaggaggagtggaggttaacggatctgctgggtgggactagataaagtgaagcaagctgacaagactaagggaagattggatggtggaaatggaatcggcagctgaaaaccctaattacccggcggtggactacaagcgaccttccatcttgtcatttcctcggaggcccgccctcagagttacatccgagttcgatagtgaaagcgcagtcttcttccataagatttcctgcaagttgttggacagccttgccaagttcaagttttcgttcaaccacagcggtaagggcggcgacatctccgaactctaattcagctttgtctccaagcaccttagccttcactacgacctctaagaccataatgctcttggtaagacctacaacgatcttgcttccaacttgcaactcactgcttcttatgatctta

SEQ ID NO: 19920 - DNA, 422 bp, Glycine max
  Clone ID: LIB3106-071-P1-K1-E11
gtccctttctgttctcttcactcttggtcttgcgagagaaagccatgccagagacgaagagttttggcatgctgtttggccaaacactcccattccaagttcattgcgagatcttctaaagcctggccctgcaagtgttgaaatcgatgatcaccctatgcaaattgaagaaacacagtacccgaaaaccttcttctataaagaagaccttcatccaggcaaaacaatgaaagtacaattcagcaagcctccctttcaacaaccatggggtgttggtacatggttaaaggaaattaaagacactactaaagaaggatatagttttgaagagctatgcatcaagaaagaagccattgagggagaagagaagttttgtgcaaaatccttgggaacagtaattggttttgccatttcaaagctgg

SEQ ID NO: 19921 - DNA, 396 bp, Glycine max
  Clone ID: LIB3106-071-P1-K1-A9
cccacgcgtccgaacaaaaccctagcacacttttatcgcttagtggcagcagcagtggcggcaagcaactccatcctcaatgggaatcgatttgaaggcaggaggtccgtccaagatgaccaagcgatccgcccccaaatccgatgatatctacctcaagcttatcgtcaagctgtaccgttttcttgttcggaggactgggagtaacttcaatgctgttgtccttaagcgccttttcatgagcaaggtcaacaagccctcgctatccgtctctagattgatccgatacacgaagggaaaggtggattagatagctgtggttgttggtgccgagaccgatgacattagggtttatgaagtccctgctctgaatgtaactgacttgaggttcactga

SEQ ID NO: 19922 - DNA, 260 bp, Glycine max
  Clone ID: LIB3106-071-P1-K1-B10
ctgacgcatagtccgtagtggatatatgattttctgcacctgaacgtgtgtacagggcactgactgaaacaaagcttcttattgtcaacaccatctctttgcctacgacatatacagagtcaatcatgtgaagacctgaggcacaacgctgaccaaaccaatggactgattctatacagggtgatcatagagagcgacaatgatgactgtgagattaagtatttatcgagcacttgaacacattgtattcttaaattata

SEQ ID NO: 19923 - DNA, 384 bp, Glycine max
  Clone ID: LIB3106-071-P1-K1-B11
cccacgcgtccggtagttgagaactaagattgagaagcaaatggcttcctcaatgatctcggccccagctgttaccactgtcaaccgtgccggtgccggcatggttgctccattcactggcctcaagtccatggctggcttccccaccaggaagaccaacaatgacattacctccattgctagcaacggtggaagagtgcaatgcatgcaggtgtggccaccagttggcaagaagaagtttgagactctttcctacctgccagaccttgatgatgtacaattggcaaaggaagtagaataccttcttaggaagggatggattccttgcttggaattcgagttggagcacggtttcgtgtaccgtgagcacaacaggtcaccagg

SEQ ID NO: 19924 - DNA, 116 bp, Glycine max
  Clone ID: LIB3106-071-P1-K1-B12
ccgcaccgacgcacgcatccgctcacgcacacggccttttaaaactaaggtttacaaaccaacaccattgacaaggatccagtccacatcacaagcgaaaaacgactaacccgaaa

SEQ ID NO: 19925 - DNA, 445 bp, Glycine max
  Clone ID: LIB3106-071-P1-K1-B2
cttgtattcacatttcaacaactataaccattgctttctcctcctccaaggcagttttccgtgcctgctctttttgcctatttgcatctttggctgttgctggcgatttctccattgtgggctattcatcagaggacttaaagtccatggataagctcattgaactctttgagtcatggatgtcaagacatggcaagatttaccaaagcattgaggagaagctgcacaggttcgatattttcaaggacaacctaatgcacattgttgtgtgaaacatggtttttagcatcatactgtctgtcttgattgattttaattattttagcctctatttgtccattttcattttttttttactatagttttattattttatattgagttggttttttattttttgctttttatatatttttattcctttttttatttttttttttttttt

SEQ ID NO: 19926 - DNA, 345 bp, Glycine max
  Clone ID: LIB3106-071-P1-K1-B3
aaagaacccaatcatggatgacctcatgattcgtgcttttgcaaacaagaatgacatatgggcatagggccctgttatgaggctatgggagactgctcgtctcactactggttcagcctaaaccagcccatcaattttaaaaacaggatcgacacaatgtagaatctacgactgagcattgacaaggctacaacctaagcttatgctgaaatggccataattgtagaagcctatgctgatactctgggctgcagcattggggacttttatttaaatcaaataatttgcaaatcttgaaagtagcgtctctaatgccttgattgaatattgacgtctcttacatgc

SEQ ID NO: 19927 - DNA, 307 bp, Glycine max
  Clone ID: LIB3106-071-P1-K1-B4
gctgcagttgtaacacctaccatttatggtttctggtgtttggactgatgatagtaacctgcatctcgaggcgacgactcagttccggaagctgctttcgattgaacgtagtccgcctattgaggaggttatacagactggtgtggtttctcgctttgttgagtttctcatgagggaagactttccacagttgcagtttgatgcatcctgtgctttgacaaatatagcttttgggacgtctgaaaacaccaaggttgtcattgatcacggggctgtcccaattttcgtgaatctacttgcttattct

SEQ ID NO: 19928 - DNA, 374 bp, Glycine max
  Clone ID: LIB3106-071-P1-K1-B5
gctgcagttggaacacctaccatctatggttactggtgtttggactgatgataataacctgcagctcgaggcgacgacgcagttccggaagctgctttcgattgaacgtagtccgccgattgaggaggttatacagactggtgtggtttctcgctttgttgagtttctcatgagggaagactttccacagttgcagtttgaggcagcctgggctttgacaaatatagcttctgggacgtctgaaaacaccaaggttgtcattgatcacggggctgtcccaattttcgtgaagctacttgcttctcctagtgatgatgtccgtgaacaggcagtgtgggcattaggcaatgtcgcgggggattcacctagatgtc

SEQ ID NO: 19929 - DNA, 240 bp, Glycine max
  Clone ID: LIB3106-071-P1-K1-B6
aaaaaaaaaaatactaagtagcataagtaaattttacatttaatgaaaacacaatactatacggacatagattaaataataatagtgcataacaatgtaaaaagaaaaagcaaaaaggggctgccaatttataggcctaaactttacgtacacgtcctggcgacggtcataactctactaaagggtgaccaaattacaattacctggccttctgttaacaacgtcatcactgtaaaaacc

SEQ ID NO: 19930 - DNA, 457 bp, Glycine max
  Clone ID: LIB3106-071-P1-K1-B7
cccacgcgtccgtggtcttagaaatggttttaagaagaaaaaacattaaggctgaagtagacaactcgagtgaaatatattttcctcattggatttacaatcgtcttgaatcaaatcaagagcttggtttacaaaatataaaaaatgaaggtgatgaccaaatggtgggaaagatgacaatagttggcttgtggtgcatacaaacccacccttcagctcgaccagccattagtaaagtgatggaaatgttagaaagtaaaatggagttattgcaaattcctcctaaaccttttctgtcttctccttcaacctctccggttcatttatcatgtgagacactatagtttagaagaatatatactaagatgtagcctttgttgtagtacattgcacttattactatttttcttcttcttttagtttggctttatacattgatgagtaagtgcagcgttaa

SEQ ID NO: 19931 - DNA, 340 bp, Glycine max
  unsure at all n locations
  Clone ID: LIB3106-071-P1-K1-B8
ggagaggatgagaagagagtgaagtttgtgttagagattgcactcgtaacatcatacccagccatcggtgangggcctctgttcgccgaagttgacatgggttccgacttcaacgccccaacggttcgagctaccgttgttcaagcctgcaccatcttctacgacacaccagccaccttagataaggctgagaggttgttggctgaagctactagctatgggtcccagcttgtggtgtttccagaagcctttgtgggtggctacccgcgtggttcagctattggtctttcgatcggaaatcgcactgttaaggtagagaggagtttcgcaagtatcattc

SEQ ID NO: 19932 - DNA, 374 bp, Glycine max
  Clone ID: LIB3106-071-P1-K1-B9
cttttcaacagtgccttaaaggacatgtctttccaaaccgtggcgattgagttcgatactggctcgaacaaaaaatgggatcctgcaaaccgacacatcggcattgacgtgaactcgatcaagcacgtgaaaacggcatcgtgggtggttgtgcaatggacaagtgacacgtgattatcgatacctataatgccgtcacgagcctataggctgatgttaggatccaacctatatagaaaacaagttacatcctctgtgacacagcgaactagaagagttatcactgcgaatggttgagcgttgagtactctggcactaccagcttgcatgaatgctgacgttgaaacccatgatgtgaatacttggtcttaagc

SEQ ID NO: 19933 - DNA, 459 bp, Glycine max
  unsure at all n locations
  Clone ID: LIB3106-071-P1-K1-C1
cccacgcgtccgcccacgcgtccgcccacgcgtccgcccacgcgtccggaagaaagggttggctttggcccgaaaacccacggccactgcgagtgagtgagtgagagaaaaatgggagagggagagaacacagaaatagaaatagaaatagaaacagaaacagaatcagaagcaacatcgacgacatggagcctcggaaaacacactcagataatcggactttcggagaagctcataaatgggaacaacctcagcgccaagattgaggccgcgagggagataaggaagatggttcggaaatcgtcgtcgtcgtcgaagacgcgcgcgaagcttgccgctgcgggtgtgatcgaaccgctcgtgctgatgctctcttcttccaacctngatgctcgccaatcctctctccttgctcttcttaacccttgtgttcgcaacgaacgaaacaaggtcaaaata

SEQ ID NO: 19934 - DNA, 457 bp, Glycine max
  Clone ID: LIB3106-071-P1-K1-C10
aacgaccgactcgaccgacgcgtcctgcgacgcgcgagacaacatatttcaaaggtttttctctgctgtgctagggttagtgcatgggccaactgcgtcgcgatgaaaccaggcttcatctgattccgatttcccttcgctccttctactacttaaccttcatcttcttcgattcctctacaaattatgattattattatgatgaactcgatcttcgcctcgcataaccttcgcgtcttcagtcccggcttgaatcccttcgcaccttattgcatcgccaatcactcccttttcctttccctttcctctcgctaaattacaattcccttcctttttcctctccaacttctccttcttcgcttctccgaacatgtaaattcggaggacaccgtctttgatttcggctatttttttgggggttactttactttgggtacgcgtcgtccttttgcttttc

SEQ ID NO: 19935 - DNA, 316 bp, Glycine max
  Clone ID: LIB3106-071-P1-K1-C12
acggacgcgtccacgcacgcgtccgtgaggcgagacatcgattttaaaggttcgtctctgctgagctagggtatgtgcatggtccacctccgtcgcgatgaaaccaggcttcatctgattccgatttcccttcgctccttctcctccttaaccttcatcttcttcgattcctctacaaattatgattattattatgatgaactccatcttcgcctcacataaccttcgcgtcttcggtcccagcttgaataccttcgcaccttattgcatcgccaatcactcccttttactttacctttcctcttgctaaattaca

SEQ ID NO: 19936 - DNA, 297 bp, Glycine max
  Clone ID: LIB3106-071-P1-K1-A8
ggcgcgtcttgtgttggacaacaaccacattttgatttacttcgaagaaaccgagttgcgagtcggggtccctggcaacgactcagcactcaagggaagtgctgccaagagaggcttctctgaaactgcttctgttgatttgaagcttaatctttcttcttgcattaacgactctgcctcggattcaccctcatctgtgtctacagagaagcccaaagagaacaagactaccactgctgaacctcctgcagctaatgatccagcaaaaccacctgctaaggcacaagtggtgggttg

SEQ ID NO: 19937 - DNA, 77 bp, Glycine max
  Clone ID: LIB3106-071-P1-K1-C2
cccacgcgtccgctttttgttcgattgagactatatgttatagcgtattagtataatataagcctttttgtcttccc

SEQ ID NO: 19938 - DNA, 282 bp, Glycine max
  Clone ID: LIB3106-071-P1-K1-C3
cccacgcgtccgcgccgtgcgcctcagaattgttctcttcgcctccggagttgcgtccaggggaagctgtcaagagcttatcttctaagggaaggctacagtgaatggtaccttgtgtaatacgcctcagactaaagttcatcctgcgaaggatgttatctatgtgaactggtacaggctatcttagaggcaatcttataatgattatctttgcattgaacaaactcaaagggtttatatgttcatctgcttagaacatagttaaatttttgattagattat

SEQ ID NO: 19939 - DNA, 372 bp, Glycine max
  Clone ID: LIB3106-070-P1-K1-G8
ccggctgcataggcatagactagagagagagttgcaatggccgtttctttggcagggaaccgtcctctgcttggtcttcacgagaatgtaccattagctgttgctcatccccaattcctcccgttcaaatggccacccaagtccaaactcccctccgtcgtcggaattcgatgctcctcctcccctttcaacgacaaaaccctcatttccatcacacctaacacttcccacctcaatcccaaccctctcgcttgtcgctttcacgcttcccagtttggagaacaggagagcaacaaatacgtggaagcctatgctgtaggacgaaatattcgtatgtctgctaataaagctcggaaagtgatcgatcagatt

SEQ ID NO: 19940 - DNA, 347 bp, Glycine max
  Clone ID: LIB3106-070-P1-K1-H1
gaattatgatgtatgcatgtttatggtccttttttgaatgtaattgttatcaatcaagagcagctacaatatgtcatatgagctaatgaataataagaactccaggagaatcaataggtctgaattgaaaactctctctcaacatgaatgtattattgttttgtgttgatgttgattggagaatttcacggttcctacgctgctatagcagctaggaactggtggaaaatgatgggtatcttggcctacgattagcttcactattgtagatagcaaacttagcaataggattatttcggcaggtgctgctgtataactcgttgtcggcggatgctgttggatgagaa

SEQ ID NO: 19941 - DNA, 398 bp, Glycine max
  unsure at all n locations
  Clone ID: LIB3106-070-P1-K1-H10
ctcgaactgttgtttggtctcttctctcttatccatggcatcaacgtttctcaccctaccaactcccttcctacacaaaaccaatgccatcagtttctctaacaagagaccctcatttttgcagaggagctctctgaagattcatgcaattaccaaaaaatgggaacccacaaaggttgtgcctcaggctgatagagttcttattcgtttggaggagctttcagataaaacagttggtggagttttgctgcctaaatcagctgttaaatttgagcgctatcttgtgggagaaatcctaactgttggtgctgaggctggagaactaaaggctggaacaaaggtactattcactgacatgaatgcttatgaggtggatttggggactgatgcanaacact

SEQ ID NO: 19942 - DNA, 397 bp, Glycine max
  unsure at all n locations
  Clone ID: LIB3106-070-P1-K1-H11
atttgattaataattacatttaagtgacaataatatagaaacttataataatttctgactggtgagttgtaacacgacctaacccattgttattgttgactagcacacaatagccacagcgaaatggggccgggccgaaaccattttccgcatcaaatttggggtattgctatttgctaatagtaatatgcacgtgggtacactttagtcatatcccaaaattgtcccttgaaaaattgtacaacataatcatatttctattgtgcaattgaggggtgtaaaaaaataacaatgaaaatacgtttccattgtacaaatcacgttttcattattaattnntttatccccttaattgtgcaacaaaaaccacgaattttgttgtataatctgtttatct

SEQ ID NO: 19943 - DNA, 230 bp, Glycine max
  Clone ID: LIB3106-070-P1-K1-H12
gttgggttgatcgcacgccttgttcggcgaagtgagtagtgcgtgctgaatcgaatgacgtggatgctgcgacacatggctgcgagcgatcgaacagtgatgcactgatattcatcatattgtactggtgcgcagatctagcccacgaaggtacaccatctggtgatctgcaacatgtgcaaaggctatgtcagacgccctgactaagctgaccgcgtaatctgaaccct

SEQ ID NO: 19944 - DNA, 316 bp, Glycine max
  Clone ID: LIB3106-070-P1-K1-H2
gtttcgttcgtcaccatgactttcaagcgcttgaatggaggtcgcaacaaacacggacggggccacgtcaagttcattcgatgctccaactgcggcaaatgctgccctaaggacaaggctatcaagaggtttctggtgaggaacattgttgaacaggctgcagtcagagatgtgcacgaagcttgtgtctacgaacaatacacgctttcgaagctgtatgtgaagatgcagtattgtgtttcctgtgctatccactctcatgttgtgagggttcgatcccgcactgataggagaaagcgtgagccttcacaacgat

SEQ ID NO: 19945 - DNA, 411 bp, Glycine max
  Clone ID: LIB3106-070-P1-K1-H3
ctttggttcccctccaattttctccctcctcctcactagaactcaccacatttcttcatgggcacaaactccaccaccaactcctcctccacaatctcagcctccaacttcgtctccacagcagctaagaacaacaaatttgaatgatgaatcaatgcacgtgtgcactgaagctaagcaacagaagcccatcaaaccatccactaaggttgaatccacagattggatagccacttccttgaccagaaggtttgggataggagctggtcttgcatgggttggctttcttgcatttggtgtcatctcagaacaaatcaagactcgccttgaggtgtctcagcaagaggcaaatacaaggaacgttgagaaggtggaagaggtggtgcttcctaatggcataagggactatga

SEQ ID NO: 19946 - DNA, 385 bp, Glycine max
  Clone ID: LIB3106-070-P1-K1-H4
cggacgcgttggtgaatttgcggattgtacagtgattacagtagctcacaggataccagcgtgtgatggattgcaccaaagttcttgccatcagtgatgggaaactggtggagtatgatgaaccgatgaacttgataaagagagaaggatcactctttgggaagcttgttaaggaatactggtctcattttcagtctgcagaatctcattgaagctgaacatgtttttttagcatagctcttatatttttctctgtggattgagaagaagccaagaaagagtacttagaagtaggatgcaaagtgtattttactattatatttggaaaaccctgaggtctgagaagtgggaaggaattagagggactaaggaggtaaaaggaaat

SEQ ID NO: 19947 - DNA, 168 bp, Glycine max
  Clone ID: LIB3106-070-P1-K1-H7
accacgcgtccgcggacgcatgggtgtttttcgagataacctggaacagtgtgatgggggtgaacgtcctcgcttacatccgggctaccattgcccgagcatatcgcatcaaatgcgtacgaaatcatcgctatacttatgaacactggctatagccccagtacttta

SEQ ID NO: 19948 - DNA, 377 bp, Glycine max
  Clone ID: LIB3106-070-P1-K1-H8
cccttatctcccttgctgctgccatctcgagtgttgaacagagaagaagggagaagccggtcatgggttgcacttcactgccatcttttattcagatgtcatctgctacacactccagcttcagtgaaaaactccgcaaccctcaaaagacgtctcacattgcgatacctacaactacaagagagacacacacaacaatttcttggactttttcttctcaatgcaaagctcttcacaaatcagatcctttggctgcttcacttgcaattcttctctggtcaacccctgcacatgctggtttcatgtcaggaatttctggaatagaggctattcctggtcctcagctacctcagattgactttctcaagcagctcaat

SEQ ID NO: 19949 - DNA, 293 bp, Glycine max
  Clone ID: LIB3106-070-P1-K1-H9
cccacgcgtccgacaagggtgactgctgtgtctgtgaatgttgatgatgtaaccacagtgcttgaccctgctccagtggaagtcacatggcaaattgtggttggagctatagctggggttaccccttttgtggtggcagggattgaatttagcaaaagaattatagctcaaaaaagatgcgaggtgtgtggagggtcagggcttgttcttagggaaaaggaaaaggactatctccgttgcccagaatgtgtttcttacattttggttatgaggagctatgacaagtgtatgac

SEQ ID NO: 19950 - DNA, 404 bp, Glycine max
  Clone ID: LIB3106-071-P1-K1-A1
cccacgcgtccggtcgcttcttcgtaggtgcagctgcaatggtgaagggacgccaaggagaacgtgtcagactctacgtgaggggtacaatccttggatacaaaaggtccaagtcaaaccagtatccaaatacatccctgatccaaattgagggtgtgaatgccaaagaagaagtagcatggtatgctggcaagaaaatggcctatatctacaaggctaaggtgaagaagaatggaagccattaccgctgcatatggggcaaggttacaaggcctcatggtaacagtggtattgtccgtgcaaaattcaagtcgaaccttccacccaaatcaatgggagcccgagtaagagtattcatgtatccaagcaacatatgagattcacgtgataaaacgctcagtaga

SEQ ID NO: 19951 - DNA, 308 bp, Glycine max
  Clone ID: LIB3106-071-P1-K1-A10
cccacgcgtccgcccacgcgtccgctgaggtcctcttattccgtgatgatcgaaggactggaggagaatcctcccgttcccatcgcgattatcaactagagcataaggactcaaaattagataaaaggcagataggtggagagatcactgatcaaagtgaagatgacagtactactagtagtagactgcaccctcaaccccatagatcgagataactgtagtatgataactgaaaagcaatgtgtcatattatctgtcttcctagtagtttgccaatatttattgttactcgaatgatgaaagaagca

SEQ ID NO: 19952 - DNA, 308 bp, Glycine max
  Clone ID: LIB3106-071-P1-K1-A11
aagtcgcctagaactacgaagatggaaatgttttcttcaatgatctccttcccagctgttgccaccgtcaaccgtgccggtgccggcatggttgctccattcaccggcctcaaatccatggctggcttccgcacgaggaagacctactatgtcattacctccattgctagcgtcggagtaagagtacaatgcatgcacgtgtggccactaattggctggaagacgttcgcgacttttcactacttgccagaccttgacgatgctctatttgcataggtagtcgcgttcctcgtaaggaaaggatggtt

SEQ ID NO: 19953 - DNA, 234 bp, Glycine max
  Clone ID: LIB3106-071-P1-K1-A4
cccacgcgtccgcgcgtctctccttaccagtttcaccgcacgaatatcttgttggttggagcgatccgtgaaaaactctgtagacatgttggtttaccaggacctccttacaggtgatgagcttctctctgactccttatgttacaaggaaattgagaatgtaatgctgtggtaagttgaagagaagtgcgctggactacgaacttcgtctgttacactcatgtaaactttttt

SEQ ID NO: 19954 - DNA, 461 bp, Glycine max
  Clone ID: LIB3106-071-P1-K1-A5
cccacgcgtccgggaaagttcgttcctttccgtgaagaaaaggtggtgcaaggtaaaacctttgtgcctttaaatcctcaatgtccaagtcttgcaaagggttgcccatggagctagtcaagtgtctcagtgaatctgattgtgttaaggttgagaagagatcatataaggaatgtgttggagagaagagtccatgtataccaagtgagtgtgttggactcagggaaacctatttcaattgcaagagaggccaggttgacatgagagctaggattcgtggaaacaagggctattaatgatctcatcatacatttgaaaactctgaagttgttctgtccagttgaggttctttcaatttttagctcaagacgaagtcaacaaaagtaagagatgagggtgaatcagagaaatgggaggccttgttagttgtttgatttgatggcattgtaagctacacatgc

SEQ ID NO: 19955 - DNA, 428 bp, Glycine max
  Clone ID: LIB3106-070-P1-K1-G7
accgctttcgccaaggatttgcttcctaaatatttcaagcacaacaacttctccagcttcgttcgccaactcaacacttatggattcagaaaagttgtacctgaccgctgggagttctcgaacgagtatttccgaagagacgagaagcggctcctctgcgaaatacagcgacggaagatcctcccggcaacgccgccgacccgagcgactgcgaccgcggcggttctatctccgctgccgctatctacgattccgccggcgaagctgatcgtgtcgccgtcgaactcagcggaggagcaggtgatttcgtctaactcgtcgccggcggagctgttggatgagaacgaccggctgaggaaggagaacattctgttaacgaaggaattggaagagatgagatcgctcttgaacaatatattcaatctcat

SEQ ID NO: 19956 - DNA, 309 bp, Glycine max
  Clone ID: LIB3106-071-P1-K1-A6
gataaagcattccatagcctcccataaaaatgaagaatactatcttctctgctctctttctactttgtgccttcaccacctcatacctaccttcaaccaccgcggtggtcgataccgacggtgatattcttcagaatcctggcacatactttatcttgtccgtttttcgacccggcggcggagtagaattcgccgccactggaaacgaaacttgccctctcactgtcgtgcagactctcttcgggaggggctttccagcaatattatcgtgccggttacgaatccctttcatcggcgaacgacaactct

SEQ ID NO: 19957 - DNA, 179 bp, Glycine max
  Clone ID: LIB3106-071-P1-K1-A7
cccacgcgttcgcgcaattcttttcaccatttttaacaaacgaatatccaagggaaaaaccgcgatccttaaaagacctcaaagacctattatttcatacacaaataccttcaaataataacgagccttatgaaatctaattatattaaagataacaaaagatcatataataaatgtac

SEQ ID NO: 19958 - DNA, 437 bp, Glycine max
  Clone ID: LIB3106-070-P1-K1-F1
cggacgcgtgggttcaattctgttcatcctttgcttcccaaagaaagagaaaataaaaagcaatgggtagccttgaagcggaaagaacaacagtaggattggcagcaagagacccttcagggattctctccccatacacctacaatctaagaaacacaggccctgatgatgtttacataaaagttcactactgtggaatttgccattctgatctccaccagattaaaaatgatcttggcatgtccaactatcccatggtcccaggacatgaagtggttggtgaggtactggaggtggggtcagacgttagcaggttcagagtgggagagttggtgggagttggactcctcgtaggttgctgcaaaaactgccagccatgccaacaagacattgagaattactgcagcaaggaagatctggtcttacaatgatggtta

SEQ ID NO: 19959 - DNA, 461 bp, Glycine max
  Clone ID: LIB3106-070-P1-K1-F10
cccacgcgtccggaagtaaaagttttgcgttaggtgtgagtgttctgcacgcaccgaatggacaataatttctcaaacagcgttgtaaaagaaacacattagactaggcagataactatggctgtacattctgattcggcttcatccgagaagaaatcaagcaatggagtgaatgagttgctgacttttaatgctgagaacatgcaaagcaacatgaaaattatctattacagccgaacatttttatctataattggtggagttgttgctggtattttgggatttacaggcttgaaaggatttgtgttttacttacttctcatggcatttacttcacttgggctcgtggccaaagcaaagttttccacccacacatactttgactcctggaatcgagtgctacttgatggctttctgggaggcctaatgtcggtcgtgctgttctggacatttgcctatga

SEQ ID NO: 19960 - DNA, 446 bp, Glycine max
  Clone ID: LIB3106-070-P1-K1-F11
gcgcgcagatggaactcgatacgatagtttgaagatggctcagtgtgtgtgcaacacagggctgcaaggtgaacacgtcctgcagcggcagcaactgccactgcagaagctcctagagcggctgaaaccgctgcggaggctgcgagatgtacccagacttgagctacactgagtcaaccaccaccgacaccttggtcatgggagtggcacctgctaaggctcaatttgagggtgctgaaatgggtgtgcccgctgagaacgatggctgcaaatgtggaccaaactgctcctgcaacccctgcacttgcaagtgaggtgatgggagagcaagctttaagcagagatagcccttaattaggaataatgataaactattaatgtgtagctaaaaacttatggataatgtctgtgatgggtttcgtgcactctggtgttttggggtaaac

SEQ ID NO: 19961 - DNA, 329 bp, Glycine max
  Clone ID: LIB3106-070-P1-K1-F12
tccacgcatactatattaaacattttctcttacgtctgttccacattatcccagcgtatggactctatcatctgaaacaatgtcctataataaacacatatctactatcaatataacttatccctatacatacaacattcatgacttattaaaactccataccttacccaatctttatcttatttcatcacattcaactttctccacatttctttatacctaaaatgtacttactaaacgctctcatcatcatctatacatctcttaattgctaactgtactctctcctatatacaggctttaaacgctttttgtttttacatatactt

SEQ ID NO: 19962 - DNA, 452 bp, Glycine max
  Clone ID: LIB3106-070-P1-K1-F2
attcccgtggtcgactccacgcccgtccggaatgcaacgaaagggaatactatccgatggcgaactaatatacgatcgagacgtccgaaaacgagttaggcgcgaacaagctttacgttttgatgcgcgagagactcttcgaagtcgcatgcccgaaggacacgatttgtcgttcaagtattatatggcactcgtacttctctaatatgtgcatacttacaagaaaacatgtgatatgtgggtggagaacatttaacgtcgactcttgtattgatgaatgggttaacgaagggcgaatgcactcggcacttgcgccgagacttcttatagaattacaacgaagctggtgtgctcttggctttaacgtttgcgttctgttactggcctgtttgtcccagtgttcttcctgacaaggaatatgaatcttgaaaggttctacgatctgcgagcgt

SEQ ID NO: 19963 - DNA, 106 bp, Glycine max
  Clone ID: LIB3106-070-P1-K1-F3
gcgagcggtcgccctttttttttttttttttttttttttttttaattctctagtgcttggtgtgtgtaaagaacattagctactatatattgaaagttattctacc

SEQ ID NO: 19964 - DNA, 398 bp, Glycine max
  Clone ID: LIB3106-070-P1-K1-F4
ctcaagcaaccatggcaatggcaacccatgcctctctcttaaccccacccctctccgggctcaaagccagcgaccgcgcctccgtgccatggaagcaaaactccagcctctccttctccagcccgaagcccctcaagttctccagaacaatcagagcagcagccgccgacgagaccacagaggcaccagcaaaagtagaggctgcaccggtcgggttcaccccaccagaacttgacccaaacaccccttccccgatcttcgggggcagcaccggcgggctcctgcgcaaggcacaggtggaggagttttatgtcattacgtgggactcacccaaagaacagatctttgaaatgcccactggcggcgccgctatcatgagggagggtcctaaccttctc

SEQ ID NO: 19965 - DNA, 374 bp, Glycine max
  Clone ID: LIB3106-070-P1-K1-F5
atcattctttcattctcattgccgccttttttagagacaagaagcaatgaagtttaggggtagggtttcctcaagccgtcggaagagccgcaaggctcacttcaccggtccgtcgagcgtgcgccgcgtcctgctgagcgcgcctatctccaccgatctccggtcaaagtacaacgtgcggtccattccgggtcgcaaggactacgaggttcaagtcgagaggagaacctacaagggccgcgaggtctaagatgtccacatctatcgacgcaagtggggcatccacatcgagcgcatcacccgcgagaaggttaacagctccaccgttaacgttggcattcacccttccaaggatgtcgtcaccaatctccgaa

SEQ ID NO: 19966 - DNA, 338 bp, Glycine max
  Clone ID: LIB3106-070-P1-K1-F6
tcctgaagcggcaaaagaatacattcatcgcgatttttatacatcagactcaaaacagtgaggtaaatcttacttctatgcgagagacctcgaaatccatcccaaggacacatttgtgttcagtatagatggcaccgtactctctaatattccatactacaaaaaacatgcatatccactggagaaatttaactcgaccttgtatgatcaatgggttaacaagggctaatcaccgtcactgccctaaactcttaagaattacaacaagcttctgtctctttgctttacatttgcatctgttacagccttattttacaacgtttttccttactagaata

SEQ ID NO: 19967 - DNA, 357 bp, Glycine max
  Clone ID: LIB3106-070-P1-K1-F7
cggacgcgtgggatgaagacaaaactgtcttggttacggtgaatggagagatctacggggatgaagaactcaggaaacagttgcctaatcacaccttccgtacaggaagtgactgtgatgttattgctcacctgtatgaggagcacggagaaaactttgtggacatgcttgatggtatattttcgtttgttctgctagatactcgtgacaacagctttatagtggcacgagatgcaattggggtcacttccttgtacattggttggggtctagatggctccgactggatttcatcagaattgaaggggttgaatgatgattgcgaacattttgagtcttttccacctggtcacttgt

SEQ ID NO: 19968 - DNA, 367 bp, Glycine max
  Clone ID: LIB3106-070-P1-K1-F8
tcctaccagataactataaacagtgtgatgaaattctacgatctcgcatggctcgcatctacgggggttgtctcataacatgtacacatgaacgatcaaaatccacaacgattatgcttctgcactaactgaattacaacagtcagttggacaggcattgtttgatctggcaaataccaatcaggagcttaaaagtgatctgaaggatttatacataaactcagccgtgcaagttgatgtttctggaaaccgcaaggctgttgttattcatgtcccttacagattaaggaaaggtttctcgtagattcatgttaagcttgtcatggagcttgaaaagaaatttaatggcaaagatttaatcttggtt

SEQ ID NO: 19969 - DNA, 56 bp, Glycine max
  Clone ID: LIB3106-070-P1-K1-F9
aaaaaaaaaaaataataataaaatttaaaatttaataaaataaaaatattaaaaaa

SEQ ID NO: 19970 - DNA, 403 bp, Glycine max
  Clone ID: LIB3106-070-P1-K1-G1
cagacacgtgcatcgacgcatgcagaagaggctatactcgcaggtgcaaatgcgccaatcggtgaagcaagtagacctatgtacgcagttcaaggctggtgaaaggaacatcatatgaggaatgtgaatggcggaaggctcttcgtgtgccataaggctcgcaccaagttctataatacccttgaggcttaatgacgacgacaactcataactatgaaaccaagtgacatatctaaaccataacccattgactgggattactatagaatatgaattcgcacttgcttataggctatgtacaaggagcattatcatagcattgcagtgcgcaagtttgttgacacagtaactggtcaatacatgactaaatttgatgccctattgatcgagcttaaagaagcat

SEQ ID NO: 19971 - DNA, 188 bp, Glycine max
  Clone ID: LIB3106-070-P1-K1-G10
aatactccttgaaaaacacaaattttcagattacaactgaagtgcagaagtttgagtagggcgaagcttacgctcgctatcacgctacctcataagaatctaatattgtcacctgacatgagtgaattcatcgaaaggtaccaactttccaaacttataaaaccatctcgttgcatatcttaatacac

SEQ ID NO: 19972 - DNA, 216 bp, Glycine max
  Clone ID: LIB3106-070-P1-K1-G12
cccacgcgtccgattgttcgttgttgtaactcgttcttcttcttttgatgttctgtgtgtgtgtttgttttttctctaacctaaaaatgcttgttgcggtggtaactgtggttgcggaagctcctgcaagtgcggaaacggttgcgaaggctgcaggatgtacccagacttgagctacattgattcaaccaccaccgtgaccttggtcatggaagt

SEQ ID NO: 19973 - DNA, 342 bp, Glycine max
  Clone ID: LIB3106-070-P1-K1-G2
accagtcgggactcccattccgactcttatccgacgatctctcagggcttgcatcttcggaggtaagctgggaagatgtacacatcaaggaagaaaatgcacaaggataaggatgctgaaccaactgaatttgaagagtcagttggacaggcattgtttgatctggaaaataccaatcaggagcttaaaagtgatctgaaggatttatacataaactcagacgtgcaagttgatgtttctggaaaccgcaaggctgttgttattcatgtgccttacagattaaggaaaggtttccgtaagattcatgtgaggcttgacaaggagcttgagaagaagtttaat

SEQ ID NO: 19974 - DNA, 343 bp, Glycine max
  Clone ID: LIB3106-070-P1-K1-G3
cactatcttatgaagatctaaaacgttttgttaagctggatacccgagcaaggatcaaggagaataactctgtcaaggcaaagaactgattcaattgtcaaatggagaaattagggggatggagggcttgaaataacagtttggagtttttccatttcttttattatttgatggttctcagtcttgctgggattcctttgactcatgcgcatacatctattgcgaattatgtgtaacataaccctatgtacttgattgttgaactacttgatacttttgttacaaaacttatcggatatgtatgtgatattgtctaattcgtacattttagatctattgcatt

SEQ ID NO: 19975 - DNA, 328 bp, Glycine max
  Clone ID: LIB3106-070-P1-K1-G5
aaaaaaaatactccgaaagaagagagagaaagagaaaagagaaaagggaaacaaaagaaaagagagagagaacaaaggaaaaaaaagaaaactgataactgagataacaatactgtagatatagagagatagttccaagctccaattcccagaaaaaaattaaaactttgcttcttcactttttctcttaccccttctgatctcatgcaatttcccctcatggatccctttgatttgattcgcaaagggtttggctgaagctatctggaatatttctgttacagtttttaaggtctatctatgttttagtcatttttgtccacattct

SEQ ID NO: 19976 - DNA, 447 bp, Glycine max
  Clone ID: LIB3106-070-P1-K1-E9
gtgagctataagctagtttatcgtgtggagtatatgaagttgtttgttttctttgttgctgcagtagttttggtagcatggccatgccatggcgcaggctaccaaaggttccctctccgaatgaaaactggctatggtgagcgttcttcggaggtaaaatgcgcaagttttaggcttgctgtggaagcacacaacatccgagcctttaaaaccattcctgaagagtgcgttgaaccaacaaaggactacattaatggcgaacaatttagatcagactctaaaacagttaaccaacaagctttcttttatgctagtgaacgcgaagtccatcacaacgacatatttatattcggcatagataacaccgtactctctaatatcccatactatgaaaaacatggatatggggtggaggaattaatgaaaccttatatgatgaatgggtta

SEQ ID NO: 19977 - DNA, 381 bp, Glycine max
  Clone ID: LIB3106-070-P1-K1-D2
gatgtatcagatctggagcaggagaatagcgttgggagcgttcgcgtttgttctgcttttcctatcggcctcagcagacgacgtcgttgtgctctctgaagataacttcgagaaggaagttggtcaggacagaggagctctcgttgagttctatgctccttggtgtggacactgcaaaaagcttgctccagaatatgaaaagcttggtagcagcttcaagaaagccaaatctgttttaatcggcaaggttgactgtgatgagcacaagagtttgtgcagcaaatatggagtctctgggtacccaacaattcagtggtttccaaaaggatctcttgaacccaaaaagtatgaagggccacgcactgctgattcacttgctga

SEQ ID NO: 19978 - DNA, 403 bp, Glycine max
  Clone ID: LIB3106-070-P1-K1-D3
ctcttctcacccccacactcccatctcacacacccctcgcatccaacaatgtctctcaccattccctccaacctctccaagcccgccgccctccgccccaaactaagcccaaagctaaggtccgccgccacaaccaccatcgtctgcagcaccaccaacaacaacaacaacaacaacgtgtcctccgacctgaaggcgttctccgccgcgctggccctctcctccatcctcctctccgcccctctccccgccggcgccgacatctcggggctcaccccatgcaaggagtcgaagcacttcgcgaagcgtgagaagcagtcgataaagaagctggagtcgtcgctgaagctctacgaggcgggcagcgcccccgcactgggcattaaagcgagcgtggagaaaa

SEQ ID NO: 19979 - DNA, 368 bp, Glycine max
  Clone ID: LIB3106-070-P1-K1-D4
cccacgcgtccggaaagtgagaggagagagaaagtagcagatcctccatggcctccaccaaggaacgtgaaaacttcgtctacgtcgccaagctcgccgaacaagccgaacgctatgaagaaatggtggaagcaatgaagaatgtggcgaagctaaacgtggaattgacggtagaggagcggaaccttctgtcggttgggtacaagaacgtggtgggtgctcgtagggcttcgtggaggattctttcctcgattgaacagaaagaagaagctaaagggaacgatgtgagcgtgaagaggataaaggagtataggctgaacgtggagtctgagtttgccaatatctgcagtgatatcatgactggtatt

SEQ ID NO: 19980 - DNA, 249 bp, Glycine max
  Clone ID: LIB3106-070-P1-K1-D5
caagcccacacagaacagaaatggtgatattaatgagagtcccagcacaaacccagacacagttacaggtgaagaaacacatgatagatggtttcggagctatatacttcattttagaattgttttagcaaaggtgatcttgaaaaactcttcattgattgtctcagcaatttaaagcttatccacatgcactgtttatctgtgacaacattgtttttgtatattaacctttattggctattttatctt

SEQ ID NO: 19981 - DNA, 356 bp, Glycine max
  unsure at all n locations
  Clone ID: LIB3106-070-P1-K1-D6
cgccgctcgatttcggcaatgccgccacgggctgccgcctgaccatgggcctcgtcggggtctacgatttcgacagcaccttcatcggcgacgcctcgctcacaaagcgcccgatgggccgcgtgttgaacccgctgcgcgaaatgggcgtgcaggtgaaatcggaagacggtgaccgtcttcccgttaccttgcgcgggccgaagacgccgacgccgatcacctaccgcgtgccgatggcctccgcacaggtgaagtccgccgtgctgctcgccggcctcaacacgcccggcatcacgacggtcatcgagccgatcatgacgcgcgatcatacggaaaagatgctgcanggcttt

SEQ ID NO: 19982 - DNA, 417 bp, Glycine max
  Clone ID: LIB3106-070-P1-K1-D7
ctttttctcaacaaaaaggggttcaattctagctagttctattacgtcgtccgcgaccatgaacatggcgatcgcgcttctgttcatggttttcgcagtttcatcagctttagacatgtcaataatatcacacgacaacgctcatgcggatagggccacgaggcgcaccgacgaggaggtgatgtcaatgttcgaggagtggctggtgaaacacgacaaggtgtacaacgcgctcggtgagaaggagaagaggtttcaaatcttcaagcacaatctgcgcattatcgatgaacgaaactctctgaaccgaacctacaagttgggactcaacgtgttcgctgatctcaccaatgcggagtacagagccatgtacctgcgaaccttggacgagggtccgaggttgggcttggatacgcc

SEQ ID NO: 19983 - DNA, 228 bp, Glycine max
  Clone ID: LIB3106-070-P1-K1-D8
cttttaagtttttgattaagggcatgctgaggtgatagaagaataactgtttgtggtggtgactggatgaagtcttttgctatttttattgaagatttatatgcgtgtatatatatgataattataattatgagtcttgtccatgtcaaacactttctgctccagttgtgattgaacgtgtaacatagtgtgaccatgttttattaaaaaaacatgaacacactatga

SEQ ID NO: 19984 - DNA, 361 bp, Glycine max
  Clone ID: LIB3106-070-P1-K1-D9
cccacgcgtccggttctagatcgttggcggttcgctcgcgatctagacttcctttgcaaggttcatactttcgtttccccttctcatcgaatcgaagcgccgcaccgtgtttcttctctgcctgaataacgcaaagaaaattgaagcatcctaagggttgtttctaagggataccgggttgggagagaagatgaagcaggtggtgggaacggtggtttcaaataagatgcagaaatcagtggtggtggcagtggatagactattctaccacaaattgtacgaccgatatgtcaagcgcacgtctaagtttatggctcatgatgagcacaatcattgtaacatcggtgaccgagttcggctg

SEQ ID NO: 19985 - DNA, 426 bp, Glycine max
  Clone ID: LIB3106-070-P1-K1-E10
cccacgcgtccgcccacgcgtccttctagttcacttatcgcaagcggcatagttagtgctggcaaatccaaccagcaccgggttgttaagacccctggagggaagttggtgtaccagaccactaagaagagagcaagtggacctaagtgccctgtcactggcaagaggatccaagggattccacacttgagacctgctgaatacaagaggtctagattgcctcggaaccggaggaccgtaaaccgagcctacggaagtgttttatcaggaggagctgctagagaaaggattattcgtgctttcctggttgaagagcaaaaacattgtgaaaaaggtattgcagatccagatggcaaaagaaaagcaggcatcaaagagttaagctgttgagtgattcatgagtgcataaaatatcttatcgttaaa

SEQ ID NO: 19986 - DNA, 366 bp, Glycine max
  Clone ID: LIB3106-070-P1-K1-E11
cagaaactcttaggcatagcgaaaatgacaaccaccttcgcgaccgtcgcaggactcggtggtgcatcactgtcatccacctcatctcgtctcacctcagggtttgtgaaatcgccagtgagtgctaggaatcccttgaggcaagctgtggcaatgggaaatgggagggttacatgcttcgagaggaattggctgcgggcagattacagtgtgattgggtttgagttgattggttggctagcaccctcaagcgtaccggctatcaacggtaaaagtctgactggcctcttctttgagagcattggagctgaccttgctcacttccccacccctcctgccttaacttcatccttttggttatggctg

SEQ ID NO: 19987 - DNA, 257 bp, Glycine max
  Clone ID: LIB3106-070-P1-K1-E12
tcgcccacgctgttcgaaaaaaaaaaatttaaaataaaaaaaaaaaaaaagaaaaaaaaagaaaaaagaaaaaaaaaaaaaaaaaaaaaaaaaaaaaaaaaaaaaaaaaaaaaaaaggaaaaaaaaaatagtggtaaaaaagattaagtagaaaggcatgtaaggtaaaaaaaaattaaaatgagggggcttaaatagaattcaatggtgggtgttttacaacgtagattattgtaaatttcttggggtgaccaaaa

SEQ ID NO: 19988 - DNA, 376 bp, Glycine max
  Clone ID: LIB3106-070-P1-K1-E2
cccacgcgtccggaagaataaaagattttggagttggagtggctcactcagcgcgtctatacgtgctaagcgcaagcaacacaacaaggaaggtcacatgacaagcatttggaagaaaagaggccaattggaagttcttgaaggcgctcaatgcgtcaatacttgctaagctcattggtttgacagtgaggatttgggctcagtgcaacatgctgggctaagcccacggccacttaatctaatgttgcttttgcatgtatgccacatgttgggctaagcaggcagacgattatgcaataacgacaacgtagtgcatttggccctatttaagctccatgtatgcaaattgaaggcaaatttggttgggggagctatc

SEQ ID NO: 19989 - DNA, 372 bp, Glycine max
  Clone ID: LIB3106-070-P1-K1-E3
gaggaatcagaatcgcgttagggagaagatgagaaaatcgcaggtgaaaatgagcggaacggtgaagaaagtaaccgatgtagcattcaaggtgggaaggaacatcgattgggatggaatggcgaagcttctcgtctccgatgaggctcgcagggagttctccaatctccgtcgcgctttcgacgaggttaactcccaactcgaaaccaagttcagccaggaacctgaacccatagactgggattactatagaaaaggaattggcactcgcttggtggatatgtacaaggagcattatgagagcattgaggtccccaagtttgttgacacagtaactcctcaatacaagactaaatttgatgccctattgat

SEQ ID NO: 19990 - DNA, 343 bp, Glycine max
  Clone ID: LIB3106-070-P1-K1-E4
tgagaagatcatttcagacgcggttcacagagcttccacatttgatccaaaagttccagctaggatcttaaggatgttcttccatgactgtttcattaggggatgtgatgcatcaatattgctggactcaacacccaaaaacctggcagagaaagatggccctcctaatctctctgttcatgcattctatgttattgatgaagccaaggccaagcttgagaaagcttgcccacacactgtttcctgtgctgatataatagccattgcggctagggatgtggtagcattgtctggaggaccatactggaatgtgctcaaaggaaagaaagatggaagagtctca

SEQ ID NO: 19991 - DNA, 400 bp, Glycine max
  Clone ID: LIB3106-070-P1-K1-E5
ctctctcttacacacccaagcactactactactactttctttctagatatgggttctggtgctgtgcaactgtttctgatcttggggctcttggctagctcatgcttagcccaagccccaggtgctgcactgtcacaaccacccactacaaccccatcaccaccaccacccagatcagcacctgcaccagcacccaccacaccatcaaccccaccaccagcaaccacaccaccagcagcaactccaccaccagcagcaacttcaccaccagcagcaacaccaacaccagcaccagcaccaccaacggctgcacctacacctgctttctctactgcaacctatcctacttcaccttattctacagtgacactaagcttcacctattctaacactacaccag

SEQ ID NO: 19992 - DNA, 146 bp, Glycine max
  Clone ID: LIB3106-070-P1-K1-E6
gctacgcttagctgctcactgctgcttctatcagctctccatgcatcttgatacggtcgtgcccactattatgattcatcagctatcaactgtaactatgatctaatctcaacacttaagccaagggcttacaaaactacccatta

SEQ ID NO: 19993 - DNA, 338 bp, Glycine max
  Clone ID: LIB3106-070-P1-K1-D12
cacttgctaatttgggctatgatgttacatttatacaaggttctcttagtaatggagagagagacaaagttgtcaaggagtttaaagatggtttgactcaagatcttatatcaacagatattcttgctcgtggctttgatcagcaccaggttaattttgtcattaattattaccttccaaataaacacaatttaccggatgaaccaaactatgaattgaatttacacacagttatcagtgctggtcgcagtggatacactattgtaccatataatgtactatcgatttgtcaagcgcacgtgtaattttatggctcatgatgagcacattcattgtat

SEQ ID NO: 19994 - DNA, 387 bp, Glycine max
  Clone ID: LIB3106-070-P1-K1-E7
tccagacgcgttggcaaaggcattcgtggagcactactacagcaccttcgacaccagccggaacggtttagcgaatctgtatcaggagggttccatgctgaccttcgaagggcagaagatccagggcgcttccagcatcgtcgctaagctcacttgcctccctttccagcagtgccaccactccatctccaccgtcgactgccagccctccggtgtcaacgctggcatgcttgtctttgtcagcggcaacctgcagctcgctggcgaacagcacactctcaagttcagccagatgttccatttgataccaacgcctcatggaagctattatgtgtggaatgacatattccggttgaactatgcatgaagatagaccatcatatgacc

SEQ ID NO: 19995 - DNA, 59 bp, Glycine max
  Clone ID: LIB3106-070-P1-K1-E8
aaaaaaaaaaaaaaaaataaaaaaaaattttaaaaaaaaaaaaaaaaaaaaaaaaaagg

SEQ ID NO: 19996 - DNA, 128 bp, Glycine max
  Clone ID: LIB3106-070-P1-K1-B8
agagagagggaggaagtcagggaactctgaggtaggaggaaaagatgccgcttgtcaagggtttgaaaccccgaacagaaaattcctcttttggacttttaaggagaatgggaccattggccttaaca

SEQ ID NO: 19997 - DNA, 418 bp, Glycine max
  Clone ID: LIB3106-070-P1-K1-B9
cgcaagagaaggatggggagcccttcaggttggcaaccagagatgaaaaagcgtcttgatgcaagttatcacaatgatcttgccgaataaaggaactcgctgaataaaggaactgggaagggggagagttggctatgtaggcagggaaagcacaaggaatggggagcaaaattattgttgaggtgaatattctgatgtcctttatttgcttattgtgatttagctaatcggttgctaaagaattgatgattctggatgctcttgtttgccttatacatttcttgtttaaggaacgggatgcctcagttttggtagtgccattaaaggcttattattatttttttttccgggctgggagggggttgtatgagaaccttgtgctatttatttaatttaatacatatgaatatatttctgc

SEQ ID NO: 19998 - DNA, 363 bp, Glycine max
  Clone ID: LIB3106-070-P1-K1-C1
tctatattggatacacacacactttgacttatagcatatacgagtgagtgatgacgtgcagcaaaactgaatcggttcacagcttactccatcttcaccttaagatcaccaaacggctgtgtactatgtgcaagccttcaagggattctatgatggggcacgtatcttcaatgcaggcaactcaatatcaaacagcctatggagtctcctcacaccctcattcggcgtactaaggaactcttcccgagccgcttttcggggattttaggcatcttcgggaggaaagggcgttgaagaggaatgataaggggggcctggtgtgagtgattctggagaacggcttatcatgagtttaagacaagg

SEQ ID NO: 19999 - DNA, 373 bp, Glycine max
  Clone ID: LIB3106-070-P1-K1-C11
gttgagtgattttaaacactcatatggtgctctgtcgtgtgaagctgaacactggatgggggcagtggagtgtgaagctcagccttttgttgatgtgtctcagaagaaaactgacacaatttatggtgaagctgaactttcagtgaaaggtgggctttctgttgaaggtgaaggtagcaatcaatgagatgaatattcaagacctgcatcggatgctttggatggacagaatgtgggtgcataggtcgtgaaaaagccattctactatttgatcagggttcccagatatgattattatggaaacatgaaagagatgataataaatgctcttcaccaagtataggagaattctaaaatccgagatgctattcta

SEQ ID NO: 20000 - DNA, 446 bp, Glycine max
  unsure at all n locations
  Clone ID: LIB3106-070-P1-K1-C12
tgcacgtactcggtctcggaanttcccgggtacgactccacgtcgtctcgacgtgaaggagcaacgaagcctctcggtgtgttgtaaattncatggaaccgnnaaatgtaagaagacatgtctcaaggaaccctcggtnncttaacactttttcaaggataacatcattggagcaattggctctncagcagctttcagcacatcnnggttctcatnnntcttgaagggcattctaatcctgttccgnntttggaagggaaatactctctcaagccttcaagncccccatgcncnnatggctgnntcttctgtcatgaccgctgtgannatcagctntngttcaaccttgaggaaaaggctgtgtaaacgtcaactttgtgaagggcaattcaaacccttgcaaaaggattaacggtgcctacttttcattttaaaagccccggtgt

SEQ ID NO: 20001 - DNA, 364 bp, Glycine max
  Clone ID: LIB3106-070-P1-K1-C2
gagagagagcaagtgacaagagtggagtgtgagatagtgactgcaaaaccgctccagccttgtttcttctcagatcttcttccatggaacagtacgagaaggtggagaagataggcgagggaacatacggcgtcgtttacaaggctcgcgaccgcgtcaccaatgagaccatcgctctcaagaagattcgcctcgagcaggaggacgaaggcgttcccagcaccgccattcgcgagatttctctcctcaaagagatgcagcataggaacattgttaggttgcaggatgtagtacacagtgagaagcgattgtatctggtttttgagtatctggacttggatctaaagaaacatatggattcatc

SEQ ID NO: 20002 - DNA, 401 bp, Glycine max
  Clone ID: LIB3106-070-P1-K1-C3
cattaccctcgtaactcgtaacggcttcatacccctttcttttccttcgttcaagttagaatcttttgcttcactcagtgagccatggatgacgctgagttggacgccgcgttcgggtttccgtctgagttcccctacgagtttgactcggttggggccgaaccggctgattccggttcgaccggaaccgagagcagcgacgaggaagacttcttcgccgggttgactcgccggctgagtcacacctcactcaatgaaacaaggaaggaacaacaaaaactcaatgttcccatctgcaacagcgacaaaaccgagaatcagaagatgatggctcgcggtttggccgggtcgcctcagtctatactgagcggaatcggaagctggtcgggtcggaacggaag

SEQ ID NO: 20003 - DNA, 401 bp, Glycine max
  Clone ID: LIB3106-070-P1-K1-C4
caaaaatattattaagatgatcaacattattggagcacttgttctactctttgcatttctcttcctcagttgtgtgtatgcacaagacacaacaacccttgtgcctgcaatcataacttttggtgattctgctgtggatgtagggaacaatgactatcttcccacccttttcaaggctgattaccctccttatgggagggactttgttaaccaccaacctactgggaggttttgcaatggcaaattagctactgatttcactgctgacacattgggtttcaagacctatgctccagcatatcttagcccacatgcatcagggaaaaacctccttattggagcaaactttgcttcagctgcatctggttatgatgaaaatgctgctactttgaatcacgcga

SEQ ID NO: 20004 - DNA, 309 bp, Glycine max
  Clone ID: LIB3106-070-P1-K1-C5
acacgcgtcccatgcataatagactttattacagataatactatcaagataaccggtgggcattatttatttatttgggtcataatctttatataatagataacagatacttctatttagattctcatgatttatttagctagaacttaaatggtgtatccctatgattcctattcgaattctatttataattttaaatcacaatacttttaatttatattaatttgatctcttctctaactcttaacaactataacatcaatttttatcctacattctacaaatctcatatattcatattcataatat

SEQ ID NO: 20005 - DNA, 396 bp, Glycine max
  Clone ID: LIB3106-070-P1-K1-C6
cccacgcgtccgcttttacttctcagcagcttcggctagggttcagaaacgaaaaagggttcggtgttctgttcgcgatgagagccaagtggaagaagaagcgtatgaggaggttgaagaggaagcgccgaaagatgagacagagatccaagtagtgcgttaaacctagtttgtttctgttgcttttacaattgcttatgttgtcgaatgggacacccagttgttagtggcactggtttctcctttttgatgtttgatacattttgatggattcaagtagtttatgttcgtcttatgttattagctcaaaacaatgttgttactgcttttgctaatcaacatgatctcctatgtgcatctctgattttcttagggttattataatttgacattata

SEQ ID NO: 20006 - DNA, 431 bp, Glycine max
  Clone ID: LIB3106-070-P1-K1-C7
ctccttactattacaagtctccaccatcttcctctccaactccgtactactataagtgggctcctccgccgccaccttattactacaagtctccacccccaccatccccagctccttactactacaagtctccacccgcaccaccaccttattactacaagtctcctccctcaccaccttacacgaagccttacatctatgcatcacctacccctacttaccactattagcatacctcttatcgatatgaagaatatgtgcaacgaataaaagaaagcgatggaaagcgcttcgcgatgcacgaaagagaagaaatggaagcaaagtttccgcgttttgtctatcataaaaaaaatgttaaattattattatctatgatacgattggtttcttgtctatcttctctagcttaagaatttccgtgtatttta

SEQ ID NO: 20007 - DNA, 349 bp, Glycine max
  Clone ID: LIB3106-070-P1-K1-C8
gttttaattagttctaatctgtttatgtgcagtctggtatggagaagaatgtttttggaaatcatcctgtatcaatgacagaatcacgaagtcctccacctgcttctgcttcagacccattgattattagggaaaatcatggaaactcagactcagttgatggatactcacctgcaactgggtcagaactacctaaacgttcagtgacagatattgtggagatagatggtgctaatccagcatgaaattttatgaaaaactcaagtcctgttggtcctgaggccaccacaaggaatggcccagtccatgttgaacgacagaatgctgaaatgtcttactatgctgatga

SEQ ID NO: 20008 - DNA, 432 bp, Glycine max
  Clone ID: LIB3106-070-P1-K1-C9
ggagagtgaagctgaacactcatttggtgctgtggggtgtgaagctgaacactgaaagggtgcagtggagtgtgaagctcaaccttttgttgatgtgtctcagaagaaaactgacacaattgagggtgaagctgaactttcagtgaaaggtgggctttctgttgaaggtgaaggtagcaatcaaggagatgaagattcaagacctgcatcggatgctttggatggacagaatgtgggtgcagaggtagtgaaaaagccattctactatttgatcagggttcccagatatgatgatgatggaaacatgaaagagaagataagaaatgctcttcaccaagtagaggagaagtctaaaattcgagatgctattcgagctgaaagccagactataaaggccagttgtaaggatttcgaccaatagtttagggctgc

SEQ ID NO: 20009 - DNA, 422 bp, Glycine max
  Clone ID: LIB3106-070-P1-K1-D1
gtgggttgttcttggacattctgagcgattacatattattggagaaaatgatgagtttataggaaagaaagctgcctatgctttgagccaaggtcttggagtgattgcatgcattggagaattgttagaagaaagggaagctggaaaaacttttgatgtttgttttcagcaattgaaggcttatgcagatgcagttcctagctgggacaacattgttattgcatatgaacctgtatgggctattggaacgggcaaagtggccactccccagcaagctcaggaagtacatgtagctgttcgagattggctaaaaaagaatgtccctgatgaagttgcatctaaaacgcgaattatttatggagggtctgtaaatggaaggaacagtgctgagctagcaaagcaagaagatattgatggatttc

SEQ ID NO: 20010 - DNA, 152 bp, Glycine max
  Clone ID: LIB3106-070-P1-K1-D10
acgcgtcactgcgacccgttctagatcgctgcagttcgatcgcgatctatacttcactagcaagggtcatactttcctttggccttgtcatcaaatcgaatcgccgcaccgcgattctactgtgcctgaataccacagagaacattgaagca

SEQ ID NO: 20011 - DNA, 271 bp, Glycine max
  Clone ID: LIB3106-070-P1-K1-D11
cccacgcgtccgtcaacacatcctttcacgtttatggccaactcgactttaacggtaacgggcatactatatttaaacattgtcaactaattcaatcaccataccgtctatctactctgcatgaataacacaaagaaaattgaagcatcctaatacttagttctaaagaataccgatttagcaagagaagataaatcatgtggtgataactgacttttcaaacaagatgcataaatcagtgttggttgcagtttataaactattctaccac

SEQ ID NO: 20012 - DNA, 407 bp, Glycine max
  Clone ID: LIB3106-070-P1-K1-B7
ctcattctttcattctcattgccgtcacagagagagacaagaaacaatgaagtttaaccctagggtttcctcaagccgtcgcaagagccgcaaggctcacttcaccgctccgtcgagcgtgcgccgcgtcctgatgagcgcgcctctctccaccgatctccggtcaaagtacaacgtgcggtccattccggttcgcaaggacgacgaggttcaggtcgtgaggggaacctacaagggccgcgagggcaaagtggtccaggtctatcgccgcaagtgggtcatccacatcgagcgcatcacccgcgagaaggttaacggctccaccgttaacgttggcattcacccttccaaggttgtcgtcaccaagctccgaatggacaaggaccgcaaatccttgctcgatcgga

SEQ ID NO: 20013 - DNA, 267 bp, Glycine max
  Clone ID: LIB3106-070-P1-K1-A12
gtaatgacagacaatctgttaagttctctttacataatcacacacataattttagactaagctacctatctattggcacactacaaatgataatgcttgacactcaaacttactaataccctttactatagtaatttatatctaaaatcttctcaatcatctatctataactacatcctatctatatctaataacgaatgcacttatgcattatctacatataaccatatgctttcctcaacaaagtcactctaacaaatgcttaca

SEQ ID NO: 20014 - DNA, 392 bp, Glycine max
  Clone ID: LIB3106-070-P1-K1-A2
cccacgcgtccgagaaaaccctagcccaaccggatcttcacgactaggagatggcaaaggcgaagaaccacaccgctcacaaccagtcctacaaggcccataagaatggcatcaaaaagccaaagaggcatcgccacacttccaccaaagggatggatccaaagtttctgaggaaccagaggtacgcgaggaagcataacaagaagagcggtgaaacagccaccgaagaagagtaaagtgccactctcaaatgggcctattaggatttgatttgttatttaagccccatatgttttgtgtcgaatctatctttagtagtatagtcatttttatgagttaacttaatccagagagaatgcagtacttactcttatagcatcgttggtggtttt

SEQ ID NO: 20015 - DNA, 322 bp, Glycine max
  Clone ID: LIB3106-070-P1-K1-A3
ctggatttggggttccctaagcacaccattattttattatgaatgagtggcaatagcggcggcaacaacaatataagtgaaagaatctcttggttgtcatgacactttgctagatccagtctccatcatggcgttagagaagcactgctgctcttgccgatactgcctctgatgctgatgctgctaccatatttgaccagatcatccttactggagattccttctactgtgacatatgaggatgacaaggttcttgactatagtgacataactgcttaagcttctacacatattcttatcatttcgaaattccaaggctctt

SEQ ID NO: 20016 - DNA, 406 bp, Glycine max
  Clone ID: LIB3106-070-P1-K1-A4
cccacgcgtccgcccacgcgtccgcagaatcaaaagtgcaagaattaggtggcatcaccgatgtgcatggagctgccaacagcgtcgagatcaacaatctcgctcgctttgctgtagaggaacaaaacaaaagagagaattcagttctggagtttgtgagggtgattagtgcaaagcagcaagtggttgctggagtgaattactacataacattggaagcaaaagatggtttgattaaaaatgagtatgaagcgaaggtttgggtgagggaatggttgaactccaaagagttgctagaattcaagccagtcaatgtttctagcacaccaataggtggcattaccgatgtgactgcgaatagcctcgagatcgacattctcgctcgttttgctggtgatcaacacaa

SEQ ID NO: 20017 - DNA, 413 bp, Glycine max
  Clone ID: LIB3106-070-P1-K1-A5
ctctccggctctaagctactgaagcaaacaaacccattccgcatagacagtgaagaaggctttctctagcagctagagatggcagacggaagagggtccactctcgtgcatctcttggtcctggttctgtgcttggtcgcatttgggtttgccgatgacgtcgagagacgaagacgcgtcggaaccatgcacaaaatagaccgaacacatgaaacattttgtagctacagctctgatgttgcgactggatatggagtgggtgctttactgcgacttctttcaagtgaatcactgctaatgggagtgacaaagtgcatgtactttaggaggccctgaacacctgggggaaatcgagcatggcccattatatactgtctttcttactgggtcacttttatcgtagcaaaatcatg

SEQ ID NO: 20018 - DNA, 402 bp, Glycine max
  Clone ID: LIB3106-070-P1-K1-A6
ctgatttctgacatctgattctgattatcattggagggaacctcaacccaaagtttagtttttttttttttattattattattgttgttatttctgccacaacatttaggggtgcattgcaaatggcttccattgttgcaagcttgccgccaccattgctgctccctgctagaaaatatcatccgggcaacttcccaagttcccctttttctcttctttcagggagacggaatcatgtttcttttgttgtgaaggcttctggagaaagttctgaatcttcaactacccttactgtttttaagtctgttcagaatgtttgggatcaacctgaggaccgtctgggacttattggtttgggatttgcagccatagcagcattttgggcatcaacaaatttgattg

SEQ ID NO: 20019 - DNA, 295 bp, Glycine max
  Clone ID: LIB3106-070-P1-K1-A7
caagtagttgagaactaagaaggagaattttatggcttcctcaatgatctcttccgcagctgttaccactgtcaaccgtgccggtgccggcatggttgctccattcactggcctcaagtccatggctggcttccccaccagaaagaccaacaatgacattacctccattgctagcaacggtggaagagtgcaatgcatgcaggtgtggccaccagttggcaagaagaagtttgagactcttttctacctgccataccttgatgatgcacaattggctaatgaagtagtatacctt

SEQ ID NO: 20020 - DNA, 413 bp, Glycine max
  Clone ID: LIB3106-070-P1-K1-A9
caaaataatacttttattctaaagccactttttatacctttacaacaacaaacagaatcggggaaaatacacaaacataaacatcgacatcaaacaggcctgatcacgcaactcacccagccatcttagcacgcagctctggctaatcccgctcctaaatcttctcctaccctacgcacactctaatctcggtgaagcactacctactctaattatcctctaaccatccagtccactccggcctcaatcttcgacgtcattgcacatgcatattgagcactccacgctcgttcctgataccctcgcatctactgtggactcctactcctaacctctctgttccgccaagctcgaagaaatcgcttccgtctgcctcgacggccatgatctcggtttgttcctctacattcaat

SEQ ID NO: 20021 - DNA, 171 bp, Glycine max
  Clone ID: LIB3106-070-P1-K1-B1
ctccgtctccgtggggggttttaagctcgttgtgtaatgttggatgtgttcccaaaacatttgaagaactttgatgtttaatgggtctgtaataatgtcccttgaaaataagttcggtttgtgttgaactcaattgtgtcccattaataatagtactctaatatcccacct

SEQ ID NO: 20022 - DNA, 277 bp, Glycine max
  Clone ID: LIB3106-070-P1-K1-B10
cccacaaactcacagtcttagtccttagttgggttctcggactttgaaagactagaggctgtctctctgtttagatccgcacacaaaagagaagcaggttgatgcgctctacttggatgtctgtagtggtatcactcttacacgcacgcaagagtgcaggcctatatagattatgtgagatgggacgagacaaagcacagtatggagcatacgttatgcgagacctcccgagtgtccgcttgtgacagtgatcaatatctaatggaacgatcagata

SEQ ID NO: 20023 - DNA, 451 bp, Glycine max
  Clone ID: LIB3106-070-P1-K1-B11
ggcagctgctactccccctgtcatgcaaggatcagacagacctttgtggtttgcatcaaagcaaagtctttcctacttggatggcagccttccgggtgactatggatttgaccctctgggactttcggaccctgaaggaacaggagggttcattgagccgaaatggctagcatatggtgagataatcaatggtcgttatgcaatgttgggtgcagttggtgcaatagcacctgaaattctaggcaaggctggtctgatccctcaggagacagcactcccatggttcagaaccggtgtgttcccacctgcaggaacctacaactactgggcagactcctacacactgttcgtgtttgagatggcactgatgggatttgcagagcacagaagattccaagactgggccaaaccaggctctatgggcaaacaatacttcctaggactagagaag

SEQ ID NO: 20024 - DNA, 343 bp, Glycine max
  Clone ID: LIB3106-070-P1-K1-B12
cccacgcgtccggaagtaaaagtttggtgttaggtgtgagtgttctgcacgcaccgaatcaacaataatttctcaaacagcgttgtaaaagaaacacattagactaggcagataactatggctgtacattctgattcggcttcatccgagaagaaatcaagcaatggagtgaatgagttgctgacttttaatgctgagaacatgcaaagcaacatgaaaattatctattacagccgaacatttttatctataattggtggcgttgttgctggtattttgggatttacaggcttgaaaggatttgtgttttacttacttattatggcatttacttcacttgggc

SEQ ID NO: 20025 - DNA, 356 bp, Glycine max
  Clone ID: LIB3106-070-P1-K1-B2
cggacgcgtgggcggacgcgtgggtttcccgagaaaaaaataacacttttcactttctgcactacgttctcacttcgatatggctcgtacgaagcaaaccgctcgcaagtccaccggtggcaaggcgccacgtaagcagctcgccaccaaggccgctcggaagtccgctccggcgaccggaggagtgaagaagccccaccgcttcaggccgggaaccgtggcgctgagggaaatcagaaagtaccagaagagcaccgagcttctcatcaggaagcttccatttcagaggctcgtgagagaaatcgcgcaggatttcaagaccgatttgcgtttccagagcagcgctgtttccgcgc

SEQ ID NO: 20026 - DNA, 342 bp, Glycine max
  Clone ID: LIB3106-070-P1-K1-B3
tgaacattcaggctagttaattttccccctttttttaatgaaagaatttgtattctgggtattatggatgccagtatgcagttacagaaaatcttaatggtccactgttcatgttatacacgaatacgtgctaatattggtagaatttcgttgtcggtacacgtattgattggatttttcttgtaaatcttagcttgtattgtgaatttgtgatgctgtaatttttccatgcctggtggcttctacctcaatattaaggcaaagttcatctaaaaaaaaaaaaaaaataaaaactaataaatcaataaaaggtgaaaagttttaataaaaaaatgggcgttc

SEQ ID NO: 20027 - DNA, 337 bp, Glycine max
  Clone ID: LIB3106-070-P1-K1-B4
cttcttcttcttcttcttgttcctgcaacgcactgaattcgatcaatcaatccatcttgaatggctttgtttcgatcggaggaaaatggccgatcagttatcgaagggagaggaattcgagaaaaaggctgagaagaagctcagcggttggggcttgtttggctccaagtatgaagatgccgccgatctcttcgataaagccgccaattgcttcaagctcgccaaatcatggcacaaggctgaagcgacatacctgaagttggcacgttgacatttgaagttggaaagcacgcatgaatctgcacaggcccatgtcgatgctgcacattgctacaaa

SEQ ID NO: 20028 - DNA, 224 bp, Glycine max
  Clone ID: LIB3106-070-P1-K1-B5
cctacgcgtccggttctttatcctctttttttaatgttggatgtgttcccaaaacgggggatgaactttgatgtttaatgggtctgtaataatgtcccttgaaaataatttcggtttgtgttgaactcaattgtgtcccattaataatagtactctaatatcccacctatatatatattcattatattatttttatattatatatatattattaaaaagtgtct

SEQ ID NO: 20029 - DNA, 451 bp, Glycine max
  Clone ID: LIB3106-070-P1-K1-A11
gcaatgagagagaatctgttgaggcagggatacagaattgttggaatcattggagaccaatggagcgatctgcttggagaccacagaggcgaaagcaggacctttaagcttcctaatcccatgtactacattgagtagtaccttcacctctctcaacaatctagctagagtttgctcctatctatatgtaataaggtatgctgatatgcactattcaaataggagcattagctatgtttgttaatgtcactttatgttatgtgggtaagtcacctaagacactccacgtacctacgttgttgtctcttaccggctttaataaatcttctgcccttgttccatatttactaaaaaaaaaaaaaatataaacataaaaaaaaaaaaaataaaaaaaaaaaaaaaaataaataatttattaatataaaataatattaaaaaaaaaaaagggcgg

SEQ ID NO: 20030 - DNA, 360 bp, Glycine max
  Clone ID: LIB3106-070-P1-K1-B6
cccacgcgtccgaaaaacaagtagttgagaactaagaagaaggaaatggcttcctcaatgatctcctccccagctgttaccaccgtcaaccgtgccggtgccggcatggttgctccattcaccggcctcaaatgcatggctggcttccccacgaggaagaccaacaatgacattacctccattgctagcaacggtggaagagtacaatgcatgcaggtgtggccaccaattggcaagaagaagttcgagactctttcctacttgccagacctcgatgatgcccaattggcaaaggaagtcgaataccttctaaggaaaggatggattccttgcttggaattcgagttggagcacgggttc

SEQ ID NO: 20031 - DNA, 448 bp, Glycine max
  Clone ID: LIB3106-069-P1-K1-G6
cccacgcgtccgggagccagggaagccaagtccttgcactgatattgtgagcttctcaaacccaactccaaagtgcttggaacttcctccaaggttgctacttgattcccaaaacaacaacaaaagcaacaaactttcatcacccaccactgttttggagggaccatacccttatgtggctaccaccaacacttgcaactctccttcttttagaatgaatgaagacttgtacggttcttttgggtctgaaagagggaaacttgggaccatggttttgaaccaaggagtggggatcaaggaggaggagaaggagaaagggtggtttggttcatggagggaaaaggccttgaaaagagaggctagtggtggtgggggtaagtatgtctttccatcttctgttgaaaaagatcctgaatgtgttggcactcacaagaaggtgaggagtatg

SEQ ID NO: 20032 - DNA, 450 bp, Glycine max
  Clone ID: LIB3106-069-P1-K1-G7
caaacacaactctctctatcaacaaaaccaaccaacacaagaaagaaagaaaaacaatggacttgtacggttccttttccaccccttcagattgcttacatattgatgattttctagatttctccaacatcaccaccgacacccaccaccaccttcctcctccgcaaaactctccattaatctcccacgacgacgccaatctcttcttcaatttcccttccgttccggtatccatccatccattattatctaatgaattgctcaataaatgagtgccataaacggtgaagcagagatagcgctatttgtttcttggctgtttatttatgctctctctctgatctcaaattgagtgaagggttgatttttttttttttcttttttatgtcgaggagaagagaagtgaccttcgtgggaaagggaaaaaaattgccttactgtacggtttta

SEQ ID NO: 20033 - DNA, 86 bp, Glycine max
  Clone ID: LIB3106-069-P1-K1-G8
cccacgcgtccgctttaaaggacattaacattaaacactgtacaaaattgaagagtttatgctgtgtatcttgttccttatgcact

SEQ ID NO: 20034 - DNA, 300 bp, Glycine max
  Clone ID: LIB3106-069-P1-K1-G9
tgtaggcgtcggaacctgtttccatgcggcttcgttgagcataccacgaaccactcggataaatacctaaatggggctaaagcgtcgccacagattacatcaaatcaaatggaataatttaacctatacttgcttacccaccgacggcgggtgcggtccaacctaatggactttacccaacattggccgcaacatagaccgaccgcaaatacgaaataagctatcccaaaccgattcgttgggtggtttctgaaaggtgaactcgtacacccttacatatcgatggtggctgatacgtac

SEQ ID NO: 20035 - DNA, 372 bp, Glycine max
  Clone ID: LIB3106-069-P1-K1-H1
cccacgcgtccggtgggaaacagttgctaccaattttgatgaatttcaggatgtttctgagaagcttttcacaagtaaaaacagaacggaggcatctgtagggaagaaggtgaagatagacatgctccctgaaatcgagaaagttcacaggagaaaggagaagttgctgaaaaaacaacacagacaagctcttcttcttgataatttcttgggtgttgatgggcttgcccctgggcgttcacttcgtgatagaaaacctgttacctacacttttgatgattacgatcgatccatcagtgaagcaattaagataaccaaacggaaaccaccatccccagaacctattccccagaaaggagccagagccaaaca

SEQ ID NO: 20036 - DNA, 375 bp, Glycine max
  Clone ID: LIB3106-069-P1-K1-H10
tgttagcgcgtcggaacctcgtagacacttactatatcggtggttgtctcggtacgtactcagagggtttaacctgtttcacagcgaggggcaccataacctatcggttgctgccccataatgctgcgatcgggaaaatttcggtgccatttaatccaactgttccgtagtatactttttccctgttagtcggtgcaacagtgaagaggtttgtattgactgtttcctttaatagccgtgtagttcgaacggtgaacggatgtgtttcgcagtggtgtaccaagtgtggtgggcgcggcggccatgtgtagtgcgattgtcatatccgttagtgtttcagtgtttgtcttccctgtccctcctttccttccctct

SEQ ID NO: 20037 - DNA, 401 bp, Glycine max
  unsure at all n locations
  Clone ID: LIB3106-069-P1-K1-H11
agcaatggttgttagcgcgtcggaacctgtttccctgagtggttgtttgggtaggcatccccccccccccccccccccccccccccggcggccccccgggccccccccccccccccccccccccccccccgccccnaaccaaaaaaactcgacccttccccgacagtaaattttaccccatccccataacgaagcctccaatccccatctaaaggcctaaactccccgttctatacaaatccatttccctataaaccatacgtaatagagctcccaacccccatttatttttttttccccccccaaagtccaattggcccccgaattgtcccccctatacagccggggaaaaagtacccccggtaaaattttaccgttttgcccaaggtccgaaactcccc

SEQ ID NO: 20038 - DNA, 366 bp, Glycine max
  unsure at all n locations
  Clone ID: LIB3106-069-P1-K1-H12
cgcgtcggaacctgtttccagtgcggctgtggttgaggcatcccccccccccccccccccnnnnnnnnagaatgaaaagtacgccagtccacctcccaccgaccaaccagttggtctccaaacagttcccaatacaaaataatcgttcttcatccctcctggaggatcccaataatccgaaataaacctccgaccaggcaaacggtcatcctcacattgtcacataacaaaagtccaccgtgatattacgcatgcatcaattccacgtaaaatatagcttgcgagacttacgccccgccaagcccccaatcccgtcccctcataagagtaagtcaggggcccgacaagcccccagatgtccggccc

SEQ ID NO: 20039 - DNA, 134 bp, Glycine max
  Clone ID: LIB3106-069-P1-K1-H2
cttaatgttacttgctttttcgtaaaaagcaagtaacattaagctggctcttgattctgcaagttatttacggactgataccagctggcgatccagctatagctataccgagacgatatttcaatgtccgaaaa

SEQ ID NO: 20040 - DNA, 232 bp, Glycine max
  Clone ID: LIB3106-069-P1-K1-H3
gccactgaccctaagaggaacgctagggatttccatgtttctgtactggcgccacttcctagtggatttgccgtgttcatggttcacttggctacaatcccaattactggtactggcattaacccagcatggagtttcggagcagctgtaatctacaacgaagacaaaatctgggatgatcagtggatattctgggttggaccaatcgttggagcagcagttgctgcatttt

SEQ ID NO: 20041 - DNA, 409 bp, Glycine max
  Clone ID: LIB3106-069-P1-K1-H4
ctcttgcgatgctgtaccggtgcggagtacccaggcgtgcgcccacgcgtccgagactcttccttttctcttctctgtctaaggggtgccctgagatcacattgaacaatggtgaaggctgtggccgttcttggcagcagtgagggtgtcactggaactattcacttcgttcaggagggaagtggtccaaccaccgtaactggatctcttgctggtcttaagcctggtctccatggtttccatgtccatgccttgggggacactaccaatggttgcctctcaactggatcacatttcaatcctaataacaaggagcatggtgcccctgaggatgagaatcgtcatgctggtgatcttgggaatgttaatgtccgtgatgatggtactgtcagcttcactattactgaca

SEQ ID NO: 20042 - DNA, 436 bp, Glycine max
  Clone ID: LIB3106-069-P1-K1-H5
tctggaattgcgtaggcacgcaaggagagttcatcccacttctcgtccctctaacattgatcctacaagagaaagagcttggcgacattttgaggaccaaagagaatatggtgatattgtgagtgctattcagtctgccgtgcctggagctgtgctagttggggactatgttcttgagaatggagacggtattggtaggttaccagacgaacgtgctgaaggcaacattggcaacgccaatggaccatggttaaccaccactatcttgtttcagatgatggatagcaccgttgaaattggtaggaaccaagagcacattcgagtgcctggacaaggcaaccgcgttcagatgaacgtcggcgctatctgtggggtgagaatttattgggtcttcatgataatgacattgaggatgatctgcgtatatttagggatt

SEQ ID NO: 20043 - DNA, 210 bp, Glycine max
  Clone ID: LIB3106-069-P1-K1-H6
tcgtccacgcgtccgttttttttttggcatcatcaaatagaacaaaaatcacaggagaaaataggaaaatgaaaacaagaaatcaaaaaaacaataaaaaaaaggacagcaactattgaggtaccaacgcttatctaaacctgcctaccacttcaactgtcttttatgctgctacttaaattcagtatacaagccttacatttacaaccc

SEQ ID NO: 20044 - DNA, 477 bp, Glycine max
  unsure at all n locations
  Clone ID: LIB3106-069-P1-K1-H7
catggcgctatgttcctcactctcacttgtctctcccatcaaactcacttccaagtccttgttatctccaacaccagtcagttggcatggcatcttgataaagaataacacctcaacaagattcttgctgaaagctggttttaatgagattgaacctgacctcagtgaagatcctagagaccaatttgccaccaatggcgttgacgctgatgattctgtgtatggaatatatgatgaccaccacacttaccatgaaggagaacagaaaggaacattttggggctcaattaaagaagagatggcagaagcagaaccccccacaggattccaggggcttatttcatggctcttcccaccagccattgctcttggggtgtacttcaatgttccgggggagtacttatacattggagcaggcatatntacaatcatattttgcattattgagatggataaacctgataaaccccatcactt

SEQ ID NO: 20045 - DNA, 372 bp, Glycine max
  Clone ID: LIB3106-069-P1-K1-H8
ggcagccatagttctaacaaccctgttgattcgaaccgctacagttccactcttaataaatcaacttaaggccacttctaaacttacgttaatgaggcctcatttggaagagataaagcaacaaatggagggactgactatggatcccgtagctgttgctaaaggtcagcagcagatgaagaaactatttaaggagtaagtggtttcttaatttgcttgtaaaagatatccttgacattattcttgtggtctcttttaatctattctttatctgctgatactcattttttatcctctcaatctgatgtaattactatttactacatttatatttagtgatataatatacgatgcattagtggagcaatcttt

SEQ ID NO: 20046 - DNA, 186 bp, Glycine max
  unsure at all n locations
  Clone ID: LIB3106-069-P1-K1-H9
tagcgcgtcggaacctgtttccctaagtggttccttggttaggtatccagatagcccccagactggattggagacagggaaggaaaggggcgtctaanacgatcagagttccgactagacgtcctacaaacgtaacgcagcagctaattatatcttctctatggcgaagataagacgaatggccaa

SEQ ID NO: 20047 - DNA, 390 bp, Glycine max
  Clone ID: LIB3106-070-P1-K1-A1
cggacgcgtgggaaaaggagcatcgagtttgtttcctactcccttctcatcgttggcaagatgagtgccatgaaattttgccgtgaatgcaataacattctgtaccctaaggaagacagagaccagaaagttcttctcttcgcttgccgcaactgcgaccatcaggaggttgctgataacttctgtgtgtataggaatgagatacatcactctgttggagagcgcactcaggtgttgcaggatgtcgctgcagatccaacgcttcctcgaaccaagtctgttcactgcagtcaatgcaatcatggtgaagctgtcttttttcaggcaactggcagaggggaagaaggaatgacactttttttcgcatgcttgaacccaaactgtggacac

SEQ ID NO: 20048 - DNA, 281 bp, Glycine max
  Clone ID: LIB3106-069-P1-K1-G5
tgatatttgaagctttgggtttttaatagatatatctagtttaatgaatggatttgtaaggtgagtatgttataagtttctccgctaggtccccttggaagccagacttttttatgcaattggcggatggtattggaactttgtaggttctgattggttcgatcgttaacctactattcgattttcttgttgtggccactaattacgtcgcctcgagttaggataacgatagtctagtatctcctctcccagagggctttttgagtccaggactgcttata

SEQ ID NO: 20049 - DNA, 458 bp, Glycine max
  Clone ID: LIB3106-070-P1-K1-A10
ctagaataaatttcatttttattttttttgttcaaggccaagaattcaatggcaggtattgcatctggaatcagcacccttgccattggctcaggtgatgctcgacggcgtccagcacaagcccaatccactcccaacactaacactaacacaaacactaacagcaacacttcttcttctacgccatcatctgaagggttcacttatttaaattctgccaagcaagatataaagggtcttaccaaccagactggatacgttaaaggcaacgctaatggggtcatcaactttgggaccctcacagcctctgcttctgtccaaaggcaatgaatcccttaacaacaaccagcaagaatgaagaacatatatacatatatatatagctgcaggcaactcaataattaactaaataacctctgctgtcgttgccttaatttatatcattttgattttatgtt

SEQ ID NO: 20050 - DNA, 289 bp, Glycine max
  Clone ID: LIB3106-069-P1-K1-E4
cccacgcgtccgcagcattgcgaattgatgtggacaagaatactaagaaatcgcttactcgtgtcgttgttactcgagctgatattgatatgaaagacataaaggcagagtaccataatctatatggggtttctttaccccagaaagttgaagaggttgctagagggagctacaaggatttcttgctaaacttgattgttagaggaggctaattgaagaaattgaaaagagaacaaaaacttggaagatcaaataaaaaaggaaaattttttcctcccagttttccttg

SEQ ID NO: 20051 - DNA, 338 bp, Glycine max
  Clone ID: LIB3106-069-P1-K1-E5
gggcgccgtacgaagaaaggtcggcggcccaaagaagaagccggtttcaaggtccgtcaaggccgttctgcaattccccgtcggaagaattggccgttatttgaagaaaggaaggtacgcccagcgtgtcggtaccggtgctcccgtttacttggccgcagttctcgagtacctagctgctgaggtgcttgagttggctgtgaatgctgcacgtgacatcaagaagaacaggattattccgagacatgtgctattggctgtgaggaacgatgaagagttggggaaattgcttgctggtgtcaccattgctcatggtggcgttcttccgaacattaacc

SEQ ID NO: 20052 - DNA, 313 bp, Glycine max
  Clone ID: LIB3106-069-P1-K1-E6
ggaaatcaaataactctttgtgggtagattatgacaaaggaaactccaaatgaagagaagaagatgaaatagcaataaggtgaagcttgccacattttgtggacttatgatgatacgtgtgagacgcctctggtgtgtgtctcgcacgtgcgtattgtgatttttctttttttagctatggccggaattgctatttcttgtttacttgattaattccttttttgagtactctagtggtataccatcacacactaccaaaagtaacgatagcccaagccctatacaaccaaaccctaacacacacccatttgat

SEQ ID NO: 20053 - DNA, 409 bp, Glycine max
  Clone ID: LIB3106-069-P1-K1-E7
cccacgcgtccgaaagaagcgaaactaaagtcagcattcgaaaaagatgagtagcatcggtacaggttacgatctatcggtcaccactttctcccctgatggccgcgttttccagatcgagtatgccgctaaagccgtcgacaacagcgggactgttattgggatcaagtgcaaagatggggttgtgttgggcgttgagaagcttattccgtcgaaaatgatgcttccgggttccaatagaagaatacactccgttcatcgtcactctgggatggctgtagcaggattagcagctgatggcagacatattgttgccagggctaagtctgaagctactaactatgacagcgtatatggcgaaccaatttctgttaaaggaacttgctgaccgtgtggctagttatgtgca

SEQ ID NO: 20054 - DNA, 465 bp, Glycine max
  Clone ID: LIB3106-069-P1-K1-E8
gccatggccacctccaacttctctattgttctctccgtctccctagccttctttttggtgctacttaccaaggcacactcgaccgataccgattctttcaccttcaacaagttcaacccagtccaaccaaacattatgctccaaaaagatgctagtatttcatcctctggggtgttacaactcaccaaagttggcagcaacggcgtgcccacctcgggatctctcggtcgtgccctttacgctgccccaatccagatttgggacagcgaaaccggcaaggtagccagctgggctacatcctttaaattcaacattttcgcacccaacaaatcaaactcagctgacgggcttgccttcttcttggcacccgtcgggtctcagccccaatccgacgatggatttcttggtcttttcaacagtcccttaaaggacaagtctctccaaaccgtggcgattgagttcgat

SEQ ID NO: 20055 - DNA, 388 bp, Glycine max
  unsure at all n locations
  Clone ID: LIB3106-069-P1-K1-E9
agcgcgtcggaacctgtttccctgagtggttgtttgggtaggnatccccccccccccccccctcccccgtagagtgcagtaacgaccacctaagaacaaaatacagtaaacccaatagattacagtttaaagccccaaatgataatacaaaataatatatctaaaggccccgctcaatacaaataacgccagtaaatccatgaatatatgagaccgtacccaggacaaccttcccaaaacatgaagggactcaagcagagaccccaccactacgtcgtactaactaaatggcaatagagataaactcggttactctaaatagtttacttctaactataatactatatgatcttactccattttcaacccccttcttccggggttccct

SEQ ID NO: 20056 - DNA, 282 bp, Glycine max
  Clone ID: LIB3106-069-P1-K1-F1
gttcgcacacctgattgatgtgtttatccattcattactgtatcttatgcttggaaatcttattaaatatatgtaagaataaaatatgatatcctgataaaaaaaaaaagcataaaaaaaacaaaaaataaaaacaaaaaaaaaaaaaataataaaaaaactacacaaaaaagaaaatagagaaaaaaataaaaagaagtacaaaaggtgtcaacattttagggtatcaatctttcattacattgctttagaaacgtataccttttgaaaagggtgcccaaa

SEQ ID NO: 20057 - DNA, 325 bp, Glycine max
  Clone ID: LIB3106-069-P1-K1-F11
agcaatggttgttagcgcgtcggaacctgtttccagtgcggctgtggttgaggcatcccccccccccccccccccccccggtgccattaatcaaaacacccacccaagcaaaaacaggtactactaattactcttatagcctacacactccaacgtaacaatccctacacccccaagctcactataccacacacgtatactaccctacccaacgggtataagtgcgcctaacagtcgaaatagcccgtcctatacttatctttacaccgtagacaccggtaagtgtcttcgcacatcctaacttgcaacttactggcgtcttata

SEQ ID NO: 20058 - DNA, 282 bp, Glycine max
  Clone ID: LIB3106-069-P1-K1-F3
tccacgcgtccggccactcgtgcgtacacgtttacgaagcaatcaaagacggcaagcacagcggagcattcaatgactcatagatagcaaaatacagtcgtcatcattcgtcctggaaaggcgaaaacgcgttaccgtcgctacatatcacgccgtgtaccaatcatcgtgtacagaacggaaggagccaaagccgttaaggcctttcgaaacatcccgggcatagaagttgataacgtcgctaggcttaaccttctgaaacttgctccaggacgacacctc

SEQ ID NO: 20059 - DNA, 289 bp, Glycine max
  Clone ID: LIB3106-069-P1-K1-F4
caaaggagtcttataccagaagcgctctactagtcaatgtaagaaaattgaacggtcaggaataaacggtgatccagaaaacacatagtgtgtctcagattatatggttatgttgagcttgtgcgttacatatacgaacaacaaattatggaacctctttgtattactacgcctggcgtgaatcgagaaatcctacaagaagttcaagatcctccaacattatgttgtataagctatgatcatatcctggttgacacatgggcaaatgatgaaaatgtgcggaaggccc

SEQ ID NO: 20060 - DNA, 313 bp, Glycine max
  Clone ID: LIB3106-069-P1-K1-F5
caaaggagtcttataccagaagcgctctacaagtcaatgaaagaaaattgtaacggggatgatataaacattgatccagaaaacacaaagtgtgtctcagattatagtgttatgttgagcttgttcgttacataaacgaacaacaaattatggaacctctttgtattactacgcctggcgtgaatcgagaaatcctacaagaagttcaagatccttcaacattttggtgtagaagctattatcatatccttgttgacacatgggcaaatgatgaaaatgtgcggaaggcccttcatgtaagagagggaactaa

SEQ ID NO: 20061 - DNA, 463 bp, Glycine max
  unsure at all n locations
  Clone ID: LIB3106-069-P1-K1-F6
cccacgcgtccgaattcaaccatggttgcgagactcgcggtaacagcgctggtgctgatagctttggcaacaatttctctccaatcttcagcttcagcttcatcagtgggtaaattcgtcgacgaaaccatcacttcccacaagatcgtcattttttccaagacctattgcccgtactgtagaagagcaaaagctgttttcaaagagttgaaccaagttccacatgttgttgagctcgacgagagagaggatggttcaaagattcaggatatcatggttaatattgttgggaggcgtactgtgccacaagttttcatcaatggaaaacaccttggaggctcagatgatactgttgaagcttacgagagcgggcacctgcataaacttctaggaatcgagaaaaaggatcatgatgatcatgatgatctctgaataaggttgtaattanggtaaactatgtcgc

SEQ ID NO: 20062 - DNA, 324 bp, Glycine max
  unsure at all n locations
  Clone ID: LIB3106-069-P1-K1-F8
cccacgcgtccgcccacgcgttcggacgaagttgcatcttatctgcaacactccgtatccacttcgctggtaataagagaagagaagagagagagagagagagagagggcgtggagaatgttaagtctctcagttgcttctccttcttcttcaaccatttcctttctcccaaagccattcaatggcattcagctccgtcgctctgccacatgctccattccacccacgaaatgcagcgcttcggtgccagtggtgatgatgtctaaaaggacggaggaatngaaggaaattagacaaatgaccaccgaacaaattaacgaagag

SEQ ID NO: 20063 - DNA, 313 bp, Glycine max
  Clone ID: LIB3106-069-P1-K1-F9
gtgtacgcgtcggaaccttttcccatagtgggtgtttgtataggtatcccgatccgctccgaggatagtgactcctacggtacgaggggagagataccgaagaaataacattaaaccgcccagagaagaataggcttcgacgtcgaattagggatgaacctccacgcaagttgtcacggactaaaagtgtccaccaaagatcactccgctcttcataccggaattaacttcgacaatgaaaatcctatccccgtcggacctatcgtcctattaactctcatacccagtcctgctaacatctgcgacactttcc

SEQ ID NO: 20064 - DNA, 103 bp, Glycine max
  Clone ID: LIB3106-069-P1-K1-G1
aaaaaaaaaaaaaagaaaaaaaaaaaaaaaaaaaaaaaaaaaaaaaaaaaaaaaaaaaaaaggggaagaaagggaaaaaaaaagggaaagaaggaaaagaaaa

SEQ ID NO: 20065 - DNA, 386 bp, Glycine max
  Clone ID: LIB3106-069-P1-K1-G12
cgtcggaacctgtttccctgagtggttgtttgggtaggcccctggggatttaataaaaagaaaacaaaagggaaatataagagaaataaatagaaagcaatacgagactctctccatcagttccgccttcagcctccgtcccctattgcggtgaagtagttgcgctccgtaatgttgcggccggagactcccatttccgttctcttcatgcggcctaaggtggcaatgctttagtgaatcgtcgtaatggcactagaatgtctaatagctaggtttaaattttcgcggattgctagggtgcccgttgccgtactaaaaacgtcactggaggagctctccctctcctcaataattctaataacgtctagctcccgttcgtcaagcgc

SEQ ID NO: 20066 - DNA, 357 bp, Glycine max
  Clone ID: LIB3106-069-P1-K1-G3
cccacgcgtccgattctcccctttcgtcaccatgccaccgacactctcactctcactagtgttggtggtgctgtttttcgccgccgtggacgcgcattttccggcgaccggcgagcttccaacgttccgcgaggcgccggcattccgcaacggaagagaatgccgcaaccgcccgcgaagcgactccgtgatccacatcgcgatgacgcttgacgcgacctaccttcgaggctccgtcgccggagtgttctccgtgctgcagcacgcgtcgtgtccggagaacgtcgtgttccacttcatagccaccacgcaccgtcggacggagctccgtcgcatcatcaccgcgacgttcccgta

SEQ ID NO: 20067 - DNA, 485 bp, Glycine max
  unsure at all n locations
  Clone ID: LIB3106-069-P1-K1-G4
accaaatcatattaagccatggccacctccaacttctcaattgttctctctctctccctagccttctttctagtgctactcaccaaggcaaactcaaccaacaccgtttctttcaccgtcagcaagttttccccacgccaacaaaaccttatcttccaaggagatgctgctatctcaccctccggggtgttacgactcaccaaggttgacagcatcgacgtgccaacgacgggatccctaggacgtgccctttatgctaccccaatccagatttgggacagtgaaacaggcaaggtagctagctgggctacatncgttaaattcaaagttttctcgcccaacaagacggccgacgggcttgccttcttcttggcgcccgtcgggtccaagccccaatccaaaggagggttccttgggtctttcaatagtgactcaaagaacatgtcagtccaaaccgttgcngttgagttcgatacttattataa

SEQ ID NO: 20068 - DNA, 474 bp, Glycine max
  unsure at all n locations
  Clone ID: LIB3106-069-P1-K1-E3
gcgcgttgtggaggacagacagaatgcaccaagtttagatctagcctgtgataccaatcgcatatatagagcaagctctataacactgcatagaacattgtacggatccgtgtccagaacagaatatactatataacatcgttgtggtgattgaatcatgtcgcggagaccggtgaatccgtctcggcgattcggagacagtggaggtggattgctttcatcttcgaaatcaaagtcgtcaccggttgtgtcggttgggctcataattgtgggatgcctgtttctcattgcgtatgtgtacaagggctcaggcgtttttggtagccgtttggagtctgtgagcagggttgaaggtgattatttgtgtgctggagaggtcctacgagcaattcccattttgcagaaagcatatggtgatagcttacataaagttttgcatgttggtcctgatactngctatgtggtctctaaatt

SEQ ID NO: 20069 - DNA, 210 bp, Glycine max
  Clone ID: LIB3106-069-P1-K1-C7
aaaaaaaaaaaaaaaaaaaaaaaaaaaaaaaaaaaaaaaaaaaaaaaaaaaaaaaaaaaaaggaaaaaaaaggaaaaaaaaaaaaaaaaaaaaaaaaaaaaaaaaaaaaaaaaaaaaaaaaaaaaaaaaaaaaaaaaagaaaaaaaaaaaaaaaaaaaaaaaaaaaaaaaaaagaaaaaaaaaaaatgaagagaaagaaaaaaaaagaaa

SEQ ID NO: 20070 - DNA, 460 bp, Glycine max
  unsure at all n locations
  Clone ID: LIB3106-069-P1-K1-C8
gtgatcatgggcttgatgtaatggatgtgctaaagaagaatgcctctttagctttgccagtcatattaactcgcttgaagcagaaacaggatgagtgggcaaggtgtcgtgctgattttaataaagtttgggctgaaatatatgcaaagaattatcacaaatcacttgatcaccgtagtttctactttaagcagcaggatacaaaaagcttgagcactaaagtcttactggcagaaatcaaagaaattagtgagaagaaacgaaaagaagatgatgttcttcttgcaattgctgctggatacagacagccttttattcctcacttggaatttgtgtattctgatccagagattcatgaagatctgtatcaactcataaaatattcatgtggagaaatgtgtacaactgaacagntggataaagctatgaagatttggacaacatttttagaacccatgct

SEQ ID NO: 20071 - DNA, 387 bp, Glycine max
  Clone ID: LIB3106-069-P1-K1-C9
gtaggcgtcggaaccttttccactagtgttcctttgatacatatcccgcaaaccaattaagaaataattaaatcagggtaactggaggccatcccgccggcaagacgacatcctaatacttcacatacaccggaacgactctctccgaaaaacataaatatacgaaattcgcctcaaatacactcgtcgtacgtatctctatagcagtaattcccatatacggactacacaatactacacgtagataccgttcccaccatgataccaaatgaacgtaaacaattaccttacctcctagaaatacaatcacttcgcacataaatctcgcaaccatcaaaaaaatcttatcaggcgtccatctaatctattctccaagaatcttgaact

SEQ ID NO: 20072 - DNA, 220 bp, Glycine max
  Clone ID: LIB3106-069-P1-K1-D1
atcacacgtccgcagaaactgatgcaattttacaagcaacgagagcaggcgaataattgagctatacaccatgtgaagctagagaacgtgaaatatctaaggcagtgcatccagatgactatgacagtcataactagtacgcatctgcaatgcaatcaagcaactacattgacgaatcttcttacataactctatagatccttaaaattcttccactaat

SEQ ID NO: 20073 - DNA, 290 bp, Glycine max
  Clone ID: LIB3106-069-P1-K1-D10
tgtagcgcgtcggaacctcttccctcatagatatcttgtatgcctccaaaacaccgagcgctgttgatccgaaattggccctagcgagattaacgagaacaacttctggaaggagcaagaatttaattactccctttattcatacagaatccgcaattacccgacaacttcaacgtagatatcaaattagccaatactataactactaagcaagtactaaagtccccgattaaatttactcctttaaaagccccaatcaaattctaaagcaaccatctatctgatctccg

SEQ ID NO: 20074 - DNA, 397 bp, Glycine max
  unsure at all n locations
  Clone ID: LIB3106-069-P1-K1-D11
atggtgtangcgtcggaacctgtttccatgcggctgtcgttgatgcatctcggggtcgccctcgtcgtaatccttatctcgggcctaccggactgagtccctgcgcctcatgtagtgacggtgtgcttcctaagagatcgtacgaaacgctcggcgactcctgtggccgcactcgtcccagcggtgcgcgggttcgtttcgcaccggaaacctaataagggccctgtcgtacttatttgcaagattctcgcccgcttcttccgtgtacgcgaccgtttattcttcgcgctctcttctgagtccgtcttcgggtccgtgaaactctctcgccatagaccgcggaggcgacgacttagagtctaaataggaaacggagaattatcccgcggcttccccc

SEQ ID NO: 20075 - DNA, 360 bp, Glycine max
  Clone ID: LIB3106-069-P1-K1-D2
cccacgcgtccgcaaagcctctgatggaatcagggaatattgctgagctagctgatccaagattggaaggcaagtatgatggagagcaactctatagggtagtgctaacggcttcatactgtgtgagacaaactgccacgtggcgtcccccaatgagtgaggtattagagctgctaactagtggccaagagagtgaggttggaaagagctggaggatcccaaagttcacttctgatgaattggatgattactccatggttttcggatatgatgtaccctcagacgtatctttggaggattatctgtgagaatgaaatgtatggttcaggttcaaattttcttttcatactcaatatctaa

SEQ ID NO: 20076 - DNA, 475 bp, Glycine max
  Clone ID: LIB3106-069-P1-K1-D3
accacgcgtccgcccactcgtccgtccactcgtccgctcatcaatcgcacggatgacactgcgttgcttgctgatgtccctttctgttctctacactcttggtcttgcgagagaaagccatgccatacacgaacatttttggcatgctgattggccaaacactcccattccaagttcattgcgagatcttctaaagcctggccctgcaagtgttgaaatcgatgatcaccctatgcaaattgaagaaacacagtacccgaaaaccttcttctataaagaagaccttcatccagtcaaaacaatgaaagtacaattcagcaagcctccctttcaacaaccatggcgtgttggtacatggttaaaggaaattaaagacactactaaagaaggatatagatctgaagagctatgcatcaagaaagatgccattgagggagaatagacgtcttgtgcaaaatccttgggaacagttatt

SEQ ID NO: 20077 - DNA, 345 bp, Glycine max
  Clone ID: LIB3106-069-P1-K1-D4
atgagttgaaagttggtggtggcgcatcgtcaaggccaggagatttggttgtgattgacatcacgggaaaaattgaaagcagtggagaagtgtttgtgaacacatttgagggggacaagaaaccattggctctagtgatggggtcaaggccatatagtaaaggagtgtgtgaaggtatagaatatgtacttaaaactatgaaggctggaggcaagaggaaggtaatagtccttcctcaattggggtttgtagagaatggtgctgactttgactcatgcactggtgtgcaaattcctgcacttgctacacttgaatacattctagaggttggaaaagtcttccatt

SEQ ID NO: 20078 - DNA, 455 bp, Glycine max
  Clone ID: LIB3106-069-P1-K1-D6
atatttcctgagagacctgatcagcctgaatgtcaattctacatgaagactggagattgcaagtttggtgcagtctgtcgtttccatcatccacatgaaaggatgattcctgctcctgactgtgttttgagtcctataggtcttcctttacgtcctggagagcccctgtgtgtgttctattcacgttatggcatatgcaaatttggtccaagttgcaagtttgatcacccaatgggagtcttcacctataacatgtctgcatcacctttagctgatgccccaggacggcgtattgtaaggtctttaataaggacctctgcattaaatttattatcaaaaggacttgttgagtcaagcttaaaaaattcaaggaggctttcattatcagaaactcgacagataccttctggtgatgataacattgatgaagagggataatgatgtctcttggaaat

SEQ ID NO: 20079 - DNA, 368 bp, Glycine max
  unsure at all n locations
  Clone ID: LIB3106-069-P1-K1-D7
cccacgcgtccgcccacgcgtccggaaagcaagctcatcctagagttttaaaaatggcagcagcctcctccatggctctctcttccccatccttggctggcaaggccgtgaagctgggcccatcagcccccgaagtcgggagggtcagcatgaggaagaccgtcaccaagcaggcctcctccggaagcccatggtacggcccagaccgcgtcaagtacttgggcccattctctggcgagcccccgtcctacctcactggcgagttcccaggtgactacggctgggacactgctgggctntcggccgacccagataccttcgccagaaaccgtgagctcgaaatgatccactccaggtgggccatgctc

SEQ ID NO: 20080 - DNA, 443 bp, Glycine max
  Clone ID: LIB3106-069-P1-K1-D8
ggttatggaggcctcggcatccatttgcaacaacagacccttcatcttctcttcctctcgtgccataacacaaaaatcttgcactctctcatcacctatgcttgtcaaatccatggccactcccaagcctcttccctcggtctctagaactgtaggctctagaaagaactcaactgtgttcccacttggggaacaacctaggagcagtcccgccacagccacgcctaccataaaacttctgacaaggatggagcagctgaagctgctgagcaaagcagagaaagcagggttgctatctgcagcagagaagtttgcgttctccctctcaacaatagagaggctagtactcctgtcaaaagcagaagagttgagtgtgctatctgctgccactgatcctggaactccagggacactcttaaccctcagcttaggggttgtgatcc

SEQ ID NO: 20081 - DNA, 300 bp, Glycine max
  Clone ID: LIB3106-069-P1-K1-D9
cgtcggaacctgtttcccatagtgcttccattgatagatccccccgaaacccactcactaatctcatttcagggactcccagaagcgcagctattctcttccacatattacacaaacaagagttcttagcactgaacacacttttaaccaaatatgagaccaccacgataagcctccgcgcattcaaaatccaacgcccgataaattcgcaataccatcactaaacctcctactatctacaccggaaaatccatctcgaaagcattcgtacaaagatctcatttccgaactaacactctc

SEQ ID NO: 20082 - DNA, 374 bp, Glycine max
  unsure at all n locations
  Clone ID: LIB3106-069-P1-K1-E1
cccacgcgtccggggtttttcttcttctcttctcactgcatcgcttcaggttcttctgaagagatgtctcgcgtgtatgttggtaacttggattcacgagtcactgagagagatctcgaagacgaattccgcgttttcggagttattcggagtgtttgggttgcacgtagaccacctggttatgcttttattgactttgatgaccgcagagacgcacaggatgctatccgtgaattggatggcaagaatggttggagggttgagctttctcacaactctagaggtggaggtggtggtcgtggtggtcgctctggtgagtctgatttgaaatgttacgagtgtggtgaacctggtcatttngctcgtgaatgccg

SEQ ID NO: 20083 - DNA, 378 bp, Glycine max
  Clone ID: LIB3106-069-P1-K1-E10
ggttgttagcgcgtcggaacctgtttccctgagtggttgtttgggtaggcatactgcttaaacccgcaaccacacccaccgtagcactcaatgtaattaaagagaacgctacttccatatggttaaaacttcttaaagtatatactcctcaccttaaacttcggagaacccaaagcagccgaaagagccctagtggccaacgcattctggttgtgattatgtcaagggtgaacctcgtagacacttactatatcggtggttgtctgagtacgtactcagagggtttaacctgtttcacagcgagctgcaccataacctatcggttgctgccccataatgctgcgatcgggaaaatttcggtgccatttaatccaactg

SEQ ID NO: 20084 - DNA, 408 bp, Glycine max
  Clone ID: LIB3106-069-P1-K1-E2
cccacgcgtccgcccacgcgtccggagagaggtctcgtagagaatcattagaaagcaagaaagaatatgggagtggagaagcagttgtagaggcctggcaccggtcctaagccatttcccggtcagaacgtcaccgttcactgcactggtttcgggaagaacggttacctttctcagaaattctggagcaccaaggatcctggacagtaccctttcactttcaaaatcggctcaaggttctgttatcaaatgatgggatgaaggtgtgcttggcatgcaaattggtgaacttgctcgtcttcggtgctctccggattatgcttatggagctggtggctctacttcttgcaggatacagcccaactgtgtcttggcatttgcaatcgaagtctcgagtgcacaatgaaa

SEQ ID NO: 20085 - DNA, 448 bp, Glycine max
  Clone ID: LIB3106-069-P1-K1-C6
aatcacacaccaaacttctgaaaataatggaaatttcaaagcatactaatcggtcttatgaagattttgatccgctgtttatgtggcgtagagaagagggtcgtgacacccttgaacttcaccttccaggttttaggagagaccaaataagaattcagataaaccatgttggtttattggtaataagcggggagcgtcattttgaaggaaacagatggaaacgtttcaagaaagaattcgaaatcccatcatattgcaatgacgatgcaatccatggcaacatgatgcagagcattctttcggtggtgatgccaaagaaaagtcctcaaattagccaagaggagcaagaacacaagaaagagagaagggcaaataaaaaagaagacaccgaagaagcctcaaccaaagagggaatagctgaagaagatataggtcatgcataagagta

SEQ ID NO: 20086 - DNA, 454 bp, Glycine max
  unsure at all n locations
  Clone ID: LIB3106-069-P1-K1-A6
gaaacagtgtgatgaaaatgaaggtccttgttttcttcgttgctacaattttggtagcatggcaatgccatgcgtacgatatgttccctctgcgaatgaacactggctatggtgcccgtactccggaggtgaaatgcgcaagttggaggcttgctgtggaagcacacaacatctttggctttgagaccattcctgaagagtgcgttgaagcaacaaaggaatacattcatggcgaacaatatagatcagactccaaaacagttaaccaacaagcttacttttatgccagagacctcgaagtccatcccaaggacacatttgtgttcagtatagatggcaccgtactctctaatattccatactacaaaaaacatggatatggggtggagaaatttaactcgacctngtatgatgaatgggttaacaagggcaatgcaccggcactgcccgagac

SEQ ID NO: 20087 - DNA, 201 bp, Glycine max
  Clone ID: LIB3106-069-P1-K1-A7
ttaccgttcgactccacgcgtccggtttaatgtattaaagaacttaatagacatatggacacacttgccataacgatgacattgggcgctactagatcggcattccttacgaagatctactccgccttctataataatgtctgtgatgcttgacagtatctatgaactattcaatactagtagctgctccttcttgactta

SEQ ID NO: 20088 - DNA, 169 bp, Glycine max
  Clone ID: LIB3106-069-P1-K1-B1
atcacacattctcatgctgattataatcactaacctctaacctatgcgacgaggaattcggcaatcatcaatacacatactatggtatctgatcacaatctcaagttccatcaaatgatgcaaacgtgaactaacaagacatactacatatcacatattggaaatgaat

SEQ ID NO: 20089 - DNA, 304 bp, Glycine max
  unsure at all n locations
  Clone ID: LIB3106-069-P1-K1-B10
cgtcggaaccttttccatgcggcttccgtgagcatccccctgggaactgacgaagaagcaccgacgggtaatagtgtcacggctcgacgcctcagcgaactcatcagttgacgccgaacctccagagtacgcgatcatcacggctcgacagtgaactccccacgtgatttcatagctcgacgcacgaccggccctgcgaagaaacaaaaaagccgaacctngctaaaaaaaaaaattaacgacccaaaaggccttcgtttgggtggttgtctgaaagggtgaacctcgtagacacttactatat

SEQ ID NO: 20090 - DNA, 348 bp, Glycine max
  unsure at all n locations
  Clone ID: LIB3106-069-P1-K1-B11
gttgttagcgcgtcggaacctgtttccctgagtggttgtttgggtaggcatcacacacttcttcatatctacgcacaacacacggctcaacccgagaccgctccaagatgcggcttaattaaactactcctctcctcctcaccgccgcccccgccgccgccacactaggcgggaccccacaagaaacgggctcctatcgacaagagatacgaattgctccgacgtccctaatccaggatctattatccgggtgtaacgggccgactaaaatgccaacaacctgtaaatttgagcccctccttaaggtaccctcttcatctatcatgcanganaggaaacggacgagtt

SEQ ID NO: 20091 - DNA, 468 bp, Glycine max
  Clone ID: LIB3106-069-P1-K1-B12
atggttgttagcgcgtcggaacctgtttccagtgcggctgtggttgaggcatgtcgggactaccaaataaaaactccttctatcaatattgcccggaataaatcatataagaaaccgccctataatctagaaaacacgaataacttctgtgcaatcaccgtagcacctccggtagtaaccgcccctatcgtacaccccctataccccgcggcggagggcaagaaagaaactacaactctacctaaacgtaaatagaaactagaacgtccaataaataccgtccgttaagttccgcgccgaccgttgacgtgacaacggaaaacgcaaacgctacggccctaaagaagaaactgtgaacttaatggccctcttaccaggactccgaccattcaaccaacccttcacgcaaatacaaaccccaccgcgacgtgtaacacccaccccaacaaaaacaccaaccccggttcc

SEQ ID NO: 20092 - DNA, 128 bp, Glycine max
  Clone ID: LIB3106-069-P1-K1-B2
ttcatagtttaaaccaaatcaatttgccaaatgtactaaactacaatatagttttttttttaacccaatgatgatggtgataataaggaatgtatgtaaacaatgttcagtgtcatatatagttcttt

SEQ ID NO: 20093 - DNA, 432 bp, Glycine max
  Clone ID: LIB3106-069-P1-K1-B3
cccacgcgtccgctgtaacccagagctccttcgcctcatcgatagtttcaagtctcgttttgacaatggtgagggttagtgtgttgaatgatgctctgaagagcatgtacaacgccgagaagcgcgggaagcgccaggtcatgattaggccatcctccaaggtcatcataaaattcctattggtcatgcagaagcacgggtacattggtgagttcgagtatgttgatgaccacagggctgggaaaatcgtggttgaattgaatgggcggctgaataagtgtggggttattagccctcgctttgatgttggtgtcaaagagattgaaggttggactgcaagactactaccctcaagacagtttgggtatattgtcttgacaacctctgctggtatcatggatcatgaagaggctaggaaaaagaatgttggtg

SEQ ID NO: 20094 - DNA, 420 bp, Glycine max
  Clone ID: LIB3106-069-P1-K1-B5
ctgaaaggcaagagtgagagagaaatggagaatgcggaggagatgatgcagcaaaacgacgaggttttgtcggttgaacttccagctccttccggttggaataaactgtttttccctaagaaactgggaacaccaagaaaaagtgagattgtattcattgctccaactggagaggagatcagtaccaaaaaacaattggagcagtacctaaaggcacatcctggcaatcctgtcatttcagagtttgactggggaactggtgagacccctaggcgatcagcaaggatcagtgagaaggtcaagtcaactccaccagcagatagtgatactccaaagaaacgagctcggaaatcatcaggatcaaagaaggattacaaagaaactgaatctgcatcagaggaaggcaaggcaaagtctgat

SEQ ID NO: 20095 - DNA, 476 bp, Glycine max
  unsure at all n locations
  Clone ID: LIB3106-069-P1-K1-B6
cttgagcaaagattttgataacatagtggagcttcaactaggtgctccgtggcccctaccaccccttgaagcgactgccacattagctcacaaatttgaactcataggatcttcaaagataaagatagtatttgagaaaaccactgtgaagacagctgggaatttgtcacagttgccaccattggaggtgcctcggattcccgatgcattgaggcctccatctaatacgggaagcggtgaatttgaagttacatatcttgactcggatactcgcatcacaagaggagacagaggcgagctaagggtctttgtgattgcttgagttcctggtgaatgcaactatgcactatgcattttctctggtggacttaaaaaaaaaaaggtttcaacaccttgtgccatcattttgtttagtnttttcctcctgatggtatttgttctaaggttctcaataatgtatacatgatggaattaaa

SEQ ID NO: 20096 - DNA, 425 bp, Glycine max
  Clone ID: LIB3106-069-P1-K1-B8
agataacctatccatagcagtcatagaaattcagagtaccttgttcgccctgtgtctactgggtgccctcacctcttacctaccttcagacaccggtggagatgtggtctacactgatggtaatcctgttgaaaatggaggcacatactttgcgttgccaactataatattaaacggaggtggaatagaatatgccacatttggaaatgtaacttgccctgtcaatgttgcacaatcttgtgatcagttctgcaaggtctttccgataaccatttcatccgcagaccgcatccgtgacatcagcgaatgccttaattcgaacattggggtcactttcgcatacacatgatgcctcgcttctgagtggaccattgtgaaggatcaaccataatgactcgctgttaaactgactggggtttaaaata

SEQ ID NO: 20097 - DNA, 269 bp, Glycine max
  unsure at all n locations
  Clone ID: LIB3106-069-P1-K1-B9
tgtaggcgtcggaacctgttccatgcggtntcgttgagcatcccccatcttacgaagtaggggattaaatacggattccccgatatcagatactaagatgaccctcccagtcctaccatacgaagtcgcgcgtcctcggtccgtgacaaatccgctcgcgaaccagggtctacatagatagacacagagaaagatcctctacatcacaccgatagtcccctcaccgccatcatcgagatggcataactccgaaaaacaaacgctctcgg

SEQ ID NO: 20098 - DNA, 456 bp, Glycine max
  Clone ID: LIB3106-069-P1-K1-C1
cccacgcgtccggacgcagaaggttcatccaatctccgaatcctttaatcgcattgcaaccatgtcgaggagaaaggtcagagagccaaaggaggaaaacgtgactcttggcccagctgttagagatggcgaacatgtctttggcgtcgctcgcatatttgcctcctttaatgataccttcattcatgtcactgatctgtctgggagggaaacgcttgtccgcatcactggtggaatgaaggttaaggctgacagagatgaatcatctccttatgctgctatgcttgcagctcaagatgttgctgccagatgcaaggaacttggcattactgctcttcatatcaagctccgtgccacgggtgggaacatgacaaaaactccgggtcctggtgctcaatcagctcttcgtgcccttgctcgttcaggaatgaaaattggtcgtatagaggatgtgac

SEQ ID NO: 20099 - DNA, 323 bp, Glycine max
  Clone ID: LIB3106-069-P1-K1-C10
agcgcgtcggaacctgtttccctgagtggtgcttgggtaggcatccgaacgaacgattcggactaaataccataaagtgtgctgggaggttcggtcacagatttacatcaaatgaaatggaagtaatttaacctatagctggcttacccaccgacggcgggatgcggtccaacctaattggtactttacccaacattggcccggaactatagacccgaccggaaatacgagactaagctatcccagatccggatcctggttgtgattatttccaaggtgaacctcgtagacacctactatatcggtggttggctgagtacgta

SEQ ID NO: 20100 - DNA, 289 bp, Glycine max
  Clone ID: LIB3106-069-P1-K1-C2
gcaaattccaattcccaattcccaattcccaattcgaaacccttattcctttcaaagaaccaaattgagtgatcgtgatggcaccaaaggcagagaagaagccagcggagaagaagcccgcggaggagaagaagtccacggtgggagacaaggctccggcggagaagaagccaaaggccggaaagaagcttccgaaggagggaggcgccggcggagaagggaagaagaagaagagaaacaagaagagcgtggagacatacaagatctacatcttcaaggttctgaagca

SEQ ID NO: 20101 - DNA, 84 bp, Glycine max
  Clone ID: LIB3106-069-P1-K1-C3
aaaaaaacaaaaaacaaatatataaaaagattaaaaacaaagcatacaaatggatcttatggagatatcaaaccgatgtatatg

SEQ ID NO: 20102 - DNA, 363 bp, Glycine max
  Clone ID: LIB3106-069-P1-K1-C4
ttttgttgttgtggtgtttcatttgtgaaactaacaacaacacaaggccatcatcatggcagctgcttgcccaatggcaagccaactcaagtccaccttcactaggactcttgtagctcccaagggcctctctgcctcttcaccacttcacctcgtgccttctagaaggcaatttagcttcactgttaaggccatccaatcagagaagccaacctatcaagtgattcagccaatcaacggtgacccattcattggaagcctggaaaccccagttacatccagccctttgatcgcatggtacttgtccaacctgcccgcatacggaaccgcattgagcccactactaaaaggaatcaaggtggc

SEQ ID NO: 20103 - DNA, 397 bp, Glycine max
  Clone ID: LIB3106-069-P1-K1-C5
gatttctcagttctcacactcattccgtgctctaaatctcaaattctagggttagggttcccaatttctccgccaatcagaagatgagttccaccggtggttctaccaagggcggaaggggcaagcccaaagcctccaaatccgtttcaagatcgcagaaagctggtctccaattccccgttggaagaatcgctcgattccttaaggctgggaaatacgctgagcgtgttggtgctggtgctcctgtgtacctctctgcagtgctcgagtatctcgctgctgaggttttggaattggctgggaatgctgctagggataacaagaagaatcgtattgttcctaggcacattcagcttgctgtgaggaacgatgaggagctgagcaagcttttgggatc

SEQ ID NO: 20104 - DNA, 426 bp, Glycine max
  Clone ID: LIB3106-069-P1-K1-A5
acaaaatccaaattcgcgtgtcacagtggcgctgggtgtaagaatgggaaatcgacgcttgactcaggtcgcaaccagcgaagatgaggacgaagcaccgacggctactcctcctcccaagcagcaatcgtcggtcagtgcccccgaagagaaccgttcgaagcagcagcagcgcaagaggaagagaatgaagcttcaagaagaagaggaagaggaagaggagaaagaggaagagaagaagaagaagaagagaaagatcaaagacaagcaagaagagagatcgaacgaagaagaggaaccgccgcatgaagacgcaaagcccattggcgaaccggttaggttatccggaaagggaaggggccgcaaaaagcattacgaatccttcgagtacgacggaaaccaatacatgctggaggaccctatact

SEQ ID NO: 20105 - DNA, 274 bp, Glycine max
  Clone ID: LIB3106-068-P1-K1-G7
cccacgcgtccgctccgccacttctgtttctattgaatcaacaatcatgtcggacgaggagcaccatttcgagtccaaggccgacgccggagcctccaaaacctaccctcagcaagccggtaccatccgcaagaacggctacatcgtcatcaaaggccgcccctgcaaggttgtggaagtttcgacttccaaaactggaaagcacggtcacgctaagtgtcactttgttggaattgatattttcactgccaagaaacttggggatattgtgccc

SEQ ID NO: 20106 - DNA, 382 bp, Glycine max
  Clone ID: LIB3106-068-P1-K1-G9
ctttatccgatactctaccgctttcattttaatctcatccttctccgtttccttcaaaacccaaacttgaacttcttgtttcttgctcgtggaagcaaatgacaaccacgccctgtgtaactggtgccttgtcaaacgcggtcggattccgtgactggaaaaagcatgtccctttatcagcttctctctgtaaactaagcttcaattcaaatatagttgacatgaagatattatctcgatgtggttgtcagaaagttggaaatgaccaaagatgtttccgattatatgccctatttggaggaaaaaaggacaatagtgggaaaagtgatgatgcttcttctaaggcaagaattctagggaacatgcaaaatctttatgagac

SEQ ID NO: 20107 - DNA, 383 bp, Glycine max
  Clone ID: LIB3106-068-P1-K1-H1
ctgtgagcgagactcggtagtaatagtatagtctacaaggtttcgtattctactacttgaaacctaactcttccttcttcttctacactactcctatggctcccgatgcttccgacgcacttgcagtaaggcagaaagttcaattatttctgaacgcggctcgtactggttcaattgatctcttaaagaaattggcgttgcagctggacgagggcaaggatttggcgaaatcggtggaagcaataaaggacgccaacaagagaggagcactgcattttgccgcgcgagaaggccaaacctctgtttgcgagtacctcttaaccgatttgaagctctctgtcgattctcaagatgatgatggcgagactgcactcattcatgct

SEQ ID NO: 20108 - DNA, 357 bp, Glycine max
  Clone ID: LIB3106-068-P1-K1-H10
aacaaatcaaagccatggccaccttcaacttctctattgttctctccgtctccctagcgcttctttttggtgctacttaccaaggcacactcgaccgataccgtttctttcaccttcaacaagttcaacccagtccaaccaaacattatgctccaaaaagatgctagtatttcatcctctggggtgttacaactcaccaaagttggcagcaacggcgtgcccacctcgggatctctcggtcgtgccctttacgctgccccaatccagatttgggacagcgaaaccggcaaggtagccagctgggctacatcctttaaaatcaacattttcgcacccaacaaatcaaactcagctgac

SEQ ID NO: 20109 - DNA, 349 bp, Glycine max
  Clone ID: LIB3106-068-P1-K1-H12
atcgcgtttgggagaagaagagcaaattcgctgtgaaaatgagcggaacggtgaagggggttagcgatgtagcattcaaggtgggaaggaacatcgattgggatggaatggcgaagcttctggtctccgatgaggctcgcagggagttctccaatctccgtcgcgctttcgacgaggttaacttccaacttcaaaccaagtttagccaggaacctgagcccattgattgggattactatagaaagggaattggcactcggttggtggatatgtacaaggagcatttatagggcattgggatccccaagtttggtgatacaataacttcttaatatatgccttaaattga

SEQ ID NO: 20110 - DNA, 314 bp, Glycine max
  Clone ID: LIB3106-068-P1-K1-H2
gcaaagaagaagaagaatggaggacgccgggaagagccacaaggcgaacgggaagctgtcgccggagactcggaaggatcggaagtcggcgacggggctgagcggatcgccgaagaagggaggccacggcgggaagttcacgtggatcggccacggctacgagcaagttgagatgccgcacggtgctatggacgccaaggacccgaacttcgaggatccggtggagatcgccaccgtgtgatcgcggtggtttccggtggccaggtctgtaaatagtagtaattggcgaaacgtgttttttcgtgttcaataat

SEQ ID NO: 20111 - DNA, 102 bp, Glycine max
  unsure at all n locations
  Clone ID: LIB3106-068-P1-K1-H3
cccacgcgtccgnaaaaaaaaaaaaatttttttaaaaaaaaaaaatttaaaaaaaaagggggggaaataacgggcgcgtgggggctattttctagatcgcga

SEQ ID NO: 20112 - DNA, 357 bp, Glycine max
  unsure at all n locations
  Clone ID: LIB3106-068-P1-K1-H4
gtcgtcaaagacaccgatttaggggtttaaaaatatcgattaacctctgatatttctgttagctgcagtctgcagtgagaatcggaaaatctccgaacccgctacttcctatcctttcaaaagagtgtgactgtaatagtgagctaaacaacatcggcagctagatcgtcgaagaaaacgaaaaagaaaagctttgaaaatggctcangagtcactctcagaaacccccgatatctcgcccccttcgtctactgcacaatcgcagccagatccatctctttcaaggaacgtttcttttagccggctcaacgcacaagcaccagaatttgtgcccactcgcgcctncccacgggccga

SEQ ID NO: 20113 - DNA, 298 bp, Glycine max
  Clone ID: LIB3106-068-P1-K1-H5
tttatatcacaatgcacgagtgtgatgaagggggatatctcctgtacaatgagtcaaaaaagctgcgatatggctactttcgaacactctaaaagattgaaactggtattatgagctaaacaccatccgcggctggaccggcgatgtattcgtcaaagaaaagctttgaaaatggctcaggagtcactctcagaaacccccgatatctcgccccctttgtctactgcacaatcgcagccagatccacctgttcaaggaacgttgctttagtccgtttaatcacaggcaccagaatttg

SEQ ID NO: 20114 - DNA, 340 bp, Glycine max
  Clone ID: LIB3106-068-P1-K1-H6
ttcgcggttctattgagagcttattcgagcgtctctatgcaacttcacagggcggaaaggtccatcacctgccacaaccttggacttggagcatcataaaacaacaccatgtttgctttcttacatcgaagaaggacgtgcggttaataggagacaacttattcttcacacgccagtagcagtagctgcatttgcagtcccaaatgcattggcactcaatgatgtgtctgacgatgttcgtgtctacactgacgatgagaacaagttcaagattgagattccccaagagtggcatgtgggaacaggagactgagaatctagtgggtttaaatccataact

SEQ ID NO: 20115 - DNA, 347 bp, Glycine max
  Clone ID: LIB3106-068-P1-K1-H7
ggtgaaatggcaatgtgcacaaattttttgcagggtcaagcctctgaatgggcattggtaagacgtcattcatctgaagatttatttggtgtacaaatctgtggggcatatcctgatactgtggcacgaacagttgaactaatagagcaagagtgtacaatagattttattgatataaatatgggttgtcctattgacattgttgtgaataagggtgctggatcagctcttctaacaaaaccaatgcggatgaaaagtattgtagaagttgcttcatgcacagcggaaaaaccaataactatcaagggacggactggttattttgaaagggagaatcgcattgattc

SEQ ID NO: 20116 - DNA, 130 bp, Glycine max
  Clone ID: LIB3106-068-P1-K1-H8
cccacgcgtgcggttacgctagaattttttatagggaaagcattgtgatagtcattgatacaactgcatgtatcatcatatatgaataagcggcaaaactcacgattgtaataacagacggttacttgaa

SEQ ID NO: 20117 - DNA, 348 bp, Glycine max
  Clone ID: LIB3106-068-P1-K1-H9
gccaggtttacaaggtgtccatcgtagcagcttgtgggctttcatggcccagtgaccgtctcgttatccaagtcctggacgattcaactgacactgtcattaaggaaatggtggagcaagaatgtttgagatgggcaagtaaaggcatcaacataacgtaccaaataagggagaacagaacgggttacaaagctggtgcgttgaaagaaggcctcaagcgaagctatgtggagcattgcgagtacgtggcaatattcgacgcggatttcaagccagagccagactttctcaggcgagcgattccattcttggtggggaaccctgagattgccctggttcaaagctcgt

SEQ ID NO: 20118 - DNA, 426 bp, Glycine max
  Clone ID: LIB3106-069-P1-K1-A1
tcgacccaggcttgacccacgcgttcgagagacacgaattgcagtcccaggcgcagttacctgttctgttattgagtcaaagggtgtgagtgagtgtgagcaagatgggttctttggcaaagaagggactcaacaattacgtcaaacagctccagcaacaccctttgagaaccaaggtaatcactgcatgggtactatcagcgatcagcgatgttgtgtctcagaaacttactgggatacagaaacttcaactcaaacgtcttcttttcaaagtgattttccgagctgcttatcttggaccctttggacactgttttcatttaatactggataaaatttataaaggaaagagagattaaaaactgtggccaagaaagttcttgattgacagtttacatctaatccttggaacaatttgcttttcat

SEQ ID NO: 20119 - DNA, 213 bp, Glycine max
  Clone ID: LIB3106-069-P1-K1-A10
aatactatgctctaaaaacggtgcgcctttataaggccgcctacgaatccaccagtgtctatcctaatccggattccttcacatcttctctaatcccacaagatgccatccagtcccgcgacgaaaggaaagtcgccaaattccataagcgaacatctatgcggtgaaacgaacagattatcttctattactcccaaataagggagccaattc

SEQ ID NO: 20120 - DNA, 338 bp, Glycine max
  Clone ID: LIB3106-069-P1-K1-A2
cccacgcgtccggagcggcgaagaagaagaagaacaataatgaaggacgccggaaagagccacaaggcgaatgcaaagctgtcgccggagacgcggaaggatcggaaatcggcgacggggctgagtggatcgccgaagaagggaggccacggcgggaagttcacgtggatcggcaacggctacgagaacgtcgagatggagcacggtgctatggacgccaaggacccgaacttcgaggatccagcggagatcgccgtcgtgtgatcgcggtggtttccggtgacgagatctgtacatactaataattgctaagagacgcggttttcgaattcaataat

SEQ ID NO: 20121 - DNA, 296 bp, Glycine max
  Clone ID: LIB3106-069-P1-K1-A3
ctttcgcaaaggactaatccatatcgtagagtcaatcacaaaactctctactttgccacagatgagtgaccccaagtatgcttatccctaccctgctcaagggtattatcaaggtcctcctgtgatggcaccaccgcaatattatgctgctccaccaccacgcacaagacaaactggattccttgagggatgtcttgcagctctgtgttggtgctggctcatagatgagtgctgctgtgatccctcaatcttatgtatcatctgatgtgatcaaaattgctgcaagtaggaaaaac

SEQ ID NO: 20122 - DNA, 446 bp, Glycine max
  Clone ID: LIB3106-069-P1-K1-A4
aagttatcctaatgggtgctgttgagggttatcgtattgctggtgggcccctcggtgaggtcactgacccaatctaccctggtggcagctttgacccattgggccttgctgatgacccagaggcttttgctgagcttaaggtgaaggaactcaagaacgggagattggccatgttctctatgtttgggttctttgttcaggccattgtcaccggtaagggtccattggagaaccttgctgatcaccttgcggacccagtcaacaaccaatgcctgggcctacgccaccaacttcgtccccgcaagtgagcattgaagaaaagattgactggtgaccttttagaagttttaagattggggttggtggaatatattgtattggaatggacttcaaaatatggtgattatcctggggatcccaattcaacttaatggtacttgcctttt

SEQ ID NO: 20123 - DNA, 310 bp, Glycine max
  Clone ID: LIB3106-068-P1-K1-G6
gaaaaaaacaatctgaacccaaattcgtatgtcgttgaaagttgaaatccaaggagagacgacaaaagaagaagaagaaaaaggaagaaaccagcgtcacatcatcgtggttctgcaaaatatatttttctttttgggtgaataaataaagggttgtgcgtggtggtgttttgttgtgtttgtgagtatctgaatccgcgcagttaggtttgtgattgattgattgatcaatcaaagagagagagagagagagagggaatgggagatcaagtggagggaacggtgcataacgttctggaacaggggactc

SEQ ID NO: 20124 - DNA, 249 bp, Glycine max
  Clone ID: LIB3106-068-P1-K1-E4
gaggcatggcactgcgtggcatggcgcttggctgatccagacattgacatttcgatgtggagaggccatggctctccgacaactgatgtccaatgaatgctggatgttctaacacttttatgataagaagattgcaaggtttggtatactctgaacgtataagtgggggacattgtgaacgcactatgctggatgttgaaccacactgatgcataaccttctagtatggagacgaccttcatacacgct

SEQ ID NO: 20125 - DNA, 368 bp, Glycine max
  Clone ID: LIB3106-068-P1-K1-E5
agcacttgttctactctttgcatttctcttcctcaggtgtgtgtatgcacaagacacaacaacccttgtgcctgcaatcataacttttggtgattctgctgtggatgtagggaacaatgactatcttcccacccttttcaaggctgattaccctccttatgggagggactttgttaaccaccaacctactgggaggttttgcaatggcaaattagctactgatttcactgctgacacattgggtttcaagacctatgctccagcatatcttagcccacatgcatcagggaaaaacctgcttattggagcaaactttgcttcagctgcatctgggtatgatgaaaatgctgctactttgaatcacgcga

SEQ ID NO: 20126 - DNA, 318 bp, Glycine max
  Clone ID: LIB3106-068-P1-K1-E6
aaggtttaaaaggaaaaagttggattcagccaattccagctccaatttgtaactcactgcttcaggcatttctggcacaattttttccacctttatttcaactttaagactccacagaaagaagcatattcctgagtcaaatagttctgtccatatagaatttgtgaagtgagagtccaacctttcattttcaattttcaaagatgcctcgtggaacacttgaagttgttctgatcagcgccaaaagaatcgatgacaatgattttctctccagcatagatccttatgtgattctcacatacagggcacaagagaaaa

SEQ ID NO: 20127 - DNA, 176 bp, Glycine max
  unsure at all n locations
  Clone ID: LIB3106-068-P1-K1-E7
tttctctctctctctctcactctttctcnctctctctctctctcatccacatttgctggtcttgtcacccccgacaaaggagatctgatttatgttgttcgnctcacgggcctttgcaacggcaacagcaacaacaacaacaacggcagtgtgtcaccggattcaagtgttttcat

SEQ ID NO: 20128 - DNA, 96 bp, Glycine max
  Clone ID: LIB3106-068-P1-K1-E8
aaaaaaaaaaaaaataaaaaaaataataaataaaaaaaaaacaaaaaaaaaaaaatgcgcgattattataaaaaaaaattcccccaccaaacaaat

SEQ ID NO: 20129 - DNA, 270 bp, Glycine max
  Clone ID: LIB3106-068-P1-K1-F1
tctaccctcccaggcacggtctcttacctcacccaaccgggttacccatgggccgctatgaaggaccctcgcgcgccgctcgggatatgggggaccctcacgcatcgcgcacgtcgcgatgactctaccaggctacttgacacggcgtcacgcacctcgcgcgactaccatacagacgggacatatacctcacgaggcccgggctttcatctgcgggtgatcgacacttgctgtgtggtctgagagtgtgctttatatacacacaaagtg

SEQ ID NO: 20130 - DNA, 389 bp, Glycine max
  Clone ID: LIB3106-068-P1-K1-F10
cccacgcgtccgggtaggtgaggaaaactttggacaaaaaatggagtgctacacaaggccaaacaggagtgacatccacctctcagcagaggaagaagccaccatagaggcaaagaccagagagtactttgatggggtcgcaccacaacgccacacaaagcctcaacgaagtgactattcagctcaatatgtcgatgctttctccaatgcccatcactcttctttaactataccagaattaacacaattccaactcctccagaacgatccccaagagaagaaattggtgtacaatggaagtcaagtaccggaagaatttgtggaaacagagtattaccaagatctcaacagcgtggacaaacaccaccatacgactggaacaggattta

SEQ ID NO: 20131 - DNA, 235 bp, Glycine max
  Clone ID: LIB3106-068-P1-K1-F11
gttgtgagctataatctagtttaacttgatgagaatatgaagttgtttgttttcttgcccgcttcaaaaatatatgcagcatacccaaaccaattcgcaatctactaatctttctctttcatatatttaaacttatttatatttttcttttttatttattttatcttttctcttttctatttttatttattattttttattacatattttaattttttttacatatcttatatta

SEQ ID NO: 20132 - DNA, 353 bp, Glycine max
  Clone ID: LIB3106-068-P1-K1-F2
gtgtatttggtcactgacctatcttggtagagatttgaagtttaaaccttcaaattaatcaaaccattttaatttgcctttagattctgagtcactgctgctatggcgctacgcgtacttcttgtgttggggatgttgctgatgttgtgccttgttaaggtttcatctgatccaaagatagaagaagaaatactggaagcagaagaagaactgcagtttcccgataacgagccacttatcgtgagagacgcgaacagaaggctaatgcaagatatggattgtggtgggttgtgcaagacgaggtgcagtgcacattcgaggcccaacttgtgcactaaggcgtgtggcacgtg

SEQ ID NO: 20133 - DNA, 363 bp, Glycine max
  Clone ID: LIB3106-068-P1-K1-F3
gcggcgtgttcaacaatcggcggcgaaaatgccttcccacaagacgttcagaatcaagaagaagctcgcgaagaagatgaggcagaacagacccatcccttattggatccgcatgagaaccgacaacactatcaggtacaatgctaagcgcaggcactggcgccgcaccaagctcggattttaaggtccatgtcaacctccgactcgagatttttatattgtttttgttattctagaatgttactagcaatgtgtaaactggaaaggttttagcttttggtcatgtggtcacacagagggatcattggtgagccgttccatatctctattttgtttttgtaccttttttggatattaatctga

SEQ ID NO: 20134 - DNA, 306 bp, Glycine max
  Clone ID: LIB3106-068-P1-K1-F6
gccacgcgtacgctcactctgcactcattattggcacacttcaatcgcactaatggctggcgaccttctcagatctacacaccgaagagggcatcaaatccctcgatcaattcctttctgggaaaacctatatttctggggatcagttgacaaaggatgatattaaagtgtatgcagctgttgttgaaaagccaggggacacttttcctaatgctgccaagtggtacgatgctgtctcttctcaacttgctccaagctttcctggccacgctcaaggggtaagattcagtggcgctgctgctccag

SEQ ID NO: 20135 - DNA, 331 bp, Glycine max
  Clone ID: LIB3106-068-P1-K1-F8
gcgtcccttcaaacatcgtttctgactctggatgaggccatcaagaccacgaatgcgggggttaacgctctggaaaacgtggtgaagccgcggttggagaacacgattagttacatcaagggagagctggacgagctggagagggaggatttcttcaggctgaagaagattcaggggtataagaagagggagattgagaggcagatgctgcagcagaacaactccaagcttgacactaatctccctttgcgcaaaggtctttcctacaattctgctcacaacttgttgtctgtgggtgacaaagatgaggatatcattttctgaatgtgct

SEQ ID NO: 20136 - DNA, 349 bp, Glycine max
  Clone ID: LIB3106-068-P1-K1-G1
aaaattctcacgttgaattgaaatttggaaatcgtgacaccaaccctacaccaccatggcctccgtagacaaattttgggcttttgccctcgctcttctcctccttgcctcccctctcctccaagttgctaggtgtcagtcagactccgaagatgtagtggaggctgctgaagaatcaagtgatatcggcattgttggtgatgatgtccaagactttggtgatgggaccttcccttctgctccaagaattgaaacaataagtgtttttccaaaaaatagtgcgagattgataacagctggagaagagacagagctgcttgttggtgttaaaaatgatggggattcaagc

SEQ ID NO: 20137 - DNA, 182 bp, Glycine max
  Clone ID: LIB3106-068-P1-K1-G10
gacaaaaagaccctttacaaaatttttttttatgagcaacctttgtgctggtctttggaaaaacatgatgacaactgaaggtttaagggccccacaaaaaggctgggcatattgttatgctcgagcacgaacagacaaactaatacaacatgagggtaccatagatttgaacgatataaata

SEQ ID NO: 20138 - DNA, 262 bp, Glycine max
  unsure at all n locations
  Clone ID: LIB3106-068-P1-K1-G11
ttcaaacagttccttttttctcacacacttcctttgttcgacaccgcagtttcagggggagatccaacattgttcaatccaaattcaacgcattccatggngaatcctgcatccggacgattctatgctcttgttctgctacatcgtttgctagggcccatcgtgcacggatgtggaagttccgactttcaaaactggaaagcacgggcacgctaagtgtcactttcgtggaattgatattttcactgccaagaaaccttgg

SEQ ID NO: 20139 - DNA, 409 bp, Glycine max
  Clone ID: LIB3106-068-P1-K1-G12
gcggagaaggtgaaggagaagattaataacaacaacaaccttcactcttctattattggtattattcaatttaatcatttaataataataataataattttgttcaccaattattattattctacatcagcatgggtaagggtcccttttccttccgccgctccgcctctcgccgccgacccaagaagaccgccgccccgcctcctcctccgtctccgccgcagcctccctacgcggccggaatcgccacctcacccgacgacaaaaacgacatggaattgattttgtagctgttagactagtgttgtacgatctattggtgaaaaagtcaatctttcatttgtaacttttgattaaatttcataaaagaaaggaacttgggccatttttttaaaataccttttctctt

SEQ ID NO: 20140 - DNA, 309 bp, Glycine max
  Clone ID: LIB3106-068-P1-K1-G2
taaaggaacggggagtttcggtaagaagaggaacaagacccacaccctctgtgtgaggtgtggccgccgcagcttccacctccagaagagtccgtgctctgcgtgcgcttaccccgctgcgcgcaccaggaaatataactggagcgtgaaggccattaagagaaagaccaccggaactggaaagatgaggtacttgcgtaacgtgcctcgcagattcaagagcggcttcagagaaggtaccgaagctgcacccaggaagagaagagctgctggctctgcctaagctttgaatgaatgacaacaattttt

SEQ ID NO: 20141 - DNA, 313 bp, Glycine max
  Clone ID: LIB3106-068-P1-K1-G3
tctaacccgcattggtctctcctcttccaagacgccccttcaactcatccaccgccgtggcctcgccgatcaccatggccctcccaaagttgcctgctggaaagacccaatgagcccgtctaaatggaaggaagagcattttgtgattgtctctttaactggctgggggctactcatctatgggggattcaagttggccacaagaggcaagggcaagaaagaagaggttttggcaaaagcatcaactgaggcgtagataatatttacaattcaaagtgttcttggtaataatgcgagctcccagactttttcg

SEQ ID NO: 20142 - DNA, 373 bp, Glycine max
  Clone ID: LIB3106-068-P1-K1-E3
ggaaaaaccggggcgacccacgcctccggttcctttcaatttccctcactttgtctgttcccaaacgcccctctctcttctccaatggccgaccagctcaccgacgaccagatcgccgagttcaaagaggccttcagcctcttcgacaaggacggcgatggttgcattactaccaaggaacttgggactgttatgaggtcacttggtcaaaacccaactgaggcagaactgcaggatatgataaacgaggttgatgctgatggcaacggaaccatcgatttcccagagttcctcaacctgatggctcgcaagatgaaagacaccgactcagaggaggagcttaaagaggctttccgtgtgtttgacaaggatc

SEQ ID NO: 20143 - DNA, 310 bp, Glycine max
  Clone ID: LIB3106-068-P1-K1-G4
cccacgcgtccgatcttgttccactttttagttagggtttggtttctaccgcatatcgcaggttcttccttcatttcatactctctggcaaaaccctcgtcgacggtgaccaatcggtggatcaaacatggacaagagcatgctagcggatttggattcgctccctgaggctgataagcaaagaatgactgtcatgatcgatcagctccaaatccgtgacagtctgagaatgtataattcactggttgagagatgctttaatgattgtgttgacacatttaagcataaatccctgcaaaagcgagaggaa

SEQ ID NO: 20144 - DNA, 377 bp, Glycine max
  Clone ID: LIB3106-068-P1-K1-G5
aagcaaatggcttcctcaatgatctcttccccagctgtgaccactgtcaaccgtgccggtgccggcatggttgctccattcactggcctcaagtccatggctggcttccccaccagaaagaccaacaatgacattacctccattgctagcaacggtggaagagtgcaatgcatgcaggtgtggccaccagttggcaagaagaagtttgagactctttcctacctgccagaccttgatgatgcacaattggcaaaggaagtagaataccttcttaagaagggatggattccttgcttggaattcgagttggagcacggtttcgtgtaccgtgagcacaacaggtcaccaggatactacgatggacgctactggaccat

SEQ ID NO: 20145 - DNA, 364 bp, Glycine max
  Clone ID: LIB3106-068-P1-K1-C12
cggacgcgtggggcctaacttaggtggtctcactgttgagcaggctatccaaaacaagaagttgttcatcttagatcaccatgactatctcattccatatttgaggaaaataaatgcaaataccacaaagacttatgctacaagaaccatatttttcttgaaaaatgatggaactttgacgccattggccattgagttaagtaagccacatcctcaaggtgaagcatatggtcctgttagtgaagtctacgtgccttcgagtgaaagagttgaagcttacatttggttactggcaaaagcttacgttgttgtgaatgatgcttgctaccatcaaatcattagccattggctaaacactcatgcg

SEQ ID NO: 20146 - DNA, 301 bp, Glycine max
  Clone ID: LIB3106-068-P1-K1-C2
ctttttggcatttggcatttgtcaccaaacaattgttgttagctctcacaagcaagcttcagcaacgacaatgaagaaagtagtcttacagttggacttacatggtgatagaatcaagcaaaaagctatgaaaacagcatctggcctttcaggggttgaatcagtttctgttgatatgaaagacatgaaaatgatcgtgttgggggacattgatccagtgagtgcagtgtcgaagctacgaaagtgttgtcacactgaaatagtttcagttggaccagcaaaaagatgagaagaaggagat

SEQ ID NO: 20147 - DNA, 220 bp, Glycine max
  Clone ID: LIB3106-068-P1-K1-C4
aacggacccagctactttgaaaaaaaatttccaaaaattttttaattaatcaccaaacatattacttttgctgttatttgcaatcttcagcctcaacaaattaataaagtattctttcatttttacttacattttttatttaaacaactatatatcttttaaaacatcaattcaccttttaatatatcattaatttcttttatattaatatcattaaaac

SEQ ID NO: 20148 - DNA, 341 bp, Glycine max
  Clone ID: LIB3106-068-P1-K1-C6
cccacgcgtccgggaactcctcagggtacatgaaaagcaaattgcataggaagagttggctagctggtcttggttgcaaatgctattgttctgacaagaattctgttgatattagtgaccatgcaggtgaaatcagtttcagcaaaaattctagtcatggaaaaacaacttcaagaaatatgttcaatgctgatccagaggctaatcattcagttaaagttactaggcctcacgcagccgaaatctcgattaacaaagatgtttacttccaaaggccagagaagttaggggtgggattgagcaaagagaacagtttagcactctcaagtttgaattctaac

SEQ ID NO: 20149 - DNA, 84 bp, Glycine max
  Clone ID: LIB3106-068-P1-K1-C7
cccacgcgtccgtaagacactccacgtacctacgatgttgactcttaccggcttggagaaatcttctgcccttgttccatattt

SEQ ID NO: 20150 - DNA, 207 bp, Glycine max
  Clone ID: LIB3106-068-P1-K1-D1
tcacaagccggtgcatgattcaagcctctatgtgggtctatttgcttctaaatttccaaactcatttctccaagcttttcaagcagcatagctaggtgctttatcttacatcaaaaggggacaagacatctaagcttgaaaattggaattgtaagtgttttttgagtggttgacacaagataatgactctttaccaccgcttgttgc

SEQ ID NO: 20151 - DNA, 401 bp, Glycine max
  unsure at all n locations
  Clone ID: LIB3106-068-P1-K1-D10
cccacgcgtccgcccacgcgtccgttataaacagtgtgatgaaaatgaaggtccttgttttcttcgttgctacaattttggtagcatggcaatgccatgcgtacgatatgttccctctccgaatgaacactggctatggtgcccgtactccggaggtgaaatgcgcaagttggaggcttgctgtggaagcacacaacatctttggctttgagaccattcctgaagagtgcgttgaagcaacaaaagaatacatccatggcgaacaatatagatcagactccaaaacagttaaccaacaagcttacttttatgccagagacctcgaagttcatcccaaggacacatttgtgttcagtatagatggcaccgnactctctaatattccatactacaaaaaacat

SEQ ID NO: 20152 - DNA, 340 bp, Glycine max
  Clone ID: LIB3106-068-P1-K1-D11
attaagaaaccttccaaaggcaaaagtgtcactcacggctgcaagaacagctgcgggggctatttatgtgcccccagctcaacaaggtgccatagatctgcagagtggaatacttcatgctgaagaaaaggattataaaactgcttatagttatttctttgaagcttttgaatcattcaatgctcttgatgaccccaaggctgtttttagcctgaaatatatgttgctgtgtaagatcatggtgaatcaagctgatgacgtaggaagaattatttcttctaaagcaagcctgcaataaattggcccttgacttggatgcttttaaaactgattgctgatg

SEQ ID NO: 20153 - DNA, 287 bp, Glycine max
  Clone ID: LIB3106-068-P1-K1-D12
cccacgcgtccgctttttcaacctttttgctgctgaaagctggtagagagggaattggtatatctgtgacctattaaattggaggaggtggactgttgcaccacccgccattagtataggagaagtttttgtttttttttgttccctaatgggattatttagaagcattgtttgcttactcatatcctttgtaagcagctatggctatgtctttggttgtactactggaagtgtaaattttcctatttctgcctttaaaaaaaaaataattttttattaatatttat

SEQ ID NO: 20154 - DNA, 154 bp, Glycine max
  unsure at all n locations
  Clone ID: LIB3106-068-P1-K1-D2
gggtccgaaaaacccggtccaaccaacccgtccgcccacccgtccgaaaaaaaaaaaaatnttttaaaaaaaaaaagggcggacaatataaggggggcaatcttacaaaacccgtgcatcctacataatacctgtttgtaaagaaaaaaataaa

SEQ ID NO: 20155 - DNA, 374 bp, Glycine max
  unsure at all n locations
  Clone ID: LIB3106-068-P1-K1-D3
ctcacgcgtncgccaaaacactatagtaatagaaacatttgcttttgaaaaaccccgcagtcttcatcactacactagctagccacatacaatgtcgaccaaatttaaggtgtttcgtgaattcacaagcgatgactcattcctaaaccaagttatccctgaaaacatcaccgaattccaagtgactctgtccctcgctagagactacgatggcaacaactcaaccaacggaaagttcattccttactgggacactgaaaaggtcactcccgaagtgataaaaaaattcaagaaaaaatacgaacccaccgcactgagggttaaagttcttgtcagcattggaaacaaaaacaaacaatttcctttcaccattg

SEQ ID NO: 20156 - DNA, 302 bp, Glycine max
  Clone ID: LIB3106-068-P1-K1-D6
cttttgcgttttgagtttcaatcaagccatcatcatgtctaccgcatcgcaacccaaggccaagaaaacggcgtcgtccaagaagcccctctcccaccctcccttcgccgtgatgatagcagaggcgattgcgagtctgaaagagagaaccggttcgagccaatacgcgataaccaaatacatcgaagggaagcacaaggagttgcctgcaacctacaagaagcttgtcctcgttcatctcaagaaatcttgtgctgctggcaagcttgttaaagtgaaaaactcctttaagctcgcaccga

SEQ ID NO: 20157 - DNA, 327 bp, Glycine max
  unsure at all n locations
  Clone ID: LIB3106-068-P1-K1-D7
cccacgcgtccgatagactatcttatanaataatataaataagaataaaaaaatagggaaaaaaaaagaatctatataaatataaaaataatatatataaggtacaaatagtaaatcgaggtacccattttatgataaactttccttccatttttgttcttctagtaggcctagtatttccggcaattgcaatggcttctttatttctttatgttcaaaaaaacaagattttttagattcagaaaacaaaggtaaattctggggttttttatttcccaattattatactaaattcaaaaaaagggggaggatggggtttaatttttt

SEQ ID NO: 20158 - DNA, 351 bp, Glycine max
  Clone ID: LIB3106-068-P1-K1-D8
agagccctttggacacaccctctaaaccaatctatcaagtcctgaatctggtgagcaaatatggagctttgttggcaaacatccatccatggttcttgaagaagcatggagataaaggggtgtgagagggtcctcaccactcacactcctccacttaaaacagtttgttttggcttagctttggcttctctaatcaacaagggatgtgttctaacattctctcttgagtggcagaagcagatatgcattctccaaaggaggagaggctttggctacagccttgcaaaccggcaagtcacgaaaaggcaatggactccattggggtctctatggctatctattgctcatcta

SEQ ID NO: 20159 - DNA, 378 bp, Glycine max
  unsure at all n locations
  Clone ID: LIB3106-068-P1-K1-E1
aatatctgctgagcattaaaagttccccaaccatgaaggcaatccttgttttcattttactcttggcctctatttttttccttcccagttcaactcttgctcgacaactggaggtggtgacaggcggtacccagaaccctaataatcccgcttttaaatgtagccgcggcggcagttataggccttgcgccccatcgaactcgccaccaagaccaccatgtaatgggtacattaggtcttgccacatcgcatcgccaccaagaccaccatgtaatcagtatagtagggaaggttgcttaccatgaaactaccgccaacagtactataatgatatatgtagtttttaattcttggtacttgctgncatctttttaacac

SEQ ID NO: 20160 - DNA, 344 bp, Glycine max
  Clone ID: LIB3106-068-P1-K1-E10
ggttgatatggctgacggtaggaggctactgggaccgaatatagctgtccaggggaacgtcgaccctggtgttctttttggttcaaaagagttcatcactgatcggataactgatactgtgagaaaagcaggtagagggaaacatatcttgaatcttggacatggcattaaagtaggtacgcctgaggagaatgttgcacatttttttgaggttgctaaatcaatcagatactaagaagctaattatgattaattaattcttttgtttgaaaaaaaaatttataaaaattaaattatgggggggttgtatatattattaatatattttggtgtaaatttatatt

SEQ ID NO: 20161 - DNA, 405 bp, Glycine max
  Clone ID: LIB3106-068-P1-K1-C11
gttttgggctggtgtttttgtgatttttgagatcaggaattaatttcagtggtgcagggaatggcaacggattcttcaaatggtaatggacatcaccagacaacaacaaagcagccttttgccatctcccctgcgcttttccaaattttttcagtccaacatgagaatcttggttactggaggagctggattcattgggtctcacttagttgacagattgatggaaaatgaaaaaaatgaggtcattgttgctgacaactacttcactggatccaaggataacctcaaaaagtggattggtcatccaaagattgagcttatccgtcatgatgtcacggagcctttattgatcgagggtgaacagatctaccatcttgcatgccctgcctttcctattttctacaa

SEQ ID NO: 20162 - DNA, 368 bp, Glycine max
  Clone ID: LIB3106-068-P1-K1-E11
caaaatttagaaacaaaaacatgttggtgaaggtgtacggtccaacctatggagcccgcaagagggtgctggtgtgtctgattgagaaggaaattgagtttgaaacagtacatattgatctcttcaagggagagaataaggaacctgagttcctaaagctgcagccatttggatcacttcctgttattcaagatggtgattatactctctatgaatctcgtgcaataatcagatactttgcagagaagtataaagaccaagggacagacttgttgggaaagacaatagaagaaaaaggtctagtggaacaatggcttgaagtagaagctcataactttcacccaccactctacaatttgggtattaat

SEQ ID NO: 20163 - DNA, 307 bp, Glycine max
  Clone ID: LIB3106-068-P1-K1-E12
ctctaagaaacatggctgaagagggtcaggttgtcggcgtccacaccgttgatgcgtggaaccagcaactgcagaatggaaaagactcccaaaaattgattgtggtggattttactgcttcctggtgtggtccatgccgttttattgccccagttctggcagagattgctaggcatactcctcaagtgatcttcctcaaggtggatgtggatgaagtgaggcctgttgctgaggaatattccattgaggccatgccaaccttcctcttcttgaaagatggcaagatcgtggataaggttgttggtgc

SEQ ID NO: 20164 - DNA, 323 bp, Glycine max
  Clone ID: LIB3106-068-P1-K1-E2
agtgtggggtggagttggaggggtgtgtgtttaatttcgctgctttggtggaggtttaccggttaccgggtgaacttgttgtggtggaagttagaagaagggacggggatggtggggtttttagggatgtgtggaggaataagctgaggccgtgtttgtgttgctgcgagtagcagttctacgtttagatcgggatggaacaactttggtgcaacctggggtcggtgaatcatgattaggggttattattttttttaatttggaattttaaattaaattgataaaatttaatgtatgttgaggttttaaaattgaaatgtgtt

SEQ ID NO: 20165 - DNA, 105 bp, Glycine max
  Clone ID: LIB3106-068-P1-K1-A1
gtgattgatgttaacacgaccaacacacctcccctgccaccagcatgttgtacttacgggagcggatgcgtcatgggtggcggaggctgttgaagacatggacaa

SEQ ID NO: 20166 - DNA, 290 bp, Glycine max
  Clone ID: LIB3106-068-P1-K1-A10
caaccccatcatcatcatcatcattctttgactggttctcttggctatccagaaccagtcttgaaccttccttaatctacgactatggcctcacctttgcccgcaacgagctccaattggaagatgcttgctacttcaaccacgagtttcttcaaagcatgggaatctcaattgccaagcacaagctagagattctcaagcttgtgaagaaacaagaaagaggaggagcagcacggcccaataagaagctctctggggtcattaaaaagtgcctaaagaagtgcatgaac

SEQ ID NO: 20167 - DNA, 335 bp, Glycine max
  Clone ID: LIB3106-068-P1-K1-A11
cagaacttgaagcattgttattgtgtgtaagctcctaatcacaaagtagaagaaataggaaacaccctttggagatatttgcttaggccattggtcatggcaactcgaagactttcattgctcctctctcgctctctatcttccacttcttttcaagctgcttctctacttcactcactagggagaaactctggcaagtggggaaactttaacagattcagcactgcagcagcagttgaggatttaatcactccacaagttccaataacatacactaagcatctgataaatggacaaatttgggatgctgcttcagggaaaacttttccaacata

SEQ ID NO: 20168 - DNA, 358 bp, Glycine max
  unsure at all n locations
  Clone ID: LIB3106-068-P1-K1-A12
gccacgcgtccgccctgttggatctgtatattatctgacgtggtgaagatgaatgatgcactctagaagaaggaccagaactcaaccttatcacttgtttggatgcggggtcatcatccgataatgcaaattcttcatcagaaacaacaacaacaacaacaacaaaccctcttggtaattctgatgctactgagcctagagtgttctcttgcaactactgccacagaaagttctacagttcacaagcactaggtggccaccaaaatgcacacangagagagaggtcaattgcaaagagaggacacaagttttggatctcagattatggcctttggccttccccttttgcattataaca

SEQ ID NO: 20169 - DNA, 319 bp, Glycine max
  unsure at all n locations
  Clone ID: LIB3106-068-P1-K1-A2
ggaaagaacgggtcggaccaacccgtccgaggaacgcagaccgaggcgtttccagttctgtagggaaatgaaagtgtctttgttggtgaagggtatgtgagagaaacgaaaggggtgtgtgttgggttgaataggtatagataggatcaatgagcaacaacaacgcangaaaggtggtgtgtgtgacgggtgcttctggtttcatagcttcatggatcgtcaaattccttctccaacgtggttacactgtcaaggccaccgttcgctacccaagtaatctgaaaaaagtagatcacttggttaaacttgagggcgcaaa

SEQ ID NO: 20170 - DNA, 370 bp, Glycine max
  unsure at all n locations
  Clone ID: LIB3106-068-P1-K1-A3
cccacgcgtncgcccacgcgtncgcccacgcgtccggtttgttgtgagctataagctagtttatcgtgaggagaatatgaagttgtttgttttctttgttgctgcagtagttttggtagcatggccatgccatggcgcaggctaccaaaggttccctctccgaatgaaaactggctatggtgagcgttcttcggaggtaaaatgcgcaagttttaggcttgctgtggaagcacacaacatccgagcctttaaaaccattcctgaagagtgcgttgaaccaacaaaggactacattaatggcgaacaatttagatcagactctaaaacaggtaaccaacaagcttcttttatgctagtgaacgcgaagtca

SEQ ID NO: 20171 - DNA, 133 bp, Glycine max
  Clone ID: LIB3106-068-P1-K1-A4
gcgtcgccagcgcggcaggaatgttgtgagaacgtggaaactggaagaaaacgagtgtcagagcaatacgcttgtatgtgaaggagagtgaataagttgtacgcaactaaggttggctttgaatggagtgatg

SEQ ID NO: 20172 - DNA, 223 bp, Glycine max
  Clone ID: LIB3106-068-P1-K1-A6
gttgtccaatacgaggcacgctgaagataatctgctctgacattggcaagtaatttccatggaaattgttactacatctgtgttgtgatattgaagaactacttttaattctacagtaccattgcttttgggtgatgtttagaaaaggataaaaactttgaaatgtgaatatgttacaaatatttgtgtttcattagtttgcaattttatcactacgatggtt

SEQ ID NO: 20173 - DNA, 280 bp, Glycine max
  Clone ID: LIB3106-068-P1-K1-A7
ccttgtgtttttcctttcgggattgttttctatggcttctgaagtaatagagtgcgcgtgctttgtcggtgggcttgcttgggccaccgacagcgatgctctcgagaaagccttctctcattatggtgagatcgtcgaatcgaatgttatcatcgatcgtgaaactggaagatcgagagggtgtggatttgggaccttcgcctcggagcaagcgatgaaagacgcaatcgaaggaatgaacgggcaagaacctcgacggtcgtaagtattacagtgaacg

SEQ ID NO: 20174 - DNA, 291 bp, Glycine max
  Clone ID: LIB3106-068-P1-K1-A8
cccacgcgtccggaggaacaccacttttagtcaaaggctgatgctggggcatcaaagacatttccccagcaagctggaaccatccgcaaaaatggttacattgtcatcaagaacaggccatgcaaggttgtggaggtttccacttccaaaactggcaagcatggacacgcaaagtgtcactttgttggaattgacatattcactgggaaaaagcttgaggatattgtcccatcttcccataactgtgatgttcctcatgttaatcgcattgactaccagctcatcgacatc

SEQ ID NO: 20175 - DNA, 359 bp, Glycine max
  Clone ID: LIB3106-068-P1-K1-A9
cccacgcgtccgaacgactctctcttttttcgctccttcgactaccatttcttggggggcatagacgcttccaccaatgtctaccatctcaactttaagtgccaagacaaaaaacttgatcttgccaaaaccatcgatttcatcattgactatgttaccctcacaccaccaatctccgccgccattcatgttcttagcatcttggcaccaccaaacaacaccatcgtatgaaatttttcttaacttttccattgtcaatccctcaccacccttaaccttttttacatatccactgacatcacattcttttctttggcttctttttaaaaattagacccttattattttgttttcaaagg

SEQ ID NO: 20176 - DNA, 340 bp, Glycine max
  Clone ID: LIB3106-068-P1-K1-B1
ggcaggttgcttctttgctttgaaggtctggaatgcccagaaggctggtgcttctgctgttcttgttgccgatgatgttgaggagcccttaattactatggacacccctgaagaggatggctcttctgccaagtacgttgagaacattactataccctctgctcttgttggaaaaagttttgctcaaaaactaaaggatgccattattgttggcgatatggtcaacgtaaacctcgattggcgagaggctgttcctcacccagatgatcgcgtcgagtatgagttgtggaccaacagcaatgatgagtgtggtcttaagtgtgatatgctcatgcaattt

SEQ ID NO: 20177 - DNA, 323 bp, Glycine max
  Clone ID: LIB3106-068-P1-K1-B10
gttcgggtgtgagagcgagaatcattttatgaagaaggaagacacagtgaagctgatgggtgccgaaggttttgaatttgtggtcgacaaagaagctgcaatggtttcacagaccatacataacatgcttacttctccagggagtttcgctgagaggcagcacggcgaagttacctttcctgagatcagcaccaccattctcgagaagatttgccagtacttttattggcatctccaattcgccagggggaaggagacggaatttcccattgaacctggattaactctggagctaatgatggctggcaattaccttcatacat

SEQ ID NO: 20178 - DNA, 335 bp, Glycine max
  Clone ID: LIB3106-068-P1-K1-B11
cccacgcgtccgcttgtatcatttataaagagagaggaagtgaaattttcgtgagagacaacaaaacaaaaaccattcaattcaaagatagtaggctgccaggcaccgcacaccgccaccgcactttctccgatcctcacaattttgcctccggcatgtctccggccgccggagtcagcgtccccctcctgggggattccaaaggaacgccgccgccggcttccgtccccggcgcggtgttcaacgtggccaccagcatagtcggcgccggaatcatgtcgattccggcgatcatgaaggttctcggcgtagttcccgctttcgcgatgattctc

SEQ ID NO: 20179 - DNA, 339 bp, Glycine max
  Clone ID: LIB3106-068-P1-K1-B12
caatttcagcacaacttgaaatcctagtacttttctatctattaactttttctttgggcacaaaaagcactcacaaaaatggcaaattctcgcattgctaggttcttcatggaggtggcaccaccacagtatgttactgtgatgaggcacagaacatcaaagatgttggacactattactgaagatgagagggagattagcaccagtgattctgtcatgtcaccccctaaaaaaagcaaatcagcagtagcagttgcagcttcatctgcttctgcttctgttaccaatgttaaaggaaggtgcttcctcaaagaagtgcatagatccctctcaattttg

SEQ ID NO: 20180 - DNA, 230 bp, Glycine max
  Clone ID: LIB3106-068-P1-K1-B2
taccggggcggaccaacccgtccgttcaatttgaaggcctaaaaggttcatttgatcttttggtgaatggtggggagtctagaacgcaactaaaggacctcatactgctcaagatagtcaccaaatgtgatgggattagcaaaccagccaaacataaagtccagagctcgccttgctgccttgcgatcagcatcactattagattgtggttcaaagaagaaagtcactat

SEQ ID NO: 20181 - DNA, 247 bp, Glycine max
  Clone ID: LIB3106-068-P1-K1-B3
aaacgatcaaaagactactaaaagaccacttgatagactgatgaatctgaagtttctttttttgttggtgtaatatgttgcatcattgcctagtcttaaggagagcctctgtggtagtggtgctagccttatggaaattatgtgtatcatgctcctaccgatgtaactaaattattatattagactatggagttgttgtatgaactcatgtcaaagttactatgatgagtatgtttattatttcttg

SEQ ID NO: 20182 - DNA, 345 bp, Glycine max
  Clone ID: LIB3106-067-P1-K1-H9
ggcctacacccattctacactcgcctccttctcaaaacctcaccctccacacacctcttcctgtttcgcgccctcagattcaaaagacctgtccccccgctgaaagcgtcgatggcggagaccaacaacaacgttgccgtcgaggtccttgaaaaagaggatcttgccgtgtccctggccaaatacgtcgccgatctctccaacaaattcacttccgaaagaggggctttcactgtttgcctgtctggcggctctttgatcaactatctccggaagctgctggaaccgccttatgttgatactcttgaatggtccaaatggcacgtgtttggggtggatgagaga

SEQ ID NO: 20183 - DNA, 161 bp, Glycine max
  Clone ID: LIB3106-068-P1-K1-B4
attccttccgctagctaagcaggattcatgctttccatttttccccttcttcattagcgtgcttttttatcctgtaataaacaaggttatttcaaccctgattttaaaaaataattagcaaccgcgattttagttggaatgtcaagttaaggtttgttctt

SEQ ID NO: 20184 - DNA, 152 bp, Glycine max
  Clone ID: LIB3106-068-P1-K1-B5
gtccgtcgttgtgtaatgtgggatgtgttcccaaaacatttgaagaactgtgatgttaaatgggtctgtaataaatgtccccttgaaaataacgttcggtttgtggttgaactcacattgtgtcccattaataatgagtactctaatatccc

SEQ ID NO: 20185 - DNA, 288 bp, Glycine max
  Clone ID: LIB3106-068-P1-K1-B7
cccacgcgtccgcccacgcgtccggtagtgtggctggatagagtcaccgggaatgttggcatgtccatttcggcgaaggcgatgacaattaacggaattgatgaccggagatactggaattggattcctactgaagaatctaggttagatttaattggctttagttgtttgctttaaggttgaatatggatatatgaaacctgtgtcttattaaaaaattatataatttaattctttttattatatattatttttttttatatctgtttatttttttttttttttttt

SEQ ID NO: 20186 - DNA, 381 bp, Glycine max
  unsure at all n locations
  Clone ID: LIB3106-068-P1-K1-B8
aaataaagcacctgccgtggctattgatgtgttgcgccgcacaattgtagttgtggagagttctctaacaagtggggcttcctatgttgtctacttatatggctcagccaaggagctccttcccgcaggaattagggatacagtcaatgtatatgaagataaagcaacagaaatcttgaggcctgttgggtcagcaactcaaaggatatacatggctgtctattcattggagaagagtcttggcttggatccaaatgacccaatcattccatttgttgttcttgtaagctcttcagccacattatgggccttttattggttgtggacatatggaaggtactcanngaaatttgcccctaaatcaactttcgagcttttggc

SEQ ID NO: 20187 - DNA, 191 bp, Glycine max
  Clone ID: LIB3106-068-P1-K1-B9
ctagtgtggtctgcaactatgagcatggattatctaatcatactttctctccttctttccacggtgcttgcaactgcaagttcttcttcttcttcttcctccctctatcttgggaagggcttctcccatcgcaaattgtctcccagttatcacattcacaaaaccattgacgaatcctatgcagttatctt

SEQ ID NO: 20188 - DNA, 452 bp, Glycine max
  Clone ID: LIB3106-067-P1-K1-F6
aaattactgatacaggaacagctagcagagaaacaaagttacaagtaaagtaaattaagaagatcattaatggcttctcttgcaaccttagctgctgttcaaccagctgcgctcaatggccttgctggaagttccctctctggaactaagctctctttcaagccctctcgccacactgtcaaatccaagaacttcaggagtggtgccgtggtagcaaagtatggtgacaagagtgtgtactttgatttggaggatctgggcaacactacggggcagtgggacttgtatggctcagatgcaccttcaccctacaaccctcttcagagcaagttcttcgagacatttgctgctccattcacaaaggaggggattgttactcaagtttctgatattgggaggtggttccacccttgcatacttcagtgcaacagccttaggtgacattctaccaa

SEQ ID NO: 20189 - DNA, 452 bp, Glycine max
  Clone ID: LIB3106-067-P1-K1-F7
gaagaaataggtttggtttctgagaggaagtttgtggaatctagtgagagggtagagaaagatgttgagtgcgacggccatcggcgcgttgttgggtttgggaacccagatgtactccaatgctctccgcaaactcccctacatgcgccatccgtgggagcacgtggtcggaatggggttgggagcggtatttgtgaaccagcttctcaaatgggaggcccaagtggagcaagacctcgacaagatgctcgaaaaggccaaagccgccaacgaaagacgttacatagatggagatgatgattaatgcctgtcttcaaggattgtagcatttggtgaaaataatcatgaaatatgttgaacttgttgcctttgttttctgatttcatagtgctatgtttgtaaggctgttaatcagactattttgtgcacatgcttttgaaagcagtgaaatt

SEQ ID NO: 20190 - DNA, 440 bp, Glycine max
  unsure at all n locations
  Clone ID: LIB3106-067-P1-K1-F8
ggattccgtagtcctaaagtagtggcggattttcgtggctacgcaaacttctgcttcaagacctttggagacagagtcaaatattgggtcactttgaatgaacccttatcatttagtcttaatggctacaatggtggcacctttgcaccaggtagatgttctaaatacgttgccaattgtagtgctggcgattcatccactgaaccctatatcgttggacactacttattacttgctcatgaatctgctgccacattatacaagacaaaatatcaggctcgtcaaaaaggacanattgggatcactaatccaacacactancttttgccaaaatctcaaagtgctgcagattacaaggcagcaagtagagctctggacttcttctttggttggtattctgatccggttttctatggtgactatccggagagtatgaaatc

SEQ ID NO: 20191 - DNA, 399 bp, Glycine max
  Clone ID: LIB3106-067-P1-K1-G1
attggcttctgactatatcagtaagatacgtaacaagctcgggcgtggtgtataaggagaaatcattacatgtttcaggaccatgtggtcctggacattctctgcgtgacatgtaactacatattttaattcacgaaaataatatgtcacatggagattgactgagaccaacatagtcttggaccatataataatttcttgtgtataagaagagacttgaaattaaaagtcttggcttatgtgctcctagtaaaactattgtcttcatagatttatgtgttccatgtattatagtactacttacataagcagccattttggtttgcattaaccagctgtaataaacttagtagttgttgggatctctagctaaaagaaatgatgtggctgtttctgatg

SEQ ID NO: 20192 - DNA, 312 bp, Glycine max
  Clone ID: LIB3106-067-P1-K1-G10
cccacgcgtccgaaaactcacgcgggccagtctgcgacttactgaccactggatcagatcggggttctgtctctcgcatccatctgcattgtagtcgccggcgtcggaggacagtctaccgtcgcagcgccgtcaaacactccggcaactcccgccgccgccactcccgcccaagcaccttccacagtaccgaaatcaccagctcccgttgcttctcccaaatcatctccaccagctgcaacccctgcatctactccggcggcatcttccaccaccacccccgccgcgcctgcttcggtgaccaagccacct

SEQ ID NO: 20193 - DNA, 185 bp, Glycine max
  Clone ID: LIB3106-067-P1-K1-G11
cccacgcgtccgagcacttacaaactgcatttagagattcagtcaccaatggatcgcaacggcgttcggtctattgcattcatctgcattgtagtcacctacgtctgaggacagtctaccccctcatctccatcaaacactccgtcaacttccgacgtcgtcactccctgccaaacacctttcac

SEQ ID NO: 20194 - DNA, 312 bp, Glycine max
  Clone ID: LIB3106-067-P1-K1-G12
cggacgcgtgggcggacgcgtgggttcgagaagctcgcccaggaagcgtcgcgtttggctcgctacaacaagaagcccaccatcacctcgagggagatccagaccgccgtgcgtctcgtgctccctggtgaattggccaaacacgccgtttctgaagggaccaaggcggttaccaagtttaccagctcttgaattagggtttgttaggcggttgtgttgcagatctagggttttctgtggatttcttttcttaaaaattagtttgtagatgtaatgatctgaacagttgttaatggaaggtttcgtttgaat

SEQ ID NO: 20195 - DNA, 386 bp, Glycine max
  Clone ID: LIB3106-067-P1-K1-G2
aaaagagttctttcaaaatgcaaacagccttaaccttcgctgcccccaacgttgtgccattggcacccacaaagagtgtctcccatattaccatctttcccaccaaattgaaagccccgcgctcctcacctcgttactctccgattagggttgcaaccgtggagcccgacacttcaactgtcgactacaactctgcgttctcagtgtttcctgcagaagcatgcgaaactgtaggaggggaagcctgcatggcggagatgtaccctgaaacgaagctacagccagaggctaagactccacgagtcgttacagagaacgttgagagagagtatcttgaatacgatgatcctaaaacggtatttcgaggagaggcttgtgatgatctt

SEQ ID NO: 20196 - DNA, 187 bp, Glycine max
  Clone ID: LIB3106-067-P1-K1-G3
cccacgcgtccgcccacgcgtccgagcaagctcatcctagagttttaaaaatggcagcagccgcctccatggctctctcttccccatccttggctggcaaggccgtgaagctgggcccatcagcccccgaagtcgggagggtcagcatgaggaagaccgtgaccaagcaagccttcttcggaagccc

SEQ ID NO: 20197 - DNA, 354 bp, Glycine max
  Clone ID: LIB3106-067-P1-K1-G4
gatacctgaaaagagaagagcgagatggcgtcggtggtgaagaacgtactcaaatccgtcagagaaaagggtttcggcgctttcctcagagagctcaaggatgaaggctacctgagatgccttccggatggaaatctcttgcaaaccaagatccacaatattggggcaacgcttgatggtgttgataaatttggtaacaagtattatgagaagcttggagacacacagtatggaaggcacaggtggattgaatatgcatagaagactagatataatgcctgccaggttccagctgaatggcatggttggctccacttcataaccgatcacacaggagatgagcttcttttactg

SEQ ID NO: 20198 - DNA, 55 bp, Glycine max
  Clone ID: LIB3106-067-P1-K1-G5
tgtgcattgtagttcttatatatctttgtgtctgatcagtgatcaattagttctg

SEQ ID NO: 20199 - DNA, 395 bp, Glycine max
  Clone ID: LIB3106-067-P1-K1-G6
cttcactccaccttcttcattcccacccaattgtctccccattaaacaataacatgaataatattaggaatggatacagagaagaaaaatcattctgctatttccaccccaaacaggtacttgttggggtgtgtcccctgtgcttgaatgagaggctcctcatactgtttgcaaaacaaggtcgccaccacaaccgttcttcttcttcatccatatcttcacacaggcttcaaagtaattccagacacagaaaaccaccctcttcttctattcacaagatctttgcttttggctctctcttcactcgcccagaatcccaccacaactatgactatgatgatgtctcttccactccagaagagtcattcatctcaatcaagtttgaagagaatggg

SEQ ID NO: 20200 - DNA, 223 bp, Glycine max
  Clone ID: LIB3106-067-P1-K1-G7
cttaaatccaccttcgaaattctttcacaattgcctacccactaaacaataacaggaataaggttatcaatggcttcaaatattaaatatcattatgctcataaccacgccacacaggaactcgatgtcatctgtctcatgatcaggaataccatgcaccttaaagtcttagcacaacaccgcaagtactataacctctttaatacttaattcatatcataat

SEQ ID NO: 20201 - DNA, 459 bp, Glycine max
  Clone ID: LIB3106-067-P1-K1-G9
cccacgcgtccgacgaatcacactctccacagtgcgattcattcaccaatggatcgcaacggcgttctctctctcgcattcatctgcattgtagtcgccggcgtcggaggacagtctcccgccgcagcgccgtcaaacactccggcaactcccgccgccgccactcccgcccaagcaccttccacagtaccgaaatcaccagctcccgttgcttctcccaaatcatctccaccagctgcaacccctgcatctactccggcggcatctcccaccaccacccccgtcgcgcctgctccggtgaccaagccacctgcagcctttcctcctccggggactcctcaaccggaaattcctcctccggggccggttcccgtaagctttcccccggttccctgccgggaagtcttcaaccggttctggttccggtggcgggcccaacaacccctgtggttccttttc

SEQ ID NO: 20202 - DNA, 334 bp, Glycine max
  Clone ID: LIB3106-067-P1-K1-H1
gtgtgttcgtttgttcggtggtgaattcctatccacacgtctcaccggaaacatgtcagcggtggttgctggttcctcctcttcattctctgccaccttcacccccataaggagcccctccttaaaaaactctcaactctctcattccaaggcactcacttcacctcaatgccagaaaacatctttacaagggctctcacttcatgaagccaaaaggggtgtttcagaatccttcctagttgagaacaacaatggttcctccattgctggaaggagacttgagatcacagcacgaactgctggggcttcaaagacaattgaaggtggaggttga

SEQ ID NO: 20203 - DNA, 354 bp, Glycine max
  Clone ID: LIB3106-067-P1-K1-H10
cccacgcgtccgcccacgcgtccgcccacgcgtccggaaatcctcaagcttcaatttgctttgtgctcactcatctatctattataaccaaacactcttcttcatattcttcttcttcttgttcttgttctatctgtgacgagcatcatggcctcgagagcagtgctattgttggctatgtgtgtgcttccggccatggttgtggccattcgcccagcaaagaaccctttttgcgtgaagggtcgcgtctactgtgacccttgccgtgctggttttgagacctcagcaaccacctacattgccggtgctgagattatgttgcaatgcaagagcatggttagcaacgaggttgtg

SEQ ID NO: 20204 - DNA, 206 bp, Glycine max
  Clone ID: LIB3106-067-P1-K1-H11
tccactcatccatccaatcgtccgctcacgtttacacttttccttaagcttaaattttcttgtatcggactcatatatctattataaccaaacactcttctacatattctacttcttctacctactactatatctccgactagcatcatgacacttagagcattgctattgcttgctatatattcttcttccatccatggatcaaa

SEQ ID NO: 20205 - DNA, 224 bp, Glycine max
  Clone ID: LIB3106-067-P1-K1-H2
ctcagatgaggagtgttttcctcaagtgcatgatgcatgagatggactgtggtgggctgattcgcgtgccttcgccaaaatgtgatccgttgaagaactttggagtggtgtttcctatgttggaggatattttgagctgtgctagagtgatacaaatggtggtgatggaggatgggtttaaggtgatgtgtattgtggattcatgtacccgggatgtttctttt

SEQ ID NO: 20206 - DNA, 161 bp, Glycine max
  Clone ID: LIB3106-067-P1-K1-F5
caaagccaaattcccaatagtcctttcacttttcaatcctacattaatatcattggcaactcgttccatgcattaaagccttgtcccaatattactcactatgcattactccatcttcatatattcacgcatcttcaacactaacaattacattacacttc

SEQ ID NO: 20207 - DNA, 243 bp, Glycine max
  Clone ID: LIB3106-067-P1-K1-H3
ctcacgcgtccgcgcttctcctctcttccaagtaaagaatcatcaatggcgattgaacacgaagacgatgtcaaagacgagaagaaccctcgacctctcgacgaggatgacatcgccctcctcaagacctacggtttgggaccttactccacaagcataaaaaaggcggagaaggaaatcaaagatatggccaagaaagtgaatgacttatgtggtataaaggagtctgatacttgtttagct

SEQ ID NO: 20208 - DNA, 284 bp, Glycine max
  Clone ID: LIB3106-067-P1-K1-H6
aaaaaatatttaaaattatattaatcatcacttaaggatactggttaataagactaattaagtaattgcatacttttctgagaggtgccaagattaaacttctatacacctccttaattaaatctatgccagaaaaactttgctttataagtgaataaagcaataattaaaaatattgtggacaatgatataaaaagaaataaaaatcatttaagatctgttaatcgcagaattcgactatgaccgcagaaaagcttgtgaaataaaattattatatttttgtt

SEQ ID NO: 20209 - DNA, 121 bp, Glycine max
  Clone ID: LIB3106-067-P1-K1-H8
cccacgcgtccgcattggacaaaaacaaaataattttcacagtggacaatatgatgtattagaaatgttattttagaaactacgaagtatattaactgaactgtaatcaataatttcagat

SEQ ID NO: 20210 - DNA, 424 bp, Glycine max
  Clone ID: LIB3106-067-P1-K1-D7
ctataagctagtttatcgtgaggagaatatgaagttgtttgttttctttgttgctgcagtagttttggtagcatggccatgccatggcgcaggctaccaaaggttccctctccgaatgaaaactggctatggtgagcgttcttcggaggtaaaatgcgcaagttttaggcttgctgtggaagcacacaacatccgagcctttaaaaccattcctgaagagtgcgttgaaccaacaaaggactacattaatggcgaacaatttagatcagactctaaaacagttaaccaacaagctttcttttatgctagtgaacgcgaagtccatcacaacgacatatttatattcggcatagataacaccgtactctctaatatcccatactatgaaaaacatggatatggggtggaggaatttaatgaaacc

SEQ ID NO: 20211 - DNA, 374 bp, Glycine max
  Clone ID: LIB3106-067-P1-K1-D8
cacacgcgtacggacgacgctgccggtgacagtcaccgtcgaacatacattaactgctctcagaaatatgcggctgcatcgatgtgaaaagacagtattggctactcaactagcggagtttacaagccgaaggctgcttaaggaggtcaacatcaagctcggctccgtatccgctgaactgtcacagagacagcagtcagtggagttgctaaagattgaatactggcgccggacgtgacatgatgaccatatggctattgctgaattacgtgaagcatggctttatgaacatgctatgcatgacgttactgatgaattgccgctccacaaacttcgacaccttttctttgcacatattaggattgaggcagatg

SEQ ID NO: 20212 - DNA, 329 bp, Glycine max
  Clone ID: LIB3106-067-P1-K1-D9
gccagaccaaaaccagagagaatctgtcagtgtttcaagtgacaaacagaacctagatgctgctcctgatgctgctacttggaatggttctgaggaatattcagaccagaggacttccccagacatcaacatatctttgccagatgaatagaacaaggtgatgcagaggctgacatggtagtaactgagtgaaactaacaccggaactttgtcatgacaactactaggttatatgacatgatgtacagttgtcagaaattagaaaggatcattattaaggcatcattatttttccattttatatttactgttgaacagttataagtttt

SEQ ID NO: 20213 - DNA, 336 bp, Glycine max
  Clone ID: LIB3106-067-P1-K1-E1
cgcacgcgtgggcggacgcgtgggttgagatctaagaaggcgaagcaaatggcttcctcagggatctcttccccagctgttaccactgtcaaccgtgccggtgccggcatggttgctccattcactggcctcaagtccatggctggcttccccaccaggaagaccaacaatgacattacctccattgctagcaacggcggaagagtgcaatgcatgcaggtgtggccaccagttggcaagaagaagtttgagactctttcctacctgccagaccttgatgatgcacaattggcaaaagaagtagaataccttcttaggaagggatggattccttgc

SEQ ID NO: 20214 - DNA, 442 bp, Glycine max
  Clone ID: LIB3106-067-P1-K1-E10
cccacgcgtccggtcagacattctcatcaattttgaccagaatgctggttcagcagttggggccttgctcaatagtttggtccgtgtaagctatgccctccacatcatgctggtgtttcctctcttgaacttctctttgagaaccaacatagatgaagttctcttccctaagaagcctatgctagccacagacaacaaaagatttatgatcctcactctggtgctgcttgtattctcctaccttgcagctatagcaatcccagatatttggtacttctttcagttcctgggatcctcatccgcagtgtgccttgccttcattttccccggctctattgctttaagggatgttaaaggtgtatcaacgagaagagacaaaattattgcactgataatgattatactagctgtggttacaagttgtccttgccatttcaaccac

SEQ ID NO: 20215 - DNA, 328 bp, Glycine max
  Clone ID: LIB3106-067-P1-K1-E11
cccacgcgtccggttgggggatccactgttgcagaatccagtttgtgacaccaaatccaaagcactattcactatgactactcagacccaagaggagcttcttgctcaacatctcgaacagcaaaagatccatgatgatgaacctgtcgtcgaggatgataatgatgaggaagaggatgatgatgatgatgaggatgacgaggatgatgaccatgccgacggactagaaggtgatgcatctggtaggtccaagcagaccagaagtgaaaagaagagtcgcaaggcaatgcttaaacttggaatgaaacctgtaacaggtgtcagccga

SEQ ID NO: 20216 - DNA, 340 bp, Glycine max
  Clone ID: LIB3106-067-P1-K1-E12
aatacctctttcttcctcttcctcagtagtgcgattttcgattctcttctctgcaactatgcctaaccctaaggtcttcttcgacatgaccatcggcggtcaacctgccggccgcatcgtgatggagctctatgccgacgtgactcccagcaccgccgagaacttccgcgcgctctgcaccggcgagaagggcgccgggcggagcggcaagcccctccactacaaaggctcgtccttccaccgcgtgatcccgaacttcatgtgccagggcggcgacttcaccgccggaaacggcaccggaggcgagtcgatctacggcgccaagttcgccgacgagaac

SEQ ID NO: 20217 - DNA, 108 bp, Glycine max
  Clone ID: LIB3106-067-P1-K1-E2
cttaagcatttcctaatcattctcccttgtttacaaattttcccataatcaagtgttacaggcactgctaatgtcattgtcttaaatataaggctttcagttgcattc

SEQ ID NO: 20218 - DNA, 379 bp, Glycine max
  Clone ID: LIB3106-067-P1-K1-E4
ttcacctcttcagcagtcgttacagagacttcataacccgaaaatgcctttcaagaggtacgttgagattggaagggttgctcagatcaactatggcaaagagtatgggaggctcgtggttattgtcgatgtcattgaccagaatagggctcttgttgatgctcctgacatggtgaggtcccaagtgaacttcaagaggctatcactcactgacatcaagatcgatattaagaggatccccaagaagaaggatctcattcaagccatggaggctgctgatgttaagaacagatggtagaagagttcttggtgcagaaaactgattgtgcagaacaagagggcatcccttaatgactctgataggttcaagatattgttg

SEQ ID NO: 20219 - DNA, 442 bp, Glycine max
  unsure at all n locations
  Clone ID: LIB3106-067-P1-K1-E5
cccacgcgtccgctgggctgcttaaacttccaacagacaaggctttattggaggatgctgaatttcgccgttatgttgagctatatgcaaaggacgaggatgcattttttcgagattatgctgaatcacataagaaactttcagagctaggctttgtgccaagttcaaagccgatttctattaaggatgggaccatactggcacaaggtgctgtaggagttgtagttactgccgcagtggtgatcatcagttacttgtatgaagttcgcaaaagagggaagtaaactggacttgttcatttcacttggctgttacgtntgcgtgaccctgacccataatgtgaaaacagggttcattttgcagcttcagattctgttacttagtacccaataagataatgcacaagccttcagactttttttatatgaatagactaaactat

SEQ ID NO: 20220 - DNA, 437 bp, Glycine max
  unsure at all n locations
  Clone ID: LIB3106-067-P1-K1-E6
ctgatgtgcccccatctatgactcaaaacggtaggtcaagcagatattcctttggctcaagcaatggcaatggtgatacccctgcacaaaatggctctgctgttatcaatgttgatgattatgatagtgatagctccaattttgcaccatccacgccatcaactatgtcaatggctgttccagcagaactaggtggagctgtacccttgatcaacagattccaggtggatggatttttaaaattaatgcagaaacaaattcaatctgctgggaaacatggatttttttctaaaagatctgtangtccccaagttcgagaaaaagttacatttgaggacatgttgagttttcaaaaggatccaattccaacatcattgctcaagttaaatgttgattttgtaagtagggcaacaaaattattccaaataattttgaaa

SEQ ID NO: 20221 - DNA, 174 bp, Glycine max
  Clone ID: LIB3106-067-P1-K1-E7
aatttaccttttttttaactcattcaaaacgacctggattgtatgtagtgtgtgaattctgtgtcataccttatctgcagcttcaaagttagtgttctcattaagtaagcaatatagttaacgaaaaaaaaaaaaaaaaataaaaaccatacaaacaataaagtatgtcaatag

SEQ ID NO: 20222 - DNA, 454 bp, Glycine max
  unsure at all n locations
  Clone ID: LIB3106-067-P1-K1-E8
ttcgaactcgagtggtaatggagacgattttacaagcaacgtgaaaaggctcataattgatttggtcaccatttgaaggaagagaatgtgaaagagtgaggtcagagttgccagtagacgaagacaatcgtcatcagttgcagctgcaaaggaatgaggtaattgcattgacgaaccttctcaatcgactctcggaatccttcaaattcgtccacgaagtgggacctacagttgaaagaatcatggaaggaggacatttttctgctcatacaagaactgattagctcatggaaaaaaatttggtcctatgtatctaaaacttaggtgtgtatgtgcgattctagtgttgacccataaggggataataaaaacccttttaggctaacactntataagaagactatggtctccaatataccaatccaccaaaagctcatccttaattctcttcatc

SEQ ID NO: 20223 - DNA, 307 bp, Glycine max
  Clone ID: LIB3106-067-P1-K1-E9
cccacgcgtccgcccacgcgtccggtggttttgaagctggtatttctaaggatggacagacccgtgagcatgctcttcttgctttcaccctaggtgtgaagcagatgatctgttgctgtaacaagatggatgccactacccccaagtactctaaggctaggtatgatgaaatcgtgaaggaagtctcttcttacttgaagaaggttggttacaacccagacaagattccctttgttcccatctctctttttgagggtgacaacatgattgagaggtccaccaaccttgactggtacaagggaccaac

SEQ ID NO: 20224 - DNA, 148 bp, Glycine max
  unsure at all n locations
  Clone ID: LIB3106-067-P1-K1-F1
cccacgcgttcggtggaaactttggacagtgtactnattaacactatgaaatactaccagagtggaatgacacatgaagctccatgcagagaatcacagcttaaacggctgcacaatcttctagtggtaaaagatgaacaaattatta

SEQ ID NO: 20225 - DNA, 224 bp, Glycine max
  Clone ID: LIB3106-067-P1-K1-F10
gactcttgcatgcacttcaatccttcgtagcattaatgttgtggccaagtcatcatgagcgtcatacgtatttctttgtgaatgtaaatcaaaattataagagagaaaatggtgcttttgtactacagattactataaataaaaaacttttatggttttcaaaaaaaatataattaaaaaattaataaaaaatatattaaaaaattttataattattatatttt

SEQ ID NO: 20226 - DNA, 360 bp, Glycine max
  Clone ID: LIB3106-067-P1-K1-F12
cccacgcgtccgcccacgcgtccgatcgagataactagaaacagtgtgatgaaaatgaaggtccttgttttcttcgttgctacaattttggtagcatggcaatgccatgcgtacgatatgttccctctccgaatgaacactggctatggtgcccgtactccggaggtgaaatgcgcaagttggaggcttgctgtggaagcacacaacatctttggctttgagaccattcctgaagagtgcgttgaagcaacaaaggaatacatccatggcgaacaatatagatcagactccaaaacagttaaccaacaagcttacttttatgccagagacctcgaagtccatcccaaggacacatttgtg

SEQ ID NO: 20227 - DNA, 313 bp, Glycine max
  Clone ID: LIB3106-067-P1-K1-F2
agcgcccaaagtcacccactagtacccgctttctccgatctcccgccgccgcatcccgttccggatctgtccacccgtttcagtctcgagccaccgtgccaacagcgctgtttcgccgcgcatttcagcaggccaccaccgtgccacccaaccacacccactgtgccccccatttctggagaagtacacttggagcaaatcttgagagaagagattgtgtactggataaaggagaaatatggaggaagggaaaactattatatgtgactatactgaacatgttctcttcagtattttatggaactcttggctc

SEQ ID NO: 20228 - DNA, 452 bp, Glycine max
  Clone ID: LIB3106-067-P1-K1-D6
cccacgcgtccgtccacttcgaaagggttaggtttacgaagaaacaccaatcctgtccgagaaatcaacgatgcctcgctatgatgataaatatggtaatacccgcctctatgttggacgcttgtcttcgaggacacgttcccgtgacctggagcgtgtcttcagcagatatggaagaattcgaggtgtagatatgaagaatgattttgcctttgttgaatttagcgatcctcgggatgctgatgatgctagatatagcttggatggtcgtgatgttgaaggaagtcgtatcattgtggaatttgccaaggggggtcctcgtggttcccgggaaaacttgggtcggggtctacctcctggatctggacgatgctttaactgtggcattgatggtcattgggcccgagattgcaaagctggggattggaagaacaagtgttaccgttgtgggg

SEQ ID NO: 20229 - DNA, 217 bp, Glycine max
  Clone ID: LIB3106-067-P1-K1-F4
cccacgcgtccggacacagaagaagtgaatgcggagagttgaaagaaggatatggaagcagggtcagagttagaccaaggtatgaaggtgttgtattcgtgtttagcgaatatcaattggcgcttttaacttttttacttgcgtttcttatatttatattttttctgctttctatttcaagtgtgatatctatctttttatttttattgtttttttc

SEQ ID NO: 20230 - DNA, 387 bp, Glycine max
  Clone ID: LIB3106-067-P1-K1-C1
cggacgcgtgggcgaaaccctcttcatcttattctatctgtgacgagcatcatggcctcaagagcagtgttattgttggctatgtgtgtgcttccggcgatggttgtggccattcgcccagcaaagaaccctttttgcgtgaagggtcgtgtctactgtgacccttgccgtgctggttttgagacctcagctaccacctacattgctggtgctgagattatgttgcaatgcaagagcagggttagcaacgaggttgtgtacacgaagaaggggtacaccgacttaaccggagcatacacaatgtacgtggatgaggatcacgcagatcagatctgcagtgccaagcttgtaagcagccctcaccctcaatgcaaggaagtcacccca

SEQ ID NO: 20231 - DNA, 439 bp, Glycine max
  Clone ID: LIB3106-067-P1-K1-C10
cccacgcgtccgcccacgcgtccgcttcacttccacgcctacatatctctctcattacctatctgccactccacttcccttcaaaaaaataatagcacagaagcagaatcaagagtggctatagcgtagatggaaggagtaggagcacgccacaacgaaattagcgacggaatgcaatgcatgaaccaccctcacagaaacaacaacaacaacaaccctggtgggatctgcgccttgtgtctccaagataaactccgcaaccttctctcttcttctttccctacttcatcacctcctttttcttcttcttcttcttcttccccttctttcacttcttcttcctcggttaaaaccgaccacgaccacgactacgaccactacacgcgctttggcctccctttcctggtacccaagaaaaccttcttcttcaccaccaaaa

SEQ ID NO: 20232 - DNA, 311 bp, Glycine max
  Clone ID: LIB3106-067-P1-K1-C11
gcaagcaatgttatggcaatggctaccaccagagaggcacccgcagcagaagttgccacgaccgagctctctgttgccgagacgccagagattgtgaagactattcaagaagcttgggacaaagttgaagacaaatatgcagtgagttcacttgccgtagccggtgtggttgcattggttggctcagctggcatgatctcagcaattgataggcttcctttaattcctggggttcttgaggtcgtaggcattggctacagtgggtggtttgcttacaagaacctatttttcaagcctgacagggaagcttt

SEQ ID NO: 20233 - DNA, 362 bp, Glycine max
  Clone ID: LIB3106-067-P1-K1-C12
cccacgcgtccgcgaggcgagacatcgatttcaaaggtgcgtttctgctgtgctagggtttctgcatcttccacctccgtcgcgatgaaaccaggcttcatctgattccgatttcccttcgctccttctcctccttaaccttcatcttcttcgattcctctacaaattatgattattattatgatgaactcgatcttcgcctcgcataaccttcgcgtcttcggtcccggcttgaatcccttcgcaccttattgcatcgccaatcactcccttttcctttccctttcctctcgctaaattacaattcccttcctttttcctctccaacttctccttctccgtttctccgaacatgtaaattc

SEQ ID NO: 20234 - DNA, 451 bp, Glycine max
  unsure at all n locations
  Clone ID: LIB3106-067-P1-K1-C2
atcagaatcaaagcatgagtaatcaagcttcaagtcaatgaagctagactcatccatgcctgtgaaatcactctctctgaaagaagagaaggtatcaccccccatgttgttgctcatttttgcagcagaaaactcatgctttgattctgatgagtaatcaagcttcaagtcaatgaagctagactcatccatgcctttgaaatcactctctctgagtgaaaacacacgcctatttaccccaccatagaatccaccaccatcaccaacaccatgcattaatccaacaacctttttcacaccacccttgagatcacttccactttcataattattgttatcaaacatgaaatcccttctctctactccatcaaaaccactccttcttggctcaacttcacctgatccacttntcctgccagattccaacatattaaccccaggacttctagct

SEQ ID NO: 20235 - DNA, 463 bp, Glycine max
  Clone ID: LIB3106-067-P1-K1-C3
cccacgcgtccgatgattcataccttgacagctatatcagtaccattggagtggactttaaaatccgcactgtggagcaggatgggaagactattaaacttcaaatttgggacactgcgggtcaggaacgtttccggacaatcactagcagctactatcgtggggctcatggcattattgttgtttatgatgtcactgaccaagagagcttcaacaatgttaagcagtggctgaatgaaattgaccgttatgcaagtgaaaatgttaacaagcttctagttggaaacaagtgtgatcttacggcaaataaagttgtgtcctctgagacagcaaaggcatttgctgatgaaattggaattcctttcatggaaactagtgctaaaaatgccaccaatgttgaacaggctttcatggccatggctgctgaaattaaaaacagaatggcaagccaaccagtgaacaa

SEQ ID NO: 20236 - DNA, 334 bp, Glycine max
  Clone ID: LIB3106-067-P1-K1-C4
gtttatcaatggcacttctccacccaaatcttcttcccactttcaattccaacactcttacgtttccttccatcaaactcaaaccctcactctcgcacgtgccttctccaacccccacacgcttcagtctctctgtttccgcggcggaaaccaccgcttttgccgcccctcccactccccaacctgagaagcttggagttgtagttaagccaacggagaagccgagacttgtgttgaagttcatatggatggagaagaacattggaattgcgcttgaccagatggtaccgggccatggcaccatccctctgagcccatattacttttggccccg

SEQ ID NO: 20237 - DNA, 200 bp, Glycine max
  Clone ID: LIB3106-067-P1-K1-C5
ctcaagatcagggctatttatcactatgtatattctatccacaattatatttaccacacaaccactaataaaccctttttgacaaaaactttgtgtttactatgaccttcttcatgcattatattagaccataatttcaatctacaaaataactgctataattattattcaatgcaataacataattacctatatacata

SEQ ID NO: 20238 - DNA, 424 bp, Glycine max
  Clone ID: LIB3106-067-P1-K1-C6
gtccttggggacagaaggcattctcaaattatcttggtgacaataaatctgagtgggaggattacgatgccactcgtttggtaacaaagtttcccaatgtttcttccaccattttgattgatcagggagaagatgacaaatttttgcctgatcaactgttgcctcacaagtttgaagaggcttgtaaaaaggccaacgttcccctactgttacgtttccaacctggttatgaccacctttactactttatagccacattcatagatgatcacatccgacatcatgctcaagctcttagacttaattaagttatgtgcactctgattatctataactattttgtcaactcttctaactttactaagctgttcatttgctcgtggtaccatgggttgtacttgagtatggtatggaacttctttct

SEQ ID NO: 20239 - DNA, 273 bp, Glycine max
  unsure at all n locations
  Clone ID: LIB3106-067-P1-K1-C7
gcttagtattcaattctgctatgtattgaactataaatagcctgtgctagtgcactacaataatgagaggcaaactggcaaagtgcatatctactcattaagtagtttagcccttcctaaagagcatatatatctacatgtgatgaaatgggttaaactagctagcaagtagcaagaggcaagaatcttgcacgcatgagatcaggccatgtggacttgatgtagtgtaaattgtctgatttttggcaaaaaaaaaaaanaaaaaaatacaaa

SEQ ID NO: 20240 - DNA, 450 bp, Glycine max
  Clone ID: LIB3106-067-P1-K1-C8
accatggccaacaacaacgaagaggaagaggaagcagtgacgccaatggtgaagttgggttcttacggtgctgaggttcggttggtggttggtggggaggaatccgccgctgaagagaccatgctgctttggggtattcagcagcccacactttccaaacccaatgccttcgtctctcaagcttccttgcaactctccctcgactcttgtggccactctctctccattcttcaatccccttcctcattgggaacgcctggagtaactggagcagtgatgtgggacagtggagttgtactgggaaagtttctagagcatgctgttgactcagggatgcttgtccttcagggaaagaagattgttgaattgcgttctggttgtggattggttggcccttttgggtagtgaggtcattgtcactgatctgcgagataggctgaggctactgag

SEQ ID NO: 20241 - DNA, 358 bp, Glycine max
  Clone ID: LIB3106-067-P1-K1-D1
cccacgcgtccggccatatctccgtacactgctacaccaagcattgtacaagctatcactgcgctatggacccttgatccacgtcatgatcggctcgaagcacgtggtggtggcgtcgactgctgagacggccaagcatatcctgaaaacctcggaggaggcattctgcaaccgtgccttaatgatagcgagcgagagcctaacctacggcgcggcggactacttcttcatcccctacggcacatactggcggttcctgaagaagctctgcatgacggagcttctgagcgggaagaccctggagcatttcgtgagaatccgcgagagcgacgtggatgcgttcctcatgagaatgatg

SEQ ID NO: 20242 - DNA, 246 bp, Glycine max
  Clone ID: LIB3106-067-P1-K1-D10
gaagcattagcaaaagcaagaagaactagtctaagcataaatggcctcttcagtgatggcatctgtggccctcaaacctgcccctttaactgttgagaagtctcaattagaagcctttccttccttttaagggacttctcttcattcaaagttgttgccagtggtggcaagaagatcaagactgacaagccttatggaattaatggtggcatggctttgagggaaggagttgatgcatctggcacg

SEQ ID NO: 20243 - DNA, 315 bp, Glycine max
  Clone ID: LIB3106-067-P1-K1-D11
aacaaaaacaaagaaaaaaaaaacccttagccaacacaaccatcatggccacctctgctattcagcaatcagcattcactggtcaaactgctctgaagcagctcaatgagttcgtccgcaagaccggtggcgccggcaaaggtcgcactaacatgcgccgcaccgtcaagagtgctcctcagagcatttggtatggccctgaccgtcccaagtacttgggtccattctcggagcagattccatcatacctgaccggagaattccctggtgactacggatgggacactgctggattatcagctgacccggaaacct

SEQ ID NO: 20244 - DNA, 423 bp, Glycine max
  Clone ID: LIB3106-067-P1-K1-D12
ctaattctgctaggtgagtgaaaatggcggtacccttgctctccaagaagatcgtgaagaagcgcgtcaagaagtttatacgcccccagagtgatcgcaagatctccgtcaagccaagctggcgcagacccaagggtattgattctcgtgtcaggagaaagttcaaaggatgcactttgatgcccaacattggttatggctcagacaagaaaacccgccattatctaccaaatggtttcaagaaatttgtcgtgcacaatgtgaaagacctggaacttctcatgatgcataacaggacatattgtgctgagattgctcacaatgtatccacaaggaagaggaaggacatagttgagagagctgctcagcttgatgtggtcttgacgaacaagacggccagactacgtagccaggaggatgagt

SEQ ID NO: 20245 - DNA, 277 bp, Glycine max
  Clone ID: LIB3106-067-P1-K1-D2
cccacgcgtgcgcgcttgttgccgttggaattatgccctagctagctgcacaatggctgacgtgtaggagcatgatgcggatggagtaatagctgggcaggcagagaatagaacgttcaagaagaggagtatcatgggcagttgatctagctgcacttctagccatgttcagctatgtactgctgaagatgtgcatggctcatgctcatagaaaggtatacagagggttcaccagaaagtgcatggactacatcaagaaactgtacgtagatggaag

SEQ ID NO: 20246 - DNA, 251 bp, Glycine max
  Clone ID: LIB3106-067-P1-K1-D3
aatacgcatagcgcactggacgccatttcgaatacaggttgatggattgaagtgccatagttggccgaagaggatggcttgtaggtgatgctctgaatgccttttgaagctagtgaactcaatatcgaccattgctgatctgcccacggtcgactatgggactgatcagtttgatgaatacactacaactgcgaataacactctcactgtcagtgatgatcagactgtagagcaactaggccgacccatgc

SEQ ID NO: 20247 - DNA, 370 bp, Glycine max
  Clone ID: LIB3106-067-P1-K1-B9
cccacgcgtccgagtgaatgccccatctgcttagaagagttctatgtagggaatgaggtccgtggcctgccctgtgctcacaattttcatgttgaatgcattgatgagtggcttaggctcaatgtgaaatgtcctcggtgccgttgctcagttttcccaaaccttgatcttagtgcactgtccagtctccgtgctgagcctgaacaattttctgccagtgttgtgacaacagccagatatgtgagaggccaaccatctagtctaagttaccggctaagattgcagggtcttctgtgtccagtccgtgctgaaattgcaggaccagttggtgacatagataatgcgttgaaaaatgctcagaatggcgttg

SEQ ID NO: 20248 - DNA, 309 bp, Glycine max
  Clone ID: LIB3106-067-P1-K1-D4
ctctcaccttcgagaacatcgacaaaaagataaagggtgaataattagcagctccttctagttccggtgtcggtgtgggtgtttgaatctggtgaaggatgtcaattgttccaatcaaccagggtgatgccaacggctccaaccccttcgcttcgtggggtcaattcgtggattttcctctccctccttccatctccggcttcttccccggcttggaattcggattcggattcggatcatccgtgaacacacgtgtggactggagggagactcccagagcgcacgtgtggaaagctggtgcttcccggc

SEQ ID NO: 20249 - DNA, 342 bp, Glycine max
  Clone ID: LIB3106-067-P1-K1-A2
gtcccttgctctgtgtcgccgtaacacaaattgggaagagagagaaagaaccaccccacccggcaacagcttttgttcttcacaagacatagcttcgtgtgtgtgtttcttttcttccttccagcttggaaagactgaagtctctgtctttttcaggttttgggggtgttgttgaagatgttggtagctaatagctttgatctatggcgaaaggacggttttttctcttcggcagaggacgtgcaggaatcagctgatataatggaatctgcatacagggcatggttgagagagaagagagaaaggtcaactcctgaggaattaaatgaactatgcagagag

SEQ ID NO: 20250 - DNA, 223 bp, Glycine max
  Clone ID: LIB3106-067-P1-K1-A3
gaaataaattgaaaacagagaaagatgaactgcgacgtcgacaagggtttgctgtggaagcgtccagtggtgaagtccgaccactacggcaaggtgggccccgacttcggcatcggcgccggctgcggactcagtttcggccttggccttctcggaggagtgggtgttggccctggaattcctggattccaagttggttttggatttggtgctggatgtggtg

SEQ ID NO: 20251 - DNA, 455 bp, Glycine max
  Clone ID: LIB3106-067-P1-K1-A4
cccacgcgttcgaccaaacaccaaagaaagaggtgaagtcaaatggtccttagttctgggagtgttgatgcttgagtcttgacggaacgaacggaaaaggggatctcaatggacaacaccaagccccttatcgaactggaactcgacgatgatggcagaatcagaagaaccgggaatgtgtggactgctagcatacacattataacagtggttgtaggggcaggggtgctgtctttggcatgggttatggcacaactaggatgggtagctggcataacccgtatcattaccttttcagctgtctccattttcacttacaatcttgtagctgattgttacagatatccagaccctgtcactggcaagagaaattatacttatatgcaagctgtcaaggcttacttaggtggaacaatgcatgttgtttgtggaatggttcaatataccaagctcgc

SEQ ID NO: 20252 - DNA, 275 bp, Glycine max
  Clone ID: LIB3106-067-P1-K1-A5
cccacgcgtccgggttttgtgtatggtgttctacaaaaacagagaagtttcagggaaaccgagaatgggtagctgctatgaggacacaggatcttcatctattcctgcattaatggactcttacataagttttgaccaaactcaaacccatgcatatgagtttgagcaagtgctatgcttcttcattatctgtcagaacgaaacaagctacattgtcaaccacatggccactatggagcctaaagtaccttccaaccatgcacactatgcatatg

SEQ ID NO: 20253 - DNA, 333 bp, Glycine max
  Clone ID: LIB3106-067-P1-K1-A6
aaaaaaaaaaaaaaaaaaaaaaaaaaaaaaattaaaaaaaaaaaaaaaaaaaaaagaaaaaaggaaaaaaaaaaaaaaaaaaaaaaaaaaaaaaaaaaaaaaaaaaaaaaaaaaaaaaaaaaaaaaaaaaaaaataaaaaaaaggggagatcgttttaatgataaaaactttgaatacgtgtaactgttaatataaacattttaaaaggggaagcaaaatcaaaattaattggcctggtatttaaaaattgtaaatttgaaaaactttgttgtaaaaaaattaattatattttaataaatttattttttaaaaatttgggtattttttaaaaa

SEQ ID NO: 20254 - DNA, 317 bp, Glycine max
  unsure at all n locations
  Clone ID: LIB3106-067-P1-K1-A7
cggacgcgtgggcggacgcgtgggtttgactctcacaaaccttgcatccatccacacatggctggcatgaactctagcgtattggcctgtagctatgccatatctggtgcagcatgctccgagctcaatgggaaggtcacttccgtggcctctgttgcatcctctggctacaagttgccattgatcaaatgtgaggccagagttcccaaagccaaagaatctgaaagaaggagaggtgcccttgttctcttggcagctaccctnttcatctctgcagcctncaattcttctgccaatgctgngatcatngatgatta

SEQ ID NO: 20255 - DNA, 197 bp, Glycine max
  Clone ID: LIB3106-067-P1-K1-A8
tacacacattcaccaaattaagattttaattttaacgaaccttacatctatccgcgcatatgcgtcattatctacagcacatacccaaaaggctatctatatctacaacaccatgctcctaatctaacttgaactctactatcattgcctaatcataataactcttgaatcaattgactgttagtatacacattata

SEQ ID NO: 20256 - DNA, 329 bp, Glycine max
  Clone ID: LIB3106-067-P1-K1-A9
gttttatagacgggaagcttattttggttggtaacaggaagttgatggaggaaaatggcatagatatttcaacagaagtggaaaattttgtggtagagctggaagaaagtgcgaagacagggatactggttgcatataatgatatattaactggagtcttggggattgcagacccactaaagagagaggcttctgtagtcatagagggcctccagaaaatgggtgtcacacctgttatggttacaggagataactggagaacagctcgtgctgttgccaaggaggttggcatccaagatgttagggcagaggtcatgccagcgggaaaa

SEQ ID NO: 20257 - DNA, 533 bp, Glycine max
  unsure at all n locations
  Clone ID: LIB3106-067-P1-K1-B1
tccaacgccgtccggcccactgcgtctcgtcccactgcgnntcctgcaatgggctattggatagggtgaataccgtcganntatctcacagagggcctatgtcgaagcggtgggatttggcttgggaaactccgagccgattgtcnttactatcggcaaaaccgaatagcgttaaagcgtcgccaacccttcttcgccactcgtcactgctgcgtccctttcgacccagttanaatccttcaactcccactcccctttcaccgaatctccttcaatttctcaatcgcttccctcacatttgtcatacaggttgaagctcccaagggttaccctatggaggcgtgccgattggcttatgggctatttgcaatggtcttctaacgcgtattggcagagagaactgccatcgatcnttggcgacgaccaatttcacttctcttctacgacaccaatatnccctcgccaggctggtctttcgggttctaagcggatcgtgtgtgctgcgttgaactgggttgtggatttctacaacg

SEQ ID NO: 20258 - DNA, 286 bp, Glycine max
  Clone ID: LIB3106-067-P1-K1-B12
atattgtaaaagtctttttcttcttcttcggctttgggttgtaattaaacattttctacatagctggattagtagtacttgtgaaaaacttgtaacgtgaaattggagaggctaagcagaaatgcttctgcttgatgttaagtgttctcctgtgaatgttaattatgcacgaaatcgagagggaaggacgacggtaaaaaatactgatgaggttgagatcactatgaaaggtaatggcaagaaattggattgaggccattggagattttaatttattcattttatt

SEQ ID NO: 20259 - DNA, 338 bp, Glycine max
  Clone ID: LIB3106-067-P1-K1-B2
cccacgcgtccgcccacgcgtccgaaatgattattgatagtgaatacgtgatatctcacaaggcctatgcaagggtcgtattgcttgagaaccacgagcgatgtctactacggcccaaccatagcgataagcgtatccaacttcttagccaccgtcacgctgcgtcccttcgaccagattatcctgcaacctaacacccttcaccatctaattcatttctcatcgctcactcaattggccaacaagttgagctcccaatgttactatggaagaatgcgattgcttatggctacttgcaatgtcttctacacgtattgaacacagaacgccattgatct

SEQ ID NO: 20260 - DNA, 460 bp, Glycine max
  unsure at all n locations
  Clone ID: LIB3106-067-P1-K1-B3
cccacgcgtccggcaatcgcgttacgtgaagctgactaaggacaatgtttctatggaagatgtcacgcctggtgaactcaatcagccaattgaggttcctcagttggctgttcacaagtgcatggaatgtgggcagccattacctggaagctatacacctgctgctgatgaaccttggatgactgggatctttggatgcactgaagatagggaaaattggctgttttgtccttgggtattatttgggcgcaatgtagaaacctttcatgaagaaactccttggactggaccatgcatttgtcatgccatntatggagagggtggcattgctctggcaactgcaaccgcaatctctaatggcttcattgtcccagggacatcatgtctcatttttgagggcttattctttacttggtggatgtgtggaatctatactgggcaggtttgacaaaacttacat

SEQ ID NO: 20261 - DNA, 457 bp, Glycine max
  Clone ID: LIB3106-067-P1-K1-B4
ctcttccataaacgggtggtgcctctcttccatctccccagccaaaacctctctcaggaaggccacattacgcccttccgtcttcgcaacccttaacactccttcttctccttcctcttcatcttccttcccctctctcattcaagacaggcctgtttttgctgcccctgcccccatcatcaccccaactgtgagagaggatatggcaaaggaatacgagaaagctattgaagaacttcagacattgttgagggagaagagtgaactcaaagcgacagctgctgaaaaaagtgagcagataacagcttctctagggacatcatcatctgatggcatcccatcatcagaagcctcagacaggatcaaagctggtttcattcacttcaagaaggagaaatacgacaagaatccagctttgtatggtgaacttgccaaaggccagagccccaagttcatg

SEQ ID NO: 20262 - DNA, 229 bp, Glycine max
  Clone ID: LIB3106-067-P1-K1-B5
attcaagtagttttttctcggctttatattgttcttaagcctacgctttcttgaatccaattgtggatattatgccagtaatacccttactcttttttcttttagcttttgtttggcaagctgctgtaagtttcttatgatatctgttattcgtgttatgttttttaatcttacaattaatcatttattattaacaacttttcatattcctaatatactttatatttta

SEQ ID NO: 20263 - DNA, 256 bp, Glycine max
  Clone ID: LIB3106-067-P1-K1-B6
attatgctttctttcttaaaaaatttaaaattatatataataacatattaattggaaataagtactataatcaaaaataataaaaaaaaattatatttactaatatatataaaataaaataattaatttcatttttcaatatataaaaatatcaattattataattaaatctaaattaatattactatattttttttgttttttttataaatttaattttcatttctatctttaattaattaatctattttaatat

SEQ ID NO: 20264 - DNA, 451 bp, Glycine max
  unsure at all n locations
  Clone ID: LIB3106-067-P1-K1-B7
cccacgcgtccgcccacgcgtccgcccacgcgtccgtttttttttttttgccttcttttcagtcctttcttttcttcaaatcaaggaactcagctatgactaccagagaaatccttcaaaagatgaaggtaaaagttggtttgggttcatcagaccctgactcagggaaaggaaagagcaagatgtcaaagaacataactcatggttatcatttggtgaaaggaaaatcatatcatgacatggaggattacgttgtggctcaatttaagcaaatagataacaatgaattgggtttggttgcaatattcgacggccatgcgggtcagaacgtacctaattacttgcggtcccatttgtttgataatatcttacatgagcctgacttctggaaaagacctgcagatgctgtgaagagagcatacagtaaaactgattctaatnatttagatat

SEQ ID NO: 20265 - DNA, 412 bp, Glycine max
  Clone ID: LIB3106-067-P1-K1-B8
cccacgcgtccgtgatgaatgaaattgaggctgatcagtcaggaacaatagctgaggtattagctgaggatgggaaaccagtcagtgtagacatgcctctttttgtaatagttccatgagtaccggaagggaccttacttcaaagttgatatgaaatctccctagcttgttggatagcagcatggtatttgatgtcagattttctgttcagaaatttcttgagtgataatgtttgtctcattttaagaaatccttgtcttctttagcccccacccctcctcttaatttatcgagatattttggacataaaagtccccagcatatcagaatgaatattggacatttcagttctaagcagatttgacatttgtagtagtatttatgttttctgtttatgaaaaaaactataaat

SEQ ID NO: 20266 - DNA, 370 bp, Glycine max
  Clone ID: LIB3106-067-P1-K1-A12
cccacgcgtccgaaacgaccaatgaagggaatgcttactggccctgttactattctgaactggtcctttgttagagatgaccaaccaagatttgaaacatgttaccagattgctttggctatcaaggatgaggttgaggatcttgagaaagctggtattactgtcatccagattgatgaggctgctctaagagaaggtttacctctgaggaagtctgaggaggctttctatctaaactgggctgttcacttcattaggattaccaactgtggtgtggaggacactactcatattcacactcacatgtgctactccaacttcaatgacatcattcactcaatcttagacatggatgctgatgtgatcacct

SEQ ID NO: 20267 - DNA, 451 bp, Glycine max
  Clone ID: LIB3106-066-P1-K1-G2
gctccatcactgcagcattagggtttatcatctgcttcaatggggaagggaacagggagcttcggtaagaggaggaacaagacccacactctctgtgtgaggtgtggccgccgcagcttccacctccagaagagtcgctgcgccgcttgtgctttccccgctgcacgcacgcggaaatataactggagcgtcaaggcaattcgcagaaagaccaccggaactggcaggatgagatacttgcgtaacgtgcctcgccgtttcaagagtggcttcagagaaggtaccgaagctgcaccaaggaagaagggagcagctaccactgcatagacctttcaaagatcgttctcgttgggtacggatttacaggaatagattgctttttgtgcttttggcaagtattttggaacacttatttttagagtctcattgcttctttatcccccatttaatt

SEQ ID NO: 20268 - DNA, 431 bp, Glycine max
  unsure at all n locations
  Clone ID: LIB3106-066-P1-K1-G3
accgattgctagaatggaatttcgatgctcagtcatctcttttaccattctcttctctcttgctcttgcaggagagagccatgtccatgcatcgctacctgaggaagattattgggaagctgtttggccaaacactcccattcccactgcactgcgagagcttctaaagcctctccctgcaggtgttgaaatcgatgaactccctaagcaaattgatgatacacagtacccaaaaacattcttctataaagaagaccttcatccaggcaaaacaatgaaagtacaattcaccaagcgtccctatgcacaaccttatggtgtatatacatggttaacggatattaaagacacctctaaagaaggatatagtcttgaagagatatgcatcaagaaagaagcgtttgagggagaagagaagttntgtgcaaaat

SEQ ID NO: 20269 - DNA, 145 bp, Glycine max
  Clone ID: LIB3106-066-P1-K1-G4
gagagctaagaaccctaagaaggacagatttgtgaccaataatgccaggaaagagacccaggaacaaccagggaagaaccagacacaaacacgggaaacacatgacagaagcaaccaagcgccaatggaccacagagcacactgg

SEQ ID NO: 20270 - DNA, 440 bp, Glycine max
  Clone ID: LIB3106-066-P1-K1-G5
cccacgcgtccggctccttcgaactgttgtttggtctcttctctcttatccatggcatcagcgtttctcaccctaccaactcccttcctacacaaaaccaatgccatcagtttctctaacaagagaccctcatttttgcagaggagctctctgaagattcatgcaattaccaaaaaatgggaacccacaaaggttgtgcctcaagctgatagagttcttattcgattggaggagctttcacataaaacagttggtggacgattgctgcctaaatcagctgttaaatttgagcgctatcttgcgggagaaatcctaactggtggtgctgaagctggagaactaaaggctggaacaaaggtactattcactgacatgaatgcttatgaggtggaattggcgactgatgcaaaacactgcttttgtaaagcacgtgacttatt

SEQ ID NO: 20271 - DNA, 449 bp, Glycine max
  Clone ID: LIB3106-066-P1-K1-G6
gctatctccgatggctctctctgcgcatatttgccgtttccccgccacacgcgctgacacttctttgccggagagtctcaccagaatccggtgccggaaacctctctccgtccgatgctccggcgattccacttccggctctgtgggttcggagttcgatccgaaggtgtttcggaagaaccttactcggagtaagaattataaccgcaaaggatttgggtacaaggaagagaccctccaactcatgaatcgcgagtacaccagtgatatcattaagactttgaaggaaaatgggtatgagtatacatggggtactgtcacggtgaagcttgctgaagcctatggattctgttggggagttgagagggctgttcaaattgcttatgaggccagaaaacagcttcctactgagacaatttggcttaccaatgaaatcatccacaacccca

SEQ ID NO: 20272 - DNA, 348 bp, Glycine max
  Clone ID: LIB3106-066-P1-K1-G7
gaaagaaagggttaccgtctagaggctcatttctcagttctttgtccagaagtttggcacaggggcatcaacccaagaaatttgataactaggaacaagcttcatgcagccatcaaattctgtctcttctctctatctctttgcctcactcgggaaacatgggtgttggtagatcaaattgatcttaattattgtttggtgcattcatgattgattgttttagagtgtgtgaggaattctagttccattttttcattgcccattcaatccatatgattttttagcccaagccaaatttaccttaaggtttactttgtaattgttacagtttggtgatataatttatgt

SEQ ID NO: 20273 - DNA, 125 bp, Glycine max
  Clone ID: LIB3106-066-P1-K1-G9
ctactcttatcactcatctatggctacatttttttgaccttgtttaccatctttcttctacggcaatatcatcgggaagatctagaatctattactatgctctaagtgaagaccactattaggag

SEQ ID NO: 20274 - DNA, 262 bp, Glycine max
  Clone ID: LIB3106-066-P1-K1-H11
gggcggacgcgtggggtttgggtttgtgaccatgtcttccgttgaggaagctttagcggctgctaagcagttcaatggctatgaacttgatggaagatcattgagagtgaattctggaccaccttctgctcggaatgagagtgctcctcggtttagaggtggatcttctttcggttccagaggtggtggtcctttagatagtgaaaaccgagttcatgtaggtaatcttgctcggggtgttgtctatgtaccacttgcgtct

SEQ ID NO: 20275 - DNA, 481 bp, Glycine max
  Clone ID: LIB3106-066-P1-K1-H12
tcgggacgcgttcgccacgcgttcgcccacgcgttcgcggacgcgtggggttttgcttacttggttgattgccagaggcttcaacatgccctctctggtgccaagtgaattcatcaaccgtgtgttaattggacgaacaatttgagaggatcgaatgttgttcgcggtcatgttgaggaaattgacaaggcaattagtgagtattcttaggaaatgggcatcaagtcgatttactagtctatgtagtagcaggtttttatagtttttggattattagaagcacaactatgggtttttgtgatgtatgttgtctaatcaaatccttcaaggatggtattgtaggattttggatttcaactgcccggttaccaatgcatgttaagtgattaattatacattcatcatcgtcatagttcaccaatatagggagaatttattgtatgagaatgattatcctatcttaaaatgaaaatgataattt

SEQ ID NO: 20276 - DNA, 450 bp, Glycine max
  Clone ID: LIB3106-066-P1-K1-H2
aatgggtcacctaatttctttcaattcactttcattatagtatttcctgattttccttcacacgctgctgtgtggtctttcttaatttgcctcttcttttctcttttcttgttgtcgaaccatcttggaaaagaagttggctgatgctgatgtctctgaggaggatcaaaacaacctgcttaaatttttagagaaaaaggaaactgaatatatgcgccttcagaggcataagatgggtgttgatgattttgagttattgacaatgattgggaaaggtgcatttgttgaggtcagagtctgtatggagataactagtgatcatgtatatgcaatgaataagctgaatatattatatatgcttcgtatagtccaggttgtgcatgttaaagctgtaagggtatttcttgcagaggttgactgaaattgctttgtctaagctttattgttctt

SEQ ID NO: 20277 - DNA, 415 bp, Glycine max
  Clone ID: LIB3106-066-P1-K1-H4
ctctgacctctgatatttctatattttggttctctgtgtctctacgatcaggatccaacggtccaaaatgttcggggcttgtgctgtttgttttcccaggttttagagctccaaaccttcagatccacctcattcgtctccagatctttcttcctggataacgttttcgggttcgagaaggcacttgtgttgtttttcgtacgaaatggagactaaacagagttcggtgacggttacgctcagttacggcgcgttgacgtgcgccgcggaattttttgcgactttgctagcttctgctgtcgtcaaagcctcgcttttggccccggatctctaccggctgctattgatcaacacgcctactgccaaaggagagagcaatattcagagtgtagacaagcaacgtgatgcatatggt

SEQ ID NO: 20278 - DNA, 422 bp, Glycine max
  Clone ID: LIB3106-066-P1-K1-H5
gcaacgcgctccagggcttcctcgtcttcaacgccgtcggcggcggcaccggttctggcttgggctcgcttctcttggagcgtctatctcgagactatggaaaaaagtcaaagctcggtttcaccgtgtatacatcccctcaggtttcgacctcagacgcggaaccctacaacagcgtgctttcaacgcaatgtttcctctaacacaccgatgttgctgagcttatcgacagcgatgcaatatacgacatttgcaggagacctcttgacatcgaacgccctacctacaccaagctgaaccgtgtcagtacccaggtgatatgatgcctcagtgactcaacgaagtgtgatggaacacggcatgttgatgtgactgaatttcaaaccaacttggttccttacccgaggatccaattcatgctg

SEQ ID NO: 20279 - DNA, 450 bp, Glycine max
  Clone ID: LIB3106-066-P1-K1-H6
ggcaacagaaacaaaagtgcaagaattaggtggcatcaccgatgtgcatggagctgccaacagcgtcgagatcaacaatctcgctcgctttgctgtagaggaacaaaacaaaagagagaattcagttctggagtttgtgagggtgattagtgcaaagcagcacgtggttgctggagtgaattactacataacattggaagcaaaagatggtttgattaaaaatgagtatgaagcgaaggtttgggtgagggaatggttgaactccaaagagttgctagaattcaagccagtcaatgtttctagcacaccaataggtggcattaccgatgtgactgcgaatagcctcgagatcgacattctcgctcgttttgctgttgatcaacacaacagataagagaatgcaaatctggagtttgtgggggtgattagggcaaagcatcaggtggtgga

SEQ ID NO: 20280 - DNA, 427 bp, Glycine max
  Clone ID: LIB3106-066-P1-K1-H9
caagaccaatacactgtggaaggagtgcagaatcttggagacaaagcattgatgtgtcataggctgaatttcagaagtgcagtattttactgccatgaagttcgtgaaacatcagctttcatggttccattggtggctgttgttggaaccaaaactcaggcacttgctatttgccacttaaatacttttgaaatgatttttaaatggtttttttacttattggttttgtatcctgaactatccctgttttaccttttcctatgatttttgttttttatattttcctttttttttttgggtgattttcttatattttttatatttttttctttttcttgtttttattttttttgttttttattattttattttgttttatatattatattatttttgtttttttttttttttatattctatacttttt

SEQ ID NO: 20281 - DNA, 450 bp, Glycine max
  unsure at all n locations
  Clone ID: LIB3106-067-P1-K1-A1
aaacccactaagatggcttcctttgtatccttcctagtgctgcttcttgcagcccttatcgtcatgcctcaagggcttgctacttactacaaaccaattaagaagccaccagtgtacaagccttcagtgtacaagccaccagtgtacaaaccaccggtttataagccaaaaccaccggtttacaagccgaaaccaccggtttacaagccaccatataagaagccaccatacaagaaaccaccttatggaaagtaccctncagtagaggacaacacccatgcctaaagcaagcaatgaggtctattatctacttaataaataagaggaactgctttgtgttttctagcattgtgatttacaacttcgtagcaatgcatnatctngactcttgcatgcacttcaatccttcgtagcattaatgatgtggccaagtcatcatgagcatcatac

SEQ ID NO: 20282 - DNA, 254 bp, Glycine max
  Clone ID: LIB3106-067-P1-K1-A10
gttatatagacgggaagcttattgtgggtgttaacatgtagttgatggaggaaaatgacatggataggtgaacataagtggaaaattaggtggtagagctggaagaaagtgcgaagacaggtatactggttgcatataatgatatattaactggagtcttgtggattgcagacccactaaagagagaggcttttgtagtcatagagggccttcagaaaatgggtgtcacacctgttatggttacaggagataac

SEQ ID NO: 20283 - DNA, 226 bp, Glycine max
  Clone ID: LIB3106-067-P1-K1-A11
aagcttattttggttgtttacatgtagtttacggaggaaaattgcagagatagtgcaacattagtggaaaatttgggggtatagctggatgaaagagcgaagtcaaagtaactggttgcatataatgatatattaacaggagttttggggattgcatactcactaaagagagaggcttctgtagtcatatagggccttcataaaatgtgtgttacacctgttattg

SEQ ID NO: 20284 - DNA, 342 bp, Glycine max
  unsure at all n locations
  Clone ID: LIB3106-066-P1-K1-G12
gagaaaagttagggttcacaacttttccttttccttttgcttgcgaatctgaatcaaataatcaatgatccattcatgattcatcatgtcgtcggcgaagaaaatcacgctgaagagttcggacggcgaggctttcgaggtggaagaggcggtggcgctggagtcgcagacgataaagcacatgatcgaggacgactgcgccgacagcggcatccctctgccgaacgtgacgagcaagatcctggcgaaggttatcgagtactgcaagaagcacgtcgaggccgcgaatcccgaagacataccctncgaggacgatctcaaggcctgggacgctgaatttcg

SEQ ID NO: 20285 - DNA, 184 bp, Glycine max
  Clone ID: LIB3106-066-P1-K1-E11
cccacgcgtccgattcaaaccagcaagctaaacctaagagtgaacagcctgcgctttctgatgatgcaaccaacccggacagtaataatgttgtgcaagaagaaccgggatcatcaaatgcttctggttctagctaatcgaaggagcacttatttaaccaatttccaggacctctaattaaccc

SEQ ID NO: 20286 - DNA, 401 bp, Glycine max
  Clone ID: LIB3106-066-P1-K1-E12
ccctaacgcgtgcagagcagagagagacgcatccatggggcgaagacccgcgaggtgttataggcaaattaagaacagaccataccccaagtcacggttttgccgtggtgttcctgatcccaagatcaggatttacgatgttggtatgaagaagaagggtgttgatgaatttcctttctgtgtccatctggttagttgggagaaggaaaacgtttctagtgaggccctggaagctgctcggattgctggcacaagtacatggccaaatttgctggaaaggatgctttccacttgagagtcagggtgcacccattccatgttcttaggatcaacaagatgctttcgtgtgccggaactgataggctccaaactggaatgagaggtgcttttggaaagccaca

SEQ ID NO: 20287 - DNA, 325 bp, Glycine max
  Clone ID: LIB3106-066-P1-K1-E2
ggacgagagagcgtgcaactttcggcaactctagaccatgttattcaagcgcatgaatggaggtcgcaacggacactgtcgcggccatgtcaaattcattcgatgctacaactgctgaaaatgctgccccaaggacaaggccatcaagaggtttttggtaaggaacattgttgaacaggctgcattcagagatgcgcaggatgcttgagtctatgaacaatatacactgccaaaactctatgtgaagatgcaatactgtgaattctgtgctatccattctcatgttgtgagggttcgatccaagactcacaggaggaagcgtgag

SEQ ID NO: 20288 - DNA, 319 bp, Glycine max
  Clone ID: LIB3106-066-P1-K1-E3
caaatatttaatgttgttgccaaccccagtatgattgttagatttgcagacgtgcaaagagtacgataaggatgtgattttcgatcaatttgaaagaacttatccatttcttgcaattttagttgtgtacccataactccatgcatgcaactcgttgagctatctcaataaatgccgtttgtatgtgttagtatttaaaaaagacaaataaacttacaaagaaagatgtatagtcgtttttgcgttttcaatgctccatataacagttcatgcaaccttatagctagatttataagtgtcacttaaagataatttactg

SEQ ID NO: 20289 - DNA, 441 bp, Glycine max
  Clone ID: LIB3106-066-P1-K1-E4
cccacgcgtccgcccacgcgtccgcccacgcgtccgcagtcccttaaaggacaagtctctgcaaaccgtggcgattgagttcgatactttctcgaacaaaaaatgggatcctgcaaaccgacacatcggcattgacgtgaactcgatcaagtccgtcaaaacggcatcgtgggggttgtccaatggacaagtggcggagattctcgttacctataatgccgccacgagcctcttggttgcttctctgatccacccttcaaagaaaacaagttacatcctctctgacacagtgaacttgaagagtaatcttcccgaatgggtgagcgttgggttctctgccaccaccgggttgcatgaaggctccgttgaaacccatgatgtgatttcttggtcttttgcttccaagttgtcagatggtagcagcaatgatgctttggatct

SEQ ID NO: 20290 - DNA, 453 bp, Glycine max
  Clone ID: LIB3106-066-P1-K1-E5
cccacgcgtccgtgttcatacaaaaccatgtccaaagtgtcacaaaccagtggagaagaatggtggttgtaacttggttagctgtatctgtggccaagcattttgttggttgtgtggtggagctactggccgagagcatacttggtcaagtatagctggtcatagctgtggtcgatacaaagagcaagaaaagacagctgaacgtgcaaagagggatctatatcgttatatgcattatcataaccgatataaagctcacacagactcctttaagattgaaagtaaactgaaagagactatacaagggaagattgccatttcagaagaaaaagattctacactcagagattatagctgggtaaataatggactctccagacttttcagatctaggcgagtcctatcatattcatatgcatttgcattttataatgttggagatgagctttttaa

SEQ ID NO: 20291 - DNA, 446 bp, Glycine max
  Clone ID: LIB3106-066-P1-K1-E6
ctcttgctcagtagtgcgatcttcgattctcttctctgcaactatgcctaaccctaagggcgttcttcgacatgaccatcggcggtcaacctgccggccgcatcgtgatggagctctatgccgacgtgactcccagcaccgtcgagaacttccgcgcgctctgcaccggcgagaagggcgccgggcggagcggcaagcccctccactacaaaggctcgtccttccaccgcgtgatcccgaacttcatgtgccagggcggcgacttcaccgccggaaacggcaccggaggcgagtcgatctacggcgccaagttcgccgacgagaacttcttgaagaagcacactggtcccggcatcctctacatggcgaacgccggtcccggaaccaacggatctcagttcttcatctgcacgacgaaaactgagtggctcgacggaaagcaacgt

SEQ ID NO: 20292 - DNA, 442 bp, Glycine max
  Clone ID: LIB3106-066-P1-K1-E7
cccagaagttgtgcctggaaccaacttccttcacggtgaaggcagagggtgtggccaagaatgccccgctcgaatttcagaacaccaagctcatgactcgtctgacctacaccctggacgagatcgagggtcccttcgaggtttcatccgatggaacggtgaaattcgaggagaaagacggaattgactatgctgctgtcactgtacagcttccagggggagagcgtgtgccattcctcttcaccattaagcagttggtggcatctgggaaaccagacagcttcagtggggagttcctagtgccgtcttaccgtggttcctctttcttggaccccaagggaaggggtgcctcaactggttatgacaatgctgttgctttgcctgctggtggaagaagagatgaagaggaacttgccaaggagaacaataaaagtgcttcatc

SEQ ID NO: 20293 - DNA, 145 bp, Glycine max
  Clone ID: LIB3106-066-P1-K1-E8
cagatagttgagaacttttaagagaagttttggcttcctcaatgatctgttccccaggtggtaccactgtgaaccgtgcccgtgccggcattgactctccatacactggccttaagtccatggctggctttcctaccagtttgac

SEQ ID NO: 20294 - DNA, 273 bp, Glycine max
  Clone ID: LIB3106-066-P1-K1-E9
ccacgcgtccgcccacgcgtccggattaagaaagctattgtcattgatttgctagctccaacaatgggttctagcagattatcattcattttagtacttgggcctggaaacctttcaatccatgtccattgcctaaagggttgcaaaggcccgtaccttgccaaattcagcctaattgccttccaaagttgttatacctactgtggttcctcttccactggtggcaccattgccaaatttgcctgtaactttccctccagtgcctgaactacc

SEQ ID NO: 20295 - DNA, 124 bp, Glycine max
  Clone ID: LIB3106-066-P1-K1-F11
cccacgcgtacgaaaaaaacagcagcacaaagcactttaagagaagactaaagaaaaagaaggagagggaaacaagcaggggaagaaagaaaacaaagggcggaaagagaagaacgaggagaaa

SEQ ID NO: 20296 - DNA, 415 bp, Glycine max
  unsure at all n locations
  Clone ID: LIB3106-066-P1-K1-F12
cccacgcgtccgcccacgcgttcgcccacgcgtccgtttctctttgtcgcaaagagaagagatctgcctccttttttttatcaaatctatctcttcttcaagaatagttgaaaatggggctgtctttcaccaagttgttcagccgactgtttgccaagaaagagatgcgtatactgatggtgggtctcgatgctgcgggtaagaccaccattctgtacaagctcaagcttggagagattgtcaccaccattcccaccattgggtttaatgtggaaactgtggaatataagaacatcagcttcactgtctgggatgttggaagtcaggacaagatcccgtcctttgtggagacattacttncaaaatacacaaggacttatttttggggttgatagcaatgacagggacccgagtg

SEQ ID NO: 20297 - DNA, 412 bp, Glycine max
  Clone ID: LIB3106-066-P1-K1-F3
tgcttctaacgtgagatctcagattgcaattgcctcttctcttctcccagaatcggtcactaatccgatatcatgaagctcgatacgactagtctcgaatcgtttcccacactgattgcacctcaaaacgacgtcgccggagaactctccgccgctccgttctttgaccttccgaattccaatgacttcgatgggttcttgaaagacgctattcagatggtgaagcccgcgaagggtactacaactcttgcttttatatttaaagagggtgttatggtagctgctgattctcgagctagcatgggaggatatatatcgtcgcagtctgtgaagaaaattatcgaaatcaatccgtatatgcttgggacaatggcttgtggtgctgctgattgcccagtttggcacaagaatc

SEQ ID NO: 20298 - DNA, 347 bp, Glycine max
  Clone ID: LIB3106-066-P1-K1-F4
agtttatctccttgaaattcaccggattcttcgccccggtagattttgggtcttgtctgggccaccgatcaattatgagcgcaggtggcgtggatggaacacaactattgaagcacaaaaatcagattatgagaagttgaaggaattgctgacttcattgtgctttaaaatgtacaagaaaaagggtgacattgctgtatggaggaagtcttcagataacaattgttataataagctggctagagattcctatccacctaaatgcgatgacagccttgaaccagattcagcatggtatactccacttcgtgcctgtattgtagttccagatactaagttttaagaaa

SEQ ID NO: 20299 - DNA, 450 bp, Glycine max
  Clone ID: LIB3106-066-P1-K1-F5
cccacgcgtccgtctgctcgtgcctctagggttatcatatctccatttccatttcctctctgtcagtttccaagaatcttaagctatgggaaagtcttacccaaccgtgagcgctgattaccagaaggccgttgagaaggcgaagaagaagctcagaggcttcatcgctgagaagagatgcgctcctctaatgctccgtttggcatggcactctgctggaacttacgacgtgagctcgaagaccggtggtcccttcggaaccataaagcacccctccgaactcgctcacggcgctaacaacggtcttgacatcgctgttaggcttttggagccactcaaagcggagtttcctattttgagctacgccgatttctaccagttggctggcgttgttgccgttgaggtcaccggtggacctgaagttcccttccatcctggaagagaggacaa

SEQ ID NO: 20300 - DNA, 436 bp, Glycine max
  unsure at all n locations
  Clone ID: LIB3106-066-P1-K1-F6
tcgnccacgcgttcggccactcgttcgtccacttgtacggccattttttacaccggcaacacaagatgtttctccacattggggtcctccctttacttctctcatacactttccatgccactgtccaagacttctgtgtggcagaccttaaaagtgcagacacccctgcaggctacccctgcaaggcacctgctaatgtcactttagaagactttggggacactggcttagctgaagcttcaaatgtcacaaacataatcaatgctgctgtgaccccagcttttggtgctcaattcccaagtctcaatggccttgaactatctgcagcaagggtggaccttggtcctagtggtggtattccacttcacacttattccggtgccaatgaactacttattgtgctttaaagtcacattcttgctggattcatattttc

SEQ ID NO: 20301 - DNA, 414 bp, Glycine max
  Clone ID: LIB3106-066-P1-K1-F7
tcgtccacgcgtaccgaatcaatcttctgagagtttttggttgaaagtagcaaagatgtttcctggcgggcaaaagggtcaaatgataaaggggactatggtggttatgcagaagaatgtgttggatatcaacagcatcaccagtgttggagggatcgttgaccaaggcttaggcttcataggcagtgcagtcgatgcacttacttttgcagccaccaaaatctccatccagttgattagtgctaccaaggctgatggtgggaaaggaaaaattggaaagagtacaaatttaagaggaaagataacattaccaaccttgggagctggcgaacatgcatacgatgttaattttgaatgggacagtgacttcggaattcccggagcattttaatattagaactttatgcaaaatga

SEQ ID NO: 20302 - DNA, 150 bp, Glycine max
  Clone ID: LIB3106-066-P1-K1-E10
gaaactaccaaggttcttatttaaagcaaataaatattgaaagacaagaggtaacagataaatagagtgtgtgaataataataagtagttgtagctggggagagtggaacattgtcagcttcataataaagatgacaatgaaccgggttt

SEQ ID NO: 20303 - DNA, 305 bp, Glycine max
  Clone ID: LIB3106-066-P1-K1-G10
gttccaaagaggctaaccttcgacgaaatccagagcaagacctacttggaagtgaaggggacaggaacagcaaaccagtgcccaacaattgatggtggattggactcatttgccttcaagccggggaaatacaatgccaagaagttatgccttgagccaacttcattcacagtgaaggccgagggtgtggccaagaatgctccccttgagttccaaaacacaaagctcatgacacgtttgacctacactctggatgagattgagggaccctttgaggtgtcttctgatggcactgtcaagtttga

SEQ ID NO: 20304 - DNA, 101 bp, Glycine max
  Clone ID: LIB3106-066-P1-K1-G11
ggaactagcactgttgcattgcgcgaacaaaattttgtgacctgcttatgttcaacattgaccagcgatgattacgaggagctactgagcaaatagcgact

SEQ ID NO: 20305 - DNA, 274 bp, Glycine max
  Clone ID: LIB3106-066-P1-K1-C4
caatatcgaacgagttaaaaaaaaaaaaattataaaaaaatctcaaaaaaaaatataaccatggtataataatggagctattgcaggaacgaaccaaagaccatgcataactaccatgaggaagaacatcgtgaagctgacaggacaaacactcccattccaactgaactgctagagcttttaaagcctatccctgcaaaacgctaaaatcaatgaactctctaagcaaatggatgatacacagtacccaaaaacattcttatataatgaaaac

SEQ ID NO: 20306 - DNA, 335 bp, Glycine max
  Clone ID: LIB3106-066-P1-K1-C5
ggttgctgtaggagataagattgcagtagtgctaagtgctaacacctgcagtgaacaatggcctctgcatcagcatctctgctcaagtcttcacttgttcttgacaagtctgagtgggtgaagggacaaacccttcgccaaccttctgcatcagttgtgagatgcaaccccaccaccccatcaggcctcaccatcagagctggttcctatgctgatgagctcgttaagaccgcgaaaacagtggcttcaccagggaggggtattttggccatggatgagtccaatgctacctgtgggaagcgtttggcttcaattgggctagagaacactgaagc

SEQ ID NO: 20307 - DNA, 417 bp, Glycine max
  Clone ID: LIB3106-066-P1-K1-C6
ggaacccaaaaactaccatagccactactgattcagaaactcttaggcatagcgaaaatgacaaccaccttcgcgaccgtcgcaggactcggtggtgcatcactgtcatccacctcatctcgtctcacctcagggtttgtgaaatcgccagtgagtgctaggaatcccttgaggaaagctgtggcaatgggaaatgggagggttacatgcttcgagaggaattggctgcgggcagattacagtgtcattgggtttggattgattggttggctagcaccctcaagcgtaccggctatcaacggtaaaagtctgactggcctcttctttgagagcattggagctgagctagctcacttccccacccctcctgcccttacttcatccttttggttatggctggttacgtggcaccttggc

SEQ ID NO: 20308 - DNA, 452 bp, Glycine max
  Clone ID: LIB3106-066-P1-K1-C7
atgagttgaaaatgaatggagaaaaaaagacgaagcggtgaagaagctgagcgaattgcagtatgaaattgaaagcggttccatggtggcataattggttagtggtaaaagcaggatcaagtcacagcagcctcatggtacgcaagaagcagactcaggattctgaatccactcctccaagaatcacatccaacgtcaaacaaaacctccgcttcctaaagctatggaagagcttccagaatagaaattctagcactcctaggccttctaccagttaccgcaagaagaaggtcgagaaggaagatgatgttgttgacacagacctctatcgtgatcccaccacctccctctactacacaaaccagcagggtatattagacaatgccgtccctgtacttcttgtggatggctataatgtgtgtggctattggatgaagctcaagaaacatttc

SEQ ID NO: 20309 - DNA, 165 bp, Glycine max
  Clone ID: LIB3106-066-P1-K1-C8
agtaactttgactttcagttcacttgtccttaaatcacaatatatttgtgacagctattgggattttcacattaaattttatcctacatagtatattaatagactggataacattatatattcaagctggtgagttgtgattctaaaaaatacacaaaaaaataa

SEQ ID NO: 20310 - DNA, 202 bp, Glycine max
  Clone ID: LIB3106-066-P1-K1-C9
ccgaaatggggatacttagcccaggaccagctccaattttcaaactctgatggtaatctggtgattgagtctttcccaggtggcgataagattgagtccatgttgcaaaggatggagcagttggtggatgagtttgacccttcttcaaccgcctaaatttgttcaaccaagaaccaccaaaagtggactgatgataactttt

SEQ ID NO: 20311 - DNA, 220 bp, Glycine max
  Clone ID: LIB3106-066-P1-K1-D1
cgaaagacattcctaaggaggacaaacattaatgtttatgaaggtgatgctgatgttactgctgtaattttgtgtttctcttattgtctttgaatggatacatgtttttgtgtcttttactagaatgatttcttgatcactgtctgttcatattactcttgaatggcccttgtattagtacatatatatttagcaataaaatgacatgacaattttggtt

SEQ ID NO: 20312 - DNA, 113 bp, Glycine max
  Clone ID: LIB3106-066-P1-K1-D10
agcacccatttaaacccgcttggttaggtccggtctgtactgctgaattctgagttctgcttgtatagtatcgacacgttgatgcttaatcaaattgttacattgcttgaagt

SEQ ID NO: 20313 - DNA, 280 bp, Glycine max
  Clone ID: LIB3106-066-P1-K1-D12
tcgccacgcgtccgtttttttttttttttttttttttttttttttttttttgaaatctcaaaaagcagaaacaaatgggaatgtagtttaagtacaaacaaacaaagtggggtggcggtggatatggtggtcgtagtggcggtggcggtggcggtggtggataccgtagcatagaccgtggttactctcgtggtggtgatggtggtgatggaggctggagaaactaaggcttgatgtcgtcaattagggtttatgattatgccccgtatttttagttgtt

SEQ ID NO: 20314 - DNA, 407 bp, Glycine max
  Clone ID: LIB3106-066-P1-K1-D2
ctcagggcaggatgctaccaaggttgataggcggggtgcctacattgagaggcaagctggggagagcattggagcaaatggacttgctaggagggcaattgtgcaagttgactatgccattggtgtgcctgagccctcgactgcatttgctgacacttatggcactgggaagagccatgacaaggaaatccttagcattcagaaggagagacttgacttcaggcctggcatgatctccatcaacctagatgttaataggtgtggaaatggcacgttcttgaagactgatgcatatggacactatcggagagaataccctgacttcacatgggaagtgtgtaagcacactcatggtggtaaaggtacctgcttaactaaaaggtattccaacactcttggcaagggac

SEQ ID NO: 20315 - DNA, 276 bp, Glycine max
  Clone ID: LIB3106-066-P1-K1-D3
cccacgcgaccgcccacgcgtccgaaaaataaaaaaaaaaataaaaaaaaaaaaaaaaaaaggaaaaaaaaaagaaaaaaaaaaaaagaaaaaaaaaaaaaaaaaaaaagaaaagtatgaaaaaaaaaaagacaaagccaacaaacaacagaagcaaaaaactaaaacaaaggaacaaagaaaaaaatacagaaaaaagaaaaccattaaaaaacaggacaaatgacaaaaaaaaagggataaccaaaaaaaaacataaagaaaacaacccaaaaa

SEQ ID NO: 20316 - DNA, 450 bp, Glycine max
  Clone ID: LIB3106-066-P1-K1-D4
cgagataactagaaacagtgtgatgaaaatgaaggtccttgttttcttcgttgctacaattgtggtagcatggcaatgccatgcgtacgatatgttccctctccgaatgaacactggctatggtgcccgtactccggaggtgaaatgcgcaagttggaggcttgctgtggaagcacacaacatctttggctttgagaccattcctgaagagtgcgttgaagcaacaaaggaatacatccatggcgaacaatatagatcagactccaaaacagttaaccaacaagcttacttttatgccagagacctcgaagtccatcccaaggacacatttgtgttcagtatagatggcaccggactctctaatattccatactacaaaaaacatggatatggggtggagaaatttaactcgaccttgtatgatgaatggggttacaagggcaatgcacc

SEQ ID NO: 20317 - DNA, 446 bp, Glycine max
  unsure at all n locations
  Clone ID: LIB3106-066-P1-K1-D5
cccacgcgtccgcccacgcgtncgcccactcgtccgcactaccctaattgccctcttctctcttccttccttccaacgaccacaaatcactgcaattcaaggtttgaacttcccatggcgagcgctgttgatgcttccggaaacccgatcccaacttctgcggtgttgatggcgtcgtcgaagcacattgggataaggtgccactccgagaatttggagtttctgaagtgcaagaagaaggatcagaaccctgaaaagtgcctcgataagggtcgtgatgttacccgttgtgtccttggccttctgaaggatctgcaccaaaagtgcacaaaggagatggatgaatatgttggctgcatgtactaccatacaaatgaatttgacttgtgtcgcaaagagcagcaagcatttgagaaaaagtgctctttggaatgaaattatgcact

SEQ ID NO: 20318 - DNA, 447 bp, Glycine max
  Clone ID: LIB3106-066-P1-K1-D6
cccacgcgtccggaaaaggaattgaacattacaaaatcgttcacaaacacagaggcaccaaccaacctcttcgaattcgcgttttcttctctcttcgcctcgcagtgtatgtactgcaatcctcccaatttggttgagactccacatatgcgacaaggactgcactctgttctagacctttgtttgaaattaaacattttacattaactttggtcattgatgtggcccatatgcttgctattcaacaagattctcaaggcaggggatgaaagagaattaaaaggagataatttgaatgtgatagatccatacctgtttcagcaaccatcaagtaacatagattcccatcctccctccttgcgccgttcacacttctttgaagtaccacacataaaccaaatatatacatgggattgtggccttgcttgtgtcttgatggttttaaaa

SEQ ID NO: 20319 - DNA, 420 bp, Glycine max
  Clone ID: LIB3106-066-P1-K1-D7
cccacgcgtccgcacaataccaattagcctaacactctcaacccaacacaagttttattttgttcttcagtttttctcttcccaaagagtttttgttttgtcttttgttcttctcatgggtgggtttgaacagaagatgaaggatagggccaaggagctcaaggtcttgctcaagaaaggggtgaagattgtgggagattcatgcaagaaggggtggcacatagtcaaacacatcaaacgctgattagcgtgattgtaatcatctgttgcatggcttattatcccaaagtctcttgattgtttttcttttttttttttggtattgccatttatttgtactttcataggtttggtttgcatgtaaaatgtagtccttctaatttttctggttcctctatccccttttttggggttgctttt

SEQ ID NO: 20320 - DNA, 346 bp, Glycine max
  Clone ID: LIB3106-066-P1-K1-D8
ctcactcgctcaaatcctaaaccagcaaattcctctcttcacaaaatggccggcaacaactgggacaaccctcaccctccgcacgctatcttatcctacaccctcctgttcttaccctacgcacctctccgccaaaccctcctccctgcaattccccaatctctcccaccgcgccgccaccacgcgccgccctcgtgtcgtcgtctccgccgttgaggcgccggagcaaatcaccaagctcggcgacgaaatcgccggactcacgctcgaggaggccaagaacctcttcgacttcctccaggacaagctcggcgtgtccgcggcggcgttcgaccctgtggcagtc

SEQ ID NO: 20321 - DNA, 461 bp, Glycine max
  Clone ID: LIB3106-066-P1-K1-D9
cccacgcgtccgcccacgcgttcgcccacgcgtccgcttttctcttaatccaaatatcatcatctgaaacgatggctgccatggcaaccacaaccctctcttcaaacccgaaactctcatttttccacggaaagcccgttacatattcttcccgcgtcgcacccaccaccaagttattctcatccaaacaaggcacaatctccatgtccctaacccaacccccatacgacctccaatccttcaaattccaacccatcaaagaatccatcgtctcacgcgaaatgacgcgccgctacatgaccgacatgataacctacgccgacaccgacgtcgtaatcgtcggagccggctcggcggggctctcctgtgcgtacgagatcagcaagaaccccgccgtgagcgtcgccataatcgagcagtccgtgagccccggcggctgcgcgtggctcggcggacaactc

SEQ ID NO: 20322 - DNA, 453 bp, Glycine max
  Clone ID: LIB3106-066-P1-K1-C3
cccacgcgtccgcaccgattgctagaatggaatttcgatgctcagtcatctcttttaccatgctcttctctcttgctcttgcaggagagagccatgtccatgcatcgctacctgaggaagattattgggaagctgtttggccaaacactcccattcccactgcactgcgagagcttctaaagcctctccctgcaggtgttgaaatcgatgaactccctaagcaaattgatgatacacagtacccaaaaacattcttctataaagaagaccttcatccaggcaaaacaatgaaagtacaattcaccaagcgtccctatgcacaaccttatggtgtatatacatggttaacggatattaaagacacctctaaagaaggatatagttttgaagagatatgcatcaagaaagaagcgtttgagggagaagagaagttttgtgcaaaatccttgggaa

SEQ ID NO: 20323 - DNA, 458 bp, Glycine max
  Clone ID: LIB3106-066-P1-K1-E1
cccacgcgttcggccacgcgtccgcaaagactgattggaacttgcaagcaagcattgaacttggttcttctggctttgtcttaccagaagctcctttcctgttcctaagcggagttagggggtcaaattgaattcatttgcaacaaacacctttttgttaatgttgttgcattctcttttcctattgccgtaaacgggtcctgtcctcgcttttctcacaagccactgaaaaattttgcacctttcgccccaaaactttaacagaggggtgttgttcaccgcaattcctcaccccaatggaagaatcaagcgaattgcaatcagaagaaaataaagtctccaatgagaaatataagaaaagaaagctgaaaacaccagcccagcttaaggccttggagaatttttataatgagcacaaataccccacagaggaaatgaaattagtacttgctgaggag

SEQ ID NO: 20324 - DNA, 439 bp, Glycine max
  Clone ID: LIB3106-066-P1-K1-A6
acgagatctgattatctagtttgctctggcttttggaaatccgaataatcaaaaccaaacgcacgcaaggaagaagaagaaaccctaaaaaattattaagaaataagatgcggctgaatttgtgccacgtttcgcttggtttcgttctgaaattcctgaatttccttcaatgcttcgttggcctttccattctgctctattccctatggatgttcaacgaatgggaccatagtgtccctcctgatcctcctcttcctcccgccttccatttctatctcaaactcaattccatcaacctacccgctccatggttcatctacaatttcatgggatttggaatattggtgttatgcatttctttcttgggttgcattgcagctgaaatgattaatggttgctgcttgtgtttttactctatactcgtggtggtgcttcttct

SEQ ID NO: 20325 - DNA, 291 bp, Glycine max
  Clone ID: LIB3106-066-P1-K1-A7
aaagaaagcgatagaaaaggaagaagaagcgcttcgcgatgcacgaaagagaagaattggaagcaaagtttcggcgttttgtcttttataaaaaaaatgttaaatcattataattttctatgatagggattggtttcttgtcttttttcttttgtttatgaatatcggtgtattttaacagttgtaaagcactgcgccctcgctgcatgatcatgtagttttcaaccagctgcgtttgcaggggttgtaaaactaataacatatataattaaataaattatattctctctc

SEQ ID NO: 20326 - DNA, 423 bp, Glycine max
  Clone ID: LIB3106-066-P1-K1-A8
gaaattttgaattgcatcaaaaaaaatgttttttttgttttatttagtatggataaaagatcttcctatgttatactatttaattctcgacgatgagtcgatttgataactaagatattgttattcgtgatattgatccaatttgatatcatcgaaatccaatttataccattgttgaattaattatcgatgaaagatttatcatctctatgggattaaatcccgaattttttattggaaatttaagagaaataaaacataataaagattatggaagtaaatattcttgcatttattgctactgcactgtttattctagttcctactgcttttttacttataatttacgtaaaaacggtaagtcaaagtgactaatttcactgaaatctgacttcttcatttttatcaatgtaatcaatgatt

SEQ ID NO: 20327 - DNA, 371 bp, Glycine max
  Clone ID: LIB3106-066-P1-K1-A9
ggttgccgtcagcttgcgtgggtgacatggttatggccaccgtcaagaagggaaagcctgatctccgtaaaaaggtgctccccgctgtcatcgtccgtcagcgcaagccgtggcgccgaaaggacggtgtttacatgtacttcgaagataatgctggggtcatagtgaatcccaagggtgaaatgaaaggttctgctatcactggtcctattgggaaggagtgtgctgatctgtggcccaggattgcaagtgctgcaaatgctattgtttaagctggggttttagtttatgtaatggttctgcttcttgaaagtggttcagatattggtttaaggttgaaattgcagacaatattggccatttgcacatat

SEQ ID NO: 20328 - DNA, 307 bp, Glycine max
  Clone ID: LIB3106-066-P1-K1-B10
cccacgcgtccggcagtaccaggatgctactgctgacgaggacgagtatgaggaggaggaagaggaagaagagattgctgcttaaggcgcctctcttatttgtcaaaaattgtttcaaatatcgatatggttggctttgaacgagtggtgtaagtttaaattgtggtgcagtcaaattagattgactcgttaatgtgtatgcttatcgttgattgttgacattgtataaactgggttttgttgacaatgcttatgttcttgagagatcaagtcatggatgtttgtaatagttaaaaaaaaaaagact

SEQ ID NO: 20329 - DNA, 185 bp, Glycine max
  unsure at all n locations
  Clone ID: LIB3106-066-P1-K1-B11
cccacgcgtccgctactttctctctctttgtaacttgtaagcatggagtcctcaaagatctatgcttacctcttcctgtgcatgctcttcctctcctgcgncactcccattctcggttgtggctactgtggcaaaccccccaaaaagcacaagcctggtaaaacaccaaagacacccacagtacc

SEQ ID NO: 20330 - DNA, 448 bp, Glycine max
  unsure at all n locations
  Clone ID: LIB3106-066-P1-K1-B2
cccacgcgtccgcacacatagaaacccaacaacaagaatgatgaagatgattctaaccctcggcttcaatagcattttatctctcctctccctctcccacgcctccgtggtggatttctgcgtagcagactacacaggccccaatggccccgcagggtactcatgcaagagcccagcaaaggtcacggtggacgacttcgtctactccggccttggcaccgncggcaacacctcaaacatcatcaaagccgcggtgacgccggcgttcgacgcgcaattccccggcgtcaacgggcttggaatctccattgcacgcctagacctagcagccggtggagtcatccctcttcacacgcaccctggtgcctcagagctgctggtggttgtgcagggaacaatctgcaccggcttcgttgcttcggacaacactgtgtacctcaaaacccta

SEQ ID NO: 20331 - DNA, 409 bp, Glycine max
  Clone ID: LIB3106-066-P1-K1-B3
gcatgaaccgcagggactggctttctctggttgctgtgcacagtgattcgtggttgctctctgtggccttctatcttggagctcgtcttaaccgcaacgaaaggaaacgtttatttagcttgatcaatgatcttcctactgtttttgaagttgtgactgagaggaagccagtaaaggacaagcccactgcagacagtggaagcaagtctagaggcagcaccaagagatcaagtgatgggcaagttaagagcaacccaaagtttgcagatgatggttatgaagacgaggatgatgagcacagtgaaaccctttgtgggagctgtagcggaaattacaatgcagatgaattttggattggctgcgatatatgtgagaggtggttccatgggaaatgtgtgaagatcacttc

SEQ ID NO: 20332 - DNA, 401 bp, Glycine max
  Clone ID: LIB3106-066-P1-K1-B4
ggtttgaggaaactgagttaaggcttggactgcctggaaacggaggcactgaagaagtgctcatcaggaagaggggtttctctgagactgaaactggtcatgaagatgagtctgccaccactgtggatttgatgcttaatctttcttctaaggaggccgcaaccactgctgctgctgctgcagatccaactgataagcacaagactttgcctaaggagaagacccttctgccagcagatcctgctaagcctccagccaagacgcaggtggtgggttggccacctgtgcggtccttccggaagaacatgttggctgtgcaaaagagcgttggagaagagagcgagaagaacagcagccctaatgcaagctttgtcaaagttagcatggatggagcaccttac

SEQ ID NO: 20333 - DNA, 287 bp, Glycine max
  unsure at all n locations
  Clone ID: LIB3106-066-P1-K1-B5
agcggcggagaaggcacccggcggagaagaagcccgaaggctggagaagaagatctcgaaggaaaggagggagccgagaagaagaagaaagcgcaccgaagaagagccgtggagacctacaacgatctacatncttcaagggtcctcaagcanggttcaaccccgacatttggtatttccagcaagggccatgggcatcatgnaactagcttcatcnaacgaccatcttcgagaaaagctcgcccaggaaaagcgtcgcgtttgggcttcgctaccaacaaggaagc

SEQ ID NO: 20334 - DNA, 446 bp, Glycine max
  Clone ID: LIB3106-066-P1-K1-B6
cccacgcgtccggaggaaagctaattataccgatatggttaataaatactacgatcttgttaccagcttttatgagtttggctggggggaatctttccattttgcacccagatggaaaggggaatctcttcgagagagcatcaagcgacatgaacacttccttcctttacaacttggactgaagccagggcagaaggttttggatgttggatgtggaattgggggaccattaagagaaatttctcgatttagctcaacttcaattaccgggttgaataacaatgagtaccagataacaagaggaaaggaactcaatcgcattgctggagtggacaagacttgcaattttgtcaaggctgacttcatgaaaatgccattcccagacaacagttttgatgcagtgtatgcgattgaagccacttgccatgcaccggatgcttatggat

SEQ ID NO: 20335 - DNA, 349 bp, Glycine max
  Clone ID: LIB3106-066-P1-K1-B7
cgggtcgaagaagtgaagagaagagaagatgaaggatttggatctgaaaagagaagatggggggaggaatggaagcaaacaagaacaagttcatagaggattggggcactgccagagagaatctggagttcaatttccgttggactcgccgcaaccttgctcttgttggcatcttcggcatcgctattcccgtcctcgtctacaagggcatcgtccgtgaattccatatgcaagatgaagataatggtcggccgtacaggaagttcatgtgagagagtatggagagtcttttgtaataattcgtcaagttagaccttgatattatgaggctacaaaccatgtttttttt

SEQ ID NO: 20336 - DNA, 473 bp, Glycine max
  Clone ID: LIB3106-066-P1-K1-B9
gaacgagtcaaattgcttatccaaaatcaggatgtaatgatcaaaagtggtcggttatctgagccatacaagggaattggtgattgttttgctcgaaccatgaaggatgagggtgtgattgctctttggaggggcaatactgctaatgttatcagatatttccctactcaggctctgaactttgcctttaaggattacttcaagagacttttcaattttaaaaaggacaaagatggctactggaagtggtttgctgggaatttggcatctggtggggctgctggggcttcttacctcttatttgactattctttggattatgcccggactcgtttagcaaacgatgcaaagtgccgacagaagggtggtgagaggcagtttaatggcttggatgatgtttacaggaaaaccatcaagtctgatggtgttgctggcctttatcgtgggttcaacatatcatgtgttggaattat

SEQ ID NO: 20337 - DNA, 170 bp, Glycine max
  Clone ID: LIB3106-066-P1-K1-C1
tcgaccaagccttcgggtttgttggaaacgcacagatgcaatcattgtccacactaaccatcagcgacatgactgggtctttccctagtcaagactgtccaaggtcaacttatgctggtcgaacttaaataggtgaagacacataccgttcattaacctaatggctacac

SEQ ID NO: 20338 - DNA, 224 bp, Glycine max
  Clone ID: LIB3106-066-P1-K1-C10
ctcttcaacccaaaacccatttcttctctcttaaccccaattttctcttcctatagttaggaattaatcttttttgtgctccttgtttaattaattgataatttttggtgatgggcaattacatttcttgcaccttggctcctactttgatgaagaacacaagggcagcacgcgtgatcttccccacgggtgaagtgaagcaatacaaggagcaagtgatcaat

SEQ ID NO: 20339 - DNA, 247 bp, Glycine max
  Clone ID: LIB3106-066-P1-K1-A5
gtgagtcgtcaagatgcacacatgaaggattaaaatccacaacgatcaggaggctgaaccagctgaatttgaggaatcagtcggacaggcattgacagatctgactaataccaacaatgagctgaacagtgatatgaaagacttatacatagactcaattgaacacatggatggcattggtaaccatcaggatgtggtgatccatgtccgctacagattaagagaaggattaccgaagattcatgtc

SEQ ID NO: 20340 - DNA, 462 bp, Glycine max
  Clone ID: LIB3106-066-P1-K1-C12
aattaagcaacacacacttcaatttatcagcatgtcctccgttcagtgccacaaaacctgcaaagtgagctgccaacaggaaaaccagcacgcctcgtttgggcagaaagtttctgacttgttcaaagggcatcaacataatgaccacagctccaattatgccacccaaaccaaagtgctttcccagtcagggtcagggttaggccccttcaccaccaaaactcaaacacaatgcggttgcccccaaacacatctcagtaccactcatggctccaacacaaaaggccatggccatggccaagggagaattaagagggagcacaagagagggatgctgcagaacatcaaggatcgcttatcaggtgacaccagcagcgacagcgagagcgacaacgaaacttgccacaagaagaaggacttgaattgaagcttgtgctaataataataattggagttcgagat

SEQ ID NO: 20341 - DNA, 82 bp, Glycine max
  Clone ID: LIB3106-066-P1-K1-C2
cccacgcgtccgcccacgcgtccgaaaaattaaaaaaaaattttaaacacaacaaaaaacaagaacatacatgaaaaaatac

SEQ ID NO: 20342 - DNA, 395 bp, Glycine max
  Clone ID: LIB3106-065-P1-K1-G7
cgagcaactaccatggctaccgctccttcgcttctacactcatctgggtcctcttttttgtctcaatttcgtgcctttcaattctcttcttcttcgctgtttcctcatggaaacaggcatgggaatgccgtggtctctgtgaaggcctctgcttctggggttgtgttggtggagaagtctgaggcagagaaggccaataggctcaaaacagcttacactgagaaaattattcccttgctcatggaagagttctcttacaccaacaaacaccaggtgcctaaaattgagaagattgtggtgaactgtggtattggagatgctgcgcaaaatgcaaagggtttggacgcggcaataagtgatctagcactgatcacagggcaaagacctattaagac

SEQ ID NO: 20343 - DNA, 396 bp, Glycine max
  Clone ID: LIB3106-065-P1-K1-G9
gcggccacggggaggcttgaacttagaacctttgctgaccctcgtggagtgatccggtggacgcaataactgcaggcagctctgacttcagtgcaagcaagcatcaaaacattgctttaaaagcatcaattcagcgtttctgcaagttccaattttccaactatccacagaaacggtcgtttgaaaaaaagctgttaattcgggagcgatatggaggtcgaactcaaagagctgtacgccgatcttcaatctctgagccaatcgcttcccgatccatctcaccatgatttgctccgcaagattcaattgcgtgttggggaccttgcgaagcttgcagaggcagcacctgttcgacgctctaaagttgaggatatgagtgctgaggttgtagatagc

SEQ ID NO: 20344 - DNA, 321 bp, Glycine max
  unsure at all n locations
  Clone ID: LIB3106-065-P1-K1-H1
gacccatgcgnncgnccacgcgtgcggataactagaaacagtgtgatgaaaatgaaggtcctcgttttcttcggtgctacaattttggtaggatggcaatgccatgcgtacgatatgttccctctccgaatgaacactggctatggtgcccggactccggaggcgaaatgcgcaagttggaggcttgctgtggaagcacacaccatctttggctttgaaaccattcctgaagagggcgttgaagcaacaaacgaatacattcatggcgaacaatataaatcagactccaaaacagttaaccaacaagcttactttttatgc

SEQ ID NO: 20345 - DNA, 201 bp, Glycine max
  unsure at all n locations
  Clone ID: LIB3106-065-P1-K1-H11
agcgtcgntaagncttgtttttgtatgaatttgtaaaatatgagtattaggtggagcagtgtcgcgtcatgggccaatgtatcctctgcttttaagttggaagaggcccaactcatgtgtgatgtacggctgtgattgtgtaatttaatttgcaaaatcaaaaataacaccagagtcatatatatgcatctctttattttc

SEQ ID NO: 20346 - DNA, 399 bp, Glycine max
  unsure at all n locations
  Clone ID: LIB3106-065-P1-K1-H12
ctttgcttgcatatcatagacaatgcattctaatcttgttgggtcttcttactataaagaactgtttttatcttgtatattttcctgtttctttcaagataatttgactatcaatttccatggtaattgaatatcttggttagttttctgactagtgaatatgtggtcgcaggtcctgcaccactatacgtgctatgtttccagtaactgtgcttaagaacctaacttgttttgtgtataaagacgctcagagaccagaccttcctttttttcattttattagttttttgtttaatacttttttcttcctaattgntattattctttctattttctatattgngtatagccagatgtcagtctcggaagtgttgtataaattgaagatggggctaggtc

SEQ ID NO: 20347 - DNA, 406 bp, Glycine max
  unsure at all n locations
  Clone ID: LIB3106-065-P1-K1-H2
gacccactcgnccgactatnnccacccacaccacaagctccttatcgtgtttgcattgcagatgtgagagagaatggcgaccacacccggttggtgtggcagtgtgttgttgagcacctcgttcctgaggaagcaggcaatggcatcagtgaacatgagaatgctgaaggctaatgctggtgtttttggcttaaagggagggcgtggagggcgtgtgagtgcgatggcaagttacaatgtgaagctgataaccccagaaggagaacaagaatttgaatgcccagatgatgttttcattcttgaaaaggctgaggaatttggcattgaccttccctactcatgcaaggctggtgcttgctctttctgtgccggcaaagttgtttctggcaaagtcgaccaatctgat

SEQ ID NO: 20348 - DNA, 95 bp, Glycine max
  unsure at all n locations
  Clone ID: LIB3106-065-P1-K1-H3
gacccacgcgnncgannnngngnaaaaaaaaaaaaaaaaaaaaaaaaaaaaaagaaaaaaaaaaaaagggcggcgcggcaagaaggaccaagggg

SEQ ID NO: 20349 - DNA, 381 bp, Glycine max
  unsure at all n locations
  Clone ID: LIB3106-065-P1-K1-H4
gacccacgcgnncgagnagggctaagngctaacaccngcagngaacaanggccncngcatcagcatcnctgctcaaggctncacttgttcttgacaagtctgagtgggtgaagggacaaacccttcgccaaccttctgcatcagttgtgagatgcaaccccaccaccccatcaggcctcaccatcagagctggttcctatgctgatgagctcgttaagaccgcgaaaacagtggcttcaccagggaggggtattttggccatggatgagtccaatgctacctgtgggaagcgtttggcttcaattgggctagagaacactgaagctaaccgccaggcataccgtacccttctcgtgacagttccaggccttggtcagtaca

SEQ ID NO: 20350 - DNA, 383 bp, Glycine max
  unsure at all n locations
  Clone ID: LIB3106-065-P1-K1-H5
atgactgggataagcatngcatggnggaaggggactcacaangctcaccacatctcatgcaatagtcttgactatgatcctgatctccagcacatacctgtctttgccgtgtcgacacggttcttcaattcaatcaaatcttgtttctatggaaggaaattggtgtttgattcattatcaaggtttctcatcagctaccagcacttcacattctacccagttttgtgctttgcaagggtcaatttgtacctccagactttgttgctgttgttctctaggagaaaggtgccagatagagcctttaacataatggggatccttgtgttttgggtttggttccctctgttgatctcttcactaccaaaatggggagaaagggtcat

SEQ ID NO: 20351 - DNA, 117 bp, Glycine max
  unsure at all n locations
  Clone ID: LIB3106-065-P1-K1-H6
accggatccgaangccataactacatacatgcaactcgttgagctatcttaataaatgccgtttgtatgtgttagaatttaaaaaaaaaaggaacctttaaaaaaaaaataatctac

SEQ ID NO: 20352 - DNA, 404 bp, Glycine max
  Clone ID: LIB3106-065-P1-K1-H7
cgaaacgcacatttcactattcattctcgtttccctttcgactgtgattgtttgttaactgaacttttcgagcaaaatgtctggacgtggaaaggggggcaagggtttgggaaagggaggagcgaaacgacaccgtaaggtgttgcgcgataacattcagggaatcaccaagcctgcgattcggcgtttggctcgcaggggtggtgtgaagcgtatcagtggtctcatctacgaggagacacgtggcgtgctcaagatctttctggagaacgtgattcgtgacgccgttacctacactgagcacgctaggagaaagaccgttacggcaatggatgtggtttatgctctcaagagacaaggaagaaccctctacggatttggaggctagtttgtttttttttttt

SEQ ID NO: 20353 - DNA, 408 bp, Glycine max
  unsure at all n locations
  Clone ID: LIB3106-065-P1-K1-H8
nagtttgttacccgttggattcgatggactacgatttcagaagcaggtcgggcccacaacctccgatttaccgtccgccaccgccaccgtcaccgatgtaccgtccatcaccgtatcagcagaatcctactccttcttcaggatttggcgttagggttggtataaagccagaatataggatcacaccgccgcctcatttatcatcccttgcgggagataatccacggagcaacttccaatttgattttggattggagagaaaaattttagccgaagcagagaaggataacccaaattggagcaaatttggatcagaaaatgttccgactaaagtttctgattcatcaacagcaaaggttactgctttggatcccattgtgagcaaatttatggccatggggcttagcc

SEQ ID NO: 20354 - DNA, 254 bp, Glycine max
  Clone ID: LIB3106-065-P1-K1-H9
cccacgcgttcggttcactcaaaagagcttaaagagacaagatcccggaaaggcgtgccggcgtcagagactcatcagttctcactcgtacggcgttgtgctttgctttctcaccttcttcttcatttctttcatcatcatcatcatcacaatataaaggtcgctcctttctcagttttcacccatacccagatgggtaacagcaccatctcggatctgagtccctcctctaagtgaaaaagggtcaatctttg

SEQ ID NO: 20355 - DNA, 156 bp, Glycine max
  Clone ID: LIB3106-066-P1-K1-A1
cgcacgaatatcttgttgtttggagcgatccgagaaaaactctgtaaacatgttggtttacgaggacctccttacaggtgatgagcttctctctgactccttccgttacaaggaaattgagaatggaatgctgtgggaagttgatggggaagtggg

SEQ ID NO: 20356 - DNA, 253 bp, Glycine max
  Clone ID: LIB3106-066-P1-K1-A10
ggaagacgaaaagagagttgagagagagtgagagttagtgagagggagcagagggagcgaagagaagaaacaaagatggagactcctgcttcccaacaaggcgtcttgaagaagaaggagacaaggtgccgaaaacccaaaccaaaggacgtacacgggaagggtttgaaggaaggttggaaaacacagcatcatcaacaacatcatcatcagcagcagtaacatcaacaagatcaaccttcgttggacaaga

SEQ ID NO: 20357 - DNA, 246 bp, Glycine max
  Clone ID: LIB3106-066-P1-K1-A11
cccacgcgtccgacattgtcccctacctttcccacaggttaggccttcgtctttattacctgacctgtgctaccacccaatcacctttccttccattatttcattccattccatatctcaccattcaccaacaccaacacaaataataattcaattaactgccacaagatactccaaattagaagcttgtagttgttgataaactttgattggtatctccacattttttgtggtagagttgttggg

SEQ ID NO: 20358 - DNA, 298 bp, Glycine max
  Clone ID: LIB3106-066-P1-K1-A12
cccacgcgttcgtccacgcgtccgctcagatctcatctcttatccacaaaaccatggctgaaaaggtgaccatcatgaaactcaaggttgatcttgagtgtgagaaatgctacaagaaggttaagaaacttctcggcaagtaccctcaaattcgggaccagaagttcgatgagaaggaaaacattgtgttcatcacagtggtgtgttgcagcccagagaagattagagacaagctttgctacaaaagtggaggctcaatcaaaagcattgagatactggaaaccgccaagcccaagcc

SEQ ID NO: 20359 - DNA, 183 bp, Glycine max
  unsure at all n locations
  Clone ID: LIB3106-065-P1-K1-G5
gacccacgcgnncgcccacgcgtccgcgcacgcgnccanccattcgcnnncacnacaaactttcatactcgagggccctccggaacacagggggagccactcacaatacacgcacccaacacaccttcacaccgcctaaaaaccctagccaagccacaaaacggcatcccgcctgggaagaag

SEQ ID NO: 20360 - DNA, 299 bp, Glycine max
  Clone ID: LIB3106-066-P1-K1-A2
aacacgaagagttgagtgtataaagccttttttatcgctctttatagccatgatagcacgcggtcacttagggactctcattctcactaccccaaaaccatcttcactctctttgaaccttacccgcacttgctccagcgctcgctctccagtcctccattgctccttcctctcttctacttcccatctctcttccccttcctccgtttcaggcttgtcacttggattggatttgacatctaatgttgggaccagaagaggaaaaggttctggcctagttgtgagggcaggcaaggctt

SEQ ID NO: 20361 - DNA, 450 bp, Glycine max
  Clone ID: LIB3106-066-P1-K1-A3
gtcatcatccgcagctgctgttattcgcaccgcaaacaaacagtgagccatggccgtcggaaagaacaagcgcatctccaaagggaaaaagggtggcaagaagaaggcagctgatccctttgccaagaaggattggtatgacattaaggccccttctctttttcaagtgaaaaatgttggcaaaaccctcgtctctcgtacgcagggtaccaagattgcttctgaaggacttaaacatagagtgtttgaggtctccttggctgatcttcaaggggatgaggatcatgcattcaagaagattaggttgagagctgaagatgtgcaagggaagaatgtcctgacaaatttctggggaatggatttcacaactgacaagctgaggtcattggtgcgaaaatggcaaactctaattgaaacccatgtggatgtgaagacaactgataactacac

SEQ ID NO: 20362 - DNA, 450 bp, Glycine max
  Clone ID: LIB3106-066-P1-K1-A4
ctagttctagatcgcgatctagacccacgcgtccgagaacaagtagttgagaactaagaaggagaagcaaatggcttcctcaatgatctcttccccagctgttaccactgtcaaccgtgccggtgccggcatggttgctccattcactggcctcaagtccatggctggcttccccaccaggaagaccaacaatgacattacctccattgctagcaacggtggaagagtgcaatgcatgcaggtgtggccaccagttggcaagaagaagtttgagactctttcctacctgccagaccttgatgatgcacaattggcaaaggaagtagaataccttcttaggaagggatggattccttgcttggaattcgagttggagcacggtttcgtgtaccgtgagcacaacaggtcaccaggatactacgatggacgctactggaccatgtggaagct

SEQ ID NO: 20363 - DNA, 409 bp, Glycine max
  Clone ID: LIB3106-065-P1-K1-E8
cccacgcgtccggtaagcactatagaaaaaaaaggacattcattcatctatggctacccttattgctcccagcaaccactctccccaagaagatgctgaagctctcagaaaggcttttgaaggatggggaactgatgagaacactgtcatagtaattttgggtcatagaactgtgtatcagaggcagcaaatcagaagagtttatgaggaaatttaccaggaggatcttgtgaagcgcctagagtctgagatcaaaggagactttgagaaagccgtgtaccgatggatactggaacctgcagatcgtgatgctgttttggccaatgttgccatcaagagtggcaaaaactacaatgtcattgtggaaattgccactatcctctccccggaagagcttttggcggttaga

SEQ ID NO: 20364 - DNA, 408 bp, Glycine max
  Clone ID: LIB3106-065-P1-K1-E9
cccacgcgttcggtttgttgatcgagattactagaaacagtgtgatgaaaatgaaggtgcttgttttcttcgttgctacaattttggtagcatggcaatgccatgcgtacgatatgttccctctccgaatgaacactggctatggtgcccgtactccggaggtgaaatgcgcaagttggaggcttgctgtggaagcacacaacatctttggctttgagaccattcctgaagagtgcgttgaagcaacaaaggaatacatccatggcgaacaatatagatcagactccaaaacagttaaccaacaagcttacttttatgccagagacctcgaagtccatcccaaggacacatttgtgttcagtatagatggcaccgtactctctaatattccatactacaaaaaacatg

SEQ ID NO: 20365 - DNA, 418 bp, Glycine max
  unsure at all n locations
  Clone ID: LIB3106-065-P1-K1-F1
gacccacgcgnncgcccacgcgtncgcccacgcgtccggcagcttcaaagatctcaatacctaatgcaatacaatcgaccagttcaaatagctgtatgggctgttattctcctttgctttattgttttaattgctttttgcacgatgtagaaaggaagatttagataaattttctatcaatttctggttgcggcaggcagaatgggagaatggacaaacaatcttttgattcgagttcatataatctatgttgtcgcttaagcaagcgagagttttttatctacttctcgctggcatacatggtgtcgatataacatttcaagtgctttgatattattactacttagagtcttccattatacatagcagtagcatttccttatttttttcttcttctcatttttgctatctatttttc

SEQ ID NO: 20366 - DNA, 405 bp, Glycine max
  Clone ID: LIB3106-065-P1-K1-F10
attccgaacaatataatccgtcaatcttatcaccttccttcttgctgttgtttatgcattcttgtgctcatacattcacaataggacaaagcttaagtggttcatatggactttattatacctagttttagttaaatagaatatttcttctactgctgaccatgtcttttatttttaactttatgtaaaaaagtgtatgttatcttgttatgaaaaaatgaaaaaaaaatagtcttgtttcttgcatccttttctaattagttcaatatgttcattagttaacaccgtgtgaagaagatggctggtgttaagagaagattatgtagtgattcagatatccatgctcttcacaaagaattggatgaagtttcatgtcctatctgcatggaccatccacataatgct

SEQ ID NO: 20367 - DNA, 414 bp, Glycine max
  Clone ID: LIB3106-065-P1-K1-F12
agttgctggagatagtattggaaaatggccctgacacctttggtattcccatggaagtgaagaaagagctcttgctgaatttacacgaagcttctacagatccagctgaggcctgggaaggggtacagccggatcagcttttattgcagttggcatcagcctgggaaattgatctacaacagcatgacaaatagcttgtagagaacaaattatgctgctattgaatcttgaattggatggtattgagtgcaatttgaaatataatgctgttcatgtttttggcctccacacaacaactacattgccacaaatttatgctcctttttctcctgtatcttggtgaacttaggctaatcctataccggtcagagcaatgttcgaccgttgatatcattgtttttttttaccaaatgt

SEQ ID NO: 20368 - DNA, 396 bp, Glycine max
  Clone ID: LIB3106-065-P1-K1-F2
cccacgcgtccggcaaatgctaaaggaagtctatttcaaagatttccttcagatttgttgacacagctgaagacagattgtctcgtcctgcacaatcatcgttatgccatatccccacgcaagcttcaatataataccaagttatctgacttttttgagattctggcaacatctgaggatagagatggaaagactttcgtttccacagcacgtggtaggaaatatcccgtgactgtcaacctatggcaaccagagaaaaatgcttttgaatgggctacatctttgaaagcccctcacacagaggatgcaattcgggttactcagtccacagcaaactttttcataagtgaagctaggaaatccacaaacacacctgatgctcaaaaagtgcgagat

SEQ ID NO: 20369 - DNA, 327 bp, Glycine max
  unsure at all n locations
  Clone ID: LIB3106-065-P1-K1-F3
cgacccatgcgtncggntgntattgctgccacgggtcctattcagcgtttgcctgattacaactggttccgacgcagaacctactggaaccgctattagttcattatagtttttttgcctcatttaaacttcattggaggtctggcaaatgttttattcaaatttacaagatttatgcctctggatggctgctttggcagccatttttcatttatttgtcatggacctctattttgtaacatttttgcagtaataagtatgctgttgtcagtgatgtaattggcatccttcgcaattactcattcctgttgaaaatggtgtttactt

SEQ ID NO: 20370 - DNA, 236 bp, Glycine max
  unsure at all n locations
  Clone ID: LIB3106-065-P1-K1-F4
gacccacgcgnncgcccacgcgngcgcccacgcgnccgcccacgcgnccggngaaaaanatgaaagnnnanccgagacacgcnccagncagggcgcaaaancaaggaagaagaggncaccancancancnncngnacagaagncnncnggggcggggggnnaccgccacaangaagggaagcaccaggaganaaagagganggngaggacgnngagaaagaacgcgcccganggag

SEQ ID NO: 20371 - DNA, 426 bp, Glycine max
  Clone ID: LIB3106-065-P1-K1-F5
cccacgcgtccgggtttgtgaaggtgaggccgctaagaatattcagaggccttggcatgctgtgtggaaatccaagaggttgatgaatattgttactgagattagtggaaggttggactgggattttgacgccgttcatgtggttcggggagagaaagctcagaacaaggagttgtggcctcatttggattatgatacgtcgccggatgttcttgtcgagaagcttaaatggatggttcagccttggagacatttgtacattgccaccaatgagccttattataattactttgataagttgaggtcaaattacaaggtgcatctgcttgatgactataaggagctgtggggaaatacaagtgagtggtataacgagaccacacttctcaacaatggaaagcctgttgagtttgatgggtacatgag

SEQ ID NO: 20372 - DNA, 202 bp, Glycine max
  unsure at all n locations
  Clone ID: LIB3106-065-P1-K1-F6
gacccacgcgnncgggncgangagaagatncgngaggctgacgncgatggagaaggccaaataaactacgaggaggncgnnaaggggangagggccaagngagggancatcacattatggccacaagaacctaaatgaagaagcgtggattaaaaggaaatgaccaaaaaaacagaggtaaggggaaggacaagggtttggg

SEQ ID NO: 20373 - DNA, 367 bp, Glycine max
  Clone ID: LIB3106-065-P1-K1-F7
cccacgcgtccgcccacgcgtccgcgagcgagtacgacgaagagcgcgtgatggagtgggaggcgggtctcccaactgccaacgatctcacgcctctctctcagccgctgatcccgccggaactcgcgtcggccttcagcatcttgccggagccccaccgcaccctcctcgacgtcaaccgcgcctctcgcaacacgctctccacgctccgcggcggcggagggagcgtgcaccaggccttctcctcctccaacaacaaccacaactacgacggcgacggcgacggaggcgtctaggaggaggaggaggaggacgacgatcgcgacggctcggggccggattcacggaagcagcggaagatcgactg

SEQ ID NO: 20374 - DNA, 390 bp, Glycine max
  Clone ID: LIB3106-065-P1-K1-F8
gccaccaacacacacacttagatcaactttcctcgtcccttgctttccactccaccaaggtaccaaccaacctaccaaatggcagcaaagccagctgaagaagctcctcaaggagaaaccctcaagtaccagtcgtgggttttgaaagtattgatccactgcgatggctgcaaaaggagagtcaagaaaattcttcagggaattgatggggtttatacaacagaggttgattctctgcagcacaaggttactgtcactggtaacgtggacgctgagactctcatcaagaggctttcaagatcagggagggtagtggagctttggccagaaaaaccacctgagaagaaagataatcagaagtctgggaaatccaataaggggggtggtgat

SEQ ID NO: 20375 - DNA, 183 bp, Glycine max
  unsure at all n locations
  Clone ID: LIB3106-065-P1-K1-G10
cccacgcgnncggcnncnncnacancacatccanccnnncgggcccnccngaaccngncggcagccanacccacnncnncggccgnaggcacgnncccaccgncnaaaaaaccgagcaaagcaacaaaacggcgncangcccgggaaggagcangcaaagggaacccnagaaaaaggagggac

SEQ ID NO: 20376 - DNA, 328 bp, Glycine max
  unsure at all n locations
  Clone ID: LIB3106-065-P1-K1-G11
ctagtcttaggagggcgaggcagaggaagcgataatggcaataagaggcataggaatggcgttctctgctccatcaacaacaagacccatactttccctcaacccacgattcctttcagcgtcatccacaatcccattatttctcgttcccagcagaagcagttatctgttattatcgntctctttcagcaggcccgaaacagagtgccctgttccgcacgagcagcagcccatcaacgagtaccaagccctctcgacttcgttcccgttctcgtgggcccgccgcgacgtgggtgagtacgccttgcgcctcttcctgacgggggcg

SEQ ID NO: 20377 - DNA, 306 bp, Glycine max
  unsure at all n locations
  Clone ID: LIB3106-065-P1-K1-G12
ccggccggaatcccggtcgcccacgcgtncgccagcgtccggngagaactaagaagagaagcaaaggcgnccncaagancncgggccagctgttaccactgtcaaccgtgccggtgccggcatggttgctccattcactggcctcaagtccatggctggcttccccaccagaaagaccaacaatgacattacctccattgctagcaacggtggaagagtgcaatgcatgcaagtgtggccaccagttggcaagaagaagtttgagactctttcctacctgccagaccttgatgatgcacaattggc

SEQ ID NO: 20378 - DNA, 382 bp, Glycine max
  unsure at all n locations
  Clone ID: LIB3106-065-P1-K1-G2
ccgacccagcgncgcccagcgtccgagcatcagggctacagcctgcatgcttcacgggctgcagccggcccgcaaccgcccgcaaaggcttggcctttccggaaccgtccgcattcccggcgacaagtcgatctcccaccggtccttcatgttcggcggtctcgcgagcggtgaaacgcgcatcaccggccttctggaaggcgaggacgtcatcaatacgggcaaggccatgcaggccatgggcgccaggatccgtaaggaaggcgacacctggatcatcgatggcgtcggcaatggcggcctcctggcgcctgaggcgccgctcgatttcggcaatgccgccacgggctgccggctgaccatgggcctcgtcggggtctac

SEQ ID NO: 20379 - DNA, 248 bp, Glycine max
  unsure at all n locations
  Clone ID: LIB3106-065-P1-K1-G3
nccacgcgtncgggaaggatacaaaggaagccatcttagtgctgcttcttgcagcccttatcctcatgcctcaagggcttgctacttactacaaaccaattaagaagccaccagtgtacaagcctccagtgtacaagccaccagtgtacaaaccaccggtttataagccaaaaccaccggtttacaagccgaaaccaccggtttacaagccaccacataagaagccaccatacaagaaaccaccttat

SEQ ID NO: 20380 - DNA, 435 bp, Glycine max
  Clone ID: LIB3106-065-P1-K1-G4
cttagaattgcgaagccacagcattttctacccatacatggagaactcttgttcttgaaggagcacgaattacttggaaaatcaactggcattcggcacacaactgttattaagaatggagagatgcttggagtttctcatttgagaaatagaagagtcctttctaatggttttatttcacttggaaaagagaatttgcagttgatgtatagtgatggcgagaaagcgtttggtacatcaagtgacctctttattgatgaaagattgaaaattgcattagatggcatcatagtggttaacatggaaatatttcgccctcaaaatttagacagtccagttgagaacaccttaaaaggaaaaataagaattaccaccagatgcctgtggcttgacaaggggaagcttgtggatgctctccataaagctgctcatgct

SEQ ID NO: 20381 - DNA, 261 bp, Glycine max
  unsure at all n locations
  Clone ID: LIB3106-065-P1-K1-E7
gcacgaacacacncacagacacncacgaacacaacgcnncnncggcnnnncggannnncgcnccaaaacccanngcgncnancacncacacnccacnnncagancggggngngncncncnccccgacagacaaaaaaagaagaaaaggannggaagannnggaaaagnngcnnncagncnngaagnaccaaaaaaggggagngngagacgngaagngaaccnngaacagngaaaanncggaaanggggacccaaaggcaaa

SEQ ID NO: 20382 - DNA, 415 bp, Glycine max
  Clone ID: LIB3106-065-P1-K1-D10
cccacgcgttcgcccacgcgtccggttgatcgagataactagaaacagtgtgatgaaaatgaaggtccttgttttcttcgttgctacaattttggtagcatggcaatgccatgcgtacgatatgttccctctccgaatgaacactggctatggtgcccgtactccggaggtgaaatgcgcaagttggaggcttgctgtggaagcacacaacatctttggctttgagaccattcctgaagagtgcgttgaagcaacaaaggaatacatccatggcgaacaatatagatcagactccaaaacagttaaccaacaagcttacttttatgccagagacctcgaagtccatcccaaggacacatttgtgttcagtatagatggcaccgtactctctaatattccatactacaaaaaacat

SEQ ID NO: 20383 - DNA, 295 bp, Glycine max
  Clone ID: LIB3106-065-P1-K1-D12
cccagcgtccgcatcccccgtgcttcctttatatgctatatattctcatgtgatatcatgtacctattgtcaattttattatgccacaaatattgcttaaactctgtaccttaattttacacttctttttcgctattttggtgattattatttgtgccaactgcatggtttggattaatattgatttgcttcaaaaaaaaaaaaaaaaaaaaaaaaaaaaaaaaaagggaggccgatataaaggatcaaaaattaaaaaacgcgcgcatgctacaaaaaaactaaaatttcgggc

SEQ ID NO: 20384 - DNA, 396 bp, Glycine max
  Clone ID: LIB3106-065-P1-K1-D2
cccacgcgtccggagtgagagtgttcttcgtttgctaccttctctcagaaatggttacgttcaggtttcaccagtaccaggtggtcgggagggctctcccaacggaagcagatcagcatccgaagatctaccgaatgaagctctgggccaccaacgaggttcgcgccaagtctaagttctggtattttttgaggaagctgaagaaggtaaagaagagcaatggtcaagttcttgctatcaacgagatttttgagaagaacccaaccaagattaagaactacgggatatggttgcggtatcagagtaggactggttaccacaacatgtacaaggagtaccgtgacaccactctaaacggttcagttgaggcaatgtacaatgagatggcttttcgcc

SEQ ID NO: 20385 - DNA, 427 bp, Glycine max
  Clone ID: LIB3106-065-P1-K1-D4
gctttctgctgacccagagacttttgccaaaaaccgtgaactggaagtcatccactccagatgggccatgttgggagccttgggctgtgttttccctgaactcttgtcccgcaacggagtcaagtttggcgaggccgtgtggttcaaggccgggtctcagatattcagtgagggtgggcttgactacttgggcaacccaagcctgatccatgcacaaagcattcttgccatctgggccacccaagttatcttgatgggtgccgttgagggttaccgtattgctggtgggcctcttggtgaggtgactgacccaatctatccaggtggcagctttgacccattgggccttgctgatgacccagaggcttttgctgagttgaaggtgaaagagctcaaaaatggtaggttggccatgttctccatgttt

SEQ ID NO: 20386 - DNA, 430 bp, Glycine max
  Clone ID: LIB3106-065-P1-K1-D5
aaaaaaaagaatctatataaatataaaaataatatatataaggtacaaatagtaaatcgaggtacccattttatgataaactttccttccatttttgttcctctagtaggcctagtatttccggcaattgcaatggcttctttatttctttatgttcaaaaaaacaagattttttagatacagaaaacaaagtaaaattctggggttttttattccccaattataatactaaattcaaaaaaaggagagtaatgagtataatctttcgctcagacgatgtactgatatattctatggcggaggttcgaagaacaagcaatttattttgggccgttttcactttgttaggttcattggggttattgttccgtgcaatttccagttatcttggtatggatttgttctttatttctgagaaaattagtgattt

SEQ ID NO: 20387 - DNA, 407 bp, Glycine max
  Clone ID: LIB3106-065-P1-K1-D7
gaagggcgtaggagaagagggtttcgttccgtttcaatggggagcgaagagcagaacggcgaattctacctgcgttactacgtcggtcacaagggcaagtttggtcacgagttcctggagttcgagttccgcccagacggcaagctccgctacgccaacaactccaactacaaaaacgacaccatcatccgcaaggaggtttacctaacccccgccgttctccgcgagtgccgtcgcatcatcgccgagagcgagattatgaaggaagatgataacaactggcccgaaccggatcgggtggggcggcaggagctcgagattgttatggggaacgagcacatttcgttcaccacgtcgaagattgggtctcttgttgatgttcagagcagtgctgaccccgagggtct

SEQ ID NO: 20388 - DNA, 411 bp, Glycine max
  Clone ID: LIB3106-065-P1-K1-D8
cccacgcgttcgcccacgcgtccgggttctcttaaaacaaaggcccctcaaaccactttccccacactcttttagtgtgtcgtattttttcctctctttctccacaattaggtcttggaccgacccttttgtgtaagtgcaatggccatggctaagcttgtatgtgttctgcttctggcattccttggcatttccatgatcacaactcaagttatggcaacagattctgcctatcacttggatggaaggagttatggacctgggagtctaaagacctcacagtgcccttctgaatgcacaagaagatgtagccagacacagtaccacaagccgtgcatgtttttctgccaaaaatgctgcaaagcgtgcctttgtgttcctcctggctactatggcaacaagtctgtgtgc

SEQ ID NO: 20389 - DNA, 279 bp, Glycine max
  unsure at all n locations
  Clone ID: LIB3106-065-P1-K1-E1
gacccacgcgnncgcccacgcgnccgctnccacagccganncggctcngnccanggccaccgaaccaaaagcagccactgaggacgncaagagcganctctncgaagacgangacgaacnngaagagcnngaaancaacgaagagngggacgacaaggaggaagggaaagaagngactcaacagngggagganganngggangacgangacgnnagngacgacnncncncttcagnngagaagggagnnggagagcaacaccgagaagaacnaaaccac

SEQ ID NO: 20390 - DNA, 407 bp, Glycine max
  Clone ID: LIB3106-065-P1-K1-E10
gacaaaactactcacagagaaagacactcggagaccttgcaagacttcatcaatggctgtcaaagtttatattgtgtactactccatgtatgggcatgttgagaaactagcagaagaaataaagaaaggggcttcctctgtggaaggtgttgaggccaaattatggcaggtacctgagacgctgcaggatgaggtgctcggtaagatgagtgcaccacccaagagcgatgtaccagtcattaccccgaatgaactatccgaggctgatggctttgtattcggcttcccaacaaggtttggaatgatggctgctcagtttaaagcttttctagatgctactggaggcttatggagagcacaacagcttgcaggcaagcctgctggcatcttctacagcactggttcac

SEQ ID NO: 20391 - DNA, 415 bp, Glycine max
  Clone ID: LIB3106-065-P1-K1-E11
cccacgcgtccggacagtgatacctgtgatgcttgttcattactattcaactcaccctgtggcacagtatcagtggtggaggtcgaggatcgtaacgttgttgacttgggcgtggagtgttaggctgatccacaactacttcaggcgagaaaagtggcagtggggtgccagggaggattggcgtttcactgatttgagccatcgctatggaaggcattggtggtgggcttctttcttcgccatctacgtccctcagcaggtgtttctgattggattgtctcttccgttctatgtcatccactcggtgaaccagcctctgagcatgtgggacttggtagccatagttgtgtgtgtatctggcattgtcacggcatacattgctgatactcagctttacaactttgggagtagaaag

SEQ ID NO: 20392 - DNA, 411 bp, Glycine max
  unsure at all n locations
  Clone ID: LIB3106-065-P1-K1-E12
ctcaagaggctgggaactaccnngcatgcttctgggtggatagccctagtcaaggagttggtgaggttaatgtaaaccttgattggaaaattggaattgcagctaaggattgggattcagttgctagaaaagagaagattgagggagttgagcttgagctgagaaagctagagggagcagtagaggccatccatgagaatttgctctatcttaagggcagggaagctgagatgaggattgtgagtgaaaaaacaaatggcagagtggcatggtttagcattatgtccttggctatgtgcattgcagtttctggtttgcaattgtggtatttgaagcggtacttccagaagaagaagcttatatagattaagtaaattaatttgattagtgatactgcaaacatataataac

SEQ ID NO: 20393 - DNA, 427 bp, Glycine max
  unsure at all n locations
  Clone ID: LIB3106-065-P1-K1-E2
gacccacgcgnncgctctntnctgcatgnnngnnctctcaacgactcctccgcgaaagaatattattcaatatggtggttgggttgaatcggggggttgaagcgttgcagacatcacggctattctaagagtgtctcgctccctcattcatgtccgatctgtacgacggaggacgggtagttgcgtaactgccgttaacccttcgccgcacggtgggcgtggtgctttgccttctgaaggtggtagcccttcagacttgctcttcctcgctggtggtggtttcttctagtttcttcactcttttcattacttttagcctgcatagttttaaataaaaaaaaaaaaaacagcgactttgggactagttaagatcaccggttcttcttcttcttcttcttcttcttcttctactactactactactact

SEQ ID NO: 20394 - DNA, 414 bp, Glycine max
  Clone ID: LIB3106-065-P1-K1-E3
gtcgcgttgtgttgcgtcgtgtcgtgcgctgttcctctgtctgtcgtttttgttttcagaccaaaccctagctccgcatcgcaaccatgtcgaccaagcaaggtggaaaagctaagcctttgaagaaacccaagtctgataagaaggattacgacgaggttgacatggctaacattcagaagaaaaaggaagaggagaaggcgctaaaggagttgaaagccaaggcgcaacagaagggaagctttggaggttctgggctcaagaaaagtggaaagaaataagggctctttatcatgattgtatacatccaatattgagccctgtagtttattaccatgataacttctgtcttattgtggccttctttattgctctaatgttagtactgaactgaggtatttcgtgatgtaagct

SEQ ID NO: 20395 - DNA, 350 bp, Glycine max
  unsure at all n locations
  Clone ID: LIB3106-065-P1-K1-E4
ggacgcgaacgcccacgcgtccggntntcgnnctgctatggcacccgatgccgccgccttcgtcgccgccgacggcaaaaagagaagacgctatcttcctcacaataaggcagtgaagaagaagggttcgtaccctctgcggcctggcgtgcaaggctttttcatcacttgcgatggcggcagagaacaccaagcctctcgtgaagctctcaatattctcgattccttttatgaagagctagttgatggggaaaaggagttacccagcaaacctttaaataaaaaaatcacgtttgctgattctgactcttctagtagtgatggtgaggaagaggaggaggaggaggagg

SEQ ID NO: 20396 - DNA, 431 bp, Glycine max
  unsure at all n locations
  Clone ID: LIB3106-065-P1-K1-E5
ncatcacctaccactgataactccatcccttccttcctctttatcatcactgacatttgcccttcatgtccctctaactcgaccacctttgtgtgtcaactctcaagactttctgagaaatggggtctaatcttaatgctgaattatccaagaaaactcccatttttggtctaaaagtttgggaaatatttggaattgtagttggattgtctataatagtcattctttctgtggtctcactttgcctaacctcaaggaagaaatctagaaaagataaagacaagattccccttagtcaaataccaactgtctcaaaggaaatcaaggaagtgcgggttgaacaagtgccaactaatgtatttgctcctcgtgatggaatacttctcacgattcaggataagtccagtgacaaggaatcagacaaggtcatg

SEQ ID NO: 20397 - DNA, 253 bp, Glycine max
  Clone ID: LIB3106-065-P1-K1-C8
agaagacagctgcttgcgggcccagaagaggtcgagttctaaacagaccacataagaggcgtctgagagaccctttgcgactggcgtggttgaacgaacactgtacggagcatcatgtacatgtgcatgataccacaggatgtcgaatgatacacactcgaggagagttaagaggagctttcgctaaccgaataggcattgcaatagcctttaatgcgaggtggaactctagacagattccacatggaggatt

SEQ ID NO: 20398 - DNA, 410 bp, Glycine max
  unsure at all n locations
  Clone ID: LIB3106-065-P1-K1-B11
actncccctncnncgaanccccggcaggccactcaccaaccaacaccaancannccctggcaagacccgccgcaaagccacgacggcgaaggcggagctcgggacggcggtggcgcggacgggcggagccggttaccaatctccgtccgtcgacgttcccacgcataaggtcacagtccacgacagacaacgaaatcgttcacgagttcgtcgtgcctgaggaccagtatatattacatactgctgaggcccagaatattacccttccattcgcctgcaggcatggttgttgtactagctgtgctgtacgtataaagaagggacaaattaggcaaccagaggcacttgggatatctgccgaattgagagacaagggttatgcacttcttgtgtgggctttccgacctctg

SEQ ID NO: 20399 - DNA, 410 bp, Glycine max
  Clone ID: LIB3106-065-P1-K1-B12
agaaaggctaccccgaaaataaggcgccttccttggagcacaatggcaaggcgtagggagaaagccttgacttgaacaaatatgtgaatgcaaactttgaacggacacctttgtttcccagtgatcctgccaagaaagagtgtcgggagacacagatatcccaagttatatacattcagaaaaaacctgtgcgggtcattgaaaggggatgctgtacaagaagccagacccgctttggaatactaggagattgctcttggacaattcaaagatgacccattcttgcacagacaaactagattggcggatattgcttatactgcatgtgttgaaagaaaacaaaatgaatgcgctgaggagttcaaacatgacatcacataacgaacgtctaaacttgcaacacggattga

SEQ ID NO: 20400 - DNA, 437 bp, Glycine max
  unsure at all n locations
  Clone ID: LIB3106-065-P1-K1-B2
cgacccacgcgaacgcccacgcgtccgagaggnnggngngagctataagctagnnnatcgngaggagaatatgaagttgtttgttttctttggtgctgcagtagttttggtagcatggccatgccatggcgcaagctaccaaaggttccctctccgaatgaaaactggctatggtgagcgttcttcggaggtaaaatgcgcaagttttaggcttgctgtggaagcacacaacatccgagcctttaaaaccattcctgaagagtgcgttgaaccaacaaaggactacattaatggcgaacaatttagatcagactctaaaacagttaaccaacaagctttcttttatgctagtgaacgcgaagtccatcacaacgacatatttatattcggcatagataacaccgtactctctaatatcccatactatgaaaaacatg

SEQ ID NO: 20401 - DNA, 334 bp, Glycine max
  unsure at all n locations
  Clone ID: LIB3106-065-P1-K1-B3
gacccacgcgnncgnagnnnnaaataagaaaaaaaaaacagcgactnngngactagggaagatcaccgcnncggcgncnncnncnncnncggcgcgncnacnacnacnacgacnacnnnncgnccacaaaaggangcncagaancaagagggnncccaccggcgcnnccaacnaccaaaaagacgacgcngcagacncnccncgncccgncggaggggggggncggaanngccncaaagcngggggccnnccagaagcaaagcngccnnngnaggcnnncaagaaggcnaanggaaaggannnggcccngcangcangcgccggggagccnccc

SEQ ID NO: 20402 - DNA, 408 bp, Glycine max
  unsure at all n locations
  Clone ID: LIB3106-065-P1-K1-B6
gacccacgcgnncgnccacgcgtccggctattccttcctcgttatggagtcgcgagtgctgtcacgcgccggaaccttgtcctccctccctgacctccgcaagccgccgcgggaggccgtctccagcgcctccctcgtcgccgtgaaggccgtgggctccgtcgcggacggcggcggcggcggcggcggcggcggcggtggtgaggtggaaactccaagggccactgggaagagagggttctctgagactgttgatctgaaacttaatcttcattccaaggaagatctgaatgagaatctgaagaatgtctcaaaggagaagaccctccttaaggatcctgccaagccaccggctaaggctcaagtggttggttggccaccagtgaggtcatacaggaagaacatgat

SEQ ID NO: 20403 - DNA, 393 bp, Glycine max
  unsure at all n locations
  Clone ID: LIB3106-065-P1-K1-B7
nnatccctctaancactctagctgttgcaaatttctactatttttcaatggcttctgcagatgttgagttccgttgctttgttggtgggcttgcttgggtcaccggcaacgatgccctcgagaaagccttttcaatctacggcgacatcgttgaatcgaaggttatcaacgaccgtgagactggaaggtccagaggattcggatttgtgaccttcgcctcagagcagtcaatgaaagatgcgatcgcaggaatgaacggccaggaccttgacggccgtaacatcactgtcaacgaagctcagacccgcgccagccgtggtggtggtggaggcggtggtttcggaagtggtggtggatacaaccgcggtagcgggggatatggtggtggtggtg

SEQ ID NO: 20404 - DNA, 426 bp, Glycine max
  unsure at all n locations
  Clone ID: LIB3106-065-P1-K1-C1
cacgcgtncgaaaaaaaaaaaaaaaattaaaaaaaaaaaaaaaaaataaaaaaaaaagggggaaaaaaaaaaaaaggggaaaaaaaaaaaaaaaaaaaaaaaaaaaaaaaaaaaaaaaaaaaaaaaaaaaaaaaaaaaaaaaagggggggcggcnaaaaagaaaaaaagcnaacaaaccggggaaggggaaaaaaaacccctnaaaagggggcaccaaaaaaaaancaaggggccgggggnnaaaaacgggggaacgggaaaaaccggggggaaaccaaaaaaaaaggccggggaaaaaaacccccnncgccaggggggggaaaaaaaaaaaaggcccgaacgaaaggcccncccaaaaaggggcccaaccaaaagggaaaaggggaccccccccggaagggccaaaaaagggggggggggggggg

SEQ ID NO: 20405 - DNA, 413 bp, Glycine max
  Clone ID: LIB3106-065-P1-K1-C10
cgctcccatcgcatctgtaacaatggaagcgcgccatgcaactcttggtcgacgaacgtgggaggaaattcggcaaaagagggccgcggagagattgagtaaaacctcttcgggaccagatcttacgcaggttcccagcacctgccagattgcgggaatgagcaagtccgagagcgcaaataagctctctgagacagatcttagtgctctattgtctcaattgaaaggactgcaaaagaagaacacggagttggaggaagaaaacacaaaaattagtttaaagcttcaaacgatggaaattgataatgagacaatgcacaagcaattaaatgatgtggaacaaaatacagtgccatctctaaggaaagctctgagggatgtcgcaatggagaaagatgctgcagttgttgcac

SEQ ID NO: 20406 - DNA, 416 bp, Glycine max
  unsure at all n locations
  Clone ID: LIB3106-065-P1-K1-C11
actnngngnngccaactataanannaaacggcggnggaanagaanangccacatnnggaaaggaaacccgcccngncactggngcgcaancncgcgancagnnctgcaagggctttccgataaccatttcatccccagcccgaatccgtcacatcagcgaaggccttagtttgaacattgggttcactttcgcatccccgtgttcccccgcttctgagtggaccattgtgaaggatcaaccagaaggactcgctgttaaactcactgggtttaaaaatacagtgcccggtgtgtttacattgaagagagttcccgccgatgaaattatcggctacaacatcttgttctgtcctcttgataataacccatgtgggtatgttgcggttcatttcgaccaattccgaaacaagcgtttg

SEQ ID NO: 20407 - DNA, 235 bp, Glycine max
  unsure at all n locations
  Clone ID: LIB3106-065-P1-K1-C12
ggcaaaagaagcggcggnggnggcgggagcccnagcanncgcgnggcncgcnanagagcgcgcncncaaacccnnccnngccaaggcacgngccccganngacaacnccgacccgccacgngaccccgacgacgangcccnnccnaaaaccaccacngacgacgnncccgacgccgccganncnaaacccgccggcgacgngccncccgcngcnganaccanaaccaccgacgcc

SEQ ID NO: 20408 - DNA, 156 bp, Glycine max
  unsure at all n locations
  Clone ID: LIB3106-065-P1-K1-C2
aagcgggagngaagagganggaacatttggtttgccttccacctttaacctcgncggagaggtgactgatatgcgtgctgacgctgctgtttcattctgaatgtaaatatattacctttccaattatattctgtatggggattgtcaattgaaaaa

SEQ ID NO: 20409 - DNA, 350 bp, Glycine max
  Clone ID: LIB3106-065-P1-K1-C3
gtcaggaagatatcttgacaaaatggccgtaacagaagcaaacctaaagaaggctggcttgcacacatgggagcaggtaattctcaaggatccacatcttatcactccaaatgcactttcatacaaatcagcaatgagagagaatctgttgaggcagggatacagaattgttggaatcattggagaccaatggagcgatctgcttggagaccacagaggcgaaagcaggacctttaagcttcctaatcccatgtactacattgagtagtaccttcacctctctcaacaatctagctagagtttgctcctatctatatgtaataaggtatgcatatatgcactattcaaat

SEQ ID NO: 20410 - DNA, 410 bp, Glycine max
  unsure at all n locations
  Clone ID: LIB3106-065-P1-K1-C4
gacccacgcgnncgannangnggcactctatggcctcagagacagaagctgctcttgctgccactccctctgatggtcccaccgtatttggcaagatcatcaataaggaaattccttctactgtggtctatgaggatgataaggtccttgcctttagggacatagatccacaagctcctacccatattctaatcattcctaaagttagggatgggttaactggtctgaccaaggctgaggagaggcactgtgagattctaggtcgacttttgtgcactgctaagctggttgcaaagcaagaaggtcttgatgatggcttcaggattgtaattaatgatggacgagacgggggccaatcagtttaccacattcatgtgcacctcattgggggacgacagatgggctggccc

SEQ ID NO: 20411 - DNA, 427 bp, Glycine max
  unsure at all n locations
  Clone ID: LIB3106-065-P1-K1-C5
gncattcaccttcattttgtcattccttcttgcaaaaacaaaaaagtcacaattgattatttcaactgatcctcattgaattatggtcagttatattgtaccacttttgtttctgttgccatttgtcttttctttatcttctgtactctattctaaggctttttataggggaaatatcaaagttcatcttatctcatttcgtggacacaactcacccatcatttatatacctgtttggatgtgaagtgtgaactacgattttatgtctccattatggattcttctgaactacgtgttaaaaacgagacttataataatgagttgatgtatcaatcataaaatgtatttagaatagttgtggaaaaaaatatttttttaataacagcttatatgaaattagttttgtgattagatgtattatatgaaa

SEQ ID NO: 20412 - DNA, 358 bp, Glycine max
  unsure at all n locations
  Clone ID: LIB3106-065-P1-K1-C6
gacccacgcgnncggccacgcggccgcccacgcgnacgcngaagggnanagccgaaaacctttcagaagaagaaaggaacggcncgaaagagagggncaaanccanggacacagacaacagnggaacaancacaancgaagaggggaaagccggncgcccaaaanngggaacgaaacnanccgaagcagaagcaaggcaganganggaagcggccgacgcaganggaaacggaaccanngaanacanggaaggaagaaccgcgaccacgcacangaanagaanggaaagagaggancaccgananaaagccnnngaacangncgacaanngaaagagcggggacancacaaaggaaga

SEQ ID NO: 20413 - DNA, 298 bp, Glycine max
  unsure at all n locations
  Clone ID: LIB3106-065-P1-K1-C7
cccacgcgtccgagngattatagactatctttatataataagataaataagaataaaagggtaaaaaaaaaaaaaagaatctatataaatataaaaataatatatataaggtacaaatagtaaatcgaggtacccattttatgataaactttccttccatttttgttcctctagtaggcctagtatttccggcaatggcaatggcttccttatttctttatgttcaaaaaaacaagattttttagatacagaaaacaaagtgaaattctggggttgtttaatccccaattataatact

SEQ ID NO: 20414 - DNA, 411 bp, Glycine max
  Clone ID: LIB3106-065-P1-K1-B10
ctgcttcatagaatatcacaccaaaaaactaactccaggccttgtcccctaaacttaacaaaccaccgagaatgattctattcctttttccttagaactcattagagacaaaccattttcgtcaccactttgttgtgcgctgtcattgaaagattgaagcttgttgtgcaaaagggtatgtctgtgataggggcgtattcacattttctctacggagaggtttatcagaaggatcaacagtgcccacagtacttggtgagtgggaggggatatttgttttctcacaagagtagttgtgggagcatatgggttggaagcagaaagagtgaaggtaaaattaaaaggaggaatttgcgtgtggaagctatgtggcctgatttgtcaagaccgaatgagttagagatggaagag

SEQ ID NO: 20415 - DNA, 398 bp, Glycine max
  Clone ID: LIB3106-064-Q1-K1-H3
cacgaaggggcaaaagtgattgagaagcatgctgcacaactctgtgttctagcagaagactgtgaccagcctgactatgttaaactggttaaggccctttgtgcagagcacaatgttagcctgctgacagttccgagtgcaaagacccttggagaatgggctggtttgtgcaagattgattccgaaggaaaagctaggaaagttactggttgctcctgtgtgggtgtgaaggattttggtgaggagcatgaagcctataacgtcgttctgcagcatgtgaaatctcaatgagttgcaagattcatagattttatgcatttcattttgggttattccatgagaatgaattttgccttgtagctggattatatctaccttgggtttgattgtttaatatg

SEQ ID NO: 20416 - DNA, 223 bp, Glycine max
  unsure at all n locations
  Clone ID: LIB3106-064-Q1-K1-H5
cttcaatttcccgtttcgtctccacgtctntctctctctctctctcttcgctttgaagagggttcaagtcttctcttccgctgcttccacatctcgcagcagccatttggatcctactcaagctcctgctcactcttcactcttccactctccatccacgaattcaattcgccgggtgcagatccgattcttcgattttcacttcctcgattcaagccactat

SEQ ID NO: 20417 - DNA, 327 bp, Glycine max
  Clone ID: LIB3106-064-Q1-K1-H6
cccacccgtccgcagaaattttggcttaattgtttgtagaggaactggtgtcatgcttgggtgcccaactgatggtacagatgacatcgccaaccactttatacagcctgatgggttttaagtgggaaatatttgtatcttaaaatgtgcatactagctcatcaatagtcatcgcttagagcctgaaacatctatgcctggattgtgattaacgattagactatttatgaagcttggagattctgacccatttcttcttcttgttatgatgaagattatttctctgcgatgcgtcggcagctacactttgacgacttaatatttatc

SEQ ID NO: 20418 - DNA, 377 bp, Glycine max
  Clone ID: LIB3106-064-Q1-K1-H7
attattcacaccaccaagccaacagaagatgtttctccacattgttttcctcctttccctggtctcatccactttccatgccactgtccaagacttttgtgtggaataccttaagggtgcacacaccccttcaggctacccctgcaagccacctgcaaatgtaacttcagatgactttgtgtacacatgcttagctgaagctgcaaatgtcacaaacataatcaatgctgttgtgaccgcagcttttgctgctcaatttccaggtctcaatggacttgacctctgtgcagcaagattagaccttggacctgagggtggtattccactccacactcaacctggtgccaatgaactactcattgatctacaaagtgaca

SEQ ID NO: 20419 - DNA, 355 bp, Glycine max
  unsure at all n locations
  Clone ID: LIB3106-064-Q1-K1-H8
cccacgcgtncggaacgctgctgccgaaacccttccggaaccctaaggtaagtgagtaatcagtggttgagaatggtggagaaggcgaagggtagaaaggaggaggtggttacccgtgagtacaccattaacctccacaagcgcctccatggctgcacatttaagaagaaagctcctaaagctattaaggagataaggaaatttgcccaaaaggccatggggaccaatgatgtgagggtggatgtgaagttgaacaagtttgtctggagccagggaatcaggagtgttccaaggaggattagagtaagaattgctcgcaagagaaatgatgatgaagatgccaaggaagagctgt

SEQ ID NO: 20420 - DNA, 362 bp, Glycine max
  Clone ID: LIB3106-064-Q1-K1-H9
gcaaattagctactgatttcactgctgacacattgggtttcaagacctatgctccagcatatcttagcccacatgcatcagggaaaaacctccttattggagcaaactttgcttcagctgcatctggttatgatgaaaatgctgctactttgaatcacgcgattccgttgtcccaacagttgagttatttcaaggaataccaaggcaagctggccaaggtagctggcagtaaaaaagcagcctcaatcatcaaggatgcgttgtatgtgctcagtgctggaagcagtgactttgtgcaaaattattatgtcaatccttggatcaacaaagtctacactcctgatcagtattcgtcctactta

SEQ ID NO: 20421 - DNA, 424 bp, Glycine max
  Clone ID: LIB3106-065-P1-K1-A1
agaaaattaaataaagctaaggagaaatattgagaagcaggaagaagcaagttatggcgacgaagcagcttccgcagatcgccattctgggagctggtatctttgtgaagactcagtaccttccgagactctccgagatctctcatcttttcattctgaaatccatttggagccgcactcaggaatcagctacagctgccgtagacatagctcgtaagcattttccccaagtagagactaagtggggagataacggttttgatgacatcattcacgatggatcaatcgatgctgttgccgtggtcttggctggacaaaatcaggttgacatctcactcaggttgctaaaggctggtaaacatgtccttcaagaaaaacctgcagcatcctgtacaagtgaattggaagctgcattgtctagcta

SEQ ID NO: 20422 - DNA, 413 bp, Glycine max
  unsure at all n locations
  Clone ID: LIB3106-065-P1-K1-A11
gnncgnnacaangacaaanactangncgatgcactcgcttccggtgaatttaccaaactagcttactatagtgatatttgtgttggagcaattgcatgccggctggagaagaaggaaggtggggggcaagttcgggtttacatcatgacgttaggtgttttggcaccttaccgtggacttggtattggaacaaagttattgaatcatgttcttgatctttgctccaagcaaaacatttctgaggtttacttgcatgtgcagacaaacaatgaagatgccataaacttctacaagaaatttgggtttgaaattacagaaacaatccagaactattatacgaacattacaccgncagactgctatgttctcacgaggtatacggcaagcacaacggaaaaataacatttcagcca

SEQ ID NO: 20423 - DNA, 284 bp, Glycine max
  unsure at all n locations
  Clone ID: LIB3106-065-P1-K1-A12
ccgacccattatccgactccctggagcgttgccagcacagcgggagaaacaaccaaacgggggaactacaacnaaacacgcggcggaacacacgcaaccccgcacgaaaaaaaggaagggagagggcaaggacggggttacatcatcgcagaaggcaacaaggcgccttaccgtggacttggcataggaaccaagttaacgaatcatggtcttgatccatgctccaagcaaaacatggatgacggatactagcatgggcagacaaacaatcaagccgccataaa

SEQ ID NO: 20424 - DNA, 152 bp, Glycine max
  unsure at all n locations
  Clone ID: LIB3106-065-P1-K1-A2
aaaaaaaaaaaaaaaaaaaaaaaaaagggaagaaaaaagaaaaaaaaaaaaaaaaaaaaaagaagaaaanaaaaagaaaaaaaaaaaaaaaagaaaaaaagaaaaaaaaaaaaaaaaaaaaaaaaaaaaaaaaaaaaaggggggggggaggg

SEQ ID NO: 20425 - DNA, 428 bp, Glycine max
  Clone ID: LIB3106-065-P1-K1-A3
ccggaccggaatcgccgggccgacgaagcgtacatggacaccagcggaggcgatgaggggcagaacaaccctgccctcgacccggatttggatgctccggatgacccggatcacgagttcgctgagttcgggtcgggttgcttctggggtgctgagttggcctttcagcgagttgtgggtgtggtgaagactgaggttggttacactcagggtcacactccggatccgaattacaaactggtttgcaccggaaccactaaccacgttgaagtggttcgggtccagttcgacccgaaggtttgcccctacaatgatctactcgctctcttttggtctcggcatgaccccacttccatcaaccgtcagggcaatgatgtgggtgcacagtatagatcaggaatatactactacaacgatacccaagctcg

SEQ ID NO: 20426 - DNA, 290 bp, Glycine max
  Clone ID: LIB3106-065-P1-K1-A4
caaccctgggctcgacccggattagggtgctcttaatgacccgtatcacgatttcgctgagtacgggtcgggttgcttctggggtgctgagttggcctttaagcgagttgtgggtgtggtgaacactgaggttggttacacttagggtcacactccggatccgaattacaaactggtttgcaccgcaaccactaaccacgttgatgtggttcgggttcatttcgacccgaaggtttgcccctacaatgatctagtcgctctatttttgggctcgggatgacccccacttt

SEQ ID NO: 20427 - DNA, 410 bp, Glycine max
  unsure at all n locations
  Clone ID: LIB3106-065-P1-K1-A5
gacccacgcgnncgctcaatnnggctcataacaagctctctggggagttatcagatgtggtgtgctctttgagaagccttgcaaatctaacggttgcttacaatatcttttctgggttcagccacgaatgctcaaggcttttctttaggaatgttggttttgatttctcactaaactgcattcctgatagggacatgcagagacctccacctgagtgctctggcataccaggtggaagtcttagttgtctcagaatccccacaccaaggcctcttgtttgtggttcaatggctgtaagtaagtctaagaacattattgatcccacttcatcatctcctccttgatgatggttattattagttacattacattacattacaagttggtcatagctgttccattaattactg

SEQ ID NO: 20428 - DNA, 341 bp, Glycine max
  unsure at all n locations
  Clone ID: LIB3106-065-P1-K1-A6
aaaaaaaaaaaaaaaaaaaaaaaaaaaataaaaaaaaaaaaaaaaaaataaaaaaaaaaggggaaaaaaaaaaaaaaggggagaaaaaaaaaaaaaaaaaaaaaaaaaaaaaaaaaaaaaaaaaaaaaaaaaaaaaaaaaaggggggggccggaaaaagggaacaaagggaaaggccccgggcggccaacggaaaaacccnccaaggggggcccaaaaaaaaaaaaaaggggccggggggaaacaacgggggaacgggaaaaccccggggggccccaaacaaaaaggccgggaagaaaaccccccnngcccaggggggggaaaaaggaaaggggcccgccc

SEQ ID NO: 20429 - DNA, 226 bp, Glycine max
  unsure at all n locations
  Clone ID: LIB3106-065-P1-K1-A7
ggaagacaacncgacaaaaaggccgnaacagaagcaaaccnaaagaaggcnggcgnccacacangggagcagnnaanncncaagganccacancnnancacnccaaangcaccnncanacaaancagcaangagagagaancngnngaggcaggganacagaanngnnggaancannggagaccaanggagcgancngcnnggagaccacagaggcgaaagcagga

SEQ ID NO: 20430 - DNA, 268 bp, Glycine max
  Clone ID: LIB3106-065-P1-K1-A8
aggcacacgtacggaggcgagaaacagacagaacaaccatgcgctcgaacgggataaaggtggaaacggaaaaccaaaaacaatgcctccagcaagtgtaatgacgaggcttattttgatcatggtgtggaggaaacatatcagaaaccccaacacctacaccagcctaagcggcctaacttggtcactcatttcattcaggtcttttacttcttctgacttcgagagctcgagctggagtattattattcaacattcttttcttttt

SEQ ID NO: 20431 - DNA, 403 bp, Glycine max
  Clone ID: LIB3106-065-P1-K1-A9
atcagtctctaatatttttctcactgtcttgtctctccagagaactgtatagagagagatggcagctgcaacatctggtgctgtgttaaatgggttgggatcttccttcttgagtggaggaaacaggagccaaacccttctggccactgctattggaggcaaagttggtgctgctgctgttactgttagtcctagaagactcattgtggtagctgctgctgcaccaaagaagtcatggctccctggtgtcagaggtggtggcaacctcgtcgacccagaatggcttgatggatcgctaccaggtgactatggctttgacccactaggccttgggaaggacccagcattcctcaaatggtacagagaagctgagctgattcatgggagatgggcaatggctgca

SEQ ID NO: 20432 - DNA, 348 bp, Glycine max
  Clone ID: LIB3106-065-P1-K1-B1
gaaaaaaagacccaaacggacaaacaaaaaaaaaattaaaactcactgacttgacacaccagagaacagaataaagagagagggcagctgcaacatctggtgctgagataaaaaacgtagacatctaaaaaaaaaaaaaaaaaaaaaaaaggggcccccccttttaaggaacccaactttccgtccccccccttcccaccctaaaccttttttttggggcccccaaaatcaaataaccggcccggcctttaacaacgcggacccgggaaaaccccggcgggaaccaaaataaatcccctggaaccaaaaccccctttcccagggtggggaaataggaaaaagccccca

SEQ ID NO: 20433 - DNA, 445 bp, Glycine max
  unsure at all n locations
  Clone ID: LIB3106-064-Q1-K1-H2
gctagtttatcgtgaggagaatatgaagttgtttgttttctttgttgctgcagtagttttggtagcatggccatgccatggcgcangctaccaaaggttccctctccgaatgaaaactggctatggtgagcgttcttcggaggtaaaatgcgcaagttttaggcttgctgtggaagcacacaacatccgagcctttaaaaccattcctgaagagtgcgttgaaccaacaaaggactacattaatggcgaacaatttacatcagactctaaaacagttaaccaacaagctttcttttatgctagtgaacgcgaagtccatcacaacgacatatttatattcggcatagataacaccgtactctctaatatcccatactatgaaaaacatggatatggggtggaggaatttaatgaaaccttatatgatgaatgggttaacaagggc

SEQ ID NO: 20434 - DNA, 416 bp, Glycine max
  unsure at all n locations
  Clone ID: LIB3106-064-Q1-K1-F8
gcgcccacgcgtncggtaactttgcacaagtgtggaagatgggaggctcgaatgggccaatttgggggcaaaaagtatggttatctgggtctgtttgacaccgaaattgaagctgcaagggcatatgataaagcagcaataaaatgtaatggcaaggaggctgtcaccaattttgatcctagcatctatgatagtgagcttaattctgaatcctcaggaggtgtagctgcacatcacaatttggatttgagtttgggcaattccagctctaaacataacaatagtcaaacatcggggaatcacttcgcaaattctgcaaccgatcagcatatgccacctgaatctaattggcggaatgggggaagcaagcctaagctggtaaatatacttccaaaaccatgtggtagaagcaacat

SEQ ID NO: 20435 - DNA, 446 bp, Glycine max
  Clone ID: LIB3106-064-Q1-K1-F9
cattctctttgcgcagttccctacctctcctttcaagatgcagatcttcgtcaagaccctgaccggaaagaccatcacccttgaggtggaaagctctgacaccatcgacaacgtcaaggccaagatccaggacaaggaaggaattcccccggatcagcaacgtctcatcttcgccggaaagcagctcgaggacggccgtaccctcgccgactacaacatccagaaggagtcaacccttcaccttgtccttcgtctccgtggtggcatgcacatcttcgtcaagactctcactggcaaaaccataaccctagaggtcgaaagctctgacaccattgacaacgtcaaggccaagatccaggacaaggagggaatccccccagaccagcaacgtctcatcttcgccggaaagcaacttgaggacgggcgcaccctcgccgactacaaca

SEQ ID NO: 20436 - DNA, 346 bp, Glycine max
  Clone ID: LIB3106-064-Q1-K1-G1
cggacgcgtgggaaaaaaaatataaaaaaaattaaaaaaaaaaaaaaaaaaagggaaattttagaaaaaaaaaaaaggaaaaaaaaaaaaaaaaaattttatttttttaaaaattaatttttattattattaaaagggcgtcctttttaaaaaattaaattttactttcccttactatcaaccctttaattttttttttttgtcacttaatttaaattcatttcccgcctttttaaaatttttttatttgaaaaactttggcgttaccaaatttaatttctttaaaaaaatttcccttttttccaatttttttaaaaacaaaaagaccctaaccattttctttttt

SEQ ID NO: 20437 - DNA, 390 bp, Glycine max
  Clone ID: LIB3106-064-Q1-K1-G10
cggacgcgtgggcttcaagctactgtcctccattaaaccattacctcaagattatcaatggaggactctgtcttatttcagggggtgttctactctgccttgatctctggatactctatgcaaaccggcccctaaggagggaagtgtttgagaagtcatccttaccagaaaccaccacaaatttaccgttgtcaaatgcaaatagtgaaatatagattggacaataaaaaaaatagttgataaagcagagttccttattgttttacaattccctactatattacgggaagaaacaaaggtggagcgaagctgcatctttgagtttgaagagaatagccaaagctagtgtactacaacttttttccatataaagaaagagcattttaaatt

SEQ ID NO: 20438 - DNA, 440 bp, Glycine max
  Clone ID: LIB3106-064-Q1-K1-G11
cccacgcgtccgctctaatagtaacagtaatagtaatatacataacataaccaatggaagcgcgtgcaggagccaatcaacggattgcaagaatctctgctcatcttcagccttcaaatttccaggaagggagtgatgttcttcttaagagaggtgagtgcagagcaaaaggtggggcacctggattcaaagttgcaattttgggggctgctggaggaattggtcaatccctttctttgctgatgaagatgaacccattggtttcagttcttcatctttatgatgttgtcaacacccctggtgtcacagctgatgttagccacatggacactggtgctgtggttcgtggctttctggggcagcaacaacttgagagtgcactcactggcatggacttggtaatcatacctgctggggtgccaaggaaacctgggatgaca

SEQ ID NO: 20439 - DNA, 66 bp, Glycine max
  Clone ID: LIB3106-064-Q1-K1-G12
gcggatatcataggctatggataaactccaatgatgcctgttttgtcaatagtatactggtagggg

SEQ ID NO: 20440 - DNA, 448 bp, Glycine max
  Clone ID: LIB3106-064-Q1-K1-G2
ccgtttttgtctatcggcgtgaacaatggcgacttacgctgcgatgaagcccacaaagcccggcttggaggagccccaggagcagatccacaagataaggatcaccctttcctccaagcacgtcaaaaacctcgagaaggtttgtgcggacttggttcgcggtgcaaaggacaagcgcctcagggttaagggacctgtcaggatgcccactaaggttcttctcatcactaccaggaagtccccttgtggtgaaggtaccaacacatgggacagatttgaacttcgtgtgcacaagagagtgattgacctctacagttccccagatgtagttaagcagattacctctatcacgattgaacctggtgtggaggttgaggttaccattgcagatgcttgatctggattcaaattttaactgttatgcttcccagttttttccctctctttt

SEQ ID NO: 20441 - DNA, 427 bp, Glycine max
  Clone ID: LIB3106-064-Q1-K1-G4
cggacccgtcggcttcaagctactgtcctgcattaaaccattgcctcaagattatcaatgggggactctggctcggttgagggggtgttctactcttccttgttctctggatactctatgcaaaccgcccccgaaggagggaagtgtttgagaagtcatccttaccataaaccaccacaaatttaccgttgtcaaatgcaaatagagaaatataaattgtacaataaaaaaaatagttgataaagtagagttccttattgttatacacctcgcatactatattacatccaataaacaaatgctaatctaaactccatctatcagtttgaatagaatacccaaagctagtgtactacaactctcatgatgaagtacaactatgctgtcaaagggatacaaacctgcgtggaagctgtcttactggttg

SEQ ID NO: 20442 - DNA, 411 bp, Glycine max
  unsure at all n locations
  Clone ID: LIB3106-064-Q1-K1-G5
cggacgcgtncgctctaatctactcggcgccattaaaccattgcctcaagattatcaatgcgcgaccatgactcgggccacggggtgttctactctcccttcttctctggatactctatgcaaaccgcccccgaaggagggaattaatagagaagtcatccttaccaaaaaccaccacacatttaccgatgtcaaatgcaaatagtgcaatataagagtacaataaaacaaatatttgataaagaagacgatcttattggtttacaattccctactatatgacgggaacaaccacacgtggagcacagctgcatctttccacatgaacacaatagccaaagctagtggactacaactgctttccatataaagaaagagcattctctagcgttttcttgggaaacatacctg

SEQ ID NO: 20443 - DNA, 270 bp, Glycine max
  Clone ID: LIB3106-064-Q1-K1-G6
cctaaaccctactcattctccatacctcaacgaagaggttaaagagacgggaacactttgctgtccgccttgaccgagcagagcttcgacttggccctcgattttgccctaaagtactctcagtcacaacagacaccgtcgtcgtcgtcgtcgtcatcaatggcaccgaagcagaccaaggctgagaagaagatcgcttacgatgcgaagctgtgcgacctaatggaggagtacggccagatcctcgttgtgaactccgataacggggga

SEQ ID NO: 20444 - DNA, 451 bp, Glycine max
  Clone ID: LIB3106-064-Q1-K1-G7
gttgatcgagataactagaaacagtgggatgaaaatgaaggtgcttggtttcttcgttgctacaattttggtagcatggcaatgccatgcgtacgatatgttccctctccgaatgaacactggctatggtgcccgtactccggaggtgaaatgcgcaagttggaggcttgctgtggaagcacacaacatctttggctttgagaccattcctgaagagtgcgttgaagcaacaaaggaatacatccatggcgaacaatatagatcagactccaaaacagttaaccaacaagcttacttttatgccagagacctcgaagtccattccaaggacacatttgtgttcagtatagatggcaccggactctctaatattccatactacaaaaaacatggatatggggtggagaaatttaactcgaccttgtatgatgaatgggttaacaagggcaat

SEQ ID NO: 20445 - DNA, 380 bp, Glycine max
  unsure at all n locations
  Clone ID: LIB3106-064-Q1-K1-G8
ntccggaaaaagaaaagcattttacgttcgaagtcgagtcgaagagttntgggagccaaatgggtcttctgagcatcataaggaaaatcaagcggaaagagaaggaaatgcgaattctaatggtcggattggacaattctgggaaaaccacaatcgttctaaagataaacggagaggacacaagcgtcatcagtcccacgctcggcttcaacatcaaaaccataacttaccaaaagtataccctaaatatatgggatgttgggggccagaaaacaataagatcttactggagaaactactttgagcaaacagatggtttggtttgggtggttgacagttcacatctcagaaggttggatgattgcaaattcgagctcgat

SEQ ID NO: 20446 - DNA, 404 bp, Glycine max
  Clone ID: LIB3106-064-Q1-K1-G9
tttcttttagtgattctaagttattcaaagggtagccggttcttagagtcaagttccaagtgggtagaatttcccctgtatgtgaatattaatttgagtagtagtaacaagccttccattctctctaatgttctgtggatgtggaagatatcatgcgtttaggctgtcatcagtgcccgaatcagattgttacttagcatgtttgacggtagcccagtcactgctactcattctactagtagctctggaaatctaccatggaaggatgaggaaggtggcaactgtgtgaactgtttggcagtggtgaaaatgtgtaaggttcagataaatggatgtggaaagaaacagtgttaatttgctagcctcattttcatgatgaatgactatattaaaaatatttgcaa

SEQ ID NO: 20447 - DNA, 408 bp, Glycine max
  Clone ID: LIB3106-064-Q1-K1-H10
cccacgcgtccgcgagaaaaccctaattcgctcgcagtcacccaagaggcgaatccttaccattgctcgagatgggtgaagaagtgaaggccgtggttccagagtctgttttgaagaagcagaagagagaggaggaatgggcgttggccaagaagcaagacctcgaggctgcgaagaagaagagagccgagagccgcaaactcatctacaacagagctaagcagtacgctaaggagtacgatcaccaggagaaggaattgattcggttgaaacgcgaggccaagctgaaaggtggattctatgtccatccagaggctaagctcttgtttattgttcgcattcgtggtattaatgccatggatcccaaatcaaggaagatcctgcagctgttgcgattgagacagattt

SEQ ID NO: 20448 - DNA, 438 bp, Glycine max
  unsure at all n locations
  Clone ID: LIB3106-064-Q1-K1-H11
gctataagctagtttatcgtgaggagaatatgaagttgtttgttttctttgttgctgcagtagttttggtagcatggccatgccatggcgcangctaccaaaggttccctctccgaatgaaaactggctatggtgagcgttcttcggaggtaaaatgcgcaagttttaggcttgctgtggaagcacacaacatccgagcctttaaaaccattcctgaagagtgcgttgaaccaacaaaggactacattaatggcgaacaatttagatcagactctaaaacagttaaccaacaagctttcttttatgctagtgaacgcgaagtccatcacaacgacatatttatattcggcatagataacaccgtactctctaatatcccatactatgaaaaacatggatatggggtggaggaatttaatgaaaccttatatgatgaat

SEQ ID NO: 20449 - DNA, 423 bp, Glycine max
  Clone ID: LIB3106-064-Q1-K1-H12
cccacgcgttcgcccacgcgttcggcgattgctagaatggaatttcgatgctcagtcatgggttttaccattctcttctctcttgctcttgcaggagagagccatgtccatgcatcgctacctgaggaagattattgggaagctgtttggccaaacactcccattcccactgcactgcgagagcttctaaagcctctccctgcaggtgttgaaatcgatgaactccctaagcaaattgatgatacacagtacccaaaaacattcttctataaagaagaccttcatccaggcaaaacaatgaaagtacaattcaccaagcgtgcctatgcacaaccttatggtgtatatacatgggtaacggatattaaagacacctctaaagaaggatatagttttgaagagatatgcatcaagaaagaagcg

SEQ ID NO: 20450 - DNA, 143 bp, Glycine max
  Clone ID: LIB3106-064-Q1-K1-F6
aaacaaaaaaaaaaaaaaaaaaaaaaaaaaaataaaagataaaaaaaaaaaacggaaaatatggaaaaaaaaaaaaagaggttcgcatatatacaacaatcttaatttttatatagaggaacgtaatttacataaactggccg

SEQ ID NO: 20451 - DNA, 444 bp, Glycine max
  Clone ID: LIB3106-064-Q1-K1-E2
ctctctttgatacccttttgttctttttggtgctttaatttgcactagcaagggggttggttttatttctgtttgcttgcaacaatggctgtggctaataagttactttctgttttgatcattgccctcattgccatttccatgcttcaaacagtggttatggcatctcatggacatggaggccaccactacaatgacaagaaaaaatatggacctggcagtctcaaaagcttccaatgcccatcacaatgctcaaggaggtgtggcaagacccagtaccacaagccctgcatgtttttctgtcagaagtgttgtaagaagtgcctatgtgtgccaccggggtattatgggaacaaagcagtgtgcccttgctacaacaactggaagaccaaggaaggaggacccaaatgcccttaataaccttatgctatgttcttcatcaaa

SEQ ID NO: 20452 - DNA, 301 bp, Glycine max
  Clone ID: LIB3106-064-Q1-K1-E3
caaataccaatccaatcctctcccaactcataaagccatgtctccaggtccgggtgtcgacgcttgccctgaggttgatgcagagcaacaacttccctccctcgatgacgccactcagaagaagataccccaaccacaggaggacgatgctccccttgtcgaggacttgaaggatgatgacaaagacgacgacgatgaagacgacgacgacgacgactaagatgacaaggaagacgattctcaaggtggtgctgagggtgcaaagcattacaaaatgtatacgaatagcctgaatgcattt

SEQ ID NO: 20453 - DNA, 438 bp, Glycine max
  Clone ID: LIB3106-064-Q1-K1-E4
cccacgcgtccggcgtagtgcacgggacagcttaaacgacgccgcgctgatcaacgactccttacgtaaacgacgacggtgtcagacaaacggtgccggttggtggtgccgccacgctattacgctaatcgtatccatcaccctcatcaaaacccctcctttctcttaatttagaaaccctaattcagaagaaaaaagtcaccttctccagaatttgcgcggtaatggcatcttcttcagactcatggatgaaggaatataatgaagctgtgaaacttgctgatgatatcactggcatgatttctgaacgtagttcattccctgcatctggaccagaaacccagcgacatgcatctgctataagaaggaagatcacgatattggggaccagacttgatagcttgcaatctcttttgtcaaaggtccctgcaaaaactg

SEQ ID NO: 20454 - DNA, 439 bp, Glycine max
  Clone ID: LIB3106-064-Q1-K1-E5
cccacgcgtccgcttagagagagacaaagacaatgcaaatttgttccggtacttggcttgatgtggtcttgacgattttgcaaaagaagtggtggttactgcattcgatacaaacagcaaaacaagagcatcatatttgaacatgcaaaatatcagtttctccatagtttccttggaaggaggagctgcgagtgcttgtacattttgcctccatatccaggtatggattactgtagatgtgtgctcctgttggagaagttgtaatgaattccataagtagggccagctcactggtaccttcacttccttttccttttgattgctgcagttccatatgatgacaacttacttgatgcctgtgttaattatttcacccaacccccataaaggaaatagaaatcgtgtaacactagtttcagttaaattgtagttttattgg

SEQ ID NO: 20455 - DNA, 434 bp, Glycine max
  Clone ID: LIB3106-064-Q1-K1-E6
gtcttggaacaaatgacttcctagagaactactacaccatgcctggtagagcatctcaatacacaccccaacagtaccaaatttttctggctggcatagctgagaacttcataaggagcctctatggtcttggtgctaggaagatttcgctaggagggttacctcccatgggatgcttgccacttgaaagaaccacaaatattgttggtgggaatgactgtgttgccagatacaataacatagcattggagttcaatgataagctcaagaatttgaccattaagctaaaccaagagctccctggactcaaattggtgttttctaatccttattacattatgttgaacatcataaaaagacctcaactttatggatttgaatcgacctcagtggcatgttgtgctactggaatgtttgagatgggttatgcatgc

SEQ ID NO: 20456 - DNA, 455 bp, Glycine max
  unsure at all n locations
  Clone ID: LIB3106-064-Q1-K1-E7
gccgccacgcgtnccggaagaaagagggaaggagaacccaacactacccaactccgaaataggagggggagaaattttgtatgcggtggatttcgtacatctgaataaatgacaaatgtatcattcaaagaatgttcctagtgcaagtttaattggtggtaattcattaagtcatggtcagcacatagattgtggtggcagcacaatggatcctggcagtggaggaaatggtcttagcaacaactctaatctcacctcaaaacaacgtttacggtggacacatgaattgcatgagcgctttgttgatgctgtggctcaacttggtgggccagatcgtgccacacccaaaggcgtgctcagagttatgggtgtacaaggcttgaccatttaccatgtcaaaagtcatttacagaaataccgacttgcaaaatatttacctgactcctcatctgatg

SEQ ID NO: 20457 - DNA, 459 bp, Glycine max
  unsure at all n locations
  Clone ID: LIB3106-064-Q1-K1-E8
gcgcccacgcgtncgnggacgcgtgggcggacgcgtgggcgaagcaggaactaaatatggctgagttgttggaatggtgaaagcgggataagaaacgaatgcttcatgtcgtctaccgtgttggtgaccttgatcgcaccatcaaattttacacagaatgtttaggaatgaagcttttgaggcaaagagatatcccagaggagaaatatgctaatgcttttcttggatttggccctgaagaatcccattttgttgttgaattaacatataattatggggttacctcgtatgacattggcgatggctttggacattttgcaattgcaactcaggacatttataaattggttgagcacatcagggccaagggtggaaacatcacaagggaacctggtccagttcaaggtggaactactgttatcgcctttgttaaggatcctgatggttatacttttggac

SEQ ID NO: 20458 - DNA, 107 bp, Glycine max
  unsure at all n locations
  Clone ID: LIB3106-064-Q1-K1-E9
aaaaaaaaaaaaaaaaaaaaaaaaaaaaagaaaaaaaaaatttgaaaaaaaaaaaaaaaagggggaaaaaaaaaaagaggggaaggggntgggcgccccttttaaaa

SEQ ID NO: 20459 - DNA, 435 bp, Glycine max
  Clone ID: LIB3106-064-Q1-K1-F1
aagggttgcagaggcacgtaccctgccaaaatcagccttattgccttccaaagttgatatacctactgttgttcctcttccactggtggcaccactgccaaatttgcctgttactctccctccagtgcctgaactacctgcggtacctaaagtaccaattcctgaagtaatagttaataacgccaaaataatcccttgagtacctatgatctatccagtcactactacttattttgtcacttgctaaattaacttgttgttgccatcccagggtggttctggttctgttggggtttaatttctgtcattcaattacatgctatgttcagtttatatgttgcttcagtcagttgaacttcagcatattatttattgtgacctgtgtaatgtaatgtatcaacttatcttctagttcaataaattctggaatttctg

SEQ ID NO: 20460 - DNA, 434 bp, Glycine max
  Clone ID: LIB3106-064-Q1-K1-F10
gcgatttgggccaataatgccaatcgtcactgtagacaatatagaagattgctacagtataataaaatcaaagccaaaacctcttgctgcatatctcttcacaaacaatgagcagctgaagaaagattatgtggataaaatattctcttggagggatgctcatcaatgacgccgtcatccatgttgcaactcgggggttgccttttggaggagttgaaaagagtggaatgggttgttaccatggaaaattctcttttgatagtttcagccacaggaagtcagttctctatagaagttttgatgcagattctaccattaggtaccctccgtatacacctcagaaggaaaaattattgaaggcccttattagtggcaatattgttcaaattattctttctcttttggggtggtcttaaggatgataaggtcccttt

SEQ ID NO: 20461 - DNA, 210 bp, Glycine max
  Clone ID: LIB3106-064-Q1-K1-F11
aaagcttacgagacttttgcaatctctcaaatttaaaacaataaggtttcttagaagaccaatggatggatgtatctgccttagttgttcacatctttcgagatttaacttcttcaaaagatttaggtcctctacaaaatgtggcaagtcagtgagacttttacaccctcccaattctaatgaaggagtaagctttcttctagatcgcga

SEQ ID NO: 20462 - DNA, 365 bp, Glycine max
  Clone ID: LIB3106-064-Q1-K1-F12
gcggaaaaaaaaaacccttagccaacacaaccattatggccacctctgctattcagcaatcaggattcactgggcaaactgctctgaagcaggtcaatgagttcttccgcaagacccgtggcgccggcaaacgtcgcactaacatgcgccgcaccgtcaagagtgctcctcaaagcatttggtatggccctgaccgtcccaagtacttgggtccattctcggagcaaattccatcatacctgaccggagaattccctggtgactacggatgggacactgctggattatcagctgacccggaaaccttctccaggaaccgggagctggaagtgattcacagcagatgggcaatgcttggtgccctt

SEQ ID NO: 20463 - DNA, 445 bp, Glycine max
  Clone ID: LIB3106-064-Q1-K1-F2
cgactaaaaaatgaaatgaatcatttcatattgatagtattgctatgcttagtgtgcgactcgttagttttttagaacggttccaatttaacaaatttataaaccggttcatcgtataaatgaattaaaaaagaactaataaccaacgcatcgcttcggattatctagatctaaagaactagtcaaaacaaaaaaaaatataaaaaaagatatattatagcaactgaactattgtgaagcataaaagaacaaaaatcttatttagttgtaaagcaataaaaatatacagataaatgaagaggtgaaagaaagagagaaaaaaaatcaatgatatagaattctaatatgtaaaggtctatgggttatctcataaaaggtagtgtaataaagcatcaatctaaatcaattcatatctatttatatatgaattaatttataacgtaaa

SEQ ID NO: 20464 - DNA, 442 bp, Glycine max
  Clone ID: LIB3106-064-Q1-K1-F3
gaaaattctctttagagagatagagagaggaagaaagaatggcagcttgcactgtctactcaacacaatctctgagcacaaattgctccatctcaaccccatcaaagacgcaactcagttttttccaccaaaagcaggtagttttctggaggaacagcaagaagggcagctgcagcagcagaagaagctatgtgataacatgtgcagcaggtgactcacagacagtggtgattggcctggctgcagactcagggtgtgggaagagcaccttcatgaggaggctgaccagtgtgtttggaggagcagcagagccaccaaagggtggcaaccctgactccaacactctcatcagtgacaccaccactgtcatatgcttggatgattaccactctttggacagaactggaagaaaggagaagggtgtcactgcccttgaccctag

SEQ ID NO: 20465 - DNA, 441 bp, Glycine max
  Clone ID: LIB3106-064-Q1-K1-F4
gttattctctcattttccttctctatgtttaagcaaagaaagcttgtgaaaagacatgcagccgagattttcacctctgtcatcatctcaacagtgttctcactgtactcaacagccttagttggacggcttgttcaattagaaccatctttaactgtgtccattctacccagatgtatcacagtggcattggccctcagcattgtatccttatttgacggagccaattcatctctcacagcagctgtggttgtattaaccggtctggttggagcaaattttgtgcaagcaacccttgataaactcagctttcgtgatccaattgctcggggaatagcaactgcttctagtgcccacgggcttggaacagcagctttgtctgccaaagaacccgaggctctcccattttgtgccattgcttatgctctgaatggtatattt

SEQ ID NO: 20466 - DNA, 439 bp, Glycine max
  unsure at all n locations
  Clone ID: LIB3106-064-Q1-K1-F5
gcgccgcggaatttctcgcgactttgctagcttctgctgtcgtcaaagcctcgcttttggccccggatctctaccggctgctattgatcaacacgcctactgccaaaggagagagcaaaattcagagtgaagacaagcaacgtgatgcagagggagaagatggtaacgatgatgaaggcgacgatgacgacgatggagatggtggatttggggagggtgaagaggagttgtcatctgaagatggaggtggatatggcaacaattccaacaacaagagcaactcaaagaaggcacccgaaggtggcgcangaggggcagaagagaatggggaagaggatgaagatgaagatggtgatgatcaagatgacgacgatgaggatgacgatgatgatgacgaagaggacgaggcaagtgaagaagaggatgaagatggtgctga

SEQ ID NO: 20467 - DNA, 422 bp, Glycine max
  unsure at all n locations
  Clone ID: LIB3106-064-Q1-K1-E12
gcggcagaacattctttgtttcgctctcgcttttcaggtccaacaacgccgaagaagaagaagattgtgtctgcgattattatttgaagatttctgaaacaccagagtgtttctgatcatcgtcgtcgctgatctctgtttcctccgttactggttctgattgcagaggcgaaaaggttttccgcatcaaaatcgaattttgtttgctccatcatcaccatgggtagaatcacgaaactgggttttcttcttctacccagataagtaaaagggttttcttctttctcatttattccgacaagtgcacaaataacaacatcatcatcgtatcaatcatcggacaagtgcacagacaaacaacatttgtgtctgattagcagaaaaaggggtaaaggggttgtccgngtttggttgatgaatta

SEQ ID NO: 20468 - DNA, 441 bp, Glycine max
  Clone ID: LIB3106-064-Q1-K1-C8
gtctaaataagttcaaagattctttaacttcatctcttgtagctcaggctattgattctaggaagcatgaggcacaaactagaagattgctcacgttcttcttatggtcttgtaagaatttgagtcatcgtttggaagacaaggattataatcatgctcttcgagtttttgctgaaaagaaagactacacggcaatggatattttgatgggagatctcaagaaggagggtcgagccatggatgctgagacttttagtcttgtagcagagaatttggttaaactaggaaaagaagatgaggcattgggtattttcaagaacttagacaagtataagtgttctatagatgaatttacagttactgctatcgttaatgccctttgctccaaagggcatggtaagagggctgaaggggtagtttggcatcacaacgacaagatta

SEQ ID NO: 20469 - DNA, 449 bp, Glycine max
  Clone ID: LIB3106-064-Q1-K1-D1
cccacgcgtccgcccacgcgtccgcccacgcgtccggtggaatccgacaactgaagatcaagctattgatcgagctcacagaattgggcaaactcgtcctgttactgtgacacgaatcactataaaagatacagttgaagataggatactggctcttcaggacgacaagagaaaaatggttgcatctgcttttggggaagaccatgctggcgcgtctggaactcgccttacagtagatgatctgaagtatcttttcatggtgtagactctagaccactccttgcttgttcttcccatgatggatgatttgaagttttgttttgggtggtttggcatggagttaggatggttcttaaggaggagggtatgactgttttttgagtacctgctgacatcggttgcacaagttggcaggcaaggcgaggcttggttgatccaagtggtaactt

SEQ ID NO: 20470 - DNA, 447 bp, Glycine max
  Clone ID: LIB3106-064-Q1-K1-D10
cccacgcgtccggaagcattagcactaggagcagcaacaactagtctcagctgaaatgggctcttcagtgatggcatctgtggccctcaaacctgcccctttcactgttgagaagtcctcagtgagaggccttccctctctctcaaggaactcttcttcattcagagttgtggccagtggcaagaagatcaagactgacaaaccttatggaattaatggtggcatggctttgagggatggaactgatgcatctggcaggaaaggaaagggaaagggtgtttaccagtttgtagacaaatacggtgctaatgtcgatggttacaggcctatctacgacaccaaggactggtctccaaccggtgatgtctacgctggcggtacgactggcttggctatctgggctgtgactctacttggtcttttagctggtggtgcacttcttgtcta

SEQ ID NO: 20471 - DNA, 407 bp, Glycine max
  unsure at all n locations
  Clone ID: LIB3106-064-Q1-K1-D11
gtttgttgtgagctataanctagtttatcgtgaggagaatatgaagttgtttgttttctgtgttgctncgggaggtttgggagcatggccatnccatggcgcangctaccaaaggttccctctccgaatgaaaactggctatggtgagcgttcttcggaggtaaaatgcgcaagttttaggcttgctgtggaagcacacaacatccgagcctttaaaaccattcctgaagagtgcgttgaaccaacaaaggactacattaatggcgaacaatttacatcagactctaaaacagttaaccaacaagctttcttttatgctagtgaacgcgaagtccatcacaacgacatatttatattcggcatagataacactcggctctctaatatgccatactatggaaaacatg

SEQ ID NO: 20472 - DNA, 442 bp, Glycine max
  unsure at all n locations
  Clone ID: LIB3106-064-Q1-K1-D12
gcatttgttgctgcggatgctgatgggagtgttccctttgtctggggaactgatgctgatggaaatctcgttttctcagatgagacagacatcgtaactaagagctgtgggaaatcttacgcaccattccccaaaggatttttcttttcaacatccggaggtttgagcagttttgagcatccactgaatgaggtgaagcctgtaccaagggttgacagttccggacaggtgtgtggtgcaactttcaaggtggatgctgaggctaanaaagaagcaactggcatgccaagggttgggagtgctgctaactggtcaaataatatctgattgcgactctattctgtttgaattatgggcttttattttatcatagctgcactcggctgcaagttctggacctgttcctatattatgataactttgaggctttgcttatcatatt

SEQ ID NO: 20473 - DNA, 440 bp, Glycine max
  Clone ID: LIB3106-064-Q1-K1-D2
cccacgcgtccgcccacgcgtccggttctggatcgccgaagaagggaggccacggcgggaagttcacgtggatcggcaacggctacgagaacgtcgagatggagcacggtgctatggacgccaaggacccgaacttcgaggatccagcggagatcgccgccgtgtgatcgcggtggtttccggtgacgagatctgtacatactaataattgctaagagacgcggttttcgaattcaataatatgaagcacgtaggagaagaagcgctttctgtgattgattgttatagatctgatctgtctctggaatttggtagtggcatggcacttgtgttgttgtacatatatcgaatggtcttggaagtgcgtgcactcatattcgcattcaagtttctacgagcttttgttatcaacgataattgaattttcaattttcaagttt

SEQ ID NO: 20474 - DNA, 68 bp, Glycine max
  Clone ID: LIB3106-064-Q1-K1-D3
tcggagataactataaacagggtgaggaaaaaaatagagctcgcgttttttttgggtacacacatggg

SEQ ID NO: 20475 - DNA, 441 bp, Glycine max
  Clone ID: LIB3106-064-Q1-K1-D4
gaaaatgaacagtttatcaatggcacttctccacccaaatcttcttcccactttcaattccaacactcttacctgttccttccatcaaactcaaaccctcactctcgcacgtgccttctccaacccccacacgcttcagtctctctgtttccgcggcggaaaccaccgcttttgccgcccctcccactccccaacctgagaagcttggagttgtagttaagccaacggagaagccgagacttgtgttgaagttcatatggatggagaagaacattggaattgcgcttgaccagatggtaccgggccatggcaccattcctctgagcccatattacttttggccccgaaaagatgcctgggaagagctcaaggagttgcttgagaacaagccttgcatctctcagaagcagatgattattcttctcaatcaggccactgata

SEQ ID NO: 20476 - DNA, 371 bp, Glycine max
  Clone ID: LIB3106-064-Q1-K1-D5
gcggcggtggtggctgcaccattgattgcaaaaagaagtgcatcgcttattgctaagccataatatggtagcacttatcatcacttgtactagtattattgctagtattactattattattattatgtatgcaattaaacttatattatatggtcatcttggttacccttttagataaataaatgaaaagtagatacatctctatgtaggtgggtttctttttggtgttttgggtgttgcttttgactattatatcttgttaaatctatgggtggaaaaaaatattatgagacactacttggtgggtgagaggagtgttaagcatgggctgtaattttggttactaaataatataaagatggtgtattatt

SEQ ID NO: 20477 - DNA, 432 bp, Glycine max
  Clone ID: LIB3106-064-Q1-K1-D6
gggaagtcactcatgaagaaactggtcatgtgctcaaagttccctttcgtcgagttcacctgtctggggaagcaggacactttgatacctatgacactagcggtccccaaaatgtaaacccaaggacaggactcccaaaattgcgcggagggtgggttgataggagggagaaactgggttatccaagattcactcagatgtactacgctaagcaaggaatcatcactgaggagatgctttactgtgccactcgtgagaaccttgacccagagtttgtgaggtcagaagttgctcgtggacgtgctatcatcccttcgaacaagaaacacttggagttagagcccatgatagttggaagaaactttttggtaaaagtaaatgccaacattgggaattctgccgttgctagctctatagaagaggaagtttaca

SEQ ID NO: 20478 - DNA, 294 bp, Glycine max
  unsure at all n locations
  Clone ID: LIB3106-064-Q1-K1-D7
gcgggctgtataagttatctggcaaagattgtggcaatcattgtaaacatgtacgatgacatactttagtgaaaatacaaacttataaactgaagatattgcagccccacctcccatctctcttttgtactggtctggccctgcaggctgtataagttatctggcaaagattgtggcaatcattgtaaacatgtacgatgacatactttagtggaaaaaaaaaaaaaaaaaaaaaaaaaaaaaaaaaaaaaaaaaaaaaaaaaaaaaaaaaaaaaaaannnnaaaaaaataaaa

SEQ ID NO: 20479 - DNA, 346 bp, Glycine max
  Clone ID: LIB3106-064-Q1-K1-D8
cccacgcgtccgcccacgcgtgcgcccacgcgtgcgcccacgcgtccgattggagaccaatggagcgatctgcttggagaccacagaggcgaaagcaggacctttaagcttcctaatcccatgtactacattgagtagtaccttcacctctctcaacaatctagctagagtttgctcctatctatatgtaataagggatgctgatatgcactattcaaataggagcattagctatgtttggtaatgtcactttatgttatgtgggtaagtcacctaagacactccacgtacctacgttgttgtctcttaccggctttaataaatcttctgcccttgttccatattt

SEQ ID NO: 20480 - DNA, 457 bp, Glycine max
  Clone ID: LIB3106-064-Q1-K1-D9
gagggagagactgatgcattggaagagtgttcagaatggttgaaagcacatggggccagcggaattactgataacaatggagatatgctgctagatacaaaagtttcatcatctaatctgtttgtgccagagccagaggatgctgttgcccacggagatgccaatcttgctggtgatgactttttagcacgagcacctttatagccaagtttgttgtttttgaagcgcatagtgagatgtcattcaggaaagtagcagaaaatatgccgcagccttcatgtgcttatattgcaagcaggctagaaaaaggctgtgatggtgattagtaaactggaatatacaatattgaaaggaaaaaaaaagccgcctaacgttctctaatgaaacggggcttataaaaacattgggtgcttgcttgctagcttacaccattctttcctggggaaggacaggacta

SEQ ID NO: 20481 - DNA, 438 bp, Glycine max
  unsure at all n locations
  Clone ID: LIB3106-064-Q1-K1-E1
ctagatcgcgggcggccgccctttttttttttttttttttttttttttttttgttttttgtttttggttttggggttttttttttttttttggtttttttttttttttttttttttttttttttttttttttttttttttttttttttttttttttttttttttttttttttttttttttttttttttttttttttttttttttaaaaaaaaaaaaaaattttttttttttaaaaaaaaaaaaaaattttttttttaaaaaaaaaaaaaaaaaaattatttgtttaaaaaaaaaaaagaatttttttaaaaaaaaaaaaaaataaaaaaatnttttttttttttttttgtggttttatataaaaaaaaaaaaaaaaaagggggggggttttaaaaaaaaatattatatttttggggtgataaaaaaaaaaattttttt

SEQ ID NO: 20482 - DNA, 451 bp, Glycine max
  unsure at all n locations
  Clone ID: LIB3106-064-Q1-K1-E10
gcgcccacgcgtncgcccacgcgtccgcaaaaggaaagaatatcaacaaggtaaagtagattccttactanacatggcgttgaaggacacattctacatatctcatggatcaccaactttgtccatagatgaatccattctggccaggaagttccttcagtcatggaagaaggacgtgtttcctcaaagaccctcttcaattcttggcatctctggtcattgggaaaccgcagttcccacggtcaacgtcgttgactccatcaacgacaccatctacgatttctatggcttccccaaacaaatgtaccagcttaaatatcctgcacctggagctccacaattggcaaggagggtgaaggaactactcaagaaatctggtttcagccatgttgatgaagatacaaagcgaggacttgaccatggtgcttgggttcctctctttttgatggat

SEQ ID NO: 20483 - DNA, 435 bp, Glycine max
  Clone ID: LIB3106-064-Q1-K1-E11
gcgcgttgctgggctttgtatctgcattataaagcatctaatctagtagctcatgtccattgggggaactgcgggacaacactcatgtgtcctgatggagctccatcagtcaaatgtgctctttgtcactttattactaatacgaacaatggaaggcttccgatccctgtccatagacccaatgggacaaccaatgctggaacattacctactacttcaacatcaatgccccaatctcaaagtcaaacagtagtggtagaaaatccaatgtctgttgattcaagtgggaaattggtgagcaatgttgttgttggggttacaacagataagaaataacgccatcacatatagaaggtacagttcacgtctggacgcattaccacagttgctgtcacaggaagatattggttgcgtatatgaatatatatgatattg

SEQ ID NO: 20484 - DNA, 442 bp, Glycine max
  unsure at all n locations
  Clone ID: LIB3106-064-Q1-K1-B4
cccacgcgtccgcccacgcgtccggttcgtatcgattgaagaattaggatccaatagatggcattttgggggacgcgggtgatggagattgtgaagaagcatgattctggaggactagtttggaagagaataaaactcacaaccacccgaaaagccaacgctaagaagcgtcttctccgcgtttggcagaatgaagctgtcctgaaggcatgtgttgctcaagttccatctgccaccaccactaccgccaccaccgncgccaccaccagtaccagtaccagtacctagctaagttcatggccatctcaatttaaatacattacttgcaggtgaaactttgtaagaatcagcttctggaattatattaatttgtaatgtgattttttgggctatttttaagactgaaaattttaaattcaatagaaattaggtcatgctcttc

SEQ ID NO: 20485 - DNA, 443 bp, Glycine max
  Clone ID: LIB3106-064-Q1-K1-B5
gcagaagaacaagtagttgagaactaagaaggagaagcaaatggcttcctcaatgatctcttccccagctgttaccactgtcaaccgtgccggtgccggcatggttgctccattcactggcctcaagtccatggctggcttccccaccagaaagaccaacaatgacattacctccattgctagcaacggtggaagagtgcaatgcatgcaggtgtggccaccagttggcaagaagaagtttgagactctttcctacctgccagaccttgatgatgcacaattggcaaaggaagtagaataccttcttaggaaaggatggattccttgcttggaattcgagttggagcacggtttcgtgtaccgtgagcacaacaggtcaccaggatactacgatggacgctactggaccatgtggaagctgcctatgtttggttgcactgatg

SEQ ID NO: 20486 - DNA, 425 bp, Glycine max
  unsure at all n locations
  Clone ID: LIB3106-064-Q1-K1-B6
ctcaaagcaacacaagaacactctcttgaacattcatggatccagtgagcgtgtggggtaacacgcccttggcgacggtggatcccgagatccatgacctcatcgagaaggagaagcaccgccaatgccgcggcatcgagctcatcgcctccgagaacttcacctccttcgcagtcatcgaggccctcggcagcgccctcaccaacaaatactccgagggcatgcccggcaaccgctactacggcggcaacgaattcatcgaccagatcgaaaacctctgccgctcacgcgccctccaggccttccacctcgacgcccaatcctggggcgtcaatgtgcagccctactccggctcccctgccaacttcgccgcctacaccgncgtcctcaacccccacgaccgcatcatggggctggatctcccc

SEQ ID NO: 20487 - DNA, 458 bp, Glycine max
  Clone ID: LIB3106-064-Q1-K1-B7
cccacgcgtccggtttgttgtgagctataagctagtttatcgtgaggagaatatgaagttgtttgttttctttgttgctgcagtagttttggtagcatggccatgccatggcgcaggctaccaaaggttccctctccgaatgaaaactggctatggtgagcgttcttcggaggtaaaatgcgcaagttttaggcttgctgtggaagcacacaacatccgagcctttaaaaccattcctgaagagtgcgttgaaccaacaaaggactacattaatggcgaacaatttacatcagactctaaaacagttaaccaacaagctttcttttatgctagtgaacgcgaagtccatcacaacgacatatttatattcggcatagataacaccgtactctctaatatcccatactatgaaaaacatggatatggggtggaggaatttaatgaaaccttatatgatg

SEQ ID NO: 20488 - DNA, 423 bp, Glycine max
  Clone ID: LIB3106-064-Q1-K1-B8
aagtgaggcaggttccttatcttgttggctttgactcaaaagctgtgtgtggcatcagaaaatgaacaggttatcaatggcacttctccacccaaatcttcttcccactttcaattccaacactcttacctttccttccatcaaactcaaaccctcactctcgcacgtgccttctccaacccccacacgcttcagtctctctgtttccgcggcggaaaccaccgcttttgccgcccctcccactccccaacctgagaagcttggagttgtagttaagccaacggagaagccgagacttgtgttgaagttcatatggatggagaagaacattggaattgcgcttgaccagatggtaccgggccatggcaccattcctctgagcccatattacttttggccccgaaaagatgcctgggaagagct

SEQ ID NO: 20489 - DNA, 433 bp, Glycine max
  unsure at all n locations
  Clone ID: LIB3106-064-Q1-K1-B9
tgatgacgaggacgatgaagacgaggaggagttgaagaagaagccctttgggttctctcggtccancaacaaggctgcttctaagcctctctctcgtggatcagcaactgtggaatcaaaggggcaagctgagaagtgtgccaagagaaagaggaagaaccagtatcgtggaatccgtcagcgtccatggggaaagtgggctgctgagatccgtgacccaagaaagggggttcgtgtttggcttggaactttcagcactgctgaagaagctgcaagagcttatgatgctgaagcaaggaggatccggggcaagaaagccaaggtgaatttcccggatgagccttcangcgctgctgcttcctcaaaacgcctcaaggtgaatccagaggctcagccaatgaaggaaaatctgaacaccgtgaagccgaaaatg

SEQ ID NO: 20490 - DNA, 331 bp, Glycine max
  Clone ID: LIB3106-064-Q1-K1-C1
ctcacacgtcactctatgtgctcaatgcacactgtccacaaattcaagtttgttgccactcaatgcgccgaagtcggcagcaccacccgtagacctaccaccagtcccatggtccaccttggctgtcgaaagatcctactcatgttttttgacaggcgacgtttccgtactgcgacggacgatccgtctgaactgcccgactactaggcgcgcgtacgccacaagctcaaggacctctattgtatgatcgtgaccgcctacacccatcaaggacgaagaaagaatggtacaccatgagcagcagcagctacagcaacagcaagatcagcac

SEQ ID NO: 20491 - DNA, 450 bp, Glycine max
  Clone ID: LIB3106-064-Q1-K1-C11
ttcatttcttccctcgccgctttgtgctgctgctgctgcaaaacctacggttgagccttttgctcacgttgtcagcgcttctttcttacaatggttctacagaacgatattgatttgctgaatcctccagctgagttggagaagagaaagcacaagctcaagcgtcttgtgcagtcaccaaactctttcttcatggatgttaagtgccagggctgcttcaacataacaactgtgtttagccactctcagactgttgtggtttgcggaaactgccagactgtgttgtgccaaccaacaggcggacgggcaaggttaaccgaagggtgctcttttaggaagaagggagattgaatggtttgttaaccagacttttctttgtcaatgattgaaaattttcggttgttaggtttttgaaatggaatccatttccggtatgggatattaattttg

SEQ ID NO: 20492 - DNA, 387 bp, Glycine max
  Clone ID: LIB3106-064-Q1-K1-C12
ggagtattcaaaatatgcagacgttgcggggactcctactcctggttgtacggaaataccgacttgtacggtttggcttgagaggttggacccatatacgagggggattctcacaacactttgcgaccactcatttgattgaccttgtgtgtcaaaggggacgtatttatcttgccaggtttgtagattctggcagcaacacgatgagaagccaacctgatttatttgcggaacattagatgatctctgggtttgtatgatttgtggatctgatggatgtggaagatataaagaacgacatgctatgtaagcttggagagatactcagcgttgctattatcttgattataaaacacatctaatttgggattatgtgggtgacaatta

SEQ ID NO: 20493 - DNA, 450 bp, Glycine max
  unsure at all n locations
  Clone ID: LIB3106-064-Q1-K1-C2
gtcttggaacaaatgacttcctagagaactactacaccatgcctggtagagcatctcaatacacaccccaacaggaccaaatttttctggctggcatagctgagaacttcataaggagcctctatggtcttggtgctaggaagatttcgctaggagggttacctcccatgggatgcttgccacttgaaagaaccacaaatattgttggtgggaatgactgtgttgccagatacaataacatagcattggagttcaatgataagctcaagaatttgaccattaagctaaaccaagagctccctggactcaaattggcgttttctaatccttattacattatgttgaacatcataaaaagacctcaactntatggatttgaatcgacctcagtggcatgttgtgctactggaatgtttgagatgggttatgcatgcaacangggccaaatgt

SEQ ID NO: 20494 - DNA, 439 bp, Glycine max
  Clone ID: LIB3106-064-Q1-K1-C3
ctcctcctaggtggaattggaattggggatctactagatgggcctaatcagaagcatgagatcgcggtcacagcgtgtggtgcaggagcaagaagctgctgagtgtgtcggtgtcgtcgtcggcgacagcatgcgacagagttgttgggccaacatgccccaagagcttctccgagaggtcctcctccgaatcgaggcctccgaggacacgtggccgccgcggaagagcgtcgtctcctgcgccggcgtctgccgcagctggagacatatcaccaaagacattgtcaaaacgcccgaactctcctccaagatcaccttccccatttctgttaaacagcctggcccaagggagaatctcctacggtgctttataaagcgcaaccggtccacccaaacatactatttgtttctcagtttaaccagtacgctagctgaagat

SEQ ID NO: 20495 - DNA, 436 bp, Glycine max
  Clone ID: LIB3106-064-Q1-K1-C4
aaacatgttggtttaccaggacctccttacaggtgatgagcttctctctgactccttccgttacaaggaaattgagaatggaatgctgtgggaagttgaggggaagtgggttgttaaaggagcagttgatgtagacattggtgcaaacccttctgctgagggtggaggagaagatgagggagttgatgatgcagctgttaaggttgttgacattgttgacacattcagacttcaggagcaacccgcattcgataagaagcagtttgttaccttcatgaagaggtttatcaagaatttgactcccaagctcgatgcagagcaacaggagttgtttaagaagcacatcgagggagcaactaaatacctgctctctaagattaaagatttccaattttttgttggtgagagcatgggtgatgatgcttgcttggtcttt

SEQ ID NO: 20496 - DNA, 432 bp, Glycine max
  Clone ID: LIB3106-064-Q1-K1-C5
aaacaatagtgcatagcgtttttcattgtgcattattcaatggccaccacagcagctctatccggaaccatggtgagcacctccttcatgaggaagcaacctatgacgaccaagagcctaaagacattccccaacgctctttttggtctgaaaggtggacgaggtggtcgtgtaacttgcatggcctcgtacaaggtgaagctcataaccccagaaggagaagtggagtttgaatgcccagatgatgttttcattgttgacaaggctgaggaagaaggcattgaacttccctactcgtgcagggctggttcttgcgtttcatgtgttgggaaaattgtgaaaggtgacgtggaccagtcagatggtagcttccttgatgatgaacaaatagaaagtggatgggttctcacctgtgttgctctacctaggtca

SEQ ID NO: 20497 - DNA, 442 bp, Glycine max
  unsure at all n locations
  Clone ID: LIB3106-064-Q1-K1-C6
caggcaagccccactcaaccaccacacctctcctcgttcacgctacccctttctgctcttgttctacctttcaagttttaaaagtataaagatggcagagacattcctatttacctcagagtcggtgaacgagggacaccctgacaagctctgcgaccaaatctccgatgctgtcctcgacgcttgcctcgagcaggacccagacagcaaagttgcctgcgaaacatgcaccaaaaccaacttggtcatggtcttcggagaaatcacgaccaaggccaacgttgactacgagaagatagtgcgtgacacctgcaggaacatcggcttcgtctcaaatgatgtgggactggatgccgacaactgcaaggtcctcgtcaacattgagcagcagagccctgatattgctcanggtgtacacggccaccttaccaaaaaacctgaa

SEQ ID NO: 20498 - DNA, 365 bp, Glycine max
  Clone ID: LIB3106-064-Q1-K1-B3
gaaaaaaaaaaaaaaaaaaaaaaaaaaaaaaaaaaaaaaaaaaaaaaaataagggacaacaccaatggtggttcgaggcctaactactaataaaatcaaacacttataatatacatatctcataccttaacttcaatcaacataacgtcgtttatctaatatgggcctgttcaaacccattacattctccaatttattcttttaccatcccgtaccccatttattatgttaacattttaattacaactcctcacactattgccttttctattagaccttctaattctatggcaattgggactcgccttataacattcaattagaattttccggttgagcctttacacgcttcttctcccttaaac

SEQ ID NO: 20499 - DNA, 406 bp, Glycine max
  unsure at all n locations
  Clone ID: LIB3106-064-Q1-K1-A1
ggcgcgcgtccgtttggtaggatcacctctcctcctcgtgcgaacatcacttattcaattgaagcangagtgtgtgctggcattgacgggggcggggttccaaagcattacacanaattcatagatgttctaaccatgttggtgaaaaataagcacattcccatgagtcgaattgatgatgcggtgagaagaattctgtgggttaagttcatgatgggtatttttgagaatccttttgctgattacagtttggccaaatatttgggaatccaggaacacagaaatttggctagggaagcagtaaggaaatcaatggtccttctgaaaaatggtgaatctgctgacaagcctttactgcctcttcctaaaaaggcgccaaaaatacttgtgggctggaagccatgct

SEQ ID NO: 20500 - DNA, 444 bp, Glycine max
  Clone ID: LIB3106-064-Q1-K1-A10
agaagaatgatctccaccccaagtcacaaattcttaaagagtcattagtcagtaataaatgtggtaatgttccaaaaaatgttgatcaacgtaaaaatgaacagaatcttacagcaaggaagcaaaatcataaagagaacatggctggaaatattgccactactactaaggtggagaaaagagcatatccatcatttgaagcttttacaatagaggaagaagaaggttcacgtggttatggcaccgtttaccgtgctcaaagaactactgatggaaaacgggttgcaataaaatgtcctcatactaatgctcataaaaaccatgtaaataatgaacggagtatgctcgagcgttttggtggtaaaaactatataataaggtatgagggctcttttaaaaatggcaacagcgactgctttgttttagaacatgttcaccatgata

SEQ ID NO: 20501 - DNA, 382 bp, Glycine max
  Clone ID: LIB3106-064-Q1-K1-A11
actatgcgagcgactatctgaggcgcagtctattgtgcaggccaagctacaggcgcaggcagatcaccacgcacaacagactcctgctatggcttctactgctgtttcgatggccttttcgatgaactacgacatgaacaactacaaagccttattcaaagccttattcataccgctaccaatacggacactattgacgacactggtcacgacaaacgccaaggctaacttcaatgcttatatgaatgcatatgcaaatgcaaaagtcacagcaggacttacaacagcttctatgacagcatctgaggtggctcatgctgctggatatgctgtttgatatgacctctagaactttctgatgaacattcttgttagcatgttt

SEQ ID NO: 20502 - DNA, 229 bp, Glycine max
  Clone ID: LIB3106-064-Q1-K1-A12
gttaaaataatgtgaagtttttcggtttagattgtgtcataatagtcttgtaagtttattggtttttctgtgttggagtcgaggcattttttgggctgctgattctagctaaccgataaatttctgtattctaccatttttcttgtaataaatgagttagtcctaggtagaccaaacaaaaaatgaattacatctagtatatataagaaattttccgactttaacagcc

SEQ ID NO: 20503 - DNA, 321 bp, Glycine max
  Clone ID: LIB3106-064-Q1-K1-A2
cccacgcgtccgctgaggattgcccatattcttacaagcctgattgtggtcataatggccgtgcgtttgttatgatgatcgaggatgatcatatgtctgagcaatagttcaagccgcactcaacattttgggagcggttgaaaagatctgggagagcgctgctctatgatgccaacatatatgttcccattgatagcagagccgaggccatagctggatcatgctcccgctcttgagccaaccagcggtgcttggatcacatacatgattgaacttacgccacgcataccttacaactgtcttacagcatatagggtagaa

SEQ ID NO: 20504 - DNA, 449 bp, Glycine max
  unsure at all n locations
  Clone ID: LIB3106-064-Q1-K1-A3
cccgaatctcccggntcggccgccgcgtacggccacgcgtncgctgaggattgcccatagtcttacaagcctgattgtggtcagaatggccgtgtgtttgttatcgggattggggatgataagatctctgtccaaaaattcantgcaaactcaacagtattggatttgttgaaaagatctgggagagcaagctctaggttgacaacatatacgttcccattgaaggaagagttgaggccaacgctgaatcataaacccgttagtgatcccaatagcaagtttaagatgggagatgtgattgaacttacaccacccatacctgacaagtctcttacagaatatagggaagaaatccagcgtatgtatgatcgcgggctaactgtgtcaaacatgggaaccgccgcaagcaccatggcttgctcaagaagttgacccgtgcttttagattt

SEQ ID NO: 20505 - DNA, 440 bp, Glycine max
  Clone ID: LIB3106-064-Q1-K1-A4
atcaggcttggagttctgtccctggtgctggagcaggcagagtcacttcgaaccggtggaacttcactcacccttttcaaaaacggatggatggtacttgatgcaattggtgcagctaatgatctcagaactcaattcttagaaattcaaggctgagcttgatctggttcacaatatcagctgtacaggatggtggtgaagtccgtggatgggagggaactacgcgccttcaatttcaaacaagaggatcaaagccaagaggtacgtgcagttgagaggagagtgcttttggaaaccttggctagtcagctacctcgggatagcgttcaatattcttcacaattgcaaaggattgaagccagtccaaacggggataccttgttggaacttgtggatgggtctaagctgcttgcaaggattgtgatagagtgcgatggaat

SEQ ID NO: 20506 - DNA, 190 bp, Glycine max
  Clone ID: LIB3106-064-Q1-K1-A6
cgaatttcccggttggaccaacccttccggcaattcaagggacgaaccggcgttaacttgtcctaagaataatcgggagcgacaattgaggattatgccgatcagaaccatcgccgatggaaggcctgaataggcgactaaccctgccacgttgaaggcggttttggctgacttcatgtaaaccttcatc

SEQ ID NO: 20507 - DNA, 442 bp, Glycine max
  Clone ID: LIB3106-064-Q1-K1-A8
cccacgcgtccgctgaggattgcccatattcttacaagcctgattgtggtcagaatggccgtgtgtttgttatcatgattgagaatgataagatgtctgtccaagaattcagtgcaaactcaacagtattggatttgttgaaaagatctgggagagcaagctctaggttgacaacatataggttcccattgaaggaagagttgaggccaaggctgaatcataaacccgttagtgatcccaatagcaagttgaagatgggagatgtgattgaacttacaccagccatacctgacaagtctcttacagaatatagggaagaaatccagcgtatgtatgatcgcgggctaactgtgtcaagcatgggaaccgccgcaagcaccatggctggctcaagaagttgacccgtgcttttggatttcacttccattccaacatgaaatta

SEQ ID NO: 20508 - DNA, 457 bp, Glycine max
  Clone ID: LIB3106-064-Q1-K1-A9
gaaaatgaaggtccttgttttcttcgttgctacaattttggtagcatggcaatgccatgcgtacgatatgttccctctccgaatgaacactggctatggtgcccgtactccggaggtgaaatgcgcaagttggaggcttgctgtggaagcacacaacatctttggctttgagaccattcctgaagagtgcgttgaagcaacaaaggaatacatccatggcgaacaatatagatcagactccaaaacagttaaccaacaagcttacttttatgccagagacctcgaagtccatcccaaggacacatttgtgttcagtatagatggcaccgtactctctaatattccatactacaaaaaacatggatatggggtggagaaatttaactcgaccttgtatgatgaatgggttaacaagggcaatgcaccggcactgcccgagactcttaagaattacaac

SEQ ID NO: 20509 - DNA, 354 bp, Glycine max
  Clone ID: LIB3106-064-Q1-K1-B1
gtccttattcccaattctcctttcaattcaattgcagcaatctcagtctctgccccatggcttacgttgagcgaggtgttgtcaaatcaaagcgatcaatatggcggcttaaaacaatcactgattttttctgggccattgttaactacataggcttgttttttgcaactatgttctcgatggaaaagtcagatgcctacagaaaaggttctgttggtaagaaatgggatggcggtgctcctggaggaggtcctggtggtggtcccggtggtggcggtccccgaggtcctcctcgtgggggtcttgacaatgttcgtgggctagatagtataaggggacgtgatcatagttcac

SEQ ID NO: 20510 - DNA, 184 bp, Glycine max
  Clone ID: LIB3106-064-Q1-K1-B10
atgcgccccgctttaattatcagttataagaattaagatagcatgtctttgctactttgcgagtaaaaaaggaaaaaaaaaaaaaaaaaaaaaaaaaaaaaaaaaaaaaaaaaaaaaaaaaaaaaaaaaaaaaaaaaaaaaaaaaaaaaaaaaaaaaaaaaaaaaaagggggggggcgttttaa

SEQ ID NO: 20511 - DNA, 434 bp, Glycine max
  Clone ID: LIB3106-064-Q1-K1-B11
atggctttaggtgttcctgctcttccgttgacatacgtggctcacgttctggcagttgttgccagcgtcttggtcgtggtctgggtcgtcaatttcaggggtggcttggcttgggattctgataacaagtccctcatcttcaacattcatccagttcttattgttattggcttactagttcatgggggtgaagctattataagttacaaagcttttcccctaaagaaggaagtgaagaaattgatacaccttgttttccatgccatcgcattaatacttggaatagttggaatttatactgccttcaagtttcacaatgaaagtgggattgccaatctctacagcttgcattcatggcttggaattggggttattgtcctttatggcattcagtggatatatgggtttgtgatctttttcttccctggtgggac

SEQ ID NO: 20512 - DNA, 427 bp, Glycine max
  unsure at all n locations
  Clone ID: LIB3106-064-Q1-K1-B12
gcgggacttcaatctggcaaagcacccagagattgatgtgccgaatctgcaggtgataaagctgatgcanagcttcaaatccagagagtatgtgagggagacatttgcgtggatgcactattactggttcctcaccaacgatggaattgagttcctcaggacatacctcaaccttccttccgaaattgtccctgccactctcaagaagcaggccaagcccgcgggaagaccattcggtggcccacccggtgatcgccccaggggcccacctcgctttgacggagagaggagattcggtggtgaccgtgatggataccgtggaggtccacgcggacctggtggtgatttccgtgacaagggtggagctcctgctgactacaggccttcttttgggggtggtcctggtggaaggcctggttttggtcgt

SEQ ID NO: 20513 - DNA, 414 bp, Glycine max
  Clone ID: LIB3106-064-Q1-K1-B2
cttgcccgcaaatccttggtcaatgccgacggtattatagagaaaacattcttgtgggggaggtactctttggaaatgtctgctgttatttacaaggattgggttttcaccgatcaagcattgcctaatgatcttgtcaagagaggagttgctgttaaggatccatctgctccccatggagttcgacttttgatcgaggactatccttatgcttctgatgggctagagatatgggatgctatcaagtcttgggtggaagaatatgtctcattctactacaagtcagatgaggaacttcaaaaagaccccgagctccaagcttggtggaaagaacttgtagaggtgggtcatggggatttgaaggataagccatggtggcaaaagatgcaaactcgtgaagagttggttgaagct

SEQ ID NO: 20514 - DNA, 434 bp, Glycine max
  Clone ID: LIB3106-063-Q1-K1-H9
attcttctaccacctcagcagagcgtgaaattgtgagggatatgaaggaaaagctggcttagatagccctcgactatgagcaagagctagagacatccaagaccagctcttcagtggagaagagctatgagttgcctgatgggcaggttatcactattggcgctgagcgtttcaggtgtccggaggtcttgtaccaaccatccatggtaggaatggaagcatcaggcattcatgaaacaacatacaactccataatgaaatgtgatgttgacatcaggaaagacctgtacggtaacattgtcctttcaggaggtacaaccatgtttcctggcatcgctgatagaatgagcaaggaaatttctgctttagccccaagtagcatgaagatcaaggtggtagcacctcctgagagaaagtacagtgtctggattgga

SEQ ID NO: 20515 - DNA, 187 bp, Glycine max
  unsure at all n locations
  Clone ID: LIB3106-063-Q1-K1-G12
ccggtccgaattcgagggcgcgcacgcgtccgtccactcgttctgatactatgaggtatacattccttgccatatatgccaatcgatgcccaggtgtnttggtatagggggcaggtgtggatgatattatagaagagagattgaacgttgagggagatggtgactggaaaaacaagggtaagagtta

SEQ ID NO: 20516 - DNA, 424 bp, Glycine max
  Clone ID: LIB3106-063-Q1-K1-G2
ggccgccctttttttttttttttttttttttttttttttttttttttttttttttttaaacacgggccggctaacaatggctttaattgatttttgaaatgggggagacaactaatccaattaagagaacaatattaaaatctgaatatgatgcaatttcattccaaggggacaccaaaactgagggcaaagagcaaagatggctgactaggattttatgtaacacgtcactgtcataggcattccagatgaaaaattatcaacaaactactacttgtatgtttgccaagactgcgactggtccaaataaagaaggcaaacggatttaagaagcaacagtaaccagcaatatggaaaatgggagccgctgaacatttccggactttaagagcactcactcaatggcagacaaatttattcatca

SEQ ID NO: 20517 - DNA, 437 bp, Glycine max
  Clone ID: LIB3106-063-Q1-K1-G3
ctttaatggaactttagctttaactggtcgtgaccaggaaactaccggtttcgcttggtgggccgggaatgcccgacttatcaatttatccggcaaactactaggagcccatgtagcccatgctggattaatagtattctgggccggagcaatgaacctttttgaagtggctcatttcgtacccgagaagcccatgtatgaacaaggtttaattttacttgcccatctagctactctaggttggggggtaggtcctgggggggaagttatagacacctttccatactttgtgtctggaggacttcacttaatttcctctgcagtattgggctttggcggtatttatcatgcacttttgggaccttggactcttgaagaatctttttcattcttcggttatgtatgggaaagatagaattaaaatgactacaattttt

SEQ ID NO: 20518 - DNA, 153 bp, Glycine max
  Clone ID: LIB3106-063-Q1-K1-G4
ttctcagccgctacaacggtattgccttttacgacaggcgctgcaaagccagggcctggaagtatcactagggtccttgcggctgtgcttagatccgcagacaataccaggagttcgacagtgagaattaattacgtacttgatttccgcata

SEQ ID NO: 20519 - DNA, 442 bp, Glycine max
  Clone ID: LIB3106-063-Q1-K1-G5
cttgaagcgtatttttgagaaagtggacgtgaatggcgacggattggtgagccttgaggaactgaatcgattgcttcagatgacgggcaattcccaatatagcatagaagagttggaatcacttgtggaaaagaaaagtcttggtttcagtgatttcttgttcttttacaactcaatatcggagcagaacaagggagagagcaaaggaagtgagttggagagcgacctggccaagacctttgaggtgtttgacttggacggagatggtttcatcacaagccaagaccttgagtctgtcttgaagaggcttggcttctgggatcaaacacatgccaaggattgcagaaccatgattcgtttctatgacaccaatttcgatggtcgccttgattttcaggaattcaagaccatgatgttgctcaccaaagcttgaatatattca

SEQ ID NO: 20520 - DNA, 408 bp, Glycine max
  Clone ID: LIB3106-063-Q1-K1-G6
aaaatgcaggaagggccacgctgaaaattaaaaaaaaaaaaaacaagaagaagaaaaaggcggggctcactgaaaaagcagtttcccgaattagtaagtaatgaccggaaaaccactgtcagggatactgaaaaccgcctcatctctgaaatcttgttcgtaaccattaatacaacgttggtagtaactcacaaaagcctatgttccctccctttccttcactttaccatgtccatgaaccaatagtagctacctttcacgaacacaaacaaagccactctctcgtattatatggcgtaccaccataacccccaagagcttccacttcaccatttcactgaccaacaacaacaccataaccaatctctcggtgacaactacttgctcttcgaccctgctttcaaacct

SEQ ID NO: 20521 - DNA, 442 bp, Glycine max
  Clone ID: LIB3106-063-Q1-K1-G7
cccacgcgtccgaagaaatttaagtgaggagctagagaatgatgatgaagtctgctatgtgtgcagtggtggttgtagcacttcttcttctggcggaggtggggcccatggctgaggctgtgacatgcaccccaacagagttgagtccgtgtcttccagcaatcacttccggtgctaaaccttccaatgcttgttgcacgaagctgaagcagcaaaaaccatgcttatgtggctacctcaaaaacgctagcttgaagcagtatgttaactctcctaatgcccgaaaaaccgttgcttcttgtgggattccctttccaacttgttaattaattaagccttcttataattaaagtgtgggatatatatatatatatatatatatatatatatatataaacaggttaatttatacacactttgatcctacaaagcatcttgacac

SEQ ID NO: 20522 - DNA, 323 bp, Glycine max
  Clone ID: LIB3106-063-Q1-K1-G8
ttctcacccgctacaacggtatcgccttcgacgattggtgcgccaacgccatgggcttgatgtctcaggagggtgcttgtggctgtgctgagatcctcaggcaataccaggagttcgacagtgagaatgaattacgtgcttaatttcagtatattattaatctacttgctagtgtctcttgatgtggagcgttatgttgacatttgcatattatcatgctatatatctcgaaggaacgaccgtgcttaatttgataattacatgaacatctgcactggacttgatgatggcagcagtctaattggtgtcattataataaacta

SEQ ID NO: 20523 - DNA, 421 bp, Glycine max
  unsure at all n locations
  Clone ID: LIB3106-063-Q1-K1-G9
cccacgcgtccgagagtttgttgtgagctataagctagtttatcgtgaggagaatatgaaggggtttgttttctttgttgctgcagtagttttggtagcatggccatgccatggcgcaggctaccaaaggttccctctccgaatgaaaactggctatggtgagcgttcttcggaggtaaaatgcgcaagttttaggcttgctgtggaagcacacaacatccgagcctttaaaaccattcctgaagagtgcgttgaaccaacaaaggactacattaatggcgaacaatttagatcagactctaaaacagttaaccaacaagctttcttttatgctagtgaacgcgaagtccatcacaacgacatatttatattcggcatagataacaccgtactctctaatatcccatactatgnaaaacat

SEQ ID NO: 20524 - DNA, 401 bp, Glycine max
  unsure at all n locations
  Clone ID: LIB3106-063-Q1-K1-H1
ttcccttttcacgtcattatcctaaaaacttgcagattttcacatcccaaacaacatgaagggaaggttcatgtttctgtcggtgctcctttgtgccacttttcatgtctccttctctattatcgacggtttagttgccaacggcaactttgagttgggtccaaagccctccgccctaaaaggaacagtggtggtgggcgggagccactcgatcccagaatgggagatctccggctttgtggagtacataaaatccggccaaaagcaaggtgacatgttgctcgtcgtcccagagggtgcctacgcggtgcgcctagggaacgaggcctncatcaagcagagaatcaaggtgatcaagggcatgtactactccatcaccttcatggtggctcgcacgtgtg

SEQ ID NO: 20525 - DNA, 200 bp, Glycine max
  Clone ID: LIB3106-063-Q1-K1-H10
caaagaaatgggaagttcattggtggaaatccaagttcccgggcagaagtttgtgaacggagttccgttccccgctgtggcgtctcctccacctgcaactgcaagtgcggttcctcttacggactccgtcaaaacccagaaagctttccttgaatcattgctactccaatcgggtgcctgccttttcaggggattcccac

SEQ ID NO: 20526 - DNA, 290 bp, Glycine max
  Clone ID: LIB3106-063-Q1-K1-H11
cggactcgtgggctgaaattttgaaaatcaattcaaattgcaagaataaaaaaaaagggtaggaaataaaaaaagaaaagaaagataaaaaaaaataataaaaaaaaataaaagggtaacatctatagaaaaattcaagaaaacttacaaattaatataaaataatatgttgtttatagcttaaattaaatgaatttaattgttcgtcaattaataatgtaattacagtgaaaacattggacgttaaaaaatttaatgccataaatcataatactatttaacatattgga

SEQ ID NO: 20527 - DNA, 183 bp, Glycine max
  unsure at all n locations
  Clone ID: LIB3106-063-Q1-K1-H12
gcgnccacgcgtccgcaaatggaaaagctccatgcttctgtgctcgcccttggattccttcttgggatactgatttaagaaggattggtaacgtgtatgaagaatgaatactgatcataagaatggggatatgtgcaagttataccaaaagcccacttgttctggaggctttacagaagtcca

SEQ ID NO: 20528 - DNA, 238 bp, Glycine max
  Clone ID: LIB3106-063-Q1-K1-H2
cccacgcgtccgttcactttcctgggaaaaaattggaacctgcctctgttaaagtttgtatttttctgagtgggtgggttgattgagagtgctgtgcaagctttggaactttttcccaacctgctacttcaatggccactgaagaggttaacaaacctcaatcacttcctccataccctgagatgatagtgaaagcacttgaagcactgaatgagccaaatggatcgaacaagtcagc

SEQ ID NO: 20529 - DNA, 409 bp, Glycine max
  Clone ID: LIB3106-063-Q1-K1-H3
cccacgcgtccgcccacgcgtccgagggaactgggacagtccttgctgtaactcttggtgccgtggatgctgaaatcagcgttaatgctgccatgctacaggaagggcttgctaggacagaaaaaagaaacaggtgggacagaaaagacagacagacagctcttgataatttggagaatttccaggaagaagcaaagaccagcaggcgcggaatgtggcagtatggagatattcagtcagatgacgaggacactgctcctcctcctagaaaggctgctggtggccgtaaataagtgtaacaggaggtaaattataaaataggcatcttgagagaacatgactgaagctataggctttgacaatttttaattttttgagctagagagaaaaaagaaaatgccctgcggat

SEQ ID NO: 20530 - DNA, 432 bp, Glycine max
  unsure at all n locations
  Clone ID: LIB3106-063-Q1-K1-H5
attgcatccctcttgatttgtagtttgttttgtgctttagataaaagttctgccaaatcaagaggggttttaagatcatagtgtgtgttttgcaacaatggctaagttctttgctgctatgatcttggcactctttgccatttccatacttcaaacagtggtaatggctgctaatgaacaaggaggccacttgtatgacaacaagagcaaatatggaagtggaagtgtcaagagttaccaatgcccatcacaatgctcgaggagatgtagccagacccaataccacaagccctgcatgtttctctgtcagaagtgctgcatgaaatgcctgtgtgtgcccccagagtattatggtaataaagctgtgtgcccttgctacaacaactggnagaccaaggaaggaagacccaagtgcccttgagcttcaacttg

SEQ ID NO: 20531 - DNA, 249 bp, Glycine max
  Clone ID: LIB3106-063-Q1-K1-H7
cccacgcgtccgagaagagaagggctacacaaacacaatctctaatggcactcaggatgtgggcttcttccactgccaatgcactcaaactctcttctgtctccagacctcatctcttgcctcctttttctttctccagatgcttatcttccgtcttggatggacttaagtacgctgattcacatgaatgggtcaagcacgaaggctcagtcgccaccattggtatcactgaccatgcccaggaccatc

SEQ ID NO: 20532 - DNA, 437 bp, Glycine max
  Clone ID: LIB3106-063-Q1-K1-G11
cccacgcgtccgagcaaaacagacttggcttatccagagtcaatcataagaaagaaactctggaattttcttctagtaaatcatgtgtgccaatattgccatgggtcaatggagatgggatcatcaacaacattgtttacagggtactcagacgtcgtgttcttggaatagtgatgcaaaaccctgggatattggaggatggtattctacatcatatgcacgtgttgaatccacagaactgtagaactctcttggaattgatggttctggataaacacctaattgtgaagaagatgcatcaaaatatgttagatgggggaccctccttacttccggaacttatcggaagcaaatccagtcaaccgaagttgatatgccgagagcatttcttcgccaatcccatgagtacttccttgttgtagggaatctgtggtatt

SEQ ID NO: 20533 - DNA, 244 bp, Glycine max
  Clone ID: LIB3106-063-Q1-K1-H8
ccacgcgtccgtccacgcgtccggaacgctacacatcaaaaataaatcgagccaacgcatttaattgtgggtgtcttcatattacctgtgttctgtcacatctttttgcataatattggcactaagtcttttttgatagaaattgtgaagatgtactggttatcattgtatcacctatattgtgctcttttttttttattgaatttgcaacacggctcttttcttcaaataagatggatcattt

SEQ ID NO: 20534 - DNA, 411 bp, Glycine max
  Clone ID: LIB3106-063-Q1-K1-E7
cccacgcgtccgctatacttttcgcatgaaacatggttctactaaaggtcaaacctctatcagagaaagaagtggattggggtctccaagaataatgaatccacatgcgcctgagtttgttcccagaaatgcttctcaaatagaagccaatgatgccaattcaaatgtttccaatgagcataactctttgtctgacataggcatgtcagaagaaaacaagctagatgaaaattttgttgaaatcaatgggagttccaacaaaaacagtatttctgaatctgagaagtccgagatagctaggcagatactgctcagttttctagggaaatctgtcaaggaaaatattgattctggggatgagtctaatgatggtgaatgaaaaattgacatcttgggaaaggtgttctgatg

SEQ ID NO: 20535 - DNA, 428 bp, Glycine max
  Clone ID: LIB3106-063-Q1-K1-E8
gggcgacgcaccggcattgccagagactcttaaaaattacaacaagctgttgtctcttggcttcaagattgtattcttgtcaggaagatatcttgacaaaatggccgtaacagaagcaaacctaaagaaggctggcttccacacatgggagcagttaattctcaaggatccacatcttatcactccaaatgcactttcatacaaatcagcaatgagagagaatctgttgaggcagggatacagaattgttggaatcattggagaccaatggagcgatctgcttggagaccacagaggcgaaagcaggacctttaagcttcctaatcccatgtactacattgagtagtaccttcacctctctcaacaatctagctagagtttgctcctatctatatgtaataaggtatgctgatatgcactattcaaat

SEQ ID NO: 20536 - DNA, 436 bp, Glycine max
  Clone ID: LIB3106-063-Q1-K1-E9
gtcggagggctagagcttgcaaggttgaatgctggtgacagaagcctaaaagttgccgagtcgggcgtcaagaacaggaatagacagggcgtgagagtcgttggtaggaagcgaaagggaattgagaaagaatctgctgttcaatcttcgtttttgccctctctttcgtgtttttagaactccaatctagacttctcgagtttgttttgcaatgccgttatttattaagtattcaatatgaaaacttgaactaccatgttatagatttcaccttgatttgtgtctaggtatattcgcctcatgattgttgctttaaaagtcgctcttccgacaaaatagctggctattattgcctcaaaggagggatatgattagtgtgtctagcattgaaaccctcgatttagaagatatttttaaaaaaaaaatccaaatgaaa

SEQ ID NO: 20537 - DNA, 68 bp, Glycine max
  Clone ID: LIB3106-063-Q1-K1-F1
atttgtggacaatctgttatgtaataggggtgtttttctggctatgaagctcaccatattgtttagtt

SEQ ID NO: 20538 - DNA, 447 bp, Glycine max
  Clone ID: LIB3106-063-Q1-K1-F10
atcgcccaagccctatgcaaccaatccctttttcacacccattcgattcactttccatgggtagcctcaaggttgcattcttggctgcagtgctctgcatggttgtggtgagtgcacccatggcacatgcagctatcacgtgcgggcaggtgacgagtagcctggccaattgcatcggttacctccagaagggaggaacgccgtcgtcgggatgctgcaacggagtgaagagcctcaatgccgccgtcaagaccaccgacgaccgtcagacggcgtgcaactgcctcaagtcggtcgccagccaaatctccggcttcaacgccaacaacgccgactagctccccggcaaatgcggagtctgcatcccctacaagatcagcaccttcaccaactgcgctaccatcaaggtttgaagagaaagtcatggacgcatgaaaccggaaacta

SEQ ID NO: 20539 - DNA, 366 bp, Glycine max
  Clone ID: LIB3106-063-Q1-K1-F11
cccacgcgtccgaaaagtagttattgcgagctctggtgtgaacatgatgaagagcagcaacgtggcgttggtgcagagggcacaattggaaaagatcgaggatctgatgttgcctcctacgccacaacatttgcgaatattgatgtcgctgtccattcacaagcctccccaactcttgcctgattttttacttcgggacttcttggataaattatatggagaaaataagaaggaaaaaatggagcttctgaaagggttaaccatcggaagggatgatacttcaagaatttcacctcttcaacaagaggttctcatcgtctggggagaagaagaccgaatatttccggtgaagttggcccacgaact

SEQ ID NO: 20540 - DNA, 396 bp, Glycine max
  Clone ID: LIB3106-063-Q1-K1-F12
cccacgcgtccgcccacgcgtccgcccacgcgtccgcccacgcgtccgcacactttggtgggcacagcaacaataacaatggcagcctcactacaagctgcagctaccttcatgcaacccaccaaggtgggcatggccactcgcaacctcaaatctacacaatgcatttctaaggcttttggcttggaacccgctgcagctaaactcatttgctcccttaagcccgatctcaaagattttgctcaaaaatgtgtcgacgccaccaaaattgcaggattcgcccttgccacctcagctctcgttgcttctggagcgagtgcagaaggtgttccaaagaggctaaccttcgacgaaatccagagcaagacatacttggaagtgaagggaactggaact

SEQ ID NO: 20541 - DNA, 59 bp, Glycine max
  Clone ID: LIB3106-063-Q1-K1-F2
aaaaaaaaaaaatataaaaaaaaaaaaatttaaactaaaaaaaaaaaaaaaaacaaaaa

SEQ ID NO: 20542 - DNA, 445 bp, Glycine max
  Clone ID: LIB3106-063-Q1-K1-F3
ctttcttccatcttcttctcttttcacgtcattatcctaaacttgcagattttcacatcccaggcaacatgaaggggaggttcatgtttctgtcggtgctcctttgtgccacctttcatgtctccttctccattactgacggcttagtagcaaacggcaacttcgagctgggtccgaagccctccgccctgaaaggaactgtggtgattggtggcagccactcgatcccagaatgggagatctctggcttcgtggagtacataaagtccggccagaagcagggcgacatgctgctcgtggtccccgaaggggcctacgcggtgcgcctcgggaaccaggccttcatcaagcaaaggatcaaggtgatcaagggcatgtactactccatcaccttcatggtggcccgcacctgcgcgcatgatgagaggctcaacatattcgtcac

SEQ ID NO: 20543 - DNA, 402 bp, Glycine max
  Clone ID: LIB3106-063-Q1-K1-F4
gaagaaagagacctgaaagtgtcgcactttcagatcgtgagctcgtaaaacctcacacaccagggggcgtcactggggcgtacatgcacctccatgaactacttatgtgaaatcactgatgctctatggttcattactgacggtttacctgccaacggcaccttatacctgggtgcaaaacccttcgacctgcacggaactgtggtgatcggtgcttttcactgtatcccagaatgctacatcatctgtcttcctgtagtcataaagttcgtcataatcatggctacatgctgctcgttttccccgatggggcctactcggttcgcctcgggaactaggccttcattaagcacatgatcaaggtgatcaaagtcatgtactacttcattaccttcatggtgg

SEQ ID NO: 20544 - DNA, 379 bp, Glycine max
  Clone ID: LIB3106-063-Q1-K1-F5
cccacgcgtccgaaccaaccgttgatgacaaggtcttaaatcatgattaccaaccttgtaagcgttcgttcctcgtttttttagcagtaactttcagttcacttgttcataaatcaaaatatacttgtgacagctattgtgattttcacactaaattttatcctacatagtatattaatagattggatacattatatattcaagcttgtgaattgtgattctaaattgtaaataaaattttgctgtcaaggtgtatgttggtatggtgctaccagcttatgcccgatgcttttggtttgctagattcatgacttctgttgtatttgttttaccaaaattgtgatcgtcttccactgtaattctatttatcgacaaatat

SEQ ID NO: 20545 - DNA, 221 bp, Glycine max
  Clone ID: LIB3106-063-Q1-K1-F6
cggttgaccaattgagtgcagctggtcttacaccatctcacatagcagcaacagttttcaatctacttggacaaacaagagaggcactagaggtcatgacataaaacaaatgcaaaggggttcaatttttgttccctgcaatgtacaaagtagcgtgattcacccagtgtaatacaaatgtgtttgttaaaaaataatagaaatggaaaatgcagattgac

SEQ ID NO: 20546 - DNA, 150 bp, Glycine max
  Clone ID: LIB3106-063-Q1-K1-F7
agatatatgacgtccctgcgttgtgtagatatatgacgtccctgtaatttttctttgacgatttttatactgttcatgaacaacttcaatgtcagttttacaagtactatttttgagggatgatgcaatatagatgaatccaagttcact

SEQ ID NO: 20547 - DNA, 444 bp, Glycine max
  unsure at all n locations
  Clone ID: LIB3106-063-Q1-K1-F8
attcttcatccatagacatggccaccgtcacttctgcagccgttgctattccctcattcactggcctcaaggcaagcgcaggcaaagtgagtgccgcagttaaagtctcagctccccaagccacaaggttgggcatcaaggcttcgctgaaagacgttggagtcgctgttgtggccactgccgcgagtgcagtgctggctagcaacgccatggccattgaagtgttgctgggtggtgatgacgggtctctggctttcgttcccaacaatttctccgtggcctctggggagaagatcgtgttcaagaacaacgcaggtttcccccacaacgttgtgttcgacgaggacgagattcctagcngcgtggatgcagggaaaatctccatgagcgatgaagaccttctcaatgcgcctggtgagacttacagcgttactttggatgcta

SEQ ID NO: 20548 - DNA, 439 bp, Glycine max
  Clone ID: LIB3106-063-Q1-K1-F9
cccacgcgtccggagtgatgaatatgatggaatcatttgttgcccaaacacatgtgtgatgggtgggaatgctgagtccacgtttagcaattgcaagtcagaagcaagtcaaaatggagtgaagtcagaggaatcagttcatactggtttgaagttggtgattattctacaagtggttctggttatttttctggtatttctctggagttttcgttgccgcaccagatctagaaggagacattaccgttgaattgaaagagactttgctttttacctgacattgaatggtgttgatcagttggagttgaagtcctgaaggttatggatttagagtcacaacattgttatgagtgcagtttgcgagttcaagagtttccaaggcactgaatttaatgaatagtgaaatatggatcatccggcacaaggaacattggtgaaa

SEQ ID NO: 20549 - DNA, 334 bp, Glycine max
  unsure at all n locations
  Clone ID: LIB3106-063-Q1-K1-G1
cccacgcgtccgcccttagctagtttttaccaatggctgctgcggttagtgctgcagtctcttttccatccaccaagtctacctctctcccaagcaggacctccatcattaccccagagagagttgtattcaagaaggcttcattgcaatacagagatgtttgtagcagtggaagggtagtttccatcagagctcaagtcaccactgaggctccagccaaggttgaaaaagagtccaagaaacaggatgaaagtgtggttgtgaacaagttcanacccaagaccccttacgttggtagatgcctgctcaacacaaagatcactggggatgatgc

SEQ ID NO: 20550 - DNA, 444 bp, Glycine max
  unsure at all n locations
  Clone ID: LIB3106-063-Q1-K1-G10
gaaagacagaaatggaggagaaagaagagctcaaaaagtctaaggttattaaaatagactctcaaaaatcatgggaacaccacatctcttatgctaccaatcaaaagtaccctattgcagttcatttctctgctttctggtgtgtcccttctttagttatgaatcctttctttcaagaattggcctccacttatgaagatgttttgcttctgacgttggatgtggatgaggttaaggaaattgcctccaagatggaaatcaaagccatgcccacctttctgttgctgagtggagggactcctgtggacaaaatcgtgggtgcaaatcctgatgaaattaggaaaaggattgaccattttgttcactcaactcgttcctagaacttttgttcattgtgctangaagcatttcatatatgtcttatattccaaagtaatatttata

SEQ ID NO: 20551 - DNA, 442 bp, Glycine max
  Clone ID: LIB3106-063-Q1-K1-E6
ctcattcttcatccatagacatggccaccgtcacttctgcagccgttgctattccctgattcactggcctcaaggcaagcgcaggcaaagtgagtgccgcagttaaagtctcagctccccaagccacaaggttgggcatcaaggcttcgctgaaagacgttggagtcgctgttgtggccactgccgcgagtgcagtgctggctagcaacgccatggccattgaagtgttgctgggtggtgatgacgggtctctggctttcgttcccaacaatttctccgtggcctctggggagaagatcgtgttcaagaacaacgcatgtttcccccacaacgttgtgttcgacgaggacgagattcctagcggcgtggatgcagggaaaatctccatgagcgatgaagaccttctcaatgcgcctggtgagacttacagcgttactttgga

SEQ ID NO: 20552 - DNA, 443 bp, Glycine max
  unsure at all n locations
  Clone ID: LIB3106-063-Q1-K1-D12
gtttttcatccaatatcacagaatcacaatagcttttctctccgtgtagactcatcgaaacggacactgtaaaaaccgcaagaactctctatcactttgccacccttcattcataaacactttccattattctatgaactcaaactcaaaacaatgaccactttttctctctactctcatttcctttcctccaagaactctattttccatgcccccttcaaaggaaacaacaacaccaagcaattcactttttccaaagccgcaaatctcttgccgttgcagccacggttaaatgtctgcttttcttcttcaaaggatgcaggctccagtgacaacacaccgagcaacttttgcattattgaggggccagagacggttgaggattntatgcagatgcagctgcaggaaattcaagacaacataaagagcatgcgcaataagat

SEQ ID NO: 20553 - DNA, 406 bp, Glycine max
  Clone ID: LIB3106-063-Q1-K1-D2
gcaagcaaaaagaaagaatcccaggcgaggagaaagatggaggggaaggagcaggatgtgtcgttgggagcgaacaagttccccgagagacagccaattgggacggcggcgcagagccaagacgacggcaaggactaccaggagccggcgccggcgccgctggttgacccgacggagtttacgtcatggtcgttttacagagcagggatagcagaagttgtggccacttttctgtttctctacatcactgtcttaaccgttatgggagtcgccggggctaagtctaagtgtagtaccgttgggattcaagggatcgcttgggccttcggtggcatgatctttcgccttcgttactgcaccggtggcatctcaaggggacacataaacccggcggtgacatttgggc

SEQ ID NO: 20554 - DNA, 185 bp, Glycine max
  Clone ID: LIB3106-063-Q1-K1-D3
gtagattatatattatacccttatgttatatgccatgtcattgtggatagaaaaaaagggaagagagaaagcaaacaagaaaaaagagagacagacaattgggaacggaggagcaaagcctagtctacgtgcaaggactaccatgagccggcgccggtgccgctggatgaccgcgcagtgttcac

SEQ ID NO: 20555 - DNA, 443 bp, Glycine max
  unsure at all n locations
  Clone ID: LIB3106-063-Q1-K1-D4
cttctgctcagtggaaacagattcacaggtgaaatcccaccagatatagggagattgaaaagtatcctcaagttggatattagtgctaacagcttttcaggtactattccccctgggataggtaactgtgtcttactcacctatttagatttgagccaaaaccaactatcaggccctattccggtccaagttgctcaaattcacatattaaattatctcaatgtctcatggaaccacctaaaccaaagcctgcccaaggaacttagggccatgaagggtttaacttcagcagatttctcttacaataacttctcaagctcaataccttgagggggccaattctcactctttaattccacatcctttgttggtaaccctcagctatgtggatatgactccaagccatgcaatncttcttcaacagcttgtgtggaatctcaaca

SEQ ID NO: 20556 - DNA, 441 bp, Glycine max
  unsure at all n locations
  Clone ID: LIB3106-063-Q1-K1-D5
catagctatctagctagcaagtgggacaagagatatatatacgtggtaccctagagtgccattctgtagtttatttctgctcaccaaggcttatcacatcacaatttgtgcattgcctcgtgtccttttttttctttgcttgccaaaaatcttacacacacaggtatctagcaaatgggttctcaccagcaagaaccatggctattggagaatgggaaaccgagggtgttgaccaaggagaataggcatggccgttctgcacacagcatgtcctccacgtctttgcgcangaagtctagccgaactcttgtctccaagcttccatgtgccacactcagaagcatccttttaaatttgcaagaggttattcttggtaccaagctttccattcttatccctgccattccagctgccatcattgccgagtgctatggctttgga

SEQ ID NO: 20557 - DNA, 327 bp, Glycine max
  Clone ID: LIB3106-063-Q1-K1-D6
aacaaatcaaagccatggccacctccaacttctctattgttctctccgtctccctagccttctttttggtgctacttaccaaggcacactcgaccgataccgtttctttcaccttcaacaagttcaacccagtccaaccaaacattatgctccaaaaagatgctagtatttcatcctctggggtgttacaactcaccaaagttggcagcaacggcgtgcccaccttgggatcttttgggcgggccctttacgcttgcccaattcagatttgggacagccaaacccggaaaggtacccgctgggctacattctttaaattcaacattt

SEQ ID NO: 20558 - DNA, 276 bp, Glycine max
  Clone ID: LIB3106-063-Q1-K1-D7
aaaagctggagtggctcacaagattgatttcagagaaggacctgctcttccgtttcttgacgagatgcttaaagatgaaaataaaaaggggtcgttggatttcgttttcgtggatgctgataaggacaattacttgaactaccacaagagggtactagagcttgtgaagattggaggactgatcggatacgataacaccctatgggctggatctgtggctgcaccacccgatgcaccattgatggattacattaagcctcttcgcgggcatgtgat

SEQ ID NO: 20559 - DNA, 438 bp, Glycine max
  unsure at all n locations
  Clone ID: LIB3106-063-Q1-K1-D8
gaacaagtagttgagaactaagaaggagaagcaaatggcttcctcaatgatctcttccccagctgttaccactgtcaaccgtgccggtgccggcatggttgctccattcactggcctcaagtccatggctggcttccccaccaggaagaccaacaatgacattacctccattgctagcaacggtggaagagtgcaatgcatgcaggtgtggccaccagttggcaagaagaagtttgagactctttcctacctgccagaccttgatgatgcacaattggcaaaggaagtagaataccttcttaggaagggatggattccttgcttggaattcgagttggagcacggtttcgtgtaccgtgagcacaacaagtcaccaggatactacgatggacgctactggaccatgntgaagctgnctatgtttgtttgcactgatgc

SEQ ID NO: 20560 - DNA, 244 bp, Glycine max
  Clone ID: LIB3106-063-Q1-K1-D9
aacataccctcttaactcccacaaccacgcttatccacttcaaaaccaacaccttcggctaggctcaatctatcatagaggagcgcctaccattcgatacttacacagccaaaaatgctacaatcaacacattcaacgatctctttcagcatacatctcatgccactcacatacttatacaaattaacctcttgcactcacttaagcatactgataacctttaaattaaccatattatgcttcc

SEQ ID NO: 20561 - DNA, 266 bp, Glycine max
  Clone ID: LIB3106-063-Q1-K1-E1
catgtcgtagagatctaataacactgacttgggttactcaatgatcttcttcacaggtgttacgcaccaggaaccgtgccggtgccggcatgggtgctccattcaccggactcaaatccatggctggcttaaagactaggaagaccaacgatgacattacctacattgctagcaatggatgcagagtccaatgcatgcatgagacgacaccaattgggatgaagaatctagagactcttgactacttgccagacgatctatgatgc

SEQ ID NO: 20562 - DNA, 440 bp, Glycine max
  Clone ID: LIB3106-063-Q1-K1-E10
ctctctgttctcttctgtcattgcttctcctccacacacgcacagagacacacacttttgcagtcacattgagaatggggcgtgttcgcacgaagacggtgaagaaatcctcgcggcaagtgatagagaggtactactcccgcatgacgctggacttccacacgaacaagaaggttctggaagaggtggccatcattccctccaagaggctccgcaacaagatcgcggggttctccacccatctcatgaagcggatccagaagggtcccgtgcgtggaatctccctgaagctgcaggaggaggaacgcgagcgtcgcatggacttcgtccccgatgtctccgccatcaggaccgaccagatcgaggtcgacaaggagacgctcgacatgctcgccgtcctcgggatgtccgaggttcctggcatcgttcaggtggatcct

SEQ ID NO: 20563 - DNA, 441 bp, Glycine max
  Clone ID: LIB3106-063-Q1-K1-E11
cccacgcgtccggccagccatgtcgatcttttctattccctcaccaacgtaccgttgttcaatttcaatttcaatttctcgggagccattgccatgttctttcacggctcaagtgagaagaagagggaaagggaaagtggtaatgagcatggaggcaggcattggagtgatgggcaccaagttgggtatgatgagctatttcgaatccgacggagaggttgttcctgtcactgtcgtgggtttcaaagaaggcaacatcgtcacccagatcaaaactgaggccaccgatggatacgacgccgtccaggttggttaccgaagggtcagagatcgcaaattgaccaaacccgaaatcggtcatctccagaaggtcggcgccattcccatgcgccatcttcaggagttccgtcttcaagccgtcgatggcttcgaccttaacca

SEQ ID NO: 20564 - DNA, 441 bp, Glycine max
  Clone ID: LIB3106-063-Q1-K1-E12
cggacgcgtgggttagtcccaattttctagggttttattcattttccgatggcttctgcagatgttgagtaccgttgctttgtcggtgggctcgcttgggccactgacgaccatgccctcgagagagccttctctcagtacggcgaaatcgttgaaacgaagattatcaacgatcgtgagactggcagatccaggggttttggatttgtgaccttcgcctcggagcagtccatgaaagatgcgatcggagcgatgaatggacagaacttggacggccgtaatatcactgtcaatgaagctcagtcccgcggtggcggcggcggcggcggcggaggaggaggaggatacaatcgtggtggcggtggatatggtggtcgtagtggcggtggcggtggcggtggtggataccgtaaccgtgacggtggttatggcggtggctat

SEQ ID NO: 20565 - DNA, 423 bp, Glycine max
  unsure at all n locations
  Clone ID: LIB3106-063-Q1-K1-E3
cccacgcgtccggatcgagataactagaaacagtgtgatgaaaatgaaggtccttgttttcttcgttgctacaattttggtagcatggcaatgccatgcgtacgatatgttccctctccgaatgaacactggctatggtgcccgtactccggaggtgaaatgcgcacgttggaggcttgctgtggaagcacacaacatctttggctttgagaccattcctgaagagtgcgttgaagcatcanaggaatacatccatggcgaacagtatagatcagactccaaaacagttaaccaacaagcttactnttatgccagagacctcgaagtccatcccaaggacacatttgtgttcagtatagatgggaccggtactttctaatattccatactacaaaaaacatggatatggggtggagaaattta

SEQ ID NO: 20566 - DNA, 439 bp, Glycine max
  Clone ID: LIB3106-063-Q1-K1-E4
gttggtcatagattagagagcgattggagtgaacgggaaaaggataatagagattattatcaagatggtattcagaagcttctatctctgaaacggacacatttttgtatggctgaagaccttatggctagatcattttgtaatgttgataaacattttggtatgcaccccatgccatccacttgttatgatcaaagttctatgaaaagtagtgaaaggttttctttctgtgcaaaaatcaaggataaattacaaaatcctaagaattacttttccttgctgtagatatccacatgctttgaaaaaactactcgacaagaattgccatcatcaacaactgatttcccaagaaaattcccagatctcatgaagggatttaatgaatgtgtaacccaatgtaagaagatgaatgaatcctcgagggatgaagaacatgtgc

SEQ ID NO: 20567 - DNA, 441 bp, Glycine max
  Clone ID: LIB3106-063-Q1-K1-E5
cccacgcgtccgcccacgcgtccggcacttttcagttacaaagcatttcattgttttacaatatacaacactacaatggctgcttcaacaatggctctctcttcatcatcattggctggccaagctatcaagcttgccccctccacccctcagcttggtgttggaagggttagcatgagaaaaacagcctccaagactgttacctcaggaagcccatggtacggcccagatcgtgtcaagtacttgggcccattctctggtgagcccccatcctacctcactggtgaattcccaggtgactatggttgggacactgctgggctttctgctgacccagagacctttgccaaaaaccgtgaactggaagtcatccactccagatgggccatgttgggagccttgggctgtgttttccctgaactctcgtcccgcaacggagtc

SEQ ID NO: 20568 - DNA, 435 bp, Glycine max
  Clone ID: LIB3106-063-Q1-K1-D11
caaacacatgccatggcaccagcgtcaacgtgtatgaacttcaacctgtcaacaccattcaagggtctctctttatctgcttgttcatcattcttcggtggacagtagtggttctattcgcacagctcctgtctcggtggagcacttgacgcagcactaccctctgaccatagagaacactcacaagacgggggcgggcatcaccaagaacggacgcgactcgcagggcaagcgcctctgattcaagacttacggtgaccactgtcgcaagcccggatacatcatcggtctccagcgcggaacctagtctcatgcaggaaagactgtgtcgctggtcatagactatcccatgatctccttgattgatggacttgtaaaccctgagaaatattgacctgacatgacataggtgagtgattaccctacagaagtaca

SEQ ID NO: 20569 - DNA, 423 bp, Glycine max
  Clone ID: LIB3106-063-Q1-K1-B7
cccacgcgtccgctcacctaacaatcaaccctaccattccaaagctcgaaggtgaacagtgagtgagtgagttattcagaacccaggatttggcgaaagtgaagcgatgagcagtgataggaatattggggttgccttggacttttccaaaggaagcaaaatcgctctcaaatgggctattgacaatcttctccgcaacggtgacatactctacatcgtccacatcaagccttccggaggaagtgaattccgaaatcttctctggtccaccactggttcacctctgattccgttgtcggagtttcgtgagaaggacgtgatgcatcactatgaggtggatactgatgctgaggtcgttgacttgcttgacaccgcttctagggagaaacaggtgactgttgtggcaaagctatactgggggga

SEQ ID NO: 20570 - DNA, 299 bp, Glycine max
  Clone ID: LIB3106-063-Q1-K1-B9
gagagtcgaggttgtggacaacgagtactttatcacacctgacaacgctggcatgctcaagctggcaaaggaagcatacacaatcctgcttgattaccgaatcccaacatcggggtacgagacgtgcggatccggtgtggagagtccactgcaaatgaatggactcccaataagcgtgtacgcgcccgaaaccgttgggtgcgtcgtggttgaccgggagggccggtgcgcggcagcaacatccacgggagggctgatgaacaaaatgaccggtcgcatcggtgattcgccgctgatag

SEQ ID NO: 20571 - DNA, 437 bp, Glycine max
  unsure at all n locations
  Clone ID: LIB3106-063-Q1-K1-C1
gaaaaacaagtagttgagaactaagaagaaggaaatggcttcctcaatgatctcctccccagctgttaccaccgtcaaccgtgccggtgccggcatggttgctccattcaccggcctcaaatccatggctggcttccccacgaggaagaccaacaatgacattacctccattgctagcaacggtggaagagtacaatgcatgcaggtgtggccaccaattggcaagaagaagttcgagactctttcctacttgccagacctcgatgatgcccaattggcaaaggaagtcgaataccttctaaggaaaggatggattccttgcttggaattcgagttggagcacggtttcgtgtaccgtgagcacaacaggtcacctggatactatgatggacgctactggaccatgtggaagcntgctatggttggctgcactgatg

SEQ ID NO: 20572 - DNA, 437 bp, Glycine max
  Clone ID: LIB3106-063-Q1-K1-C10
cagaaattttttgatactatttgctatacccctctctttatagtactttgtagtaaagtaggaaaataaattgaatatatatctattgaatttattcttcttattatttttcgcattcggattgaagaatttaatcagatagttatatgagtgcaataaaacagcttcttttgaatataatttatagaatactatattacttatagttaatagaaaagatgatgattttaaattgcagtaaaaatattgagtctcattttctatgtataagaattacgtgaaaaaaatgaattaaattatacgtagaagttgttgcttttcccaaggttggttgattagtcatcctgtcttgaagcggtcgtaaaagaccaaccctttttaaattaaattttcaatatcatttgtatgaattagcatatatatattaacataaataa

SEQ ID NO: 20573 - DNA, 262 bp, Glycine max
  Clone ID: LIB3106-063-Q1-K1-C11
atttcattgtcatttgcttgtttagaaaaaagttggattgaagctggagtgtactggggattgttagtacatccctggaatcctaataaaatgaataatatttaatattaaaaaaaaaaaaaaaaaaaaaaaaaaaaaaaaaaaaaaaaaaaaaaaaaaaaaaaaaaaaaaaaaaaaaaaaaaaaaaaaaaaataatataaatgttaaaaaacaaaagaaaaaaaacaatataatgactataactaaattacatttaaatgg

SEQ ID NO: 20574 - DNA, 436 bp, Glycine max
  Clone ID: LIB3106-063-Q1-K1-C12
ggttaccctggcaaggttatcagggtgatcataaatccttccttgtttgcaaaaagaagatgggaacatctcctgagatgctatgctgcttttgccctgctccttttaggcagttccttgagattgtagtgaacatgaagtttgatgaagaacctaactattccaggctaatatctttgcttgatggtatgcttggaccgaatcctgcattgaggccaattaacactgaaggtgctcaaaaggtcgggcagaagaggggtagattgaatattgaggaagaggatgattcacagcccaaaaagaaggttcgcttgggggttcctgctacacaatggatttcagtttacaatgcaagactgccaatgaagcaaaggtaccattacaatgtagcggacgcaagattagcacaacatgtggagagagggattgctgatgg

SEQ ID NO: 20575 - DNA, 365 bp, Glycine max
  Clone ID: LIB3106-063-Q1-K1-C2
aaagaaaagaccatcaaagtttcacttcagccttatccggtttagggtttcggtttttgacccaacctttgacgtatcgaaaccttaagtttcggatcaggtctgagcaatctggttggtagaacctttggtcttagagagtcaagttttatgtctgaattagacgatcaaattcctactgccttcgatccttttgctgatgcaaatgctgatgactcgggtgctgggtcaaaggagtatgtgcatattcgcgtacagcagcgaaatggaaggaaaagcctgacaaccgttcagggattgaaaaaagaattcagctataacaagatacttaaagatgttaagaaagagttctgttgcaatggaac

SEQ ID NO: 20576 - DNA, 171 bp, Glycine max
  Clone ID: LIB3106-063-Q1-K1-C4
aacacgcgttcgatttaggagtgagtgtatagcttatacggggaagggtggtaggattacgagacgcactttgacgtatggctacagtgagacagaagactgggtgcgggaaatctgactggtagtacgtgtggaactagagggtcatgctgtatgactgaattatacgag

SEQ ID NO: 20577 - DNA, 438 bp, Glycine max
  Clone ID: LIB3106-063-Q1-K1-C5
cccacgcgtccgtttccacttgtctccgaattagttatcttgagaaacattattcccattgctatatattatggctagcatgaaggttacatgggtggttgtgatcatgtgcatggccgtggtgggtgcaccgatgatggcgcaagccatgacatgcaatgatgtgacggtgaacatggcacagtgcctatcctacctgatgcagggaggaacaccttcaacactttgctgcagcggagtcaagaacattcttggctctgctgtcaccaccgttgacaaacaaactgtgtgcaactgtctcaaggcggatgctgctaggtacaacatcaatgaccagtatgctcaggcactcactggtttctgcaaggtcaatgtcccttacaagatcagccgctccactaactgtgcaagcatcaggttctgaacaagccatggaca

SEQ ID NO: 20578 - DNA, 406 bp, Glycine max
  Clone ID: LIB3106-063-Q1-K1-C6
ggagtcgaaggacttggaagagaaggccgagatgaagaagatgtatggcctcatcgagacctacaagttgaacggccaattcagatggatatcctctcagatgaaccgtgtgaggaacggagagctctaccgtgtcatctgtgacacaaggggtgcctttgtgcagcctgcagtttatgaggcctttgggttgactgtggttgaggccatgacttgtgggttgccaacgtttgccacatgcaatggtggtcctgctgagatcattgtgcatggaaaatctggttaccacattgatccttaccatggtgaccatgctgctgagatccttgttgagttctttgagaagagcagggctgatccatctcactgggacaaaatctcccagggtgactcaagcgtattcatg

SEQ ID NO: 20579 - DNA, 445 bp, Glycine max
  unsure at all n locations
  Clone ID: LIB3106-063-Q1-K1-C7
ttccctttgaccattcaaccttcctcgcctttgcctccgtttccgtgactgagatggctggaggtgttattcagcagatattgaggaggaaactccaccctcggtttactaactctcccttgttgtcacccatcgtagcaaaaaaagatgatgctggctctactggcagtcagtccttaagagcacttgcattaattggagctggtttgtcaggtcttttcagtttttcaacaatggcagcagctgatgaagctgaacatggcctggcatgtccaagctatccatggcctcacaagggaattcttagttcatatgatcacgcttcgattcgtcgtggtcatcaagtttatacagaagtctgtgcttcctgccattctatgtctntgatatcgtatcgtgatttggttggtgttgcttatacagaagaagaggtaaaggctatggc

SEQ ID NO: 20580 - DNA, 423 bp, Glycine max
  Clone ID: LIB3106-063-Q1-K1-C8
ccgtaaccatgtctcagactgttgtcctcaaagttggtatgtcatgtgaaggatgtgttggagcagtgaagagagttttaggaaaattggatggtgtggaatcatatgacattgatttgaaggaacagaaggtggtagtgaagggaaatgtccagccagacacagttcttgcgaccgtttccaaaactgggaagaagactaccttctgggaaggtgaagcagcagcatccgaaactagcacagcaactgcctagaacatttcgctctattctgttcagaagaagtagctgcgtaaatcaaatactattttatggacttgaaataacgatgggacttgttatctggtgtattttagtgtgtcacaacaaagattgctgtatatgactgcttttaacatctgtgctacttgattaatgtgctttt

SEQ ID NO: 20581 - DNA, 436 bp, Glycine max
  unsure at all n locations
  Clone ID: LIB3106-063-Q1-K1-C9
cacagacacaaataataagagattatgattatgttgtcatatgtttcatattccaattgcctcggtggcaatcaatgaacaacgccaattctgaaacttcttctccttcttcttcttcttttgcttctcttgtgtacttctacttcttctgaacatggaactgttgtctctgagactcaccccttcaccttcgagttcgacttcatcgcttcctgcagcacttgctcactgctccaagctatgtgaatttcagccgaggaagaagaagaaggcgtgcttcgacgcgcctaggcttgcggtgcggtgtgtgaaggcctcggcggagcgaaccggtgatacgatcgatgatggngaggctcgtagcgggttcaccacacctgccatggaagtcaccacattcaatcgaagcacttttagcgatgctgctgactttccc

SEQ ID NO: 20582 - DNA, 198 bp, Glycine max
  Clone ID: LIB3106-063-Q1-K1-D1
caatgtcgaagcgaggtcgcggaggatcggcagggaacaagttccgcatgtcactgggtctgccggtggcggcgacggtgaacttgggccaccaccaccgggccgaaaaatctttccatcttatcagggaaggggatcaagggaaggctgaaccggttgccgtaagctggcttggttgccatggttttggccaccgtc

SEQ ID NO: 20583 - DNA, 439 bp, Glycine max
  Clone ID: LIB3106-063-Q1-K1-D10
cggacgcgtgggtttcgggattggtttctatggcttctgaagtaatagagtaccgatgctttgtcggtgggcttgcttgggccaccgacagcgatgctctcgagaaagccttctctcattatggtgagatcgtcgaatcgaaggttatcatcgatcgtgaaactggaagatcgagagggtttggatttgtgaccttcgcctcggagcaggcgatgaaagacgcaatcgaaggaatgaacggtcagaacctcgacggtcgtagtatcacagtgaacgaagcacaatcccgtggaagaggccgtggtggcggtggatacggaggtggtggtggttatggcggcggcggttacagccgcggtggatgaggatatggaagaggaggccgtcgtgaaggtggtggacgtggctataaccgcaacggtggacgtggtggatatgg

SEQ ID NO: 20584 - DNA, 423 bp, Glycine max
  unsure at all n locations
  Clone ID: LIB3106-063-Q1-K1-B6
cccacgcgtccggttatggaaactatggacatagtttaaggagtccaagcttcaagagtgtgagtggatcacactttggggggttagaacaacaatcaaattactcttcttgctgcactgagagtattggtgggggtcaggtttctccttcttcaacaggtgaccttaggaggtggttgagatgatttgttgcacactttaatgagaagaaacatgaccggacccattaggccatggccataattcacttcatatttgatttttatttgggctttttgtgatgttagagttaattttagtttaaccctttctcaccctcccaaaagaaagtatntaattacccccgggcgacctgaatctgatgttaagaaccagagaagcaagcaagtactttttctgctaggaaactcagaacaatttaat

SEQ ID NO: 20585 - DNA, 347 bp, Glycine max
  unsure at all n locations
  Clone ID: LIB3106-063-Q1-K1-A2
cgcaaggagatctgcaaatacctcttccaagagggagtttgctttgcgaagaaggacttcaatttggcgaagcaccctgagattgacgtgccgaatctgcaggtgattaagctgatgcagagtttcaagtctcgcgagtatgtgagggagacttttgcttggatgcactattactggttcctcaccaacgatggaatcgagtttctcagaacttaccttaaccttccttccgaaattgtccctgctactttgaagaaacaggccaagccacctggcaggccctttggcgggccatccggtgatcgccctangggtccaccacgctttgaaggggagcgtaggtttgg

SEQ ID NO: 20586 - DNA, 391 bp, Glycine max
  Clone ID: LIB3106-063-Q1-K1-A3
caagtagttgagaactaagaagaaggaaatggcttcctcaatgatctcctccccagctgttaccaccgtcaaccgtgccggtgccggcatggttgctccattcaccggcctcaaatccatggctggcttccccacgaggaagaccaacaatgacattacctccattgctagcaatggtggaagagtacaatgcatgcacgtgtggccaccaattggcaagaagaagttcgagactctttcctacttgccagacctcgatgatgcccaattggcaaaggaagtcgaataccttctaaggaaaggatggattccttgcttgaaatcgaagtggagcacggtttcgtgtaccgtgagcacaacaggtcccctggatactatgaatgacgctact

SEQ ID NO: 20587 - DNA, 338 bp, Glycine max
  Clone ID: LIB3106-063-Q1-K1-A4
attcattcaagattcagcaagtgcgttttggaagcagagaccgaaatacttcgagatggcccgtacaaagcaaactgctcgtaagtcaactggaggaaaagctcccaggaagcagcttgcaaccaaggctgcacgtaagtctgcaccaacaactggtggtgtgaagaagcctcatcgttatcgacctggaactgttgctcttcgtgagattaggaaataccagaagagcactgagctcctaatcaggaagcttcctttccagaggttggttcgtgaaattgcccaagatttcaagactgatctgcgttttcagagccatgctgtgcttgcattgcaag

SEQ ID NO: 20588 - DNA, 352 bp, Glycine max
  Clone ID: LIB3106-063-Q1-K1-A5
gcaattgtttacattttccgtcaaccaaaatgctacaaacgaaaccagagattcgtaattgcacattctcttttgttgtctccagctcatagaatattataaactcagattcattcagaatttcagattcacctttttcttttcttctctaccttctttttcctctgacagctttttgcagaaagttgtgatttttccttgaaagatggcatctttgagcatgatccagatcagaactgggaattgtgcatctgggtttggtttgaattgtgctgggaaggttaaggttggtcccagcagagttgggtttaaggtgtttgcttcagagactcaggctacagagcctgatctt

SEQ ID NO: 20589 - DNA, 382 bp, Glycine max
  Clone ID: LIB3106-063-Q1-K1-A6
caaattctctgtgttgtgttgtgtacttgtgttaattgtgttgttgttgtaggaaatttaagtgaagagagaatgatgatgaagtctgctatgtgtgcattggtgcttgtggcactggttgtggttgaagtggggcccatggctgaggctgcggtgacttgcaacccaacacagttgactccttgtcttacggcaattaattcaggttctgcaccttcgagtgcttgttgccagaagctgaaggagcaaaagccatgcttctgtggctacctcaaaaaccctagcttgaagcagtatgttaactctcctaatgccaaaaaaacccgttagttcttgtggtattgcctattcaacttggtaagcacctcttatatatatatat

SEQ ID NO: 20590 - DNA, 254 bp, Glycine max
  Clone ID: LIB3106-063-Q1-K1-A7
cccacgcgttcgcctaccatcaaaacaaaaagctacaaactaaaccaaaaaatgaaaaggaacacattctatgaaagatgaaaacagataataaaatattataagctacaaattcattgggagtttgatatacacgttccatctttcttaccttgcctcgacatgctatgactcttttttgccgaaacttaagtccattgcattggccgattgcttcacaagatcatggattgagatcacctttgggaatcgca

SEQ ID NO: 20591 - DNA, 430 bp, Glycine max
  unsure at all n locations
  Clone ID: LIB3106-063-Q1-K1-A8
atcgatctcccgcgcaactcttgtgcaaaagcgggtctcatctcccgttcttggtttgccagcaatgggtaaggtgggaagagtgagttgctccatggaggaaaaaccttattctgtgaaggaaagcagctctagcatgttggggatgggggcatctctgatggcagctgccagcgctgcagccatgtcaggcccagccatggccttggtagatgagagactgagcactgaaggaaccggacttccctttggcctcagcaacaatcttcttggttggatccttttcggcgtctttggtcttatctggactctctattttgtctacactttcactcttgaagaggatgaagagtcaggactgtccctttaaatatcctgngttgtagggtgggtgatgatgaatgatggattgatacattgcaatgagtcc

SEQ ID NO: 20592 - DNA, 447 bp, Glycine max
  unsure at all n locations
  Clone ID: LIB3106-063-Q1-K1-A9
gcgagaaaatctatctatgattatcagagcgtagttgaaagcaacgactgaaatcgagagggagacgaaaagttttgatcgagagagatgggaaaggagagtagcaaagatacggttccgttgacgcagtggctgaatcgaatggtctcagaaccttactacctcttccatttcttaaccttcttctcctatttcgtcgttcgcagctccgcaacccaaaacttagcgcctcatctcactcaccatctccttcgtcgcgaaatacaaacactgctagtgttcgcgatattggctttcatcaagggaataaaagaagaaacatgggaagcctttatagctgatgtgcttttcctggccaagatttgtctttttctcctagcctttacaatggatcgccgcttaaccgttttgtatatttctgatttttagtgatacatatngtaacac

SEQ ID NO: 20593 - DNA, 250 bp, Glycine max
  Clone ID: LIB3106-063-Q1-K1-B1
aacatgggtgaagcagttgtgctctctagggaaatggagaagtcgcttgtgaagcctgacctcttctgcatgaatgctgcgatcaaaggtttcgtgaacgagggtcattactatgacgctacgatgcggatcgcagagattgcaaagttcgactatgaccctgataggaatacttactatatcattgatccattcctctgagagactggtgatatcatgactgccattgctatgtacgacgatattgtca

SEQ ID NO: 20594 - DNA, 430 bp, Glycine max
  unsure at all n locations
  Clone ID: LIB3106-063-Q1-K1-B10
ctttgtcctcaaaccttatcccttatcctcccaaaaccaaaccatgtctacctccggagcttgtctcgcactcccaaccctcactctccgaactcgacaacctctctgttctccccaatgcttctcctcgtgcctcttcctcacccctaacttcaaacccatttccattttcggcggtttcctcaaaacaacgctgtcgtcgtcgtcgccgttgtcgctgtcgtctcgcttcggtccccatgtctctgtgttggagcacgaggaggacaccttcggcgacagagacaggcccagcttttcccgcgaccttaagctctntgtcgggaatctcccctttagtgtcgacagtgcgcgggtcgcggagctcttcgagagtgcggngaatgtggacgtgggtgacgctgattatgataggactactgggaggagc

SEQ ID NO: 20595 - DNA, 393 bp, Glycine max
  Clone ID: LIB3106-063-Q1-K1-B11
cccacgcgtccggagaaggatgtgccctgggtaccctcttggccttaaggtcattcaggcaagtttggccaattcgttgcatggatttaactggagattgcctgataatgtgaggaatgatgattcgaatatggatgagatttctgggctctctacacctaagagactaccactggaaactgtcgaggagcctaggctttcataccatctttattctctctgagcagtgcctttgcacaaagcgattctctctaataacattgacgcatggataatgggtcttgagtgagattatgattgtcacactggatcgcaatatattgttctatctattcataacaatggtacacagagatactgggcttcttggtcatggcattgatgtcagtcatt

SEQ ID NO: 20596 - DNA, 439 bp, Glycine max
  Clone ID: LIB3106-063-Q1-K1-B12
tctcaattctcatcactaacacacaagtgtgcgttgtagatttctcagtttgcaacatatggcttccatcatcatgtcatttgctccagcaactggtagagtctttgcagccacagcagcaaagggtgctggtggaagcaaagagaagggtcttcttgattggataattggaggattgcagaaggaagaccagctggtagagactgatcctatcctcaagaaggtggaggagaagaatggaggcaccaccaccaccaccactggccgcaacaagaactctgtggcagtgccacaaaagaagaaaggtggctttggaggcctctttgccaagaactgaagcagcagtgatgatttgttatttaccttacaattgtttttacctgttttcttctgaaatgcttgcactgttgtcttgtccacttagattccaaccacctga

SEQ ID NO: 20597 - DNA, 371 bp, Glycine max
  Clone ID: LIB3106-063-Q1-K1-B2
caaagagccattgaactttgactataatattcagagttcagattactcactctaatcttctaagttttcattttggggtttaagtttctgaaggaaaaaaaaaatgataaagtttgttctatttttgttctgctttgcctctgcactgaccctttcagtatcggagtccaaatcagcttcagtgcaacctcatgctgctgaatctttctctgttggatatattcagatgaagactgcagcgaactgttcttacctggtagttatatctacgagttgttcatcgcctaagttcacaacggataagatcggtatcacgtcttgggatgctaatggcaaccaggtatatgaaccaagactggatgatccaattt

SEQ ID NO: 20598 - DNA, 440 bp, Glycine max
  unsure at all n locations
  Clone ID: LIB3106-063-Q1-K1-B3
cccacgcgtccgcccacgcgtccgcccacgcgtccggaaaatgttgttcgggattctagtgggaaaaagatccaatcccagctggtgccgatacttgatgattttcttggtttaagaaactaccacactgtggcatacttgggagtgtctccaactgtaaaacccaaatactggcttgctttttcagcagctgttcctccactcggttttagcacttactatgtatcctatgccaaaaaagaagctactatttcagatagagatacagcttaccaatcatggaataagagtgatacaattacagtgggcctaaaaaacttgaaactagnttattctgtgaaggaagggaaacttactaaatatatcaacagcagaagcaatgtcaaaggacctctagagcangcatataaattttacactgggtatggaaatgatggaac

SEQ ID NO: 20599 - DNA, 443 bp, Glycine max
  Clone ID: LIB3106-063-Q1-K1-B4
ccggcaatgtgatttcacagatgaaaaaaccaacctgaaggggaagtccctgtctgctgcactcatgtcagatgccaagtttgatggagctgatatgacagaagttgtaatgtcaaaggcttatgctgttggtgccagcttcaagggatattttacaggggtggacttctcaaatgcagtcttggaccgtgtgaactttgagaaagctgatcttgaaggagctgtatttaagaacacggtattgtcgggctccacctttgatgatgctaagctggacaatgccgttttcgaggacactatcattggttacattgatcttcagaaactatgcacaaataagaccatccgtgatgaatggagagttgaactaggattgtcatgaaaagcaaagtattcattggcttctaatacttggatgctgctatgctatgacacgacacaaa

SEQ ID NO: 20600 - DNA, 448 bp, Glycine max
  unsure at all n locations
  Clone ID: LIB3106-063-Q1-K1-B5
cccacgcgtccgcccacgcgtccgcccacgcgtccggatcacccaagagagaacctaagacacacaacacaacacaaacacacagagttagaggagaaatcatcatggcatcagcagcatctgggtttgtgttgtcacttaatgttgcagctgccaccacaaactcaagggtggtcatgttcaacacaaagaacaacgcttctaggcttgttgtaagggcttcagatgagcctgcagcggcggcacccgccaccgccacacccccagctgaagctgaagctaaaccaaagccaccacctattggccccaagagaggtgctaaggtgaagattcttaggaaggaatcttactggtacaaaggcactgggtcagtggttggctgtgatcaggaccccaacactcgctacccttgtgtggntcgattcaacaaagtcaactatgccaatgg

SEQ ID NO: 20601 - DNA, 393 bp, Glycine max
  Clone ID: LIB3106-063-Q1-K1-A12
tcggtggaaagaaaaaacatcagtgatcttgagttactaacaatccatccgtgtaaaacgtgattggatttgggtcagtaatttaatgtacgaattacgaggtggcagcgactttaagtgttgaatggtgtgcaacatagaatcgcattggcgcgaacacgatgatgaggtcaaagatagtgttgcttggagactccatcacggagcaatcgatccgagagaatggatggggtgttcctcttgccaatgcctattctcgcatggctgatgtacttgttcgtggttatggtggatacaacactatgtgggctatgttcttactgggccatctcttccctctggactcaactaaaccacctactgctaccacaattttctttggcgctaatgatg

SEQ ID NO: 20602 - DNA, 253 bp, Glycine max
  Clone ID: LIB3106-062-Q1-K1-G12
ctagctgttgcaaatttctactattttttaatggcttctgcagatgttgagttctgttgctttgttggtggtcttgctttggtcacctgcaacgatgccttggagaaagccttttcaatctacggcgacatcgttgaatcgaaggttatcaacgaccgtgagactggaaggtccagaggattcggatttgtgaccttcgcctcagagcagtcaatgaaagatgcgatcgcaggaatgaacggtcttgaccttg

SEQ ID NO: 20603 - DNA, 387 bp, Glycine max
  Clone ID: LIB3106-062-Q1-K1-G2
cccacgcgtccgtttttgtttattttgttattcagtttttgtaagtgaaccttatctgtcaagcttatagttctagctcttgttccctcaagagtcttggtttttagaagggaaacagcatgtgctctttctcttcaaaacagaccctttatttggcacttcctcgtccatggacatctaagagacaccaccacagtcacaggcaccttcggttgggcatgctcaacagaaggagggcacacttgaaagaagcaagacaaaggaaaaggattgttgtgaaatcagagattcagatgaagaacttgaagttgtacatggagaaccaaaccatcatagaggagaatgagaagttgaggaaacaagccatgcttctgcacaaagagaatc

SEQ ID NO: 20604 - DNA, 316 bp, Glycine max
  Clone ID: LIB3106-062-Q1-K1-G3
cccacgcgtccgcccacgcgtccgggaggcgcagagtagagcagcagagaagagagaaaacggcactgcagccgtagaaggaaaaccgaccatggtgcacgtctccttttacaggaactatggtaagacgtttaagaagccccgccgtccgtacgagaaggagcgtctagacgcggagctgaagctggtgggggagtacgggctgcggtgcaagagggagctgtggagggtgcagtacgcgctcagccgcatccgcaacaacgcgcggaatctccttaccctcgacgagaagaacccgcgccggatcttcgagggc

SEQ ID NO: 20605 - DNA, 305 bp, Glycine max
  Clone ID: LIB3106-062-Q1-K1-G4
ggcattcttaagctccttagtgctgctccttgcagctctaattctataccctcaagtggtcgcaaactatgacaatcccccagtgtacaagactgccactgagaaaccaccaggttataagcgccccacttgagaagcctcctgtctacacacctacagttgacaacctcacaatttatatgcctctcagtagagaagccaccagtgtacaagcccacagttgtgaaacccgcagtttataagctcacacttgtgaaaccacccgcgtacaagctcccagctgataaaccaccagtgtacaaccc

SEQ ID NO: 20606 - DNA, 255 bp, Glycine max
  Clone ID: LIB3106-062-Q1-K1-G7
gccatgccttcattccttcaattcgttttgccgtcaaaagcttcaaaggttgttaatcaggttgcaaaggttccaacggtctccaactgcttaaacctttgggaggcctctggcttttccactgtgcccggttaaggtatggtacatacaaaagggctctaccttgagaggcctactatttcaccacacgaggcagacgcgccccttcttatggagagttacaaagtttacactgatgaattcgtggccctatac

SEQ ID NO: 20607 - DNA, 443 bp, Glycine max
  unsure at all n locations
  Clone ID: LIB3106-062-Q1-K1-G8
cccacgcgtccgatttcatcaagcctgccatggcttcctcgtgtgcttcctctgccattgcagctgttgccatctccacaccaagttcccagaagaatggatcactcttgggaagcacaaaagcttcttttcttagtgggaggaaactgaaggtgaacagttttacagcaccagttggagcacgatccagcactacagtgtgtgcagttgctgagcctgataggcctctgtggttcccaggcagcacccctcctccgtggctagatggcagtttgccaggagattttggctttgatcccctaggtcttggatctgatcctgagagcctgagatggaatgtccaagcagagcttgtgcactgcagatgggccatgttgggagctgctggcattntcatcccagaattcctcacanagattggtatcctgaacaccccttcatgg

SEQ ID NO: 20608 - DNA, 306 bp, Glycine max
  Clone ID: LIB3106-062-Q1-K1-G9
tcgcgaaaaagaagaataaaaaaagcatagaaaatcctgtttcccgataaaaactgcgagcgtacatggtctggtcacgcggatcgggttgattgagatgcacaccgcgagcaggagcaacagtggcggcggcggcgtgctggcgtcgcggacgagttcgcggtcggtgacggagacggtgaacgggtcgcacaagttcgtgataaagggatactcgctggcgaaggggatcggagtcggaaaacacatcgcgagcgagacgtttacggtaggaggtggccagtggacgatatacttttaccctga

SEQ ID NO: 20609 - DNA, 266 bp, Glycine max
  Clone ID: LIB3106-062-Q1-K1-H1
atctgtactagctataccgttccttctgccacaaattaactggaaaggatggtgctgcccaagttctctccgttctcacggcttctcctttcttcccttgtgattctcttaataagctatccagttaaatgtgacgatgatgaggaagacaatctttatcagggtatcaacaagtatcgagcatcgttaaacttgaaagctctaacaaggaatgacaatgcagattgccttgctgaaaaaatagctgaccaattcaagaaacaacc

SEQ ID NO: 20610 - DNA, 286 bp, Glycine max
  Clone ID: LIB3106-062-Q1-K1-H10
attctcaaccccgaaccctaggatctgagcggaggtgacaaccaccttcgcgaccgtcgcaggactcggtgacgcattactgtcatccacctcatctcgtgtgacctcagggtttgtgaaatccccagtgattgctaggaatcccttgaggcaagctgtggcaatgggaaatgggaggattacatgctttgagaggaattggctgcgggcagattacagtgtgattgggtttgggttgattggttggctagcacccgagagcatacctgctatcaacgtgaaaagt

SEQ ID NO: 20611 - DNA, 398 bp, Glycine max
  Clone ID: LIB3106-062-Q1-K1-H11
acgcaacttttgataatacatattacaggttgatccttcaacagaaaggcttgttgtcttctgatcaagttttgcttgacaacccagacactaaaaatctggttacaaaagttgccacctcaaaaaaggctttttatgaggcttttgcgaagtccatgatcagaatgagtagcatcaatggtggacaggaggttagaaaggactgcagaatgatcaattaataagtcttaaatcaattcaagttaaattgatgttccaaacaagttggatcaaattttctagatgccaagaatattatgtctttttcctctattagataaatatgtatatttatctgaaggtaataaaatctcaagcaatgtttgggaaattaatttagatgtcagtgacaaaatata

SEQ ID NO: 20612 - DNA, 442 bp, Glycine max
  Clone ID: LIB3106-062-Q1-K1-H2
tcggtgacaacaaaaccccactctaccagtccccctatcttaagaaaactaagcataatcgattttcccaacatcgcatattgcacgacacgagcgttgagacagtaaccacgatgtccaaactatagacaagatgaaaacgttggaaatgagtctattagcaggtgcttacgttcaaccccgcttcccttgtaactacaacccaacgctttccgcatcttgcagaacccaaaagacagcaacttcactaaccgtaacaactcccaagaaaacagaaaaggcgttattcactgagtcattcgatcaaacacgtgacgcgcaacctctccccgaaaagaagaagagggtgttcttcttagacgttaacccgctctgttacgaaggaagcaaacccagcttgcactctctcgggcgtggctctctctgggtctcgagcaagtca

SEQ ID NO: 20613 - DNA, 394 bp, Glycine max
  Clone ID: LIB3106-062-Q1-K1-H3
ctctgagtaccaaaagcttttgcagaggctatatgatttgggagcacgcagagttcttgtgacaggcacaggacccttgggttgtgttccatcagaattggcccaacgtggtagaaatggacaatgtgctcctgaactacaacaagctgcagcactcttcaacccacaactcgaacaaatgttacttcaactcaaccgcaaaattgcaactgacgttttcattgctgcaaacactggaaaagctcacaacgacttcgttactaacccccaacaattcggatttgttacatcacaggtagcttgttgtggacaaggaccttacaatggtattgggctatgcacagcactcttcaacctttgctccaacagagagcagtatgcattttgggatgca

SEQ ID NO: 20614 - DNA, 78 bp, Glycine max
  Clone ID: LIB3106-062-Q1-K1-H4
gtgtcagcaccaccagattctgccagagctatttgattaggaagcacgcacagaactcgtgacaggaacatgaccctt

SEQ ID NO: 20615 - DNA, 218 bp, Glycine max
  Clone ID: LIB3106-062-Q1-K1-H5
gtaagactttgtcattgaggtgctgcattggcttcaagtcaggaagaggtgagtctctcgggagtaattggaagcccatttgcttgcagggtgaagattgcccttaagttgaagggagttgaatacaaatatgtggaagaaaatctggccaacaagagtgacttgcttctcaaattcaacccagttcacaagagagttccagtgtttattcacaatga

SEQ ID NO: 20616 - DNA, 398 bp, Glycine max
  unsure at all n locations
  Clone ID: LIB3106-062-Q1-K1-H7
cccacgcgtccgcttcctcaccgattgctagaatggaatttcgatgctcaggcgatctggtttaccattctcttctctcttgctcttgcaggagagagccatgtccatgcatcgctacctgaggaagattattgggaagctgtttggccaaacactcccattcccactgcactgcgagagcttctaaagcctctccctgcaggtgttgaaatcgatgaactccctaagcaaattgatgatacacagtacccaaaaacattcttctataaagaagaccttcatccaggcaaaacaatgaaagtacaattcaccaagcgtncctatgcacaaccttatggtgtatatacatgggtaacggatattaaagacacctctaaagaaggatatacgtttgaaga

SEQ ID NO: 20617 - DNA, 445 bp, Glycine max
  Clone ID: LIB3106-062-Q1-K1-H8
atggccaccgtcacttctgcagccgttgctattccctcattcactggcctcaaggcaagcgcaggcaaagtgagtgccgcagttaaagtctcagctccccaagccacaaggttgggcatcaaggcttcgctgaaagacgttggagtcgctgttgtggccactgccgcgagtgcagtgctggctagcaacgccatggccattgaagtgttgctgggtggtgatgacgggtctctggctttcgttcccaacaatttctccgtggcctctggggagaagatcgtgttcaagaacaacgcaggtttcccccacaacgttgtgttcgacgaggacgagattcctagcggcgtggatgcagggaaaatctccatgagcgatgaagaccttctcaatgcgcctggtgagacttacagcgttactttggatgctaaggggacctacagtttct

SEQ ID NO: 20618 - DNA, 395 bp, Glycine max
  Clone ID: LIB3106-062-Q1-K1-G11
tcggctccgcaaagctagaaagggaagcaccagcaggtgagaagccagaaccagtgcgcacccatctccgcaacatgattattgtgcctgagatgattggtagcatgattggagtctacaacggcaagactttcaatcaggttgaaatcaaacccgagatgattggccattatctcgctgagttctctatttcatataaacccgtcaagcatggtaggcctggtattggtgccactcactcttccaggttcattcctctcaagtgaaagccttaccgagactcttgtcagattttgtttttatttaagcattttattattgacttgtctgtcggtcatgacttgattccatgggatcagcattttatagaggttttggattgtgcaacttcgata

SEQ ID NO: 20619 - DNA, 212 bp, Glycine max
  Clone ID: LIB3106-063-Q1-K1-A1
aaaaaaaataaataaataaaaaataatttaagaaaaaaataaaaaataaaaaaaaaaacaggacaattgaaaaaaaacaagtggcgatcaatatggcggatctaattttgctttcgctttctcgtaacttcatatctagggggtaccgttttctgggttcaaccttttgtgcgtcgtttttgcttcctattcctttttttaaccctggcctt

SEQ ID NO: 20620 - DNA, 427 bp, Glycine max
  Clone ID: LIB3106-063-Q1-K1-A10
cccacgcgtccgaccatggaaaaatctaagcgactctttatgaaatccaagcgatcttttcgtaggcgtttgcccccgatccaatcgggggaccgaattgattataaaaacatgggtttaattagtcgatttattagtgaacaaggaaaaatattatccagacgcgtaaatagattgaccttaaaacaacaacgattaataacaattgctataaaacaagctcgtattttatctttgttaccttttcttaataatgaaaaacaatttgaaaaaagcgagtcaaccgctagaactactactttaagaaaaaaaaaaatatagaaattaagaattctaaatccaattttgaattgagatttgaatgaaatattgattgatgttttgtttgaaaattacgacaattcaatttgggtttttatgttgtaag

SEQ ID NO: 20621 - DNA, 383 bp, Glycine max
  Clone ID: LIB3106-063-Q1-K1-A11
ttctttacattcatttttcttctggtgattccacaatgtgtcctaactctcaatcggcttcctcttaattatactctattcatctttttcctcataacctcaaacacaaaacccaatcattgcaattcccaatctcacagaaacaccagaattaataaaacacataacaaaaaaaaaagcgaaaaatggcgagctcagtggacaaggacgtggtgcgagcgatgaaactttctctttggagcttcctgctccacctgcttggaagaagaagttcatcccatagaaagctggtaccccatagataaacgagattgagttcacttcaccaacaggagaggaaatcaatagcaggaaacacctggaaaaatatttgaaagcacacc

SEQ ID NO: 20622 - DNA, 398 bp, Glycine max
  Clone ID: LIB3106-062-Q1-K1-E3
cagaaatcagttgaagagcatgggtcgtggagttagcagtggtggtggtcaaagttcattgggttatctttttggcagtggagaggcccctgccccaaaaccagcaacaaataatgccccatcccaacctgaagtgcaggctgtaaataatgtgcctcctccaaaagcatctcctcctactaaaacaatagaccctaacaaggctgctggtatcaacagtcattctactgatggccagaacaccggcaacttcatcacggaccgaccctcaaccaaggtccatgctgcccctggtggtggttcttccctaggttatctctttggtgaacctggggaggggaaatgataccttgtttgcaaagcttttgctcgatgatgaatgatttattttgaaattc

SEQ ID NO: 20623 - DNA, 371 bp, Glycine max
  Clone ID: LIB3106-062-Q1-K1-E4
cccacgcgtccgcttaatgttgttaagaaggcagagaatcttatgctggagagaggggataacaaagagtatctcccaattgagggtttggcagcatttaataaggcaactgcagagttgttactcggagcagacaacccagcaatcaaacagcaaagagttgccactgtccaaggtctttctggaactggttctctgcgactaggtgcagctctgatagagcgatattttcctggggcaaaagttttgatatcagctcctacctggggtaatcacaagaatattttcaatgatgctagtgtcccatggtctgagtaccgatattatgatcccaagacagttgggttggattttgagggcatgattgaaga

SEQ ID NO: 20624 - DNA, 421 bp, Glycine max
  Clone ID: LIB3106-062-Q1-K1-E6
cccacgcgtccgaaaaaaaaagatatgaagcttcacagaaacgctataagctgcctataagtttcttgtttgattagaatggagccccaacacttctccatctacaatcttagaaacctttattcgaagttctgatggctgtgcgatcatcctcctacgatgtgttcctcagcttccgaggggaagatactcgtcgtggtttcactggcaatctctacaatgtcctccgggaaaggggaattgacaccttcattgatgacgaggagctccagaaagggcacgaaatcacaaaagcacttgaggaggcaattgagaagtccaagattttcatcatcgtgctctctaaaaactacgcatcttcctccttttgcttaaacgaactcactcacatccttaactttactaaggggaagagtgatcg

SEQ ID NO: 20625 - DNA, 386 bp, Glycine max
  Clone ID: LIB3106-062-Q1-K1-E7
cccacgcgtccgagaaaggaggccaccagaaaagcatggcaattttctgcatcaagtatggatgcaacttatgagcctttaatttgtggtagcatataacaatcaactttggttcatcaaggtctgtccaaattcaatcaccaaatttaatcctctccctatttatgtaagtccacccactttatataccaaattgaaatttggtttgttcaaatttatcagtaagttatggtcaaggtgaatttctgcacccttttgctaccatgtttgaaaggttgagtagactaagccatgatctattgcagcttctgatttgttagtggttgaaatcctaaagggtgatgatcaaaagggtatcatgcttcaaactagaatcaagactggtc

SEQ ID NO: 20626 - DNA, 367 bp, Glycine max
  unsure at all n locations
  Clone ID: LIB3106-062-Q1-K1-E8
gcaagttgcaacttttgacgttttgattttgttgtatagaacaacatggtgttactcgctcactgagttgagttcactggttacacaatgtcgaagagagaagaatttgctccgtggcacttcttttttcttcttcttcttctatgggggtttgtcggcggcgatgcgccggggagggaggtgtggtgcgtggcgaagaacaactcggaggacacggcgctgcaatcggcggaggagtgggcttgcggcgcatgctgatccgattgcggagcgattcatggaggaggaccctgcttcgacccttccagtatgcagaatacggcgtcgtatgctttcaatgattatttncgtaaacacgctatctctg

SEQ ID NO: 20627 - DNA, 390 bp, Glycine max
  Clone ID: LIB3106-062-Q1-K1-E9
ctcaatcatccatagacatggccaccgtcacttctgcagcagtttctattccctcattcactggcctcaaggcaagcgcaggcaaagtgagtgccgccgcagttaaagtctcagctccccaagccacaaggttctgcggcatcaaggcttccctcaaagacgttggagtcgctgttgtggccactgctgcgagcgcagttctagctagcaacgccatggccattgaagtgttactgggcactgatgacgggtctctggttttctctcccaactctttctccgtggcccctggggaaaagatcgtgttcaagaacatcgcagggttcccccacaatcgtgtgttcgacgaggactagattcctagcggcgtggatgcagggaaaatctcca

SEQ ID NO: 20628 - DNA, 305 bp, Glycine max
  Clone ID: LIB3106-062-Q1-K1-F1
cccacgcgtccgcccacgcgtccgagatgctacaggattggtagttaaaggggatctcgatgttcattcagtttatgctacttctctccctacttcacatccaagtttctcacctcaaagggtactggaaatgtcggagacctggaaagccagtgctctacctaaacatgctgttaaactttttattggagttctttctgcttcaaatcactttgcagaacgtatggcagttcgaaaaacatggatgcaagcagctgcaatcaagtcttcagatgtagtagtgcgattctttgttgcattgaatc

SEQ ID NO: 20629 - DNA, 283 bp, Glycine max
  Clone ID: LIB3106-062-Q1-K1-F10
acaaaggaattagtttctggatccatcttgcataagctttgttgatggtgatgatgagtttcgaaacagcaggtttaagctcataccatcagtcccaaatggctcatggattgtacgccagagtgttggtagtactccttgtttactgggaaaggcggttgattgcaactatattcggggtcccaagtatttagaaattgatgttgatattggttcttctactgttgctaatggagttttgggtctggttattggtgtgattacaacattggaggttgatatg

SEQ ID NO: 20630 - DNA, 457 bp, Glycine max
  Clone ID: LIB3106-062-Q1-K1-F11
tcggggacaatctcactgttgggacgtaacctatttgaaattttcgactgacaatatcatcccagctttggtggaagcattgcacaaggaacctgacacagatatgtgtgcaagcatgttggattcattaaatgaatgcttacagatatctggaatgcttttggacgaaagccaggtcagatccatcgtggatgagataaaacaggtgatcacagctagttcaagtagaaaacgagagagagcagagaggacccaagctgaagagtttgatgctgattagggggacctgattaagagaggaaaatgaacaataggaagaagtttttgatcaggtgggagagagtatatgaactttaatcaaaaccttcaaagccaacttcttgcctttctttgatgaactatcagtatatctgacacctatgatgggaagggacaagactcctgaagagagaagaat

SEQ ID NO: 20631 - DNA, 311 bp, Glycine max
  Clone ID: LIB3106-062-Q1-K1-F12
cggttttcttatacaggcactctttcattctcattgccgtcacacagagagagaagagacaatgaagtttaacccaagggtttcctcaagccgtcgaaagagccgcaaggctcacttcaccgctccgtcgagcgtgcgtcgcgtcctgatgagcgcgcctctctcgaccgatctccggtcgaagtacaacgtgcggtccattccggttcgcaaggacgacgaggtgcaggtggtgaggggaacctacaagggccgcgagggcaaagtggtccaggtctatcgccgcaagtgggtcattcacatcgagcgca

SEQ ID NO: 20632 - DNA, 426 bp, Glycine max
  unsure at all n locations
  Clone ID: LIB3106-062-Q1-K1-F2
cccacgcgtccgtattgctcctggggacaaccttaaccattggccacaaaaactagaggtcaccagtgactacttgtaattttccttccgatctctggtgttggaattcctgataacacaaaagatggctgaattattcatcttcagcatcgctgagtctctcataacaaagcttgcttctcattctttccaagaagcttctcgggtggtgggtttgtacgaccatctccgagaccttgaaaagactctctcattagtcaaggcagtgctgttagatgctgagcaaaagcaagagcataaccatgagctgcaggaatggctgangcagctcaaaagtgtcttctatgacgccgaagatgtgttggatgaattcgaatgccaaacactgcgaaaagcagtgctcaaagctcatggtaccatcaaaga

SEQ ID NO: 20633 - DNA, 289 bp, Glycine max
  Clone ID: LIB3106-062-Q1-K1-F3
ctgaaaatgagggaaagttccactcattccacccagttgcgaccatcctcagttacctgaccaaggcccctatggttccaccgagtacgccagtggttaatgcactgtcaaagcagcgagctatgctggaaaacatcctaagggcttgagttggattagctcctgagaacaacatgatcctggagtacaagtgaaggtcaaagtcttaagagtaatgggttgggatacctggagtgaatgaaatcaaaacttaacttatattccatacccttttttctggtaaaaatta

SEQ ID NO: 20634 - DNA, 276 bp, Glycine max
  Clone ID: LIB3106-062-Q1-K1-F4
aagaaaatgacggatagctcctgtggtcacacttagccgtgaccatcctcagctaccggaccagggccactacgggtccaccgagttcccaactgtgtaatgcactgtcctaggggcgcgctatactggggaacaatctataggcacgcgtccgtgcaactttcagagcacagcatgatgctgcttaactccaaaaaactggccgcttattaacaacggactaacaggctaaacccgggtgataccacacttaatctcatatggcataaccccctt

SEQ ID NO: 20635 - DNA, 120 bp, Glycine max
  Clone ID: LIB3106-062-Q1-K1-F5
tgaacttcaagcatggtggaaggaagttgtggagaagggtcatggtgacttagaagatgagccttggtggcctaaactgcagactgtggaagatctcattcaatcctgctctattatcat

SEQ ID NO: 20636 - DNA, 86 bp, Glycine max
  Clone ID: LIB3106-062-Q1-K1-F6
cccacgcgtccgcccacgcgtccgcccacgcgtccgcccacgcgtccgcccacgcgtgcgcccacgcgtccggttctagatcgcga

SEQ ID NO: 20637 - DNA, 347 bp, Glycine max
  Clone ID: LIB3106-062-Q1-K1-F7
agaagaccgttcaagtgttttgatattggtttgggacgaggagtaagttaatttgtgtggcgtttccattaaaacggcgtcgtaatcatacgttggtattcagacagcatgaaaactccgatttcgggtttctacagaaaccccgtgaagttcagaatgccaactgcggagaacttggttcccattcgattggacatcgaaatcgaggggcagagatacaaggacgcgttcacttggaacccttctgatcccgattccgaggttgtcgtctttgcaaaaaggactgttaaagacttgaagctccctaccgcctttgtaacacaaattgctcaatcaattcaatcaca

SEQ ID NO: 20638 - DNA, 328 bp, Glycine max
  Clone ID: LIB3106-062-Q1-K1-F8
ccttactgttctgccaggattttaaggattggtaaaattatttatttcccgtaggatatagaccatattttttttaggctccaaaagttgaccaattatgccgtctttattttttgcgccctcttgattgttgacttggtccgaatttggcccacttgatttaacaagagtttctatccttgcgttcgattctactgtggcccagttgagtctgtaaatttctgaagctgagtattgtacgatccatttgtaatattcttcattcatataatagaacttaggatttttattactaaaaacttcctaacgtctttgtgacacaaattgc

SEQ ID NO: 20639 - DNA, 408 bp, Glycine max
  Clone ID: LIB3106-062-Q1-K1-E2
cgaaaagttgcaaaagtgaagaactttgcacagaactactcgaatcccaaactggggacacttccactgggtctgtgattcaaactttgcgtcttcaagtatttggggtgctacattgggttgtttcactaggcctcattctggccattgactttctcttgaagaaagccttcgtagcagcttcgattgagttcccaagtgctctgtttgggatgttctgtattttctctgttttgattattcttgattgtgctataccttctgctgctgtggctttgatgaagttttttgaaccagggattatgttcattcagagatggctccctttgttctatgttccctatttggttgtgctgcccctttctcttaaagatattcccccttcttctgccatcaaaatttgcttta

SEQ ID NO: 20640 - DNA, 323 bp, Glycine max
  Clone ID: LIB3106-062-Q1-K1-F9
tcgcgagataactagaaacagtgtgatgaaaatgaaggtccttgttttctttgttgctacaattttggtagcatggcaatgccatgcgtacgatatgttccttatgctaatgaacactgtctatggtgcccgtactccggaggtgaaatgcgcaagttggaggcttgctgtggaagcacacaacatctttggctttgagaccattcctgaagagtgcgttgaagcaacaaaggaatacatccatggcgaacaatatagatcatgctccaaaacaatttaccaacatgcttactgttatgccagagacttttaagtgttttccc

SEQ ID NO: 20641 - DNA, 107 bp, Glycine max
  Clone ID: LIB3106-062-Q1-K1-G1
aacacgcgtccgtaaaagcaagcctaagataaaagcacagccataggctctatataagatggatgcgactcatgagccacctatctctggtcacttactacactcaa

SEQ ID NO: 20642 - DNA, 426 bp, Glycine max
  Clone ID: LIB3106-062-Q1-K1-C7
ggcgttgttccgaaccgtgttacttatgggtgctttgttagttactattgtgctgtgaatgagattgataagggtgttgagatgctgagggagatgcagaggctgggggacggggttgctagttcaagtctgtatacacccatcattcatgcgctttgcgaagctgggaggaaccagtttgagtttgaatgcttgaatctagtgttgagttggatttgaatttctgctagtgaagtcaatcaagagcgtggttttcttcaaatgattattattgatctagtggggggatctttgattcttcagatgcatgcaagtgcaatgttcagacaaggaattttcgtaattggcagatccacagttgcaaggtcactgaccaggatctggtctaacgatggtcatttgatttgcattcatgtatttcgagaa

SEQ ID NO: 20643 - DNA, 375 bp, Glycine max
  Clone ID: LIB3106-062-Q1-K1-C8
cccacgcgtccgggacactaacttgtgtgccattcacgccaagcgtgtgactattatgcccaaggatattcagctggcaagaaggattcgtggtgagcgtgcttgagttggtgcgttctgtgtttgtgaagatggattgttggtggctgctgatggtgttttgttactaagttttctttttgttgaagcctataggttattagggaaaaataggtgtttacttggtagtcatattaattgtcattggcaaatactgcctaagacactgtgaaggtctggttgttagaaatttggcatgtatttgattcttttggatccttgatttctcgttgtatttctggttgtgcagccactatgggaattgcattggacaac

SEQ ID NO: 20644 - DNA, 401 bp, Glycine max
  Clone ID: LIB3106-062-Q1-K1-D1
ctcttacactttgttactacttactgattccaaccatatactactaaaatggcttccttccgtgtgcatctcttatcattcttcttcattgctttgtcacttttatccattagcaatgtccaagccagtagaaaacttctggcacccacaatgcccaatatgggaaattatcctcctcgcgtgatatatcctccattccccccagtaacagactggccagagtataggttgccagcacccttaattcgcacacttccacccttctcaccacctcctaaccctaccaatccttgagtagtagcattatttgctacactccacagtagattaatgtagcgtaatcaatgttgctatatatgtgcagtcaaataaaggttcatcacgaacaagctttcaattgc

SEQ ID NO: 20645 - DNA, 271 bp, Glycine max
  unsure at all n locations
  Clone ID: LIB3106-062-Q1-K1-D10
ctgaaatgagacgattttgaaacggtgcattgcaagtcagccagtggttgtatttattgcaacagtcgacgatgaatttcaatattatgaattatatatataataagtgaaatgcggnatataagtaaatcatgctgtcctgcttgtggcgtatggtacagaaaatggtgaagattattggatagcaaagaattcatatagtgataaatggggagataatggctatatcagaataaaaagaaaactgagcacttgtaaatttttaatcgag

SEQ ID NO: 20646 - DNA, 302 bp, Glycine max
  Clone ID: LIB3106-062-Q1-K1-D11
tcggtcagatgtcacaaactgcaagcctgacttggctatgcacctacttcaacgaggataatgagtccttttggcaccccaggattgaatcagacatctagtgagtggtgcgttacctacagtgagcctagtgctgcaatgatgtatgctcattcatatgaccaatttagacatggtgttttccaggctccatttggtcaacagccgttgagctttgactattcacagaactattagatgacatttagggggagaatattcaatttggatgcaaaaagttatgttagcttgtttagagattc

SEQ ID NO: 20647 - DNA, 267 bp, Glycine max
  unsure at all n locations
  Clone ID: LIB3106-062-Q1-K1-D12
cccacgcgtccgcttaactctcagttctgccacatattaacattccggcgcaaaatgaaggtcatcgccgcctacttgctcgccgttttgggaggcaacgcagccccttccgccgatgacttgagggacatccttggctccgttggagctgacgcgaacgatgacaacatcagcaacttcttgtctgaagttaagggcaaagacattgtggagcttatcgcctccggtagggaaaagctggcctncgtgccttctggcggtggcgcc

SEQ ID NO: 20648 - DNA, 364 bp, Glycine max
  Clone ID: LIB3106-062-Q1-K1-D3
cccacgcgtccgatcgaatcatccatcgtgcgaagatgagacccaccgcgcgtcggcaagcgaaggactccttcattcccccggcgccgcccactccgctggacttccaccaccgccagtactcctcccgcgactccgacgtcagcagccgcccctcctgcgtcggcatcggcagacgccccaccctagacctctacaatgagccttcctacaagcaaacggtggtttgcaccatcaactccttcctctactgccacaacttcccaatcaccttcaaaacgacgctcccctctgccaaagacatccacgaaaccctaaaatttctcctctctctcctcgacttccctttctccatactcgaaga

SEQ ID NO: 20649 - DNA, 411 bp, Glycine max
  Clone ID: LIB3106-062-Q1-K1-D4
cctaaacgtacgtttattctctctatgtgtgcgctcttgaacggaatccacatgcaggcatggacactgcaaggactgtgaaggatgtttcacctcatgagttcgctaaggcgtactcctctcacctcaagcgatccggcaagatggagctgccatagtggactgatattgtgaacactgctagatttaaggagttggctacttatgatcctgactggtactatgtcagagctgcttccatggcatgaaagatctactcgagaggaggacttggagttggtgcctttcagaggatttatggtgcgagcaagaggaatggtagtcgccctgctcatttttgcaagagcagtggtgccattgctcgtcacattcttcaacaagtgcagaacatgaacatcattgaactggaca

SEQ ID NO: 20650 - DNA, 410 bp, Glycine max
  Clone ID: LIB3106-062-Q1-K1-D5
cccacgcgtccgcccacgcgtccggctagctagttcacagcttcagttcgtttttgttgatcctgtgaacttatggctgacggggtggttctgttggatacatgggccagcatgtttgggatgagggttaggattgcattagctgaaaagggtgttgagtatgaatacaaggaagaaaatctcaggaacaagagtcctttgcttttgcaaatgaacccaattcacaagaaaattccagttctgatccataatggcataccaatttgtgaatctgcaattatagtgcagtacattgatgaggtctggaatgataaagctccaatcttgccctctgacccttatgagagagctcaagccagattctgggtagattacattgacaaaaaggtgtatgacacttggaagaaaat

SEQ ID NO: 20651 - DNA, 392 bp, Glycine max
  Clone ID: LIB3106-062-Q1-K1-D6
cccacgcgtccgcccacgcgtccgcccacgcgtccgaaacgccgcagtctcttctctgtcagaaaccctaatggcagagcgcggaggtggcgaacgtggcggcgaccgtggcggtttcggacgcggcttcggcgggcgagggcgcggaggcgacaggggccgcggccggcgtagaggtccccgccgcgaggaggaggagaagtgggtcccggtgactaagctgggacgcctggtgaaggaaggaagaatccgaagcctggagcagatctacctccactcgctgcccatcaaagagcaccagatcatcgacacgctggtgggccccaccctgaaggacgaggtgatgaagatcacgccggttcagaagcagacccgggccgggcagagaaccc

SEQ ID NO: 20652 - DNA, 324 bp, Glycine max
  Clone ID: LIB3106-062-Q1-K1-D7
gccacgcgtccgcccacgcgtccgcccacgcgtccgaaacgccgcagtctggggtctgggagaaaccctaatgggagagcgcggaggtggcgaacgtggtggcgaccgaggaggtttcggacgcggcttcggagggcgagggcgcggaggcgacaggggccgtggtcggcgtagaggtcctcgacgtgaggaggaggagaagtgggtcccggtgactaagctggaacgcctggtgaaggaaggatgaatccgaagcctggagcagatcgacctgcactcgctggccatcaaatagcaccagatcatcgacgcgctggtgggccc

SEQ ID NO: 20653 - DNA, 409 bp, Glycine max
  Clone ID: LIB3106-062-Q1-K1-D8
cccactcgtccggttacattctgaaaagaaaacgggctattctgaaattggtggaattgagtggtctccaaggatggatgttgcagaatcagaaggcaaatatgttatcacagtggaagttccaggtgtcagtatcagtgacataagagtggaggttgatgaactaaagttgcgtgttaaaggtagacgctctactagctcttggacagttgcaggttgtccaaatgcttctttttcttcatatcatcggagggaaatactatatggaccatatggggtggtctggccactccctgctggtgtgaacaaggacagaatatcagctgaatttttggatggatttctacaaattatagttcctaaagtttgagtatgactgagcaatattgatttgtagcacatatatgta

SEQ ID NO: 20654 - DNA, 211 bp, Glycine max
  Clone ID: LIB3106-062-Q1-K1-D9
tcgatttactcaccattgtacaaatcaatggcgttgatggttgtcgagtatgagagcagtgacacgtaccaatgaaaccgctggcatgtccatcgtaggaaaggctatgacgaatcctttgggaaacaaagtcgctcacatgtcaaagctgatgaccggcgtaatgaagaagacgcaccgattgaggacatgaacggcagatctgatggag

SEQ ID NO: 20655 - DNA, 423 bp, Glycine max
  Clone ID: LIB3106-062-Q1-K1-E1
gagggaggcatgagattccgacggaagtgattgaggtgaagcaagaagagttgattaagaatcggccaagagaggatcaggtcaagctaactgggattgcattcggacccacttatcagcctgcttcgacaaaggggaagcctacaaagctgcacaagaggaaacatcaaattggttcattgtactttgatatgaaacaaaatgaaatgaaacttgctgagcggcgtgtaaagggcatgcttaccaaagctgaaacacaagcgaaatatggatggtgatttgagatgatgatattggaaatacttacattgaaacgtgaaaaagcaaagtcgaagttttcatatttagttgcaatccttgtgtttcactgttctgtgtacatttgctccgtctttaagtgcaaattatggatttctattctta

SEQ ID NO: 20656 - DNA, 332 bp, Glycine max
  Clone ID: LIB3106-062-Q1-K1-E10
agaacaagtagttgagaactaagaaggagaagcaaatggcttgctcaatgatctcttccccagctgttaccactgtcaaccgtgccggtgccggcatggttgctccattcactggcctgaagtccatggctggcttccccaccagaaagaccaacaatgacattacctccattgctagcaacggtggaagagtgcaatgcatgcaggtgtggccaccagttggcaagaagaagtttgagactctttcctacctgccagaccgtgatgatgcacaattggcaaaggaagtagaataccttcttaggaagggattggttccttgcttggaattc

SEQ ID NO: 20657 - DNA, 399 bp, Glycine max
  Clone ID: LIB3106-062-Q1-K1-E11
tcgcccacgcgtccgatctgtcctcataaataatcatttccttgcacgattgaatgagctatcattgaagacgcgcatttcttcctctccagttctcgattcgcctctggcggcggagctgtggagtgaagtgaagtgaaccaacacgtcatatgataaattcgccgtcaaaaccactctcttccatgaacgacggtgataaatttctgcattctttgtattaatggcattgaaacattgaattattaagggttttgtttggggagaactgacattggaagctagaatctgttgttatggcttcaagagtgattatgcgaaagagaaggggcctcttcttcaaccctctgatgaggcaacctacttgcattatttgtggattcttcagtgttgggcacg

SEQ ID NO: 20658 - DNA, 117 bp, Glycine max
  Clone ID: LIB3106-062-Q1-K1-E12
ctgtttttgttttctgtgtgccaatgcttttctatcgtgtctgctttatgcttatcacactgcaatttgatcatggatgatataatgcatgcttttgtatgaattttaatttccttc

SEQ ID NO: 20659 - DNA, 301 bp, Glycine max
  Clone ID: LIB3106-062-Q1-K1-C6
tcgaaaaaaaaaaggaacggttaagttggcaagtaagagatgaattcgtacttgacatcctcgatgtgggagtaacaggaacaggttgatgcccaacatacttagccaattcacacgacaaaaacagtggatatcaacacaatcctgggaccccttttcatggtactgtttcttctcttgggctgtttttccatactaaaacaaaccttgtgaaaaccccgcttggctcccctctcttgccgaatcccaaaacgacgtcgtatcagtatcatcacctctgttgccgaagatcgagaaatag

SEQ ID NO: 20660 - DNA, 313 bp, Glycine max
  Clone ID: LIB3106-062-Q1-K1-B1
ctttccctcacgtctctctctcacatcatcatgggctccccaacactaataacccccggatcagtgaaatcactcacacccatcaagcccaaacccaccaccaccatcggcgacactctcacaccacccacaacaacctccaccgccgccgccacccaccctcgccgtcgcgaattcttgtccatcatcaccgccaccacatggctggtccctctgagcccggcactggcttcctcggacgaggaatacatgaaggagaccgatgaagtgatcaacacagtgaggacaacaatcgtgatggacaggaatgacc

SEQ ID NO: 20661 - DNA, 275 bp, Glycine max
  Clone ID: LIB3106-062-Q1-K1-B10
tcgcccacgcgtccgaatcggattaggttctgcgtgcacaggcgaaaaccctgatccttgggcactgaaagtgtgatatggcaagagtcatttgctcttcctgtgcacgcctcgcaatgcgcgtgttgtccaccaccaccacagccaccgcgttcgccgtcactttacccaaaccctcatcactctccctctcatcgcgtcgattcctcttccctctctcccatgccatcgtccctccctccacctatttaatatataatacaaatgatgtcaaa

SEQ ID NO: 20662 - DNA, 282 bp, Glycine max
  Clone ID: LIB3106-062-Q1-K1-B11
tccacgcgtccgctgagagggttgagagaccggagacctataagcagtggcaggttaggaaccagagagctgggttcaagcaagtccgttttgatcctcagctggtgaatcatgaaaaggaaatggtgaagaaggaatatcacaaagattttgtagtggctgaggatggcaagtgggttttgctggggtggaaagggcgtattctgaatgccatttctgcttggactcctgcttaagcattgtccagaaagtgtcttgtaactagtaactagttatctactc

SEQ ID NO: 20663 - DNA, 455 bp, Glycine max
  Clone ID: LIB3106-062-Q1-K1-B12
agaaacgcgaattgatgatggaggtcaccaaagacgaagctgctaccccagtagcaggaggtgctcaacctcgcaatccaaatccaaatccaaatccaactgcaaattcaaaccctaaccctaaccctcctcacaccaccagaggatctaaaggaaaatcgtgtaagggatgcacctactactcatcgcttcataaagccaagtccaaaaaccccacatgcgttggtttctccagaacactccagcaagtacccccctttgttgtcggagaatctgggttggaagcttttcaaagagggccgcagccttaccaatttgaagtatgcatgtagtggatactctgtctacttagacaacaaagattcttcagctgacttgcaagatataacagcaaaattgcccttttgcgttgggcttgaagtggtcttagaggataaagcttagaattcacatgc

SEQ ID NO: 20664 - DNA, 350 bp, Glycine max
  Clone ID: LIB3106-062-Q1-K1-B2
caagtccaacacttctaattccgttctggaacccgacattgccaaccacctcctcggcttctctcagtatttctccacctctgctgacgtgtcatttcttcaccaccactctcataaaccctattatgtggcttttgcagattggagactgggcctgctaggttccacgacggctatagcagactatgaacatggactcattcttcactcgatttgtacaagcacgagttgcttcgcgtgctttatacggcgttgatacactgcttcatggatcttgtcgccaaaggacaagttcatgaagctcggaactttcaatacttttcgcgaagaccatgaaatgatgcacttgc

SEQ ID NO: 20665 - DNA, 431 bp, Glycine max
  Clone ID: LIB3106-062-Q1-K1-B3
cccacgcgtccgctcaaactcacagatagattagcacttagcatttactaagaaaggggaaaggaaggaacactttcggtacatttctccgcccattcctaccttgttcctccttttctccttttctttttcgtattcggggttgctgctttctttcgactctattgtcttcttaataaatacagaaagaaacaaactagaaaaaagtttataggtgcctagaagaaaagacaatatagtgtggagcaattacgtttgatcacaagggaaattaaaggtgcaacggttttgcaagatagcatagaagattttgaagaatcttagttgcaatatagttgtgcaggtgctgaaatgggggctcctttatcagcatggcctttggagaactttggaacatacaagtatctattgtatgggccgtttgtgggaaa

SEQ ID NO: 20666 - DNA, 60 bp, Glycine max
  Clone ID: LIB3106-062-Q1-K1-B4
ccttctcctagaaagctttctgtaatcccttttcactcaacgaactgcacacatttgtca

SEQ ID NO: 20667 - DNA, 431 bp, Glycine max
  Clone ID: LIB3106-062-Q1-K1-B5
cccacgcgtccgtccacgcgttcggttactggcaaaggcttatgttgttgtgggtgaggcatgctaccatcagggcattagccattggctaagcactcatgcaattgttgagccatttgtcatagcatcaaacaggcaactgagtgtggttcaccctatttacaaacttctgtttcctcactaccgtgacaccatgaatattaattcacttgcccggaaagccctggtcaatgcagatggtattatagagaaaacattcttgtggggtaggtactctatcgaaatgtccgctgtcatttacaaggactggctgttcactgatcaagcattacctaatgatctttgtaagagaggaggtgctgttatagacccatctgctaaccatggaggtccgcttttgcttgaggactatccttatgccgctgaagggc

SEQ ID NO: 20668 - DNA, 279 bp, Glycine max
  Clone ID: LIB3106-062-Q1-K1-B6
tcgctaggtcttcaatcgaactcgccaggaacggaactttctcagattgacacacaccatgaaggaaagtggtttcgagaataatgatacaaagcaagctgctgctgatgtgttgcttctatattcaaaatttgcaatggcatgcattggatgtaaggctcgtccatgtgatttgaggtttcatttgatgaaggagatttcaggtatgccctcttctctaaatagggagtcaccacagaatgcagcatctcctgatgcaatgggtgagtcattcagcac

SEQ ID NO: 20669 - DNA, 436 bp, Glycine max
  Clone ID: LIB3106-062-Q1-K1-B7
cccacgcgtccgcccacgcgtccgcaagcacacacaaaaattctcatcaaagatgttcagtgccaaaaaagctgagcttcatccccagaacacagtgctccaaatcaagcaagatgacaagttcttcagcaggcttctctcaaaggaaggttccatgtccaaaccctctttcagaatggctgtggcagtcccttttgtgtgggagtctcaacctggcacccccaaatacactttctctgaggacactctcccacccctcactcctccaccttcctattttgttaactccaacaaaaaaaacaagccactaaagaaacgctcaagatccaacatcttcttagcactcttcccaaaactaaatctcaagaagaaaaacattctctcaccctcttcacctacctctccatcttctctatggtcaacctcagatcattct

SEQ ID NO: 20670 - DNA, 320 bp, Glycine max
  Clone ID: LIB3106-062-Q1-K1-B8
cccacgcgtccgagaggccaaaatatccattgcacctttctctttctccgatggctaatccctcactcttggtcttcagtctcctcctattatccgccaccgtagccgccgccgaacggatcgacgatgaagacgaccttctgatccgtcaagtggtgccggatgcggaggaccaccacctgctcaacgcggagcaccacctctccgccttcaagacaaagttcggcaagacctacgccacgcaggatgagcacgaccaccgcttccgtatcttcaagaacaacttgctccgcgccaagtcacaccagaaattggatccc

SEQ ID NO: 20671 - DNA, 304 bp, Glycine max
  Clone ID: LIB3106-062-Q1-K1-B9
cccacgcgtccgcccacgcgtccgtgaaggtggaggcctggttcggttctcggaaaacatgcgccgccattcgcaccgccctgagccacgtggagaatctgatcaccggcgtcaccaatggctaccgctacaaaatgaggttcgtttatgcccattttcccatcaacgcaagcatcggcaacgacaacaagtctattgagatcagaaatttccttggcgaaaagaaggtgagaaaagtggaccttcttaacggtgtttacggtgttcgatctgaaaaaagtaaagatgaattgattttggatgg

SEQ ID NO: 20672 - DNA, 220 bp, Glycine max
  Clone ID: LIB3106-062-Q1-K1-C10
aaaaaaaaaaaagcaaaagaaaaaaaaaaaaaaaaaaaaaagaaaaaatgagaagaaagtgaataggaatataaaaagaagaatagtgtaattaagataatgagaaaagctagaaaaatgacatatataaaaagtagtgtaaattaaatacagtggcgacagaattacaataacggaactgggaaaaccccgacactaccaaactcattacactaaaagc

SEQ ID NO: 20673 - DNA, 396 bp, Glycine max
  Clone ID: LIB3106-062-Q1-K1-C12
gtgccaagtcacacgcacaaacattttcttttctaattattacttacttattactttggttctctctcactctccaacttgcattcaagtaacaacaacttactgaatctcccttcagatcgaacacaactcactcctcaaacaagaccaagattctcccccagtggtgcagttgaagggccgtgaggatgttagagaaagtgggggagtttaacatggataaagttatacaagagtttgaattattgacacgggatgcagatagggttcagagggtaacactgatgaggatttttgaggataactctttatcaatagtacttgcagagtttgggtcgtaattgaataattgatcttgatagtttcaaggccttgatttatacttgtcacccacaa

SEQ ID NO: 20674 - DNA, 375 bp, Glycine max
  Clone ID: LIB3106-062-Q1-K1-C2
aacttgggaaattcgaatgaacattattctgggaacggctaaaggattaacttatcttcacgaggggttagaaccaaaagttgttcaccgtgatattaaatcaagcaacattttgctcagtaagaagtggaatgcgaaggtttcagactttggcctcgcaaaactccttggctctgacagcagctatatcacaacccgtgtcatgggtacatttggatatgttgctcctgaatacgcgagtactggcatgttgaatgaacggagtgatgtttatagttttggaattcttattatggaactaattacaggaaggaatccggttgattatagtcggcctccagaagaggtgaatttggtagactggctcaagaagat

SEQ ID NO: 20675 - DNA, 271 bp, Glycine max
  Clone ID: LIB3106-062-Q1-K1-A9
ccccaaaattttctctgaataagaagcaacaatgtctggtcgctgaaagggttgcaagggtttgggaaagggtggagcaaagaggcatcgcatggtgctccgttgcaacatccagggaattacgaaacccgcgattcggaggctagccagaagaggcggcgtgaaaagaatcagcggctcgatctacgaggaaaccagtggtgtgctcaagatcttcctcgagaacgtcattcgcgacgccgtcaactacaccgagcacgctaggagaaag

SEQ ID NO: 20676 - DNA, 403 bp, Glycine max
  Clone ID: LIB3106-062-Q1-K1-C3
caaccgagtaaaagaaaaggctgtgtccgttactccggagtggaagatggctactgcgccgggaaatcaaatgctggagggcggaggacgagctcctcaatctacgggtacagacatgaccggaatatgctttcgggatcagctatggctcaatagcttacctctggatcgcatcttggtcttcgattacttagcactcttcactttctacgactggacctgcaacaacgagcagctgcgcatgcgcttcgttcacccactcgacatctctcaactctcgaaaatgactgagacggagcatatgctcagcgaagttatggagccgcacctgtttgtcattcgcaagctgaatagagatagacccgacaaagttacacctatgctcgcgtattacgtactcgat

SEQ ID NO: 20677 - DNA, 349 bp, Glycine max
  Clone ID: LIB3106-062-Q1-K1-C4
gtcccaaagagctaacaagagattcaagaccggcatggctaatgaagaggcacagaagcaccacctcttcggcatcaaagatctcggtcacaagactctccttcagagcgatgcactctatcagtatatacttgaaaccagtgtctatccaagagagcacgagtgcttgaaagagatacgcatgatgactgcaaaacacccactgaacatcatggcgacaccagcagacgaaggacaacttctgagcatgcttgttaagctcacgaattcaaagaacgccttggaaatcggtgactgcactggttactctctgctctccactgccctggctcttccccctgatggaaag

SEQ ID NO: 20678 - DNA, 54 bp, Glycine max
  Clone ID: LIB3106-062-Q1-K1-C5
tggaacgggacacgccctgtagcagtacattaagctctactgctgtggtggtta

SEQ ID NO: 20679 - DNA, 158 bp, Glycine max
  Clone ID: LIB3106-061-Q1-K1-H2
ctgaaagccaaggataacgaccacgaccaccatatcttctgatccttatctattaccaccgcctaccgtgccggtgccgacccatccattccatacaccgaacagctacacgctgctggcctccccacgaggtagaccatcgatgtcctatcctacaa

SEQ ID NO: 20680 - DNA, 294 bp, Glycine max
  Clone ID: LIB3106-061-Q1-K1-H3
ttttgttattatttaattacatcggaaccaacagtttcattacaaataacaaaatgaggcaaaaaaagcccaccatttctttcctaataaagctaaagctatagctatagccattgctctgacttattgctcatttttaaagccttgaaaaaaaaagtgcatatactaaatactaaacacatgatacaaacacacacatgaaagaaaaaaacttagtagtaagcccaggtccaaaggacatgatcttcctcaggaaatccaaaattacaagaactttcaagttctagatcgcga

SEQ ID NO: 20681 - DNA, 417 bp, Glycine max
  Clone ID: LIB3106-061-Q1-K1-H4
cgcagatattgtgtttacctctggggcagatattgttgttattggaataaacattacaacccaagtccaattcacagatgctgatctcctcgaactgaaggaatctaaaggaaagtatgctcccttcttgagtgacatatgcaaattctatagggactttcatgtaaaatctgatggtgtccacggaattttcctccacgatcctgtaagttttgtggcagttgtgcgtccagatcttttcacatacaagaagggggtagtgagggtagaaacacaaggcatctgtgttgggcatacacttatggaccaaggattgaaaaactggaatacgagcaacccatggacgggttattctcctgttgcagttgcttggacagtgaatctcgaggaagttcttgattatatcagggagctggt

SEQ ID NO: 20682 - DNA, 385 bp, Glycine max
  Clone ID: LIB3106-061-Q1-K1-H5
gacgtagttgagaactaagaagaaggaaatggcttgctcaatgatcttctccggagctgttaccaccgtcatccgggccggcgccggcatggttgctacattcaccggcctcaaattcatggctggcttccccaccaggaagaccaacaatgacattacctgcattgctagcaacggtggaagagtacactgcatgcaggtgtggccaccaattggcaacaagaagctcgagactctttcctacttgccagacctcgatgatgcccaattggcaaatgaaagtctataccttctaatgaaaggatggattacctgcttggaattcgagttggagcacggtttcttgttccgtgagcacaacaagtcaactggatactatgatgga

SEQ ID NO: 20683 - DNA, 396 bp, Glycine max
  Clone ID: LIB3106-061-Q1-K1-H6
ccacgcgtgcggcgactttctatttctccctcaacacaacacgagacaacatgttcctctttggcgggggctatggcattctcgctgtccctcggtctctggcagaaagaagccaaaattctcttccttggtctcgataatgccggcaaaaccaccctccttcacatgctcaaagacgagagattagttcaggaccagccgacccagcaccccacttcggaggaattgagcattgggaagatcaagtttaaggctttcgatttggggggccatcaagttgctcgcagggtctggaaagactattatgccaaggtggatgctgttgtgtacctgggtgacgcctttgacaaagagaggttcgcagaatctaagaaggagctcgatgccttgctttca

SEQ ID NO: 20684 - DNA, 284 bp, Glycine max
  Clone ID: LIB3106-061-Q1-K1-H7
aaaccttctctcaccaaaacttacaacagcagcataaaaagaagaaaattttggaacaatggacgcatcaaagatgaagctttttcttggttttggtggtttccgtgttggcgatggcagcaactggggtttcagctgctgaggcacctgccccaggtcctttatccgatgccaccaccctctttgtgcccactgcttttgcttctctctttgttcttgcatttggctttctcttctaattttccaacaaccctttggttatttgttacatatataatgtgcat

SEQ ID NO: 20685 - DNA, 404 bp, Glycine max
  Clone ID: LIB3106-061-Q1-K1-H8
gttttcgctcaccggtgtgcagtcgagcccccgaagaaaaagcgaaaatgccgtcgcacaagacattcagaatcaagaagaagttggcgaagaagatgaggcagaacaggcctatcccctactggatccgcatgaggaccgacaacaccatcaggtacaacgcgaagcgccgtcactggcgtcgcaccaagcttggattctgaggtgcttgctttgcctcggttctgtttatccaattaattagtgttttattttcttgagccaaaaacaatgctttggagattttaatattttgcattttgttccaagactatattgtgtaaggaacttattgtagttcagactaatggtggtgttggtcacctttttttaaaagtatttttggaattctttgccgttggttt

SEQ ID NO: 20686 - DNA, 73 bp, Glycine max
  Clone ID: LIB3106-061-Q1-K1-H9
gtcactcgtcaacgcagtggagtatgcgcccctgaatactaagcgattatgtggttacatgagtcatatagag

SEQ ID NO: 20687 - DNA, 387 bp, Glycine max
  Clone ID: LIB3106-062-Q1-K1-A1
aatggctcccaagggtttaacctttctggctgtgttaatatgcgtttcagcactgtcactgagtccttctgttgcgggggaagggcaaaataatggccttgttatgaacttctacaaggaatcatgccctcaggctgaagacatcatcacagaacaagtcaagcttctctacaagcgccacaagaacactgctttctcctggctcaggaacatcttccatgactgtgctgttcagagctgtgatgcttcactgttgctggactccacaagaaggagcttgtctgagaaggaaacagatagaagctttgggttgagaaatttcaggtacattgagaccatcaaagaagctttggaaagagaatgccctggagttgcttcatgtgctga

SEQ ID NO: 20688 - DNA, 294 bp, Glycine max
  Clone ID: LIB3106-062-Q1-K1-A10
acgctgacgcgtccgtgcaagcgtccgaatcaactacattcacttcaatttgtgagcgagtaaagggtgcctaattctcttcacattgcaagattaactacatggtgcacgcaccacagatgtgaccggatccaattggactctattctgcaacacaaacacaacgcatcatcatttttcttcaattacttcacttgaggaatctctgatgatgctgaatcagacgatgaaaaccaccacataggtgacacctttactgtgtgttacctcatcaactagtggggattgtcccca

SEQ ID NO: 20689 - DNA, 269 bp, Glycine max
  Clone ID: LIB3106-062-Q1-K1-A11
gttcggattgcggcgacgtgagcggttcgctgcccgcgacgttgtgagaagtccactgaagcttatcatttagaggaagagaagtagatgatacaatataggcgtctttttgttgggtgatctgtattattatcattattcatattcttatgtaacaaattcattattattcctcattgtactttctttatatgggttgtgacaatgtaatcttattgtgatttgtttggttccctggtttgtctcgcatttatggttgagctttagct

SEQ ID NO: 20690 - DNA, 411 bp, Glycine max
  Clone ID: LIB3106-062-Q1-K1-A12
gtgaagagttggttgaagcttccgctaccctcatatggattgcttcagctcttcatgctgctgttaactttggacagtatccatatggaggtttaatcctgaataggccaactattagcaggagattcatgcctgagaaagggtctcctgaatatgatgcgttagctaagaaccctgagaaggagtttttgaagactattactggcaagaaagagaccctcattgaccttacaattatagaaattttatcaaggcacgcatctgatgagttctaccttgggcagagagatggcggtgactactggacttctgatgccgggccattagaggcctttaagaggttgggaaagaatcttgaagagattggaaagaagcttattgagaagaacaataatgagacattgagaaacc

SEQ ID NO: 20691 - DNA, 352 bp, Glycine max
  Clone ID: LIB3106-062-Q1-K1-A2
ctttggatctctggaatctttgcacaatactgtccacagctggaccggtgaattagaaaaacctaaccacgacatggggttgttggctacggctgcaagagatcccattttctttgctcaccattcaaacgtcgataggatgtggaacatatggaagacagaattgctggatggaagaagatttgatcacaaaagtgacgaatggttggaatccagtttcttcttctacgacgagaacagtaactatgtgcgtgtgaaggtcaaagactgcctcgactccaagaagatggggtatgattaccaacgtgttgaccttccatggctgttggctggggaactcatcaaaccaaag

SEQ ID NO: 20692 - DNA, 203 bp, Glycine max
  Clone ID: LIB3106-062-Q1-K1-A3
ctcaggatctctggaatctatgcgcaagactgtacacagatggaccggtgaattacaggaacctagcgacgacatggggttgatggctacacatgcatgagatccgcattatctatgctcagcattcacacgtttaccggatgcggatcatatggaacacagaatggctggattgaagacgatttgctcacacaagggacgaa

SEQ ID NO: 20693 - DNA, 423 bp, Glycine max
  Clone ID: LIB3106-062-Q1-K1-A4
cccacgcgttcgcccacgcgtccgggaaagtgagtgagagaaagagatcacatagcagaatggcttctactcaatgtttcttgcaccaccatgctcttaccacccctgccagatccccatcacaacgcatcatggttagcaccaagcctaaccagcttgtttgcaaggcacagaagcaagaggatattgatgtcagcccaatctctcgccggttagctctaaccgtgctcattggtgctgctgctgttggctccaaagtccaacctgctgatgcagcttatggggaagctgccaatgtgtttggaaagccaaagacagacacagatttcctgccatacaatggagatggattcaaactatcgattccctcaaagtggaacccaagcaaagaggttgagtacacaagtcacgtgtgtagatatg

SEQ ID NO: 20694 - DNA, 317 bp, Glycine max
  Clone ID: LIB3106-061-Q1-K1-H12
gcgcgaaaacagtgagagcggtgtggcgcttagtgctcacaccaattaccaatggcagtggagaagacggagcaagaactccgcaacgagatcgatgagcttcttcgccaacagcgcgagatttcggaaaggctttgagatcctcgaggtcttcgcagaggtgccttgccgggtcctcctgctctccgcactaacggtgttcgccaacgaccctttattcgccctggagacaggaacgattctgaagatcaacctgctttcaagcgtcgactttcatttgccgtcgttgaggtggattatggggacatgcctgaaga

SEQ ID NO: 20695 - DNA, 408 bp, Glycine max
  Clone ID: LIB3106-062-Q1-K1-A5
cccacgcgtccgccgattgctagaatggaatttcgatgctcagtcatctcttgtaccattctcttctctcttggtcttgcaggagagagccatgtccatgcatcgctacctgaggaagattattgggaagctgtttggccaaacactcccattcccactgcactgcgagagcttctaaagcctctccctgcaggtgttgaaatcgatgaactccctaagcaaattgatgatacacagtacccaaaaacattcttctataaagaagaccttcatccaggcaaaacaatgaaagtacaattcaccaagcgtgcctatgcacaaccttatggcgtatatacatggttaacggatattaaagacacctctaaagaaggatatagttttgaagagatatgcatcaagaaagaa

SEQ ID NO: 20696 - DNA, 428 bp, Glycine max
  Clone ID: LIB3106-062-Q1-K1-A6
cccacgcgtccgctctcccacaaaacaaagtgcacgttgcacctgcaatttataattaacttgtgcaatggcaaagcctagagttgatgctgagtatctgaaggaaatcgagaaggctcgtcgtgaccttcgcgctcttatctccaacagaaactgcgcccctctcatgcttcgattagcgtggcatgatgctggtacttacgatgctaaaacaaacacaggaggccctaatggttctatcagaaacagacaagagttgaatcacgcagcaaacaagggactggaaacagcacttgccttctgtgaggaagtgaaggccaaacatccaaaaatttcatatgccgacctttaccaactagctggtggtggtgcagtagaagttaccggggggccaactattaactttggtcccgggagaaaagaatcat

SEQ ID NO: 20697 - DNA, 203 bp, Glycine max
  Clone ID: LIB3106-062-Q1-K1-A7
cccacgcgtccgctctcgcacacaacaacgcgcacgttgaacctgccatccaggcttagcttgtacagtggcgactcctggagaggatactgatgatcaggaggaagtcgaaaaggctcatgatgaccttggcgctcttatatacgacagaaactgcaccgatatcgtgcttagattagcgaggaccgatgctgaggcttacg

SEQ ID NO: 20698 - DNA, 381 bp, Glycine max
  Clone ID: LIB3106-062-Q1-K1-A8
cccacgcgtccgttgacatatatgttccaggctgtcctccaactgctgaggctttgctgtatggactcctccagctgcagaaaaagatcaataggcgcaaagacttcctccactggtggacaaagtgaggtcgattcggtttattttcttggcatcgaagctattttataataagcaattacatggtagtttaccttgctaagaagcactcatgttagatggagattgtgtccgtacaatactttgtcacagtttctgaatgctttatgtgctgctgcttttacggggcttcaggcccatttgaagttgaataatggatggttattggtatctgtcaatgcttaatctgcacctgagagtgtaaacaatttctgaatgact

SEQ ID NO: 20699 - DNA, 193 bp, Glycine max
  Clone ID: LIB3106-061-Q1-K1-F10
aagaaattatagagcacacatgatcacaagtctgagaaattggtttttttaagatggcttgttcacaaatcaagcgcatactatttgtggctttcattattctattgttgttttcctctcaaatgtttgtagcacgaacattgtaagaagaaagcagcctaactagcggggatgccaactcagttcaacataa

SEQ ID NO: 20700 - DNA, 325 bp, Glycine max
  Clone ID: LIB3106-061-Q1-K1-F11
gccttgtgcccattgttgagcctgagattttgactgatggggctcatgacatcggcaaatgtggctgctgttactgaaactgtgcttgcagctgtttacaaggcactcaatgagcagcatgttcttcttgaaggaactcttctcaagcccaacatggttactcccggctctgatagcccaaaggtaccaccagaggtgattgctgagtacacagttcaagcactccgcaggactgtcccagctgcggtgccaggggttgtgtttattgctggtgggcaaattgaagaagaagcttccctcaacctgaatgcaatgaacaagttgg

SEQ ID NO: 20701 - DNA, 180 bp, Glycine max
  Clone ID: LIB3106-061-Q1-K1-F12
gaacaagtatcggtgaactaatatggagatgcaaacggctaagtcaatgatctatttgtcggctggagccagtgacaaaagtgccggtgcctgtatggctgctccattaactagcctcaagttcatggttgacatggcgacctgaaagaccaacggtgaccttacctgcattggtagcaa

SEQ ID NO: 20702 - DNA, 417 bp, Glycine max
  Clone ID: LIB3106-061-Q1-K1-F2
cccacgcgtccggaagaagatgtcgggtatgggagatgggtacgtgggcaccgcccaagacgcggtgtggattcgacggctggagaagcagacagaagcggagcgtcgcaaaatccaagagctgtaaaccaagtctgcctccgccaaggaccaacccggtcttctacaattcggttccagcacttgcgagattctagagactgcctttaagaaggaaactgggggtttggtcactagagagcagtatgtagaaaagagggttaatattcagagcaaaattgaggaagaagagaaggagaaacttcataagcatcaacaagaagaggaggagcttcaattactatagcgtaaaaagaggaagatcacgggcaattctcgattgtcctttgctgaggatattgacaatgaaccccaaga

SEQ ID NO: 20703 - DNA, 257 bp, Glycine max
  Clone ID: LIB3106-061-Q1-K1-F3
accacaaacacatacattgtagtatcacttttgtctcggaatttgttcttttgagttatggcaagcttaaaggttgcatgtgtggttttgatgtgcatggctgtgatgagtgcaccaatgttggtgcaagccgtgtaatccaatgatgtttctgtgaacctagcaccgtgcctatcttaccttttgcagggtggagatgttccataatcgtgctgtagcggagtggggaacattctgggttctgccagcaccacctt

SEQ ID NO: 20704 - DNA, 128 bp, Glycine max
  Clone ID: LIB3106-061-Q1-K1-F4
cccacgcgtccgcttcccctttgaatccttcctttcctttctaaaatatcagtatcatgtggttcgttcatagagtgaatggagtctgttatgagaaacataaaaaaatatgatgagctaccttcaat

SEQ ID NO: 20705 - DNA, 62 bp, Glycine max
  Clone ID: LIB3106-061-Q1-K1-F5
gcttgcaagagtgaaaaccttctcttacccttctctcaagtttcaagagaattcatcatggc

SEQ ID NO: 20706 - DNA, 422 bp, Glycine max
  Clone ID: LIB3106-061-Q1-K1-F6
aagagcatcatggttaggctatggtgctcttctctcttaatgacaatcttattccaacaactcatcagattgtgcatttcttggagtgtgcaaaccccaacacccccattgccaatcctccctctcccaacatattcccagttgcaatggcaacaaagggagatcataatgttcttgcattttggtgtgaacacattcactgacagagaatggggcactggccaggaaaacccagcaatcttcaatccaacagggctcaacaccacccagtgggccactgtggcagcagatgcaggagtttcattaatgatattaactgcaaaacaccatgatggcttttgcctatggccttccaagtacactgagcattctgtcattagcagcccctggcaaggtggcaagggtgatgttgttcaagactt

SEQ ID NO: 20707 - DNA, 227 bp, Glycine max
  Clone ID: LIB3106-061-Q1-K1-F8
caaagaatgatatgattgcaagggacagggtaatggacttcattaggctcttgtttggtataaattagattagaagcggcagattgatgtatagacctgagaaggtatggcattacctgatttttttcctttactgaaacaaaaatgtatcctctcttgtgctggtgaaaatgatgtacatacatttcaggacaatttagtaatagatgatggatatttgctctggt

SEQ ID NO: 20708 - DNA, 300 bp, Glycine max
  Clone ID: LIB3106-061-Q1-K1-F9
cccacgcgtccgcccactcgttcgcatatttctctcccttttctaattcattttctaagcccaacacatacaaccttatattctcccattcatcataaccaaaaactttgttactggcttatttattctctattaatattatatcctttgggtattgtattgtatcgtattgctttatacaaattcttaactcaattagcctagctagctaggtcattataaaaaaaataaaaatagtgttccttgatggctgaccagaagaatttaaacccggatttgtgaaccattggtgttgtatca

SEQ ID NO: 20709 - DNA, 232 bp, Glycine max
  Clone ID: LIB3106-061-Q1-K1-G2
cccacgcgtccggtggtggtggtttaggaggtggctatggaggaggagctggaggtgatagtggtttatgtggtggatatggaggaggagctgtaagtggtggagttggaggacttggaggtggtagtggtctaagtggtggaattgggggaggcatttacaaaggaattggtattggtggaggcatttacaaaggaattggatttggtggggttggtggtggcttacgtgc

SEQ ID NO: 20710 - DNA, 145 bp, Glycine max
  Clone ID: LIB3106-061-Q1-K1-G3
aattttggagctttgctatcaaagttaccatctggaatcccttcccataattccactcaagtccctaatgcagggacacaaagcatcattgagagagtgaaaattgaagattgtgaatttcatcccacccatgatgatgatcaca

SEQ ID NO: 20711 - DNA, 419 bp, Glycine max
  Clone ID: LIB3106-061-Q1-K1-G4
cccacgcgtccgtaaaaacgtgtatttgtattcatccatccctaggcactccatttggcgatttcattccatttgtaacctctctctctcccttcactacacttcattcattcattcaccagtcagaggcagaggccagagagtgtggtgtgtgtgtgtgtctctctctttctctgcttttgagtaattaaatgagagcaaaaatgacgctcaaaacagcggcggtggctgtggctatagtgtgcatttctgcctttagcatcactgtggtggctgaagatccatacaggttcttcaactggaatgttacatacggagacatttatccacttggtgttcgccaacagggaatacttatcaacggtcaattcccaggtccagacattcattctgttaccaacgacaacctcatcatcaat

SEQ ID NO: 20712 - DNA, 384 bp, Glycine max
  Clone ID: LIB3106-061-Q1-K1-G5
ttcttaattcttaaatcttaatttcttacacacacacacactcttactctggtatgtatataccgcaaccactcgcgtcgtcactgtcacagtcaaaggccaaggcagaaccctaaattgtctcacactttcgtaggaatccgattttggctttttccgtgacaagatgccggcgaatgacgacggctccgacaaggagaagtgccttgatctctttctgaaaatcggcttatacgagcgcaccgctaaaaacaccggcgcaaacaacaaagtcaccgccaatcttactgcagtcatctacgaagccggtgttattgatggatgcagccgaacggttggaaatcttctttacacgggtgcaacgaaataccctgcaaatgcctt

SEQ ID NO: 20713 - DNA, 382 bp, Glycine max
  Clone ID: LIB3106-061-Q1-K1-F1
ggccatataatttttttttatttgaaataatgtccgggatcatccacaagattgaggagaccctgcatgtgggagggcacaagaaagaggagcacaaaggataacaccatggtgagcacaaaggtgaacacaaaagagaacaccatggtgagcacaaaggtgaacacaaaggagaacaacaccatggggagcacaaggggggaactggggataagatcaaagacaagatccatggtgatggccatgacaagggtgagaaaaagaagaagaaggacaagaagaagaaggagcatggacatgaccatcatggtcatagcagcagcagtgacagtgattagatcttatatgttaagcaggtgtacggtacgatggtagtgaggag

SEQ ID NO: 20714 - DNA, 411 bp, Glycine max
  Clone ID: LIB3106-061-Q1-K1-G8
cccacgcgtccgggattgtgatactggatataaccaaggatgcaatggaggacttatggactatgcatttgagttcataatcaacaatggcggcattgattctgatgaggattacccataccgtggtgttgatggtagatgcgacacatataggaaaaatgctaaagtcgtttctattgatgactacgaagatgttcctgcctatgatgagttagccttgaaaaaggccgttgcaaatcagcccgtgagcgttgctattgaaggagggggcagggaatttcaattatatgtatctggtgtattcacggggagatgtggcacagcactagatcatggtgtcgtggctgttgggtatggaacagctaaaggtcatgattattgcatcggaaagaattcatggggttctagctg

SEQ ID NO: 20715 - DNA, 193 bp, Glycine max
  Clone ID: LIB3106-061-Q1-K1-G9
gtcacgcgtcagcgcagtggaatatatacttttaagcaaatgcgaaagcatggtgttcaggagacatacgacatcatgagaaaggaggagaacacgatgtggcaaaatatgcctatggcatactgaatctgtatgaggaccatctacaccatcgaggaacaacgcaaagcgcacgcactatacaacagaccaa

SEQ ID NO: 20716 - DNA, 400 bp, Glycine max
  Clone ID: LIB3106-061-Q1-K1-H1
cttaaggacaaggatcacgaccacgaccaccataacttttgatccttataaattggcataccctttgctgctgctctttacccatccattcttcaaatggaaaagctccatgcttctgtgctcgcccttgtattccttcttgtcatactatttcaggaaggattggtaacatgtatgaagaatgaagacggatcagaagaatggggatatgtgcaagttagaccaaaagcccacttgttctggtggctttacagaagtccatacagagtggagaatccctccaagccttggccaatcattctctggcttcaaggaggaccaggctcttcaggagttgggtttggaaattttggagagggtggtcctttggatgctaatttgaagccacgaaatttcacat

SEQ ID NO: 20717 - DNA, 313 bp, Glycine max
  Clone ID: LIB3106-061-Q1-K1-H10
gccacgcgtccgctcaaaggcccacgattcctcactcttcttccatagcctgcggccttgagtctcatctcctggtctccagtgagatgaaccctagctccaattggtcccattaggtacctctttcctgcatgtgatatatcccattctttctcattcacacagcatcatgggcgtcaaaggttttgttgaaggaggcatcgcttccatcatcgcaggatgttccaccacccgcatgggcctctacgacgtgctcaagaccaagtggaccggctccgtcaccgggaccatgccactcggaaaaaagatcgag

SEQ ID NO: 20718 - DNA, 310 bp, Glycine max
  Clone ID: LIB3106-061-Q1-K1-H11
gtcacgcgtgcgctcaaaggaggacgaggcctcactctacttccatagcctgtgggcatcagtgctcatctactggtcttcagtgagacgaaccctagctccaattggtgccattagttacctcggtgctgcatctcatatatcccattctttctcattcacacagcatcatgggcgtcaaaggttttgttgaaggaggcatcgcttccatcatcgcaggatgttccaccacccgcatgggcctctacgacgtgctcaagaccaagtgtgccgactccgttagcggcaccatgccacttcgaaaaaagat

SEQ ID NO: 20719 - DNA, 351 bp, Glycine max
  Clone ID: LIB3106-061-Q1-K1-D3
cttgggactcggtcctcttattcgcgacggacattctcgccgttgtgtgctacatcgcgagcggttgctcgacatcggatagggcggctctgctggccttccagaaggcgctgagcgagcactaccttggactcttcaactcgtggacgggtccaactgctgcctcgactggtacagcattagctgcgacgcctccaccagacgaggaaccgacataaacctgcggggggagtccgtagaccccatcttatagaaagcctgtcggtccggctacatgaccggaaaactctcagaggcgaaactgggtatgtacaccctcaccaccctagtcgtcgctgattggaaagacat

SEQ ID NO: 20720 - DNA, 425 bp, Glycine max
  Clone ID: LIB3106-061-Q1-K1-D4
gctgatcgcaatgttatcagctgcaaacaatctttagtctcccatttacacatggaaatcccagatcaatctgtctccttatcagatctagctcgcataggccattgagaaacacaagaaagacaccactcaaaacacaaatgatcaaaaccaagtgtaaatgggagactaaagattgcttgcagctgatcgcaatgttatcatttgctaatcatttgtttgagtgctgaactagattttatctcgttccacgtgtattggataaatatgttaaaacagaatataatagtttgacacatgcaatttgttttgcatgcaccacaaacaattatatcgtgcatgtccaagtaaaagtaagagacgtgatgagtagaattaattttaaaatctctcgtgtcattttttttttctggcacatgtgcaca

SEQ ID NO: 20721 - DNA, 336 bp, Glycine max
  Clone ID: LIB3106-061-Q1-K1-D5
ggtggctatgggttggatcatgctaatcctccttatacgcttatttacatgaagcttgtacgtctactggcgaatcaattagggtcaaggacccattatgggataaatgtgagctcaagaccgactaataaatcctttcatgactcctcattactgccgagctcacatttatctcatactgactctaactgcattctaccaaatcaacttataaaaacaggattatatccacttatatattctactttgactatatcaccatgtgaggctagatctacagtgcatccaagaatgaaacatcttatatgacaactggcatagcttacacatgcgtag

SEQ ID NO: 20722 - DNA, 87 bp, Glycine max
  Clone ID: LIB3106-061-Q1-K1-D6
ggaatgattgcattcaaaccagttttcctgttttctgtgtaatggttacccttaaaaaaattctggtctttgtgtgctttggctact

SEQ ID NO: 20723 - DNA, 425 bp, Glycine max
  Clone ID: LIB3106-061-Q1-K1-D7
acgccataacctaaatctcctctttgtttacaggtcagagagcgatggcacgtaccaggcaaaccgctccgaagtccaccgggagcaaggcgcctaggaagccattggcgactaaagccgttaggaagtcaggtcctgacaccggcggagtgaaaaatccccaccgcttgaggcccggaatcggggctctgagggagatcaaaaagtaccataatagcactgagcttttcatccaaaaactcgcattccagatgctcgtcggagaaatcgctcaagatttcaaaacagatcttcgattccagagcagcgctgtttctgcgcttcaggaagccgcagaggcttatctcgatggactcttcgaggacaccaacctctgcgctattcacgccaagagagtcaccattatgcccaacgttattcaactt

SEQ ID NO: 20724 - DNA, 391 bp, Glycine max
  Clone ID: LIB3106-061-Q1-K1-D8
ggattacaacaacaacaacaacaacgccttatcccactaggtggggtcggctacatggatcaacttccgtcataatgttctatcaggtggaatactatggaagtccagttagcttgaagagcattgctcaaattagcactcctgatgccagttctcttttggtacagccatatgacaaatcaagcttgaaggctatagagaaaaccatagttagctctgatcttggtatgactccaaataatgatggagaatcgatacaattgagaatcccacagttgacatctgataggaggaaggaactatcgaagatagtggctaaacaagctgaagaagggaaggtggctttgaggaatataaggagagatgcattaaaagcttatgataaacttga

SEQ ID NO: 20725 - DNA, 248 bp, Glycine max
  Clone ID: LIB3106-061-Q1-K1-D9
cggacgcgtgggctagttctagatcgcgagcgccgccctttttttttttgattttttttttgtttttttttttttttttttttttttttatttttttagtttttttttttagttttttttttttatggttaatttttttgttttattatggatggtacacttacttttaattacaatatttgttttaacattatcgtttttgccacttggtgacatgagaaattttgggagttgtgtattgaaatgag

SEQ ID NO: 20726 - DNA, 285 bp, Glycine max
  Clone ID: LIB3106-061-Q1-K1-E1
cccacgcgtccggaagaagcctgttgtggagaaagaagctccagggcatgccatatgagggcatgcacgtacggcctcggaggggaaccagaaaattatgttaacaaaataatctggaaccctaatgtatcagtgtcatcatcagtgtgtagtttaagctagctttgctatggttacgttctttgagatgagagtcttgatgaacagtaccattctgatgtattgctttccttgaaagttaatgcatgcttcttatattctgtctaataaaaaaaaaaaataaaa

SEQ ID NO: 20727 - DNA, 330 bp, Glycine max
  Clone ID: LIB3106-061-Q1-K1-E10
cccacgcgtccgaaaaaattaaattcttatcatttacagaatatggagtgccagactttcacacgagagaaggagtctgtcaatctcagggaagtcccagaagcagataaaaccttgggcttggacatggccaagggcagcgcattctgcaagatgggtgaaggttggacatgtatcataactaaaactgaggggcctgatgctggcaaagttttcgttaaatgtggtgaaaattgcacctgtaccattgagggcgaagcagtgttcgaagaattgaatgtgccacctggtgttgtgagcagcaatggcagtggagcatgtggcaagtgt

SEQ ID NO: 20728 - DNA, 306 bp, Glycine max
  Clone ID: LIB3106-061-Q1-K1-E11
attaagtggaaccttctgcgaaattagccttcgatggtcccttgattgaagtataaattagggtgttgaaattcaaagccatatccgtgattaaccaaatttgtgtttctctgattgcaagcgatggactccttcaattccttcttcgattcaacaaaccgatggaattacgatactctcaaaaacttccgtcaaatttctacggtcattcagaatcacctcaagcaggtttattttactctgagattcgccgtggatgctgatgatgatggggcttaccttcatgtcctcttgaacattgagggt

SEQ ID NO: 20729 - DNA, 328 bp, Glycine max
  Clone ID: LIB3106-061-Q1-K1-E12
cccacgcgtgcgctctctgagtatctctcttccgccattgatgtaaagatactatagatcgtgctgagaatgagaatcaacgcattctgtgtctccggctgtgcttgtatatattcttcttttgttaatccacatggtgcgctactgcaagattggaagcttcggaagcataggtttagcttgaagctcacggcatttcctttgaattcgagttgcaggaagaggaggacaactttcatatgtgcagccaatcaagaagccgatgttgcttttaagaagactgatgaagatgataggctcatagatatgctcatagaatggaatcctc

SEQ ID NO: 20730 - DNA, 407 bp, Glycine max
  Clone ID: LIB3106-061-Q1-K1-E2
ccagcgactgacttttcgagaaagaaaaacaaaaatgagtttccggcattccatcatgaacgctcttcccattctcctcttcttcctcttcgtttctgcattagcttctgcgaagaaaactggtgatgtgacggagctgcaaattggcgtgaagcataaaccagtatcatgtgaagttcaggcacacaaaggtgacagagtcaaagtacactatcggggaaaactcactgatggaactgtttttgattctagctttgaaagaaataatccaattgaatttgagcttggtactggtcaagtgatcaaaggttgggaccagggattattgggaatgcgtcttggtgagaagcggaagctgaaaataccatcaaaacttggctatggagagcagggttccccacccacta

SEQ ID NO: 20731 - DNA, 417 bp, Glycine max
  Clone ID: LIB3106-061-Q1-K1-E3
ttcttgtctaaaataaaaaaccctaacttctgaacctttcaccggatattcaccgattggctatctccactaatcaaagaaaagaaaatgagtagacgctcgagcagaactgtctacgtcgggaatctacccggtgatatccgtgaaagagaagctgaagatttgtttctgaagtacggacacataacacacatcgacctaaaggttcccccaagaccacctggttatgcatttgtagagtttgaagatgctcaagatgctgaggatgcaattcgtggtcgtgatggctatgattttgatggccaccggttacgggtggagcctgcccatggtgggcgtggtcatttatcctcaaaagatcggcacaatagtcacagcaatggccgaggtggacgtggcgtatctaggcgctctgaa

SEQ ID NO: 20732 - DNA, 94 bp, Glycine max
  Clone ID: LIB3106-061-Q1-K1-E4
ctgagtttaaaaagcattcttttccaaaaaattaaaaacaaaaaatgcatttatagataattctttaataaataaacagactaccattatgctt

SEQ ID NO: 20733 - DNA, 290 bp, Glycine max
  unsure at all n locations
  Clone ID: LIB3106-061-Q1-K1-E5
aaatttaagggttcgagcatgccgtctcaggggatgctcgctcgggctgcttacggaacttgatatatgaccttgccaaagagtgctgggctaatgtgctctagtgtcctgatgtgcgcgcgacttttaatgatgatgctacggtccccatcatagggctaatagacgtgcaggacaagaggggcctgatgaatctgtattgcttggggtcaatagatgcggcttgttgcttgtttggaagacgcangctaagccatacagaaatacgtgacatatatggcacgcggcat

SEQ ID NO: 20734 - DNA, 415 bp, Glycine max
  Clone ID: LIB3106-061-Q1-K1-E6
cccacgcgtccgggcattggagtcgccatacccctgagggtgctaaacttgaagctgagtggaatgccaagtttgcagaatatgagaagaaatacagtgaggaagctgcagagctgaaggctattattactggtgaattaccagctggttgggagaaagcacttccggtgagtaaactaacaaacttccaggtttctcttaatatttattctgggctaaatctccttattagttgaatgatgtctaatccaattttattggtgcccttataatgagaaaaattctgaatggtggtgatttgtttccatgatttgttataatcattagctttcctaattacagttaaaattcatattaagtagcatgtgcattgcatcttcactcatcatccctatttttgcttcatgataaaact

SEQ ID NO: 20735 - DNA, 399 bp, Glycine max
  Clone ID: LIB3106-061-Q1-K1-D2
atttgacatacgttgacgcgtgcacaatgcatattcaaaattttggatatgacataacatatgtcttccccattatgctgcattccacttttgacttgaaccaaatgctaactaccttataaatacggtcgactcaaaattgtctgtcgttgtcttggacttcggcgcttatatgaaatatgctgttgatgattttgagaaagcatgacttgcattagttacgctgatttggtaattagtctaagcgtgatggcatgtataattgattgactggctttgcaaatcacatgccgtatttaaatgacattgtcgactactactctagcgattcattcctcttggattcattcccttgctatgtgaactaacttttggttgattacccctcatgtttgatga

SEQ ID NO: 20736 - DNA, 382 bp, Glycine max
  Clone ID: LIB3106-061-Q1-K1-E7
caattcttcttctcatcacttctttttccacaaaaaagaaaccatggaagggagaacgggactcttgtttcttgctgtattaagtgctgcttgggcatgtgattcaagggaactgactaactctgaactaagcataaagccggatgtgtgtgcactttgcgaggaatatattaccaaggcacttgattatctacatgaaaacaagaccgagacagagatcattaatatgctgcacaacacttgccaccagcttccctctttcaagcagaagtgcgttgctttggtggacttttatgctcctctgttcttctctgaagtagctacaattcagcctggagaattctgccacaaggtcaatctctgtcagaaaattgcatatatt

SEQ ID NO: 20737 - DNA, 368 bp, Glycine max
  Clone ID: LIB3106-061-Q1-K1-E8
gctgttcattccacagatcctgttgctttatatcaagttgacaaggtgctactgcctgaggccatttttggcactgatatacctcctgcacctgctcctgcaccaactcctgatattgcccctgctgctgattctccaactgaacacagtgcagatagcaaagcatcatctccatcatccactcatgatggctcctcttctcacaagctcatcagctatggaatctgggccaaccttgtcttggcaacttttggtgtgctggtgctcttctgatggcactcttcctattggatattcaatttagactacgtttatgtatctacatacgctgccacatgctttgatttagaatgcaaatcctggaacat

SEQ ID NO: 20738 - DNA, 260 bp, Glycine max
  Clone ID: LIB3106-061-Q1-K1-E9
aatcactatagcactagaaacatttgcttttgaaaaacccatgacgcttgattactgcactagctagccacatacaatgtcgaccaaatttaaggtgcttcgtgaattcacaagcgatgactgattgctaaaccaagatatgcctgaaaacatcatcgaattccaagagactctgtatctagctagagactactatggcaacaactgaaccaacggaaaggtcattccttactgggacactgaaaaggtcactcccgaag

SEQ ID NO: 20739 - DNA, 412 bp, Glycine max
  Clone ID: LIB3106-061-Q1-K1-B8
cccacgcgtccgcccacgcgtccggttactggcaaaggcttatgttgttgtgaatgatgcatgctaccatcaaatcattagccattggctaagcactcatgcaattgttgagccatttgtcatagcaacaaacaggcaactgagtgtggttcaccctatttacaaacttctgtttcctcactaccgtgacaccatgaatattaattcacttgcccggaaagccctggtcaatgcagatggtattatagagaaaacattcttgtggggtaggtactctatggaaatgtccgctgtcatttacaaggactgggttttcactgatcaagcattacctaatgatcttgtaaagagaggagttgctgttaaggacccatctgctccccatggagttcgtcttttgattgaggactat

SEQ ID NO: 20740 - DNA, 350 bp, Glycine max
  Clone ID: LIB3106-061-Q1-K1-B9
gttaataaagaatggcaacaatagctactagtggtgtgagtctttcaagccctagcacagtacttgctatgaaatcagactcagcacaaaaggcccaggccatgagcttgccagctctgttcaggcccattcaaaagtggcccggtttggtgaaggcccggcccgtttgggccacgccggagaagatatcggagaaggtggaggagagcatcaagagcgcggaggaggcgtgctcgggagctggcggcgacgcagagtgcgcggcggcgtgggacgaggtggaggagctgagcgcggcggcgagccacgccaaggagaagctgaagcaatctgacccgctcgagaactac

SEQ ID NO: 20741 - DNA, 381 bp, Glycine max
  Clone ID: LIB3106-061-Q1-K1-C1
tcgaggcaggcgtacgcgcacgcttcctacaaaataaaaaaatcattgactttcttacgttgaatgaccaacaacacacgtggtgtgactgtgtatacactacgggctgttagtatccttcctactttaccaccacctgatggccataccactgctgaagatctgccttgcctaaacaacgatcctgtttataccactaccatgggctgtggactatggaccggaccatgcacagaacttcgctatagtggatgttacattcactgtgggcaagggcacttatccggctgaacatccttacaacttatcacagctagctcgtgaaacatcactttggtattgaagtggcggcctcagcataatatgaatgtgaagttagca

SEQ ID NO: 20742 - DNA, 408 bp, Glycine max
  Clone ID: LIB3106-061-Q1-K1-C10
cccacgcgtgcggccattattcttcttccgaccatccccaagaatgcttttctcacccttgctcactgtcactttcttcctcctcttctcttcttccgttgctgcgatttactcagcggcaacatgttctaacatagtgccgctgagataccgcagcgacagaatctccataacggacttcggtggtgtcggcgacggccgcacgctgaacacgaaagcgttcagagcggccgtgtaccgcattcagcacctgagaaggcgcggcgggacggtgctttactggcctccgtgggtttacttaacggagagctttaacctcacttgccacatgacgctttatctggctgctggtgctgttatcaaagccacgcaagagttggggaattgggctttaattgtgcccttacc

SEQ ID NO: 20743 - DNA, 371 bp, Glycine max
  Clone ID: LIB3106-061-Q1-K1-C11
cgagataactagaaacagtgtgatgaaaatgaaggtccttgttttcttagttgatacaatgatggtagcatggcaatgccatgcgtacgatatgttccctctccgaatgaacactggctttggtgcccgtactccggaggtgaaatgcgcaagttggaggcttgctgtggaagcacacaacatctttggctttgagaccattcctgaagagtgcgttgaagcaacaaaggaatacatccatggcgaacaatatagatcagactgctaaacagttaaccaacaagcttacttttatgccagatacctagaatttcatcttaaggacacattttgtttcagtatagattggattcgtacttttttaatatttc

SEQ ID NO: 20744 - DNA, 332 bp, Glycine max
  Clone ID: LIB3106-061-Q1-K1-C12
gacgaaacagagggattataaaaagagaagttactcgatagttcaaatcagaagatggttcctgtcacaccaactcaataacagatcaaaccaaacccaaactgttaggtttactttgtttggtgtgaagccatggctgattcttcttccaacctgaaatccgacgcgataatggagcagatgaagcaacacctcgccaccgacgctggcaaacaagtcaccaataaaattggactcgtttatcagtttcacattgctcctaagaaacgtggattcgacgatgtcgtctacaccgttgatcttaagaaaggatgagtcaccaaagggtcata

SEQ ID NO: 20745 - DNA, 416 bp, Glycine max
  Clone ID: LIB3106-061-Q1-K1-C2
cccacgcgtccgcccacgcgttcgcccacgcgtccgtccacgcgtccgcaaatatgttataaagtaaactaaaaaggagactttcatggtcttcattcacagtgcagcctcttcttaagagtagctccatctcttccagctttgtgggaatttgtaacagaaagacgagcaagcggttaaagtatgaattctccgaaaaagaaaaaagcgaccatagtttcacttcggccttatccagtttaggggttcggttctctaccctatctttcacgtatcgaaaccttatatttacgatcaggtctgagcactctgcttgtgagaacctttggtcttagtgagtcaagttttatgtctgaattagacgatcatattcctactgccttcgatccttttgctgatgcacatgctgatgactc

SEQ ID NO: 20746 - DNA, 406 bp, Glycine max
  Clone ID: LIB3106-061-Q1-K1-C3
gtatagaatagtgttttagaaagaagagtgtctagcattttgaataaatatgtgatccaagtccatgaataggcctgattgttatggggtggttggattcactatggagaagaggacgaaagtttattaaaaggaaagacagtgatgctggcgatgcaggtagagcactggaagaactcagagcttctctctacaatgagattcgaacctcagaaggagccaagcgtcaacagcaaagatattgtggaccagtggtggcactgtccttcaattttatggttgctgttgggattatcatggcaaacaaattggtgatgggtaaagttggcttcaacttcccaattttcctgacatttgtacactacatcactgcatggcttcttcttgccattttcaagacactctc

SEQ ID NO: 20747 - DNA, 407 bp, Glycine max
  Clone ID: LIB3106-061-Q1-K1-C4
aaaacgttacatcgttgcaacttcctagatgggttaattgaaagatgtagtgggcaaagtgtctgtgtccaaagattgtatcagccaactagatgttgctagctaatgcaagatttgttagctgatatatagcactttgaagaacttttcagttagcagtcacccgtggaaggcttgggttatcaaacaagtttcttggaagcttcctgattatccttttggataaaatgtaatacagacggtgcagctaaggggagtcctggtttggcaggttgttgcggattgttcatacagtaaaggagtgaattcagctttctttgctgaggtaatggcagcaattattgcaattgataagcctgtggaaaatagatgggatttcttttggctgaaaacttattcaagcttac

SEQ ID NO: 20748 - DNA, 277 bp, Glycine max
  Clone ID: LIB3106-061-Q1-K1-C5
acgctacctacaaaaaaaaaaaatcatctaacgttctaacgatgaatcaccaacaacactcggctgtgactgcgtatacaccacgggctgatatcatcctaccatctccaccaccacctgaaggttataccactgatgatgatcttccttgccaacaaaacgttcctgtcaaaaccactaccaggggtggtggcttatggagcggacgttgcacagcactccgctatggtggatgttacatacactgtgtgcaagggcgcttatcctgttgaacatc

SEQ ID NO: 20749 - DNA, 391 bp, Glycine max
  Clone ID: LIB3106-061-Q1-K1-C6
acgctgcagcattagggtttatcatctgcttcaatggggaagggaacagggagcttcggtgggaggaggaacaagacccacactctctgtgtgaggtgtggccgccgcatcttccacctccagaagagtcgctgcgccgcttgtgctttccccgctgcacgcacgcggaaatataactggagcgtcaaggcaattcgcagaaagaccaccggaactggcaggatgagatacttgcgtaacgtgcctcgccgcttcaagagtggcttcagagaaggtaccgaagctgcaccaaggaagaagggagcagctaccactgcatagacctttcaaagatcgttctcggtgggtacggatttacaggaatagattgctttttgggcttttggcaagt

SEQ ID NO: 20750 - DNA, 391 bp, Glycine max
  Clone ID: LIB3106-061-Q1-K1-C7
aggagatggctctgggaagaggcagtgcagaggttctactactttgcttcttgctgcttcactctcagatggctcgtgctgccacctacacagttggagattctgggggttggacctttaacactgttgcctggcccaaaggaaagctctttcaggctggcgacacacttgctttcaattatagccctgggactcacaatgtggtggccgcgaacaaggctggatatgatatgctgcaagactccaagaggagccacagcgtataagtcagggacggatcacatcacacttgccaagggacagaactacttcatctgcaattatgttggtcactgcgagtctgggatgaaaattgccatcaacgctgcctgagtttaataatatgggtaac

SEQ ID NO: 20751 - DNA, 415 bp, Glycine max
  Clone ID: LIB3106-061-Q1-K1-C8
aacaaatcaaagccatggccacctccaacttctctattgttctctccgtctccctagccttctttttggtgctacttaccaaggcacactcgaccgataccgtttctttcaccttcaacaagttcaacccagtccaaccaaacattatgctccaaaaagatgctagtatttcatcctctggggtgttacaactcaccaaagttggcagcaacggcgtgcccacctcgggatctctcggtcgtgccctttacgctgccccaatccagatttgggacagcgaaaccggcaaggtagccagctgggctacatcctttaaattcaacattttcgcacccaacaaatcaaactcagctgacgggcttgccttcttcttggcacccgtcgggtctcagccccaatccgacgatggatttct

SEQ ID NO: 20752 - DNA, 258 bp, Glycine max
  Clone ID: LIB3106-061-Q1-K1-C9
ggcgacgcagagtgcgcggcggcgtgggacgaggtggaggagctgagcgcggttgtgagccacgccagggagaagcagaagcaatctgacccgctcgagaactactgtaaggacaacccggagaccgatgagtgccgcacctatgataactgaactcatgcatttcaacgtttcaatgtatatctattattctaccttctgttacatcagagacaccatgtattattattattaattaattcttattcatagtaagaa

SEQ ID NO: 20753 - DNA, 425 bp, Glycine max
  Clone ID: LIB3106-061-Q1-K1-D1
cccacgcgtccgcccacgcgtccggtgcgatcactcatctcacctcttctcatcaacgctgcgaaagacaatggagctgacaccccagcagctgagccaatacaacggcacggacccatcgaagccgatctacgtggcggtgaagggccgcgtctacgacgtcaccaccggaaaatccttttacggccccggcggcccctacgccatgttcgccggcaaagacgccagcagagccctggcgaagatgagcaagaacgacgacgacatctccccctccctcgacggcctctccgacaaggagatcggcgttctcaacgactgggagaacaaattccaagctaagtaccctgtcgttgctcgcgttctcaattaatcatatgataacctaagtgtattttggactctatcatgtgagtggcatgatc

SEQ ID NO: 20754 - DNA, 345 bp, Glycine max
  Clone ID: LIB3106-061-Q1-K1-B7
acgcccacgcgtacgaccacacgtccggtctatcattaacaggcatatcttctacaagaccgtaaacgacaagaccatcacccttgacgtggaaagctctgacaccatcaacaacgccaaggccaagacccaggacaaggaaggaattcccccagaccaggaacaactcattcacgcgaggatagcaacttgaggacggccggacccttgctgactacaacattcagaaggagagtactgttcacctcgcactgcggctccgaggtggcatacaaacctgtaatcagacactaaccggctagagcataaccctataggtcgcaagctccaacaccatcgataacg

SEQ ID NO: 20755 - DNA, 153 bp, Glycine max
  Clone ID: LIB3106-061-Q1-K1-D10
gttctagatcgcgagcggccgtccatttttgttttgatcatacccaattcttgaatatgtattcaatttttaggacaatgtttgtaatatactatgttggtggtaaaagattttatttcttttcttttgtccttaaaaaatttgtgttatgag

SEQ ID NO: 20756 - DNA, 176 bp, Glycine max
  unsure at all n locations
  Clone ID: LIB3106-061-Q1-K1-D11
caacctggttcccaaccccagatgcgtgaccagttcttgctcncttctcttgtattatggtagctcctcaatagctgctaatgtggtccaagacacagttactctagccactgaccctattcctgactacacctttgggtgtgttgcaaagactactggggccagtgcaccaccac

SEQ ID NO: 20757 - DNA, 377 bp, Glycine max
  Clone ID: LIB3106-061-Q1-K1-A1
tttaaggttcactcctatcgcatagcacccactggtgttgacaccagaatccattgggaaaacgaagatgaaggttggatcggaggtaccaataccaaacaccaacaaacccacagacccaatagcatgttacaggctgatgactttccagatctcctctgtgcttctttaggttctcattacgaattcttaggcgtatgaccagatgcggatttagaagaaattaaagttgcttatcgaaaactgacaaaggagtatcatcccgacacaacttccctacctgtcaaaactggctcagaaaagttcatgaaattaagagaggtttacaacgttcttagcaatgaagagagtcagaaattctatgactggacccttgc

SEQ ID NO: 20758 - DNA, 310 bp, Glycine max
  Clone ID: LIB3106-061-Q1-K1-A10
agatcgagtaagaagtagaagattgtcaaaaatgataagtttttctctcgagcccttatttatggattcctttccaaaattgaacatttggtatcggcaacatcaataatgtattgctttcacctgcaatactcttgcacctggagggccagtttctcagatcgttgaagcactacttagcatgatgtgcaagaaaataaatagaagtgctcagtcattgacgcctacaacttcaagaagcagcaattcatctctttcttcattggatgatgctatgattgtactcaaagtgcctgcatgggacatcctt

SEQ ID NO: 20759 - DNA, 167 bp, Glycine max
  Clone ID: LIB3106-061-Q1-K1-A12
attactccctcttaccctcaaaaccctaaccctaaccctacttcttatcttccccttaacccttccggggtagatccccaaaccccattgaaccctattagctatgcggctcatgaacccgttcctggtttggtattctctcaaagccttttttgggaagattcatt

SEQ ID NO: 20760 - DNA, 368 bp, Glycine max
  Clone ID: LIB3106-061-Q1-K1-A3
cccacgcgtacgatcgagcatccataaaaaacacctgccctggtgacgataacatactagaagaaagagaagcattatcatcatatatctgctgcttcacactacagtagtgctagcgaataaagctggacccactattcggaccaaccatagctgcataaaaattactaccattaggcaaggtagtgctgtggagtgtgaaggaaaacgagcatgaatggaagagtactctgaggaagaagagtccatgatccctgacgcttcttgtgaacctgcacattatgataatgattgctatcgacagaatcggaattctagacttgcttccatagccaaagcatcccaaaagatgatcatgtgagtcaaag

SEQ ID NO: 20761 - DNA, 411 bp, Glycine max
  Clone ID: LIB3106-061-Q1-K1-A4
gagataactagaaacagtgtgatgaaaatgaaggtccttgttttcttcgttgctacaattttggtagcatggcaatgccatgcgtacgatatgttccctctccgaatgaacactggctatggtgcccgtactccggaggtgaaatgcgcaagttggaggcttgctgtggaagcacacaacatctttggctttgagaccattcctgaagagtgcgttgaagcaacaaaggaatacatccatggcgaacaatatagatcagactccaaaacagttaaccaacaagcttacttttatgccagagacctcgaagtccatcccaaggacacatttgtgttcagtatagatggcaccgtactctctaatattccatactacaaaaaacatggatatggggtgggagaaatttaactc

SEQ ID NO: 20762 - DNA, 258 bp, Glycine max
  Clone ID: LIB3106-061-Q1-K1-A5
acgcgtccggttcactacctatcgcaaagcaaaaactggtgtcgactcgacaatacaatgcgaaaacgaagaggagggttgtatcgaaggtcccaattccaaacaccaccttaccgacagaccctatagcatgtgacaggcttatgaccattcaaatgtcctgtgtgcttaatcacggtggcatgacgaactcttaggcgtgtgaaccagatacggcttgagaagaatttaactttgctcatcggacactgtaaaaag

SEQ ID NO: 20763 - DNA, 410 bp, Glycine max
  Clone ID: LIB3106-061-Q1-K1-A6
catctttgctattacctctttttccaaactctaaaaatttttagttccacaaaaccaaaccaaaatggcaggagcctgggcctcatccaccatgatatcaacaccagccttatctccaagcacaagcatccaaaagcaccatcatttgaagccatccaacgtgtgctttcaaggccttagacccctcacaaggttcacaaccaaagtgagcagcaccaccaaaagggttattccaaagggtggtgtcggtgttagagctgaactcaactcagcacttgtcataagcctcagcactgggctctccctcttcttggggagggttgtgttcttcaacttccaaagggagaacgtggcaaagcaagtgcctgagcagaacggactcacacactttgaggctggtgacacacgtg

SEQ ID NO: 20764 - DNA, 144 bp, Glycine max
  Clone ID: LIB3106-061-Q1-K1-A7
gcgctccatttgacacaggcctagtggagtactacttattatggcgcacaccagcatgcatgactaatgtgactgcggagtcccttcaattccccacactgtttacacctggttgctctaccagctcatattcccatggcggcc

SEQ ID NO: 20765 - DNA, 406 bp, Glycine max
  Clone ID: LIB3106-061-Q1-K1-A8
gaaagaatgggcaaagtttcaattccagtcccgcaaaacggtttctccatacgcaatgtctcaacgtccaaacgctcatgtttcaccccttcaccttcaacgctcagaatttcttgctctggagtagctgagttagatggatctcatgagaataagggaggtttgtttaatttcaatggaatcaagggcgtggcttgtggtattcttgcagcttgtacggttacttctgctgcatttcccgttactgctgctacccagagacttcccccattgtcaactgagccccatcgctgtgagcgtgcatttattggcaacacaattggtcaggcaaatggtgtatatgataaaccattagatctccggcaatgtgatttcacagatgaaaaaaccaacctgaaggggaagt

SEQ ID NO: 20766 - DNA, 277 bp, Glycine max
  Clone ID: LIB3106-061-Q1-K1-A9
cccacgcgttcgggaattcgttttctgtgatcgggatctggaatggaagcgaatcgacatgggtttcttggtgacgacgctgatcttcgtagtgatcggaatcatcgcgagcctctgcaccagaatttggtgcaacagaggaccttctaccaatctatttcaccttactttggtaattactgcaacaatttgctgctggatgatgtgggcgattgtatatctggcacaaatgaaaccactcattgtacctatactgaacgagggcgaataattcttt

SEQ ID NO: 20767 - DNA, 373 bp, Glycine max
  Clone ID: LIB3106-061-Q1-K1-B1
gctggtcacatggtcactatggatcaaccaaaaactgctctagagacgctaacaagctggatgcatgggaaactgacaatgacaaagagtggagataatgtctctcctaaatgatgcactcacagcacaaaaaccaaaaccatccctctattgctgcatagatattgatgtcatttccttgtgtatactgggagggtggaatgtaattctttttcttttttcttttttttttctttctctagtttctcttatccctgaccattgatggatttggaactaatcatctatcattgccaccaaatcacgcacaactttacacttgtaacctgatttcaatcaaagcaaatttcaattcttgaaaaaaataaatttc

SEQ ID NO: 20768 - DNA, 198 bp, Glycine max
  Clone ID: LIB3106-061-Q1-K1-B10
gtagctcataactaagaacgagaagcaaatggctcgctaaatgaactcttccacagctgttaccactgtcaaccgtaccggtaccggcatggttgctgcattcactggtctcaagttcatggctggattacctaccagaaagaccaacgatgacattacctccattggtagcaactgcggacgagtgcaatgcatgca

SEQ ID NO: 20769 - DNA, 240 bp, Glycine max
  Clone ID: LIB3106-061-Q1-K1-B11
tcgcagaatacaaggcccagtgctgaagaccttcctgaggatttagctctgattgtaacttgatgttggaaagaggatccgaatgatcgaccaaatttcagtcaaatcatacagatgctccttcgatatctatgcaccgtttcaccaccagaaccgagtgttcctctgctgattacttcatctgagaacgcggtgttgccaccagaatctcctggtacaagtgcattaatgcttggaaga

SEQ ID NO: 20770 - DNA, 275 bp, Glycine max
  Clone ID: LIB3106-061-Q1-K1-B12
ggactgtatgactgctgactttggttactttgagttcatgtccttaattttgttctgttcataggacctagattatggctgctataagagttgtggccaatatgatctagatgttgaatctatttcaccaattcaaccaagaaattgccgaacaaacaggaagcggcgtgggaacgactttcaaagtgaaattctcccgagccttgcttctctgtcgcggtacgaggtaaccgaagatcttcaaacaatcggaggtctcttggaagaggccagaa

SEQ ID NO: 20771 - DNA, 264 bp, Glycine max
  unsure at all n locations
  Clone ID: LIB3106-061-Q1-K1-B2
cccacgcgttcgcccacgcgtgcgtgtttatttatttttcgatatacactaacaaaccacatgaataggtagnctgactgtctcgattaacccctttaccttctaccctcaaaaattcactctctgctcaaagaccaaaaccatccctacataggagcataaatatggcgggagcccattttggtttcaatagaaagactgtggaatgccatgaatcacgacctgggaatcatcctatttctgtgccattcaacgtgacccata

SEQ ID NO: 20772 - DNA, 117 bp, Glycine max
  Clone ID: LIB3106-060-Q1-K1-H9
aaaaaaaaaaaaaaaaaaaaaaaaaaataaaaaaaaaaaaaaaaaaaaaaaaaaaagggaaaaaaaaaaaaaaaaaaaaaaaaaaaaaaaaaaaaaaaaaaggggggtttagttcgg

SEQ ID NO: 20773 - DNA, 343 bp, Glycine max
  Clone ID: LIB3106-061-Q1-K1-B3
cccacgcgtccgcccacgcgtccggagcaaagaatttatctatggactcataccaacgacgagtaccggaaatactccattctctggaacttggatcagattgtgttctttgtggacgaggtgcgcataacggcgttcaagaacagcatggacttgggagtgaaattcccattcgaccaggctatgaagatctacaacagatggaggaacgcttatgactgggcaacgaggggtggattggagaaaacggattgtgcgaatgcacccttcatagcaccttacaacgggtatcacatcgacgggtgcgaagcttttgggaacgccaaggtctgcgacacgcaag

SEQ ID NO: 20774 - DNA, 392 bp, Glycine max
  Clone ID: LIB3106-061-Q1-K1-B4
cagaaacaacaaacacaaaccgaaaaggcgaaaggggttttccgagtgagatctaggggttccatcgattcggagagaggatattgatcgaacgacctcagcgagcaaggacaggaggtggagtactagatcatggattcggtgccttcgaattcgcatggaaacctcgatgagcagatttctcagctcatgcagtgcaaacccttgtccgagcaagaggtaagggtcttgtgtgataaggcaaaagagattttgatggaagagagcaatgtacagcctgtgaaaagtcctgttacaatttgtggtgatattcatgggcaattccatgatcttgcagagctttttcgcattggagggaagtgtccagatacaaattacttgtttatgggaga

SEQ ID NO: 20775 - DNA, 339 bp, Glycine max
  Clone ID: LIB3106-061-Q1-K1-B5
acgctggtttttatgagaaactcaacttagaggtcaacaaggctgactgtcatgctgctgtcatggcaaaccaagtattccagaagaccaaagacaagtttattattccctgatcagttagctctaatcatcttattaaatgcgagcgcacgttacaattgttcaggaaaactttcgattcttggacaaaaataattttttgtcagactttattttggattagacaaaaaagaaataattcaagaaatatacaatgcgcacgttcgtgttttgaacaaaacatcgagcattgccaccaaagcacgcacaactttacactcgcaacctgattcgcaatca

SEQ ID NO: 20776 - DNA, 405 bp, Glycine max
  Clone ID: LIB3106-061-Q1-K1-B6
caggtacctccttggataaggctttttcttcagtacttgttcttggtggaacaacctggtaagtttgtaacaatggctgcctcagttacttcctcttttcgcatcagcaatttgaagtcggtttttgttggtgagactaataaactcagagtttcaagtgttcctggtgcccatgttggtttcaatagaaagactgtagaatgtaaggaatcacgaattgggaagcaacctattcctgtgccatccaatgtcacggtcaaattggaaggacaggatatacaagtgaaaggtcctttgggagaacttgcattaacttatcctcgagaagtgttggttgagagggaagagtcagggactctaagggttaaaaaggcagttgaaaccagaatggccaatcaaatgcat

SEQ ID NO: 20777 - DNA, 399 bp, Glycine max
  Clone ID: LIB3106-060-Q1-K1-F8
gagaaagttgccgaagaagctgctaatactgcggagactgaaaaatccctactgactgaattagaaaaagaaaagaatgaggagaaaacagatactgcgactctagaggctaatgggggaggcgagaaagagaatcctaatgctgcacaaatgtaatatggttatttggagctgtgcacagtgaaacacttcaacatttgtcataccgttgtgtaagctgcataaatgtaacaccattgccctagtgccccatgacttttgcgatgctattttagttattttgtggccttatggatgactgtagtctcgtatttcatctaaagatttggttgtactttctacctaggattaggaaattaaatgagtcttccttttagtttagattaggacatctgattt

SEQ ID NO: 20778 - DNA, 291 bp, Glycine max
  Clone ID: LIB3106-060-Q1-K1-F9
cccacgcgtccgaccattaattgaaaaaaaaaaaaaaaaaaaaaataaaaaatgggggggataatataagagaataggggataaaaataaaaaaaaaaaaaaaaaaaaaaatatatgggggggttttttgggggtataaaattatgggggggggtttttcttatattatatctttttttttgttgtctttgtttttatttattttttttttttttttctaatgttttaatttgggtattttgttgtttttttcatatttgtttgtgatagattgtgttttctttttttttt

SEQ ID NO: 20779 - DNA, 381 bp, Glycine max
  Clone ID: LIB3106-060-Q1-K1-G1
gtcgaagcgaggtcgcggaggatcggcagggaacaagttccgcatgtcactgggtctgccggtggcggcgacggtgaactgcgccgacaacaccggcgcgaagaatctctacatcatatcagtgaaggggatcaagggaaggctgaaccggttgccgtcagcttgcgtgggtgacatggttatggccaccgtcaagaagggaaagcctgatctccgtaaaaaggtgctccccgctgtcatcgtccgtcagcgcaagccgtggcgccgaaaggacggtgtttacatgtacttcgaagataatgctggggtcatagtgaatcccaagggtgaaatgaaaggttctgctatcactggttctattgggaaggagtgtgctgatct

SEQ ID NO: 20780 - DNA, 251 bp, Glycine max
  Clone ID: LIB3106-060-Q1-K1-G10
tgtgaatatactgcaaagatatataagaaattactgaaattcttctcatgaaagggaagtacacagaacaagaacgcagcgatcatgtggcatcgatcctactacggggagcaaacattagatggattgtttatatgatattgtagggttttttttgttttaacttttgcttctctttacattgtatttgtttgaagaaaaaaataagcagcttcaagaaatgggataagatacacaaacttccattttgc

SEQ ID NO: 20781 - DNA, 425 bp, Glycine max
  Clone ID: LIB3106-060-Q1-K1-G11
aaagcattgaattcaaaaacttaagttcattccttgtgttttgctttcttcctcaaaaccaaacatgtcgaacacatgcggcaactgcgactgcgctgacaagactagctgcaccaagggaaacagctatggtgttattgtagagactgagaagagttacatcgagactgttgtcatggatgttccagcagctgagcatgatgggaagtgcaagtgtggcactaactgcacttgcacggactgcacctgtggccattaaggaatatgtatgaaaatgtaattgccatgtgtttggcaatacaaatatccaaataatgtaatcttcgtatgaataaatgtgtgtgctgttatcctacttcaggtctgtgtagtcatgcagtctgaatcatttcaagttcctgtcttagttaatataacagccatgg

SEQ ID NO: 20782 - DNA, 298 bp, Glycine max
  unsure at all n locations
  Clone ID: LIB3106-060-Q1-K1-G2
gctaatatgaagtatgagagtagaacccagcaaagaatgtgattgatattcatccttgaaactgaagaacaaaaatagagaggatttcatatggatacaaccaatgcaattcactcaatattagatgtatacatgaattatatttgttaggttatcccatgtattgatgtcctttttctttaacgaatattatcttttaaaagatagtatctggaaaggaaaattgtcaagcaaatagttagttgatttgttactnantataaataatatatttattatattttattatttttttttt

SEQ ID NO: 20783 - DNA, 334 bp, Glycine max
  Clone ID: LIB3106-060-Q1-K1-G3
acgccgccgagcccgccaaaaaccccgtcgtcaccgacaagcccaagccccaagcccgacaatctgcatccccggccgcggcccgtgcaaccaaatgggccgtggacagctggaagtccaagaaggccctgcagctgcccgaataccccaaccaggaggatctcgaggccgtcctccgcaccctcgacgccttccctcccatcgtcttcgccggcgaggcccggacactcgaggagcacctcgccgaggccgccatgggaaatgccttcctcctccagggcggagactgtgccgagagcttcaaggagttcaatgccaacaacatccgtgacac

SEQ ID NO: 20784 - DNA, 201 bp, Glycine max
  unsure at all n locations
  Clone ID: LIB3106-060-Q1-K1-G4
ctgagattcagcccttgtcgctttgattcgtgaagntaatgacaaaggcccaccaccgaggccaagaagcccaccggctccgacgtcaactggctccaatgcataccctgctctcgattgctaccaacaatccgacccgatttttgacccgacagcgtccttctcgtacaacctcttaacctgcgacgcacatcattgtca

SEQ ID NO: 20785 - DNA, 296 bp, Glycine max
  Clone ID: LIB3106-060-Q1-K1-G7
cccacgcgtccgggttgtatccctaaatgaccccagctcgaggtcacattaattatttcccagagagagatagagagtgtgtgtgagagagaatatatattatattccctttgtattatctcggattttactagtattgttatcaagaagaagggtgaatcggattgcgaaaaaaaaaaaaaaaaaaaaaaaaaaaaaaaaaaaaaaaaaaaaaaaaaaaaaaaaagttaatccttcttaaaagatatcaaaaattcataaaccataaaaacaagggggcggcccttttaaagggt

SEQ ID NO: 20786 - DNA, 375 bp, Glycine max
  Clone ID: LIB3106-060-Q1-K1-G8
gagaatatggcgaccacaggcgctttgtgtggcactatgttgaacacctccttcgtgaagaggcaggcatcagtgggcatgacaagcttcaaggctaacgctgctgtctttggtgtaaaaggaggacgaggaggtcgtgtgagggccatggcaacttacaaggtgaagctgataactccagagggagagcaagaatttgaatgcccagatgatatatacattcttgatcaggcagaggaaaatggcattgatcttacctactcatgcagggctggttcttgctctgcatgtgctgccaaagttgggagtggcaaactagaccagtcagatcgtagctttcttgatgacgaccaacttgatgcaagatttgttctt

SEQ ID NO: 20787 - DNA, 388 bp, Glycine max
  unsure at all n locations
  Clone ID: LIB3106-060-Q1-K1-G9
cccacgcgtccgcccacgcgtccgcccacgcgtccgctagaggaaaagtaactccacacaacacaacacagcctaagagaattagattctaagctctatagagagagattatctgagaaatcttagccagccaaggaggaagaaagaatcatgtggtgctggcaaggagagggaggctagaaagaaagaaaaaaagaaagagctagagagagagggtaccctcttcttaattttcactgtttttgtgtctgttgcagcacttttaggagttcttctattctagtaacctctgccaaccaacaaaacaagcctgaaaataaaatagagatgctgcctncttgctggcgatcgttcgggaagaaacagttatgctactgacatgggaaag

SEQ ID NO: 20788 - DNA, 269 bp, Glycine max
  Clone ID: LIB3106-060-Q1-K1-H1
gtgagtgatcggtgttcacttgatctcatcataatcgtcagcgtcaattgaagaagatgccgatcagaaacatcgccgtcggaaggcctgaagaggcgactcaccccgacacgttgaaggcggctttggctgagttcatctcaaccttcatcttcgtgttcgccggctcaggctccggcatcgcctacaacaagctcaccgacaacggcgctgccacccctgccggcctcatcttcgcctccatcgcccatgcattcgccctcttcgtc

SEQ ID NO: 20789 - DNA, 344 bp, Glycine max
  Clone ID: LIB3106-060-Q1-K1-H11
gccatttatcttcacttcgttgcttcagatccaatgggccaattcaagcagctgcctgaggcaaccagtaggctgccattggtgcagtgcagatgacttgactagtgaaagaaagccatgtctaatctatgctttcttttatttgttcaattttcttcatttcccccttctttttctctggggccctgaagaactgtagggcattttcttacagttttatgtagacttttagttttcagactgctgcccgcataaggcaccctttatgttttagaccttggtcagatgcttgaacagttgtacttctgttttggccctgaatctcattctttaatttttatttt

SEQ ID NO: 20790 - DNA, 268 bp, Glycine max
  unsure at all n locations
  Clone ID: LIB3106-060-Q1-K1-H12
cccacgcgtccgtgctttgttatcgaacatttctttttgatttcaaaaattatccggcaagagtntgaatctatttttatatgcgaatcaatcctactacttctggtcctgaggcttctgcgcttgaaaaaaaaaaatctgggacgtatcccccaaataatgggtccggtactagatgtagcttttcccccaggtaagatgcctaatatatacaacgctctgatagttaagggtcgagatactgttggtcaacaaattaaagtgactt

SEQ ID NO: 20791 - DNA, 252 bp, Glycine max
  Clone ID: LIB3106-060-Q1-K1-H2
cccacgcgtccgatgaaaatgaaggtccttgttttcttcgttgctacaattttggtagcatggcaatgccatgcgtacgatatgttccctcttcgaatgaacactggctatggtgcccgtactccggaggtgaaatgcgcaagttggaggcttgctgtggaagcacacaacatctttggctttgagaccattcctgaagagtgcgttgaagcaacaaaggaatacattcatggcgaacaatatagatcagac

SEQ ID NO: 20792 - DNA, 264 bp, Glycine max
  Clone ID: LIB3106-060-Q1-K1-H3
ggcttgttcaagcaagagactatctatgttgatgatgactagtggaagtggaatatattattttgcacggcataaaactatgttgtttgagtctgtgttaacgtagataatttggttgcatgtgtatggccttgtaaagttctatattttgaagcaggatatttatatagttgtactgtttcagaaaaaaaaaaaataaaaaaataaatttataaaaaataaatataaataaaatattttttatataatttattattttttatt

SEQ ID NO: 20793 - DNA, 356 bp, Glycine max
  Clone ID: LIB3106-060-Q1-K1-H4
agcaaccatggcaatggcaacccaagcctctctcttaaccccacccctctccggtctcaaagccagcgaccgcgcctccgtgccatggaagcaaaactccagcctctccttctccagcccgaagcccctcaagttctccagaacaatcagagcagcagccgccgacgagaccacagaggcaccagcaaaagtagaggctgcaccggtcgggttcaccccaccagaacttgacccaaacaccccttccccgatcttcgggggcagcaccggcgggctcctgcgcaaggcacaggtggaggagttttatgtcattacgtgggactcacccaaagaacagatctttgaaatgcccactg

SEQ ID NO: 20794 - DNA, 387 bp, Glycine max
  Clone ID: LIB3106-060-Q1-K1-F7
tcagcctccacagcactactgttatatatggattcgatgcttcttcgatcttttcctaatattaacaacgcttcttctctcgccaccactggttcttatttgccaaatgcttcatggcacaataggaaaatccaaaaagaatataattttttgaggtttcggtggccaagtttgaaccaccattacaaaagcattgaaggagggtgtacatgtaaaaaatgtaatataaaatttgttgtgaaagcgacctctgaaaaatcttttgagtctgaacctcaagcttttgatccaaaaagcattttggactctgtcaagaattccttggatgctttctacaggttttccagacctcacacagttattggcacagcattaagcataatttct

SEQ ID NO: 20795 - DNA, 358 bp, Glycine max
  Clone ID: LIB3106-060-Q1-K1-H6
ctccaaaagtacaagccatttatcttcacttcgttgcttcagatccaatgggccaattcaagcagctgcctgaggcaaccagtaggctgccattggtgcagtgcagatgacttgactagtgaaagaaagccatgtctaatctatgctttcttttatttgttcaattttcttcatttcccccttctttttctctggggccctgaagaactgtagggcattttcttacagttttatgtagacttttagttttcagactgctgcccgcataaggcaccctttatgttttagaccttggtcagatgcttgaacagttgtacttctgttttggccctgaatctcattctttaatttttatttt

SEQ ID NO: 20796 - DNA, 419 bp, Glycine max
  Clone ID: LIB3106-060-Q1-K1-H7
cccacgcgtccgaaaacaatggtttcagcttcgcttcaattctggtcttggatagcacctactcctatatcccaccgttacacccataaatttgcttccctaacctcactcaaattagccactcctgtttcttctactaataccgtttatcttcccaagcctctagttgtgcgttttgctctaactgagtccgactcgcccaaatccatagaacctgaccctcaaactcttctccaagaaattgctgacagttttgatcttccttccgattacttttcaaagcttcccggcgatcttcgattagacctaaacgacgcggcgttcgacctttcaaacggacctgttttagatgagtgtggccaagagtttgggagagactttgcttgaatctctttcgagcatgggaacttgcttacaca

SEQ ID NO: 20797 - DNA, 388 bp, Glycine max
  Clone ID: LIB3106-060-Q1-K1-E1
cccacgcgtccgcccacgcgtccgatttagtgctgcgtactaagtttttggtttcatcagatccacaccggaattctattcagactctatacatagttacatcgatcctcgcggggagagccaaataacgagatacacaggttttaattctttgagagcggaaatggatacattttcacatgtaccaccaggctttcggtttcatccaaccgatgaagagctcgttggttactaccttaggaaaaaggtagcgtctaaaaggattgatctagatgtgatcaaagatgtcgatctctataaaattgaaccatgggatctccaagaactatgcaaaataggaaccgatgaacaaagtgactggtacttcttcagtcataaagataagaaa

SEQ ID NO: 20798 - DNA, 384 bp, Glycine max
  Clone ID: LIB3106-060-Q1-K1-E11
aaaaaattcaagaaaaaatacgaacccaccgcactgagggttaaggttcttgtcagcattggaaacaaaaacaaacaatttcctttcaccattggctcggactcgaacagcgaagcatgggtctccgaggccactgcttcgctgaagagcatcattaaaacctacaaccttgatggcatcgatgtcagctacgaggacatcgccgccaacgaagccgactttgttaattccgttggggggcttgtgaggaacctgaagcagaacaagctcattactgtggcttccttcgcaacaagcgctgatgccgccaacaacaaattctacaatctcttgtacgcagaatatgctactttctttgacactgtggtgtttctgagctgggta

SEQ ID NO: 20799 - DNA, 425 bp, Glycine max
  unsure at all n locations
  Clone ID: LIB3106-060-Q1-K1-E12
gttgcttctagcactcgaagatccagtagtcatagtgggcctgttcaattagcaccagtggcctcgccaccagaccaaagtgctggcttcgtatatattccatcaggttcttcaggacgcaattttcaggaagaaacccatttgccaagtcgattccatgcttgggaaagagagcacttgccttcattggcgttaaacaatgttggtagagaatcaagttggagagcataccaccagactgccagtgtgtcagacccaagtatcagatccagcagctttcgattaagacacgaatccgacaaatgccttcacaaaatcggtgatatacttgtttttatgtcaaactacagctattgtggaaaatcaaaatttatgtatgattganaaacgttacataatgcttttagcctggctggcgtgttatg

SEQ ID NO: 20800 - DNA, 411 bp, Glycine max
  Clone ID: LIB3106-060-Q1-K1-E2
acgaaaaatgcaccacacctaaaatcgggtcaaattctaacagttcaaatggattctgtaggaataagatcggctaacccttatttggcgactcctggagcaacggttcatggccattatggggaaatactttctgaaggagatatattagttacatttatctatgaaaaatcgagatcgggtgatataacacaaggtcttccaaaagtagaacaggtattagaagttcgttcgattgattcaatatcgatgaacctagaaaagagagttgatacttggaatgggcgtataacaaaaattcttggcattccttggggattcttgattggtgctgagctaacgatagcgcaaagtcgtatttctttggttaataaaattcaaaaagtttatcgatcccagggagttcacatt

SEQ ID NO: 20801 - DNA, 277 bp, Glycine max
  Clone ID: LIB3106-060-Q1-K1-E3
atcaccgatgtgcatggaggtgccaacagcgtcgagatcaacaatctcgctcgctttgctgtagaggaacaaaacaaaagagagaattcagttctggagtttgtgagggtgattagtgcaaagcagcaagtggttgctggagtgaattactacataacattggaagcaaaagatggtttgattaataatgagtatgaagcgaatgtttgggtgagggaatggttgaactccaaagagttgctagaattcaagccagtcaatgtttttagcacaccaa

SEQ ID NO: 20802 - DNA, 319 bp, Glycine max
  Clone ID: LIB3106-060-Q1-K1-E4
attaacagcttctgagttctaagctaagtctgcttttattcttttctctcccggtatatatatagtatttgcttatatatatatatactactcattaggaactgtgattgcagttcctaatgcagattttaacgcggcgccaaggagcatttttgtgcttctggttgtctgtgctttttgtggtagtagacttttgctatggtgaccatagtacagtcgaggtagtagggttgggagaatgcgcagattgcaaggagaaaaacattcaaactagccaggctttctcaggtttacgtgtgacagtagactgcaaggcagc

SEQ ID NO: 20803 - DNA, 345 bp, Glycine max
  Clone ID: LIB3106-060-Q1-K1-E7
cccacgcgtccgcccacgcgtccggagactggttccaagcacatcatttattattattcttctatatagttttatataagaaagagggtatcaaagccatatcatatcagaaaacacaaaggaataatatattgcgggggtgtttgtttctcatatggggtctcgctctgcttctccatagggattacatttattaccattcttttgttagctatcactaccatacggaatgttggtcaccctcatacactccctaaggtagcagcatttaattaacactactactactactttgatcactactgctcagctttcatcatggaaaggctccaaagacccctcaat

SEQ ID NO: 20804 - DNA, 385 bp, Glycine max
  Clone ID: LIB3106-060-Q1-K1-E8
cccacgcgtccgggaaaggaaagggttttgtagagggagagaattccaaaccaaaaatccgaaataaataattttttttttaaaaaaaaaaagaaccgggtgtgggtgttgttggtgttggcggaggcagatcggagatctgtgatagatatagatggagggagttggggcccggcttgggcggtcctcgacccgctacggaccggccacggtgttcactggaccggtccggaagtggaagaagaaatggatccacgtgtccccttcttctgcttcctctaattccaacgccaataatcatcacaaccacgcttcccatgcctctcatcttctcctctacaagtggacccctctcacccacaggcagaacaccgccactactaac

SEQ ID NO: 20805 - DNA, 392 bp, Glycine max
  Clone ID: LIB3106-060-Q1-K1-E9
gttaaaagacagagacagaggcaaccttgtttcagttggttggtatcataccatgggacaagtctttgacaagttagagggtaaggagtggaggcaaaggcaaataaggaagataacagatcgagtttttgacaaagtaaagaatcaaatagaaactgataacttgagttttgaagatctgtatattgctgttttacttgtgtacaatgatatcaacaagtatatacctggtccccattttgaccctccatcaaaagacaaagtcagagaagtcaaacagagctgtgatatcaacctcgatggtgatattgaccgtgatgaattttatgatttcatcctgataatgacagctgatacattcactattgttagccaaaaacttattctcacat

SEQ ID NO: 20806 - DNA, 357 bp, Glycine max
  Clone ID: LIB3106-060-Q1-K1-F1
gtgagggccttccatggcttccgcttgtgcttcctctgcaattacagctgttgccatctctacgccgagttccgggcagaagaatggatcaggaggttgttttcttagtggaaggaaattgagggtgaaaaaggagagagcagcaattggaggacgatcgatgggcactacagtgtgcgcagttgctgagcctgacagacctctatggttcccaggcagcacccctcctccatggcttgatggcactctacctggagacttcggctttgaccctcttggtcttggatctgacccggagagtctgagatggaatgttcaggcagagctagtgcactgcagatgggcaatgttgggtgc

SEQ ID NO: 20807 - DNA, 417 bp, Glycine max
  Clone ID: LIB3106-060-Q1-K1-F10
cttacttcccaagctggtatagtagaaagcttggatgtcttggtaaaggagtttgtagctgccagcgatgaagagaagaaatccgtgtttacccgattggaagaggaagttgtgaagcttaagggttccgcctcaaggtacgggaagatttacttgaaagctgccaagaattacagggaaaaaggttctgattatgctaagaacgaaattcagcgcctacagcgcattcttgacaagtccattagccctgcgaaggccgacgagttaactctaaagaaaaatatcttgtcgacatatgctgcttgacttattggtgcattgttaaccaactctcatggaagctcgtgatccaccgcaactgccgatgattgtttgactttgatatcgaaattgctgggagatattcaacgtggatac

SEQ ID NO: 20808 - DNA, 428 bp, Glycine max
  Clone ID: LIB3106-060-Q1-K1-F12
tggaatgtattttagtgccaaagataatggagagatgatgtcaatgatctataactggccagctcacgaggtagacatgattgtcttaacagatggaagtcgaattcttggcttaggtgaccttggagttcagggaattggaatccccataggaaaacttgatgtgtatgttgctgctgctggtatcaacccacaaagaatacttccagttatgctggatgttggtaccaacaatcaaaagttacttgaagatcgcctttatttaggacttcgacaaccaaggttggaaggtgaagagtatctatcaattatagatgaattcatggaagctgttcatgctcgatggcccaaggctattgtgcagtttgaggattttcaaatgaattgggctttttaaacccttaaaagatattataaaaagttttgta

SEQ ID NO: 20809 - DNA, 170 bp, Glycine max
  Clone ID: LIB3106-060-Q1-K1-F2
cggacgcgtgggaaaaaaaaaaaaaaaaaaaaaaaatcttcaagaaaaaaaaaaaaaggaagaaaaaaaaaaaggggaggggagaaccagtcttacaaggcccatctgaatggcgtcaacaagccaaagaggcattgcctcacttacaccaaagggatggatccaaagtt

SEQ ID NO: 20810 - DNA, 359 bp, Glycine max
  Clone ID: LIB3106-060-Q1-K1-F3
gcgacgcgtacgtacactcgtgcgaccacgcgttcgatattcctcagtgcaacacatcgaacagcaagacgcaaactagtaacagagagaaagcatttcaaagaagaaacaaaacgatgtcgtttatgcgaggggattttctttctcgaacgaggaagctcgtgaagggtttggccaaggcgcaacccgcgtggctcaaagccatggaacaggcaccacctgcaacgtttcctcggtctgccgggaaaattccgaccattactcttcccgaggatgtttatgtgaagaagttttataagaaatatccggaatccaaattccatgacgccataaaagtttcatgcttttgatcccccctc

SEQ ID NO: 20811 - DNA, 377 bp, Glycine max
  Clone ID: LIB3106-060-Q1-K1-F4
gagaaatggcgatggcaatggcgcttcgcaggctttcatcttcaattgacaagcctctgcgccctctcttcaatgccggttccctctactacaagtcgtctttgcctgatgaagctgtttacgacaaggagcgacccggagttacatggccgaagcagttgaatgctccacttgaggtcgtggatcctgagattgctgatattattgagcttgagaaagctaggcaatggaaggggctagaattgataccgtcagagaatttcacctctgtgtctgtgatgcaagcggttggatcggttatgaccaacaaatacagtgaggggtaccctggtgcaagatattatggtgggaatgagtttattgacatgggctgaaca

SEQ ID NO: 20812 - DNA, 246 bp, Glycine max
  Clone ID: LIB3106-060-Q1-K1-F5
gttctcgctactctcgcggtggggaaggctgtggatccgatggaaactggagaaattaggcatatgaccctgtaaattagggtttatgattaagttcaattattttaaggtgttgtctgtgtgtggtttaagtttcggtatctgtgttggtttcgtttcgtgttcctgtggttttcgtttttgacctacaattctagttgtgtttatagtcgatcgaatgaaatgatagtaagaaattatcgcatc

SEQ ID NO: 20813 - DNA, 419 bp, Glycine max
  Clone ID: LIB3106-060-Q1-K1-F6
gcaattgaagttgaagtcttgcccttctctcttcaactccaaacacaagacatcatcatccatggctgcctccgtctccactgtcggagctgtcaacagagctcttttgaacctgaatgggtctggacctggggtttcagctcccagttcatccttctttgggagcagcttgaagaaggttattggctcaagggtccccaacacaaagatttcctctggaagcttcaagattgttgctgtagaagagaagaaagagattgaagagacccagcagaccgacaaggacagatggaagggtcttgcctatgatatctcagacgaccaacaggacatcacaagaggaaagggttttggtgactcccttttccaagctccacaggatgctgggactcactatgctgtcatgagcttctacgagt

SEQ ID NO: 20814 - DNA, 383 bp, Glycine max
  Clone ID: LIB3106-060-Q1-K1-D9
cagattttgattcgattcgattcgattcagtcgaggttttaagcagcagcaagatgtctgggcgtggaaagggaggaaagggattgggaaaaggaggagcaaaacgacatcgtaaggtgctccgcgacaacattcagggaattacgaagccagcgattcgtcgtttggctcgcaggggtggcgtgaagcgtatcagcggtttgatctacgaggagactcgcggtgttctcaagatcttcttggagaatgtcatccgtgacgcctttacttacacggaacacgctaggaagaagaccgttacggttatggacgttgtttatgcgcttaagaggcagggaatgaccctttactgatttggtggttagggtttttgcttgattttt

SEQ ID NO: 20815 - DNA, 388 bp, Glycine max
  Clone ID: LIB3106-060-Q1-K1-C3
cgagaattatccaaaatcctaacccgacgatggcgagtcaaaagttggtgctggcattgatcagggccgcgaggccaaccttccgaaaccaaaacgacaaaatcgcctttgccgttcactcctccttcctcgcctctggttatgtccttacagctacgggtccccaggccctctccgacgatgcgttttctgacccatccaatgacgaggtgtccgttgatcactggaacgagctgaacgacgagtacgcgttcgtttacgcgaatccagaaaagggttcggagaaagtgcttgtcaagtgcctcgtgatgaacgacaaattgctcgttcatgctttgactcaagggtcgtcggagcctttgagccttgagattgatgttggggatta
